(19) United States
(12) Patent Application Publication
(10) Pub. No.: US 2004/0029129 A1
(43) Pub. Date: Feb. 12, 2004

(54) Identification of essential genes in microorganisms

(76) Inventors: Liangsu Wang, San Diego, CA (US); Carlos Zamudio, La Jolla, CA (US); Cheryl Malone, Santee, CA (US); Robert Haselbeck, San Diego, CA (US); kari L. Ohlsen, San Diego, CA (US); Judith W. Zyskind, La Jolla, CA (US); Daniel Wall, San Diego, CA (US); John D. Trawick, La Mesa, CA (US); Grant J. Carr, Escondido, CA (US); Robert Yamamoto, San Diego, CA (US); R. Allyn Forsyth, San Diego, CA (US); H. Howard Xu, San Diego, CA (US)

Correspondence Address: KNOBBE MARTENS OLSON & BEAR LLP, 2040 MAIN STREET, FOURTEENTH FLOOR, IRVINE, CA, 92614, US

(21) Appl. No.: 10/282,122

(22) Filed: Oct. 25, 2002

Related U.S. Application Data
(60) Provisional application No. 60/362,699, filed on Mar. 6, 2002.
(60) Provisional application No. 60/342,923, filed on Oct. 25, 2001.

(30) Foreign Application Priority Data
Mar. 21, 2002 (WO) PCT/US02/09107

(51) Int. Cl. C12Q 1/68; C07H 21/04; C12N 1/20; C12N 9/00; C12P 21/02; C12N 1/21; C07K 14/47; C12N 5/04; C12N 1/18

(52) U.S. Cl. 435/6; 435/69.1; 435/183; 435/252.33; 435/320.1; 530/350; 536/23.2; 435/325; 435/254.2; 435/419

(57) ABSTRACT

The sequences of antisense nucleic acids which inhibit the proliferation of prokaryotes are disclosed. Cell-based assays which employ the antisense nucleic acids to identify and develop antibiotics are also disclosed. The antisense nucleic acids can also be used to identify proteins required for proliferation, express these proteins or portions thereof, obtain antibodies capable of specifically binding to the expressed proteins, and to use those expressed proteins as a screen to isolate candidate molecules for rational drug discovery programs. The nucleic acids can also be used to screen for homologous nucleic acids that are required for proliferation in cells other than Staphylococcus aureus, Salmonella typhimurium, Klebsiella pneumoniae, and Pseudomonas aeruginosa. The nucleic acids of the present invention can also be used in various assay systems to screen for proliferation required genes in other organisms.

### RELATED APPLICATIONS

[0001] This application claims priority from International Application Number PCT/US02/09107, entitled IDENTIFICATION OF ESSENTIAL GENES IN MICROORGANISMS, filed Mar. 21, 2002, U.S. Provisional Patent Application No. 60/362,699, entitled IDENTIFICATION OF ESSENTIAL GENES IN MICROORGANISMS, filed Mar. 6, 2002, U.S. patent application Ser. No. 10/072,851, entitled METHODS FOR IDENTIFYING THE TARGET OF A COMPOUND WHICH INHIBITS CELLULAR PROLIFERATION, filed Feb. 8, 2002, U.S. Provisional Patent Application No. 60/342,923, entitled STAPHYLOCOCCUS AUREUS ESSENTIAL GENES AND METHODS OF USE, filed Oct. 25, 2001, U.S. patent application Ser. No. 09/948,993, entitled RAPID METHOD FOR REGULATING GENE EXPRESSION, filed Sep. 6, 2001, U.S. patent application Ser. No., 09/815,242, IDENTIFICATION OF ESSENTIAL GENES IN PROKARYOTES, filed Mar. 21, 2001, U.S. Provisional Patent Application No. 60/269,308, entitled IDENTIFICATION OF ESSENTIAL GENES IN STAPHYLOCOCCUS AUREUS, PSEUDOMONAS AERUGINOSA, KLEBSIELLA PNEUMONIAE, SALMONELLA TYPHIMURIUM, AND ENTEROCOCCUS FAECALIS, filed Feb. 16, 2001, U.S. Provisional Patent Application No. 60/267,636, entitled METHODS FOR IDENTIFYING THE TARGET OF A COMPOUND WHICH INHIBITS CELLULAR PROLIFERATION, filed Feb. 9, 2001, U.S. Provisional Patent Application No. 60/257,931, entitled IDENTIFICATION OF ESSENTIAL GENES IN STAPHYLOCOCCUS AUREUS, PSEUDOMONAS AERUGINOSA, KLEBSIELLA PNEUMONIAE AND SALMONELLA TYPHIMURIUM, filed Dec. 22, 2000, U.S. Provisional Patent Application No. 60/253,625, entitled IDENTIFICATION OF ESSENTIAL GENES IN STAPHYLOCOCCUS AUREUS, PSEUDOMONAS AERUGINOSA, KLEBSIELLA PNEUMONIAE AND SALMONELLA TYPHIMURIUM, filed Nov. 27, 2000, U.S. Provisional Patent Application No. 60/242,578, entitled GENES IDENTIFIED AS ESSENTIAL IN STAPHLOCOCCUS AUREUS, filed Oct. 23, 2000, U.S. Provisional Patent Application No. 60/230,347, entitled RAPID PCR METHOD FOR DETERMINATION OF WHETHER A GENE IS ESSENTIAL, filed Sep. 6, 2000, U.S. Provisional Patent Application No. 60/230,335, entitled RAPID REPLACEMENT OF GENOMIC PROMOTERS TO GENERATE STRAINS FOR USE IN A CELL-BASED ASSAY FOR ANTIBIOTICS, filed Sep. 6, 2000, U.S. Provisional Patent Application No. 60/207,727, entitled GENES IDENTIFIED AS ESSENTIAL IN STAPHYLOCOCCUS AUREUS, filed May 26, 2000, U.S. Provisional Patent Application No. 60/206,848, enititled GENES IDENTIFIED AS ESSENTIAL IN STAPHYLOCOCCUS AUREUS, filed May 23, 2000, and U.S. Provisional Patent Application No. 60/191,078, entitled, GENES IDENTIFIED AS REQUIRED FOR PROLIFERATION IN STAPHYLOCOCCUS AUREUS, filed March 21, 2000, the disclosures of which are incorporated herein by reference in their entireties.

### SEQUENCE LISTING

[0002] The present application is being filed along with duplicate copies of a CD-ROM marked “Copy 1” and “Copy 2” containing a Sequence Listing in electronic format. The duplicate copies of the CD-ROM each contain a file entitled 034A_FINAL.ST25.txt created on Oct. 25, 2002 which is 181,323,992 bytes in size. The information on these duplicate CD-ROMs is incorporated herein by reference in its entirety.

[0003] Tables

[0004] Table IA is provided in electronic format on duplicate copies of a CD-ROM filed herewith and marked “Tables-Copy 1” and “Tables-Copy 2.” The duplicate copies of the CD-ROM each contain a file entitled FINAL_CLONE_LIST created on Feb. 26, 2002 which is 248,535 bytes in size and which contains Table IA. The information on these duplicate CD-ROMs is incorporated herein by reference in its entirety.

[0005] Table IB is provided in electronic format on duplicate copies of a CD-ROM filed herewith and marked “Tables-Copy 1” and “Tables-Copy 2.” The duplicate copies of the CD-ROM each contain a file entitled FINAL_CLONE_GENE created on Feb. 26, 2002 which is 191,382 bytes in size and which contains Table IB. The information on these duplicate CD-ROMs is incorporated herein by reference in its entirety.

[0006] Table IC is provided in electronic format on duplicate copies of a CD-ROM filed herewith and marked “Tables-Copy 1” and “Tables-Copy 2.” The duplicate copies of the CD-ROM each contain a file entitled FINAL_GENE_LIST created on Feb. 26, 2002 which is 1,569,997 bytes in size and which contains Table IC. The information on these duplicate CD-ROMs is incorporated herein by reference in its entirety.

[0007] Table IV is provided in electronic format on duplicate copies of a CD-ROM filed herewith and marked “Tables-Copy 1” and “Tables-Copy 2.” The duplicate copies of the CD-ROM each contain a file entitled FINAL_HOMOLOGY_LOOKUP_WITH_GENE_NAMES created on Oct. 25, 2002 which is 3,334,161 bytes in size and which contains Table IV. The information on these duplicate CD-ROMs is incorporated herein by reference in its entirety.

### BACKGROUND OF THE INVENTION

[0008] Since the discovery of penicillin, the use of antibiotics to treat the ravages of bacterial infections has saved millions of lives. With the advent of these “miracle drugs,” for a time it was popularly believed that humanity might, once and for all, be saved from the scourge of bacterial infections. In fact, during the 1980s and early 1990s, many large pharmaceutical companies cut back or eliminated antibiotics research and development. They believed that infectious disease caused by bacteria finally had been conquered and that markets for new drugs were limited. Unfortunately, this belief was overly optimistic.

[0009] The tide is beginning to turn in favor of the bacteria as reports of drug resistant bacteria become more frequent. The United States Centers for Disease Control announced that one of the most powerful known antibiotics, vancomycin, was unable to treat an infection of the common Staphylococcus aureus (staph). This organism is commonly found in our environment and is responsible for many nosocomial infections. The import of this announcement becomes clear when one considers that vancomycin was used for years to treat infections caused by Staphylococcus species as well as other stubborn strains of bacteria. In short, bacteria are becoming resistant to our most powerful antibiotics. If this trend continues, it is conceivable that we will return to a time when what are presently considered minor bacterial infections are fatal diseases.

[0010] Over-prescription and improper prescription habits by some physicians have caused an indiscriminate increase in the availability of antibiotics to the public. The patients are also partly responsible, since they will often improperly use the drug, thereby generating yet another population of bacteria that is resistant, in whole or in part, to traditional antibiotics.

[0011] The bacterial pathogens that have haunted humanity remain, in spite of the development of modern scientific practices to deal with the diseases that they cause. Drug resistant bacteria are now an increasing threat to the health of humanity. A new generation of antibiotics is needed to once again deal with the pending health threat that bacteria present.

[0012] Discovery of New Antibiotics

[0013] As more and more bacterial strains become resistant to the panel of available antibiotics, new antibiotics are required to treat infections. In the past, practitioners of pharmacology would have to rely upon traditional methods of drug discovery to generate novel, safe and efficacious compounds for the treatment of disease. Traditional drug discovery methods involve blindly testing potential drug candidate-molecules, often selected at random, in the hope that one might prove to be an effective treatment for some disease. The process is painstaking and laborious, with no guarantee of success. Today, the average cost to discover and develop a new drug exceeds US $500 million, and the average time from laboratory to patient is 15 years. Improving this process, even incrementally, would represent a huge advance in the generation of novel antimicrobial agents.

[0014] Newly emerging practices in drug discovery utilize a number of biochemical techniques to provide for directed approaches to creating new drugs, rather than discovering them at random. For example, gene sequences and proteins encoded thereby that are required for the proliferation of a cell or microorganism make excellent targets since exposure of bacteria to compounds active against these targets would result in the inactivation of the cell or microorganism. Once a target is identified, biochemical analysis of that target can be used to discover or to design molecules that interact with and alter the functions of the target. Use of physical and computational techniques to analyze structural and biochemical properties of targets in order to derive compounds that interact with such targets is called rational drug design and offers great potential. Thus, emerging drug discovery practices use molecular modeling techniques, combinatorial chemistry approaches, and other means to produce and screen and/or design large numbers of candidate compounds.

[0015] Nevertheless, while this approach to drug discovery is clearly the way of the future, problems remain. For example, the initial step of identifying molecular targets for investigation can be an extremely time consuming task. It may also be difficult to design molecules that interact with the target by using computer modeling techniques. Furthermore, in cases where the function of the target is not known or is poorly understood, it may be difficult to design assays to detect molecules that interact with and alter the functions of the target. To improve the rate of novel drug discovery and development, methods of identifying important molecular targets in pathogenic cells or microorganisms and methods for identifying molecules that interact with and alter the functions of such molecular targets are urgently required.

[0016] Escherichia coli represents an excellent model system to understand bacterial biochemistry and physiology. The estimated 4288 genes scattered along the 4.6×10⁶ base pairs of the Escherichia coli (E. coli) chromosome offer tremendous promise for the understanding of bacterial biochemical processes. In turn, this knowledge will assist in the development of new tools for the diagnosis and treatment of bacteria-caused human disease. The entire E. coli genome has been sequenced, and this body of information holds a tremendous potential for application to the discovery and development of new antibiotic compounds. Yet, in spite of this accomplishment, the general functions or roles of many of these genes are still unknown. For example, the total number of proliferation-required genes contained within the E. coli genome is unknown, but has been variously estimated at around 200 to 700 (Armstrong, K. A. and Fan, D. P. Essential Genes in the metB-malB Region of Escherichia coli K12, 1975, J. Bacteriol. 126: 48-55).

[0017] Staphylococcus aureus is a Gram positive microorganism which is the causative agent of many infectious diseases. Local infection by Staphylococcus aureus can cause abscesses on skin and cellulitis in subcutaneous tissues and can lead to toxin-related diseases such as toxic shock and scalded skin syndromes. Staphylococcus aureus can cause serious systemic infections such as osteomyelitis, endocarditis, pneumonia, and septicemia. Staphylococcus aureus is also a common cause of food poisoning, often arising from contact between prepared food and infected food industry workers. Antibiotic resistant strains of Staphylococcus aureus have recently been identified, including those that are now resistant to all available antibiotics, thereby severely limiting the options of care available to physicians.

[0018] Pseudomonas aeruginosa is an important Gram negative opportunistic pathogen. It is the most common Gram negative found in nosocomial infections. P. aeruginosa is responsible for 16% of nosocomial pneumonia cases, 12% of hospital-acquired urinary tract infections, 8% of surgical wound infections, and 10% of bloodstream infections. Immunocompromised patients, such as neutropenic cancer and bone marrow transplant patients, are particular susceptible to opportunistic infections. In this group of patients, P. aeruginosa is responsible for pneumonia and septicemia with attributable deaths reaching 30%. P. aeruginosa is also one of the most common and lethal pathogens responsible for ventilator-associated pneumonia in intubated patients, with directly attributable death rates reaching 38%. Although P. aeruginosa outbreaks in burn patients are rare, it is associated with 60% death rates. In the AIDS population, P. aeruginosa is associated with 50% of deaths. Cystic fibrosis patients are characteristically susceptible to chronic infection by P. aeruginosa, which is responsible for high rates of illness and death. Current antibiotics work poorly for CF infections (Van Delden & Igelwski. 1998. Emerging Infectious Diseases 4:551-560; references therein).

[0019] The gram negative enteric bacterial genus, Salmonella, encompasses at least 2 species. One of these, S. enterica, is divided into multiple subspecies and thousands of serotypes or serovars (Brenner, et al. 2000 J. Clin. Microbiol. 38:2465-2467). The S. enterica human pathogens include serovars Typhi, Paratyphi, Typhimurium, Cholerasuis, and many others deemed so closely related that they are variants of a widespread species. Worldwide, disease in humans caused by Salmonella is a very serious problem. In many developing countries, S. enterica ser. Typhi still causes often-fatal typhoid fever. This problem has been reduced or eliminated in wealthy industrial states. However, enteritis induced by Salmonella is widespread and is the second most common disease caused by contaminated food in the United States (Edwards, B H 1999 “Salmonella and Shigella species” Clin. Lab Med. 19(3):469-487). Though usually self-limiting in healthy individuals, others such as children, seniors, and those with compromising illnesses can be at much greater risk of serious illness and death.

[0020] Some S. enterica serovars (e.g. Typhimurium) cause a localized infection in the gastrointestinal tract. Other serovars (i.e. Typhi and Paratyphi) cause a much more serious systemic infection. In animal models, these roles can be reversed which has allowed the use of the relatively safe S. enterica ser. Typhimurium as a surrogate in mice for the typhoid fever agent, S. enterica ser. Typhi. In mice, S. enterica ser Typhimurium causes a systemic infection similar in outcome to typhoid fever. Years of study of the Salmonella have led to the identification of many determinants of virulence in animals and humans. Salmonella is interesting in its ability to localize to and invade the intestinal epithelium, induce morphologic changes in target cells via injection of certain cell-remodeling proteins, and to reside intracellularly in membrane-bound vesicles (Wallis, T S and Galyov, E E 2000 “Molecular basis of Salmonella-induced enteritis.” Molec. Microb. 36:997-1005; Falkow, S “The evolution of pathogenicity in Escherichia, Shigella, and Salmonella,” Chap. 149 in Neidhardt, et al. eds pp 2723-2729; Gulig, P A “Pathogenesis of Systemic Disease,” Chap. 152 in Neidhardt, et al. ppp 2774-2787). The immediate infection often results in a severe watery diarrhea but Salmonella also can establish and maintain a subclinical carrier state in some individuals. Spread is via food contaminated with sewage.

[0021] The gene products implicated in Salmonella pathogenesis include type three secretion systems (TTSS), proteins affecting cytoplasmic structure of the target cells, many proteins carrying out functions necessary for survival and proliferation of Salmonella in the host, as well as “traditional” factors such as endotoxin and secreted exotoxins. Additionally, there must be factors mediating species-specific illnesses. Despite this most of the genomes of S. enterica ser. Typhi (see http://www.sanger.ac.uk/Projects/S_typhi/ for the genome database) and S. enterica ser. Typhimurium (see http://genome.wustl.edu/gsc/bacterial/salmonella.shtml for the genome database) are highly conserved and are mutually useful for gene identification in multiple serovars. The Salmonella are a complex group of enteric bacteria causing disease similar to but distinct from other gram negative enterics such as E. coli and have been a focus of biomedical research for the last century.

[0022] Enterococcus faecalis, a Gram positive bacterium, is by far the most common member of the enterococci to cause infections in humans. Enterococcus faecium generally accounts for less than 20% of clinical isolates. Enterococci infections are mostly hospital-acquired though they are also associated with some community-acquired infections. Of nosocomial infections enterococci account for 12% of bacteremia, 15% of surgical wound infections, 14% of urinary tract infections, and 5 to 15% of endocarditis cases (Huycke, M. M., D. F., Sahm and M. S. Gilmore. 1998. Emerging Infectious Diseases 4:239-249). Additionally enterococci are frequently associated with intraabdominal and pelvic infections. Enterococci infections are often hard to treat because they are resistant to a vast array of antimicrobial drugs, including aminoglycosides, penicillin, ampicillin and vancomycin. The development of multiple-drug resistant (MDR) enterococci has made this bacteria a major concern for treating nosocomial infections.

[0023] Current drug discovery methods involve screening large number of prospective therapeutic compounds to identify those that are effective therapeutic agents or that can be optimized to provide an effective therapeutic agents. For example, the compounds to be evaluated for therapeutic activity may be members of a library of compounds generated by combinatorial chemistry or members of a library of natural products.

[0024] Unfortunately, current methods are laborious and time consuming and may yield compounds which have already been identified or which act on gene products which are already targeted by an existing therapeutic agent. In addition, a large number of compounds have been identified which have antimicrobial activity but which cannot be administered to individuals suffering from infection due to the fact that their targets are unknown.

[0025] The above reasons underscore the urgency of developing new antibiotics that are effective against Escherichia coli, Staphylococcus aureus, Enterococcus faecalis, Klebsiella pneumoniae, Pseudomonas aeruginosa, and Salmonella typhimurium. Accordingly, there is an urgent need for more novel methods to identify and characterize bacterial genomic sequences that encode gene products involved in proliferation, and are thereby potential new targets for antibiotic development. Likewise, there is a need for rapid screening techniques which yield novel compounds or compounds which act on novel targets as well as a need for methods which permit the identification of the target on which a compound with antimicrobial activity acts.

[0026] Prior to the present invention, the discovery of Escherichia coli, Staphylococcus aureus, Enterococcus faecalis, Klebsiella pneumoniae, Pseudomonas aeruginosa, and Salmonella typhimurium genes required for proliferation of the microorganism was a painstaking and slow process. Rapid screening techniques for identifying novel targets on which novel compounds act were undeveloped. While the detection and identification of new cellular drug targets within a Escherichia coli, Staphylococcus aureus, Enterococcus faecalis, Klebsiella pneumoniae, Pseudomonas aeruginosa, and Salmonella typhimurium cell is key for novel antibiotic development and effective treatment, the current methods of drug target discovery available prior to this invention have required painstaking processes requiring years of effort.

### SUMMARY OF THE INVENTION

[0027] Some aspects of the present invention are described in the numbered paragraphs below.

[0028] 1. A purified or isolated nucleic acid sequence comprising a nucleotide sequence consisting essentially of one of SEQ ID NOs: 1-6213, wherein expression of said nucleic acid inhibits proliferation of a cell.

[0029] 2. The nucleic acid sequence of Paragraph 1, wherein said nucleotide sequence is complementary to at least a portion of a coding sequence of a gene whose expression is required for proliferation of a cell.

[0030] 3. The nucleic acid of Paragraph 1, wherein said nucleic acid sequence is complementary to at least a portion of a nucleotide sequence of an RNA required for proliferation of a cell.

[0031] 4. The nucleic acid of Paragraph 3, wherein said RNA is an RNA comprising a sequence of nucleotides encoding more than one gene product.

[0032] 5. A purified or isolated nucleic acid comprising a fragment of one of SEQ ID NOs.: 1-6213, said fragment selected from the group consisting of fragments comprising at least 10, at least 20, at least 25, at least 30, at least 50 and more than 50 consecutive nucleotides of one of SEQ ID NOs: 1-6213.

[0033] 6. The fragment of Paragraph 5, wherein said fragment is included in a nucleic acid obtained from an organism selected from the group consisting of Acinetobacter baumannii, Anaplasma marginale, Aspergillus fumigatus, Bacillus anthracis, Bacteroides fragilis, Bordetella pertussis, Borrelia burgdorferi, Burkholderia cepacia, Burkholderia fungorum, Burkholderia mallei, Campylobacter jejuni, Candida albicans, Candida glabrata (also called Torulopsis glabrata), Candida tropicalis, Candida parapsilosis, Candida guilliermondii, Candida krusei, Candida kefyr (also called Candida pseudotropicalis), Candida dubliniensis, Chlamydia pneumoniae, Chlamydia trachomatis, Clostridium acetobutylicum, Clostridium botulinum, Clostridium difficile, Clostridium perfringens, Coccidioides immitis, Corynebacterium diptheriae, Cryptococcus neoformans, Enterobacter cloacae, Enterococcus faecalis, Enterococcus faecium, Escherichia coli, Haemophilus influenzae, Helicobacter pylori, Histoplasma capsulatum, Klebsiella pneumoniae, Legionella pneumophila, Listeria monocytogenes, Moraxella catarrhalis, Mycobacterium avium, Mycobacterium bovis, Mycobacterium leprae, Mycobacterium tuberculosis, Mycoplasma genitalium, Mycoplasma pneumoniae, Neisseria gonorrhoeae, Neisseria meningitidis, Nocardia asteroides, Pasteurella haemolytica, Pasteurella multocida, Pneumocystis carinii, Proteus mirabilis, Proteus vulgaris, Pseudomonas aeruginosa, Pseudomonas putida, Pseudomonas syringae, Salmonella bongori, Salmonella cholerasuis, Salmonella enterica, Salmonella paratyphi, Salmonella typhi, Salmonella typhimurium, Shigella boydii, Shigella dysenteriae, Shigella flexneri, Shigella sonnei, Staphylococcus aureus, Staphylococcus epidermidis, Staphylococcus haemolyticus, Streptococcus pneumoniae, Streptococcus mutans, Streptococcus pyogenes, Treponema pallidum, Ureaplasma urealyticum, Vibrio cholerae, Vibrio parahaemolyticus, Vibrio vulnificans, Yersinia enterocolitica, Yersinia pestis and any species falling within the genera of any of the above species.

[0034] 7. The fragment of Paragraph 5, wherein said fragment is included in a nucleic acid obtained from an organism other than Escherichia coli.

[0035] 8. A vector comprising a promoter operably linked to the nucleic acid of any one of Paragraphs 1-7.

[0036] 9. The vector of Paragraph 8, wherein said promoter is active in a microorganism selected from the group consisting of Acinetobacter baumannii, Anaplasma marginale, Aspergillus fumigatus, Bacillus anthracis, Bacteroides fragilis, Bordetella pertussis, Borrelia burgdorferi, Burkholderia cepacia, Burkholderia fungorum, Burkholderia mallei, Campylobacter jejuni, Candida albicans, Candida glabrata (also called Torulopsis glabrata), Candida tropicalis, Candida parapsilosis, Candida guilliermondii, Candida krusei, Candida kefyr (also called Candida pseudotropicalis), Candida dubliniensis, Chlamydia pneumoniae, Chlamydia trachomatis, Clostridium acetobutylicum, Clostridium botulinum, Clostridium difficile, Clostridium perfringens, Coccidioides immitis, Corynebacterium diptheriae, Cryptococcus neoformans, Enterobacter cloacae, Enterococcus faecalis, Enterococcus faecium, Escherichia coli, Haemophilus influenzae, Helicobacter pylori, Histoplasma capsulatum, Klebsiella pneumoniae, Legionella pneumophila, Listeria monocytogenes, Moraxella catarrhalis, Mycobacterium avium, Mycobacterium bovis, Mycobacterium leprae, Mycobacterium tuberculosis, Mycoplasma genitalium, Mycoplasma pneumoniae, Neisseria gonorrhoeae, Neisseria meningitidis, Nocardia asteroides, Pasteurella haemolytica, Pasteurella multocida, Pneumocystis carinii, Proteus mirabilis, Proteus vulgaris, Pseudomonas aeruginosa, Pseudomonas putida, Pseudomonas syringae, Salmonella bongori, Salmonella cholerasuis, Salmonella enterica, Salmonella paratyphi, Salmonella typhi, Salmonella typhimurium, Shigella boydii, Shigella dysenteriae, Shigella flexneri, Shigella sonnei, Staphylococcus aureus, Staphylococcus epidermidis, Staphylococcus haemolyticus, Streptococcus pneumoniae, Streptococcus mutans, Streptococcus pyogenes, Treponema pallidum, Ureaplasma urealyticum, Vibrio cholerae, Vibrio parahaemolyticus, Vibrio vulnificans, Yersinia enterocolitica, Yersinia pestis and any species falling within the genera of any of the above species.

[0037] 10. A host cell containing the vector of Paragraph 8 or Paragraph 9.

[0038] 11. A purified or isolated antisense nucleic acid comprising a nucleotide sequence complementary to at least a portion of an intragenic sequence, intergenic sequence, sequences spanning at least a portion of two or more genes, 5′ noncoding region, or 3′ noncoding region within an operon comprising a proliferation-required gene whose activity or expression is inhibited by an antisense nucleic acid comprising the nucleotide sequence of one of SEQ ID NOs.: 1-6213.

[0039] 12. The purified or isolated antisense nucleic acid of Paragraph 11, wherein said antisense nucleic acid is complementary to a nucleic acid from an organism selected from the group consisting of Acinetobacter baumannii, Anaplasma marginale, Aspergillus fumigatus, Bacillus anthracis, Bacteroides fragilis, Bordetella pertussis, Borrelia burgdorferi, Burkholderia cepacia, Burkholderia fungorum, Burkholderia mallei, Campylobacter jejuni, Candida albicans, Candida glabrata (also called Torulopsis glabrata), Candida tropicalis, Candida parapsilosis, Candida guilliermondii, Candida krusei, Candida kefyr (also called Candida pseudotropicalis), Candida dubliniensis, Chlamydia pneumoniae, Chlamydia trachomatis, Clostridium acetobutylicum, Clostridium botulinum, Clostridium difficile, Clostridium perfringens, Coccidioides immitis, Corynebacterium diptheriae, Cryptococcus neoformans, Enterobacter cloacae, Enterococcus faecalis, Enterococcus faecium, Escherichia coli, Haemophilus influenzae, Helicobacter pylori, Histoplasma capsulatum, Klebsiella pneumoniae, Legionella pneumophila, Listeria monocytogenes, Moraxella catarrhalis, Mycobacterium avium, Mycobacterium bovis, Mycobacterium leprae, Mycobacterium tuberculosis, Mycoplasma genitalium, Mycoplasma pneumoniae, Neisseria gonorrhoeae, Neisseria meningitidis, Nocardia asteroides, Pasteurella haemolytica, Pasteurella multocida, Pneumocystis carinii, Proteus mirabilis, Proteus vulgaris, Pseudomonas aeruginosa, Pseudomonas putida, Pseudomonas syringae, Salmonella bongori, Salmonella cholerasuis, Salmonella enterica, Salmonella paratyphi, Salmonella typhi, Salmonella typhimurium, Shigella boydii, Shigella dysenteriae, Shigella flexneri, Shigella sonnei, Staphylococcus aureus, Staphylococcus epidermidis, Staphylococcus haemolyticus, Streptococcus pneumoniae, Streptococcus mutans, Streptococcus pyogenes, Treponema pallidum, Ureaplasma urealyticum, Vibrio cholerae, Vibrio parahaemolyticus, Vibrio vulnificans, Yersinia enterocolitica, Yersinia pestis and any species falling within the genera of any of the above species.

[0040] 13. The purified or isolated antisense nucleic acid of Paragraph 11, wherein said nucleotide sequence is complementary to a nucleotide sequence of a nucleic acid from an organism other than E. coli.

[0041] 14. The purified or isolated antisense nucleic acid of Paragraph 11, wherein said proliferation-required gene comprises a nucleotide sequence selected from the group consisting of SEQ ID NOS.: 6214-42397.

[0042] 15. A purified or isolated nucleic acid comprising a nucleotide sequence having at least 70% identity to a nucleotide sequence selected from the group consisting of SEQ ID NOs.: 1-6213, fragments comprising at least 25 consecutive nucleotides of SEQ ID NOs.: 1-6213, the nucleotide sequences complementary to SEQ ID NOs.: 1-6213 and the sequences complementary to fragments comprising at least 25 consecutive nucleotides of SEQ ID NOs.: 1-6213 as determined using BLASTN version 2.0 with the default parameters.

[0043] 16. The purified or isolated nucleic acid of Paragraph 15, wherein said nucleic acid is obtained from an organism selected from the group consisting of Acinetobacter baumannii, Anaplasma marginale, Aspergillus fumigatus, Bacillus anthracis, Bacteroides fragilis, Bordetella pertussis, Borrelia burgdorferi, Burkholderia cepacia, Burkholderia fungorum, Burkholderia mallei, Campylobacter jejuni, Candida albicans, Candida glabrata (also called Torulopsis glabrata), Candida tropicalis, Candida parapsilosis, Candida guilliermondii, Candida krusei, Candida kefyr (also called Candida pseudotropicalis), Candida dubliniensis, Chlamydia pneumoniae, Chlamydia trachomatis, Clostridium acetobutylicum, Clostridium botulinum, Clostridium difficile, Clostridium perfringens, Coccidioides immitis, Corynebacterium diptheriae, Cryptococcus neoformans, Enterobacter cloacae, Enterococcus faecalis, Enterococcus faecium, Escherichia coli, Haemophilus influenzae, Helicobacter pylori, Histoplasma capsulatum, Klebsiella pneumoniae, Legionella pneumophila, Listeria monocytogenes, Moraxella catarrhalis, Mycobacterium avium, Mycobacterium bovis, Mycobacterium leprae, Mycobacterium tuberculosis, Mycoplasma genitalium, Mycoplasma pneumoniae, Neisseria gonorrhoeae, Neisseria meningitidis, Nocardia asteroides, Pasteurella haemolytica, Pasteurella multocida, Pneumocystis carinii, Proteus mirabilis, Proteus vulgaris, Pseudomonas aeruginosa, Pseudomonas putida, Pseudomonas syringae, Salmonella bongori, Salmonella cholerasuis, Salmonella enterica, Salmonella paratyphi, Salmonella typhi, Salmonella typhimurium, Shigella boydii, Shigella dysenteriae, Shigella flexneri, Shigella sonnei, Staphylococcus aureus, Staphylococcus epidermidis, Staphylococcus haemolyticus, Streptococcus pneumoniae, Streptococcus mutans, Streptococcus pyogenes, Treponema pallidum, Ureaplasma urealyticum, Vibrio cholerae, Vibrio parahaemolyticus, Vibrio vulnificans, Yersinia enterocolitica, Yersinia pestis and any species falling within the genera of any of the above species.

[0044] 17. The nucleic acid of Paragraph 15, wherein said nucleic acid is obtained from an organism other than E. coli.

[0045] 18. A vector comprising a promoter operably linked to a nucleic acid encoding a polypeptide whose expression is inhibited by an antisense nucleic acid comprising a nucleotide sequence of any one of SEQ ID NOs.: 1-6213.

[0046] 19. The vector of Paragraph 18, wherein said nucleic acid encoding said polypeptide is obtained from an organism selected from the group consisting of Acinetobacter baumannii, Anaplasma marginale, Aspergillus fumigatus, Bacillus anthracis, Bacteroides fragilis, Bordetella pertussis, Borrelia burgdorferi, Burkholderia cepacia, Burkholderia fungorum, Burkholderia mallei, Campylobacter jejuni, Candida albicans, Candida glabrata (also called Torulopsis glabrata), Candida tropicalis, Candida parapsilosis, Candida guilliermondii, Candida krusei, Candida kefyr (also called Candida pseudotropicalis), Candida dubliniensis, Chlamydia pneumoniae, Chlamydia trachomatis, Clostridium acetobutylicum, Clostridium botulinum, Clostridium difficile, Clostridium perfringens, Coccidioides immitis, Corynebacterium diptheriae, Cryptococcus neoformans, Enterobacter cloacae, Enterococcus faecalis, Enterococcus faecium, Escherichia coli, Haemophilus influenzae, Helicobacter pylori, Histoplasma capsulatum, Klebsiella pneumoniae, Legionella pneumophila, Listeria monocytogenes, Moraxella catarrhalis, Mycobacterium avium, Mycobacterium bovis, Mycobacterium leprae, Mycobacterium tuberculosis, Mycoplasma genitalium, Mycoplasma pneumoniae, Neisseria gonorrhoeae, Neisseria meningitidis, Nocardia asteroides, Pasteurella haemolytica, Pasteurella multocida, Pneumocystis carinii, Proteus mirabilis, Proteus vulgaris, Pseudomonas aeruginosa, Pseudomonas putida, Pseudomonas syringae, Salmonella bongori, Salmonella cholerasuis, Salmonella enterica, Salmonella paratyphi, Salmonella typhi, Salmonella typhimurium, Shigella boydii, Shigella dysenteriae, Shigella flexneri, Shigella sonnei, Staphylococcus aureus, Staphylococcus epidermidis, Staphylococcus haemolyticus, Streptococcus pneumoniae, Streptococcus mutans, Streptococcus pyogenes, Treponema pallidum, Ureaplasma urealyticum, Vibrio cholerae, Vibrio parahaemolyticus, Vibrio vulnificans, Yersinia enterocolitica, Yersinia pestis and any species falling within the genera of any of the above species.

[0047] 20. The vector of Paragraph 18, wherein said nucleotide sequence encoding said polypeptide is obtained from an organism other than E. coli.

[0048] 21. A host cell containing the vector of Paragraph 18.

[0049] 22. The vector of Paragraph 18, wherein said polypeptide comprises a polypeptide comprising an amino acid sequence selected from the group consisting of SEQ ID NOs: 42398-78581.

[0050] 23. The vector of Paragraph 18, wherein said promoter is operably linked to a nucleic acid comprising a nucleotide sequence selected from the group consisting of SEQ ID NOS.: 6214-42397.

[0051] 24. A purified or isolated polypeptide comprising a polypeptide whose expression is inhibited by an antisense nucleic acid comprising a nucleotide sequence of any one of SEQ ID NOs.: 1-6213, or a fragment selected from the group consisting of fragments comprising at least 5, at least 10, at least 20, at least 30, at least 40, at least 50, at least 60 or more than 60 consecutive amino acids of one of the said polypeptides.

[0052] 25. The polypeptide of Paragraph 24, wherein said polypeptide comprises an amino acid sequence of any one of SEQ ID NOs.: 42398-78581 or a fragment comprising at least 5, at least 10, at least 20, at least 30, at least 40, at least 50, at least 60 or more than 60 consecutive amino acids of a polypeptide comprising an amino acid sequence selected from the group consisting of SEQ ID NOs.: 42398-78581.

[0053] 26. The polypeptide of Paragraph 24, wherein said polypeptide is obtained from an organism selected from the group consisting of Acinetobacter baumannii, Anaplasma marginale, Aspergillus fumigatus, Bacillus anthracis, Bacteroides fragilis, Bordetella pertussis, Borrelia burgdorferi, Burkholderia cepacia, Burkholderia fungorum, Burkholderia mallei, Campylobacter jejuni, Candida albicans, Candida glabrata (also called Torulopsis glabrata), Candida tropicalis, Candida parapsilosis, Candida guilliermondii, Candida krusei, Candida kefyr (also called Candida pseudotropicalis), Candida dubliniensis, Chlamydia pneumoniae, Chlamydia trachomatis, Clostridium acetobutylicum, Clostridium botulinum, Clostridium difficile, Clostridium perfringens, Coccidioides immitis, Corynebacterium diptheriae, Cryptococcus neoformans, Enterobacter cloacae, Enterococcus faecalis, Enterococcus faecium, Escherichia coli, Haemophilus influenzae, Helicobacter pylori, Histoplasma capsulatum, Klebsiella pneumoniae, Legionella pneumophila, Listeria monocytogenes, Moraxella catarrhalis, Mycobacterium avium, Mycobacterium bovis, Mycobacterium leprae, Mycobacterium tuberculosis, Mycoplasma genitalium, Mycoplasma pneumoniae, Neisseria gonorrhoeae, Neisseria meningitidis, Nocardia asteroides, Pasteurella haemolytica, Pasteurella multocida, Pneumocystis carinii, Proteus mirabilis, Proteus vulgaris, Pseudomonas aeruginosa, Pseudomonas putida, Pseudomonas syringae, Salmonella bongori, Salmonella cholerasuis, Salmonella enterica, Salmonella paratyphi, Salmonella typhi, Salmonella typhimurium, Shigella boydii, Shigella dysenteriae, Shigella flexneri, Shigella sonnei, Staphylococcus aureus, Staphylococcus epidermidis, Staphylococcus haemolyticus, Streptococcus pneumoniae, Streptococcus mutans, Streptococcus pyogenes, Treponema pallidum, Ureaplasma urealyticum, Vibrio cholerae, Vibrio parahaemolyticus, Vibrio vulnificans, Yersinia enterocolitica, Yersinia pestis and any species falling within the genera of any of the above species.

[0054] 27. The polypeptide of Paragraph 24, wherein said polypeptide is obtained from an organism other than E. coli.

[0055] 28. A purified or isolated polypeptide comprising a polypeptide having at least 25% amino acid identity to a polypeptide whose expression is inhibited by a nucleic acid comprising a nucleotide sequence selected from the group consisting of SEQ ID NOs.: 1-6213, or at least 25% amino acid identity to a fragment comprising at least 10, at least 20, at least 30, at least 40, at least 50, at least 60 or more than 60 consecutive amino acids of a polypeptide whose expression is inhibited by a nucleic acid comprising a nucleotide sequence selected from the group consisting of SEQ ID NOs.: 1-6213 as determined using FASTA version 3.0t78 with the default parameters.

[0056] 29. The polypeptide of Paragraph 28, wherein said polypeptide has at least 25% identity to a polypeptide comprising one of SEQ ID NOs: 42398-78581 or at least 25% identity to a fragment comprising at least 5, at least 10, at least 20, at least 30, at least 40, at least 50, at least 60 or more than 60 consecutive amino acids of a polypeptide comprising one of SEQ ID NOs.: 42398-78581 as determined using FASTA version 3.0t78 with the default parameters.

[0057] 30. The polypeptide of Paragraph 28, wherein said polypeptide is obtained from an organism selected from the group consisting of Acinetobacter baumannii, Anaplasma marginale, Aspergillus fumigatus, Bacillus anthracis, Bacteroides fragilis, Bordetella pertussis, Borrelia burgdorferi, Burkholderia cepacia, Burkholderia fungorum, Burkholderia mallei, Campylobacter jejuni, Candida albicans, Candida glabrata (also called Torulopsis glabrata), Candida tropicalis, Candida parapsilosis, Candida guilliermondii, Candida krusei, Candida kefyr (also called Candida pseudotropicalis), Candida dubliniensis, Chlamydia pneumoniae, Chlamydia trachomatis, Clostridium acetobutylicum, Clostridium botulinum, Clostridium difficile, Clostridium perfringens, Coccidioides immitis, Corynebacterium diptheriae, Cryptococcus neoformans, Enterobacter cloacae, Enterococcus faecalis, Enterococcus faecium, Escherichia coli, Haemophilus influenzae, Helicobacter pylori, Histoplasma capsulatum, Klebsiella pneumoniae, Legionella pneumophila, Listeria monocytogenes, Moraxella catarrhalis, Mycobacterium avium, Mycobacterium bovis, Mycobacterium leprae, Mycobacterium tuberculosis, Mycoplasma genitalium, Mycoplasma pneumoniae, Neisseria gonorrhoeae, Neisseria meningitidis, Nocardia asteroides, Pasteurella haemolytica, Pasteurella multocida, Pneumocystis carinii, Proteus mirabilis, Proteus vulgaris, Pseudomonas aeruginosa, Pseudomonas putida, Pseudomonas syringae, Salmonella bongori, Salmonella cholerasuis, Salmonella enterica, Salmonella paratyphi, Salmonella typhi, Salmonella typhimurium, Shigella boydii, Shigella dysenteriae, Shigella flexneri, Shigella sonnei, Staphylococcus aureus, Staphylococcus epidermidis, Staphylococcus haemolyticus, Streptococcus pneumoniae, Streptococcus mutans, Streptococcus pyogenes, Treponema pallidum, Ureaplasma urealyticum, Vibrio cholerae, Vibrio parahaemolyticus, Vibrio vulnificans, Yersinia enterocolitica, Yersinia pestis and any species falling within the genera of any of the above species.

[0058] 31. The polypeptide of Paragraph 28, wherein said polypeptide is obtained from an organism other than E. coli.

[0059] 32. An antibody capable of specifically binding the polypeptide of one of Paragraphs 28-31.

[0060] 33. A method of producing a polypeptide, comprising introducing a vector comprising a promoter operably linked to a nucleic acid comprising a nucleotide sequence encoding a polypeptide whose expression is inhibited by an antisense nucleic acid comprising one of SEQ ID NOs.: 1-6213 into a cell.

[0061] 34. The method of Paragraph 33, further comprising the step of isolating said polypeptide.

[0062] 35. The method of Paragraph 33, wherein said polypeptide comprises an amino acid sequence selected from the group consisting of SEQ ID NOs.: 42398-78581.

[0063] 36. The method of Paragraph 33, wherein said nucleic acid encoding said polypeptide is obtained from an organism selected from the group consisting of Acinetobacter baumannii, Anaplasma marginale, Aspergillus fumigatus, Bacillus anthracis, Bacteroides fragilis, Bordetella pertussis, Borrelia burgdorferi, Burkholderia cepacia, Burkholderia fungorum, Burkholderia mallei, Campylobacter jejuni, Candida albicans, Candida glabrata (also called Torulopsis glabrata), Candida tropicalis, Candida parapsilosis, Candida guilliermondii, Candida krusei, Candida kefyr (also called Candida pseudotropicalis), Candida dubliniensis, Chlamydia pneumoniae, Chlamydia trachomatis, Clostridium acetobutylicum, Clostridium botulinum, Clostridium difficile, Clostridium perfringens, Coccidioides immitis, Corynebacterium diptheriae, Cryptococcus neoformans, Enterobacter cloacae, Enterococcus faecalis, Enterococcus faecium, Escherichia coli, Haemophilus influenzae, Helicobacter pylori, Histoplasma capsulatum, Klebsiella pneumoniae, Legionella pneumophila, Listeria monocytogenes, Moraxella catarrhalis, Mycobacterium avium, Mycobacterium bovis, Mycobacterium leprae, Mycobacterium tuberculosis, Mycoplasma genitalium, Mycoplasma pneumoniae, Neisseria gonorrhoeae, Neisseria meningitidis, Nocardia asteroides, Pasteurella haemolytica, Pasteurella multocida, Pneumocystis carinii, Proteus mirabilis, Proteus vulgaris, Pseudomonas aeruginosa, Pseudomonas putida, Pseudomonas syringae, Salmonella bongori, Salmonella cholerasuis, Salmonella enterica, Salmonella paratyphi, Salmonella typhi, Salmonella typhimurium, Shigella boydii, Shigella dysenteriae, Shigella flexneri, Shigella sonnei, Staphylococcus aureus, Staphylococcus epidermidis, Staphylococcus haemolyticus, Streptococcus pneumoniae, Streptococcus mutans, Streptococcus pyogenes, Treponema pallidum, Ureaplasma urealyticum, Vibrio cholerae, Vibrio parahaemolyticus, Vibrio vulnificans, Yersinia enterocolitica, Yersinia pestis and any species falling within the genera of any of the above species.

[0064] 37. The method of Paragraph 33, wherein said nucleic acid encoding said polypeptide is obtained from an organism other than E. coli.

[0065] 38. The method of Paragraph 33, wherein said promoter is operably linked to a nucleic acid comprising a nucleotide sequence selected from the group consisting of SEQ ID NOS.: 6214-42397.

[0066] 39. A method of inhibiting proliferation of a cell in an individual comprising inhibiting the activity or reducing the amount of a gene product whose expression is inhibited by an antisense nucleic acid comprising a nucleotide sequence selected from the group consisting of SEQ ID NOs.: 1-6213 or inhibiting the activity or reducing the amount of a nucleic acid encoding said gene product.

[0067] 40. The method of Paragraph 39, wherein said method comprises inhibiting said activity or reducing said amount of a gene product in an organism selected from the group consisting of Acinetobacter baumannii, Anaplasma marginale, Aspergillus fumigatus, Bacillus anthracis, Bacteroides fragilis, Bordetella pertussis, Borrelia burgdorferi, Burkholderia cepacia, Burkholderia fungorum, Burkholderia mallei, Campylobacter jejuni, Candida albicans, Candida glabrata (also called Torulopsis glabrata), Candida tropicalis, Candida parapsilosis, Candida guilliermondii, Candida krusei, Candida kefyr (also called Candida pseudotropicalis), Candida dubliniensis, Chlamydia pneumoniae, Chlamydia trachomatis, Clostridium acetobutylicum, Clostridium botulinum, Clostridium difficile, Clostridium perfringens, Coccidioides immitis, Corynebacterium diptheriae, Cryptococcus neoformans, Enterobacter cloacae, Enterococcus faecalis, Enterococcus faecium, Escherichia coli, Haemophilus influenzae, Helicobacter pylori, Histoplasma capsulatum, Klebsiella pneumoniae, Legionella pneumophila, Listeria monocytogenes, Moraxella catarrhalis, Mycobacterium avium, Mycobacterium bovis, Mycobacterium leprae, Mycobacterium tuberculosis, Mycoplasma genitalium, Mycoplasma pneumoniae, Neisseria gonorrhoeae, Neisseria meningitidis, Nocardia asteroides, Pasteurella haemolytica, Pasteurella multocida, Pneumocystis carinii, Proteus mirabilis, Proteus vulgaris, Pseudomonas aeruginosa, Pseudomonas putida, Pseudomonas syringae, Salmonella bongori, Salmonella cholerasuis, Salmonella enterica, Salmonella paratyphi, Salmonella typhi, Salmonella typhimurium, Shigella boydii, Shigella dysenteriae, Shigella flexneri, Shigella sonnei, Staphylococcus aureus, Staphylococcus epidermidis, Staphylococcus haemolyticus, Streptococcus pneumoniae, Streptococcus mutans, Streptococcus pyogenes, Treponema pallidum, Ureaplasma urealyticum, Vibrio cholerae, Vibrio parahaemolyticus, Vibrio vulnificans, Yersinia enterocolitica, Yersinia pestis and any species falling within the genera of any of the above species.

[0068] 41. The method of Paragraph 39, wherein said method comprises inhibiting said activity or reducing said amount of a gene product in an organism other than E. coli.

[0069] 42. The method of Paragraph 39, wherein said gene product is present in an organism other than E. coli.

[0070] 43. The method of Paragraph 39, wherein said gene product comprises a polypeptide comprising a sequence selected from the group consisting of SEQ ID NOs.: 42398-78581.

[0071] 44. A method for identifying a compound which influences the activity of a gene product required for proliferation, said gene product comprising a gene product whose expression is inhibited by an antisense nucleic acid comprising a nucleotide sequence selected from the group consisting of SEQ ID NOs.: 1-6213, said method comprising:

[0072] contacting said gene product with a candidate compound; and

[0073] determining whether said compound influences the activity of said gene product.

[0074] 45. The method of Paragraph 44, wherein said gene product is from an organism selected from the group consisting of Acinetobacter baumannii, Anaplasma marginale, Aspergillus fumigatus, Bacillus anthracis, Bacteroides fragilis, Bordetella pertussis, Borrelia burgdorferi, Burkholderia cepacia, Burkholderia fungorum, Burkholderia mallei, Campylobacterjejuni, Candida albicans, Candida glabrata (also called Torulopsis glabrata), Candida tropicalis, Candida parapsilosis, Candida guilliermondii, Candida krusei, Candida kefyr (also called Candida pseudotropicalis), Candida dubliniensis, Chlamydia pneumoniae, Chlamydia trachomatis, Clostridium acetibutylicum, Clostridium botulinum, Clostridium difficile, Clostridium perfringens, Coccidioides immitis, Corynebacterium diptheriae, Cryptococcus neoformans, Enterobacter cloacae, Enterococcus faecalis, Enterococcus faecium, Escherichia coli, Haemophilus influenzae, Helicobacter pylori, Histoplasma capsulatum, Klebsiella pneumoniae, Legionella pneumophila, Listeria monocytogenes, Moraxella catarrhalis, Mycobacterium avium, Mycobacterium bovis, Mycobacterium leprae, Mycobacterium tuberculosis, Mycoplasma genitalium, Mycoplasma pneumoniae, Neisseria gonorrhoeae, Neisseria meningitidis, Nocardia asteroides, Pasteurella haemolytica, Pasteurella multocida, Pneumocystis carinii, Proteus mirabilis, Proteus vulgaris, Pseudomonas aeruginosa, Pseudomonas putida, Pseudomonas syringae, Salmonella bongori, Salmonella cholerasuis, Salmonella enterica, Salmonella paratyphi, Salmonella typhi, Salmonella typhimurium, Shigella boydii, Shigella dysenteriae, Shigella flexneri, Shigella sonnei, Staphylococcus aureus, Staphylococcus epidermidis, Staphylococcus haemolyticus, Streptococcus pneumoniae, Streptococcus mutans, Streptococcus pyogenes, Treponema pallidum, Ureaplasma urealyticum, Vibrio cholerae, Vibrio parahaemolyticus, Vibrio vulnificans, Yersinia enterocolitica, Yersinia pestis and any species falling within the genera of any of the above species.

[0075] 46. The method of Paragraph 44, wherein said gene product is from an organism other than E. coli.

[0076] 47. The method of Paragraph 44, wherein said gene product is a polypeptide and said activity is an enzymatic activity.

[0077] 48. The method of Paragraph 44, wherein said gene product is a polypeptide and said activity is a carbon compound catabolism activity.

[0078] 49. The method of Paragraph 44, wherein said gene product is a polypeptide and said activity is a biosynthetic activity.

[0079] 50. The method of Paragraph 44, wherein said gene product is a polypeptide and said activity is a transporter activity.

[0080] 51. The method of Paragraph 44, wherein said gene product is a polypeptide and said activity is a transcriptional activity.

[0081] 52. The method of Paragraph 44, wherein said gene product is a polypeptide and said activity is a DNA replication activity.

[0082] 53. The method of Paragraph 44, wherein said gene product is a polypeptide and said activity is a cell division activity.

[0083] 54. The method of Paragraph 44, wherein said gene product is an RNA.

[0084] 55. The method of Paragraph 44, wherein said gene product is a polypeptide comprising an amino acid sequence selected from the group consisting of SEQ ID NOs.: 42398-78581.

[0085] 56. A compound identified using the method of Paragraph 44.

[0086] 57. A method for identifying a compound or nucleic acid having the ability to reduce the activity or level of a gene product required for proliferation, said gene product comprising a gene product whose activity or expression is inhibited by an antisense nucleic acid comprising a nucleotide sequence selected from the group consisting of SEQ ID NOs.: 1-6213, said method comprising:

[0087] (a) contacting a target gene or RNA encoding said gene product with a candidate compound or nucleic acid; and

[0088] (b) measuring an activity of said target.

[0089] 58. The method of Paragraph 57, wherein said target gene or RNA is from an organism selected from the group consisting of Acinetobacter baumannii, Anaplasma marginale, Aspergillus fumigatus, Bacillus anthracis, Bacteroides fragilis, Bordetella pertussis, Borrelia burgdorferi, Burkholderia cepacia, Burkholderia fungorum, Burkholderia mallei, Campylobacter jejuni, Candida albicans, Candida glabrata (also called Torulopsis glabrata), Candida tropicalis, Candida parapsilosis, Candida guilliermondii, Candida krusei, Candida kefyr (also called Candida pseudotropicalis), Candida dubliniensis, Chlamydia pneumoniae, Chlamydia trachomatis, Clostridium acetobutylicum, Clostridium botulinum, Clostridium difficile, Clostridium perfringens, Coccidioides immitis, Corynebacterium diptheriae, Cryptococcus neoformans, Enterobacter cloacae, Enterococcus faecalis, Enterococcus faecium, Escherichia coli, Haemophilus influenzae, Helicobacter pylori, Histoplasma capsulatum, Klebsiella pneumoniae, Legionella pneumophila, Listeria monocytogenes, Moraxella catarrhalis, Mycobacterium avium, Mycobacterium bovis, Mycobacterium leprae, Mycobacterium tuberculosis, Mycoplasma genitalium, Mycoplasma pneumoniae, Neisseria gonorrhoeae, Neisseria meningitidis, Nocardia asteroides, Pasteurella haemolytica, Pasteurella multocida, Pneumocystis carinii, Proteus mirabilis, Proteus vulgaris, Pseudomonas aeruginosa, Pseudomonas putida, Pseudomonas syringae, Salmonella bongori, Salmonella cholerasuis, Salmonella enterica, Salmonella paratyphi, Salmonella typhi, Salmonella typhimurium, Shigella boydii, Shigella dysenteriae, Shigella flexneri, Shigella sonnei, Staphylococcus aureus, Staphylococcus epidermidis, Staphylococcus haemolyticus, Streptococcus pneumoniae, Streptococcus mutans, Streptococcus pyogenes, Treponema pallidum, Ureaplasma urealyticum, Vibrio cholerae, Vibrio parahaemolyticus, Vibrio vulnificans, Yersinia enterocolitica, Yersinia pestis and any species falling within the genera of any of the above species.

[0090] 59. The method of Paragraph 57, wherein said target gene or RNA is from an organism other than E. coli.

[0091] 60. The method of Paragraph 57, wherein said gene product is from an organism other than E. coli.

[0092] 61. The method of Paragraph 57, wherein said target is a messenger RNA molecule and said activity is translation of said messenger RNA.

[0093] 62. The method of Paragraph 57, wherein said target is a messenger RNA molecule and said activity is transcription of a gene encoding said messenger RNA.

[0094] 63. The method of Paragraph 57, wherein said target is a gene and said activity is transcription of said gene.

[0095] 64. The method of Paragraph 57, wherein said target is a nontranslated RNA and said activity is processing or folding of said nontranslated RNA or assembly of said nontranslated RNA into a protein/RNA complex.

[0096] 65. The method of Paragraph 57, wherein said target is a messenger RNA molecule encoding a polypeptide comprising an amino acid sequence selected from the group consisting of SEQ ID NOs.: 42398-78581.

[0097] 66. The method of Paragraph 57, wherein said target comprises a nucleic acid selected from the group consisting of SEQ ID NOS.: 6214-42397.

[0098] 67. A compound or nucleic acid identified using the method of Paragraph 57.

[0099] 68. A method for identifying a compound which reduces the activity or level of a gene product required for proliferation of a cell, wherein the activity or expression of said gene product is inhibited by an antisense nucleic acid comprising a nucleotide sequence selected from the group consisting of SEQ ID NOs.: 1-6213, said method comprising the steps of:

[0100] (a) providing a sublethal level of an antisense nucleic acid comprising a nucleotide sequence complementary to a nucleic acid comprising a nucleotide sequence encoding said gene product in a cell to reduce the activity or amount of said gene product in said cell, thereby producing a sensitized cell;

[0101] (b) contacting said sensitized cell with a compound; and

[0102] (c) determining the degree to which said compound inhibits proliferation of said sensitized cell relative to a cell which does not contain said antisense nucleic acid.

[0103] 69. The method of Paragraph 68, wherein said determining step comprises determining whether said compound inhibits the growth of said sensitized cell to a greater extent than said compound inhibits the growth of a nonsensitized cell.

[0104] 70. The method of Paragraph 68, wherein said cell is a Gram positive bacterium.

[0105] 71. The method of Paragraph 68, wherein said Gram positive bacterium is selected from the group consisting of Staphylococcus species, Streptococcus species, Enterococcus species, Mycobacterium species, Clostridium species, and Bacillus species.

[0106] 72. The method of Paragraph 68, wherein said bacterium is Staphylococcus aureus.

[0107] 73. The method of Paragraph 72, wherein said Staphylococcus species is coagulase negative.

[0108] 74. The method of Paragraph 72, wherein said bacterium is selected from the group consisting of Staphylococcus aureus RN450 and Staphylococcus aureus RN4220.

[0109] 75. The method of Paragraph 68, wherein said cell is an organism selected from the group consisting of Acinetobacter baumannii, Anaplasma marginale, Aspergillus fumigatus, Bacillus anthracis, Bacteroides fragilis, Bordetella pertussis, Borrelia burgdorferi, Burkholderia cepacia, Burkholderia fungorum, Burkholderia mallei, Campylobacter jejuni, Candida albicans, Candida glabrata (also called Torulopsis glabrata), Candida tropicalis, Candida parapsilosis, Candida guilliermondii, Candida krusei, Candida kefyr (also called Candida pseudotropicalis), Candida dubliniensis, Chlamydia pneumoniae, Chlamydia trachomatis, Clostridium acetobutylicum, Clostridium botulinum, Clostridium difficile, Clostridium perfringens, Coccidioides immitis, Corynebacterium diptheriae, Cryptococcus neoformans, Enterobacter cloacae, Enterococcus faecalis, Enterococcus faecium, Escherichia coli, Haemophilus influenzae, Helicobacter pylori, Histoplasma capsulatum, Klebsiella pneumoniae, Legionella pneumophila, Listeria monocytogenes, Moraxella catarrhalis, Mycobacterium avium, Mycobacterium bovis, Mycobacterium leprae, Mycobacterium tuberculosis, Mycoplasma genitalium, Mycoplasma pneumoniae, Neisseria gonorrhoeae, Neisseria meningitidis, Nocardia asteroides, Pasteurella haemolytica, Pasteurella multocida, Pneumocystis carinii, Proteus mirabilis, Proteus vulgaris, Pseudomonas aeruginosa, Pseudomonas putida, Pseudomonas syringae, Salmonella bongori, Salmonella cholerasuis, Salmonella enterica, Salmonella paratyphi, Salmonella typhi, Salmonella typhimurium, Shigella boydii, Shigella dysenteriae, Shigella flexneri, Shigella sonnei, Staphylococcus aureus, Staphylococcus epidermidis, Staphylococcus haemolyticus, Streptococcus pneumoniae, Streptococcus mutans, Streptococcus pyogenes, Treponema pallidum, Ureaplasma urealyticum, Vibrio cholerae, Vibrio parahaemolyticus, Vibrio vulnificans, Yersinia enterocolitica, Yersinia pestis and any species falling within the genera of any of the above species.

[0110] 76. The method of Paragraph 68, wherein said cell is not an E. coli cell.

[0111] 77. The method of Paragraph 68, wherein said gene product is from an organism other than E. coli.

[0112] 78. The method of Paragraph 68, wherein said antisense nucleic acid is transcribed from an inducible promoter.

[0113] 79. The method of Paragraph 68, further comprising the step of contacting said cell with a concentration of inducer which induces transcription of said antisense nucleic acid to a sublethal level.

[0114] 80. The method of Paragraph 68, wherein growth inhibition is measured by monitoring optical density of a culture growth solution.

[0115] 81. The method of Paragraph 68, wherein said gene product is a polypeptide.

[0116] 82. The method of Paragraph 81, wherein said polypeptide comprises an amino acid sequence selected from the group consisting of SEQ ID NOs.: 42398-78581.

[0117] 83. The method of Paragraph 68, wherein said gene product is an RNA.

[0118] 84. The method of Paragraph 68, wherein nucleic acid encoding said gene product comprises a nucleotide sequence selected from the group consisting of SEQ ID NOS.: 6214-42397.

[0119] 85. A compound identified using the method of Paragraph 68.

[0120] 86. A method for inhibiting cellular proliferation comprising introducing an effective amount of a compound with activity against a gene whose activity or expression is inhibited by an antisense nucleic acid comprising a nucleotide sequence selected from the group consisting of SEQ ID NOs.: 1-6213 or a compound with activity against the product of said gene into a population of cells expressing said gene.

[0121] 87. The method of Paragraph 86, wherein said compound is an antisense nucleic acid comprising a nucleotide sequence selected from the group consisting of SEQ ID NOs.: 1-6213, or a proliferation-inhibiting portion thereof.

[0122] 88. The method of Paragraph 86, wherein said proliferation inhibiting portion of one of SEQ ID NOs.: 1-6213 is a fragment comprising at least 10, at least 20, at least 25, at least 30, at least 50 or more than 51 consecutive nucleotides of one of SEQ ID NOs.: 1-6213.

[0123] 89. The method of Paragraph 86, wherein said population is a population of Gram positive bacteria.

[0124] 90. The method of Paragraph 89, wherein said population of Gram positive bacteria is selected from the group consisting of a population of Staphylococcus species, Streptococcus species, Enterococcus species, Mycobacterium species, Clostridium species, and Bacillus species.

[0125] 91. The method of Paragraph 86, wherein said population is a population of Staphylococcus aureus.

[0126] 92. The method of Paragraph 91, wherein said population is a population of a bacterium selected from the group consisting of Staphylococcus aureus RN450 and Staphylococcus aureus RN4220.

[0127] 93. The method of Paragraph 86, wherein said population is a population of a bacterium selected from the group consisting of Acinetobacter baumannii, Anaplasma marginale, Aspergillus fumigatus, Bacillus anthracis, Bacteroides fragilis, Bordetella pertussis, Borrelia burgdorferi, Burkholderia cepacia, Burkholderia fungorum, Burkholderia mallei, Campylobacter jejuni, Candida albicans, Candida glabrata (also called Torulopsis glabrata), Candida tropicalis, Candida parapsilosis, Candida guilliermondii, Candida krusei, Candida kefyr (also called Candida pseudotropicalis), Candida dubliniensis, Chlamydia pneumoniae, Chlamydia trachomatis, Clostridium acetobutylicum, Clostridium botulinum, Clostridium difficile, Clostridium perfringens, Coccidioides immitis, Corynebacterium diptheriae, Cryptococcus neoformans, Enterobacter cloacae, Enterococcus faecalis, Enterococcus faecium, Escherichia coli, Haemophilus influenzae, Helicobacter pylori, Histoplasma capsulatum, Klebsiella pneumoniae, Legionella pneumophila, Listeria monocytogenes, Moraxella catarrhalis, Mycobacterium avium, Mycobacterium bovis, Mycobacterium leprae, Mycobacterium tuberculosis, Mycoplasma genitalium, Mycoplasma pneumoniae, Neisseria gonorrhoeae, Neisseria meningitidis, Nocardia asteroides, Pasteurella haemolytic, Pasteurella multocida, Pneumocystis carinii, Proteus mirabilis, Proteus vulgaris, Pseudomonas aeruginosa, Pseudomonas putida, Pseudomonas syringae, Salmonella bongori, Salmonella cholerasuis, Salmonella enterica, Salmonella paratyphi, Salmonella typhi, Salmonella typhimurium, Shigella boydii, Shigella dysenteriae, Shigella flexneri, Shigella sonnei, Staphylococcus aureus, Staphylococcus epidermidis, Staphylococcus haemolyticus, Streptococcus pneumoniae, Streptococcus mutans, Streptococcus pyogenes, Treponema pallidum, Ureaplasma urealyticum, Vibrio cholerae, Vibrio parahaemolyticus, Vibrio vulnificans, Yersinia enterocolitica, Yersinia pestis and any species falling within the genera of any of the above species.

[0128] 94. The method of Paragraph 86, wherein said population is a population of an organism other than E. coli.

[0129] 95. The method of Paragraph 86, wherein said product of said gene is from an organism other than E. coli.

[0130] 96. The method of Paragraph 86, wherein said gene encodes a polypeptide comprising an amino acid sequence selected from the group consisting of SEQ ID NOs.: 42398-78581.

[0131] 97. The method of Paragraph 86, wherein said gene comprises a nucleotide sequence selected from the group consisting of SEQ ID NOS.: 6214-42397.

[0132] 98. A composition comprising an effective concentration of an antisense nucleic acid comprising a nucleotide sequence selected from the group consisting of SEQ ID NOs.: 1-6213, or a proliferation-inhibiting portion thereof in a pharmaceutically acceptable carrier.

[0133] 99. The composition of Paragraph 98, wherein said proliferation-inhibiting portion of one of SEQ ID NOs.: 1-6213 comprises at least 20, at least 25, at least 30, at least 50 or more than 50 consecutive nucleotides of one of SEQ ID NOs.: 1-6213.

[0134] 100. A method for inhibiting the activity or expression of a gene in an operon required for proliferation wherein the activity or expression of at least one gene in said operon is inhibited by an antisense nucleic acid comprising a sequence selected from the group consisting of SEQ ID NOs.: 1-6213, said method comprising contacting a cell in a cell population with an antisense nucleic acid complementary to at least a portion of said operon.

[0135] 101. The method of Paragraph 100, wherein said antisense nucleic acid comprises a nucleotide sequence selected from the group consisting of SEQ ID NOs.: 1-6213 or a proliferation-inhibiting portion thereof.

[0136] 102. The method of Paragraph 100, wherein said cell is selected from the group consisting of Acinetobacter baumannii, Anaplasma marginale, Aspergillus fumigatus, Bacillus anthracis, Bacteroides fragilis, Bordetella pertussis, Borrelia burgdorferi, Burkholderia cepacia, Burkholderia fungorum, Burkholderia mallei, Campylobacter jejuni, Candida albicans, Candida glabrata (also called Torulopsis glabrata), Candida tropicalis, Candida parapsilosis, Candida guilliermondii, Candida krusei, Candida kefyr (also called Candida pseudotropicalis), Candida dubliniensis, Chlamydia pneumoniae, Chlamydia trachomatis, Clostridium acetobutylicum, Clostridium botulinum, Clostridium difficile, Clostridium perfringens, Coccidioides immitis, Corynebacterium diptheriae, Cryptococcus neoformans, Enterobacter cloacae, Enterococcus faecalis, Enterococcus faecium, Escherichia coli, Haemophilus influenzae, Helicobacter pylori, Histoplasma capsulatum, Klebsiella pneumoniae, Legionella pneumophila, Listeria monocytogenes, Moraxella catarrhalis, Mycobacterium avium, Mycobacterium bovis, Mycobacterium leprae, Mycobacterium tuberculosis, Mycoplasma genitalium, Mycoplasma pneumoniae, Neisseria gonorrhoeae, Neisseria meningitidis, Nocardia asteroides, Pasteurella haemolytica, Pasteurella multocida, Pneumocystis carinii, Proteus mirabilis, Proteus vulgaris, Pseudomonas aeruginosa, Pseudomonas putida, Pseudomonas syringae, Salmonella bongori, Salmonella cholerasuis, Salmonella enterica, Salmonella paratyphi, Salmonella typhi, Salmonella typhimurium, Shigella boydii, Shigella dysenteriae, Shigella flexneri, Shigella sonnei, Staphylococcus aureus, Staphylococcus epidermidis, Staphylococcus haemolyticus, Streptococcus pneumoniae, Streptococcus mutans, Streptococcus pyogenes, Treponema pallidum, Ureaplasma urealyticum, Vibrio cholerae, Vibrio parahaemolyticus, Vibrio vulnificans, Yersinia enterocolitica, Yersinia pestis and any species falling within the genera of any of the above species.

[0137] 103. The method of Paragraph 100, wherein said cell is not an E. coli cell.

[0138] 104. The method of Paragraph 100, wherein said gene is from an organism other than E. coli.

[0139] 105. The method of Paragraph 100, wherein said cell is contacted with said antisense nucleic acid by introducing a plasmid which expresses said antisense nucleic acid into said cell population.

[0140] 106. The method of Paragraph 100, wherein said cell is contacted with said antisense nucleic acid by introducing a phage which encodes said antisense nucleic acid into said cell population.

[0141] 107. The method of Paragraph 100, wherein said cell is contacted with said antisense nucleic acid by expressing said antisense nucleic acid from the chromosome of cells in said cell population.

[0142] 108. The method of Paragraph 100, wherein said cell is contacted with said antisense nucleic acid by introducing a promoter adjacent to a chromosomal copy of said antisense nucleic acid such that said promoter directs the transcription of said antisense nucleic acid.

[0143] 109. The method of Paragraph 100, wherein said cell is contacted with said antisense nucleic acid by introducing a retron which expresses said antisense nucleic acid into said cell population.

[0144] 110. The method of Paragraph 100, wherein said cell is contacted with said antisense nucleic acid by introducing a ribozyme into said cell-population, wherein a binding portion of said ribozyme comprises said antisense nucleic acid.

[0145] 111. The method of Paragraph 100, wherein said cell is contacted with said antisense nucleic acid by introducing a liposome comprising said antisense nucleic acid into said cell.

[0146] 112. The method of Paragraph 100, wherein said cell is contacted with said antisense nucleic acid by electroporation of said antisense nucleic acid into said cell.

[0147] 113. The method of Paragraph 100, wherein said antisense nucleic acid is a fragment comprising at least 10, at least 20, at least 25, at least 30, at least 50 or more than 50 consecutive nucleotides of one of SEQ ID NOs.: 1-6213.

[0148] 114. The method of Paragraph 100 wherein said antisense nucleic acid is a synthetic oligonucleotide.

[0149] 115. The method of Paragraph 100, wherein said gene comprises a nucleotide sequence selected from the group consisting of SEQ ID NOS.: 6214-42397.

[0150] 116. A method for identifying a gene which is required for proliferation of a cell comprising:

[0151] (a) contacting a cell with an antisense nucleic acid comprising a nucleotide sequence selected from the group consisting of SEQ ID NOs.: 1-6213, wherein said cell is a cell other than the organism from which said nucleic acid was obtained;

[0152] (b) determining whether said nucleic acid inhibits proliferation of said cell; and

[0153] (c) identifying the gene in said cell which encodes the mRNA which is complementary to said antisense nucleic acid or a portion thereof.

[0154] 117. The method of Paragraph 116, wherein said cell is selected from the group consisting of Staphylococcus species, Streptococcus species, Enterococcus species, Mycobacterium species, Clostridium species, and Bacillus species.

[0155] 118. The method of Paragraph 116 wherein said cell is selected from the group consisting of Acinetobacter baumannii, Anaplasma marginale, Aspergillus fumigatus, Bacillus anthracis, Bacteroides fragilis, Bordetella pertussis, Borrelia burgdorferi, Burkholderia cepacia, Burkholderia fungorum, Burkholderia mallei, Campylobacter jejuni, Candida albicans, Candida glabrata (also called Torulopsis glabrata), Candida tropicalis, Candida parapsilosis, Candida guilliermondii, Candida krusei, Candida kefyr (also called Candida pseudotropicalis), Candida dubliniensis, Chlamydia pneumoniae, Chlamydia trachomatis, Clostridium acetobutylicum, Clostridium botulinum, Clostridium difficile, Clostridium perfringens, Coccidioides immitis, Corynebacterium diptheriae, Cryptococcus neoformans, Enterobacter cloacae, Enterococcus faecalis, Enterococcus faecium, Escherichia coli, Haemophilus influenzae, Helicobacter pylori, Histoplasma capsulatum, Klebsiella pneumoniae, Legionella pneumophila, Listeria monocytogenes, Moraxella catarrhalis, Mycobacterium avium, Mycobacterium bovis, Mycobacterium leprae, Mycobacterium tuberculosis, Mycoplasma genitalium, Mycoplasma pneumoniae, Neisseria gonorrhoeae, Neisseria meningitidis, Nocardia asteroides, Pasteurella haemolytica, Pasteurella multocida, Pneumocystis carinii, Proteus mirabilis, Proteus vulgaris, Pseudomonas aeruginosa, Pseudomonas putida, Pseudomonas syringae, Salmonella bongori, Salmonella cholerasuis, Salmonella enterica, Salmonella paratyphi, Salmonella typhi, Salmonella typhimurium, Shigella boydii, Shigella dysenteriae, Shigella flexneri, Shigella sonnei, Staphylococcus aureus, Staphylococcus epidermidis, Staphylococcus haemolyticus, Streptococcus pneumoniae, Streptococcus mutans, Streptococcus pyogenes, Treponema pallidum, Ureaplasma urealyticum, Vibrio cholerae, Vibrio parahaemolyticus, Vibrio vulnificans, Yersinia enterocolitica, Yersinia pestis and any species falling within the genera of any of the above species.

[0156] 119. The method of Paragraph 116, wherein said cell is not E. coli.

[0157] 120. The method of Paragraph 116, further comprising operably linking said antisense nucleic acid to a promoter which is functional in said cell, said promoter being included in a vector, and introducing said vector into said cell.

[0158] 121. A method for identifying a compound having the ability to inhibit proliferation of a cell comprising:

[0159] (a) identifying a homolog of a gene or gene product whose activity or level is inhibited by a nucleic acid comprising a nucleotide sequence selected from the group consisting of SEQ ID NOs. 1-6213 in a test cell, wherein said test cell is not the cell from which said nucleic acid was obtained;

[0160] (b) identifying an inhibitory nucleic acid sequence which inhibits the activity of said homolog in said test cell;

[0161] (c) contacting said test cell with a sublethal level of said inhibitory nucleic acid, thus sensitizing said cell;

[0162] (d) contacting the sensitized cell of step (c) with a compound; and

[0163] (e) determining the degree to which said compound inhibits proliferation of said sensitized cell relative to a cell which does not contain said inhibitory nucleic acid.

[0164] 122. The method of Paragraph 121, wherein said determining step comprises determining whether said compound inhibits proliferation of said sensitized test cell to a greater extent than said compound inhibits proliferation of a nonsensitized test cell.

[0165] 123. The method of Paragraph 121, wherein step (a) comprises identifying a nucleic acid homologous to a gene or gene product whose activity or level is inhibited by a nucleic acid selected from the group consisting of SEQ ID NOs.

[0166] 1-6213 or a nucleic acid encoding a homologous polypeptide to a polypeptide whose activity or level is inhibited by a nucleic acid selected from the group consisting of SEQ ID NOs. 1-6213 by using an algorithm selected from the group consisting of BLASTN version 2.0 with the default parameters and FASTA version 3.0t78 algorithm with the default parameters to identify said homologous nucleic acid or said nucleic acid encoding a homologous polypeptide in a database.

[0167] 124. The method of Paragraph 121 wherein said step (a) comprises identifying a homologous nucleic acid or a nucleic acid comprising a sequence of nucleotides encoding a homologous polypeptide by identifying nucleic acids which hybridize to said nucleic acid selected from the group consisting of SEQ ID NOs. 1-6213 or the complement of said nucleic acid selected from the group consisting of SEQ ID NOs. 1-6213.

[0168] 125. The method of Paragraph 121 wherein step (a) comprises expressing a nucleic acid selected from the group consisting of SEQ ID NOs. 1-6213 in said test cell.

[0169] 126. The method of Paragraph 121, wherein step (a) comprises identifying a homologous nucleic acid or a nucleic acid encoding a homologous polypeptide in a test cell selected from the group consisting of Acinetobacter baumannii, Anaplasma marginale, Aspergillus fumigatus, Bacillus anthracis, Bacteroides fragilis, Bordetella pertussis, Borrelia burgdorferi, Burkholderia cepacia, Burkholderia fungorum, Burkholderia mallei, Campylobacter jejuni, Candida albicans, Candida glabrata (also called Torulopsis glabrata), Candida tropicalis, Candida parapsilosis, Candida guilliermondii, Candida krusei, Candida kefyr (also called Candida pseudotropicalis), Candida dubliniensis, Chlamydia pneumoniae, Chlamydia trachomatis, Clostridium acetobutylicum, Clostridium botulinum, Clostridium difficile, Clostridium perfringens, Coccidioides immitis, Corynebacterium diptheriae, Cryptococcus neoformans, Enterobacter cloacae, Enterococcus faecalis, Enterococcus faecium, Escherichia coli, Haemophilus influenzae, Helicobacter pylori, Histoplasma capsulatum, Klebsiella pneumoniae, Legionella pneumophila, Listeria monocytogenes, Moraxella catarrhalis, Mycobacterium avium, Mycobacterium bovis, Mycobacterium leprae, Mycobacterium tuberculosis, Mycoplasma genitalium, Mycoplasma pneumoniae, Neisseria gonorrhoeae, Neisseria meningitidis, Nocardia asteroides, Pasteurella haemolytica, Pasteurella multocida, Pneumocystis carinii, Proteus mirabilis, Proteus vulgaris, Pseudomonas aeruginosa, Pseudomonas putida, Pseudomonas syringae, Salmonella bongori, Salmonella cholerasuis, Salmonella enterica, Salmonella paratyphi, Salmonella typhi, Salmonella typhimurium, Shigella boydii, Shigella dysenteriae, Shigella flexneri, Shigella sonnei, Staphylococcus aureus, Staphylococcus epidermidis, Staphylococcus haemolyticus, Streptococcus pneumoniae, Streptococcus mutans, Streptococcus pyogenes, Treponema pallidum, Ureaplasma urealyticum, Vibrio cholerae, Vibrio parahaemolyticus, Vibrio vulnificans, Yersinia enterocolitica, Yersinia pestis and any species failing within the genera of any of the above species.

[0170] 127. The method of Paragraph 121, wherein step (a) comprises identifying a homologous nucleic acid or a nucleic acid encoding a homologous polypeptide in a test cell other than E. coli.

[0171] 128. The method of Paragraph 121, wherein said inhibitory nucleic acid is an antisense nucleic acid.

[0172] 129. The method of Paragraph 121, wherein said inhibitory nucleic acid comprises an antisense nucleic acid to a portion of said homolog.

[0173] 130. The method of Paragraph 121, wherein said inhibitory nucleic acid comprises an antisense nucleic acid to a portion of the operon encoding said homolog.

[0174] 131. The method of Paragraph 121, wherein the step of contacting the cell with a sublethal level of said inhibitory nucleic acid comprises directly contacting the surface of said cell with said inhibitory nucleic acid.

[0175] 132. The method of Paragraph 121, wherein the step of contacting the cell with a sublethal level of said inhibitory nucleic acid comprises transcribing an antisense nucleic acid complementary to at least a portion of the RNA transcribed from said homolog in said cell.

[0176] 133. The method of Paragraph 121, wherein said gene product comprises a polypeptide comprising an amino acid sequence selected from the group consisting of SEQ ID NOs.: 42398-78581.

[0177] 134. The method of Paragraph 121, wherein said gene comprises a nucleotide sequence selected from the group consisting of SEQ ID NOS.: 6214-42397.

[0178] 135. A compound identified using the method of Paragraph 121.

[0179] 136. A method of identifying a compound having the ability to inhibit proliferation comprising:

[0180] (a) contacting a test cell with a sublethal level of a nucleic acid comprising a nucleotide sequence selected from the group consisting of SEQ ID NOs. 1-6213 or a portion thereof which inhibits the proliferation of the cell from which said nucleic acid was obtained, thus sensitizing said test cell;

[0181] (b) contacting the sensitized test cell of step (a) with a compound; and

[0182] (c) determining the degree to which said compound inhibits proliferation of said sensitized test cell relative to a cell which does not contain said nucleic acid.

[0183] 137. The method of Paragraph 136, wherein said determining step comprises determining whether said compound inhibits proliferation of said sensitized test cell to a greater extent than said compound inhibits proliferation of a nonsensitized test cell.

[0184] 138. A compound identified using the method of Paragraph 136.

[0185] 139. The method of Paragraph 136, wherein said test cell is selected from the group consisting of Acinetobacter baumannii, Anaplasma marginale, Aspergillus fumigatus, Bacillus anthracis, Bacteroides fragilis, Bordetella pertussis, Borrelia burgdorferi, Burkholderia cepacia, Burkholderia fungorum, Burkholderia mallei, Campylobacter jejuni, Candida albicans, Candida glabrata (also called Torulopsis glabrata), Candida tropicalis, Candida parapsilosis, Candida guilliermondii, Candida krusei, Candida kefyr (also called Candida pseudotropicalis), Candida dubliniensis, Chlamydia pneumoniae, Chlamydia trachomatis, Clostridium acetobutylicum, Clostridium botulinum, Clostridium difficile, Clostridium perfringens, Coccidioides immitis, Corynebacterium diptheriae, Cryptococcus neoformans, Enterobacter cloacae, Enterococcus faecalis, Enterococcus faecium, Escherichia coli, Haemophilus influenzae, Helicobacter pylori, Histoplasma capsulatum, Klebsiella pneumoniae, Legionella pneumophila, Listeria monocytogenes, Moraxella catarrhalis, Mycobacterium avium, Mycobacterium bovis, Mycobacterium leprae, Mycobacterium tuberculosis, Mycoplasma genitalium, Mycoplasma pneumoniae, Neisseria gonorrhoeae, Neisseria meningitidis, Nocardia asteroides, Pasteurella haemolytica, Pasteurella multocida, Pneumocystis carinii, Proteus mirabilis, Proteus vulgaris, Pseudomonas aeruginosa, Pseudomonas putida, Pseudomonas syringae, Salmonella bongori, Salmonella cholerasuis, Salmonella enterica, Salmonella paratyphi, Salmonella typhi, Salmonella typhimurium, Shigella boydii, Shigella dysenteriae, Shigella flexneri, Shigella sonnei, Staphylococcus aureus, Staphylococcus epidermidis, Staphylococcus haemolyticus, Streptococcus pneumoniae, Streptococcus mutans, Streptococcus pyogenes, Treponema pallidum, Ureaplasma urealyticum, Vibrio cholerae, Vibrio parahaemolyticus, Vibrio vulnificans, Yersinia enterocolitica, Yersinia pestis and any species falling within the genera of any of the above species.

[0186] 140. The method of Paragraph 136, wherein the test cell is not E. coli.

[0187] 141. A method for identifying a compound having activity against a biological pathway required for proliferation comprising:

[0188] (a) sensitizing a cell by providing a sublethal level of an antisense nucleic acid complementary to a nucleic acid encoding a gene product required for proliferation, wherein the activity or expression of said gene product is inhibited by an antisense nucleic acid comprising a nucleotide sequence selected from the group consisting of SEQ ID NOs.: 1-6213, in said cell to reduce the activity or amount of said gene product;

[0189] (b) contacting the sensitized cell with a compound; and

[0190] (c) determining the degree to which said compound inhibits the growth of said sensitized cell relative to a cell which does not contain said antisense nucleic acid.

[0191] 142. The method of Paragraph 141, wherein said determining step comprises determining whether said compound inhibits the growth of said sensitized cell to a greater extent than said compound inhibits the growth of a nonsensitized cell.

[0192] 143. The method of Paragraph 141, wherein said cell is selected from the group consisting of bacterial cells, fungal cells, plant cells, and animal cells.

[0193] 144. The method of Paragraph 141, wherein said cell is a Gram positive bacterium.

[0194] 145. The method of Paragraph 144, wherein said Gram positive bacterium is selected from the group consisting of Staphylococcus species, Streptococcus species, Enterococcus species, Mycobacterium species, Clostridium species, and Bacillus species.

[0195] 146. The method of Paragraph 145, wherein said Gram positive bacterium is Staphylococcus aureus.

[0196] 147. The method of Paragraph 146, wherein said Gram positive bacterium is selected from the group consisting of Staphylococcus aureus RN450 and Staphylococcus aureus RN4220.

[0197] 148. The method of Paragraph 141, wherein said cell is selected from the group consisting of Acinetobacter baumannii, Anaplasma marginale, Aspergillus fumigatus, Bacillus anthracis, Bacteroides fragilis, Bordetella pertussis, Borrelia burgdorferi, Burkholderia cepacia, Burkholderia fungorum, Burkholderia mallei, Campylobacter jejuni, Candida albicans, Candida glabrata (also called Torulopsis glabrata), Candida tropicalis, Candida parapsilosis, Candida guilliermondii, Candida krusei, Candida kefyr (also called Candida pseudotropicalis), Candida dubliniensis, Chlamydia pneumoniae, Chlamydia trachomatis, Clostridium acetobutylicum, Clostridium botulinum, Clostridium difficile, Clostridium perfringens, Coccidioides immitis, Corynebacterium diptheriae, Cryptococcus neoformans, Enterobacter cloacae, Enterococcus faecalis, Enterococcus faecium, Escherichia coli, Haemophilus influenzae, Helicobacter pylori, Histoplasma capsulatum, Klebsiella pneumoniae, Legionella pneumophila, Listeria monocytogenes, Moraxella catarrhalis, Mycobacterium avium, Mycobacterium bovis, Mycobacterium leprae, Mycobacterium tuberculosis, Mycoplasma genitalium, Mycoplasma pneumoniae, Neisseria gonorrhoeae, Neisseria meningitidis, Nocardia asteroides, Pasteurella haemolytica, Pasteurella multocida, Pneumocystis carinii, Proteus mirabilis, Proteus vulgaris, Pseudomonas aeruginosa, Pseudomonas putida, Pseudomonas syringae, Salmonella bongori, Salmonella cholerasuis, Salmonella enterica, Salmonella paratyphi, Salmonella typhi, Salmonella typhimurium, Shigella boydii, Shigella dysenteriae, Shigella flexneri, Shigella sonnei, Staphylococcus aureus, Staphylococcus epidermidis, Staphylococcus haemolyticus, Streptococcus pneumoniae, Streptococcus mutans, Streptococcus pyogenes, Treponema pallidum, Ureaplasma urealyticum, Vibrio cholerae, Vibrio parahaemolyticus, Vibrio vulnificans, Yersinia enterocolitica, Yersinia pestis and any species falling within the genera of any of the above species.

[0198] 149. The method of Paragraph 141, wherein said cell is not an E. coli cell.

[0199] 150. The method of Paragraph 141, wherein said gene product is from an organism other than E. coli.

[0200] 151. The method of Paragraph 141, wherein said antisense nucleic acid is transcribed from an inducible promoter.

[0201] 152. The method of Paragraph 141, further comprising contacting the cell with an agent which induces transcription of said antisense nucleic acid from said inducible promoter, wherein said antisense nucleic acid is transcribed at a sublethal level.

[0202] 153. The method of Paragraph 141, wherein inhibition of proliferation is measured by monitoring the optical density of a liquid culture.

[0203] 154. The method of Paragraph 141, wherein said gene product comprises a polypeptide comprising an amino acid sequence selected from the group consisting of SEQ ID NOs.: 42398-78581.

[0204] 155. The method of Paragraph 141, wherein said nucleic acid encoding said gene product comprises a nucleotide sequence selected from the group consisting of SEQ ID NOS.: 6214-42397.

[0205] 156. A compound identified using the method of Paragraph 141.

[0206] 157. A method for identifying a compound having the ability to inhibit cellular proliferation comprising:

[0207] (a) contacting a cell with an agent which reduces the activity or level of a gene product required for proliferation of said cell, wherein said gene product is a gene product whose activity or expression is inhibited by an antisense nucleic acid comprising a nucleotide sequence selected from the group consisting of SEQ ID NOs.: 1-6213;

[0208] (b) contacting said cell with a compound; and

[0209] (c) determining whether said compound reduces proliferation of said contacted cell by acting on said gene product.

[0210] 158. The method of Paragraph 157, wherein said determining step comprises determining whether said compound reduces proliferation of said contacted cell to a greater extent than said compound reduces proliferation of cells which have not been contacted with said agent.

[0211] 159. The method of Paragraph 157, wherein said cell is selected from the group consisting of Acinetobacter baumannii, Anaplasma marginale, Aspergillus fumigatus, Bacillus anthracis, Bacteroides fragilis, Bordetella pertussis, Borrelia burgdorferi, Burkholderia cepacia, Burkholderia fungorum, Burkholderia mallei, Campylobacter jejuni, Candida albicans, Candida glabrata (also called Torulopsis glabrata), Candida tropicalis, Candida parapsilosis, Candida guilliermondii, Candida krusei, Candida kefyr (also called Candida pseudotropicalis), Candida dubliniensis, Chlamydia pneumoniae, Chlamydia trachomatis, Clostridium acetobutylicum, Clostridium botulinum, Clostridium difficile, Clostridium perfringens, Coccidioides immitis, Corynebacterium diptheriae, Cryptococcus neoformans, Enterobacter cloacae, Enterococcus faecalis, Enterococcus faecium, Escherichia coli, Haemophilus influenzae, Helicobacter pylori, Histoplasma capsulatum, Klebsiella pneumoniae, Legionella pneumophila, Listeria monocytogenes, Moraxella catarrhalis, Mycobacterium avium, Mycobacterium bovis, Mycobacterium leprae, Mycobacterium tuberculosis, Mycoplasma genitalium, Mycoplasma pneumoniae, Neisseria gonorrhoeae, Neisseria meningitidis, Nocardia asteroides, Pasteurella haemolytica, Pasteurella multocida, Pneumocystis carinii, Proteus mirabilis, Proteus vulgaris, Pseudomonas aeruginosa, Pseudomonas putida, Pseudomonas syringae, Salmonella bongori, Salmonella cholerasuis, Salmonella enterica, Salmonella paratyphi, Salmonella typhi, Salmonella typhimurium, Shigella boydii, Shigella dysenteriae, Shigella flexneri, Shigella sonnei, Staphylococcus aureus, Staphylococcus epidermidis, Staphylococcus haemolyticus, Streptococcus pneumoniae, Streptococcus mutans, Streptococcus pyogenes, Treponema pallidum, Ureaplasma urealyticum, Vibrio cholerae, Vibrio parahaemolyticus, Vibrio vulnificans, Yersinia enterocolitica, Yersinia pestis and any species falling within the genera of any of the above species.

[0212] 160. The method of Paragraph 157, wherein said cell is not an E. coli cell.

[0213] 161. The method of Paragraph 157, wherein said gene product is from an organism other than E. coli.

[0214] 162. The method of Paragraph 157, wherein said agent which reduces the activity or level of a gene product required for proliferation of said cell comprises an antisense nucleic acid to a gene or operon required for proliferation.

[0215] 163. The method of Paragraph 157, wherein said agent which reduces the activity or level of a gene product required for proliferation of said cell comprises a compound known to inhibit growth or proliferation of a cell.

[0216] 164. The method of Paragraph 157, wherein said cell contains a mutation which reduces the activity or level of said gene product required for proliferation of said cell.

[0217] 165. The method of Paragraph 157, wherein said mutation is a temperature sensitive mutation.

[0218] 166. The method of Paragraph 157, wherein said gene product comprises a polypeptide comprising an amino acid sequence selected from the group consisting of SEQ ID NOs.: 42398-78581.

[0219] 167. A compound identified using the method of Paragraph 157.

[0220] 168. A method for identifying the biological pathway in which a proliferation-required gene or its gene product lies, wherein said gene or gene product comprises a gene or gene product whose activity or expression is inhibited by an antisense nucleic acid comprising a sequence selected from the group consisting of SEQ ID NOs.: 1-6213, said method comprising:

[0221] (a) providing a sublethal level of an antisense nucleic acid which inhibits the activity of said proliferation-required gene or gene product in a test cell;

[0222] (b) contacting said test cell with a compound known to inhibit growth or proliferation of a cell, wherein the biological pathway on which said compound acts is known; and

[0223] (c) determining the degree to which said proliferation of said test cell is inhibited relative to a cell which was not contacted with said compound.

[0224] 169. The method of Paragraph 168, wherein said determining step comprises determining whether said test cell has a substantially greater sensitivity to said compound than a cell which does not express said sublethal level of said antisense nucleic acid.

[0225] 170. The method of Paragraph 168, wherein said gene product comprises a polypeptide comprising an amino acid sequence selected from the group consisting of SEQ ID NOs.: 42398-78581.

[0226] 171. The method of Paragraph 168, wherein said test cell is selected from the group consisting of Acinetobacter baumannii, Anaplasma marginale, Aspergillus fumigatus, Bacillus anthracis, Bacteroides fragilis, Bordetella pertussis, Borrelia burgdorferi, Burkholderia cepacia, Burkholderia fungorum, Burkholderia mallei, Campylobacter jejuni, Candida albicans, Candida glabrata (also called Torulopsis glabrata), Candida tropicalis, Candida parapsilosis, Candida guilliermondii, Candida krusei, Candida kefyr (also called Candida pseudotropicalis), Candida dubliniensis, Chlamydia pneumoniae, Chlamydia trachomatis, Clostridium acetobutylicum, Clostridium botulinum, Clostridium difficile, Clostridium perfringens, Coccidioides immitis, Corynebacterium diptheriae, Cryptococcus neoformans, Enterobacter cloacae, Enterococcus faecalis, Enterococcus faecium, Escherichia coli, Haemophilus influenzae, Helicobacter pylori, Histoplasma capsulatum, Klebsiella pneumoniae, Legionella pneumophila, Listeria monocytogenes, Moraxella catarrhalis, Mycobacterium avium, Mycobacterium bovis, Mycobacterium leprae, Mycobacterium tuberculosis, Mycoplasma genitalium, Mycoplasma pneumoniae, Neisseria gonorrhoeae, Neisseria meningitidis, Nocardia asteroides, Pasteurella haemolytica, Pasteurella multocida, Pneumocystis carinii, Proteus mirabilis, Proteus vulgaris, Pseudomonas aeruginosa, Pseudomonas putida, Pseudomonas syringae, Salmonella bongori, Salmonella cholerasuis, Salmonella enterica, Salmonella paratyphi, Salmonella typhi, Salmonella typhimurium, Shigella boydii, Shigella dysenteriae, Shigella flexneri, Shigella sonnei, Staphylococcus aureus, Staphylococcus epidermidis, Staphylococcus haemolyticus, Streptococcus pneumoniae, Streptococcus mutans, Streptococcus pyogenes, Treponema pallidum, Ureaplasma urealyticum, Vibrio cholerae, Vibrio parahaemolyticus, Vibrio vulnificans, Yersinia enterocolitica, Yersinia pestis and any species falling within the genera of any of the above species.

[0227] 172. The method of Paragraph 168, wherein said test cell is not an E. coli cell.

[0228] 173. The method of Paragraph 168, wherein said gene product is from an organism other than E. coli.

[0229] 174. A method for determining the biological pathway on which a test compound acts comprising:

[0230] (a) providing a sublethal level of an antisense nucleic acid complementary to a proliferation-required nucleic acid in a first cell, wherein the activity or expression of said proliferation-required nucleic acid is inhibited by an antisense nucleic acid comprising a sequence selected from the group consisting of SEQ ID NOs.: 1-6213 and wherein the biological pathway in which said proliferation-required nucleic acid or a protein encoded by said proliferation-required nucleic acid lies is known,

[0231] (b) contacting said first cell with said test compound; and

[0232] (c) determining the degree to which said test compound inhibits proliferation of said first cell relative to a cell which does not contain said antisense nucleic acid.

[0233] 175. The method of Paragraph 174, wherein said determining step comprises determining whether said first cell has a substantially greater sensitivity to said test compound than a cell which does not express said sublethal level of said antisense nucleic acid.

[0234] 176. The method of Paragraph 174, further comprising:

[0235] (d) providing a sublethal level of a second antisense nucleic acid complementary to a second proliferation-required nucleic acid in a second cell, wherein said second proliferation-required nucleic acid is in a different biological pathway than said proliferation-required nucleic acid in step (a); and

[0236] (e) determining whether said second cell does not have a substantially greater sensitivity to said test compound than a cell which does not express said sublethal level of said second antisense nucleic acid, wherein said test compound is specific for the biological pathway against which the antisense nucleic acid of step (a) acts if said first cell has a substantially greater sensitivity to said test compound than said second cell.

[0237] 177. The method of Paragraph 174, wherein said first cell is selected from the group consisting of Acinetobacter baumannii, Anaplasma marginale, Aspergillus fumigatus, Bacillus anthracis, Bacteroides fragilis, Bordetella pertussis, Borrelia burgdorferi, Burkholderia cepacia, Burkholderia fungorum, Burkholderia mallei, Campylobacter jejuni, Candida albicans, Candida glabrata (also called Torulopsis glabrata), Candida tropicalis, Candida parapsilosis, Candida guilliermondii, Candida krusei, Candida kefyr (also called Candida pseudotropicalis), Candida dubliniensis, Chlamydia pneumoniae, Chlamydia trachomatis, Clostridium acetobutylicum, Clostridium botulinum, Clostridium difficile, Clostridium perfringens, Coccidioides immitis, Corynebacterium diptheriae, Cryptococcus neoformans, Enterobacter cloacae, Enterococcus faecalis, Enterococcus faecium, Escherichia coli, Haemophilus influenzae, Helicobacter pylori, Histoplasma capsulatum, Klebsiella pneumoniae, Legionella pneumophila, Listeria monocytogenes, Moraxella catarrhalis, Mycobacterium avium, Mycobacterium bovis, Mycobacterium leprae, Mycobacterium tuberculosis, Mycoplasma genitalium, Mycoplasma pneumoniae, Neisseria gonorrhoeae, Neisseria meningitidis, Nocardia asteroides, Pasteurella haemolytica, Pasteurella multocida, Pneumocystis carinii, Proteus mirabilis, Proteus vulgaris, Pseudomonas aeruginosa, Pseudomonas putida, Pseudomonas syringae, Salmonella bongori, Salmonella cholerasuis, Salmonella enterica, Salmonella paratyphi, Salmonella typhi, Salmonella typhimurium, Shigella boydii, Shigella dysenteriae, Shigella flexneri, Shigella sonnei, Staphylococcus aureus, Staphylococcus epidermidis, Staphylococcus haemolyticus, Streptococcus pneumoniae, Streptococcus mutans, Streptococcus pyogenes, Treponema pallidum, Ureaplasma urealyticum, Vibrio cholerae, Vibrio parahaemolyticus, Vibrio vulnificans, Yersinia enterocolitica, Yersinia pestis and any species falling within the genera of any of the above species.

[0238] 178. The method of Paragraph 174, wherein said first cell is not an E. coli cell.

[0239] 179. The method of Paragraph 174, wherein said proliferation-required nucleic acid is from an organism other than E. coli.

[0240] 180. A purified or isolated nucleic acid comprising a sequence selected from the group consisting of SEQ ID NOs.: 1-6213.

[0241] 181. A compound which interacts with a gene or gene product whose activity or expression is inhibited by an antisense nucleic acid comprising a nucleotide sequence of one of SEQ ID NOs.: 1-6213 to inhibit proliferation.

[0242] 182. The compound of Paragraph 181, wherein said gene product is a polypeptide comprising one of SEQ ID NOs.: 42398-78581.

[0243] 183. The compound of Paragraph 181, wherein said gene comprises a nucleotide sequence selected from the group consisting of SEQ ID NOS.: 6214-42397.

[0244] 184. A compound which interacts with a gene product whose expression is inhibited by an antisense nucleic acid comprising a nucleotide sequence of one of SEQ ID NOs.: 1-6213 to inhibit proliferation.

[0245] 185. A method for manufacturing an antibiotic comprising the steps of:

[0246] screening one or more candidate compounds to identify a compound that reduces the activity or level of a gene product required for proliferation, said gene product comprising a gene product whose activity or expression is inhibited by an antisense nucleic acid comprising a nucleotide sequence selected from the group consisting of SEQ ID NOs.: 1-6213; and

[0247] manufacturing the compound so identified.

[0248] 186. The method of Paragraph 185, wherein said screening step comprises performing any one of the methods of Paragraphs 44, 68, 121, 136, 141, and 157.

[0249] 187. The method of Paragraph 185, wherein said gene product is a polypeptide comprising one of SEQ ID NOs: 42398-78581.

[0250] 188. A method for inhibiting proliferation of a cell in a subject comprising administering an effective amount of a compound that reduces the activity or level of a gene product required for proliferation of said cell, said gene product comprising a gene product whose activity or expression is inhibited by an antisense nucleic acid comprising a nucleotide sequence selected from the group consisting of SEQ ID NOs.: 1-6213 to said subject.

[0251] 189. The method of Paragraph 188 wherein said subject is selected from the group consisting of vertebrates, mammals, avians, and human beings.

[0252] 190. The method of Paragraph 188, wherein said gene product comprises a polypeptide comprising an amino acid sequence selected from the group consisting of SEQ ID NOs.: 42398-78581.

[0253] 191. The method of Paragraph 188, wherein said cell is selected from the group consisting of Acinetobacter baumannii, Anaplasma marginale, Aspergillus fumigatus, Bacillus anthracis, Bacteroides fragilis, Bordetella pertussis, Borrelia burgdorferi, Burkholderia cepacia, Burkholderia fungorum, Burkholderia mallei, Campylobacter jejuni, Candida albicans, Candida glabrata (also called Torulopsis glabrata), Candida tropicalis, Candida parapsilosis, Candida guilliermondii, Candida krusei, Candida kefyr (also called Candida pseudotropicalis), Candida dubliniensis, Chlamydia pneumoniae, Chlamydia trachomatis, Clostridium acetobutylicum, Clostridium botulinum, Clostridium difficile, Clostridium perfringens, Coccidioides immitis, Corynebacterium diptheriae, Cryptococcus neoformans, Enterobacter cloacae, Enterococcus faecalis, Enterococcus faecium, Escherichia coli, Haemophilus influenzae, Helicobacter pylori, Histoplasma capsulatum, Klebsiella pneumoniae, Legionella pneumophila, Listeria monocytogenes, Moraxella catarrhalis, Mycobacterium avium, Mycobacterium bovis, Mycobacterium leprae, Mycobacterium tuberculosis, Mycoplasma genitalium, Mycoplasma pneumoniae, Neisseria gonorrhoeae, Neisseria meningitidis, Nocardia asteroides, Pasteurella haemolytica, Pasteurella multocida, Pneumocystis carinii, Proteus mirabilis, Proteus vulgaris, Pseudomonas aeruginosa, Pseudomonas putida, Pseudomonas syringae, Salmonella bongori, Salmonella cholerasuis, Salmonella enterica, Salmonella paratyphi, Salmonella typhi, Salmonella typhimurium, Shigella boydii, Shigella dysenteriae, Shigella flexneri, Shigella sonnei, Staphylococcus aureus, Staphylococcus epidermidis, Staphylococcus haemolyticus, Streptococcus pneumoniae, Streptococcus mutans, Streptococcus pyogenes, Treponema pallidum, Ureaplasma urealyticum, Vibrio cholerae, Vibrio parahaemolyticus, Vibrio vulnificans, Yersinia enterocolitica, Yersinia pestis and any species falling within the genera of any of the above species.

[0254] 192. The method of Paragraph 188, wherein said cell is not E. coli. 193. The method of Paragraph 188, wherein said gene product is from an organism other than E. coli.

[0255] 194. A purified or isolated nucleic acid consisting essentially of the coding sequence of one of SEQ ID NOs: 6214-42397.

[0256] 195. A fragment of the nucleic acid of Paragraph 194, said fragment comprising at least 10, at least 20, at least 25, at least 30, at least 50 or more than 50 consecutive nucleotides of one of SEQ ID NOs: 6214-42397.

[0257] 196. A purified or isolated nucleic acid comprising a nucleic acid having at least 70% nucleotide sequence identity to a nucleotide sequence selected from the group consisting of SEQ ID NOs.: 6214-42397, fragments comprising at least 25 consecutive nucleotides of SEQ ID NOs.: 6214-42397, the nucleotide sequences complementary to SEQ ID NOs.: 6214-42397, and the nucleotide sequences complementary to fragments comprising at least 25 consecutive nucleotides of SEQ ID NOs.: 6214-42397 as determined using BLASTN version 2.0 with the default parameters.

[0258] 197. The nucleic acid of Paragraph 196, wherein said nucleic acid is from an organism selected from the group consisting of Acinetobacter baumannii, Anaplasma marginale, Aspergillus fumigatus, Bacillus anthracis, Bacteroides fragilis, Bordetella pertussis, Borrelia burgdorferi, Burkholderia cepacia, Burkholderia fungorum, Burkholderia mallei, Campylobacter jejuni, Candida albicans, Candida glabrata (also called Torulopsis glabrata), Candida tropicalis, Candida parapsilosis, Candida guilliermondii, Candida krusei, Candida kefyr (also called Candida pseudotropicalis), Candida dubliniensis, Chlamydia pneumoniae, Chlamydia trachomatis, Clostridium acetobutylicum, Clostridium botulinum, Clostridium difficile, Clostridium perfringens, Coccidioides immitis, Corynebacterium diptheriae, Cryptococcus neoformans, Enterobacter cloacae, Enterococcus faecalis, Enterococcus faecium, Escherichia coli, Haemophilus influenzae, Helicobacter pylori, Histoplasma capsulatum, Klebsiella pneumoniae, Legionella pneumophila, Listeria monocytogenes, Moraxella catarrhalis, Mycobacterium avium, Mycobacterium bovis, Mycobacterium leprae, Mycobacterium tuberculosis, Mycoplasma genitalium, Mycoplasma pneumoniae, Neisseria gonorrhoeae, Neisseria meningitidis, Nocardia asteroides, Pasteurella haemolytica, Pasteurella multocida, Pneumocystis carinii, Proteus mirabilis, Proteus vulgaris, Pseudomonas aeruginosa, Pseudomonas putida, Pseudomonas syringae, Salmonella bongori, Salmonella cholerasuis, Salmonella enterica, Salmonella paratyphi, Salmonella typhi, Salmonella typhimurium, Shigella boydii, Shigella dysenteriae, Shigella flexneri, Shigella sonnei, Staphylococcus aureus, Staphylococcus epidermidis, Staphylococcus haemolyticus, Streptococcus pneumoniae, Streptococcus mutans, Streptococcus pyogenes, Treponema pallidum, Ureaplasma urealyticum, Vibrio cholerae, Vibrio parahaemolyticus, Vibrio vulnificans, Yersinia enterocolitica, Yersinia pestis and any species falling within the genera of any of the above species.

[0259] 198. The nucleic acid of Paragraph 196, wherein said nucleic acid is from an organism other than E. coli.

[0260] 199. A method of inhibiting proliferation of a cell comprising inhibiting the activity or reducing the amount of a gene product in said cell or inhibiting the activity or reducing the amount of a nucleic acid encoding said gene product in said cell, wherein said gene product is selected from the group consisting of a gene product having having at least 70% nucleotide sequence identity as determined using BLASTN version 2.0 with the default parameters to a gene product whose expression is inhibited by an antisense nucleic acid comprising a nucleotide sequence selected from the group consisting of SEQ ID NOs.: 1-6213, a gene product encoded by a nucleic acid having at least 70% nucleotide sequence identity as determined using BLASTN version 2.0 with the default parameters to a nucleic acid encoding a gene product whose expression is inhibited by an antisense nucleic acid comprising a nucleotide sequence selected from the group consisting of SEQ ID NOs: 1-6213, a gene product having at least 25% amino acid identity as determined using FASTA version 3.0t78 with the default parameters to a gene product whose expression is inhibited by an antisense nucleic acid comprising a nucleotide sequence selected from the group consisting of SEQ ID NOs.: 1-6213, a gene product encoded by a nucleic acid which hybridizes to a nucleic acid comprising a nucleotide sequence selected from the group consisting of SEQ ID NOs.: 1-6213 under stringent conditions, a gene product encoded by a nucleic acid which hybridizes to a nucleic acid comprising a nucleotide sequence selected from the group consisting of SEQ ID NOs.: 1-6213 under moderate conditions, and a gene product whose activity may be complemented by the gene product whose activity is inhibited by a nucleic acid comprising a nucleotide sequence selected from the group consisting of SEQ ID NOs: 1-6213.

[0261] 200. The method of Paragraph 199, wherein said method comprises inhibiting said activity or reducing said amount of said gene product or inhibiting the activity or reducing the amount of a nucleic acid encoding said gene product in an organism selected from the group consisting of Acinetobacter baumannii, Anaplasma marginale, Aspergillus fumigatus, Bacillus anthracis, Bacteroides fragilis, Bordetella pertussis, Borrelia burgdorferi, Burkholderia cepacia, Burkholderia fungorum, Burkholderia mallei, Campylobacter jejuni, Candida albicans, Candida glabrata (also called Torulopsis glabrata), Candida tropicalis, Candida parapsilosis, Candida guilliermondii, Candida krusei, Candida kefyr (also called Candida pseudotropicalis), Candida dubliniensis, Chlamydia pneumoniae, Chlamydia trachomatis, Clostridium acetobutylicum, Clostridium botulinum, Clostridium difficile, Clostridium perfringens, Coccidioides immitis, Corynebacterium diptheriae, Cryptococcus neoformans, Enterobacter cloacae, Enterococcus faecalis, Enterococcus faecium, Escherichia coli, Haemophilus influenzae, Helicobacter pylori, Histoplasma capsulatum, Klebsiella pneumoniae, Legionella pneumophila, Listeria monocytogenes, Moraxella catarrhalis, Mycobacterium avium, Mycobacterium bovis, Mycobacterium leprae, Mycobacterium tuberculosis, Mycoplasma genitalium, Mycoplasma pneumoniae, Neisseria gonorrhoeae, Neisseria meningitidis, Nocardia asteroides, Pasteurella haemolytica, Pasteurella multocida, Pneumocystis carinii, Proteus mirabilis, Proteus vulgaris, Pseudomonas aeruginosa, Pseudomonas putida, Pseudomonas syringae, Salmonella bongori, Salmonella cholerasuis, Salmonella enterica, Salmonella paratyphi, Salmonella typhi, Salmonella typhimurium, Shigella boydii, Shigella dysenteriae, Shigella flexneri, Shigella sonnei, Staphylococcus aureus, Staphylococcus epidermidis, Staphylococcus haemolyticus, Streptococcus pneumoniae, Streptococcus mutans, Streptococcus pyogenes, Treponema pallidum, Ureaplasma urealyticum, Vibrio cholerae, Vibrio parahaemolyticus, Vibrio vulnificans, Yersinia enterocolitica, Yersinia pestis and any species falling within the genera of any of the above species.

[0262] 201. The method of Paragraph 199, wherein said method comprises inhibiting said activity or reducing said amount of said gene product or inhibiting the activity or reducing the amount of a nucleic acid encoding said gene product in an organism other than E. coli.

[0263] 202. The method of Paragraph 199, wherein said gene product is from an organism other than E. coli.

[0264] 203. The method of Paragraph 199, wherein said gene product comprises a polypeptide selected from the group consisting of a polypeptide having at least 25% amino acid identity as determined using FASTA version 3.0t78 to a polypeptide selected from the group consisting of SEQ ID NOs.: 42398-78581 and a polypeptide whose activity may be complemented by a polypeptide selected from the group consisting of SEQ ID NOs: 42398-78581.

[0265] 204. The method of Paragraph 199, wherein said gene product is encoded by a nucleic acid selected from the group consisting of a nucleic acid comprising a nucleic acid having at least 70% nucleotide sequence identity as determined using BLASTN version 2.0 with the default parameters to a nucleotide sequence selected from the group consisting of SEQ ID NOS.: 6214-42397, a nucleic acid comprising a nucleotide sequence which hybridizes to a sequence selected from the group consisting of SEQ ID NOS.: 6214-42397 under stringent conditions, and a nucleic acid comprising a nucloetide sequence which hybridizes to a nucleotide sequence selected from the group consisting of SEQ ID NOS.: 6214-42397 under moderate condtions.

[0266] 205. A method for identifying a compound which influences the activity of a gene product required for proliferation comprising:

[0267] contacting a candidate compound with a gene product selected from the group consisting of a gene product having at least 70% nucleotide sequence identity as determined using BLASTN version 2.0 with the default parameters to a gene product whose expression is inhibited by an antisense nucleic acid comprising a nucleotide sequence selected from the group consisting of SEQ ID NOs.: 1-6213, a gene product encoded by a nucleic acid having at least 70% nucleotide sequence identity as determined using BLASTN version 2.0 with the default parameters to a nucleic acid encoding a gene product whose expression is inhibited by an antisense nucleic acid comprising a nucleotide sequence selected from the group consisting of SEQ ID NOs: 1-6213, a gene product having at least 25% amino acid identity as determined using FASTA version 3.0t78 with the default parameters to a gene product whose expression is inhibited by an antisense nucleic acid comprising a nucleotide sequence selected from the group consisting of SEQ ID NOs.: 1-6213, a gene product encoded by a nucleic acid comprising a nucleotide sequence which hybridizes to a nucleic acid selected from the group consisting of SEQ ID NOs.: 1-6213 under stringent conditions, a gene product encoded by a nucleic acid comprising a nucleotide sequence which hybridizes to a nucleic acid selected from the group consisting of SEQ ID NOs.: 1-6213 under moderate conditions, and a gene product whose activity may be complemented by the gene product whose activity is inhibited by a nucleic acid selected from the group consisting of SEQ ID NOs: 1-6213; and

[0268] determining whether said candidate compound influences the activity of said gene product.

[0269] 206. The method of Paragraph 205, wherein said gene product is from an organism selected from the group consisting of Acinetobacter baumannii, Anaplasma marginale, Aspergillus fumigatus, Bacillus anthracis, Bacteroides fragilis, Bordetella pertussis, Borrelia burgdorferi, Burkholderia cepacia, Burkholderia fungorum, Burkholderia mallei, Campylobacter jejuni, Candida albicans, Candida glabrata (also called Torulopsis glabrata), Candida tropicalis, Candida parapsilosis, Candida guilliermondii, Candida krusei, Candida kefyr (also called Candida pseudotropicalis), Candida dubliniensis, Chlamydia pneumoniae, Chlamydia trachomatis, Clostridium acetobutylicum, Clostridium botulinum, Clostridium difficile, Clostridium perfringens, Coccidioides immitis, Corynebacterium diptheriae, Cryptococcus neoformans, Enterobacter cloacae, Enterococcus faecalis, Enterococcus faecium, Escherichia coli, Haemophilus influenzae, Helicobacter pylori, Histoplasma capsulatum, Klebsiella pneumoniae, Legionella pneumophila, Listeria monocytogenes, Moraxella catarrhalis, Mycobacterium avium, Mycobacterium bovis, Mycobacterium leprae, Mycobacterium tuberculosis, Mycoplasma genitalium, Mycoplasma pneumoniae, Neisseria gonorrhoeae, Neisseria meningitidis, Nocardia asteroides, Pasteurella haemolytica, Pasteurella multocida, Pneumocystis carinii, Proteus mirabilis, Proteus vulgaris, Pseudomonas aeruginosa, Pseudomonas putida, Pseudomonas syringae, Salmonella bongori, Salmonella cholerasuis, Salmonella enterica, Salmonella paratyphi, Salmonella typhi, Salmonella typhimurium, Shigella boydii, Shigella dysenteriae, Shigella flexneri, Shigella sonnei, Staphylococcus aureus, Staphylococcus epidermidis, Staphylococcus haemolyticus, Streptococcus pneumoniae, Streptococcus mutans, Streptococcus pyogenes, Treponema pallidum, Ureaplasma urealyticum, Vibrio cholerae, Vibrio parahaemolyticus, Vibrio vulnificans, Yersinia enterocolitica, Yersinia pestis and any species falling within the genera of any of the above species.

[0270] 207. The method of Paragraph 205, wherein said gene product is from an organism other than E. coli.

[0271] 208. The method of Paragraph 205, wherein said gene product is a polypeptide selected from the group consisting of a polypeptide having at least 25% amino acid identity as determined using FASTA version 3.0t78 to a polypeptide selected from the group consisting of SEQ ID NOs.: 42398-78581 and a polypeptide whose activity may be complemented by a polypeptide selected from the group consisting of SEQ ID NOs: 42398-78581.

[0272] 209. The method of Paragraph 205, wherein said gene product is encoded by a nucleic acid selected from the group consisting of a nucleic acid comprising a nucleic acid having at least 70% nucleotide sequence identity as determined using BLASTN version 2.0 with the default parameters to a nucleotide sequence selected from the group consisting of SEQ ID NOS.: 6214-42397, a nucleic acid which hybridizes to a sequence selected from the group consisting of SEQ ID NOS.: 6214-42397 under stringent conditions, and a nucleic acid which hybridizes to a sequence selected from the group consisting of SEQ ID NOS.: 6214-42397 under moderate condtions.

[0273] 210. A compound identified using the method of Paragraph 205.

[0274] 211. A method for identifying a compound or nucleic acid having the ability to reduce the activity or level of a gene product required for proliferation comprising:

[0275] (a) providing a target that is a gene or RNA, wherein said target comprises a nucleic acid that encodes a gene product selected from the group consisting of a gene product having having at least 70% nucleotide sequence identity as determined using BLASTN version 2.0 with the default parameters to a gene product whose expression is inhibited by an antisense nucleic acid comprising a nucleotide sequence selected from the group consisting of SEQ ID NOs.: 1-6213, a gene product encoded by a nucleic acid having at least 70% nucleic acid identity as determined using BLASTN version 2.0 with the default parameters to a nucleic acid encoding a gene product whose expression is inhibited by an antisense nucleic acid comprising a nucleotide sequence selected from the group consisting of SEQ ID NOs: 1-6213, a gene product having at least 25% amino acid identity as determined using FASTA version 3.0t78 with the default parameters to a gene product whose expression is inhibited by an antisense nucleic acid comprising a sequence selected from the group consisting of SEQ ID NOs.: 1-6213, a gene product encoded by a nucleic acid comprising a nucleotide sequence which hybridizes to a nucleic acid selected from the group consisting of SEQ ID NOs.: 1-6213 under stringent conditions, a gene product encoded by a nucleic acid comprising a nucleotide sequence which hybridizes to a nucleic acid selected from the group consisting of SEQ ID NOs.: 1-6213 under moderate conditions, and a gene product whose activity may be complemented by the gene product whose activity is inhibited by a nucleic acid selected from the group consisting of SEQ ID NOs: 1-6213;

[0276] (b) contacting said target with a candidate compound or nucleic acid; and

[0277] (c) measuring an activity of said target.

[0278] 212. The method of Paragraph 211, wherein said target gene or RNA is from an organism selected from the group consisting of Acinetobacter baumannii, Anaplasma marginale, Aspergillus fumigatus, Bacillus anthracis, Bacteroides fragilis, Bordetella pertussis, Borrelia burgdorferi, Burkholderia cepacia, Burkholderia fungorum, Burkholderia mallei, Campylobacter jejuni, Candida albicans, Candida glabrata (also called Torulopsis glabrata), Candida tropicalis, Candida parapsilosis, Candida guilliermondii, Candida krusei, Candida kefyr (also called Candida pseudotropicalis), Candida dubliniensis, Chlamydia pneumoniae, Chlamydia trachomatis, Clostridium acetobutylicum, Clostridium botulinum, Clostridium difficile, Clostridium perfringens, Coccidioides immitis, Corynebacterium diptheriae, Cryptococcus neoformans, Enterobacter cloacae, Enterococcus faecalis, Enterococcus faecium, Escherichia coli, Haemophilus influenzae, Helicobacter pylori, Histoplasma capsulatum, Klebsiella pneumoniae, Legionella pneumophila, Listeria monocytogenes, Moraxella catarrhalis, Mycobacterium avium, Mycobacterium bovis, Mycobacterium leprae, Mycobacterium tuberculosis, Mycoplasma genitalium, Mycoplasma pneumoniae, Neisseria gonorrhoeae, Neisseria meningitidis, Nocardia asteroides, Pasteurella haemolytica, Pasteurella multocida, Pneumocystis carinii, Proteus mirabilis, Proteus vulgaris, Pseudomonas aeruginosa, Pseudomonas putida, Pseudomonas syringae, Salmonella bongori, Salmonella cholerasuis, Salmonella enterica, Salmonella paratyphi, Salmonella typhi, Salmonella typhimurium, Shigella boydii, Shigella dysenteriae, Shigella flexneri, Shigella sonnei, Staphylococcus aureus, Staphylococcus epidermidis, Staphylococcus haemolyticus, Streptococcus pneumoniae, Streptococcus mutans, Streptococcus pyogenes, Treponema pallidum, Ureaplasma urealyticum, Vibrio cholerae, Vibrio parahaemolyticus, Vibrio vulnificans, Yersinia enterocolitica, Yersinia pestis and any species falling within the genera of any of the above species.

[0279] 213. The method of Paragraph 211, wherein said target gene or RNA is from an organism other than E. coli.

[0280] 214. The method of Paragraph 211, wherein said gene product is from an organism other than E. coli.

[0281] 215. The method of Paragraph 211, wherein said target is a messenger RNA molecule and said activity is translation of said messenger RNA.

[0282] 216. The method of Paragraph 211, wherein said compound is a nucleic acid and said activity is translation of said gene product.

[0283] 217. The method of Paragraph 211, wherein said target is a gene and said activity is transcription of said gene.

[0284] 218. The method of Paragraph 211, wherein said target is a nontranslated RNA and said activity is processing or folding of said nontranslated RNA or assembly of said nontranslated RNA into a protein/RNA complex.

[0285] 219. The method of Paragraph 211, wherein said target gene is a messenger RNA molecule encoding a polypeptide selected from the group consisting of a polypeptide having at least 25% amino acid identity as determined using FASTA version 3.0t78 to a polypeptide selected from the group consisting of SEQ ID NOs.: 42398-78581 and a polypeptide whose activity may be complemented by a polypeptide selected from the group consisting of SEQ ID NOs: 42398-78581.

[0286] 220. The method of Paragraph 11, wherein said target gene comprises a nucleic acid selected from the group consisting of a nucleic acid comprising a nucleic acid having at least 70% nucleotide sequence identity as determined using BLASTN version 2.0 with the default parameters to a nucleotide sequence selected from the group consisting of SEQ ID NOS.: 6214-42397, a nucleic acid which hybridizes to a sequence selected from the group consisting of SEQ ID NOS.: 6214-42397 under stringent conditions, and a nucleic acid which hybridizes to a sequence selected from the group consisting of SEQ ID NOS.: 6214-42397 under moderate condtions.

[0287] 221. A compound or nucleic acid identified using the method of Paragraph 211.

[0288] 222. A method for identifying a compound which reduces the activity or level of a gene product required for proliferation of a cell comprising:

[0289] (a) providing a sublethal level of an antisense nucleic acid complementary to a nucleic acid encoding said gene product in a cell to reduce the activity or amount of said gene product in said cell, thereby producing a sensitized cell, wherein said gene product is selected from the group consisting of a gene product having having at least 70% nucleic acid identity as determined using BLASTN version 2.0 with the default parameters to a gene product whose expression is inhibited by an antisense nucleic acid comprising a nucleotide sequence selected from the group consisting of SEQ ID NOs.: 1-6213, a gene product encoded by a nucleic acid having at least 70% nucleotide sequence identity as determined using BLASTN version 2.0 with the default parameters to a nucleic acid encoding a gene product whose expression is inhibited by an antisense nucleic acid comprising a nucleotide sequence selected from the group consisting of SEQ ID NOs: 1-6213, a gene product having at least 25% amino acid identity as determined using FASTA version 3.0t78 with the default parameters to a gene product whose expression is inhibited by an antisense nucleic acid comprising a nucleotide sequence selected from the group consisting of SEQ ID NOs.: 1-6213, a gene product encoded by a nucleic acid comprising a nucleotide sequence which hybridizes to a nucleic acid selected from the group consisting of SEQ ID NOs.: 1-6213 under stringent conditions, a gene product encoded by a nucleic acid comprising a nucleotide sequence which hybridizes to a nucleic acid comprising a nucleotide sequence selected from the group consisting of SEQ ID NOs.: 1-6213 under moderate conditions, and a gene product whose activity may be complemented by the gene product whose activity is inhibited by a nucleic acid selected from the group consisting of SEQ ID NOs: 1-6213;

[0290] (b) contacting said sensitized cell with a compound; and

[0291] (c) determining the degree to which said compound inhibits the growth of said sensitized cell relative to a cell which does not contain said antisense nucleic acid.

[0292] 223. The method of Paragraph 222, wherein said determining step comprises determining whether said compound inhibits the growth of said sensitized cell to a greater extent than said compound inhibits the growth of a nonsensitized cell.

[0293] 224. The method of Paragraph 222, wherein said sensitized cell is a Gram positive bacterium.

[0294] 225. The method of Paragraph 224, wherein said Gram positive bacterium is selected from the group consisting of Staphylococcus species, Streptococcus species, Enterococcus species, Mycobacterium species, Clostridium species, and Bacillus species.

[0295] 226. The method of Paragraph 225, wherein said bacterium is Staphylococcus aureus.

[0296] 227. The method of Paragraph 224, wherein said Staphylococcus species is coagulase negative.

[0297] 228. The method of Paragraph 226, wherein said bacterium is selected from the group consisting of Staphylococcus aureus RN450 and Staphylococcus aureus RN4220.

[0298] 229. The method of Paragraph 222, wherein said sensitized cell is an organism selected from the group consisting of Acinetobacter baumannii, Anaplasma marginale, Aspergillus fumigatus, Bacillus anthracis, Bacteroides fragilis, Bordetella pertussis, Borrelia burgdorferi, Burkholderia cepacia, Burkholderia fungorum, Burkholderia mallei, Campylobacter jejuni, Candida albicans, Candida glabrata (also called Torulopsis glabrata), Candida tropicalis, Candida parapsilosis, Candida guilliermondii, Candida krusei, Candida kefyr (also called Candida pseudotropicalis), Candida dubliniensis, Chlamydia pneumoniae, Chlamydia trachomatis, Clostridium acetobutylicum, Clostridium botulinum, Clostridium difficile, Clostridium perfringens, Coccidioides immitis, Corynebacterium diptheriae, Cryptococcus neoformans, Enterobacter cloacae, Enterococcus faecalis, Enterococcus faecium, Escherichia coli, Haemophilus influenzae, Helicobacter pylori, Histoplasma capsulatum, Klebsiella pneumoniae, Legionella pneumophila, Listeria monocytogenes, Moraxella catarrhalis, Mycobacterium avium, Mycobacterium bovis, Mycobacterium leprae, Mycobacterium tuberculosis, Mycoplasma genitalium, Mycoplasma pneumoniae, Neisseria gonorrhoeae, Neisseria meningitidis, Nocardia asteroides, Pasteurella haemolytica, Pasteurella multocida, Pneumocystis carinii, Proteus mirabilis, Proteus vulgaris, Pseudomonas aeruginosa, Pseudomonas putida, Pseudomonas syringae, Salmonella bongori, Salmonella cholerasuis, Salmonella enterica, Salmonella paratyphi, Salmonella typhi, Salmonella typhimurium, Shigella boydii, Shigella dysenteriae, Shigella flexneri, Shigella sonnei, Staphylococcus aureus, Staphylococcus epidermidis, Staphylococcus haemolyticus, Streptococcus pneumoniae, Streptococcus mutans, Streptococcus pyogenes, Treponema pallidum, Ureaplasma urealyticum, Vibrio cholerae, Vibrio parahaemolyticus, Vibrio vulnificans, Yersinia enterocolitica, Yersinia pestis and any species falling within the genera of any of the above species.

[0299] 230. The method of Paragraph 222, wherein said cell is an organism other than E. coli.

[0300] 231. The method of Paragraph 222, wherein said gene product is from an organism other than E. coli.

[0301] 232. The method of Paragraph 222, wherein said antisense nucleic acid is transcribed from an inducible promoter.

[0302] 233. The method of Paragraph 222, further comprising the step of contacting said cell with a concentration of inducer which induces transcription of said antisense nucleic acid to a sublethal level.

[0303] 234. The method of Paragraph 222, wherein growth inhibition is measured by monitoring optical density of a culture medium.

[0304] 235. The method of Paragraph 222, wherein said gene product is a polypeptide.

[0305] 236. The method of Paragraph 235, wherein said polypeptide comprises a polypeptide selected from the group consisting of a polypeptide having at least 25% amino acid identity as determined using FASTA version 3.0t78 to a polypeptide selected from the group consisting of SEQ ID NOs.: 42398-78581 and a polypeptide whose activity may be complemented by a polypeptide selected from the group consisting of SEQ ID NOs: 42398-78581.

[0306] 237. The method of Paragraph 222, wherein said gene product is an RNA.

[0307] 238. The method of Paragraph 222, wherein said nucleic acid encoding said gene product comprises a nucleic acid selected from the group consisting of a nucleic acid comprising a nucleic acid having at least 70% nucleic acid identity as determined using BLASTN version 2.0 with the default parameters to a sequence selected from the group consisting of SEQ ID NOS.: 6214-42397, a nucleic acid which hybridizes to a sequence selected from the group consisting of SEQ ID NOS.: 6214-42397 under stringent conditions, and a nucleic acid which hybridizes to a sequence selected from the group consisting of SEQ ID NOS.: 6214-42397 under moderate condtions.

[0308] 239. A compound identified using the method of Paragraph 222.

[0309] 240. A method for inhibiting cellular proliferation comprising introducing a compound with activity against a gene product or a compound with activity against a gene encoding said gene product into a population of cells expressing said gene product, wherein said gene product is selected from the group consisting of a gene product having at least 70% nucleotide sequence identity as determined using BLASTN version 2.0 with the default parameters to a gene product whose expression is inhibited by an antisense nucleic acid comprising a nucleotide sequence selected from the group consisting of SEQ ID NOs.: 1-6213, a gene product encoded by a nucleic acid having at least 70% nucleotide sequence identity as determined using BLASTN version 2.0 with the default parameters to a nucleic acid encoding a gene product whose expression is inhibited by an antisense nucleic acid comprising a nucleotide sequence selected from the group consisting of SEQ ID NOs: 1-6213, a gene product having at least 25% amino acid identity as determined using FASTA version 3.0t78 with the default parameters to a gene product whose expression is inhibited by an antisense nucleic acid comprising a nucleotide sequence selected from the group consisting of SEQ ID NOs.: 1-6213, a gene product encoded by a nucleic acid comprising a nucleotide sequence which hybridizes to a nucleic acid selected from the group consisting of SEQ ID NOs.: 1-6213 under stringent conditions, a gene product encoded by a nucleic acid comprising a nucleotide sequence which hybridizes to a nucleic acid selected from the group consisting of SEQ ID NOs.: 1-6213 under moderate conditions, and a gene product whose activity may be complemented by the gene product whose activity is inhibited by a nucleic acid selected from the group consisting of SEQ ID NOs: 1-6213.

[0310] 241. The method of Paragraph 240, wherein said compound is an antisense nucleic acid comprising a nucleotide sequence selected from the group consisting of SEQ ID NOs.: 1-6213, or a proliferation-inhibiting portion thereof.

[0311] 242. The method of Paragraph 240, wherein said proliferation inhibiting portion of one of SEQ ID NOs.: 1-6213 is a fragment comprising at least 10, at least 20, at least 25, at least 30, at least 50 or more than 51 consecutive nucleotides of one of SEQ ID NOs.: 1-6213.

[0312] 243. The method of Paragraph 240, wherein said population is a population of Gram positive bacteria.

[0313] 244. The method of Paragraph 243, wherein said population of Gram positive bacteria is selected from the group consisting of a population of Staphylococcus species, Streptococcus species, Enterococcus species, Mycobacterium species, Clostridium species, and Bacillus species.

[0314] 245. The method of Paragraph 243, wherein said population is a population of Staphylococcus aureus.

[0315] 246. The method of Paragraph 245, wherein said population is a population of a bacterium selected from the group consisting of Staphylococcus aureus RN450 and Staphylococcus aureus RN4220.

[0316] 247. The method of Paragraph 240, wherein said population is a population of a bacterium selected from the group consisting of Acinetobacter baumannii, Anaplasma marginale, Aspergillus fumigatus, Bacillus anthracis, Bacteroides fragilis, Bordetella pertussis, Borrelia burgdorferi, Burkholderia cepacia, Burkholderia fungorum, Burkholderia mallei, Campylobacter jejuni, Candida albicans, Candida glabrata (also called Torulopsis glabrata), Candida tropicalis, Candida parapsilosis, Candida guilliermondii, Candida krusei, Candida kefyr (also called Candida pseudotropicalis), Candida dubliniensis, Chlamydia pneumoniae, Chlamydia trachomatis, Clostridium acetobutylicum, Clostridium botulinum, Clostridium difficile, Clostridium perfringens, Coccidioides immitis, Corynebacterium diptheriae, Cryptococcus neoformans, Enterobacter cloacae, Enterococcus faecalis, Enterococcus faecium, Escherichia coli, Haemophilus influenzae, Helicobacter pylori, Histoplasma capsulatum, Klebsiella pneumoniae, Legionella pneumophila, Listeria monocytogenes, Moraxella catarrhalis, Mycobacterium avium, Mycobacterium bovis, Mycobacterium leprae, Mycobacterium tuberculosis, Mycoplasma genitalium, Mycoplasma pneumoniae, Neisseria gonorrhoeae, Neisseria meningitidis, Nocardia asteroides, Pasteurella haemolytica, Pasteurella multocida, Pneumocystis carinii, Proteus mirabilis, Proteus vulgaris, Pseudomonas aeruginosa, Pseudomonas putida, Pseudomonas syringae, Salmonella bongori, Salmonella cholerasuis, Salmonella enterica, Salmonella paratyphi, Salmonella typhi, Salmonella typhimurium, Shigella boydii, Shigella dysenteriae, Shigella flexneri, Shigella sonnei, Staphylococcus aureus, Staphylococcus epidermidis, Staphylococcus haemolyticus, Streptococcus pneumoniae, Streptococcus mutans, Streptococcus pyogenes, Treponema pallidum, Ureaplasma urealyticum, Vibrio cholerae, Vibrio parahaemolyticus, Vibrio vulnificans, Yersinia enterocolitica, Yersinia pestis and any species falling within the genera of any of the above species.

[0317] 248. The method of Paragraph 240, wherein said population is a population of an organism other than E. coli.

[0318] 249. The method of Paragraph 240, wherein said product of said gene is from an organism other than E. coli.

[0319] 250. The method of Paragraph 240, wherein said gene product is selected from the group consisting of a polypeptide having at least 25% amino acid identity as determined using FASTA version 3.0t78 to a polypeptide selected from the group consisting of SEQ ID NOs.: 42398-78581 and a polypeptide whose activity may be complemented by a polypeptide selected from the group consisting of SEQ ID NOs: 42398-78581.

[0320] 251. The method of Paragraph 240, wherein said gene comprises a nucleic acid selected from the group consisting of a nucleic acid comprising a nucleic acid having at least 70% nucleotide sequence identity as determined using BLASTN version 2.0 with the default parameters to a nucleotide sequence selected from the group consisting of SEQ ID NOS.: 6214-42397, a nucleic acid comprising a nucleotide sequence which hybridizes to a nucleotide sequence selected from the group consisting of SEQ ID NOS.: 6214-42397 under stringent conditions, and a nucleic acid comprising a nucleotide sequence which hybridizes to a nucleotide sequence selected from the group consisting of SEQ ID NOS.: 6214-42397 under moderate condtions.

[0321] 252. A preparation comprising an effective concentration of an antisense nucleic acid in a pharmaceutically acceptable carrier wherein said antisense nucleic acid is selected from the group consisting of a nucleic acid comprising a sequence having at least 70% nucleotide sequence identity as determined using BLASTN version 2.0 with the default parameters to a nucleotide sequence selected from the group consisting of SEQ ID NOs.: 1-6213 or a proliferation-inhibiting portion thereof, a nucleic acid comprising a nucleotide sequence which hybridizes to a nucleic acid selected from the group consisting of SEQ ID NOs.: 1-6213 under stringent conditions, and a nucleic acid comprising a nucleotide sequence which hybridizes to a nucleic acid selected from the group consisting of SEQ ID NOs.: 1-6213 under moderate conditions.

[0322] 253. The preparation of Paragraph 252, wherein said proliferation-inhibiting portion of one of SEQ ID NOs.: 1-6213 comprises at least 10, at least 20, at least 25, at least 30, at least 50 or more than 50 consecutive nucleotides of one of SEQ ID NOs.: 1-6213.

[0323] 254. A method for inhibiting the activity or expression of a gene in an operon which encodes a gene product required for proliferation comprising contacting a cell in a cell population with an antisense nucleic acid comprising at least a proliferation-inhibiting portion of said operon in an antisense orientation, wherein said gene product is selected from the group consisting of a gene product having at least 70% nucleotide sequence identity as determined using BLASTN version 2.0 with the default parameters to a gene product whose expression is inhibited by an antisense nucleic acid comprising a nucleotide sequence selected from the group consisting of SEQ ID NOs.: 1-6213, a gene product encoded by a nucleic acid having at least 70% nucleotide sequence identity as determined using BLASTN version 2.0 with the default parameters to a nucleic acid encoding a gene product whose expression is inhibited by an antisense nucleic acid comprising a nucleotide sequence selected from the group consisting of SEQ ID NOs: 1-6213, a gene product having at least 25% amino acid identity as determined using FASTA version 3.0t78 with the default parameters to a gene product whose expression is inhibited by an antisense nucleic acid comprising a nucleotide sequence selected from the group consisting of SEQ ID NOs.: 1-6213, a gene product encoded by a nucleic acid comprising a nucleotide sequence which hybridizes to a nucleic acid selected from the group consisting of SEQ ID NOs.: 1-6213 under stringent conditions, a gene product encoded by a nucleic acid comprising a nucleotide sequence which hybridizes to a nucleic acid selected from the group consisting of SEQ ID NOs.: 1-6213 under moderate conditions, and a gene product whose activity may be complemented by the gene product whose activity is inhibited by a nucleic acid selected from the group consisting of SEQ ID NOs: 1-6213.

[0324] 255. The method of Paragraph 254, wherein said antisense nucleic acid comprises a nucleotide sequence having at least 70% nucleotide sequence identity as determined using BLASTN version 2.0 with the default parameters to a nucleotide seqence selected from the group consisting of SEQ ID NOs.: 1-6213, a proliferation inhibiting portion thereof, a nucleic acid comprising a nucleotide sequence which hybridizes to a nucleic acid selected from the group consisting of SEQ ID NOs.: 1-6213 under stringent conditions, and a nucleic acid which comprising a nucleotide sequence which hybridizes to a nucleic acid selected from the group consisting of SEQ ID NOs.: 1-6213 under moderate conditions.

[0325] 256. The method of Paragraph 254, wherein said cell is selected from the group consisting of Acinetobacter baumannii, Anaplasma marginale, Aspergillus fumigatus, Bacillus anthracis, Bacteroides fragilis, Bordetella pertussis, Borrelia burgdorferi, Burkholderia cepacia, Burkholderia fungorum, Burkholderia mallei, Campylobacter jejuni, Candida albicans, Candida glabrata (also called Torulopsis glabrata), Candida tropicalis, Candida parapsilosis, Candida guilliermondii, Candida krusei, Candida kefyr (also called Candida pseudotropicalis), Candida dubliniensis, Chlamydia pneumoniae, Chlamydia trachomatis, Clostridium acetobutylicum, Clostridium botulinum, Clostridium difficile, Clostridium perfringens, Coccidioides immitis, Corynebacterium diptheriae, Cryptococcus neoformans, Enterobacter cloacae, Enterococcus faecalis, Enterococcus faecium, Escherichia coli, Haemophilus influenzae, Helicobacter pylori, Histoplasma capsulatum, Klebsiella pneumoniae, Legionella pneumophila, Listeria monocytogenes, Moraxella catarrhalis, Mycobacterium avium, Mycobacterium bovis, Mycobacterium leprae, Mycobacterium tuberculosis, Mycoplasma genitalium, Mycoplasma pneumoniae, Neisseria gonorrhoeae, Neisseria meningitidis, Nocardia asteroides, Pasteurella haemolytica, Pasteurella multocida, Pneumocystis carinii, Proteus mirabilis, Proteus vulgaris, Pseudomonas aeruginosa, Pseudomonas putida, Pseudomonas syringae, Salmonella bongori, Salmonella cholerasuis, Salmonella enterica, Salmonella paratyphi, Salmonella typhi, Salmonella typhimurium, Shigella boydii, Shigella dysenteriae, Shigella flexneri, Shigella sonnei, Staphylococcus aureus, Staphylococcus epidermidis, Staphylococcus haemolyticus, Streptococcus pneumoniae, Streptococcus mutans, Streptococcus pyogenes, Treponema pallidum, Ureaplasma urealyticum, Vibrio cholerae, Vibrio parahaemolyticus, Vibrio vulnificans, Yersinia enterocolitica, Yersinia pestis and any species falling within the genera of any of the above species.

[0326] 257. The method of Paragraph 254, wherein said cell is not an E. coli cell.

[0327] 258. The method of Paragraph 254, wherein said gene is from an organism other than E. coli.

[0328] 259. The method of Paragraph 254, wherein said cell is contacted with said antisense nucleic acid by introducing a plasmid which transcribes said antisense nucleic acid into said cell population.

[0329] 260. The method of Paragraph 254, wherein said cell is contacted with said antisense nucleic acid by introducing a phage which transcribes said antisense nucleic acid into said cell population.

[0330] 261. The method of Paragraph 254, wherein said cell is contacted with said antisense nucleic acid by transcribing said antisense nucleic acid from the chromosome of cells in said cell population.

[0331] 262. The method of Paragraph 254, wherein said cell is contacted with said antisense nucleic acid by introducing a promoter adjacent to a chromosomal copy of said antisense nucleic acid such that said promoter directs the synthesis of said antisense nucleic acid.

[0332] 263. The method of Paragraph 254, wherein said cell is contacted with said antisense nucleic acid by introducing a retron which expresses said antisense nucleic acid into said cell population.

[0333] 264. The method of Paragraph 254, wherein said cell is contacted with said antisense nucleic acid by introducing a ribozyme into said cell-population, wherein a binding portion of said ribozyme is complementary to said antisense oligonucleotide.

[0334] 265. The method of Paragraph 254, wherein said cell is contacted with said antisense nucleic acid by introducing a liposome comprising said antisense oligonucleotide into said cell.

[0335] 266. The method of Paragraph 254, wherein said cell is contacted with said antisense nucleic acid by electroporation of said antisense nucleic acid into said cell.

[0336] 267. The method of Paragraph 254, wherein said antisense nucleic acid has at least 70% nucleotide sequence identity as determined using BLASTN version 2.0 with the default parameters to a nucleotide sequence comprising at least 10, at least 20, at least 25, at least 30, at least 50 or more than 50 consecutive nucleotides of one of SEQ ID NOs.: 1-6213.

[0337] 268. The method of Paragraph 254 wherein said antisense nucleic acid is a synthetic oligonucleotide.

[0338] 269. The method of Paragraph 254, wherein said gene comprises a nucleic acid selected from the group consisting of a nucleic acid comprising a nucleic acid having at least 70% nucleotide sequence identity as determined using BLASTN version 2.0 with the default parameters to a nucleotide sequence selected from the group consisting of SEQ ID NOS.: 6214-42397, a nucleic acid comprising a nucleotide sequence which hybridizes to a sequence selected from the group consisting of SEQ ID NOS.: 6214-42397 under stringent conditions, and a nucleic acid comprising a nucleotide sequence which hybridizes to a nucleotide sequence selected from the group consisting of SEQ ID NOS.: 6214-42397 under moderate condtions.

[0339] 270. A method for identifying a gene which is required for proliferation of a cell comprising:

[0340] (a) contacting a cell with an antisense nucleic acid selected from the group consisting of a nucleic acid at least 70% nucleotide sequence identity as determined using BLASTN version 2.0 with the default parameters to a nucleotide sequence selected from the group consisting of SEQ ID NOs.: 1-6213 or a proliferation-inhibiting portion thereof, a nucleic acid comprising a nucleotide sequence which hybridizes to a nucleic acid selected from the group consisting of SEQ ID NOs.: 1-6213 under stringent conditions, and a nucleic acid comprising a nucleotide sequence which hybridizes to a nucleic acid selected from the group consisting of SEQ ID NOs.: 1-6213 under moderate conditions, wherein said cell is a cell other than the organism from which said nucleic acid was obtained;

[0341] (b) determining whether said nucleic acid inhibits proliferation of said cell; and

[0342] (c) identifying the gene in said cell which encodes the mRNA which is complementary to said antisense nucleic acid or a portion thereof.

[0343] 271. The method of Paragraph 270, wherein said cell is selected from the group consisting of Staphylococcus species, Streptococcus species, Enterococcus species, Mycobacterium species, Clostridium species, and Bacillus species.

[0344] 272. The method of Paragraph 270 wherein said cell is selected from the group consisting of Acinetobacter baumannii, Anaplasma marginale, Aspergillus fumigatus, Bacillus anthracis, Bacteroides fragilis, Bordetella pertussis, Borrelia burgdorferi, Burkholderia cepacia, Burkholderia fungorum, Burkholderia mallei, Campylobacter jejuni, Candida albicans, Candida glabrata (also called Torulopsis glabrata), Candida tropicalis, Candida parapsilosis, Candida guilliermondii, Candida krusei, Candida kefyr (also called Candida pseudotropicalis), Candida dubliniensis, Chlamydia pneumoniae, Chlamydia trachomatis, Clostridium acetobutylicum, Clostridium botulinum, Clostridium difficile, Clostridium perfringens, Coccidioides immitis, Corynebacterium diptheriae, Cryptococcus neoformans, Enterobacter cloacae, Enterococcus faecalis, Enterococcus faecium, Escherichia coli, Haemophilus influenzae, Helicobacter pylori, Histoplasma capsulatum, Klebsiella pneumoniae, Legionella pneumophila, Listeria monocytogenes, Moraxella catarrhalis, Mycobacterium avium, Mycobacterium bovis, Mycobacterium leprae, Mycobacterium tuberculosis, Mycoplasma genitalium, Mycoplasma pneumoniae, Neisseria gonorrhoeae, Neisseria meningitidis, Nocardia asteroides, Pasteurella haemolytica, Pasteurella multocida, Pneumocystis carinii, Proteus mirabilis, Proteus vulgaris, Pseudomonas aeruginosa, Pseudomonas putida, Pseudomonas syringae, Salmonella bongori, Salmonella cholerasuis, Salmonella enterica, Salmonella paratyphi, Salmonella typhi, Salmonella typhimurium, Shigella boydii, Shigella dysenteriae, Shigella flexneri, Shigella sonnei, Staphylococcus aureus, Staphylococcus epidermidis, Staphylococcus haemolyticus, Streptococcus pneumoniae, Streptococcus mutans, Streptococcus pyogenes, Treponema pallidum, Ureaplasma urealyticum, Vibrio cholerae, Vibrio parahaemolyticus, Vibrio vulnificans, Yersinia enterocolitica, Yersinia pestis and any species falling within the genera of any of the above species.

[0345] 273. The method of Paragraph 270, wherein said cell is not E. coli.

[0346] 274. The method of Paragraph 270, further comprising operably linking said antisense nucleic acid to a promoter which is functional in said cell, said promoter being included in a vector, and introducing said vector into said cell.

[0347] 275. A method for identifying a compound having the ability to inhibit proliferation of a cell comprising:

[0348] (a) identifying a homolog of a gene or gene product whose activity or level is inhibited by an antisense nucleic acid in a test cell, wherein said test cell is not the microorgaism from which the antisense nucleic acid was obtained, wherein said antisense nucleic acid is selected from the group consisting of a nucleic acid having at least 70% nucleotide sequence identity as determined using BLASTN version 2.0 with the default parameters to a nucleotide sequence selected from the group consisting of SEQ ID NOs. 1-6213, a nucleic acid comprising a nucleotide sequence which hybridizes to a nucleic acid selected from the group consisting of SEQ ID NOs.: 1-6213 under stringent conditions, and a nucleic acid comprising a nucleotide sequence which hybridizes to a nucleic acid selected from the group consisting of SEQ ID NOs.: 1-6213 under moderate conditions;

[0349] (b) identifying an inhibitory nucleic acid sequence which inhibits the activity of said homolog in said test cell;

[0350] (c) contacting said test cell with a sublethal level of said inhibitory nucleic acid, thus sensitizing said cell;

[0351] (d) contacting the sensitized cell of step (c) with a compound; and

[0352] (e) determining the degree to which said compound inhibits proliferation of said sensitized cell relative to a cell which does not express said inhibitory nucleic acid.

[0353] 276. The method of Paragraph 275, wherein said determining step comprises determining whether said compound inhibits proliferation of said sensitized test cell to a greater extent than said compound inhibits proliferation of a nonsensitized test cell.

[0354] 277. The method of Paragraph 275, wherein step (a) comprises identifying a homologous nucleic acid to a gene or gene product whose activity or level is inhibited by a nucleic acid having at least 70% nucleotide sequence identity as determined using BLASTN version 2.0 with the default parameters to a nucleotide sequence selected from the group consisting of SEQ ID NOs. 1-6213 or a nucleic acid encoding a homologous polypeptide to a polypeptide whose activity or level is inhibited by a nucleic acid having at least 70% nucleotide sequence identity as determined using BLASTN version 2.0 with the default parameters to a nucleotide sequence selected from the group consisting of SEQ ID NOs. 1-6213 by using an algorithm selected from the group consisting of BLASTN version 2.0 with the default parameters and FASTA version 3.0t78 algorithm with the default parameters to identify said homologous nucleic acid or said nucleic acid encoding a homologous polypeptide in a database.

[0355] 278. The method of Paragraph 275 wherein said step (a) comprises identifying a homologous nucleic acid or a nucleic acid encoding a homologous polypeptide by identifying nucleic acids comprising nucleotide sequences which hybridize to said nucleic acid having at least 70% nucleotide sequence identity as determined using BLASTN version 2.0 with the default parameters to a nucleotide sequence selected from the group consisting of SEQ ID NOs. 1-6213 or the complement of the nucleotide sequence of said nucleic acid selected from the group consisting of SEQ ID NOs. 1-6213.

[0356] 279. The method of Paragraph 275 wherein step (a) comprises expressing a nucleic acid having at least 70% nucleic acid identity as determined using BLASTN version 2.0 with the default parameters to a sequence selected from the group consisting of SEQ ID NOs. 1-6213 in said test cell.

[0357] 280. The method of Paragraph 275, wherein step (a) comprises identifying a homologous nucleic acid or a nucleic acid encoding a homologous polypeptide in an test cell selected from the group consisting of Acinetobacter baumannii, Anaplasma marginale, Aspergillus fumigatus, Bacillus anthracis, Bacteroides fragilis, Bordetella pertussis, Borrelia burgdorferi, Burkholderia cepacia, Burkholderia fungorum, Burkholderia mallei, Campylobacter jejuni, Candida albicans, Candida glabrata (also called Torulopsis glabrata), Candida tropicalis, Candida parapsilosis, Candida guilliermondii, Candida krusei, Candida kefyr (also called Candida pseudotropicalis), Candida dubliniensis, Chlamydia pneumoniae, Chlamydia trachomatis, Clostridium acetobutylicum, Clostridium botulinum, Clostridium difficile, Clostridium perfringens, Coccidioides immitis, Corynebacterium diptheriae, Cryptococcus neoformans, Enterobacter cloacae, Enterococcus faecalis, Enterococcus faecium, Escherichia coli, Haemophilus influenzae, Helicobacter pylori, Histoplasma capsulatum, Klebsiella pneumoniae, Legionella pneumophila, Listeria monocytogenes, Moraxella catarrhalis, Mycobacterium avium, Mycobacterium bovis, Mycobacterium leprae, Mycobacterium tuberculosis, Mycoplasma genitalium, Mycoplasma pneumoniae, Neisseria gonorrhoeae, Neisseria meningitidis, Nocardia asteroides, Pasteurella haemolytica, Pasteurella multocida, Pneumocystis carinii, Proteus mirabilis, Proteus vulgaris, Pseudomonas aeruginosa, Pseudomonas putida, Pseudomonas syringae, Salmonella bongori, Salmonella cholerasuis, Salmonella enterica, Salmonella paratyphi, Salmonella typhi, Salmonella typhimurium, Shigella boydii, Shigella dysenteriae, Shigella flexneri, Shigella sonnei, Staphylococcus aureus, Staphylococcus epidermidis, Staphylococcus haemolyticus, Streptococcus pneumoniae, Streptococcus mutans, Streptococcus pyogenes, Treponema pallidum, Ureaplasma urealyticum, Vibrio cholerae, Vibrio parahaemolyticus, Vibrio vulnificans, Yersinia enterocolitica, Yersinia pestis and any species falling within the genera of any of the above species.

[0358] 281. The method of Paragraph 275, wherein step (a) comprises identifying a homologous nucleic acid or a nucleic acid encoding a homologous polypeptide in a test cell other than E. coli.

[0359] 282. The method of Paragraph 275, wherein said inhibitory nucleic acid is an antisense nucleic acid.

[0360] 283. The method of Paragraph 275, wherein said inhibitory nucleic acid comprises an antisense nucleic acid to a portion of said homolog.

[0361] 284. The method of Paragraph 275, wherein said inhibitory nucleic acid comprises an antisense nucleic acid to a portion of the operon encoding said homolog.

[0362] 285. The method of Paragraph 275, wherein the step of contacting the cell with a sublethal level of said inhibitory nucleic acid comprises directly contacting said cell with said inhibitory nucleic acid.

[0363] 286. The method of Paragraph 275, wherein the step of contacting the cell with a sublethal level of said inhibitory nucleic acid comprises expressing an antisense nucleic acid to said homolog in said cell.

[0364] 287. The method of Paragraph 275, wherein said gene product comprises a polypeptide comprising an amino acid sequence selected from the group consisting of SEQ ID NOs.: 42398-78581.

[0365] 288. The method of Paragraph 275, wherein said gene comprises a nucleic acid selected from the group consisting of a nucleic acid comprising a nucleic acid having at least 70% nucleotide sequence identity as determined using BLASTN version 2.0 with the default parameters to a sequence selected from the group consisting of SEQ ID NOS.: 6214-42397, a nucleic acid comprising a nucleotide sequence which hybridizes to a nucleotide sequence selected from the group consisting of SEQ ID NOS.: 6214-42397 under stringent conditions, and a nucleic acid comprising a nucleotide sequence which hybridizes to a nucleotide sequence selected from the group consisting of SEQ ID NOS.: 6214-42397 under moderate condtions.

[0366] 289. A compound identified using the method of Paragraph 275.

[0367] 290. A method of identifying a compound having the ability to inhibit proliferation comprising:

[0368] (a) sensitizing a test cell by contacting said test cell with a sublethal level of an antisense nucleic acid, wherein said antisense nucleic acid is selected from the group consisting of a nucleic acid having at least 70% nucleotide sequence identity as determined using BLASTN version 2.0 with the default parameters to a nucleotide sequence selected from the group consisting of SEQ ID NOs. 1-6213 or a portion thereof which inhibits the proliferation of the cell from which said nucleic acid was obtained, a nucleic acid comprising a nucleotide sequence which hybridizes to a nucleic acid selected from the group consisting of SEQ ID NOs.: 1-6213 under stringent conditions, and a nucleic acid comprising a nucleotide sequence which hybridizes to a nucleic acid selected from the group consisting of SEQ ID NOs.: 1-6213 under moderate conditionst;

[0369] (b) contacting the sensitized test cell of step (a) with a compound; and

[0370] (c) determining the degree to which said compound inhibits proliferation of said sensitized test cell relative to a cell which does not contain said antisense nucleic acid.

[0371] 291. The method of Paragraph 290, wherein said determining step comprises determining whether said compound inhibits proliferation of said sensitized test cell to a greater extent than said compound inhibits proliferation of a nonsensitized test cell.

[0372] 292. A compound identified using the method of Paragraph 290.

[0373] 293. The method of Paragraph 290, wherein said test cell is selected from the group consisting of Acinetobacter baumannii, Anaplasma marginale, Aspergillus fumigatus, Bacillus anthracis, Bacteroides fragilis, Bordetella pertussis, Borrelia burgdorferi, Burkholderia cepacia, Burkholderia fungorum, Burkholderia mallei, Campylobacter jejuni, Candida albicans, Candida glabrata (also called Torulopsis glabrata), Candida tropicalis, Candida parapsilosis, Candida guilliermondii, Candida krusei, Candida kefyr (also called Candida pseudotropicalis), Candida dubliniensis, Chlamydia pneumoniae, Chlamydia trachomatis, Clostridium acetobutylicum, Clostridium botulinum, Clostridium difficile, Clostridium perfringens, Coccidioides immitis, Corynebacterium diptheriae, Cryptococcus neoformans, Enterobacter cloacae, Enterococcus faecalis, Enterococcus faecium, Escherichia coli, Haemophilus influenzae, Helicobacter pylori, Histoplasma capsulatum, Klebsiella pneumoniae, Legionella pneumophila, Listeria monocytogenes, Moraxella catarrhalis, Mycobacterium avium, Mycobacterium bovis, Mycobacterium leprae, Mycobacterium tuberculosis, Mycoplasma genitalium, Mycoplasma pneumoniae, Neisseria gonorrhoeae, Neisseria meningitidis, Nocardia asteroides, Pasteurella haemolytica, Pasteurella multocida, Pneumocystis carinii, Proteus mirabilis, Proteus vulgaris, Pseudomonas aeruginosa, Pseudomonas putida, Pseudomonas syringae, Salmonella bongori, Salmonella cholerasuis, Salmonella enterica, Salmonella paratyphi, Salmonella typhi, Salmonella typhimurium, Shigella boydii, Shigella dysenteriae, Shigella flexneri, Shigella sonnei, Staphylococcus aureus, Staphylococcus epidermidis, Staphylococcus haemolyticus, Streptococcus pneumoniae, Streptococcus mutans, Streptococcus pyogenes, Treponema pallidum, Ureaplasma urealyticum, Vibrio cholerae, Vibrio parahaemolyticus, Vibrio vulnificans, Yersinia enterocolitica, Yersinia pestis and any species falling within the genera of any of the above species.

[0374] 294. The method of Paragraph 290, wherein the test cell is not E. coli.

[0375] 295. A method for identifying a compound having activity against a biological pathway required for proliferation comprising:

[0376] (a) sensitizing a cell by providing a sublethal level of an antisense nucleic acid complementary to a nucleic acid encoding a gene product required for proliferation, wherein said gene product is selected from the group consisting of a gene product having at least 70% nucleotide sequence identity as determined using BLASTN version 2.0 with the default parameters to a gene product whose expression is inhibited by an antisense nucleic acid comprising a nucleotide sequence selected from the group consisting of SEQ ID NOs.: 1-6213, a gene product encoded by a nucleic acid having at least 70% nucleotide sequence identity as determined using BLASTN version 2.0 with the default parameters to a nucleic acid encoding a gene product whose expression is inhibited by an antisense nucleic acid comprising a nucleotide sequence selected from the group consisting of SEQ ID NOs: 1-6213, a gene product having at least 25% amino acid identity as determined using FASTA version 3.0t78 with the default parameters to a gene product whose expression is inhibited by an antisense nucleic acid comprising a nucleotide sequence selected from the group consisting of SEQ ID NOs.: 1-6213, a gene product encoded by a nucleic acid comprising a nucleotide sequence which hybridizes to a nucleic acid selected from the group consisting of SEQ ID NOs.: 1-6213 under stringent conditions, a gene product encoded by a nucleic acid comprising a nucleotide sequence which hybridizes to a nucleic acid selected from the group consisting of SEQ ID NOs.:

[0377] 1-6213 under moderate conditions, and a gene product whose activity may be complemented by the gene product whose activity is inhibited by a nucleic acid selected from the group consisting of SEQ ID NOs: 1-6213;

[0378] (b) contacting the sensitized cell with a compound; and

[0379] (c) determining the extent to which said compound inhibits the growth of said sensitized cell relative to a cell which does not contain said antisense nucleic acid.

[0380] 296. The method of Paragraph 295, wherein said determining step comprises determining whether said compound inhibits the growth of said sensitized cell to a greater extent than said compound inhibits the growth of a nonsensitized cell.

[0381] 297. The method of Paragraph 295, wherein said cell is selected from the group consisting of bacterial cells, fungal cells, plant cells, and animal cells.

[0382] 298. The method of Paragraph 295, wherein said cell is a Gram positive bacterium.

[0383] 299. The method of Paragraph 298, wherein said Gram positive bacterium is selected from the group consisting of Staphylococcus species, Streptococcus species, Enterococcus species, Mycobacterium species, Clostridium species, and Bacillus species.

[0384] 300. The method of Paragraph 299, wherein said Gram positive bacterium is Staphylococcus aureus.

[0385] 301. The method of Paragraph 298, wherein said Gram positive bacterium is selected from the group consisting of Staphylococcus aureus RN450 and Staphylococcus aureus RN4220.

[0386] 302. The method of Paragraph 295, wherein said cell is selected from the group consisting of Acinetobacter baumannii, Anaplasma marginale, Aspergillus fumigatus, Bacillus anthracis, Bacteroides fragilis, Bordetella pertussis, Borrelia burgdorferi, Burkholderia cepacia, Burkholderia fungorum, Burkholderia mallei, Campylobacter jejuni, Candida albicans, Candida glabrata (also called Torulopsis glabrata), Candida tropicalis, Candida parapsilosis, Candida guilliermondii, Candida krusei, Candida kefyr (also called Candida pseudotropicalis), Candida dubliniensis, Chlamydia pneumoniae, Chlamydia trachomatis, Clostridium acetobutylicum, Clostridium botulinum, Clostridium difficile, Clostridium perfringens, Coccidioides immitis, Corynebacterium diptheriae, Cryptococcus neoformans, Enterobacter cloacae, Enterococcus faecalis, Enterococcus faecium, Escherichia coli, Haemophilus influenzae, Helicobacter pylori, Histoplasma capsulatum, Klebsiella pneumoniae, Legionella pneumophila, Listeria monocytogenes, Moraxella catarrhalis, Mycobacterium avium, Mycobacterium bovis, Mycobacterium leprae, Mycobacterium tuberculosis, Mycoplasma genitalium, Mycoplasma pneumoniae, Neisseria gonorrhoeae, Neisseria meningitidis, Nocardia asteroides, Pasteurella haemolytica, Pasteurella multocida, Pneumocystis carinii, Proteus mirabilis, Proteus vulgaris, Pseudomonas aeruginosa, Pseudomonas putida, Pseudomonas syringae, Salmonella bongori, Salmonella cholerasuis, Salmonella enterica, Salmonella paratyphi, Salmonella typhi, Salmonella typhimurium, Shigella boydii, Shigella dysenteriae, Shigella flexneri, Shigella sonnei, Staphylococcus aureus, Staphylococcus epidermidis, Staphylococcus haemolyticus, Streptococcus pneumoniae, Streptococcus mutans, Streptococcus pyogenes, Treponema pallidum, Ureaplasma urealyticum, Vibrio cholerae, Vibrio parahaemolyticus, Vibrio vulnificans, Yersinia enterocolitica, Yersinia pestis and any species falling within the genera of any of the above species.

[0387] 303. The method of Paragraph 295, wherein said cell is not an E. coli cell.

[0388] 304. The method of Paragraph 295, wherein said gene product is from an organism other than E. coli.

[0389] 305. The method of Paragraph 295, wherein said antisense nucleic acid is transcribed from an inducible promoter.

[0390] 306. The method of Paragraph 305, further comprising contacting the cell with an agent which induces expression of said antisense nucleic acid from said inducible promoter, wherein said antisense nucleic acid is expressed at a sublethal level.

[0391] 307. The method of Paragraph 295, wherein inhibition of proliferation is measured by monitoring the optical density of a liquid culture.

[0392] 308. The method of Paragraph 295, wherein said gene product comprises a polypeptide having at least 25% amino acid identity as determined using FASTA version 3.0t78 with the default parameters to a sequence selected from the group consisting of SEQ ID NOs.: 42398-78581.

[0393] 309. The method of Paragraph 295, wherein said nucleic acid encoding said gene product comprises a nucleic acid selected from the group consisting of a nucleic acid comprising a nucleic acid having at least 70% nucleotide sequence identity as determined using BLASTN version 2.0 with the default parameters to a nucleotide sequence selected from the group consisting of SEQ ID NOS.: 6214-42397, a nucleic acid comprising a nucleotide sequence which hybridizes to a nucleotide sequence selected from the group consisting of SEQ ID NOS.: 6214-42397 under stringent conditions, and a nucleic acid comprising a nucleotide sequence which hybridizes to a nucleotide sequence selected from the group consisting of SEQ ID NOS.: 6214-42397 under moderate condtions.

[0394] 310. A compound identified using the method of Paragraph 295.

[0395] 311. A method for identifying a compound having the ability to inhibit cellular proliferation comprising:

[0396] (a) contacting a cell with an agent which reduces the activity or level of a gene product required for proliferation of said cell, wherein said gene product is selected from the group consisting of a gene product having at least 70% nucleotide sequence identity as determined using BLASTN version 2.0 with the default parameters to a gene product whose expression is inhibited by an antisense nucleic acid comprising a nucleotide sequence selected from the group consisting of SEQ ID NOs.: 1-6213, a gene product encoded by a nucleic acid having at least 70% nucleotide sequence identity as determined using BLASTN version 2.0 with the default parameters to a nucleic acid encoding a gene product whose expression is inhibited by an antisense nucleic acid comprising a nucleotide sequence selected from the group consisting of SEQ ID NOs: I -6213, a gene product having at least 25% amino acid identity as determined using FASTA version 3.0t78 with the default parameters to a gene product whose expression is inhibited by an antisense nucleic acid comprising a nucleotide sequence selected from the group consisting of SEQ ID NOs.: 1-6213, a gene product encoded by a nucleic acid comprising a nucleotide sequence which hybridizes to a nucleic acid selected from the group consisting of SEQ ID NOs.: 1-6213 under stringent conditions, a gene product encoded by a nucleic acid comprising a nucleotide sequence which hybridizes to a nucleic acid selected from the group consisting of SEQ ID NOs.: 1-6213 under moderate conditions, and a gene product whose activity may be complemented by the gene product whose activity is inhibited by a nucleic acid selected from the group consisting of SEQ ID NOs: 1-6213;

[0397] (b) contacting said cell with a compound; and

[0398] (c) determining the degree to which said compound reduces proliferation of said contacted cell relative to a cell which was not contacted with said agent.

[0399] 312. The method of Paragraph 311, wherein said determining step comprises determining whether said compound reduces proliferation of said contacted cell to a greater extent than said compound reduces proliferation of cells which have not been contacted with said agent.

[0400] 313. The method of Paragraph 311, wherein said cell is selected from the group consisting of Acinetobacter baumannii, Anaplasma marginale, Aspergillus fumigatus, Bacillus anthracis, Bacteroides fragilis, Bordetella pertussis, Borrelia burgdorferi, Burkholderia cepacia, Burkholderia fungorum, Burkholderia mallei, Campylobacter jejuni, Candida albicans, Candida glabrata (also called Torulopsis glabrata), Candida tropicalis, Candida parapsilosis, Candida guilliermondii, Candida krusei, Candida kefyr (also called Candida pseudotropicalis), Candida dubliniensis, Chlamydia pneumoniae, Chlamydia trachomatis, Clostridium acetobutylicum, Clostridium botulinum, Clostridium difficile, Clostridium perfringens, Coccidioides immitis, Corynebacterium diptheriae, Cryptococcus neoformans, Enterobacter cloacae, Enterococcus faecalis, Enterococcus faecium, Escherichia coli, Haemophilus influenzae, Helicobacter pylori, Histoplasma capsulatum, Klebsiella pneumoniae, Legionella pneumophila, Listeria monocytogenes, Moraxella catarrhalis, Mycobacterium avium, Mycobacterium bovis, Mycobacterium leprae, Mycobacterium tuberculosis, Mycoplasma genitalium, Mycoplasma pneumoniae, Neisseria gonorrhoeae, Neisseria meningitidis, Nocardia asteroides, Pasteurella haemolytica, Pasteurella multocida, Pneumocystis carinii, Proteus mirabilis, Proteus vulgaris, Pseudomonas aeruginosa, Pseudomonas putida, Pseudomonas syringae, Salmonella bongori, Salmonella cholerasuis, Salmonella enterica, Salmonella paratyphi, Salmonella typhi, Salmonella typhimurium, Shigella boydii, Shigella dysenteriae, Shigella flexneri, Shigella sonnei, Staphylococcus aureus, Staphylococcus epidermidis, Staphylococcus haemolyticus, Streptococcus pneumoniae, Streptococcus mutans, Streptococcus pyogenes, Treponema pallidum, Ureaplasma urealyticum, Vibrio cholerae, Vibrio parahaemolyticus, Vibrio vulnificans, Yersinia enterocolitica, Yersinia pestis and any species falling within the genera of any of the above species.

[0401] 314. The method of Paragraph 311, wherein said cell is not an E. coli cell.

[0402] 315. The method of Paragraph 311, wherein said gene product is from an organism other than E. coli.

[0403] 316. The method of Paragraph 311, wherein said agent which reduces the activity or level of a gene product required for proliferation of said cell comprises an antisense nucleic acid to a gene or operon required for proliferation.

[0404] 317. The method of Paragraph 311, wherein said agent which reduces the activity or level of a gene product required for proliferation of said cell comprises a compound known to inhibit growth or proliferation of a cell.

[0405] 318. The method of Paragraph 311, wherein said cell contains a mutation which reduces the activity or level of said gene product required for proliferation of said cell.

[0406] 319. The method of Paragraph 311, wherein said mutation is a temperature sensitive mutation.

[0407] 320. The method of Paragraph 311, wherein said gene product comprises a gene product comprises a polypeptide having at least 25% amino acid identity as determined using FASTA version 3.0t78 with the default parameters to an amino acid sequence selected from the group consisting of SEQ ID NOs.: 42398-78581.

[0408] 321. A compound identified using the method of Paragraph 311.

[0409] 322. A method for identifying the biological pathway in which a proliferation-required gene product or a gene encoding a proliferation-required gene product lies comprising:

[0410] (a) providing a sublethal level of an antisense nucleic acid which inhibits the activity or reduces the level of said gene encoding a proliferation-required gene product or said said proliferation-required gene product in a test cell, wherein said proliferation-required gene product is selected from the group consisting of a gene product having at least 70% nucleotide sequence identity as determined using BLASTN version 2.0 with the default parameters to a gene product whose expression is inhibited by an antisense nucleic acid comprising a nucleotide sequence selected from the group consisting of SEQ ID NOs.: 1-6213, a gene product encoded by a nucleic acid having at least 70% nucleotide sequence identity as determined using BLASTN version 2.0 with the default parameters to a nucleic acid encoding a gene product whose expression is inhibited by an antisense nucleic acid comprising a nucleotide sequence selected from the group consisting of SEQ ID NOs: 1-6213, a gene product having at least 25% amino acid identity as determined using FASTA version 3.0t78 with the default parameters to a gene product whose expression is inhibited by an antisense nucleic acid comprising a nucleotide sequence selected from the group consisting of SEQ ID NOs.: 1-6213, a gene product encoded by a nucleic acid comprising a nucleotide sequence which hybridizes to a nucleic acid selected from the group consisting of SEQ ID NOs.: 1-6213 under stringent conditions, a gene product encoded by a nucleic acid comprising a nucleotide sequence which hybridizes to a nucleic acid selected from the group consisting of SEQ ID NOs.: 1-6213 under moderate conditions, and a gene product whose activity may be complemented by the gene product whose activity is inhibited by a nucleic acid selected from the group consisting of SEQ ID NOs: 1-6213;

[0411] (b) contacting said test cell with a compound known to inhibit growth or proliferation of a cell, wherein the biological pathway on which said compound acts is known; and

[0412] (c) determining the degree to which said compound inhibits proliferation of said test cell relative to a cell which does not contain said antisense nucleic acid.

[0413] 323. The method of Paragraph 322, wherein said determining step comprises determining whether said test cell has a substantially greater sensitivity to said compound than a cell which does not express said sublethal level of said antisense nucleic acid.

[0414] 324. The method of Paragraph 322, wherein said gene product comprises a polypeptide having at least 25% amino acid identity as determined using FASTA version 3.0t78 with the default parameters to an amino acid sequence selected from the group consisting of SEQ ID NOs.: 42398-78581.

[0415] 325. The method of Paragraph 322, wherein said test cell is selected from the group consisting of Acinetobacter baumannii, Anaplasma marginale, Aspergillus fumigatus, Bacillus anthracis, Bacteroides fragilis, Bordetella pertussis, Borrelia burgdorferi, Burkholderia cepacia, Burkholderia fungorum, Burkholderia mallei, Campylobacter jejuni, Candida albicans, Candida glabrata (also called Torulopsis glabrata), Candida tropicalis, Candida parapsilosis, Candida guilliermondii, Candida krusei, Candida kefyr (also called Candida pseudotropicalis), Candida dubliniensis, Chlamydia pneumoniae, Chlamydia trachomatis, Clostridium acetobutylicum, Clostridium botulinum, Clostridium difficile, Clostridium perfringens, Coccidioides immitis, Corynebacterium diptheriae, Cryptococcus neoformans, Enterobacter cloacae, Enterococcus faecalis, Enterococcus faecium, Escherichia coli, Haemophilus influenzae, Helicobacter pylori, Histoplasma capsulatum, Klebsiella pneumoniae, Legionella pneumophila, Listeria monocytogenes, Moraxella catarrhalis, Mycobacterium avium, Mycobacterium bovis, Mycobacterium leprae, Mycobacterium tuberculosis, Mycoplasma genitalium, Mycoplasma pneumoniae, Neisseria gonorrhoeae, Neisseria meningitidis, Nocardia asteroides, Pasteurella haemolytica, Pasteurella multocida, Pneumocystis carinii, Proteus mirabilis, Proteus vulgaris, Pseudomonas aeruginosa, Pseudomonas putida, Pseudomonas syringae, Salmonella bongori, Salmonella cholerasuis, Salmonella enterica, Salmonella paratyphi, Salmonella typhi, Salmonella typhimurium, Shigella boydii, Shigella dysenteriae, Shigella flexneri, Shigella sonnei, Staphylococcus aureus, Staphylococcus epidermidis, Staphylococcus haemolyticus, Streptococcus pneumoniae, Streptococcus mutans, Streptococcus pyogenes, Treponema pallidum, Ureaplasma urealyticum, Vibrio cholerae, Vibrio parahaemolyticus, Vibrio vulnificans, Yersinia enterocolitica, Yersinia pestis and any species falling within the genera of any of the above species.

[0416] 326. The method of Paragraph 322, wherein said test cell is not an E. coli cell.

[0417] 327. The method of Paragraph 322, wherein said gene product is from an organism other than E. coli.

[0418] 328. A method for determining the biological pathway on which a test compound acts comprising:

[0419] (a) providing a sublethal level of an antisense nucleic acid complementary to a proliferation-required nucleic acid in a cell, thereby producing a sensitized cell, wherein said antisense nucleic acid is selected from the group consisting of a nucleic acid having at least 70% nucleotide sequence identity as determined using BLASTN version 2.0 with the default parameters to a nucleotide sequence selected from the group consisting of SEQ ID NOs: 1-6213 or a proliferation-inhibiting portion thereof, a nucleic acid comprising a nucleotide sequence which hybridizes to a nucleic acid selected from the group consisting of SEQ ID NOs.: 1-6213 under stringent conditions, and a nucleic acid comprising a nucleotide sequence which hybridizes to a nucleic acid selected from the group consisting of SEQ ID NOs.: 1-6213 under moderate conditions and wherein the biological pathway in which said proliferation-required nucleic acid or a protein encoded by said proliferation-required polypeptide lies is known,

[0420] (b) contacting said cell with said test compound; and

[0421] (c) determining the degree to which said compound inhibits proliferation of said sensitized cell relative to a cell which does not contain said antisense nucleic acid.

[0422] 329. The method of Paragraph 328, wherein said determining step comprises determining whether said sensitized cell has a substantially greater sensitivity to said test compound than a cell which does not express said sublethal level of said antisense nucleic acid.

[0423] 330. The method of Paragraph 328, further comprising:

[0424] (d) providing a sublethal level of a second antisense nucleic acid complementary to a second proliferation-required nucleic acid in a second cell, wherein said second proliferation-required nucleic acid is in a different biological pathway than said proliferation-required nucleic acid in step (a); and

[0425] (e) determining whether said second cell does not have a substantially greater sensitivity to said test compound than a cell which does not express said sublethal level of said second antisense nucleic acid, wherein said test compound is specific for the biological pathway against which the antisense nucleic acid of step (a) acts if said sensitized cell has substantially greater sensitivity to said test compound than said second cell.

[0426] 331. The method of Paragraph 328, wherein said sensitized cell is selected from the group consisting of Acinetobacter baumannii, Anaplasma marginale, Aspergillus fumigatus, Bacillus anthracis, Bacteroides fragilis, Bordetella pertussis, Borrelia burgdorferi, Burkholderia cepacia, Burkholderia fungorum, Burkholderia mallei, Campylobacter jejuni, Candida albicans, Candida glabrata (also called Torulopsis glabrata), Candida tropicalis, Candida parapsilosis, Candida guilliermondii, Candida krusei, Candida kefyr (also called Candida pseudotropicalis), Candida dubliniensis, Chlamydia pneumoniae, Chlamydia trachomatis, Clostridium acetobutylicum, Clostridium botulinum, Clostridium difficile, Clostridium perfringens, Coccidioides immitis, Corynebacterium diptheriae, Cryptococcus neoformans, Enterobacter cloacae, Enterococcus faecalis, Enterococcus faecium, Escherichia coli, Haemophilus influenzae, Helicobacter pylori, Histoplasma capsulatum, Klebsiella pneumoniae, Legionella pneumophila, Listeria monocytogenes, Moraxella catarrhalis, Mycobacterium avium, Mycobacterium bovis, Mycobacterium leprae, Mycobacterium tuberculosis, Mycoplasma genitalium, Mycoplasma pneumoniae, Neisseria gonorrhoeae, Neisseria meningitidis, Nocardia asteroides, Pasteurella haemolytica, Pasteurella multocida, Pneumocystis carinii, Proteus mirabilis, Proteus vulgaris, Pseudomonas aeruginosa, Pseudomonas putida, Pseudomonas syringae, Salmonella bongori, Salmonella cholerasuis, Salmonella enterica, Salmonella paratyphi, Salmonella typhi, Salmonella typhimurium, Shigella boydii, Shigella dysenteriae, Shigella flexneri, Shigella sonnei, Staphylococcus aureus, Staphylococcus epidermidis, Staphylococcus haemolyticus, Streptococcus pneumoniae, Streptococcus mutans, Streptococcus pyogenes, Treponema pallidum, Ureaplasma urealyticum, Vibrio cholerae, Vibrio parahaemolyticus, Vibrio vulnificans, Yersinia enterocolitica, Yersinia pestis and any species falling within the genera of any of the above species.

[0427] 332. The method of Paragraph 328, wherein said sensitized cell is not an E. coli cell.

[0428] 333. The method of Paragraph 328, wherein said proliferation-required nucleic acid is from an organism other than E. coli.

[0429] 334. A compound which inhibits proliferation by interacting with a gene encoding a gene product required for proliferation or with a gene product required for proliferation, wherein said gene product is selected from the group consisting of a gene product having at least 70% nucleotide sequence identity as determined using BLASTN version 2.0 with the default parameters to a gene product whose expression is inhibited by an antisense nucleic acid comprising a nucleotide sequence selected from the group consisting of SEQ ID NOs.: 1-6213, a gene product encoded by a nucleic acid having at least 70% nucleotide sequence identity as determined using BLASTN version 2.0 with the default parameters to a nucleic acid encoding a gene product whose expression is inhibited by an antisense nucleic acid comprising a nucleotide sequence selected from the group consisting of SEQ ID NOs: 1-6213, a gene product having at least 25% amino acid identity as determined using FASTA version 3.0t78 with the default parameters to a gene product whose expression is inhibited by an antisense nucleic acid comprising a nucleotide sequence selected from the group consisting of SEQ ID NOs.: 1-6213, a gene product encoded by a nucleic acid comprising a nucleotide sequence which hybridizes to a nucleic acid selected from the group consisting of SEQ ID NOs.: 1-6213 under stringent conditions, a gene product encoded by a nucleic acid comprising a nucleotide sequence which hybridizes to a nucleic acid selected from the group consisting of SEQ ID NOs.: 1-6213 under moderate conditions, and a gene product whose activity may be complemented by the gene product whose activity is inhibited by a nucleic acid selected from the group consisting of SEQ ID NOs: 1-6213.

[0430] 335. The compound of Paragraph 334, wherein said gene product comprises a polypeptide having at least 25% amino acid identity as determined using FASTA version 3.0t78 with the default parameters to a sequence selected from the group consisting of SEQ ID NOs.: 42398-78581.

[0431] 336. The compound of Paragraph 334, wherein said gene comprises a nucleic acid selected from the group consisting of a nucleic acid comprising a nucleic acid having at least 70% nucleotide sequence identity as determined using BLASTN version 2.0 with the default parameters to a nucleotide sequence selected from the group consisting of SEQ ID NOS.: 6214-42397, a nucleic acid comprising a nucleotide sequence which hybridizes to a nucleotide sequence selected from the group consisting of SEQ ID NOS.: 6214-42397 under stringent conditions, and a nucleic acid comprising a nucleotide sequence which hybridizes to a nucleotide sequence selected from the group consisting of SEQ ID NOS.: 6214-42397 under moderate condtions.

[0432] 337. A method for manufacturing an antibiotic comprising the steps of:

[0433] screening one or more candidate compounds to identify a compound that reduces the activity or level of a gene product required for proliferation wherein said gene product is selected from the group consisting of a gene product having at least 70% nucleotide sequence identity as determined using BLASTN version 2.0 with the default parameters to a gene product whose expression is inhibited by an antisense nucleic acid comprising a nucleotide sequence selected from the group consisting of SEQ ID NOs.: 1-6213, a gene product encoded by a nucleic acid having at least 70% nucleotide sequence identity as determined using BLASTN version 2.0 with the default parameters to a nucleic acid encoding a gene product whose expression is inhibited by an antisense nucleic acid comprising a nucleotide sequence selected from the group consisting of SEQ ID NOs: 1-6213, a gene product having at least 25% amino acid identity as determined using FASTA version 3.0t78 with the default parameters to a gene product whose expression is inhibited by an antisense nucleic acid comprising a nucleotide sequence selected from the group consisting of SEQ ID NOs.: 1-6213, a gene product encoded by a nucleic acid comprising a nucleotide sequence which hybridizes to a nucleic acid selected from the group consisting of SEQ ID NOs.: 1-6213 under stringent conditions, a gene product encoded by a nucleic acid comprising a nucleotide sequence which hybridizes to a nucleic acid selected from the group consisting of SEQ ID NOs.: 1-6213 under moderate conditions, and a gene product whose activity may be complemented by the gene product whose activity is inhibited by a nucleic acid selected from the group consisting of SEQ ID NOs: 1-6213 ; and

[0434] manufacturing the compound so identified.

[0435] 338. The method of Paragraph 337, wherein said screening step comprises performing any one of the methods of Paragraphs 205, 211, 222, 275, 290, 295, 311.

[0436] 339. The method of Paragraph 337, wherein said gene product comprises a polypeptide having at least 25% amino acid identity as determined using FASTA version 3.0t78 with the default parameters to an amino acid sequence selected from the group consisting of SEQ ID NOs.: 42398-78581.

[0437] 340. A method for inhibiting proliferation of a cell in a subject comprising administering an effective amount of a compound that reduces the activity or level of a gene product required for proliferation of said cell, wherein said gene product is selected from the group consisting of a gene product having at least 70% nucleotide sequence identity as determined using BLASTN version 2.0 with the default parameters to a gene product whose expression is inhibited by an antisense nucleic acid comprising a nucleotide sequence selected from the group consisting of SEQ ID NOs.: 1-6213, a gene product encoded by a nucleic acid having at least 70% nucleotide sequence identity as determined using BLASTN version 2.0 with the default parameters to a nucleic acid encoding a gene product whose expression is inhibited by an antisense nucleic acid comprising a nucleotide sequence selected from the group consisting of SEQ ID NOs: 1-6213, a gene product having at least 25% amino acid identity as determined using FASTA version 3.0t78 with the default parameters to a gene product whose expression is inhibited by an antisense nucleic acid comprising a nucleotide sequence selected from the group consisting of SEQ ID NOs.: 1-6213, a gene product encoded by a nucleic acid comprising a nucleotide sequence which hybridizes to a nucleic acid selected from the group consisting of SEQ ID NOs.: 1-6213 under stringent conditions, a gene product encoded by a nucleic acid comprising a nucleotide sequence which hybridizes to a nucleic acid selected from the group consisting of SEQ ID NOs.: 1-6213 under moderate conditions, and a gene product whose activity may be complemented by the gene product whose activity is inhibited by a nucleic acid selected from the group consisting of SEQ ID NOs: 1-6213.

[0438] 341. The method of Paragraph 340 wherein said subject is selected from the group consisting of vertebrates, mammals, avians, and human beings.

[0439] 342. The method of Paragraph 340, wherein said gene product comprises a polypeptide having at least 25% amino acid identity as determined using FASTA version 3.0t78 with the default parameters to an amino acid sequence selected from the group consisting of SEQ ID NOs.: 42398-78581.

[0440] 343. The method of Paragraph 340, wherein said cell is selected from the group consisting of Acinetobacter baumannii, Anaplasma marginale, Aspergillus fumigatus, Bacillus anthracis, Bacteroides fragilis, Bordetella pertussis, Borrelia burgdorferi, Burkholderia cepacia, Burkholderia fungorum, Burkholderia mallei, Campylobacter jejuni, Candida albicans, Candida glabrata (also called Torulopsis glabrata), Candida tropicalis, Candida parapsilosis, Candida guilliermondii, Candida krusei, Candida kefyr (also called Candida pseudotropicalis), Candida dubliniensis, Chlamydia pneumoniae, Chlamydia trachomatis, Clostridium acetobutylicum, Clostridium botulinum, Clostridium difficile, Clostridium perfringens, Coccidioides immitis, Corynebacterium diptheriae, Cryptococcus neoformans, Enterobacter cloacae, Enterococcus faecalis, Enterococcus faecium, Escherichia coli, Haemophilus influenzae, Helicobacter pylori, Histoplasma capsulatum, Klebsiella pneumoniae, Legionella pneumophila, Listeria monocytogenes, Moraxella catarrhalis, Mycobacterium avium, Mycobacterium bovis, Mycobacterium leprae, Mycobacterium tuberculosis, Mycoplasma genitalium, Mycoplasma pneumoniae, Neisseria gonorrhoeae, Neisseria meningitidis, Nocardia asteroides, Pasteurella haemolytica, Pasteurella multocida, Pneumocystis carinii, Proteus mirabilis, Proteus vulgaris, Pseudomonas aeruginosa, Pseudomonas putida, Pseudomonas syringae, Salmonella bongori, Salmonella cholerasuis, Salmonella enterica, Salmonella paratyphi, Salmonella typhi, Salmonella typhimurium, Shigella boydii, Shigella dysenteriae, Shigella flexneri, Shigella sonnei, Staphylococcus aureus, Staphylococcus epidermidis, Staphylococcus haemolyticus, Streptococcus pneumoniae, Streptococcus mutans, Streptococcus pyogenes, Treponema pallidum, Ureaplasma urealyticum, Vibrio cholerae, Vibrio parahaemolyticus, Vibrio vulnificans, Yersinia enterocolitica, Yersinia pestis and any species falling within the genera of any of the above species.

[0441] 344. The method of Paragraph 340, wherein said cell is not E. coli.

[0442] 345. The method of Paragraph 340, wherein said gene product is from an organism other than E. coli.

[0443] 346. A method for identifying the gene product on which a compound which inhibits proliferation of an organism acts comprising:

[0444] obtaining a culture comprising a plurality of strains wherein each strain in said culture overexpresses a different gene product which is essential for proliferation of said organism, wherein said culture comprises a strain in which a gene product whose activity or level is inhibited by a nucleic acid comprising a nucleotide sequence selected from the group consisting of SEQ ID NOs.: 1-6213 is overexpressed;

[0445] contacting said culture with a sufficient concentration of said compound to inhibit the proliferation of strains of said organism which do not overexpress said gene product on which said compound acts, such that strains which overexpress said gene product on which said compound acts proliferate more rapidly than strains which do not overexpress said gene product on which said compound acts; and

[0446] identifying the gene product which is overexpressed in a strain which proliferated more rapidly in said culture.

[0447] 347. A method for identifying the gene product on which a compound which inhibits proliferation of an organism acts comprising:

[0448] obtaining a culture comprising a plurality of strains wherein each strain in said culture overexpresses a different gene product which is essential for proliferation of said organism, wherein said culture comprises a strain in which a gene product encoded by a nucleic acid comprising a nucleotide sequence selected from the group consisting of SEQ ID NOs.: 6214-42397 is overexpressed;

[0449] contacting said culture with a sufficient concentration of said compound to inhibit the proliferation of strains of said organism which do not overexpress said gene product on which said compound acts, such that strains which overexpress said gene product on which said compound acts proliferate more rapidly than strains which do not overexpress said gene product on which said compound acts; and

[0450] identifying the gene product which is overexpressed in a strain which proliferated more rapidly in said culture.

[0451] 348. A method for identifying the gene product on which a compound which inhibits proliferation of an organism acts comprising:

[0452] obtaining a culture comprising a plurality of strains wherein each strain in said culture overexpresses a different gene product which is essential for proliferation of said organism, wherein said culture comprises a strain in which a gene product comprising an amino acid sequence selected from the group consisting of SEQ ID NOs.: 42938-78581 is overexpressed;

[0453] contacting said culture with a sufficient concentration of said compound to inhibit the proliferation of strains of said organism which do not overexpress said gene product on which said compound acts, such that strains which overexpress said gene product on which said compound acts proliferate more rapidly than strains which do not overexpress said gene product on which said compound acts; and

[0454] identifying the gene product which is overexpressed in a strain which proliferated more rapidly in said culture.

[0455] 349. A method for identifying the gene product on which a compound which inhibits proliferation of an organism acts comprising:

[0456] obtaining a culture comprising a plurality of strains wherein each strain in said culture overexpresses a different gene product which is essential for proliferation of said organism, wherein said culture comprises a strain in which a gene product selected from the group consisting of a gene product having at least 70% nucleotide sequence identity as determined using BLASTN version 2.0 with the default parameters to a gene product whose expression is inhibited by an antisense nucleic acid comprising a nucleotide sequence selected from the group consisting of SEQ ID NOs.: 1-6213, a gene product encoded by a nucleic acid having at least 70% nucleotide sequence identity as determined using BLASTN version 2.0 with the default parameters to a nucleic acid encoding a gene product whose expression is inhibited by an antisense nucleic acid comprising a nucleotide sequence selected from the group consisting of SEQ ID NOs: 1-6213, a gene product having at least 25% amino acid identity as determined using FASTA version 3.0t78 with the default parameters to a gene product whose expression is inhibited by an antisense nucleic acid comprising a nucleotide sequence selected from the group consisting of SEQ ID NOs.: 1-6213, a gene product encoded by a nucleic acid which hybridizes to a nucleic acid comprising a nucleotide sequence selected from the group consisting of SEQ ID NOs.: 1-6213 under stringent conditions, a gene product encoded by a nucleic acid which hybridizes to a nucleic acid comprising a nucleotide sequence selected from the group consisting of SEQ ID NOs.: 1-6213 under moderate conditions, and a gene product whose activity may be complemented by the gene product whose activity is inhibited by a nucleic acid comprising a nucleotide sequence selected from the group consisting of SEQ ID NOs: 1-6213 is overexpressed;

[0457] contacting said culture with a sufficient concentration of said compound to inhibit the proliferation of strains of said organism which do not overexpress said gene product on which said compound acts, such that strains which overexpress said gene product on which said compound acts proliferate more rapidly than strains which do not overexpress said gene product on which said compound acts; and

[0458] identifying the gene product which is overexpressed in a strain which proliferated more rapidly in said culture.

[0459] 350. A method for identifying the gene product on which a compound which inhibits proliferation of an organism acts comprising:

[0460] obtaining a culture comprising a plurality of strains wherein each strain in said culture overexpresses a different gene product which is essential for proliferation of said organism, wherein said culture comprises a strain in which a gene product encoded by a nucleic acid comprising a nucleotide sequence selected from the group consisting of a nucleic acid comprising a nucleic acid having at least 70% nucleotide sequence identity as determined using BLASTN version 2.0 with the default parameters to a nucleotide sequence selected from the group consisting of SEQ ID NOS.: 6214-42397, a nucleic acid comprising a nucleotide sequence which hybridizes to a sequence selected from the group consisting of SEQ ID NOS.: 6214-42397 under stringent conditions, and a nucleic acid comprising a nucleotide sequence which hybridizes to a nucleotide sequence selected from the group consisting of SEQ ID NOS.: 6214-42397 under moderate conditions is overexpressed;

[0461] contacting said culture with a sufficient concentration of said compound to inhibit the proliferation of strains of said organism which do not overexpress said gene product on which said compound acts, such that strains which overexpress said gene product on which said compound acts proliferate more rapidly than strains which do not overexpress said gene product on which said compound acts; and

[0462] identifying the gene product which is overexpressed in a strain which proliferated more rapidly in said culture.

[0463] 351. A method for identifying the gene product on which a compound which inhibits proliferation of an organism acts comprising:

[0464] obtaining a culture comprising a plurality of strains wherein each strain in said culture overexpresses a different gene product which is essential for proliferation of said organism, wherein said culture comprises a strain in which a gene product comprises a polypeptide selected from the group consisting of a polypeptide having at least 25% amino acid identity as determined using FASTA version 3.0t78 to a polypeptide selected from the group consisting of SEQ ID NOs.: 42938-78581 and a polypeptide whose activity may be complemented by a polypeptide selected from the group consisting of SEQ ID NOs: 42938-78581 is overexpressed;

[0465] contacting said culture with a sufficient concentration of said compound to inhibit the proliferation of strains of said organism which do not overexpress said gene product on which said compound acts, such that strains which overexpress said gene product on which said compound acts proliferate more rapidly than strains which do not overexpress said gene product on which said compound acts; and

[0466] identifying the gene product which is overexpressed in a strain which proliferated more rapidly in said culture.

[0467] 352. The method of Paragraph 346, 347, 348, 349, 350 or 351, wherein said culture includes at least one strain which does not overexpresses a gene product which is essential for proliferation of said organism.

[0468] 353. The method of Paragraph 346, 347, 348, 349, 350 or 351, wherein said strains which overexpress said gene products comprise a nucleic acid encoding said gene product which is essential for proliferation of said organism operably linked to a regulatable promoter.

[0469] 354. The method of Paragraph 346, 347, 348, 349, 350 or 351, wherein said strains which overexpress said gene products a nucleic acid encoding said gene product which is essential for proliferation of said organism operably linked to a constitutive promoter.

[0470] 355. The method of Paragraph 346, 347, 348, 349, 350 or 351, wherein said identification step comprises determining the nucleotide sequence of a nucleic acid encoding said gene product in said cell which proliferated more rapidly in said culture.

[0471] 356. The method of Paragraph 346, 347, 348, 349, 350 or 351, wherein said identification step comprises performing an amplification reaction to identify the nucleic acid encoding said gene product in said cell which proliferated more rapidly in said cell culture.

[0472] 357. The method of Paragraph 356, wherein the products of said amplification reaction are labeled with a detectable dye.

[0473] 358. The method of Paragraph 346, 347, 348, 349, 350 or 351, wherein said identification step comprises performing a hybridization procedure.

[0474] 359. The method of Paragraph 346, 347, 348, 349, 350 or 351, wherein said identification step comprises contacting a nucleic acid array with a nucleic acid encoding said gene product in said cell which proliferated more rapidly in said cell culture.

[0475] 360. The method of Paragraph 346, 347, 348, 349, 350 or 351, wherein said organism is selected from the group consisting of bacteria, fungi, and protozoa.

[0476] 361. The method of Paragraph 346, 347, 348, 349, 350 or 351, wherein said culture is a culture of an organism selected from the group consisting of Acinetobacter baumannii, Anaplasma marginale, Aspergillus fumigatus, Bacillus anthracis, Bacteroides fragilis, Bordetella pertussis, Borrelia burgdorferi, Burkholderia cepacia, Burkholderia fungorum, Burkholderia mallei, Campylobacter jejuni, Candida albicans, Candida glabrata (also called Torulopsis glabrata), Candida tropicalis, Candida parapsilosis, Candida guilliermondii, Candida krusei, Candida kefyr (also called Candida pseudotropicalis), Candida dubliniensis, Chlamydia pneumoniae, Chlamydia trachomatis, Clostridium acetobutylicum, Clostridium botulinum, Clostridium difficile, Clostridium perfringens, Coccidioides immitis, Corynebacterium diptheriae, Cryptococcus neoformans, Enterobacter cloacae, Enterococcus faecalis, Enterococcus faecium, Escherichia coli, Haemophilus influenzae, Helicobacter pylori, Histoplasma capsulatum, Klebsiella pneumoniae, Legionella pneumophila, Listeria monocytogenes, Moraxella catarrhalis, Mycobacterium avium, Mycobacterium bovis, Mycobacterium leprae, Mycobacterium tuberculosis, Mycoplasma genitalium, Mycoplasma pneumoniae, Neisseria gonorrhoeae, Neisseria meningitidis, Nocardia asteroides, Pasteurella haemolytica, Pasteurella multocida, Pneumocystis carinii, Proteus mirabilis, Proteus vulgaris, Pseudomonas aeruginosa, Pseudomonas putida, Pseudomonas syringae, Salmonella bongori, Salmonella cholerasuis, Salmonella enterica, Salmonella paratyphi, Salmonella typhi, Salmonella typhimurium, Shigella boydii, Shigella dysenteriae, Shigella flexneri, Shigella sonnei, Staphylococcus aureus, Staphylococcus epidermidis, Staphylococcus haemolyticus, Streptococcus pneumoniae, Streptococcus mutans, Streptococcus pyogenes, Treponema pallidum, Ureaplasma urealyticum, Vibrio cholerae, Vibrio parahaemolyticus, Vibrio vulnificans, Yersinia enterocolitica, Yersinia pestis and any species falling within the genera of any of the above species.

[0477] 362. The method of Paragraph 346, 347, 348, 349, 350 or 351, wherein said compound is obtained from a library of natural compounds.

[0478] 363. The method of Paragraph 346, 347, 348, 349, 350 or 351, wherein said compound is obtained from a library of synthetic compounds.

[0479] 364. The method of Paragraph 346, 347, 348, 349, 350 or 351, wherein said compound is present in a crude or partially purified state.

[0480] 365. The method of Paragraph 346, 347, 348, 349, 350 or 351, further comprising determining whether said gene product in said strain which proliferated more rapidly in said culture has a counterpart in at least one other organism.

[0481] 366. A method for identifying the gene product on which a compound which inhibits proliferation of an organism acts comprising:

[0482] obtaining an array of strains on a solid growth medium wherein each strain overexpresses a different gene product which is essential for proliferation of said organism, wherein said culture comprises a strain in which a gene product whose activity or level is inhibited by a nucleic acid comprising a nucleotide sequence selected from the group consisting of SEQ ID NOs.: 1-6213 is overexpressed;

[0483] contacting said array of strains with a sufficient concentration of said compound to inhibit the proliferation of strains of said organism which do not overexpress said gene product on which said compound acts, such that strains which overexpress said gene product on which said compound acts proliferate more rapidly than strains which do not overexpress said gene product on which said compound acts; and

[0484] identifying the gene product which is overexpressed in a strain which proliferated more rapidly on said solid medium.

[0485] 367. A method for identifying the gene product on which a compound which inhibits proliferation of an organism acts comprising:

[0486] obtaining an array of strains on a solid growth medium wherein each strain overexpresses a different gene product which is essential for proliferation of said organism, wherein said culture comprises a strain in which a gene product encoded by a nucleic acid comprising a nucleotide sequence selected from the group consisting of SEQ ID NOs.: 6214-42397 is overexpressed;

[0487] contacting said array of strains with a sufficient concentration of said compound to inhibit the proliferation of strains of said organism which do not overexpress said gene product on which said compound acts, such that strains which overexpress said gene product on which said compound acts proliferate more rapidly than strains which do not overexpress said gene product on which said compound acts; and

[0488] identifying the gene product which is overexpressed in a strain which proliferated more rapidly on said solid medium.

[0489] 368. A method for identifying the gene product on which a compound which inhibits proliferation of an organism acts comprising:

[0490] obtaining an array of strains on a solid growth medium wherein each strain overexpresses a different gene product which is essential for proliferation of said organism, wherein said culture comprises a strain in which a gene product comprising an amino acid sequence selected from the group consisting of SEQ ID NOs.: 42938-78581 is overexpressed;

[0491] contacting said array of strains with a sufficient concentration of said compound to inhibit the proliferation of strains of said organism which do not overexpress said gene product on which said compound acts, such that strains which overexpress said gene product on which said compound acts proliferate more rapidly than strains which do not overexpress said gene product on which said compound acts; and

[0492] identifying the gene product which is overexpressed in a strain which proliferated more rapidly on said solid medium.

[0493] 369. A method for identifying the gene product on which a compound which inhibits proliferation of an organism acts comprising:

[0494] obtaining an array of strains on a solid growth medium wherein each strain overexpresses a different gene product which is essential for proliferation of said organism, wherein said culture comprises a strain in which a gene product selected from the group consisting of a gene product having at least 70% nucleotide sequence identity as determined using BLASTN version 2.0 with the default parameters to a gene product whose expression is inhibited by an antisense nucleic acid comprising a nucleotide sequence selected from the group consisting of SEQ ID NOs.: 1-6213, a gene product encoded by a nucleic acid having at least 70% nucleotide sequence identity as determined using BLASTN version 2.0 with the default parameters to a nucleic acid encoding a gene product whose expression is inhibited by an antisense nucleic acid comprising a nucleotide sequence selected from the group consisting of SEQ ID NOs: 1-6213, a gene product having at least 25% amino acid identity as determined using FASTA version 3.0t78 with the default parameters to a gene product whose expression is inhibited by an antisense nucleic acid comprising a nucleotide sequence selected from the group consisting of SEQ ID NOs.: 1-6213, a gene product encoded by a nucleic acid which hybridizes to a nucleic acid comprising a nucleotide sequence selected from the group consisting of SEQ ID NOs.: 1-6213 under stringent conditions, a gene product encoded by a nucleic acid which hybridizes to a nucleic acid comprising a nucleotide sequence selected from the group consisting of SEQ ID NOs.: 1-6213 under moderate conditions, and a gene product whose activity may be complemented by the gene product whose activity is inhibited by a nucleic acid comprising a nucleotide sequence selected from the group consisting of SEQ ID NOs: 1-6213 is overexpressed;

[0495] contacting said array of strains with a sufficient concentration of said compound to inhibit the proliferation of strains of said organism which do not overexpress said gene product on which said compound acts, such that strains which overexpress said gene product on which said compound acts proliferate more rapidly than strains which do not overexpress said gene product on which said compound acts; and

[0496] identifying the gene product which is overexpressed in a strain which proliferated more rapidly on said solid medium.

[0497] 370. A method for identifying the gene product on which a compound which inhibits proliferation of an organism acts comprising:

[0498] obtaining an array of strains on a solid growth medium wherein each strain overexpresses a different gene product which is essential for proliferation of said organism, wherein said culture comprises a strain in which a gene product encoded by a nucleic acid comprising a nucleotide sequence selected from the group consisting of a nucleic acid comprising a nucleic acid having at least 70% nucleotide sequence identity as determined using BLASTN version 2.0 with the default parameters to a nucleotide sequence selected from the group consisting of SEQ ID NOS.: 6214-42397, a nucleic acid comprising a nucleotide sequence which hybridizes to a sequence selected from the group consisting of SEQ ID NOS.: 6214-42397 under stringent conditions, and a nucleic acid comprising a nucleotide sequence which hybridizes to a nucleotide sequence selected from the group consisting of SEQ ID NOS.: 6214-42397 under moderate conditions is overexpressed;

[0499] contacting said array of strains with a sufficient concentration of said compound to inhibit the proliferation of strains of said organism which do not overexpress said gene product on which said compound acts, such that strains which overexpress said gene product on which said compound acts proliferate more rapidly than strains which do not overexpress said gene product on which said compound acts; and

[0500] identifying the gene product which is overexpressed in a strain which proliferated more rapidly on said solid medium.

[0501] 371. A method for identifying the gene product on which a compound which inhibits proliferation of an organism acts comprising:

[0502] obtaining an array of strains on a solid growth medium wherein each strain overexpresses a different gene product which is essential for proliferation of said organism, wherein said culture comprises a strain in which a gene product comprises a polypeptide selected from the group consisting of a polypeptide having at least 25% amino acid identity as determined using FASTA version 3.0t78 to a polypeptide selected from the group consisting of SEQ ID NOs.: 42938-78581 and a polypeptide whose activity may be complemented by a polypeptide selected from the group consisting of SEQ ID NOs: 42938-78581 is overexpressed;

[0503] contacting said array of strains with a sufficient concentration of said compound to inhibit the proliferation of strains of said organism which do not overexpress said gene product on which said compound acts, such that strains which overexpress said gene product on which said compound acts proliferate more rapidly than strains which do not overexpress said gene product on which said compound acts; and

[0504] identifying the gene product which is overexpressed in a strain which proliferated more rapidly on said solid medium.

[0505] 372. The method of Paragraph 366, 367, 368, 369, 370 or 371, wherein at least one strain in said array does not overexpresses a gene product which is essential for proliferation of said organism.

[0506] 373. A method for identifying the gene product on which a compound which inhibits proliferation of an organism acts comprising:

[0507] obtaining a plurality of cultures, wherein each culture comprises a plurality of strains wherein each strain overexpresses a different gene product which is essential for proliferation of said organism, wherein said culture comprises a strain in which a gene product whose activity or level is inhibited by a nucleic acid comprising a nucleotide sequence selected from the group consisting of SEQ ID NOs.: 1-6213 is overexpressed;

[0508] contacting each of said cultures with a different concentration of said compound; and

[0509] identifying the gene product which is overexpressed in a strain whose proliferation is inhibited by said compound.

[0510] 374. A method for identifying the gene product on which a compound which inhibits proliferation of an organism acts comprising:

[0511] obtaining a plurality of cultures, wherein each culture comprises a plurality of strains wherein each strain overexpresses a different gene product which is essential for proliferation of said organism, wherein said culture comprises a strain in which a gene product encoded by a nucleic acid comprising a nucleotide sequence selected from the group consisting of SEQ ID NOs.: 6214-42397 is overexpressed;

[0512] contacting each of said cultures with a different concentration of said compound; and

[0513] identifying the gene product which is overexpressed in a strain whose proliferation is inhibited by said compound.

[0514] 375. A method for identifying the gene product on which a compound which inhibits proliferation of an organism acts comprising:

[0515] obtaining a plurality of cultures, wherein each culture comprises a plurality of strains wherein each strain overexpresses a different gene product which is essential for proliferation of said organism, wherein said culture comprises a strain in which a gene product comprising an amino acid sequence selected from the group consisting of SEQ ID NOs.: 42938-78581 is overexpressed;

[0516] contacting each of said cultures with a different concentration of said compound; and

[0517] identifying the gene product which is overexpressed in a strain whose proliferation is inhibited by said compound.

[0518] 376. A method for identifying the gene product on which a compound which inhibits proliferation of an organism acts comprising:

[0519] obtaining a plurality of cultures, wherein each culture comprises a plurality of strains wherein each strain overexpresses a different gene product which is essential for proliferation of said organism, wherein said culture comprises a strain in which a gene product selected from the group consisting of a gene product having at least 70% nucleotide sequence identity as determined using BLASTN version 2.0 with the default parameters to a gene product whose expression is inhibited by an antisense nucleic acid comprising a nucleotide sequence selected from the group consisting of SEQ ID NOs.: 1-6213, a gene product encoded by a nucleic acid having at least 70% nucleotide sequence identity as determined using BLASTN version 2.0 with the default parameters to a nucleic acid encoding a gene product whose expression is inhibited by an antisense nucleic acid comprising a nucleotide sequence selected from the group consisting of SEQ ID NOs: 1-6213, a gene product having at least 25% amino acid identity as determined using FASTA version 3.0t78 with the default parameters to a gene product whose expression is inhibited by an antisense nucleic acid comprising a nucleotide sequence selected from the group consisting of SEQ ID NOs.: 1-6213, a gene product encoded by a nucleic acid which hybridizes to a nucleic acid comprising a nucleotide sequence selected from the group consisting of SEQ ID NOs.: 1-6213 under stringent conditions, a gene product encoded by a nucleic acid which hybridizes to a nucleic acid comprising a nucleotide sequence selected from the group consisting of SEQ ID NOs.: 1-6213 under moderate conditions, and a gene product whose activity may be complemented by the gene product whose activity is inhibited by a nucleic acid comprising a nucleotide sequence selected from the group consisting of SEQ ID NOs: 1-6213 is overexpressed;

[0520] contacting each of said cultures with a different concentration of said compound; and

[0521] identifying the gene product which is overexpressed in a strain whose proliferation is inhibited by said compound.

[0522] 377. A method for identifying the gene product on which a compound which inhibits proliferation of an organism acts comprising:

[0523] obtaining a plurality of cultures, wherein each culture comprises a plurality of strains wherein each strain overexpresses a different gene product which is essential for proliferation of said organism, wherein said culture comprises a strain in which a gene product encoded by a nucleic acid comprising a nucleotide sequence selected from the group consisting of a nucleic acid comprising a nucleic acid having at least 70% nucleotide sequence identity as determined using BLASTN version 2.0 with the default parameters to a nucleotide sequence selected from the group consisting of SEQ ID NOS.: 6214-42397, a nucleic acid comprising a nucleotide sequence which hybridizes to a sequence selected from the group consisting of SEQ ID NOS.: 6214-42397 under stringent conditions, and a nucleic acid comprising a nucleotide sequence which hybridizes to a nucleotide sequence selected from the group consisting of SEQ ID NOS.: 6214-42397 under moderate conditions is overexpressed;

[0524] contacting each of said cultures with a different concentration of said compound; and

[0525] identifying the gene product which is overexpressed in a strain whose proliferation is inhibited by said compound.

[0526] 378. A method for identifying the gene product on which a compound which inhibits proliferation of an organism acts comprising:

[0527] obtaining a plurality of cultures, wherein each culture comprises a plurality of strains wherein each strain overexpresses a different gene product which is essential for proliferation of said organism, wherein said culture comprises a strain in which a gene product comprises a polypeptide selected from the group consisting of a polypeptide having at least 25% amino acid identity as determined using FASTA version 3.0t78 to a polypeptide selected from the group consisting of SEQ ID NOs.: 42938-78581 and a polypeptide whose activity may be complemented by a polypeptide selected from the group consisting of SEQ ID NOs: 42938-78581 is overexpressed;

[0528] contacting each of said cultures with a different concentration of said compound; and

[0529] identifying the gene product which is overexpressed in a strain whose proliferation is inhibited by said compound.

[0530] 379. The method of Paragraph 373, 374, 375, 376, 377 or 378, wherein at least one strain in said plurality of cultures does not overexpress a gene product which is essential for proliferation of said organism.

[0531] 380. A method of profiling a compound's activity comprising:

[0532] performing the method of Paragraph 346 on a first culture using a first compound;

[0533] performing the method of Paragraph 346 on a second culture using a second compound; and

[0534] comparing the strains identified in said first culture to the strains identified in said second culture.

[0535] 381. A method of profiling a compound's activity comprising:

[0536] performing the method of Paragraph 347 on a first culture using a first compound;

[0537] performing the method of Paragraph 347 on a second culture using a second compound; and

[0538] comparing the strains identified in said first culture to the strains identified in said second culture.

[0539] 382. A method of profiling a compound's activity comprising:

[0540] performing the method of Paragraph 348 on a first culture using a first compound;

[0541] performing the method of Paragraph 348 on a second culture using a second compound; and

[0542] comparing the strains identified in said first culture to the strains identified in said second culture.

[0543] 383. A method of profiling a compound's activity comprising:

[0544] performing the method of Paragraph 349 on a first culture using a first compound;

[0545] performing the method of Paragraph 349 on a second culture using a second compound; and

[0546] comparing the strains identified in said first culture to the strains identified in said second culture.

[0547] 384. A method of profiling a compound's activity comprising:

[0548] performing the method of Paragraph 350 on a first culture using a first compound;

[0549] performing the method of Paragraph 350 on a second culture using a second compound; and

[0550] comparing the strains identified in said first culture to the strains identified in said second culture.

[0551] 385. A method of profiling a compound's activity comprising:

[0552] performing the method of Paragraph 351 on a first culture using a first compound;

[0553] performing the method of Paragraph 351 on a second culture using a second compound; and

[0554] comparing the strains identified in said first culture to the strains identified in said second culture.

[0555] b 386. A method of profiling a first compound's activity comprising:

[0556] growing an array of strains on a first solid medium comprising said first compound and on a second solid medium comprising a second compound, wherein each strain in said array overexpresses a different gene product which is essential for proliferation of an organism, wherein said culture comprises a strain in which a gene product whose activity or level is inhibited by a nucleic acid comprising a nucleotide sequence selected from the group consisting of SEQ ID NOs.: 1-6213 is overexpressed, and wherein said first compound and said second compound inhibit the proliferation of said organism; and

[0557] comparing the pattern of strains which grow on said first solid medium with the pattern of strains which grow on said second solid medium.

[0558] 387. A method of profiling a first compound's activity comprising:

[0559] growing an array of strains on a first solid medium comprising said first compound and on a second solid medium comprising a second compound, wherein each strain in said array overexpresses a different gene product which is essential for proliferation of an organism, wherein said culture comprises a strain in which a gene product encoded by a nucleic acid comprising a nucleotide sequence selected from the group consisting of SEQ ID NOs.: 6214-42397 is overexpressed, and wherein said first compound and said second compound inhibit the proliferation of said organism; and

[0560] comparing the pattern of strains which grow on said first solid medium with the pattern of strains which grow on said second solid medium.

[0561] 388. A method of profiling a first compound's activity comprising:

[0562] growing an array of strains on a first solid medium comprising said first compound and on a second solid medium comprising a second compound, wherein each strain in said array overexpresses a different gene product which is essential for proliferation of an organism, wherein said culture comprises a strain in which a gene product comprising an amino acid sequence selected from the group consisting of SEQ ID NOs.: 42938-78581 is overexpressed, and wherein said first compound and said second compound inhibit the proliferation of said organism; and

[0563] comparing the pattern of strains which grow on said first solid medium with the pattern of strains which grow on said second solid medium.

[0564] 389. A method of profiling a first compound's activity comprising:

[0565] growing an array of strains on a first solid medium comprising said first compound and on a second solid medium comprising a second compound, wherein each strain in said array overexpresses a different gene product which is essential for proliferation of an organism, wherein said culture comprises a strain in which a gene product selected from the group consisting of a gene product having at least 70% nucleotide sequence identity as determined using BLASTN version 2.0 with the default parameters to a gene product whose expression is inhibited by an antisense nucleic acid comprising a nucleotide sequence selected from the group consisting of SEQ ID NOs.: 1-6213, a gene product encoded by a nucleic acid having at least 70% nucleotide sequence identity as determined using BLASTN version 2.0 with the default parameters to a nucleic acid encoding a gene product whose expression is inhibited by an antisense nucleic acid comprising a nucleotide sequence selected from the group consisting of SEQ ID NOs: 1-6213, a gene product having at least 25% amino acid identity as determined using FASTA version 3.0t78 with the default parameters to a gene product whose expression is inhibited by an antisense nucleic acid comprising a nucleotide sequence selected from the group consisting of SEQ ID NOs.: 1-6213, a gene product encoded by a nucleic acid which hybridizes to a nucleic acid comprising a nucleotide sequence selected from the group consisting of SEQ ID NOs.: 1-6213 under stringent conditions, a gene product encoded by a nucleic acid which hybridizes to a nucleic acid comprising a nucleotide sequence selected from the group consisting of SEQ ID NOs.: 1-6213 under moderate conditions, and a gene product whose activity may be complemented by the gene product whose activity is inhibited by a nucleic acid comprising a nucleotide sequence selected from the group consisting of SEQ ID NOs: 1-6213 is overexpressed, and wherein said first compound and said second compound inhibit the proliferation of said organism; and

[0566] comparing the pattern of strains which grow on said first solid medium with the pattern of strains which grow on said second solid medium.

[0567] 390. A method of profiling a first compound's activity comprising:

[0568] growing an array of strains on a first solid medium comprising said first compound and on a second solid medium comprising a second compound, wherein each strain in said array overexpresses a different gene product which is essential for proliferation of an organism, wherein said culture comprises a strain in which a gene product encoded by a nucleic acid comprising a nucleotide sequence selected from the group consisting of a nucleic acid comprising a nucleic acid having at least 70% nucleotide sequence identity as determined using BLASTN version 2.0 with the default parameters to a nucleotide sequence selected from the group consisting of SEQ ID NOS.: 6214-42397, a nucleic acid comprising a nucleotide sequence which hybridizes to a sequence selected from the group consisting of SEQ ID NOS.: 6214-42397 under stringent conditions, and a nucleic acid comprising a nucleotide sequence which hybridizes to a nucleotide sequence selected from the group consisting of SEQ ID NOS.: 6214-42397 under moderate conditions is overexpressed, and wherein said first compound and said second compound inhibit the proliferation of said organism; and

[0569] comparing the pattern of strains which grow on said first solid medium with the pattern of strains which grow on said second solid medium.

[0570] 391. A method of profiling a first compound's activity comprising:

[0571] growing an array of strains on a first solid medium comprising said first compound and on a second solid medium comprising a second compound, wherein each strain in said array overexpresses a different gene product which is essential for proliferation of an organism, wherein said culture comprises a strain in which a gene product comprises a polypeptide selected from the group consisting of a polypeptide having at least 25% amino acid identity as determined using FASTA version 3.0t78 to a polypeptide selected from the group consisting of SEQ ID NOs.: 42938-78581 and a polypeptide whose activity may be complemented by a polypeptide selected from the group consisting of SEQ ID NOs: 42938-78581 is overexpressed, and wherein said first compound and said second compound inhibit the proliferation of said organism; and

[0572] comparing the pattern of strains which grow on said first solid medium with the pattern of strains which grow on said second solid medium.

[0573] 392. The method of any one of Paragraphs 380, 381, 382, 383, 384, 385, 386, 387, 388, 389, 390 or 391, wherein said first compound is present in a crude or partially purified state.

[0574] 393. A method for identifying the gene product on which a compound which inhibits proliferation of an organism acts comprising:

[0575] obtaining a culture comprising a plurality of strains wherein each strain underexpresses a different gene product which is essential for proliferation of said organism, wherein said culture comprises a strain in which a gene product whose activity or level is inhibited by a nucleic acid comprising a nucleotide sequence selected from the group consisting of SEQ ID NOs.: 1-6213 is underexpressed;

[0576] contacting said culture with a sufficient concentration of said compound to inhibit the proliferation of strains of said organism which underexpress said gene product on which said compound acts, such that strains which underexpress said gene product on which said compound acts proliferate more slowly than strains which do not underexpress said gene product on which said compound acts; and

[0577] identifying the gene product which is underexpressed in a strain which proliferated more slowly in said culture.

[0578] 394. A method for identifying the gene product on which a compound which inhibits proliferation of an organism acts comprising:

[0579] obtaining a culture comprising a plurality of strains wherein each strain underexpresses a different gene product which is essential for proliferation of said organism, wherein said culture comprises a strain in which a gene product encoded by a nucleic acid comprising a nucleotide sequence selected from the group consisting of SEQ ID NOs.: 6214-42397 is underexpressed;

[0580] contacting said culture with a sufficient concentration of said compound to inhibit the proliferation of strains of said organism which underexpress said gene product on which said compound acts, such that strains which underexpress said gene product on which said compound acts proliferate more slowly than strains which do not underexpress said gene product on which said compound acts; and

[0581] identifying the gene product which is underexpressed in a strain which proliferated more slowly in said culture.

[0582] 395. A method for identifying the gene product on which a compound which inhibits proliferation of an organism acts comprising:

[0583] obtaining a culture comprising a plurality of strains wherein each strain underexpresses a different gene product which is essential for proliferation of said organism, wherein said culture comprises a strain in which a gene product comprising an amino acid sequence selected from the group consisting of SEQ ID NOs.: 42938-78581 is underexpressed;

[0584] contacting said culture with a sufficient concentration of said compound to inhibit the proliferation of strains of said organism which underexpress said gene product on which said compound acts, such that strains which underexpress said gene product on which said compound acts proliferate more slowly than strains which do not underexpress said gene product on which said compound acts; and

[0585] identifying the gene product which is underexpressed in a strain which proliferated more slowly in said culture.

[0586] 396. A method for identifying the gene product on which a compound which inhibits proliferation of an organism acts comprising:

[0587] obtaining a culture comprising a plurality of strains wherein each strain underexpresses a different gene product which is essential for proliferation of said organism, wherein said culture comprises a strain in which a gene product selected from the group consisting of a gene product having at least 70% nucleotide sequence identity as determined using BLASTN version 2.0 with the default parameters to a gene product whose expression is inhibited by an antisense nucleic acid comprising a nucleotide sequence selected from the group consisting of SEQ ID NOs.: 1-6213, a gene product encoded by a nucleic acid having at least 70% nucleotide sequence identity as determined using BLASTN version 2.0 with the default parameters to a nucleic acid encoding a gene product whose expression is inhibited by an antisense nucleic acid comprising a nucleotide sequence selected from the group consisting of SEQ ID NOs: 1-6213, a gene product having at least 25% amino acid identity as determined using FASTA version 3.0t78 with the default parameters to a gene product whose expression is inhibited by an antisense nucleic acid comprising a nucleotide sequence selected from the group consisting of SEQ ID NOs.: 1-6213, a gene product encoded by a nucleic acid which hybridizes to a nucleic acid comprising a nucleotide sequence selected from the group consisting of SEQ ID NOs.: 1-6213 under stringent conditions, a gene product encoded by a nucleic acid which hybridizes to a nucleic acid comprising a nucleotide sequence selected from the group consisting of SEQ ID NOs.: 1-6213 under moderate conditions, and a gene product whose activity may be complemented by the gene product whose activity is inhibited by a nucleic acid comprising a nucleotide sequence selected from the group consisting of SEQ ID NOs: 1-6213 is underexpressed;

[0588] contacting said culture with a sufficient concentration of said compound to inhibit the proliferation of strains of said organism which underexpress said gene product on which said compound acts, such that strains which underexpress said gene product on which said compound acts proliferate more slowly than strains which do not underexpress said gene product on which said compound acts; and

[0589] identifying the gene product which is underexpressed in a strain which proliferated more slowly in said culture.

[0590] 397. A method for identifying the gene product on which a compound which inhibits proliferation of an organism acts comprising:

[0591] obtaining a culture comprising a plurality of strains wherein each strain underexpresses a different gene product which is essential for proliferation of said organism, wherein said culture comprises a strain in which a gene product encoded by a nucleic acid comprising a nucleotide sequence selected from the group consisting of a nucleic acid comprising a nucleic acid having at least 70% nucleotide sequence identity as determined using BLASTN version 2.0 with the default parameters to a nucleotide sequence selected from the group consisting of SEQ ID NOS.: 6214-42397, a nucleic acid comprising a nucleotide sequence which hybridizes to a sequence selected from the group consisting of SEQ ID NOS.: 6214-42397 under stringent conditions, and a nucleic acid comprising a nucleotide sequence which hybridizes to a nucleotide sequence selected from the group consisting of SEQ ID NOS.: 6214-42397 under moderate conditions is underexpressed;

[0592] contacting said culture with a sufficient concentration of said compound to inhibit the proliferation of strains of said organism which underexpress said gene product on which said compound acts, such that strains which underexpress said gene product on which said compound acts proliferate more slowly than strains which do not underexpress said gene product on which said compound acts; and

[0593] identifying the gene product which is underexpressed in a strain which proliferated more slowly in said culture.

[0594] 398. A method for identifying the gene product on which a compound which inhibits proliferation of an organism acts comprising:

[0595] obtaining a culture comprising a plurality of strains wherein each strain underexpresses a different gene product which is essential for proliferation of said organism, wherein said culture comprises a strain in which a gene product comprises a polypeptide selected from the group consisting of a polypeptide having at least 25% amino acid identity as determined using FASTA version 3.0t78 to a polypeptide selected from the group consisting of SEQ ID NOs.: 42938-78581 and a polypeptide whose activity may be complemented by a polypeptide selected from the group consisting of SEQ ID NOs: 42938-78581 is underexpressed;

[0596] contacting said culture with a sufficient concentration of said compound to inhibit the proliferation of strains of said organism which underexpress said gene product on which said compound acts, such that strains which underexpress said gene product on which said compound acts proliferate more slowly than strains which do not underexpress said gene product on which said compound acts; and

[0597] identifying the gene product which is underexpressed in a strain which proliferated more slowly in said culture.

[0598] 399. The method of Paragraph 393, 394, 395, 396, 397 or 398, wherein at least one strain in said culture does not underexpresses a gene product which is essential for proliferation of said organism.

[0599] 400. The method of Paragraph 393, 394, 395, 396, 397 or 398, wherein said strains which underexpresess said gene products comprise a nucleic acid complementary to at least a portion of a gene encoding said gene product which is essential for proliferation of said organism operably linked to a regulatable promoter.

[0600] 401. The method of Paragraph 393, 394, 395, 396, 397 or 398, wherein said strains which underexpress said gene products express an antisense nucleic acid complementary to at least a portion of a gene encoding said gene product which is essential for proliferation of said organism, wherein expression of said antisense nucleic acid reduces expression of said gene product in said strain.

[0601] 402. The method of Paragraph 393, 394, 395, 396, 397 or 398, wherein said identification step comprises determining the nucleotide sequence of a nucleic acid encoding said gene product in said strain which proliferated more slowly.

[0602] 403. The method of Paragraph 393, 394, 395, 396, 397 or 398, wherein said identification step comprises performing an amplification reaction to identify the nucleic acid encoding said gene product in said cell which proliferated more slowly.

[0603] 404. The method of Paragraph 393, 394, 395, 396, 397 or 398, wherein the products of said amplification reaction are labeled with a detectable dye.

[0604] 405. The method of Paragraph 404, wherein said identification step comprises performing a hybridization procedure.

[0605] 406. The method of Paragraph 393, 394, 395, 396, 397 or 398, wherein said identification step comprises contacting a nucleic acid array with a nucleic acid encoding said gene product in said cell which proliferated more slowly.

[0606] 407. The method of Paragraph 393, 394, 395, 396, 397 or 398, wherein said organism is selected from the group consisting of bacteria, fungi, protozoa.

[0607] 408. The method of Paragraph 393, 394, 395, 396, 397 or 398, wherein said culture is a culture of an organism selected from the group consisting of Acinetobacter baumannii, Anaplasma marginale, Aspergillus fumigatus, Bacillus anthracis, Bacteroides fragilis, Bordetella pertussis, Borrelia burgdorferi, Burkholderia cepacia, Burkholderia fungorum, Burkholderia mallei Campylobacter jejuni, Candida albicans, Candida glabrata (also called Torulopsis glabrata), Candida tropicalis, Candida parapsilosis, Candida guilliermondii, Candida krusei, Candida kefyr (also called Candida pseudotropicalis), Candida dubliniensis, Chlamydia pneumoniae, Chlamydia trachomatis, Clostridium acetobutylicum, Clostridium botulinum, Clostridium difficile, Clostridium perfringens, Coccidioides immitis, Corynebacterium diptheriae, Cryptococcus neoformans, Enterobacter cloacae, Enterococcus faecalis, Enterococcus faecium, Escherichia coli, Haemophilus influenzae, Helicobacter pylori, Histoplasma capsulatum, Klebsiella pneumoniae, Legionella pneumophila, Listeria monocytogenes, Moraxella catarrhalis, Mycobacterium avium, Mycobacterium bovis, Mycobacterium leprae, Mycobacterium tuberculosis, Mycoplasma genitalium, Mycoplasma pneumoniae, Neisseria gonorrhoeae, Neisseria meningitidis, Nocardia asteroides, Pasteurella haemolytica, Pasteurella multocida, Pneumocystis carinii, Proteus mirabilis, Proteus vulgaris, Pseudomonas aeruginosa, Pseudomonas putida, Pseudomonas syringae, Salmonella bongori, Salmonella cholerasuis, Salmonella enterica, Salmonella paratyphi, Salmonella typhi, Salmonella typhimurium, Shigella boydii, Shigella dysenteriae, Shigella flexneri, Shigella sonnei, Staphylococcus aureus, Staphylococcus epidermidis, Staphylococcus haemolyticus, Streptococcus pneumoniae, Streptococcus mutans, Streptococcus pyogenes, Treponema pallidum, Ureaplasma urealyticum, Vibrio cholerae, Vibrio parahaemolyticus, Vibrio vulnificans, Yersinia enterocolitica, Yersinia pestis and any species falling within the genera of any of the above species.

[0608] 409. The method of Paragraph 393, 394, 395, 396, 397 or 398, wherein said compound is obtained from a library of natural compounds.

[0609] 410. The method of Paragraph 393, 394, 395, 396, 397 or 398, wherein said compound is obtained from a library of synthetic compounds.

[0610] 411. The method of Paragraph 393, 394, 395, 396, 397 or 398, wherein said compound is present in a crude or partially purified state.

[0611] 412. The method of Paragraph 393, 394, 395, 396, 397 or 398, further comprising determining whether said gene product in said strain which proliferated more slowly in said culture has a counterpart in at least one other organism.

[0612] 413. A method for identifying the gene product on which a compound which inhibits proliferation of an organism acts comprising:

[0613] obtaining a plurality of cultures, each culture comprising a plurality of strains wherein each strain underexpresses a different gene product which is essential for proliferation of said organism, wherein said culture comprises a strain in which a gene product whose activity or level is inhibited by a nucleic acid comprising a nucleotide sequence selected from the group consisting of SEQ ID NOs.: 1-6213 is underexpressed;

[0614] contacting each of said cultures with a different concentration of said compound; and

[0615] identifying the gene product which is underexpressed in a strain whose rate of proliferation is reduced by said compound.

[0616] 414. A method for identifying the gene product on which a compound which inhibits proliferation of an organism acts comprising:

[0617] obtaining a plurality of cultures, each culture comprising a plurality of strains wherein each strain underexpresses a different gene product which is essential for proliferation of said organism, wherein said culture comprises a strain in which a gene product encoded by a nucleic acid comprising a nucleotide sequence selected from the group consisting of SEQ ID NOs.: 6214-42397 is underexpressed;

[0618] contacting each of said cultures with a different concentration of said compound; and

[0619] identifying the gene product which is underexpressed in a strain whose rate of proliferation is reduced by said compound.

[0620] 415. A method for identifying the gene product on which a compound which inhibits proliferation of an organism acts comprising:

[0621] obtaining a plurality of cultures, each culture comprising a plurality of strains wherein each strain underexpresses a different gene product which is essential for proliferation of said organism, wherein said culture comprises a strain in which a gene product comprising an amino acid sequence selected from the group consisting of SEQ ID NOs.: 42938-78581 is underexpressed;

[0622] contacting each of said cultures with a different concentration of said compound; and

[0623] identifying the gene product which is underexpressed in a strain whose rate of proliferation is reduced by said compound.

[0624] 416. A method for identifying the gene product on which a compound which inhibits proliferation of an organism acts comprising:

[0625] obtaining a plurality of cultures, each culture comprising a plurality of strains wherein each strain underexpresses a different gene product which is essential for proliferation of said organism, wherein said culture comprises a strain in which a gene product selected from the group consisting of a gene product having at least 70% nucleotide sequence identity as determined using BLASTN version 2.0 with the default parameters to a gene product whose expression is inhibited by an antisense nucleic acid comprising a nucleotide sequence selected from the group consisting of SEQ ID NOs.: 1-6213, a gene product encoded by a nucleic acid having at least 70% nucleotide sequence identity as determined using BLASTN version 2.0 with the default parameters to a nucleic acid encoding a gene product whose expression is inhibited by an antisense nucleic acid comprising a nucleotide sequence selected from the group consisting of SEQ ID NOs: 1-6213, a gene product having at least 25% amino acid identity as determined using FASTA version 3.0t78 with the default parameters to a gene product whose expression is inhibited by an antisense nucleic acid comprising a nucleotide sequence selected from the group consisting of SEQ ID NOs.: 1-6213, a gene product encoded by a nucleic acid which hybridizes to a nucleic acid comprising a nucleotide sequence selected from the group consisting of SEQ ID NOs.: 1-6213 under stringent conditions, a gene product encoded by a nucleic acid which hybridizes to a nucleic acid comprising a nucleotide sequence selected from the group consisting of SEQ ID NOs.: 1-6213 under moderate conditions, and a gene product whose activity may be complemented by the gene product whose activity is inhibited by a nucleic acid comprising a nucleotide sequence selected from the group consisting of SEQ ID NOs: 1-6213 is underexpressed;

[0626] contacting each of said cultures with a different concentration of said compound; and

[0627] identifying the gene product which is underexpressed in a strain whose rate of proliferation is reduced by said compound.

[0628] 417. A method for identifying the gene product on which a compound which inhibits proliferation of an organism acts comprising:

[0629] obtaining a plurality of cultures, each culture comprising a plurality of strains wherein each strain underexpresses a different gene product which is essential for proliferation of said organism, wherein said culture comprises a strain in which a gene product encoded by a nucleic acid comprising a nucleotide sequence selected from the group consisting of a nucleic acid comprising a nucleic acid having at least 70% nucleotide sequence identity as determined using BLASTN version 2.0 with the default parameters to a nucleotide sequence selected from the group consisting of SEQ ID NOS.: 6214-42397, a nucleic acid comprising a nucleotide sequence which hybridizes to a sequence selected from the group consisting of SEQ ID NOS.: 6214-42397 under stringent conditions, and a nucleic acid comprising a nucleotide sequence which hybridizes to a nucleotide sequence selected from the group consisting of SEQ ID NOS.: 6214-42397 under moderate conditions is underexpressed;

[0630] contacting each of said cultures with a different concentration of said compound; and

[0631] identifying the gene product which is underexpressed in a strain whose rate of proliferation is reduced by said compound.

[0632] 418. A method for identifying the gene product on which a compound which inhibits proliferation of an organism acts comprising:

[0633] obtaining a plurality of cultures, each culture comprising a plurality of strains wherein each strain underexpresses a different gene product which is essential for proliferation of said organism, wherein said culture comprises a strain in which a gene product comprises a polypeptide selected from the group consisting of a polypeptide having at least 25% amino acid identity as determined using FASTA version 3.0t78 to a polypeptide selected from the group consisting of SEQ ID NOs.: 42938-78581 and a polypeptide whose activity may be complemented by a polypeptide selected from the group consisting of SEQ ID NOs: 42938-78581 is underexpressed;

[0634] contacting each of said cultures with a different concentration of said compound; and

[0635] identifying the gene product which is underexpressed in a strain whose rate of proliferation is reduced by said compound.

[0636] 419. A method of profiling a compound's activity comprising:

[0637] performing the method of Paragraph 393 on a first culture using a first compound;

[0638] performing the method of Paragraph 393 on a second culture using a second compound; and

[0639] comparing the strains identified in said first culture to the strains identified in said second culture.

[0640] 420. A method of profiling a compound's activity comprising:

[0641] performing the method of Paragraph 394 on a first culture using a first compound;

[0642] performing the method of Paragraph 394 on a second culture using a second compound; and

[0643] comparing the strains identified in said first culture to the strains identified in said second culture.

[0644] 421. A method of profiling a compound's activity comprising:

[0645] performing the method of Paragraph 395 on a first culture using a first compound;

[0646] performing the method of Paragraph 395 on a second culture using a second compound; and

[0647] comparing the strains identified in said first culture to the strains identified in said second culture.

[0648] 422. A method of profiling a compound's activity comprising

[0649] performing the method of Paragraph 396 on a first culture using a first compound;

[0650] performing the method of Paragraph 396 on a second culture using a second compound; and

[0651] comparing the strains identified in said first culture to the strains identified in said second culture.

[0652] 423. A method of profiling a compound's activity comprising

[0653] performing the method of Paragraph 397 on a first culture using a first compound;

[0654] performing the method of Paragraph 397 on a second culture using a second compound; and

[0655] comparing the strains identified in said first culture to the strains identified in said second culture.

[0656] 424. A method of profiling a compound's activity comprising

[0657] performing the method of Paragraph 398 on a first culture using a first compound;

[0658] performing the method of Paragraph 398 on a second culture using a second compound; and

[0659] comparing the strains identified in said first culture to the strains identified in said second culture.

[0660] 425. A method of profiling a first compound's activity comprising:

[0661] growing an array of strains on a first solid medium comprising said first compound and on a second solid medium comprising a second compound, wherein said array comprises a plurality of strains wherein each strain underexpresses a different gene product which is essential for proliferation of an organism, wherein said culture comprises a strain in which a gene product whose activity or level is inhibited by a nucleic acid comprising a nucleotide sequence selected from the group consisting of SEQ ID NOs.: 1-6213 is underexpressed, and wherein said first compound and said second compound inhibit the proliferation of said organism; and

[0662] comparing the pattern of strains which grow on said first solid medium with the pattern of strains which grow on said second solid medium.

[0663] 426. A method of profiling a first compound's activity comprising:

[0664] growing an array of strains on a first solid medium comprising said first compound and on a second solid medium comprising a second compound, wherein said array comprises a plurality of strains wherein each strain underexpresses a different gene product which is essential for proliferation of an organism, wherein said culture comprises a strain in which a gene product encoded by a nucleic acid comprising a nucleotide sequence selected from the group consisting of SEQ ID NOs.: 6214-42397 is underexpressed, and wherein said first compound and said second compound inhibit the proliferation of said organism; and

[0665] comparing the pattern of strains which grow on said first solid medium with the pattern of strains which grow on said second solid medium.

[0666] 427. A method of profiling a first compound's activity comprising:

[0667] growing an array of strains on a first solid medium comprising said first compound and on a second solid medium comprising a second compound, wherein said array comprises a plurality of strains wherein each strain underexpresses a different gene product which is essential for proliferation of an organism, wherein said culture comprises a strain in which a gene product comprising an amino acid sequence selected from the group consisting of SEQ ID NOs.: 42938-78581 is underexpressed, and wherein said first compound and said second compound inhibit the proliferation of said organism; and

[0668] comparing the pattern of strains which grow on said first solid medium with the pattern of strains which grow on said second solid medium.

[0669] 428. A method of profiling a first compound's activity comprising:

[0670] growing an array of strains on a first solid medium comprising said first compound and on a second solid medium comprising a second compound, wherein said array comprises a plurality of strains wherein each strain underexpresses a different gene product which is essential for proliferation of an organism, wherein said culture comprises a strain in which a gene product selected from the group consisting of a gene product having at least 70% nucleotide sequence identity as determined using BLASTN version 2.0 with the default parameters to a gene product whose expression is inhibited by an antisense nucleic acid comprising a nucleotide sequence selected from the group consisting of SEQ ID NOs.: 1-6213, a gene product encoded by a nucleic acid having at least 70% nucleotide sequence identity as determined using BLASTN version 2.0 with the default parameters to a nucleic acid encoding a gene product whose expression is inhibited by an antisense nucleic acid comprising a nucleotide sequence selected from the group consisting of SEQ ID NOs: 1-6213, a gene product having at least 25% amino acid identity as determined using FASTA version 3.0t78 with the default parameters to a gene product whose expression is inhibited by an antisense nucleic acid comprising a nucleotide sequence selected from the group consisting of SEQ ID NOs.: 1-6213, a gene product encoded by a nucleic acid which hybridizes to a nucleic acid comprising a nucleotide sequence selected from the group consisting of SEQ ID NOs.: 1-6213 under stringent conditions, a gene product encoded by a nucleic acid which hybridizes to a nucleic acid comprising a nucleotide sequence selected from the group consisting of SEQ ID NOs.: 1-6213 under moderate conditions, and a gene product whose activity may be complemented by the gene product whose activity is inhibited by a nucleic acid comprising a nucleotide sequence selected from the group consisting of SEQ ID NOs: 1-6213 is underexpressed, and wherein said first compound and said second compound inhibit the proliferation of said organism; and

[0671] comparing the pattern of strains which grow on said first solid medium with the pattern of strains which grow on said second solid medium.

[0672] 429. A method of profiling a first compound's activity comprising:

[0673] growing an array of strains on a first solid medium comprising said first compound and on a second solid medium comprising a second compound, wherein said array comprises a plurality of strains wherein each strain underexpresses a different gene product which is essential for proliferation of an organism, wherein said culture comprises a strain in which a gene product encoded by a nucleic acid comprising a nucleotide sequence selected from the group consisting of a nucleic acid comprising a nucleic acid having at least 70% nucleotide sequence identity as determined using BLASTN version 2.0 with the default parameters to a nucleotide sequence selected from the group consisting of SEQ ID NOS.: 6214-42397, a nucleic acid comprising a nucleotide sequence which hybridizes to a sequence selected from the group consisting of SEQ ID NOS.: 6214-42397 under stringent conditions, and a nucleic acid comprising a nucleotide sequence which hybridizes to a nucleotide sequence selected from the group consisting of SEQ ID NOS.: 6214-42397 under moderate conditions is underexpressed, and wherein said first compound and said second compound inhibit the proliferation of said organism; and

[0674] comparing the pattern of strains which grow on said first solid medium with the pattern of strains which grow on said second solid medium.

[0675] 430. A method of profiling a first compound's activity comprising:

[0676] growing an array of strains on a first solid medium comprising said first compound and on a second solid medium comprising a second compound, wherein said array comprises a plurality of strains wherein each strain underexpresses a different gene product which is essential for proliferation of an organism, wherein said culture comprises a strain in which a gene product comprises a polypeptide selected from the group consisting of a polypeptide having at least 25% amino acid identity as determined using FASTA version 3.0t78 to a polypeptide selected from the group consisting of SEQ ID NOs.: 42938-78581 and a polypeptide whose activity may be complemented by a polypeptide selected from the group consisting of SEQ ID NOs: 42938-78581 is underexpressed, and wherein said first compound and said second compound inhibit the proliferation of said organism; and

[0677] comparing the pattern of strains which grow on said first solid medium with the pattern of strains which grow on said second solid medium.

[0678] 431. The method of any one of Paragraphs 419, 420, 421, 422, 423, 424, 425, 426, 427, 428, 429 or 430, wherein said first compound is present in a crude or partially purified state.

[0679] 432. A method for identifying the gene product on which a compound which inhibits proliferation of an organism acts comprising:

[0680] obtaining a plurality of cultures comprising a plurality of strains wherein each strain underexpresses a different gene product which is essential for proliferation of said organism, wherein said culture comprises a strain in which a gene product whose activity or level is inhibited by a nucleic acid comprising a nucleotide sequence selected from the group consisting of SEQ ID NOs.: 1-6213 is underexpressed;

[0681] contacting each of said plurality of cultures with a varying concentration of a regulatory agent which regulates the level of expression of said gene products which are essential for proliferation of said organism; and

[0682] identifying the gene product which is underexpressed in a strain whose rate of proliferation is reduced by said compound.

[0683] 433. A method for identifying the gene product on which a compound which inhibits proliferation of an organism acts comprising:

[0684] obtaining a plurality of cultures comprising a plurality of strains wherein each strain underexpresses a different gene product which is essential for proliferation of said organism, wherein said culture comprises a strain in which a gene product encoded by a nucleic acid comprising a nucleotide sequence selected from the group consisting of SEQ ID NOs.: 6214-42397 is underexpressed;

[0685] contacting each of said plurality of cultures with a varying concentration of a regulatory agent which regulates the level of expression of said gene products which are essential for proliferation of said organism; and

[0686] identifying the gene product which is underexpressed in a strain whose rate of proliferation is reduced by said compound.

[0687] 434. A method for identifying the gene product on which a compound which inhibits proliferation of an organism acts comprising:

[0688] obtaining a plurality of cultures comprising a plurality of strains wherein each strain underexpresses a different gene product which is essential for proliferation of said organism, wherein said culture comprises a strain in which a gene product comprising an amino acid sequence selected from the group consisting of SEQ ID NOs.: 42938-78581 is underexpressed;

[0689] contacting each of said plurality of cultures with a varying concentration of a regulatory agent which regulates the level of expression of said gene products which are essential for proliferation of said organism; and

[0690] identifying the gene product which is underexpressed in a strain whose rate of proliferation is reduced by said compound.

[0691] 435. A method for identifying the gene product on which a compound which inhibits proliferation of an organism acts comprising:

[0692] obtaining a plurality of cultures comprising a plurality of strains wherein each strain underexpresses a different gene product which is essential for proliferation of said organism, wherein said culture comprises a strain in which a gene product selected from the group consisting of a gene product having at least 70% nucleotide sequence identity as determined using BLASTN version 2.0 with the default parameters to a gene product whose expression is inhibited by an antisense nucleic acid comprising a nucleotide sequence selected from the group consisting of SEQ ID NOs.: 1-6213, a gene product encoded by a nucleic acid having at least 70% nucleotide sequence identity as determined using BLASTN version 2.0 with the default parameters to a nucleic acid encoding a gene product whose expression is inhibited by an antisense nucleic acid comprising a nucleotide sequence selected from the group consisting of SEQ ID NOs: 1-6213, a gene product having at least 25% amino acid identity as determined using FASTA version 3.0t78 with the default parameters to a gene product whose expression is inhibited by an antisense nucleic acid comprising a nucleotide sequence selected from the group consisting of SEQ ID NOs.: 1-6213, a gene product encoded by a nucleic acid which hybridizes to a nucleic acid comprising a nucleotide sequence selected from the group consisting of SEQ ID NOs.: 1-6213 under stringent conditions, a gene product encoded by a nucleic acid which hybridizes to a nucleic acid comprising a nucleotide sequence selected from the group consisting of SEQ ID NOs.: 1-6213 under moderate conditions, and a gene product whose activity may be complemented by the gene product whose activity is inhibited by a nucleic acid comprising a nucleotide sequence selected from the group consisting of SEQ ID NOs: 1-6213 is underexpressed;

[0693] contacting each of said plurality of cultures with a varying concentration of a regulatory agent which regulates the level of expression of said gene products which are essential for proliferation of said organism; and

[0694] identifying the gene product which is underexpressed in a strain whose rate of proliferation is reduced by said compound.

[0695] 436. A method for identifying the gene product on which a compound which inhibits proliferation of an organism acts comprising:

[0696] obtaining a plurality of cultures comprising a plurality of strains wherein each strain underexpresses a different gene product which is essential for proliferation of said organism, wherein said culture comprises a strain in which a gene product encoded by a nucleic acid comprising a nucleotide sequence selected from the group consisting of a nucleic acid comprising a nucleic acid having at least 70% nucleotide sequence identity as determined using BLASTN version 2.0 with the default parameters to a nucleotide sequence selected from the group consisting of SEQ ID NOS.: 6214-42397, a nucleic acid comprising a nucleotide sequence which hybridizes to a sequence selected from the group consisting of SEQ ID NOS.: 6214-42397 under stringent conditions, and a nucleic acid comprising a nucleotide sequence which hybridizes to a nucleotide sequence selected from the group consisting of SEQ ID NOS.: 6214-42397 under moderate conditions is underexpressed;

[0697] contacting each of said plurality of cultures with a varying concentration of a regulatory agent which regulates the level of expression of said gene products which are essential for proliferation of said organism; and

[0698] identifying the gene product which is underexpressed in a strain whose rate of proliferation is reduced by said compound.

[0699] 437. A method for identifying the gene product on which a compound which inhibits proliferation of an organism acts comprising:

[0700] obtaining a plurality of cultures comprising a plurality of strains wherein each strain underexpresses a different gene product which is essential for proliferation of said organism, wherein said culture comprises a strain in which a gene product comprises a polypeptide selected from the group consisting of a polypeptide having at least 25% amino acid identity as determined using FASTA version 3.0t78 to a polypeptide selected from the group consisting of SEQ ID NOs.: 42938-78581 and a polypeptide whose activity may be complemented by a polypeptide selected from the group consisting of SEQ ID NOs: 42938-78581 is underexpressed;

[0701] contacting each of said plurality of cultures with a varying concentration of a regulatory agent which regulates the level of expression of said gene products which are essential for proliferation of said organism; and

[0702] identifying the gene product which is underexpressed in a strain whose rate of proliferation is reduced by said compound.

[0703] 438. A culture comprising a plurality of strains wherein each strain overexpresses a different gene product which is essential for proliferation of said organism, wherein said culture comprises a strain in which a gene product whose activity or level is inhibited by a nucleic acid comprising a nucleotide sequence selected from the group consisting of SEQ ID NOs.: 1-6213 is overexpressed.

[0704] 439. A culture comprising a plurality of strains wherein each strain overexpresses a different gene product which is essential for proliferation of said organism, wherein said culture comprises a strain in which a gene product encoded by a nucleic acid comprising a nucleotide sequence selected from the group consisting of SEQ ID NOs.: 6214-42397 is overexpressed.

[0705] 440. A culture comprising a plurality of strains wherein each strain overexpresses a different gene product which is essential for proliferation of said organism, wherein said culture comprises a strain in which a gene product comprising an amino acid sequence selected from the group consisting of SEQ ID NOs.: 42938-78581 is overexpressed.

[0706] 441. A culture comprising a plurality of strains wherein each strain overexpresses a different gene product which is essential for proliferation of said organism, wherein said culture comprises a strain in which a gene product selected from the group consisting of a gene product having at least 70% nucleotide sequence identity as determined using BLASTN version 2.0 with the default parameters to a gene product whose expression is inhibited by an antisense nucleic acid comprising a nucleotide sequence selected from the group consisting of SEQ ID NOs.: 1-6213, a gene product encoded by a nucleic acid having at least 70% nucleotide sequence identity as determined using BLASTN version 2.0 with the default parameters to a nucleic acid encoding a gene product whose expression is inhibited by an antisense nucleic acid comprising a nucleotide sequence selected from the group consisting of SEQ ID NOs: 1-6213, a gene product having at least 25% amino acid identity as determined using FASTA version 3.0t78 with the default parameters to a gene product whose expression is inhibited by an antisense nucleic acid comprising a nucleotide sequence selected from the group consisting of SEQ ID NOs.: 1-6213, a gene product encoded by a nucleic acid which hybridizes to a nucleic acid comprising a nucleotide sequence selected from the group consisting of SEQ ID NOs.: 1-6213 under stringent conditions, a gene product encoded by a nucleic acid which hybridizes to a nucleic acid comprising a nucleotide sequence selected from the group consisting of SEQ ID NOs.: 1-6213 under moderate conditions, and a gene product whose activity may be complemented by the gene product whose activity is inhibited by a nucleic acid comprising a nucleotide sequence selected from the group consisting of SEQ ID NOs: 1-6213 is overexpressed.

[0707] 442. A culture comprising a plurality of strains wherein each strain overexpresses a different gene product which is essential for proliferation of said organism, wherein said culture comprises a strain in which a gene product encoded by a nucleic acid comprising a nucleotide sequence selected from the group consisting of a nucleic acid comprising a nucleic acid having at least 70% nucleotide sequence identity as determined using BLASTN version 2.0 with the default parameters to a nucleotide sequence selected from the group consisting of SEQ ID NOS.: 6214-42397, a nucleic acid comprising a nucleotide sequence which hybridizes to a sequence selected from the group consisting of SEQ ID NOS.: 6214-42397 under stringent conditions, and a nucleic acid comprising a nucleotide sequence which hybridizes to a nucleotide sequence selected from the group consisting of SEQ ID NOS.: 6214-42397 under moderate conditions is overexpressed.

[0708] 443. A culture comprising a plurality of strains wherein each strain overexpresses a different gene product which is essential for proliferation of said organism, wherein said culture comprises a strain in which a gene product comprises a polypeptide selected from the group consisting of a polypeptide having at least 25% amino acid identity as determined using FASTA version 3.0t78 to a polypeptide selected from the group consisting of SEQ ID NOs.: 42938-78581 and a polypeptide whose activity may be complemented by a polypeptide selected from the group consisting of SEQ ID NOs: 42938-78581 is overexpressed.

[0709] 444. The culture of Paragraph 438, 439, 440, 441, 442 or 443, wherein said strains which overexpresess said gene products comprise a nucleic acid encoding said gene product which is essential for proliferation of said organism operably linked to a regulatable promoter.

[0710] 445. The culture of Paragraph 438, 439, 440, 441, 442 or 443, wherein said strains which overexpresess said gene products comprise a nucleic acid encoding said gene product which is essential for proliferation of said organism operably linked to a constitutive promoter.

[0711] 446. The culture of Paragraph 438, 439, 440, 441, 442 or 443, wherein said culture is a culture of an organism selected from the group consisting of Acinetobacter baumannii, Anaplasma marginale, Aspergillus fumigatus, Bacillus anthracis, Bacteroides fragilis, Bordetella pertussis, Borrelia burgdorferi, Burkholderia cepacia, Burkholderia fungorum, Burkholderia mallei, Campylobacter jejuni, Candida albicans, Candida glabrata (also called Torulopsis glabrata), Candida tropicalis, Candida parapsilosis, Candida guilliermondii, Candida krusei, Candida kefyr (also called Candida pseudotropicalis), Candida dubliniensis, Chlamydia pneumoniae, Chlamydia trachomatis, Clostridium acetobutylicum, Clostridium botulinum, Clostridium difficile, Clostridium perfringens, Coccidioides immitis, Corynebacterium diptheriae, Cryptococcus neoformans, Enterobacter cloacae, Enterococcus faecalis, Enterococcus faecium, Escherichia coli, Haemophilus influenzae, Helicobacter pylori, Histoplasma capsulatum, Klebsiella pneumoniae, Legionella pneumophila, Listeria monocytogenes, Moraxella catarrhalis, Mycobacterium avium, Mycobacterium bovis, Mycobacterium leprae, Mycobacterium tuberculosis, Mycoplasma genitalium, Mycoplasma pneumoniae, Neisseria gonorrhoeae, Neisseria meningitidis, Nocardia asteroides, Pasteurella haemolytica, Pasteurella multocida, Pneumocystis carinii, Proteus mirabilis, Proteus vulgaris, Pseudomonas aeruginosa, Pseudomonas putida, Pseudomonas syringae, Salmonella bongori, Salmonella cholerasuis, Salmonella enterica, Salmonella paratyphi, Salmonella typhi, Salmonella typhimurium, Shigella boydii, Shigella dysenteriae, Shigella flexneri, Shigella sonnei, Staphylococcus aureus, Staphylococcus epidermidis, Staphylococcus haemolyticus, Streptococcus pneumoniae, Streptococcus mutans, Streptococcus pyogenes, Treponema pallidum, Ureaplasma urealyticum, Vibrio cholerae, Vibrio parahaemolyticus, Vibrio vulnificans, Yersinia enterocolitica, Yersinia pestis and any species falling within the genera of any of the above species.

[0712] 447. A culture comprising a a plurality of strains wherein each strain underexpresses a different gene product which is essential for proliferation of said organism, wherein said culture comprises a strain in which a gene product whose activity or level is inhibited by a nucleic acid comprising a nucleotide sequence selected from the group consisting of SEQ ID NOs.: 1-6213 is underexpressed.

[0713] 448. A culture comprising a a plurality of strains wherein each strain underexpresses a different gene product which is essential for proliferation of said organism, wherein said culture comprises a strain in which a gene product encoded by a nucleic acid comprising a nucleotide sequence selected from the group consisting of SEQ ID NOs.: 6214-42397 is underexpressed.

[0714] 449. A culture comprising a a plurality of strains wherein each strain underexpresses a different gene product which is essential for proliferation of said organism, wherein said culture comprises a strain in which a gene product comprising an amino acid sequence selected from the group consisting of SEQ ID NOs.: 42938-78581 is underexpressed.

[0715] 450. A culture comprising a a plurality of strains wherein each strain underexpresses a different gene product which is essential for proliferation of said organism, wherein said culture comprises a strain in which a gene product selected from the group consisting of a gene product having at least 70% nucleotide sequence identity as determined using BLASTN version 2.0 with the default parameters to a gene product whose expression is inhibited by an antisense nucleic acid comprising a nucleotide sequence selected from the group consisting of SEQ ID NOs.: 1-6213, a gene product encoded by a nucleic acid having at least 70% nucleotide sequence identity as determined using BLASTN version 2.0 with the default parameters to a nucleic acid encoding a gene product whose expression is inhibited by an antisense nucleic acid comprising a nucleotide sequence selected from the group consisting of SEQ ID NOs: 1-6213, a gene product having at least 25% amino acid identity as determined using FASTA version 3.0t78 with the default parameters to a gene product whose expression is inhibited by an antisense nucleic acid comprising a nucleotide sequence selected from the group consisting of SEQ ID NOs.: 1-6213, a gene product encoded by a nucleic acid which hybridizes to a nucleic acid comprising a nucleotide sequence selected from the group consisting of SEQ ID NOs.: 1-6213 under stringent conditions, a gene product encoded by a nucleic acid which hybridizes to a nucleic acid comprising a nucleotide sequence selected from the group consisting of SEQ ID NOs.: 1-6213 under moderate conditions, and a gene product whose activity may be complemented by the gene product whose activity is inhibited by a nucleic acid comprising a nucleotide sequence selected from the group consisting of SEQ ID NOs: 1-6213 is underexpressed.

[0716] 451. A culture comprising a a plurality of strains wherein each strain underexpresses a different gene product which is essential for proliferation of said organism, wherein said culture comprises a strain in which a gene product encoded by a nucleic acid comprising a nucleotide sequence selected from the group consisting of a nucleic acid comprising a nucleic acid having at least 70% nucleotide sequence identity as determined using BLASTN version 2.0 with the default parameters to a nucleotide sequence selected from the group consisting of SEQ ID NOS.: 6214-42397, a nucleic acid comprising a nucleotide sequence which hybridizes to a sequence selected from the group consisting of SEQ ID NOS.: 6214-42397 under stringent conditions, and a nucleic acid comprising a nucleotide sequence which hybridizes to a nucleotide sequence selected from the group consisting of SEQ ID NOS.: 6214-42397 under moderate conditions is underexpressed.

[0717] 452. A culture comprising a a plurality of strains wherein each strain underexpresses a different gene product which is essential for proliferation of said organism, wherein said culture comprises a strain in which a gene product comprises a polypeptide selected from the group consisting of a polypeptide having at least 25% amino acid identity as determined using FASTA version 3.0t78 to a polypeptide selected from the group consisting of SEQ ID NOs.: 42938-78581 and a polypeptide whose activity may be complemented by a polypeptide selected from the group consisting of SEQ ID NOs: 42938-78581 is underexpressed.

[0718] 453. The culture of Paragraph 447, 448, 449, 450, 451 or 452, wherein said strains which underexpress said gene products comprise a nucleic acid encoding said gene product which is essential for proliferation of said organism operably linked to a regulatable promoter.

[0719] 454. The culture of Paragraph 447, 448, 449, 450, 451 or 452, wherein said strains which underexpress said gene products comprise a nucleic acid encoding said gene product which is essential for proliferation of said organism operably linked to a constitutive promoter.

[0720] 455. The culture of Paragraph 447, 448, 449, 450, 451 or 452, wherein said culture is a culture of an organism selected from the group consisting of Acinetobacter baumannii, Anaplasma marginale, Aspergillus fumigatus, Bacillus anthracis, Bacteroides fragilis, Bordetella pertussis, Borrelia burgdorferi, Burkholderia cepacia, Burkholderia fungorum, Burkholderia mallei, Campylobacter jejuni, Candida albicans, Candida glabrata (also called Torulopsis glabrata), Candida tropicalis, Candida parapsilosis, Candida guilliermondii, Candida krusei, Candida kefyr (also called Candida pseudotropicalis), Candida dubliniensis, Chlamydia pneumoniae, Chlamydia trachomatis, Clostridium acetobutylicum, Clostridium botulinum, Clostridium difficile, Clostridium perfringens, Coccidioides immitis, Corynebacterium diptheriae, Cryptococcus neoformans, Enterobacter cloacae, Enterococcus faecalis, Enterococcus faecium, Escherichia coli, Haemophilus influenzae, Helicobacter pylori, Histoplasma capsulatum, Klebsiella pneumoniae, Legionella pneumophila, Listeria monocytogenes, Moraxella catarrhalis, Mycobacterium avium, Mycobacterium bovis, Mycobacterium leprae, Mycobacterium tuberculosis, Mycoplasma genitalium, Mycoplasma pneumoniae, Neisseria gonorrhoeae, Neisseria meningitidis, Nocardia asteroides, Pasteurella haemolytica, Pasteurella multocida, Pneumocystis carinii, Proteus mirabilis, Proteus vulgaris, Pseudomonas aeruginosa, Pseudomonas putida, Pseudomonas syringae, Salmonella bongori, Salmonella cholerasuis, Salmonella enterica, Salmonella paratyphi, Salmonella typhi, Salmonella typhimurium, Shigella boydii, Shigella dysenteriae, Shigella flexneri, Shigella sonnei Staphylococcus aureus, Staphylococcus epidermidis, Staphylococcus haemolyticus, Streptococcus pneumoniae, Streptococcus mutans, Streptococcus pyogenes, Treponema pallidum, Ureaplasma urealyticum, Vibrio cholerae, Vibrio parahaemolyticus, Vibrio vulnificans, Yersinia enterocolitica, Yersinia pestis and any species falling within the genera of any of the above species.

[0721] 456. A method for identifying the gene product on which a compound which inhibits proliferation of an organism acts comprising:

[0722] obtaining a culture comprising a plurality of strains wherein each strain overexpresses a different gene product which is essential for proliferation of said organism and wherein the nucleotide sequence of each of the overexpressed genes has been altered so as to include a nucleotide sequence which can be used to generate a unique product corresponding to each of the overexpressed genes, wherein said culture comprises a strain in which a gene product whose activity or level is inhibited by a nucleic acid comprising a nucleotide sequence selected from the group consisting of SEQ ID NOs.: 1-6213 is overexpressed;

[0723] contacting said culture with a sufficient concentration of said compound to inhibit the proliferation of strains of said organism which do not overexpress said gene product on which said compound acts, such that strains which overexpress said gene product on which said compound acts proliferate more rapidly than strains which do not overexpress said gene product on which said compound acts; and

[0724] identifying the gene product which is overexpressed in a strain which proliferated more rapidly in said culture by detecting the unique product corresponding to said gene.

[0725] 457. A method for identifying the gene product on which a compound which inhibits proliferation of an organism acts comprising:

[0726] obtaining a culture comprising a plurality of strains wherein each strain overexpresses a different gene product which is essential for proliferation of said organism and wherein the nucleotide sequence of each of the overexpressed genes has been altered so as to include a nucleotide sequence which can be used to generate a unique product corresponding to each of the overexpressed genes, wherein said culture comprises a strain in which a gene product encoded by a nucleic acid comprising a nucleotide sequence selected from the group consisting of SEQ ID NOs.: 6214-42397 is overexpressed;

[0727] contacting said culture with a sufficient concentration of said compound to inhibit the proliferation of strains of said organism which do not overexpress said gene product on which said compound acts, such that strains which overexpress said gene product on which said compound acts proliferate more rapidly than strains which do not overexpress said gene product on which said compound acts; and

[0728] identifying the gene product which is overexpressed in a strain which proliferated more rapidly in said culture by detecting the unique product corresponding to said gene.

[0729] 458. A method for identifying the gene product on which a compound which inhibits proliferation of an organism acts comprising:

[0730] obtaining a culture comprising a plurality of strains wherein each strain overexpresses a different gene product which is essential for proliferation of said organism and wherein the nucleotide sequence of each of the overexpressed genes has been altered so as to include a nucleotide sequence which can be used to generate a unique product corresponding to each of the overexpressed genes, wherein said culture comprises a strain in which a gene product comprising an amino acid sequence selected from the group consisting of SEQ ID NOs.: 42938-78581 is overexpressed;

[0731] contacting said culture with a sufficient concentration of said compound to inhibit the proliferation of strains of said organism which do not overexpress said gene product on which said compound acts, such that strains which overexpress said gene product on which said compound acts proliferate more rapidly than strains which do not overexpress said gene product on which said compound acts; and

[0732] identifying the gene product which is overexpressed in a strain which proliferated more rapidly in said culture by detecting the unique product corresponding to said gene.

[0733] 459. A method for identifying the gene product on which a compound which inhibits proliferation of an organism acts comprising:

[0734] obtaining a culture comprising a plurality of strains wherein each strain overexpresses a different gene product which is essential for proliferation of said organism and wherein the nucleotide sequence of each of the overexpressed genes has been altered so as to include a nucleotide sequence which can be used to generate a unique product corresponding to each of the overexpressed genes, wherein said culture comprises a strain in which a gene product selected from the group consisting of a gene product having at least 70% nucleotide sequence identity as determined using BLASTN version 2.0 with the default parameters to a gene product whose expression is inhibited by an antisense nucleic acid comprising a nucleotide sequence selected from the group consisting of SEQ ID NOs.: 1-6213, a gene product encoded by a nucleic acid having at least 70% nucleotide sequence identity as determined using BLASTN version 2.0 with the default parameters to a nucleic acid encoding a gene product whose expression is inhibited by an antisense nucleic acid comprising a nucleotide sequence selected from the group consisting of SEQ ID NOs: 1-6213, a gene product having at least 25% amino acid identity as determined using FASTA version 3.0t78 with the default parameters to a gene product whose expression is inhibited by an antisense nucleic acid comprising a nucleotide sequence selected from the group consisting of SEQ ID NOs.: 1-6213, a gene product encoded by a nucleic acid which hybridizes to a nucleic acid comprising a nucleotide sequence selected from the group consisting of SEQ ID NOs.: 1-6213 under stringent conditions, a gene product encoded by a nucleic acid which hybridizes to a nucleic acid comprising a nucleotide sequence selected from the group consisting of SEQ ID NOs.: 1-6213 under moderate conditions, and a gene product whose activity may be complemented by the gene product whose activity is inhibited by a nucleic acid comprising a nucleotide sequence selected from the group consisting of SEQ ID NOs: 1-6213 is overexpressed;

[0735] contacting said culture with a sufficient concentration of said compound to inhibit the proliferation of strains of said organism which do not overexpress said gene product on which said compound acts, such that strains which overexpress said gene product on which said compound acts proliferate more rapidly than strains which do not overexpress said gene product on which said compound acts; and

[0736] identifying the gene product which is overexpressed in a strain which proliferated more rapidly in said culture by detecting the unique product corresponding to said gene.

[0737] 460. A method for identifying the gene product on which a compound which inhibits proliferation of an organism acts comprising:

[0738] obtaining a culture comprising a plurality of strains wherein each strain overexpresses a different gene product which is essential for proliferation of said organism and wherein the nucleotide sequence of each of the overexpressed genes has been altered so as to include a nucleotide sequence which can be used to generate a unique product corresponding to each of the overexpressed genes, wherein said culture comprises a strain in which a gene product encoded by a nucleic acid comprising a nucleotide sequence selected from the group consisting of a nucleic acid comprising a nucleic acid having at least 70% nucleotide sequence identity as determined using BLASTN version 2.0 with the default parameters to a nucleotide sequence selected from the group consisting of SEQ ID NOS.: 6214-42397, a nucleic acid comprising a nucleotide sequence which hybridizes to a sequence selected from the group consisting of SEQ ID NOS.: 6214-42397 under stringent conditions, and a nucleic acid comprising a nucleotide sequence which hybridizes to a nucleotide sequence selected from the group consisting of SEQ ID NOS.: 6214-42397 under moderate conditions is overexpressed;

[0739] contacting said culture with a sufficient concentration of said compound to inhibit the proliferation of strains of said organism which do not overexpress said gene product on which said compound acts, such that strains which overexpress said gene product on which said compound acts proliferate more rapidly than strains which do not overexpress said gene product on which said compound acts; and

[0740] identifying the gene product which is overexpressed in a strain which proliferated more rapidly in said culture by detecting the unique product corresponding to said gene.

[0741] 461. A method for identifying the gene product on which a compound which inhibits proliferation of an organism acts comprising:

[0742] obtaining a culture comprising a plurality of strains wherein each strain overexpresses a different gene product which is essential for proliferation of said organism and wherein the nucleotide sequence of each of the overexpressed genes has been altered so as to include a nucleotide sequence which can be used to generate a unique product corresponding to each of the overexpressed genes, wherein said culture comprises a strain in which a gene product comprises a polypeptide selected from the group consisting of a polypeptide having at least 25% amino acid identity as determined using FASTA version 3.0t78 to a polypeptide selected from the group consisting of SEQ ID NOs.: 42938-78581 and a polypeptide whose activity may be complemented by a polypeptide selected from the group consisting of SEQ ID NOs: 42938-78581 is overexpressed;

[0743] contacting said culture with a sufficient concentration of said compound to inhibit the proliferation of strains of said organism which do not overexpress said gene product on which said compound acts, such that strains which overexpress said gene product on which said compound acts proliferate more rapidly than strains which do not overexpress said gene product on which said compound acts; and

[0744] identifying the gene product which is overexpressed in a strain which proliferated more rapidly in said culture by detecting the unique product corresponding to said gene.

[0745] 462. The method of Paragraph 456, 457, 458, 459, 460 or 461, wherein the nucleotide sequence of each of the genes encoding an overexpressed gene product has been altered by replacing the native promoters of said genes with promoters which facilitate overexpression of said gene products.

[0746] 463. The method of Paragraph 456, 457, 458, 459, 460 or 461, wherein the nucleotide sequence of each of the genes encoding an overexpressed gene product has been altered by inserting a regulatory element into the native promoters of said genes with a promoter which facilitates overexpression of said gene products.

[0747] 464. The method of Paragraph 463, wherein said regulatory element is selected from the group consisting of a regulatable promoter, an operator which is recognized by a repressor, a nucleotide sequence which is recognized by a transcriptional activator, a transcriptional terminator, a nucleotide sequence which introduces a bend in the DNA and an upstream activating sequence.

[0748] 465. The method of Paragraph 456, 457, 458, 459, 460 or 461, wherein the step of identifying the gene product which is overexpressed in a strain which proliferated more rapidly in said culture by detecting the unique product corresponding to said gene comprises performing an amplification reaction and detecting a unique amplification product corresponding to said gene.

[0749] 466. The method of Paragraph 462, wherein the native promoter of each of the genes encoding a gene product essential for proliferation is replaced with the same promoter.

[0750] 467. The method of Paragraph 462, wherein the native promoters of the genes encoding gene products essential for proliferation are replaced with a plurality of promoters selected to give a desired expression level for each gene product.

[0751] 468. The method of Paragraph 462, wherein said promoters which replaced the native promoters in each strain comprise regulatable promoters.

[0752] 469. The method of Paragraph 462, wherein said promoters which replaced the native promoters in each strain each strain comprise constitutive promoters.

[0753] 470. The method of Paragraph 456, 457, 458, 459, 460 or 461, wherein said organism is selected from the group consisting of bacteria, fungi, and protozoa.

[0754] 471. The method of Paragraph 456, 457, 458, 459, 460 or 461, wherein said culture is a culture of an organism selected from the group consisting of Acinetobacter baumannii, Anaplasma marginale, Aspergillus fumigatus, Bacillus anthracis, Bacteroides fragilis, Bordetella pertussis, Borrelia burgdorferi, Burkholderia cepacia, Burkholderia fungorum, Burkholderia mallei, Campylobacter jejuni, Candida albicans, Candida glabrata (also called Torulopsis glabrata), Candida tropicalis, Candida parapsilosis, Candida guilliermondii, Candida krusei, Candida kefyr (also called Candida pseudotropicalis), Candida dubliniensis, Chlamydia pneumoniae, Chlamydia trachomatis, Clostridium acetobutylicum, Clostridium botulinum, Clostridium difficile, Clostridium perfringens, Coccidioides immitis, Corynebacterium diptheriae, Cryptococcus neoformans, Enterobacter cloacae, Enterococcus faecalis, Enterococcus faecium, Escherichia coli, Haemophilus influenzae, Helicobacter pylori, Histoplasma capsulatum, Klebsiella pneumoniae, Legionella pneumophila, Listeria monocytogenes, Moraxella catarrhalis, Mycobacterium avium, Mycobacterium bovis, Mycobacterium leprae, Mycobacterium tuberculosis, Mycoplasma genitalium, Mycoplasma pneumoniae, Neisseria gonorrhoeae, Neisseria meningitidis, Nocardia asteroides, Pasteurella haemolytica, Pasteurella multocida, Pneumocystis carinii, Proteus mirabilis, Proteus vulgaris, Pseudomonas aeruginosa, Pseudomonas putida, Pseudomonas syringae, Salmonella bongori, Salmonella cholerasuis, Salmonella enterica, Salmonella paratyphi, Salmonella typhi, Salmonella typhimurium, Shigella boydii, Shigella dysenteriae, Shigella flexneri, Shigella sonnei, Staphylococcus aureus, Staphylococcus epidermidis, Staphylococcus haemolyticus, Streptococcus pneumoniae, Streptococcus mutans, Streptococcus pyogenes, Treponema pallidum, Ureaplasma urealyticum, Vibrio cholerae, Vibrio parahaemolyticus, Vibrio vulnificans, Yersinia enterocolitica, Yersinia pestis and any species falling within the genera of any of the above species.

[0755] 472. A method for identifying the gene product on which a compound which inhibits proliferation of an organism acts comprising:

[0756] obtaining a culture comprising a plurality of strains wherein each strain underexpresses a different gene product which is essential for proliferation of said organism and wherein the nucleotide sequence of each of the underexpressed genes has been altered so as to include a nucleotide sequence which can be used to generate a unique product corresponding to each of the underexpressed genes and wherein said culture comprises a strain in which a gene product whose activity or level is inhibited by a nucleic acid comprising a nucleotide sequence selected from the group consisting of SEQ ID NOs.: 1-6213 is underexpressed;

[0757] contacting said culture with a sufficient concentration of said compound to inhibit the proliferation of strains of said organism which underexpress said gene product on which said compound acts, such that strains which underexpress said gene product on which said compound acts proliferate more slowly than strains which do not underexpress the gene product on which said compound acts; and

[0758] identifying the gene product which is underexpressed in a strain which proliferated more rapidly in said culture by detecting the unique product corresponding to said gene.

[0759] 473. A method for identifying the gene product on which a compound which inhibits proliferation of an organism acts comprising:

[0760] obtaining a culture comprising a plurality of strains wherein each strain underexpresses a different gene product which is essential for proliferation of said organism and wherein the nucleotide sequence of each of the underexpressed genes has been altered so as to include a nucleotide sequence which can be used to generate a unique product corresponding to each of the underexpressed genes and wherein said culture comprises a strain in which a gene product encoded by a nucleic acid comprising a nucleotide sequence selected from the group consisting of SEQ ID NOs.: 6214-42397 is underexpressed;

[0761] contacting said culture with a sufficient concentration of said compound to inhibit the proliferation of strains of said organism which underexpress said gene product on which said compound acts, such that strains which underexpress said gene product on which said compound acts proliferate more slowly than strains which do not underexpress the gene product on which said compound acts; and

[0762] identifying the gene product which is underexpressed in a strain which proliferated more rapidly in said culture by detecting the unique product corresponding to said gene.

[0763] 474. A method for identifying the gene product on which a compound which inhibits proliferation of an organism acts comprising:

[0764] obtaining a culture comprising a plurality of strains wherein each strain underexpresses a different gene product which is essential for proliferation of said organism and wherein the nucleotide sequence of each of the underexpressed genes has been altered so as to include a nucleotide sequence which can be used to generate a unique product corresponding to each of the underexpressed genes, wherein said culture comprises a strain in which a gene product comprising an amino acid sequence selected from the group consisting of SEQ ID NOs.: 42938-78581 is underexpressed;

[0765] contacting said culture with a sufficient concentration of said compound to inhibit the proliferation of strains of said organism which underexpress said gene product on which said compound acts, such that strains which underexpress said gene product on which said compound acts proliferate more slowly than strains which do not underexpress the gene product on which said compound acts; and

[0766] identifying the gene product which is underexpressed in a strain which proliferated more rapidly in said culture by detecting the unique product corresponding to said gene.

[0767] 475. A method for identifying the gene product on which a compound which inhibits proliferation of an organism acts comprising:

[0768] obtaining a culture comprising a plurality of strains wherein each strain underexpresses a different gene product which is essential for proliferation of said organism and wherein the nucleotide sequence of each of the underexpressed genes has been altered so as to include a nucleotide sequence which can be used to generate a unique product corresponding to each of the underexpressed genes, wherein said culture comprises a strain in which a gene product selected from the group consisting of a gene product having at least 70% nucleotide sequence identity as determined using BLASTN version 2.0 with the default parameters to a gene product whose expression is inhibited by an antisense nucleic acid comprising a nucleotide sequence selected from the group consisting of SEQ ID NOs.: 1-6213, a gene product encoded by a nucleic acid having at least 70% nucleotide sequence identity as determined using BLASTN version 2.0 with the default parameters to a nucleic acid encoding a gene product whose expression is inhibited by an antisense nucleic acid comprising a nucleotide sequence selected from the group consisting of SEQ ID NOs: 1-6213, a gene product having at least 25% amino acid identity as determined using FASTA version 3.0t78 with the default parameters to a gene product whose expression is inhibited by an antisense nucleic acid comprising a nucleotide sequence selected from the group consisting of SEQ ID NOs.: 1-6213, a gene product encoded by a nucleic acid which hybridizes to a nucleic acid comprising a nucleotide sequence selected from the group consisting of SEQ ID NOs.: 1-6213 under stringent conditions, a gene product encoded by a nucleic acid which hybridizes to a nucleic acid comprising a nucleotide sequence selected from the group consisting of SEQ ID NOs.: 1-6213 under moderate conditions, and a gene product whose activity may be complemented by the gene product whose activity is inhibited by a nucleic acid comprising a nucleotide sequence selected from the group consisting of SEQ ID NOs: 1-6213 is underexpressed;

[0769] contacting said culture with a sufficient concentration of said compound to inhibit the proliferation of strains of said organism which underexpress said gene product on which said compound acts, such that strains which underexpress said gene product on which said compound acts proliferate more slowly than strains which do not underexpress the gene product on which said compound acts; and

[0770] identifying the gene product which is underexpressed in a strain which proliferated more rapidly in said culture by detecting the unique product corresponding to said gene.

[0771] 476. A method for identifying the gene product on which a compound which inhibits proliferation of an organism acts comprising:

[0772] obtaining a culture comprising a plurality of strains wherein each strain underexpresses a different gene product which is essential for proliferation of said organism and wherein the nucleotide sequence of each of the underexpressed genes has been altered so as to include a nucleotide sequence which can be used to generate a unique product corresponding to each of the underexpressed genes, wherein said culture comprises a strain in which a gene product encoded by a nucleic acid comprising a nucleotide sequence selected from the group consisting of a nucleic acid comprising a nucleic acid having at least 70% nucleotide sequence identity as determined using BLASTN version 2.0 with the default parameters to a nucleotide sequence selected from the group consisting of SEQ ID NOS.: 6214-42397, a nucleic acid comprising a nucleotide sequence which hybridizes to a sequence selected from the group consisting of SEQ ID NOS.: 6214-42397 under stringent conditions, and a nucleic acid comprising a nucleotide sequence which hybridizes to a nucleotide sequence selected from the group consisting of SEQ ID NOS.: 6214-42397 under moderate conditions is underexpressed;

[0773] contacting said culture with a sufficient concentration of said compound to inhibit the proliferation of strains of said organism which underexpress said gene product on which said compound acts, such that strains which underexpress said gene product on which said compound acts proliferate more slowly than strains which do not underexpress the gene product on which said compound acts; and

[0774] identifying the gene product which is underexpressed in a strain which proliferated more rapidly in said culture by detecting the unique product corresponding to said gene.

[0775] 477. A method for identifying the gene product on which a compound which inhibits proliferation of an organism acts comprising:

[0776] obtaining a culture comprising a plurality of strains wherein each strain underexpresses a different gene product which is essential for proliferation of said organism and wherein the nucleotide sequence of each of the underexpressed genes has been altered so as to include a nucleotide sequence which can be used to generate a unique product corresponding to each of the underexpressed genes, wherein said culture comprises a strain in which a gene product comprises a polypeptide selected from the group consisting of a polypeptide having at least 25% amino acid identity as determined using FASTA version 3.0t78 to a polypeptide selected from the group consisting of SEQ ID NOs.: 42938-78581 and a polypeptide whose activity may be complemented by a polypeptide selected from the group consisting of SEQ ID NOs: 42938-78581 is underexpressed;

[0777] contacting said culture with a sufficient concentration of said compound to inhibit the proliferation of strains of said organism which underexpress said gene product on which said compound acts, such that strains which underexpress said gene product on which said compound acts proliferate more slowly than strains which do not underexpress the gene product on which said compound acts; and

[0778] identifying the gene product which is underexpressed in a strain which proliferated more rapidly in said culture by detecting the unique product corresponding to said gene.

[0779] 478. The method of Paragraph 472, 473, 474, 475, 476 or 477, wherein the nucleotide sequence of each of the genes encoding an underexpressed gene product has been altered by replacing the native promoters of said genes with promoters which facilitate underexpression of said gene products.

[0780] 479. The method of Paragraph 472, 473, 474, 475, 476 or 477, wherein the nucleotide sequence of each of the genes encoding an underexpressed gene product has been altered by inserting a regulatory element into the native promoters of said genes with a promoter which facilitates underexpression of said gene products.

[0781] 480. The method of Paragraph 479, wherein said regulatory element is selected from the group consisting of a regulatable promoter, an operator which is recognized by a repressor, a nucleotide sequence which is recognized by a transcriptional activator, a transcriptional terminator, a nucleotide sequence which introduces a bend in the DNA and an upstream activating sequence.

[0782] 481. The method of Paragraph 472, 473, 474, 475, 476 or 477, wherein the step of identifying the gene product which is underexpressed in a strain which proliferated more slowly in said culture by detecting the unique product corresponding to said gene comprises performing an amplification reaction and detecting a unique amplification product corresponding to said gene.

[0783] 482. The method of Paragraph 478, wherein the native promoter of each of the genes encoding a gene product essential for proliferation is replaced with the same promoter.

[0784] 483. The method of Paragraph 478, wherein the native promoters of the genes encoding gene products essential for proliferation are replaced with a plurality of promoters selected to give a desired expression level for each gene product.

[0785] 484. The method of Paragraph 478, wherein said promoters which replaced the native promoters in each strain comprise regulatable promoters.

[0786] 485. The method of Paragraph 478, wherein said promoters which replaced the native promoters in each strain each strain comprise constitutive promoters.

[0787] 486. The method of Paragraph 472, 473, 474, 475, 476 or 477, wherein said organism is selected from the group consisting of bacteria, fungi, and protozoa.

[0788] 487. The method of Paragraph 472, 473, 474, 475, 476 or 477, wherein said culture is a culture of an organism selected from the group consisting of Acinetobacter baumannii, Anaplasma marginale, Aspergillus fumigatus, Bacillus anthracis, Bacteroides fragilis, Bordetella pertussis, Borrelia burgdorferi, Burkholderia cepacia, Burkholderia fungorum, Burkholderia mallei, Campylobacter jejuni, Candida albicans, Candida glabrata (also called Torulopsis glabrata), Candida tropicalis, Candida parapsilosis, Candida guilliermondii, Candida krusei, Candida kefyr (also called Candida pseudotropicalis), Candida dubliniensis, Chlamydia pneumoniae, Chlamydia trachomatis, Clostridium acetobutylicum, Clostridium botulinum, Clostridium difficile, Clostridium perfringens, Coccidioides immitis, Corynebacterium diptheriae, Cryptococcus neoformans, Enterobacter cloacae, Enterococcus faecalis, Enterococcus faecium, Escherichia coli, Haemophilus influenzae, Helicobacter pylori, Histoplasma capsulatum, Klebsiella pneumoniae, Legionella pneumophila, Listeria monocytogenes, Moraxella catarrhalis, Mycobacterium avium, Mycobacterium bovis, Mycobacterium leprae, Mycobacterium tuberculosis, Mycoplasma genitalium, Mycoplasma pneumoniae, Neisseria gonorrhoeae, Neisseria meningitidis, Nocardia asteroides, Pasteurella haemolytica, Pasteurella multocida, Pneumocystis carinii, Proteus mirabilis, Proteus vulgaris, Pseudomonas aeruginosa, Pseudomonas putida, Pseudomonas syringae, Salmonella bongori, Salmonella cholerasuis, Salmonella enterica, Salmonella paratyphi, Salmonella typhi, Salmonella typhimurium, Shigella boydii, Shigella dysenteriae, Shigella flexneri, Shigella sonnei, Staphylococcus aureus, Staphylococcus epidermidis, Staphylococcus haemolyticus, Streptococcus pneumoniae, Streptococcus mutans, Streptococcus pyogenes, Treponema pallidum, Ureaplasma urealyticum, Vibrio cholerae, Vibrio parahaemolyticus, Vibrio vulnificans, Yersinia enterocolitica, Yersinia pestis and any species falling within the genera of any of the above species.

[0789] 488. A method for determining the extent to which each of a plurality of strains are present in a culture or collection of strains comprising:

[0790] obtaining a nucleic acid sample comprising nucleic acids from a culture or collection of strains wherein said culture or collection of strains comprises a plurality of strains wherein each strain overexpresses or underexpresses a different gene product which is required for proliferation of said organism wherein said culture comprises a strain in which a gene product whose activity or level is inhibited by a nucleic acid comprising a nucleotide sequence selected from the group consisting of SEQ ID NOs.: 1-6213 is overexpressed or underexpressed;

[0791] performing an amplification reaction using a set of primer pairs which are complementary to nucleotide sequences within or adjacent to the genes which encode said gene products, wherein the members of said set of primer pairs are designed such that each primer pair would yield an amplification product having a length distinguishable from the lengths of the amplification products from the other primer pairs if a strain comprising the nucleotide sequences complementary to said primer pair is present in said culture or collection of strains; and

[0792] determining the lengths of the amplification products obtained in said amplification reaction.

[0793] 489. A method for determining the extent to which each of a plurality of strains are present in a culture or collection of strains comprising:

[0794] obtaining a nucleic acid sample comprising nucleic acids from a culture or collection of strains wherein said culture or collection of strains comprises a plurality of strains wherein each strain overexpresses or underexpresses a different gene product which is required for proliferation of said organism, wherein said culture comprises a strain in which a gene product encoded by a nucleic acid comprising a nucleotide sequence selected from the group consisting of SEQ ID NOs.: 6214-42397 is overexpressed or underexpressed;

[0795] performing an amplification reaction using a set of primer pairs which are complementary to nucleotide sequences within or adjacent to the genes which encode said gene products, wherein the members of said set of primer pairs are designed such that each primer pair would yield an amplification product having a length distinguishable from the lengths of the amplification products from the other primer pairs if a strain comprising the nucleotide sequences complementary to said primer pair is present in said culture or collection of strains; and

[0796] determining the lengths of the amplification products obtained in said amplification reaction.

[0797] 490. A method for determining the extent to which each of a plurality of strains are present in a culture or collection of strains comprising:

[0798] obtaining a nucleic acid sample comprising nucleic acids from a culture or collection of strains wherein said culture or collection of strains comprises a plurality of strains wherein each strain overexpresses or underexpresses a different gene product which is required for proliferation of said organism, wherein said culture comprises a strain in which a gene product comprising an amino acid sequence selected from the group consisting of SEQ ID NOs.: 42938-78581 is overexpressed or underexpressed;

[0799] performing an amplification reaction using a set of primer pairs which are complementary to nucleotide sequences within or adjacent to the genes which encode said gene products, wherein the members of said set of primer pairs are designed such that each primer pair would yield an amplification product having a length distinguishable from the lengths of the amplification products from the other primer pairs if a strain comprising the nucleotide sequences complementary to said primer pair is present in said culture or collection of strains; and

[0800] determining the lengths of the amplification products obtained in said amplification reaction.

[0801] 491. A method for determining the extent to which each of a plurality of strains are present in a culture or collection of strains comprising:

[0802] obtaining a nucleic acid sample comprising nucleic acids from a culture or collection of strains wherein said culture or collection of strains comprises a plurality of strains wherein each strain overexpresses or underexpresses a different gene product which is required for proliferation of said organism, wherein said culture comprises a strain in which a gene product selected from the group consisting of a gene product having at least 70% nucleotide sequence identity as determined using BLASTN version 2.0 with the default parameters to a gene product whose expression is inhibited by an antisense nucleic acid comprising a nucleotide sequence selected from the group consisting of SEQ ID NOs.: 1-6213, a gene product encoded by a nucleic acid having at least 70% nucleotide sequence identity as determined using BLASTN version 2.0 with the default parameters to a nucleic acid encoding a gene product whose expression is inhibited by an antisense nucleic acid comprising a nucleotide sequence selected from the group consisting of SEQ ID NOs: 1-6213, a gene product having at least 25% amino acid identity as determined using FASTA version 3.0t78 with the default parameters to a gene product whose expression is inhibited by an antisense nucleic acid comprising a nucleotide sequence selected from the group consisting of SEQ ID NOs.: 1-6213, a gene product encoded by a nucleic acid which hybridizes to a nucleic acid comprising a nucleotide sequence selected from the group consisting of SEQ ID NOs.: 1-6213 under stringent conditions, a gene product encoded by a nucleic acid which hybridizes to a nucleic acid comprising a nucleotide sequence selected from the group consisting of SEQ ID NOs.: 1-6213 under moderate conditions, and a gene product whose activity may be complemented by the gene product whose activity is inhibited by a nucleic acid comprising a nucleotide sequence selected from the group consisting of SEQ ID NOs: 1-6213 is overexpressed or underexpressed;

[0803] performing an amplification reaction using a set of primer pairs which are complementary to nucleotide sequences within or adjacent to the genes which encode said gene products, wherein the members of said set of primer pairs are designed such that each primer pair would yield an amplification product having a length distinguishable from the lengths of the amplification products from the other primer pairs if a strain comprising the nucleotide sequences complementary to said primer pair is present in said culture or collection of strains; and

[0804] determining the lengths of the amplification products obtained in said amplification reaction.

[0805] 492. A method for determining the extent to which each of a plurality of strains are present in a culture or collection of strains comprising:

[0806] obtaining a nucleic acid sample comprising nucleic acids from a culture or collection of strains wherein said culture or collection of strains comprises a plurality of strains wherein each strain overexpresses or underexpresses a different gene product which is required for proliferation of said organism, wherein said culture comprises a strain in which a gene product encoded by a nucleic acid comprising a nucleotide sequence selected from the group consisting of a nucleic acid comprising a nucleic acid having at least 70% nucleotide sequence identity as determined using BLASTN version 2.0 with the default parameters to a nucleotide sequence selected from the group consisting of SEQ ID NOS.: 6214-42397, a nucleic acid comprising a nucleotide sequence which hybridizes to a sequence selected from the group consisting of SEQ ID NOS.: 6214-42397 under stringent conditions, and a nucleic acid comprising a nucleotide sequence which hybridizes to a nucleotide sequence selected from the group consisting of SEQ ID NOS.: 6214-42397 under moderate conditions is overexpressed or underexpressed;

[0807] performing an amplification reaction using a set of primer pairs which are complementary to nucleotide sequences within or adjacent to the genes which encode said gene products, wherein the members of said set of primer pairs are designed such that each primer pair would yield an amplification product having a length distinguishable from the lengths of the amplification products from the other primer pairs if a strain comprising the nucleotide sequences complementary to said primer pair is present in said culture or collection of strains; and

[0808] determining the lengths of the amplification products obtained in said amplification reaction.

[0809] 493. A method for determining the extent to which each of a plurality of strains are present in a culture or collection of strains comprising:

[0810] obtaining a nucleic acid sample comprising nucleic acids from a culture or collection of strains wherein said culture or collection of strains comprises a plurality of strains wherein each strain overexpresses or underexpresses a different gene product which is required for proliferation of said organism, wherein said culture comprises a strain in which a gene product comprising a polypeptide selected from the group consisting of a polypeptide having at least 25% amino acid identity as determined using FASTA version 3.0t78 to a polypeptide selected from the group consisting of SEQ ID NOs.: 42938-78581 and a polypeptide whose activity may be complemented by a polypeptide selected from the group consisting of SEQ ID NOs: 42938-78581 is overexpressed or underexpressed;

[0811] performing an amplification reaction using a set of primer pairs which are complementary to nucleotide sequences within or adjacent to the genes which encode said gene products, wherein the members of said set of primer pairs are designed such that each primer pair would yield an amplification product having a length distinguishable from the lengths of the amplification products from the other primer pairs if a strain comprising the nucleotide sequences complementary to said primer pair is present in said culture or collection of strains; and

[0812] determining the lengths of the amplification products obtained in said amplification reaction.

[0813] 494. The method of Paragraph 488, 489, 490, 491, 492 or 493, wherein one member of each primer pair for each of said genes is labeled with a detectable dye.

[0814] 495. The method of Paragraph 488, 489, 490, 491, 492 or 493, wherein:

[0815] said nucleic acid sample is divided into N aliquots; and

[0816] said amplification reaction is performed on each aliquot using primer pairs complementary to nucleotide sequences within or adjacent to 1/N of the genes which encode said gene products, wherein one of the members of each primer pair in each aliquot is labeled with a dye and wherein the dyes on the primers in each aliquot are distinguishable from one another.

[0817] 496. The method of Paragraph 494, further comprising pooling the amplification products from each of the aliquots prior to determining the lengths of the amplification products.

[0818] 497. The method of Paragraph 488, 489, 490, 491, 492 or 493, wherein the native promoters of said genes which encode said gene products have been replaced with a regulatable promoter and one of the primers in said primer pairs is complementary to a nucleotide sequence within said regulatable promoter.

[0819] 498. The method of Paragraph 496, wherein the native promoters for each of said genes were replaced with the same regulatable promoter.

[0820] 499. The method of Paragraph 496, wherein more than one regulatable promoter was used to replace the promoters of said genes such that some of said genes are under the control of a different regulatable promoter.

[0821] 500. A method for identifying the target of a compound which inhibits the proliferation of an organism comprising:

[0822] obtaining a first nucleic acid sample comprising nucleic acids from a first culture or collection of strains wherein said culture or collection of strains comprises a plurality of strains wherein each strain overexpresses or underexpresses a different gene product which is required for proliferation of said organism and wherein said culture or collection of strains has been contacted with said compound;

[0823] obtaining a second nucleic acid sample comprising nucleic acids from a second culture or collection of strains wherein said culture or collection of strains comprises the same strains as said first culture or collection of strains wherein said second culture or collection of strains has not been contacted with said compound;

[0824] performing a first amplification reaction on said first nucleic acid sample using a set of primer pairs which are complementary to nucleotide sequences within or adjacent to the genes which encode said gene products, wherein the members of said set of primer pairs are designed such that each primer pair would yield an amplification product having a length distinguishable from the lengths of the amplification products from the other primer pairs if a strain comprising the nucleotide sequences complementary to said primer pair is present in said culture or collection of strains;

[0825] performing a second amplification reaction on said second nucleic acid sample using the same set of primer pairs used in said first amplification reaction;

[0826] and comparing the amount of each amplification product in said first amplification reaction to the amount of that amplification product in said second amplification reaction, wherein an increased level of an amplification product in said first amplification reaction relative to said second amplification reaction indicates that the gene product corresponding to said amplification product is the target of said compound if said culture or strain overexpresses said gene products and a decreased level of of an amplification product in said first amplification reaction relative to said second amplification reaction indicates that the gene product corresponding to said amplification product is the target of said compound if said culture or strain overexpresses said gene products, wherein said first and second cultures or collection of strains comprise a strain in which a gene product whose activity or level is inhibited by a nucleic acid comprising a nucleotide sequence selected from the group consisting of SEQ ID NOs.: 1-6213 is overexpressed or underexpressed.

[0827] 501. A method for identifying the target of a compound which inhibits the proliferation of an organism comprising:

[0828] obtaining a first nucleic acid sample comprising nucleic acids from a first culture or collection of strains wherein said culture or collection of strains comprises a plurality of strains wherein each strain overexpresses or underexpresses a different gene product which is required for proliferation of said organism and wherein said culture or collection of strains has been contacted with said compound;

[0829] obtaining a second nucleic acid sample comprising nucleic acids from a second culture or collection of strains wherein said culture or collection of strains comprises the same strains as said first culture or collection of strains wherein said second culture or collection of strains has not been contacted with said compound;

[0830] performing a first amplification reaction on said first nucleic acid sample using a set of primer pairs which are complementary to nucleotide sequences within or adjacent to the genes which encode said gene products, wherein the members of said set of primer pairs are designed such that each primer pair would yield an amplification product having a length distinguishable from the lengths of the amplification products from the other primer pairs if a strain comprising the nucleotide sequences complementary to said primer pair is present in said culture or collection of strains;

[0831] performing a second amplification reaction on said second nucleic acid sample using the same set of primer pairs used in said first amplification reaction;

[0832] and comparing the amount of each amplification product in said first amplification reaction to the amount of that amplification product in said second amplification reaction, wherein an increased level of an amplification product in said first amplification reaction relative to said second amplification reaction indicates that the gene product corresponding to said amplification product is the target of said compound if said culture or strain overexpresses said gene products and a decreased level of of an amplification product in said first amplification reaction relative to said second amplification reaction indicates that the gene product corresponding to said amplification product is the target of said compound if said culture or strain overexpresses said gene products, wherein said first and second cultures or collection of strains comprise a strain in which a gene product encoded by a nucleic acid comprising a nucleotide sequence selected from the group consisting of SEQ ID NOs.: 6214-42397 is overexpressed or underexpressed.

[0833] 502. A method for identifying the target of a compound which inhibits the proliferation of an organism comprising:

[0834] obtaining a first nucleic acid sample comprising nucleic acids from a first culture or collection of strains wherein said culture or collection of strains comprises a plurality of strains wherein each strain overexpresses or underexpresses a different gene product which is required for proliferation of said organism and wherein said culture or collection of strains has been contacted with said compound;

[0835] obtaining a second nucleic acid sample comprising nucleic acids from a second culture or collection of strains wherein said culture or collection of strains comprises the same strains as said first culture or collection of strains wherein said second culture or collection of strains has not been contacted with said compound;

[0836] performing a first amplification reaction on said first nucleic acid sample using a set of primer pairs which are complementary to nucleotide sequences within or adjacent to the genes which encode said gene products, wherein the members of said set of primer pairs are designed such that each primer pair would yield an amplification product having a length distinguishable from the lengths of the amplification products from the other primer pairs if a strain comprising the nucleotide sequences complementary to said primer pair is present in said culture or collection of strains;

[0837] performing a second amplification reaction on said second nucleic acid sample using the same set of primer pairs used in said first amplification reaction;

[0838] and comparing the amount of each amplification product in said first amplification reaction to the amount of that amplification product in said second amplification reaction, wherein an increased level of an amplification product in said first amplification reaction relative to said second amplification reaction indicates that the gene product corresponding to said amplification product is the target of said compound if said culture or strain overexpresses said gene products and a decreased level of of an amplification product in said first amplification reaction relative to said second amplification reaction indicates that the gene product corresponding to said amplification product is the target of said compound if said culture or strain overexpresses said gene products, wherein said first and second cultures or collection of strains comprise a strain in which a gene product comprising an amino acid sequence selected from the group consisting of SEQ ID NOs.: 42938-78581 is overexpressed or underexpressed.

[0839] 503. A method for identifying the target of a compound which inhibits the proliferation of an organism comprising:

[0840] obtaining a first nucleic acid sample comprising nucleic acids from a first culture or collection of strains wherein said culture or collection of strains comprises a plurality of strains wherein each strain overexpresses or underexpresses a different gene product which is required for proliferation of said organism and wherein said culture or collection of strains has been contacted with said compound;

[0841] obtaining a second nucleic acid sample comprising nucleic acids from a second culture or collection of strains wherein said culture or collection of strains comprises the same strains as said first culture or collection of strains wherein said second culture or collection of strains has not been contacted with said compound;

[0842] performing a first amplification reaction on said first nucleic acid sample using a set of primer pairs which are complementary to nucleotide sequences within or adjacent to the genes which encode said gene products, wherein the members of said set of primer pairs are designed such that each primer pair would yield an amplification product having a length distinguishable from the lengths of the amplification products from the other primer pairs if a strain comprising the nucleotide sequences complementary to said primer pair is present in said culture or collection of strains;

[0843] performing a second amplification reaction on said second nucleic acid sample using the same set of primer pairs used in said first amplification reaction;

[0844] and comparing the amount of each amplification product in said first amplification reaction to the amount of that amplification product in said second amplification reaction, wherein an increased level of an amplification product in said first amplification reaction relative to said second amplification reaction indicates that the gene product corresponding to said amplification product is the target of said compound if said culture or strain overexpresses said gene products and a decreased level of of an amplification product in said first amplification reaction relative to said second amplification reaction indicates that the gene product corresponding to said amplification product is the target of said compound if said culture or strain overexpresses said gene products, wherein said first and second cultures or collection of strains comprise a strain in which a gene product selected from the group consisting of a gene product having at least 70% nucleotide sequence identity as determined using BLASTN version 2.0 with the default parameters to a gene product whose expression is inhibited by an antisense nucleic acid comprising a nucleotide sequence selected from the group consisting of SEQ ID NOs.: 1-6213, a gene product encoded by a nucleic acid having at least 70% nucleotide sequence identity as determined using BLASTN version 2.0 with the default parameters to a nucleic acid encoding a gene product whose expression is inhibited by an antisense nucleic acid comprising a nucleotide sequence selected from the group consisting of SEQ ID NOs: 1-6213, a gene product having at least 25% amino acid identity as determined using FASTA version 3.0t78 with the default parameters to a gene product whose expression is inhibited by an antisense nucleic acid comprising a nucleotide sequence selected from the group consisting of SEQ ID NOs.: 1-6213, a gene product encoded by a nucleic acid which hybridizes to a nucleic acid comprising a nucleotide sequence selected from the group consisting of SEQ ID NOs.: 1-6213 under stringent conditions, a gene product encoded by a nucleic acid which hybridizes to a nucleic acid comprising a nucleotide sequence selected from the group consisting of SEQ ID NOs.: 1-6213 under moderate conditions, and a gene product whose activity may be complemented by the gene product whose activity is inhibited by a nucleic acid comprising a nucleotide sequence selected from the group consisting of SEQ ID NOs: 1-6213 is overexpressed or underexpressed.

[0845] 504. A method for identifying the target of a compound which inhibits the proliferation of an organism comprising:

[0846] obtaining a first nucleic acid sample comprising nucleic acids from a first culture or collection of strains wherein said culture or collection of strains comprises a plurality of strains wherein each strain overexpresses or underexpresses a different gene product which is required for proliferation of said organism and wherein said culture or collection of strains has been contacted with said compound;

[0847] obtaining a second nucleic acid sample comprising nucleic acids from a second culture or collection of strains wherein said culture or collection of strains comprises the same strains as said first culture or collection of strains wherein said second culture or collection of strains has not been contacted with said compound;

[0848] performing a first amplification reaction on said first nucleic acid sample using a set of primer pairs which are complementary to nucleotide sequences within or adjacent to the genes which encode said gene products, wherein the members of said set of primer pairs are designed such that each primer pair would yield an amplification product having a length distinguishable from the lengths of the amplification products from the other primer pairs if a strain comprising the nucleotide sequences complementary to said primer pair is present in said culture or collection of strains;

[0849] performing a second amplification reaction on said second nucleic acid sample using the same set of primer pairs used in said first amplification reaction;

[0850] and comparing the amount of each amplification product in said first amplification reaction to the amount of that amplification product in said second amplification reaction, wherein an increased level of an amplification product in said first amplification reaction relative to said second amplification reaction indicates that the gene product corresponding to said amplification product is the target of said compound if said culture or strain overexpresses said gene products and a decreased level of of an amplification product in said first amplification reaction relative to said second amplification reaction indicates that the gene product corresponding to said amplification product is the target of said compound if said culture or strain overexpresses said gene products, wherein said first and second cultures or collection of strains comprise a strain in which a gene product encoded by a nucleic acid comprising a nucleotide sequence selected from the group consisting of a nucleic acid comprising a nucleic acid having at least 70% nucleotide sequence identity as determined using BLASTN version 2.0 with the default parameters to a nucleotide sequence selected from the group consisting of SEQ ID NOS.: 6214-42397, a nucleic acid comprising a nucleotide sequence which hybridizes to a sequence selected from the group consisting of SEQ ID NOS.: 6214-42397 under stringent conditions, and a nucleic acid comprising a nucleotide sequence which hybridizes to a nucleotide sequence selected from the group consisting of SEQ ID NOS.: 6214-42397 under moderate conditions is overexpressed or underexpressed.

[0851] 505. A method for identifying the target of a compound which inhibits the proliferation of an organism comprising:

[0852] obtaining a first nucleic acid sample comprising nucleic acids from a first culture or collection of strains wherein said culture or collection of strains comprises a plurality of strains wherein each strain overexpresses or underexpresses a different gene product which is required for proliferation of said organism and wherein said culture or collection of strains has been contacted with said compound;

[0853] obtaining a second nucleic acid sample comprising nucleic acids from a second culture or collection of strains wherein said culture or collection of strains comprises the same strains as said first culture or collection of strains wherein said second culture or collection of strains has not been contacted with said compound;

[0854] performing a first amplification reaction on said first nucleic acid sample using a set of primer pairs which are complementary to nucleotide sequences within or adjacent to the genes which encode said gene products, wherein the members of said set of primer pairs are designed such that each primer pair would yield an amplification product having a length distinguishable from the lengths of the amplification products from the other primer pairs if a strain comprising the nucleotide sequences complementary to said primer pair is present in said culture or collection of strains;

[0855] performing a second amplification reaction on said second nucleic acid sample using the same set of primer pairs used in said first amplification reaction;

[0856] and comparing the amount of each amplification product in said first amplification reaction to the amount of that amplification product in said second amplification reaction, wherein an increased level of an amplification product in said first amplification reaction relative to said second amplification reaction indicates that the gene product corresponding to said amplification product is the target of said compound if said culture or strain overexpresses said gene products and a decreased level of of an amplification product in said first amplification reaction relative to said second amplification reaction indicates that the gene product corresponding to said amplification product is the target of said compound if said culture or strain overexpresses said gene products, wherein said first and second culture or collection of strains comprise a strain in which a gene product comprising a polypeptide selected from the group consisting of a polypeptide having at least 25% amino acid identity as determined using FASTA version 3.0t78 to a polypeptide selected from the group consisting of SEQ ID NOs.: 42938-78581 and a polypeptide whose activity may be complemented by a polypeptide selected from the group consisting of SEQ ID NOs: 42938-78581 is overexpressed or underexpressed.

[0857] 506. The method of Paragraph 500, 501, 502, 503, 504 or 505, wherein one member of each primer pair for each of said genes is labeled with a detectable dye.

[0858] 507. The method of Paragraph 500, 501, 502, 503, 504 or 505, wherein the native promoters of said genes which encode said gene products have been replaced with a regulatable promoter and one of the primers in said primer pairs is complementary to a nucleotide sequence within said regulatable promoter.

[0859] 508. The method of Paragraph 500, 501, 502, 503, 504 or 505, wherein the native promoters for each of said genes were replaced with the same regulatable promoter.

[0860] 509. The method of Paragraph 500, 501, 502, 503, 504 or 505, wherein more than one regulatable promoter was used to replace the promoters of said genes such that some of said genes are under the control of a different regulatable promoter.

[0861] 510. A method for determining the extent to which each of a plurality of strains are present in a culture or collection of strains comprising:

[0862] obtaining a nucleic acid sample comprising nucleic acids from a culture or collection of strains wherein said culture or collection of strains comprises a plurality of strains which transcribe an antisense nucleic acid complementary to a different gene product which is required for proliferation of said organism;

[0863] performing an amplification reaction using a set of primer pairs which are complementary to nucleotide sequences within or adjacent to the nucleic acids which encode said antisense nucleic acids, wherein the members of said set of primer pairs are designed such that each primer pair would yield an amplification product having a length distinguishable from the lengths of the amplification products from the other primer pairs if a strain comprising the nucleotide sequences complementary to said primer pair is present in said culture or collection of strains; and

[0864] determining the lengths of the amplification products obtained in said amplification reaction, wherein said culture comprises a strain in which a gene product whose activity or level is inhibited by a nucleic acid comprising a nucleotide sequence selected from the group consisting of SEQ ID NOs.: 1-6213 is overexpressed or underexpressed.

[0865] 511. A method for determining the extent to which each of a plurality of strains are present in a culture or collection of strains comprising:

[0866] obtaining a nucleic acid sample comprising nucleic acids from a culture or collection of strains wherein said culture or collection of strains comprises a plurality of strains which transcribe an antisense nucleic acid complementary to a different gene product which is required for proliferation of said organism;

[0867] performing an amplification reaction using a set of primer pairs which are complementary to nucleotide sequences within or adjacent to the nucleic acids which encode said antisense nucleic acids, wherein the members of said set of primer pairs are designed such that each primer pair would yield an amplification product having a length distinguishable from the lengths of the amplification products from the other primer pairs if a strain comprising the nucleotide sequences complementary to said primer pair is present in said culture or collection of strains; and

[0868] determining the lengths of the amplification products obtained in said amplification reaction, wherein said culture comprises a strain in which a gene product encoded by a nucleic acid comprising a nucleotide sequence selected from the group consisting of SEQ ID NOs.: 6214-42397 is overexpressed or underexpressed.

[0869] 512. A method for determining the extent to which each of a plurality of strains are present in a culture or collection of strains comprising:

[0870] obtaining a nucleic acid sample comprising nucleic acids from a culture or collection of strains wherein said culture or collection of strains comprises a plurality of strains which transcribe an antisense nucleic acid complementary to a different gene product which is required for proliferation of said organism;

[0871] performing an amplification reaction using a set of primer pairs which are complementary to nucleotide sequences within or adjacent to the nucleic acids which encode said antisense nucleic acids, wherein the members of said set of primer pairs are designed such that each primer pair would yield an amplification product having a length distinguishable from the lengths of the amplification products from the other primer pairs if a strain comprising the nucleotide sequences complementary to said primer pair is present in said culture or collection of strains; and

[0872] determining the lengths of the amplification products obtained in said amplification reaction, wherein said culture comprises a strain in which a gene product comprising an amino acid sequence selected from the group consisting of SEQ ID NOs.: 42938-78581 is overexpressed or underexpressed.

[0873] 513. A method for determining the extent to which each of a plurality of strains are present in a culture or collection of strains comprising:

[0874] obtaining a nucleic acid sample comprising nucleic acids from a culture or collection of strains wherein said culture or collection of strains comprises a plurality of strains which transcribe an antisense nucleic acid complementary to a different gene product which is required for proliferation of said organism;

[0875] performing an amplification reaction using a set of primer pairs which are complementary to nucleotide sequences within or adjacent to the nucleic acids which encode said antisense nucleic acids, wherein the members of said set of primer pairs are designed such that each primer pair would yield an amplification product having a length distinguishable from the lengths of the amplification products from the other primer pairs if a strain comprising the nucleotide sequences complementary to said primer pair is present in said culture or collection of strains; and

[0876] determining the lengths of the amplification products obtained in said amplification reaction, wherein said culture comprises a strain in which a gene product selected from the group consisting of a gene product having at least 70% nucleotide sequence identity as determined using BLASTN version 2.0 with the default parameters to a gene product whose expression is inhibited by an antisense nucleic acid comprising a nucleotide sequence selected from the group consisting of SEQ ID NOs.: 1-6213, a gene product encoded by a nucleic acid having at least 70% nucleotide sequence identity as determined using BLASTN version 2.0 with the default parameters to a nucleic acid encoding a gene product whose expression is inhibited by an antisense nucleic acid comprising a nucleotide sequence selected from the group consisting of SEQ ID NOs: 1-6213, a gene product having at least 25% amino acid identity as determined using FASTA version 3.0t78 with the default parameters to a gene product whose expression is inhibited by an antisense nucleic acid comprising a nucleotide sequence selected from the group consisting of SEQ ID NOs.: 1-6213, a gene product encoded by a nucleic acid which hybridizes to a nucleic acid comprising a nucleotide sequence selected from the group consisting of SEQ ID NOs.: 1-6213 under stringent conditions, a gene product encoded by a nucleic acid which hybridizes to a nucleic acid comprising a nucleotide sequence selected from the group consisting of SEQ ID NOs.: 1-6213 under moderate conditions, and a gene product whose activity may be complemented by the gene product whose activity is inhibited by a nucleic acid comprising a nucleotide sequence selected from the group consisting of SEQ ID NOs: 1-6213 is overexpressed or underexpressed.

[0877] 514. A method for determining the extent to which each of a plurality of strains are present in a culture or collection of strains comprising:

[0878] obtaining a nucleic acid sample comprising nucleic acids from a culture or collection of strains wherein said culture or collection of strains comprises a plurality of strains which transcribe an antisense nucleic acid complementary to a different gene product which is required for proliferation of said organism;

[0879] performing an amplification reaction using a set of primer pairs which are complementary to nucleotide sequences within or adjacent to the nucleic acids which encode said antisense nucleic acids, wherein the members of said set of primer pairs are designed such that each primer pair would yield an amplification product having a length distinguishable from the lengths of the amplification products from the other primer pairs if a strain comprising the nucleotide sequences complementary to said primer pair is present in said culture or collection of strains; and

[0880] determining the lengths of the amplification products obtained in said amplification reaction, wherein said culture comprises a strain in which a gene product encoded by a nucleic acid comprising a nucleotide sequence selected from the group consisting of a nucleic acid comprising a nucleic acid having at least 70% nucleotide sequence identity as determined using BLASTN version 2.0 with the default parameters to a nucleotide sequence selected from the group consisting of SEQ ID NOS.: 6214-42397, a nucleic acid comprising a nucleotide sequence which hybridizes to a sequence selected from the group consisting of SEQ ID NOS.: 6214-42397 under stringent conditions, and a nucleic acid comprising a nucleotide sequence which hybridizes to a nucleotide sequence selected from the group consisting of SEQ ID NOS.: 6214-42397 under moderate conditions is overexpressed or underexpressed.

[0881] 515. A method for determining the extent to which each of a plurality of strains are present in a culture or collection of strains comprising:

[0882] obtaining a nucleic acid sample comprising nucleic acids from a culture or collection of strains wherein said culture or collection of strains comprises a plurality of strains which transcribe an antisense nucleic acid complementary to a different gene product which is required for proliferation of said organism;

[0883] performing an amplification reaction using a set of primer pairs which are complementary to nucleotide sequences within or adjacent to the nucleic acids which encode said antisense nucleic acids, wherein the members of said set of primer pairs are designed such that each primer pair would yield an amplification product having a length distinguishable from the lengths of the amplification products from the other primer pairs if a strain comprising the nucleotide sequences complementary to said primer pair is present in said culture or collection of strains; and

[0884] determining the lengths of the amplification products obtained in said amplification reaction, wherein said culture comprises a strain in which a gene product comprising a polypeptide selected from the group consisting of a polypeptide having at least 25% amino acid identity as determined using FASTA version 3.0t78 to a polypeptide selected from the group consisting of SEQ ID NOs.: 42938-78581 and a polypeptide whose activity may be complemented by a polypeptide selected from the group consisting of SEQ ID NOs: 42938-78581 is overexpressed or underexpressed.

[0885] 516. The method of Paragraph 510, 511, 512, 513, 514 or 515, wherein one member of each primer pair for each of said genes is labeled with a detectable dye.

[0886] 517. The method of Paragraph 510, 511, 512, 513, 514 or 515, wherein:

[0887] said nucleic acid sample is divided into N aliquots; and

[0888] said amplification reaction is performed on each aliquot using primer pairs complementary to nucleotide sequences within or adjacent to 1/N of the genes which encode said gene products, wherein one of the members of each primer pair in each aliquot is labeled with a dye and wherein the dyes on the primers in each aliquot are distinguishable from one another.

[0889] 518. The method of Paragraph 517, further comprising pooling the amplification products from each of the aliquots prior to determining the lengths of the amplification products.

[0890] 519. A method for determining the extent to which each of a plurality of strains are present in a culture or collection of strains comprising:

[0891] obtaining a nucleic acid sample comprising nucleic acids from a culture or collection of strains wherein said culture or collection of strains comprises a plurality of strains which overexpress or underexpress a different gene product which is required for proliferation of said organism;

[0892] performing an amplification reaction using primer pairs which are complementary to nucleotide sequences within or adjacent to the genes which encode said gene products, wherein said primer pairs are designed such that each primer pair would yield an amplification product which is distinguishable from the amplification products produced by the other primer pairs on the a basis selected from the group consisting of length, detectable label and both length and detectable label if a strain comprising the nucleotide sequences complementary to said primer pair is present in said culture or collection of strains; and

[0893] identifying the amplification products obtained in said amplification reaction, wherein said culture comprises a strain in which a gene product whose activity or level is inhibited by a nucleic acid comprising a nucleotide sequence selected from the group consisting of SEQ ID NOs.: 1-6213 is overexpressed or underexpressed.

[0894] 520. A method for determining the extent to which each of a plurality of strains are present in a culture or collection of strains comprising:

[0895] obtaining a nucleic acid sample comprising nucleic acids from a culture or collection of strains wherein said culture or collection of strains comprises a plurality of strains which overexpress or underexpress a different gene product which is required for proliferation of said organism;

[0896] performing an amplification reaction using primer pairs which are complementary to nucleotide sequences within or adjacent to the genes which encode said gene products, wherein said primer pairs are designed such that each primer pair would yield an amplification product which is distinguishable from the amplification products produced by the other primer pairs on the a basis selected from the group consisting of length, detectable label and both length and detectable label if a strain comprising the nucleotide sequences complementary to said primer pair is present in said culture or collection of strains; and

[0897] identifying the amplification products obtained in said amplification reaction, wherein said culture comprises a strain in which a gene product encoded by a nucleic acid comprising a nucleotide sequence selected from the group consisting of SEQ ID NOs.: 6214-42397 is overexpressed or underexpressed.

[0898] 521. A method for determining the extent to which each of a plurality of strains are present in a culture or collection of strains comprising:

[0899] obtaining a nucleic acid sample comprising nucleic acids from a culture or collection of strains wherein said culture or collection of strains comprises a plurality of strains which overexpress or underexpress a different gene product which is required for proliferation of said organism;

[0900] performing an amplification reaction using primer pairs which are complementary to nucleotide sequences within or adjacent to the genes which encode said gene products, wherein said primer pairs are designed such that each primer pair would yield an amplification product which is distinguishable from the amplification products produced by the other primer pairs on the a basis selected from the group consisting of length, detectable label and both length and detectable label if a strain comprising the nucleotide sequences complementary to said primer pair is present in said culture or collection of strains; and

[0901] identifying the amplification products obtained in said amplification reaction, wherein said culture comprises a strain in which a gene product comprising an amino acid sequence selected from the group consisting of SEQ ID NOs.: 42938-78581 is overexpressed or underexpressed.

[0902] 522. A method for determining the extent to which each of a plurality of strains are present in a culture or collection of strains comprising:

[0903] obtaining a nucleic acid sample comprising nucleic acids from a culture or collection of strains wherein said culture or collection of strains comprises a plurality of strains which overexpress or underexpress a different gene product which is required for proliferation of said organism;

[0904] performing an amplification reaction using primer pairs which are complementary to nucleotide sequences within or adjacent to the genes which encode said gene products, wherein said primer pairs are designed such that each primer pair would yield an amplification product which is distinguishable from the amplification products produced by the other primer pairs on the a basis selected from the group consisting of length, detectable label and both length and detectable label if a strain comprising the nucleotide sequences complementary to said primer pair is present in said culture or collection of strains; and

[0905] identifying the amplification products obtained in said amplification reaction, wherein said culture comprises a strain in which a gene product selected from the group consisting of a gene product having at least 70% nucleotide sequence identity as determined using BLASTN version 2.0 with the default parameters to a gene product whose expression is inhibited by an antisense nucleic acid comprising a nucleotide sequence selected from the group consisting of SEQ ID NOs.: 1-6213, a gene product encoded by a nucleic acid having at least 70% nucleotide sequence identity as determined using BLASTN version 2.0 with the default parameters to a nucleic acid encoding a gene product whose expression is inhibited by an antisense nucleic acid comprising a nucleotide sequence selected from the group consisting of SEQ ID NOs: 1-6213, a gene product having at least 25% amino acid identity as determined using FASTA version 3.0t78 with the default parameters to a gene product whose expression is inhibited by an antisense nucleic acid comprising a nucleotide sequence selected from the group consisting of SEQ ID NOs.: 1-6213, a gene product encoded by a nucleic acid which hybridizes to a nucleic acid comprising a nucleotide sequence selected from the group consisting of SEQ ID NOs.: 1-6213 under stringent conditions, a gene product encoded by a nucleic acid which hybridizes to a nucleic acid comprising a nucleotide sequence selected from the group consisting of SEQ ID NOs.: 1-6213 under moderate conditions, and a gene product whose activity may be complemented by the gene product whose activity is inhibited by a nucleic acid comprising a nucleotide sequence selected from the group consisting of SEQ ID NOs: 1-6213 is overexpressed or underexpressed.

[0906] 523. A method for determining the extent to which each of a plurality of strains are present in a culture or collection of strains comprising:

[0907] obtaining a nucleic acid sample comprising nucleic acids from a culture or collection of strains wherein said culture or collection of strains comprises a plurality of strains which overexpress or underexpress a different gene product which is required for proliferation of said organism;

[0908] performing an amplification reaction using primer pairs which are complementary to nucleotide sequences within or adjacent to the genes which encode said gene products, wherein said primer pairs are designed such that each primer pair would yield an amplification product which is distinguishable from the amplification products produced by the other primer pairs on the a basis selected from the group consisting of length, detectable label and both length and detectable label if a strain comprising the nucleotide sequences complementary to said primer pair is present in said culture or collection of strains; and

[0909] identifying the amplification products obtained in said amplification reaction, wherein said culture comprises a strain in which a gene product encoded by a nucleic acid comprising a nucleotide sequence selected from the group consisting of a nucleic acid comprising a nucleic acid having at least 70% nucleotide sequence identity as determined using BLASTN version 2.0 with the default parameters to a nucleotide sequence selected from the group consisting of SEQ ID NOS.: 6214-42397, a nucleic acid comprising a nucleotide sequence which hybridizes to a sequence selected from the group consisting of SEQ ID NOS.: 6214-42397 under stringent conditions, and a nucleic acid comprising a nucleotide sequence which hybridizes to a nucleotide sequence selected from the group consisting of SEQ ID NOS.: 6214-42397 under moderate conditions is overexpressed or underexpressed.

[0910] 524. A method for determining the extent to which each of a plurality of strains are present in a culture or collection of strains comprising:

[0911] obtaining a nucleic acid sample comprising nucleic acids from a culture or collection of strains wherein said culture or collection of strains comprises a plurality of strains which overexpress or underexpress a different gene product which is required for proliferation of said organism;

[0912] performing an amplification reaction using primer pairs which are complementary to nucleotide sequences within or adjacent to the genes which encode said gene products, wherein said primer pairs are designed such that each primer pair would yield an amplification product which is distinguishable from the amplification products produced by the other primer pairs on the a basis selected from the group consisting of length, detectable label and both length and detectable label if a strain comprising the nucleotide sequences complementary to said primer pair is present in said culture or collection of strains; and

[0913] identifying the amplification products obtained in said amplification reaction, wherein said culture comprises a strain in which a gene product comprising a polypeptide selected from the group consisting of a polypeptide having at least 25% amino acid identity as determined using FASTA version 3.0t78 to a polypeptide selected from the group consisting of SEQ ID NOs.: 42938-78581 and a polypeptide whose activity may be complemented by a polypeptide selected from the group consisting of SEQ ID NOs: 42938-78581 is overexpressed or underexpressed.

[0914] 525. The method of Paragraph 519, 520, 521, 522, 523 or 524, wherein said primer pairs are divided into at least two sets, each primer pair comprises a primer which is labeled with a distinguishable dye, and the distinguishable dye used to label each set of primer pairs is distinguishable from the dye used to label the other sets of primer pairs.

[0915] 526. The method of Paragraph 519, 520, 521, 522, 523 or 524, wherein:

[0916] said nucleic acid sample is divided into N aliquots; and

[0917] said amplification reaction is performed on each aliquot using primer pairs complementary to nucleotide sequences within or adjacent to 1/N of the genes which encode said gene products, wherein one of the members of each primer pair in each aliquot is labeled with a dye and wherein the dyes on the primers in each aliquot are distinguishable from one another.

[0918] 527. The method of Paragraph 526, further comprising pooling the amplification products from each of the aliquots prior to determining the lengths of the amplification products.

[0919] 528. The method of Paragraph 519, 520, 521, 522, 523 or 524, wherein the native promoters of said genes which encode said gene products have been replaced with a regulatable promoter and one of the primers in said primer pairs is complementary to a nucleotide sequence within said regulatable promoter.

[0920] 529. The method of Paragraph 528, wherein the native promoters for each of said genes were replaced with the same regulatable promoter.

[0921] 530. The method of Paragraph 528, wherein more than one regulatable promoter was used to replace the promoters of said genes such that some of said genes are under the control of a different regulatable promoter.

[0922] 531. A purified or isolated nucleic acid sequence comprising a nucleotide sequence consisting essentially of one of SEQ ID NOs: 1-6213, wherein expression of said nucleic acid inhibits proliferation of a cell.

[0923] 532. A purified or isolated nucleic acid comprising a fragment of one of SEQ ID NOs.: 1-6213, said fragment selected from the group consisting of fragments comprising at least 10, at least 20, at least 25, at least 30, at least 50 and more than 50 consecutive nucleotides of one of SEQ ID NOs: 1-6213.

[0924] 533. A vector comprising a promoter operably linked to the nucleic acid of Paragraph 531.

[0925] 534. A host cell containing the vector of Paragraph 533.

[0926] 535. A method for screening a candidate compound for the ability to reduce cellular proliferation, said method comprising the steps of:

[0927] (a) providing a sublethal level of an antisense nucleic acid complementary to at least a portion of a nucleic acid encoding a gene product in a cell to reduce the activity or amount of said gene product in said cell, thereby producing a sensitized cell, wherein said gene product is a gene product whose activity or amount is reduced by an antisense nucleic acid comprising a nucleotide sequence selected from the group consisting of SEQ ID NOs.: 1-6213;

[0928] (b) contacting said sensitized cell with a compound; and

[0929] (c) determining the degree to which said compound inhibits proliferation of said sensitized cell relative to a nonsensitized cell.

[0930] 536. The method of Paragraph 535, wherein said determining step comprises determining whether said compound inhibits the growth of said sensitized cell to a greater extent than said compound inhibits the growth of said nonsensitized cell.

[0931] 537. The method of Paragraph 535, wherein said gene product is from an organism other than E. coli.

[0932] 538. The method of Paragraph 535, wherein said cell is not an E. coli cell.

[0933] 539. The method of Paragraph 535, wherein said cell is selected from the group consisting of bacterial cells, fungal cells, plant cells, and animal cells.

[0934] 540. The method of Paragraph 535, wherein said cell is an organism selected from the group consisting of Acinetobacter baumannii, Anaplasma marginale, Aspergillus fumigatus, Bacillus anthracis, Bacteroides fragilis, Bordetella pertussis, Borrelia burgdorferi, Burkholderia cepacia, Burkholderia fungorum, Burkholderia mallei, Campylobacter jejuni, Candida albicans, Candida glabrata (also called Torulopsis glabrata), Candida tropicalis, Candida parapsilosis, Candida guilliermondii, Candida krusei, Candida kefyr (also called Candida pseudotropicalis), Candida dubliniensis, Chlamydia pneumoniae, Chlamydia trachomatis, Clostridium acetobutylicum, Clostridium botulinum, Clostridium difficile, Clostridium perfringens, Coccidioides immitis, Corynebacterium diptheriae, Cryptococcus neoformans, Enterobacter cloacae, Enterococcus faecalis, Enterococcus faecium, Escherichia coli, Haemophilus influenzae, Helicobacter pylori, Histoplasma capsulatum, Klebsiella pneumoniae, Legionella pneumophila, Listeria monocytogenes, Moraxella catarrhalis, Mycobacterium avium, Mycobacterium bovis, Mycobacterium leprae, Mycobacterium tuberculosis, Mycoplasma genitalium, Mycoplasma pneumoniae, Neisseria gonorrhoeae, Neisseria meningitidis, Nocardia asteroides, Pasteurella haemolytica, Pasteurella multocida, Pneumocystis carinii, Proteus mirabilis, Proteus vulgaris, Pseudomonas aeruginosa, Pseudomonas putida, Pseudomonas syringae, Salmonella bongori, Salmonella cholerasuis, Salmonella enterica, Salmonella paratyphi, Salmonella typhi, Salmonella typhimurium, Shigella boydii, Shigella dysenteriae, Shigella flexneri, Shigella sonnei, Staphylococcus aureus, Staphylococcus epidermidis, Staphylococcus haemolyticus, Streptococcus pneumoniae, Streptococcus mutans, Streptococcus pyogenes, Treponema pallidum, Ureaplasma urealyticum, Vibrio cholerae, Vibrio parahaemolyticus, Vibrio vulnificans, Yersinia enterocolitica, Yersinia pestis and any species falling within the genera of any of the above species.

[0935] 541. The method of Paragraph 535, wherein said cell is a Gram positive bacterium.

[0936] 542. The method of Paragraph 541, wherein said Gram positive bacterium is selected from the group consisting of Staphylococcus species, Streptococcus species, Enterococcus species, Mycobacterium species, Clostridium species, and Bacillus species.

[0937] 543. The method of Paragraph 541, wherein said Gram positive bacterium is a Staphylococcus species.

[0938] 544. The method of Paragraph 543, wherein said Staphylococcus species is coagulase negative.

[0939] 545. The method of Paragraph 543, wherein said Staphylococcus species is Staphylococcus aureus.

[0940] 546. The method of Paragraph 545, wherein said Staphylococcus aureus is selected from the group consisting of Staphylococcus aureus RN450 and Staphylococcus aureus RN4220.

[0941] 547. The method of Paragraph 535, wherein said antisense nucleic acid is transcribed from an inducible promoter.

[0942] 548. The method of Paragraph 535, further comprising the step of contacting said cell with a concentration of inducer which induces transcription of said antisense nucleic acid to a sublethal level.

[0943] 549. The method of Paragraph 535, wherein growth inhibition is measured by monitoring optical density of a liquid culture.

[0944] 550. The method of Paragraph 535, wherein said antisense nucleic acid comprises a nucleotide sequence selected from the group consisting of SEQ ID NOs.: 1-6213 or a proliferation-inhibiting portion thereof.

[0945] 551. The method of Paragraph 550, wherein said proliferation inhibiting portion of one of SEQ ID NOs.: 1-6213 is a fragment comprising at least 10, at least 20, at least 25, at least 30, at least 50 or more than 51 consecutive nucleotides of one of SEQ ID NOs.: 1-6213.

[0946] 552. The method of Paragraph 535, wherein said gene product is an RNA.

[0947] 553. The method of Paragraph 535, wherein nucleic acid encoding said gene product comprises a nucleotide sequence selected from the group consisting of SEQ ID NOS.: 6214-42397.

[0948] 554. The method of Paragraph 535, wherein said gene product is a polypeptide.

[0949] 555. The method of Paragraph 554, wherein said polypeptide comprises an amino acid sequence selected from the group consisting of SEQ ID NOs.: 42398-78581.

[0950] 556. A compound identified using the method of Paragraph 535.

[0951] 557. A method for inhibiting cellular proliferation comprising introducing an effective amount of a compound with activity against a gene whose activity or expression is inhibited by an antisense nucleic acid comprising a nucleotide sequence selected from the group consisting of SEQ ID NOs.: 1-6213 or a compound with activity against the product of said gene into a population of cells expressing said gene.

[0952] 558. A method for inhibiting the activity or expression of a gene in an operon required for proliferation wherein the activity or expression of at least one gene in said operon is inhibited by an antisense nucleic acid comprising a sequence selected from the group consisting of SEQ ID NOs.: 1-6213, said method comprising contacting a cell in a cell population with an antisense nucleic acid complementary to at least a portion of said operon.

[0953] 559. The method of Paragraph 558, wherein said antisense nucleic acid comprises a nucleotide sequence selected from the group consisting of SEQ ID NOs.: 1-6213 or a proliferation-inhibiting portion thereof.

[0954] 560. The method of Paragraph 559, wherein said proliferation inhibiting portion of one of SEQ ID NOs.: 1-6213 is a fragment comprising at least 10, at least 20, at least 25, at least 30, at least 50 or more than 51 consecutive nucleotides of one of SEQ ID NOs.: 1-6213.

[0955] 561. The method of Paragraph 558, wherein said gene comprises a nucleotide sequence selected from the group consisting of SEQ ID NOS.: 6214-42397.

[0956] 562. The method of Paragraph 558, wherein said gene encodes a polypeptide comprising a nucleotide sequence selected from the group consisting of SEQ ID NOS.: 42398-78581.

[0957] 563. A method of screening a candidate compound for the ability to inhibit cellular proliferation, said method comprising:

[0958] (a) contacting a cell with a sublethal level of a nucleic acid comprising a nucleotide sequence selected from the group consisting of SEQ ID NOs. 1-6213 or a portion thereof which inhibits the proliferation of the cell from which said nucleic acid was obtained, thus sensitizing said cell;

[0959] (b) contacting the sensitized cell with a compound; and

[0960] (c) determining the degree to which said compound inhibits proliferation of said sensitized cell relative to a nonsensitized cell.

[0961] 564. A method for screening a candidate compound for activity against a biological pathway required for proliferation, said method comprising:

[0962] (a) sensitizing a cell by providing a sublethal level of an antisense nucleic acid complementary to at least a portion of a nucleic acid encoding a gene product required for proliferation, wherein the activity or expression of said gene product is inhibited by an antisense nucleic acid comprising a nucleotide sequence selected from the group consisting of SEQ ID NOs.: 1-6213, in said cell to reduce the activity or amount of said gene product;

[0963] (b) contacting the sensitized cell with a compound; and

[0964] (c) determining the degree to which said compound inhibits the growth of said sensitized cell relative to a nonsensitized cell.

[0965] 565. The method of Paragraph 564, wherein said antisense nucleic acid comprises a nucleotide sequence selected from the group consisting of SEQ ID NOs.: 1-6213 or a proliferation-inhibiting portion thereof.

[0966] 566. The method of Paragraph 565, wherein said proliferation inhibiting portion of one of SEQ ID NOs.: 1-6213 is a fragment comprising at least 10, at least 20, at least 25, at least 30, at least 50 or more than 51 consecutive nucleotides of one of SEQ ID NOs.: 1-6213.

[0967] 567. The method of Paragraph 564, wherein nucleic acid encoding said gene product comprises a nucleotide sequence selected from the group consisting of SEQ ID NOS.: 6214-42397.

[0968] 568. The method of Paragraph 564, wherein said gene product is a polypeptide.

[0969] 569. The method of Paragraph 568, wherein said polypeptide comprises an amino acid sequence selected from the group consisting of SEQ ID NOs.: 42398-78581.

[0970] 570. A method for screening a candidate compound for the ability to inhibit cellular proliferation, said method comprising:

[0971] (a) contacting a cell with an agent which reduces the activity or level of a gene product required for proliferation of said cell, wherein said gene product is a gene product whose activity or expression is inhibited by an antisense nucleic acid comprising a nucleotide sequence selected from the group consisting of SEQ ID NOs.: 1-6213;

[0972] (b) contacting said cell with a compound; and

[0973] (c) determining whether said compound reduces proliferation of said contacted cell by acting on said gene product.

[0974] 571. The method of Paragraph 570, wherein said agent which reduces the activity or level of a gene product required for proliferation of said cell comprises an antisense nucleic acid to a gene or operon required for proliferation.

[0975] 572. A method for screening a candidate compound for the ability to reduce cellular proliferation comprising:

[0976] (a) providing a sublethal level of an antisense nucleic acid complementary to at least a portion of a nucleic acid encoding a gene product in a cell to reduce the activity or amount of said gene product in said cell, thereby producing a sensitized cell, wherein said gene product is selected from the group consisting of a gene product having having at least 70% nucleic acid identity as determined using BLASTN version 2.0 with the default parameters to a gene product whose expression is inhibited by an antisense nucleic acid comprising a nucleotide sequence selected from the group consisting of SEQ ID NOs.: 1-6213, a gene product encoded by a nucleic acid having at least 70% nucleotide sequence identity as determined using BLASTN version 2.0 with the default parameters to a nucleic acid encoding a gene product whose expression is inhibited by an antisense nucleic acid comprising a nucleotide sequence selected from the group consisting of SEQ ID NOs: 1-6213, a gene product having at least 25% amino acid identity as determined using FASTA version 3.0t78 with the default parameters to a gene product whose expression is inhibited by an antisense nucleic acid comprising a nucleotide sequence selected from the group consisting of SEQ ID NOs.: 1-6213, a gene product encoded by a nucleic acid comprising a nucleotide sequence which hybridizes to a nucleic acid selected from the group consisting of SEQ ID NOs.: 1-6213 under stringent conditions, a gene product encoded by a nucleic acid comprising a nucleotide sequence which hybridizes to a nucleic acid comprising a nucleotide sequence selected from the group consisting of SEQ ID NOs.: 1-6213 under moderate conditions, and a gene product whose activity may be complemented by the gene product whose activity is inhibited by a nucleic acid selected from the group consisting of SEQ ID NOs: 1-6213;

[0977] (b) contacting said sensitized cell with a compound; and

[0978] (c) determining the degree to which said compound inhibits the growth of said sensitized cell relative to a nonsensitized cell.

[0979] 573. The method of Paragraph 572, wherein said determining step comprises determining whether said compound inhibits the growth of said sensitized cell to a greater extent than said compound inhibits the growth of said nonsensitized cell.

[0980] 574. The method of Paragraph 572, wherein said gene product is from an organism other than E. coli.

[0981] 575. The method of Paragraph 572, wherein said cell is not an E. coli cell.

[0982] 576. The method of Paragraph 572, wherein said cell is selected from the group consisting of bacterial cells, fungal cells, plant cells, and animal cells.

[0983] 577. The method of Paragraph 572, wherein said cell is an organism selected from the group consisting of Acinetobacter baumannii, Anaplasma marginale, Aspergillus fumigatus, Bacillus anthracis, Bacteroides fragilis, Bordetella pertussis, Borrelia burgdorferi, Burkholderia cepacia, Burkholderia fungorum, Burkholderia mallei, Campylobacter jejuni, Candida albicans, Candida glabrata (also called Torulopsis glabrata), Candida tropicalis, Candida parapsilosis, Candida guilliermondii, Candida krusei, Candida kefyr (also called Candida pseudotropicalis), Candida dubliniensis, Chlamydia pneumoniae, Chlamydia trachomatis, Clostridium acetobutylicum, Clostridium botulinum, Clostridium difficile, Clostridium perfringens, Coccidioides immitis, Corynebacterium diptheriae, Cryptococcus neoformans, Enterobacter cloacae, Enterococcus faecalis, Enterococcus faecium, Escherichia coli, Haemophilus influenzae, Helicobacter pylori, Histoplasma capsulatum, Klebsiella pneumoniae, Legionella pneumophila, Listeria monocytogenes, Moraxella catarrhalis, Mycobacterium avium, Mycobacterium bovis, Mycobacterium leprae, Mycobacterium tuberculosis, Mycoplasma genitalium, Mycoplasma pneumoniae, Neisseria gonorrhoeae, Neisseria meningitidis, Nocardia asteroides, Pasteurella haemolytica, Pasteurella multocida, Pneumocystis carinii, Proteus mirabilis, Proteus vulgaris, Pseudomonas aeruginosa, Pseudomonas putida, Pseudomonas syringae, Salmonella bongori, Salmonella cholerasuis, Salmonella enterica, Salmonella paratyphi, Salmonella typhi, Salmonella typhimurium, Shigella boydii, Shigella dysenteriae, Shigella flexneri, Shigella sonnei, Staphylococcus aureus, Staphylococcus epidermidis, Staphylococcus haemolyticus, Streptococcus pneumoniae, Streptococcus mutans, Streptococcus pyogenes, Treponema pallidum, Ureaplasma urealyticum, Vibrio cholerae, Vibrio parahaemolyticus, Vibrio vulnificans, Yersinia enterocolitica, Yersinia pestis and any species falling within the genera of any of the above species.

[0984] 578. The method of Paragraph 572, wherein said cell is a Gram positive bacterium.

[0985] 579. The method of Paragraph 578, wherein said Gram positive bacterium is selected from the group consisting of Staphylococcus species, Streptococcus species, Enterococcus species, Mycobacterium species, Clostridium species, and Bacillus species.

[0986] 580. The method of Paragraph 578, wherein said Gram positive bacterium is a Staphylococcus species.

[0987] 581. The method of Paragraph 580, wherein said Staphylococcus species is coagulase negative.

[0988] 582. The method of Paragraph 580, wherein said Staphylococcus species is Staphylococcus aureus.

[0989] 583. The method of Paragraph 582, wherein said Staphylococcus aureus is selected from the group consisting of Staphylococcus aureus RN450 and Staphylococcus aureus RN4220.

[0990] 584. The method of Paragraph 572, wherein said antisense nucleic acid is transcribed from an inducible promoter.

[0991] 585. The method of Paragraph 572, further comprising the step of contacting said cell with a concentration of inducer which induces transcription of said antisense nucleic acid to a sublethal level.

[0992] 586. The method of Paragraph 572, wherein growth inhibition is measured by monitoring optical density of a liquid culture.

[0993] 587. The method of Paragraph 572, wherein said gene product is a polypeptide.

[0994] 588. The method of Paragraph 587, wherein said polypeptide comprises an amino acid sequence selected from the group consisting of SEQ ID NOs.: 42398-78581.

[0995] 589. The method of Paragraph 587, wherein said polypeptide comprises a polypeptide selected from the group consisting of a polypeptide having at least 99% amino acid identity as determined using FASTA version 3.0t78 to a polypeptide selected from the group consisting of SEQ ID NOs.: 42398-78581 and a polypeptide whose activity may be complemented by a polypeptide selected from the group consisting of SEQ ID NOs: 42398-78581.

[0996] 590. The method of Paragraph 587, wherein said polypeptide comprises a polypeptide selected from the group consisting of a polypeptide having at least 95% amino acid identity as determined using FASTA version 3.0t78 to a polypeptide selected from the group consisting of SEQ ID NOs.: 42398-78581 and a polypeptide whose activity may be complemented by a polypeptide selected from the group consisting of SEQ ID NOs: 42398-78581.

[0997] 591. The method of Paragraph 587, wherein said polypeptide comprises a polypeptide selected from the group consisting of a polypeptide having at least 90% amino acid identity as determined using FASTA version 3.0t78 to a polypeptide selected from the group consisting of SEQ ID NOs.: 42398-78581 and a polypeptide whose activity may be complemented by a polypeptide selected from the group consisting of SEQ ID NOs: 42398-78581.

[0998] 592. The method of Paragraph 587, wherein said polypeptide comprises a polypeptide selected from the group consisting of a polypeptide having at least 85% amino acid identity as determined using FASTA version 3.0t78 to a polypeptide selected from the group consisting of SEQ ID NOs.: 42398-78581 and a polypeptide whose activity may be complemented by a polypeptide selected from the group consisting of SEQ ID NOs: 42398-78581.

[0999] 593. The method of Paragraph 587, wherein said polypeptide comprises a polypeptide selected from the group consisting of a polypeptide having at least at least 80% amino acid identity as determined using FASTA version 3.0t78 to a polypeptide selected from the group consisting of SEQ ID NOs.: 42398-78581 and a polypeptide whose activity may be complemented by a polypeptide selected from the group consisting of SEQ ID NOs: 42398-78581.

[1000] 594. The method of Paragraph 587, wherein said polypeptide comprises a polypeptide selected from the group consisting of a polypeptide having at least 70% amino acid identity as determined using FASTA version 3.0t78 to a polypeptide selected from the group consisting of SEQ ID NOs.: 42398-78581 and a polypeptide whose activity may be complemented by a polypeptide selected from the group consisting of SEQ ID NOs: 42398-78581.

[1001] 595. The method of Paragraph 587, wherein said polypeptide comprises a polypeptide selected from the group consisting of a polypeptide having at least 60% amino acid identity as determined using FASTA version 3.0t78 to a polypeptide selected from the group consisting of SEQ ID NOs.: 42398-78581 and a polypeptide whose activity may be complemented by a polypeptide selected from the group consisting of SEQ ID NOs: 42398-78581.

[1002] 596. The method of Paragraph 587, wherein said polypeptide comprises a polypeptide selected from the group consisting of a polypeptide having at least 50% amino acid identity as determined using FASTA version 3.0t78 to a polypeptide selected from the group consisting of SEQ ID NOs.: 42398-78581 and a polypeptide whose activity may be complemented by a polypeptide selected from the group consisting of SEQ ID NOs: 42398-78581.

[1003] 597. The method of Paragraph 587, wherein said polypeptide comprises a polypeptide selected from the group consisting of a polypeptide having at least 40% amino acid identity as determined using FASTA version 3.0t78 to a polypeptide selected from the group consisting of SEQ ID NOs.: 42398-78581 and a polypeptide whose activity may be complemented by a polypeptide selected from the group consisting of SEQ ID NOs: 42398-78581.

[1004] 598. The method of Paragraph 587, wherein said polypeptide comprises a polypeptide selected from the group consisting of a polypeptide having at least 25% amino acid identity as determined using FASTA version 3.0t78 to a polypeptide selected from the group consisting of SEQ ID NOs.: 42398-78581 and a polypeptide whose activity may be complemented by a polypeptide selected from the group consisting of SEQ ID NOs: 42398-78581.

[1005] 599. The method of Paragraph 572, wherein said gene product is an RNA.

[1006] 600. The method of Paragraph 572, wherein nucleic acid encoding said gene product comprises a nucleotide sequence selected from the group consisting of SEQ ID NOS.: 6214-42397.

[1007] 601. The method of Paragraph 572, wherein said nucleic acid encoding said gene product comprises a nucleic acid selected from the group consisting of a nucleic acid comprising a nucleic acid having at least 97% nucleic acid identity as determined using BLASTN version 2.0 with the default parameters to a sequence selected from the group consisting of SEQ ID NOS.: 6214-42397, a nucleic acid which hybridizes to a sequence selected from the group consisting of SEQ ID NOS.: 6214-42397 under stringent conditions, and a nucleic acid which hybridizes to a sequence selected from the group consisting of SEQ ID NOS.: 6214-42397 under moderate conditions.

[1008] 602. The method of Paragraph 572, wherein said nucleic acid encoding said gene product comprises a nucleic acid selected from the group consisting of a nucleic acid comprising a nucleic acid having at least 95% nucleic acid identity as detenmined using BLASTN version 2.0 with the default parameters to a sequence selected from the group consisting of SEQ ID NOS.: 6214-42397, a nucleic acid which hybridizes to a sequence selected from the group consisting of SEQ ID NOS.: 6214-42397 under stringent conditions, and a nucleic acid which hybridizes to a sequence selected from the group consisting of SEQ ID NOS.: 6214-42397 under moderate conditions.

[1009] 603. The method of Paragraph 572, wherein said nucleic acid encoding said gene product comprises a nucleic acid selected from the group consisting of a nucleic acid comprising a nucleic acid having at least 90% nucleic acid identity as determined using BLASTN version 2.0 with the default parameters to a sequence selected from the group consisting of SEQ ID NOS.: 6214-42397, a nucleic acid which hybridizes to a sequence selected from the group consisting of SEQ ID NOS.: 6214-42397 under stringent conditions, and a nucleic acid which hybridizes to a sequence selected from the group consisting of SEQ ID NOS.: 6214-42397 under moderate conditions.

[1010] 604. The method of Paragraph 572, wherein said nucleic acid encoding said gene product comprises a nucleic acid selected from the group consisting of a nucleic acid comprising a nucleic acid having at least 85% nucleic acid identity as determined using BLASTN version 2.0 with the default parameters to a sequence selected from the group consisting of SEQ ID NOS.: 6214-42397, a nucleic acid which hybridizes to a sequence selected from the group consisting of SEQ ID NOS.: 6214-42397 under stringent conditions, and a nucleic acid which hybridizes to a sequence selected from the group consisting of SEQ ID NOS.: 6214-42397 under moderate conditions.

[1011] 605. The method of Paragraph 572, wherein said nucleic acid encoding said gene product comprises a nucleic acid selected from the group consisting of a nucleic acid comprising a nucleic acid having at least 80% nucleic acid identity as determined using BLASTN version 2.0 with the default parameters to a sequence selected from the group consisting of SEQ ID NOS.: 6214-42397, a nucleic acid which hybridizes to a sequence selected from the group consisting of SEQ ID NOS.: 6214-42397 under stringent conditions, and a nucleic acid which hybridizes to a sequence selected from the group consisting of SEQ ID NOS.: 6214-42397 under moderate conditions.

[1012] 606. The method of Paragraph 572, wherein said nucleic acid encoding said gene product comprises a nucleic acid selected from the group consisting of a nucleic acid comprising a nucleic acid having at least 70% nucleic acid identity as determined using BLASTN version 2.0 with the default parameters to a sequence selected from the group consisting of SEQ ID NOS.: 6214-42397, a nucleic acid which hybridizes to a sequence selected from the group consisting of SEQ ID NOS.: 6214-42397 under stringent conditions, and a nucleic acid which hybridizes to a sequence selected from the group consisting of SEQ ID NOS.: 6214-42397 under moderate conditions.

[1013] 607. The method of Paragraph 572, wherein said antisense nucleic acid comprises a nucleic acid having at least 97% nucleotide sequence identity to a nucleotide sequence selected from the group consisting of one of the sequences of SEQ ID NOS. 1-6213.

[1014] 608. The method of Paragraph 572, wherein said antisense nucleic acid comprises a nucleic acid having at least 95% nucleotide sequence identity to a nucleotide sequence selected from the group consisting of one of the sequences of SEQ ID NOS. 1-6213.

[1015] 609. The method of Paragraph 572, wherein said antisense nucleic acid comprises a nucleic acid having at least 90% nucleotide sequence identity to a nucleotide sequence selected from the group consisting of one of the sequences of SEQ ID NOS. 1-6213.

[1016] 610. The method of Paragraph 572, wherein said antisense nucleic acid comprises a nucleic acid having at least 85% nucleotide sequence identity to a nucleotide sequence selected from the group consisting of one of the sequences of SEQ ID NOS. 1-6213.

[1017] 611. The method of Paragraph 572, wherein said antisense nucleic acid comprises a nucleic acid having at least 80% nucleotide sequence identity to a nucleotide sequence selected from the group consisting of one of the sequences of SEQ ID NOS. 1-6213.

[1018] 612. The method of Paragraph 572, wherein said antisense nucleic acid comprises a nucleic acid having at least 70% nucleotide sequence identity to a nucleotide sequence selected from the group consisting of one of the sequences of SEQ ID NOS. 1-6213.

[1019] 613. The method of Paragraph 572, wherein said antisense nucleic acid comprises a nucleic acid having at least 70% nucleotide sequence identity to a nucleotide sequence comprising at least 100 consecutive nucleotides of a nucleotide sequence selected from the group consisting of SEQ ID NOs: 1-6213.

[1020] 614. A compound identified using the method of Paragraph 572.

[1021] 615. A method for inhibiting cellular proliferation comprising introducing an effective amount of a compound with activity against a gene product or an effective amount of a compound with activity against a gene encoding said gene product into a population of cells expressing said gene product, wherein said gene product is selected from the group consisting of a gene product having at least 70% nucleotide sequence identity as determined using BLASTN version 2.0 with the default parameters to a gene product whose expression is inhibited by an antisense nucleic acid comprising a nucleotide sequence selected from the group consisting of SEQ ID NOs.: 1-6213, a gene product encoded by a nucleic acid having at least 70% nucleotide sequence identity as determined using BLASTN version 2.0 with the default parameters to a nucleic acid encoding a gene product whose expression is inhibited by an antisense nucleic acid comprising a nucleotide sequence selected from the group consisting of SEQ ID NOs: 1-6213, a gene product having at least 25% amino acid identity as determined using FASTA version 3.0t78 with the default parameters to a gene product whose expression is inhibited by an antisense nucleic acid comprising a nucleotide sequence selected from the group consisting of SEQ ID NOs.: 1-6213, a gene product encoded by a nucleic acid comprising a nucleotide sequence which hybridizes to a nucleic acid selected from the group consisting of SEQ ID NOs.: 1-6213 under stringent conditions, a gene product encoded by a nucleic acid comprising a nucleotide sequence which hybridizes to a nucleic acid selected from the group consisting of SEQ ID NOs.: 1-6213 under moderate conditions, and a gene product whose activity may be complemented by the gene product whose activity is inhibited by a nucleic acid selected from the group consisting of SEQ ID NOs: 1-6213.

[1022] 616. A method for inhibiting the activity or expression of a gene in an operon which encodes a gene product required for proliferation comprising contacting a cell in a cell population with an antisense nucleic acid comprising at least a proliferation-inhibiting portion of said operon in an antisense orientation, wherein said gene product is selected from the group consisting of a gene product having at least 70% nucleotide sequence identity as determined using BLASTN version 2.0 with the default parameters to a gene product whose expression is inhibited by an antisense nucleic acid comprising a nucleotide sequence selected from the group consisting of SEQ ID NOs.: 1-6213, a gene product encoded by a nucleic acid having at least 70% nucleotide sequence identity as determined using BLASTN version 2.0 with the default parameters to a nucleic acid encoding a gene product whose expression is inhibited by an antisense nucleic acid comprising a nucleotide sequence selected from the group consisting of SEQ ID NOs: 1-6213, a gene product having at least 25% amino acid identity as determined using FASTA version 3.0t78 with the default parameters to a gene product whose expression is inhibited by an antisense nucleic acid comprising a nucleotide sequence selected from the group consisting of SEQ ID NOs.: 1-6213, a gene product encoded by a nucleic acid comprising a nucleotide sequence which hybridizes to a nucleic acid selected from the group consisting of SEQ ID NOs.: 1-6213 under stringent conditions, a gene product encoded by a nucleic acid comprising a nucleotide sequence which hybridizes to a nucleic acid selected from the group consisting of SEQ ID NOs.: 1-6213 under moderate conditions, and a gene product whose activity may be complemented by the gene product whose activity is inhibited by a nucleic acid selected from the group consisting of SEQ ID NOs: 1-6213.

[1023] 617. The method of Paragraph 616, wherein said antisense nucleic acid comprises a nucleotide sequence having at least 70% nucleotide sequence identity as determined using BLASTN version 2.0 with the default parameters to a nucleotide seqence selected from the group consisting of SEQ ID NOs.: 1-6213, a proliferation inhibiting portion thereof, a nucleic acid comprising a nucleotide sequence which hybridizes to a nucleic acid selected from the group consisting of SEQ ID NOs.: 1-6213 under stringent conditions, and a nucleic acid which comprising a nucleotide sequence which hybridizes to a nucleic acid selected from the group consisting of SEQ ID NOs.: 1-6213 under moderate conditions.

[1024] 618. The method of Paragraph 616, wherein said antisense nucleic acid has at least 70% nucleotide sequence identity as determined using BLASTN version 2.0 with the default parameters to a nucleotide sequence comprising at least 10, at least 20, at least 25, at least 30, at least 50 or more than 50 consecutive nucleotides of one of SEQ ID NOs.: 1-6213.

[1025] 619. The method of Paragraph 616, wherein said gene comprises a nucleic acid selected from the group consisting of a nucleic acid comprising a nucleic acid having at least 70% nucleotide sequence identity as determined using BLASTN version 2.0 with the default parameters to a nucleotide sequence selected from the group consisting of SEQ ID NOS.: 6214-42397, a nucleic acid comprising a nucleotide sequence which hybridizes to a sequence selected from the group consisting of SEQ ID NOS.: 6214-42397 under stringent conditions, and a nucleic acid comprising a nucleotide sequence which hybridizes to a nucleotide sequence selected from the group consisting of SEQ ID NOS.: 6214-42397 under moderate condtions.

[1026] 620. The method of Paragraph 616, wherein said gene encodes a polypeptide comprising a polypeptide selected from the group consisting of a polypeptide having at least 25% amino acid identity as determined using FASTA version 3.0t78 to a polypeptide selected from the group consisting of SEQ ID NOs.: 42398-78581 and a polypeptide whose activity may be complemented by a polypeptide selected from the group consisting of SEQ ID NOs: 42398-78581.

[1027] 621. A method of screening a candidate compound for the ability to inhibit proliferation comprising:

[1028] (a) sensitizing a cell by contacting said cell with a sublethal level of an antisense nucleic acid, wherein said antisense nucleic acid is selected from the group consisting of a nucleic acid having at least 70% nucleotide sequence identity as determined using BLASTN version 2.0 with the default parameters to a nucleotide sequence selected from the group consisting of SEQ ID NOs. 1-6213 or a portion thereof which inhibits the proliferation of the cell from which said nucleic acid was obtained, a nucleic acid comprising a nucleotide sequence which hybridizes to a nucleic acid selected from the group consisting of SEQ ID NOs.: 1-6213 under stringent conditions, and a nucleic acid comprising a nucleotide sequence which hybridizes to a nucleic acid selected from the group consisting of SEQ ID NOs.: 1-6213 under moderate conditions;

[1029] (b) contacting the sensitized cell with a compound; and

[1030] (c) determining the degree to which said compound inhibits proliferation of said sensitized test cell relative to a nonsensitized cell.

[1031] 622. A method for screening a compound for activity against a biological pathway required for proliferation comprising:

[1032] (a) sensitizing a cell by providing a sublethal level of an antisense nucleic acid complementary to at least a portion of a nucleic acid encoding a gene product required for proliferation, wherein said gene product is selected from the group consisting of a gene product having at least 70% nucleotide sequence identity as determined using BLASTN version 2.0 with the default parameters to a gene product whose expression is inhibited by an antisense nucleic acid comprising a nucleotide sequence selected from the group consisting of SEQ ID NOs.: 1-6213, a gene product encoded by a nucleic acid having at least 70% nucleotide sequence identity as determined using BLASTN version 2.0 with the default parameters to a nucleic acid encoding a gene product whose expression is inhibited by an antisense nucleic acid comprising a nucleotide sequence selected from the group consisting of SEQ ID NOs: 1-6213, a gene product having at least 25% amino acid identity as determined using FASTA version 3.0t78 with the default parameters to a gene product whose expression is inhibited by an antisense nucleic acid comprising a nucleotide sequence selected from the group consisting of SEQ ID NOs.: 1-6213, a gene product encoded by a nucleic acid comprising a nucleotide sequence which hybridizes to a nucleic acid selected from the group consisting of SEQ ID NOs.: 1-6213 under stringent conditions, a gene product encoded by a nucleic acid comprising a nucleotide sequence which hybridizes to a nucleic acid selected from the group consisting of SEQ ID NOs.: 1-6213 under moderate conditions, and a gene product whose activity may be complemented by the gene product whose activity is inhibited by a nucleic acid selected from the group consisting of SEQ ID NOs: 1-6213;

[1033] (b) contacting the sensitized cell with a compound; and

[1034] (c) determining the extent to which said compound inhibits the growth of said sensitized cell relative to a nonsensitized cell.

[1035] 623. The method of Paragraph 622, wherein said antisense nucleic acid comprises a nucleotide sequence having at least 70% nucleotide sequence identity as determined using BLASTN version 2.0 with the default parameters to a nucleotide seqence selected from the group consisting of SEQ ID NOs.: 1-6213, a proliferation inhibiting portion thereof, a nucleic acid comprising a nucleotide sequence which hybridizes to a nucleic acid selected from the group consisting of SEQ ID NOs.: 1-6213 under stringent conditions, and a nucleic acid which comprising a nucleotide sequence which hybridizes to a nucleic acid selected from the group consisting of SEQ ID NOs.: 1-6213 under moderate conditions.

[1036] 624. The method of Paragraph 622, wherein said antisense nucleic acid has at least 70% nucleotide sequence identity as determined using BLASTN version 2.0 with the default parameters to a nucleotide sequence comprising at least 10, at least 20, at least 25, at least 30, at least 50 or more than 50 consecutive nucleotides of one of SEQ ID NOs.: 1-6213.

[1037] 625. The method of Paragraph 622, wherein said nucleic acid encoding said gene product comprises a nucleic acid selected from the group consisting of a nucleic acid comprising a nucleic acid having at least 70% nucleotide sequence identity as determined using BLASTN version 2.0 with the default parameters to a nucleotide sequence selected from the group consisting of SEQ ID NOS.: 6214-42397, a nucleic acid comprising a nucleotide sequence which hybridizes to a sequence selected from the group consisting of SEQ ID NOS.: 6214-42397 under stringent conditions, and a nucleic acid comprising a nucleotide sequence which hybridizes to a nucleotide sequence selected from the group consisting of SEQ ID NOS.: 6214-42397 under moderate condtions.

[1038] 626. The method of Paragraph 622, wherein said gene product comprises a polypeptide selected from the group consisting of a polypeptide having at least 25% amino acid identity as determined using FASTA version 3.0t78 to a polypeptide selected from the group consisting of SEQ ID NOs.: 42398-78581 and a polypeptide whose activity may be complemented by a polypeptide selected from the group consisting of SEQ ID NOs: 42398-78581.

[1039] 627. A method for screening a candidate compound for the ability to inhibit cellular proliferation comprising:

[1040] (a) contacting a cell with an agent which reduces the activity or level of a gene product required for proliferation of said cell, wherein said gene product is selected from the group consisting of a gene product having at least 70% nucleotide sequence identity as determined using BLASTN version 2.0 with the default parameters to a gene product whose expression is inhibited by an antisense nucleic acid comprising a nucleotide sequence selected from the group consisting of SEQ ID NOs.: 1-6213, a gene product encoded by a nucleic acid having at least 70% nucleotide sequence identity as determined using BLASTN version 2.0 with the default parameters to a nucleic acid encoding a gene product whose expression is inhibited by an antisense nucleic acid comprising a nucleotide sequence selected from the group consisting of SEQ ID NOs: 1-6213, a gene product having at least 25% amino acid identity as determined using FASTA version 3.0t78 with the default parameters to a gene product whose expression is inhibited by an antisense nucleic acid comprising a nucleotide sequence selected from the group consisting of SEQ ID NOs.: 1-6213, a gene product encoded by a nucleic acid comprising a nucleotide sequence which hybridizes to a nucleic acid selected from the group consisting of SEQ ID NOs.: 1-6213 under stringent conditions, a gene product encoded by a nucleic acid comprising a nucleotide sequence which hybridizes to a nucleic acid selected from the group consisting of SEQ ID NOs.: 1-6213 under moderate conditions, and a gene product whose activity may be complemented by the gene product whose activity is inhibited by a nucleic acid selected from the group consisting of SEQ ID NOs: 1-6213;

[1041] (b) contacting said cell with a compound; and

[1042] (c) determining the degree to which said compound reduces proliferation of said contacted cell relative to a cell which was not contacted with said agent.

[1043] 628. The method of Paragraph 627, wherein said agent which reduces the activity or level of a gene product required for proliferation of said cell comprises an antisense nucleic acid to a gene or operon required for proliferation.

[1044] 629. A method for screening a candidate compound for the ability to reduce cellular proliferation comprising:

[1045] (a) producing a sensitized cell by providing in said cell a sublethal level of an antisense nucleic acid complementary to a nucleic acid encoding a polypeptide selected from the group consisting of the polypeptides designated in the column entitled GENE NAME of Table IV;

[1046] (b) contacting said sensitized cell with a compound; and

[1047] (c) determining the degree to which said compound inhibits the growth of said sensitized cell relative to a nonsensitized cell.

[1048] 630. A method for sensitizing a cell of a microorganism, comprising inhibiting the production or activity of a gene product selected from the group consisting of the polypeptides designated in the column entitled GENE NAME of Table IV.

[1049] 631. The method of Paragraph 630, wherein the cell is sensitized by production of an antisense sequence that inhibits production of said gene product.

[1050] 632. The method of Paragraph 630, wherein the inhibition is a sublethal inhibition, further comprising contacting the sensitized cell with a candidate compound and ascertaining the effect of the candidate compound on the proliferation or viability of the sensitized cell.

[1051] 633. The method of Paragraph 630, wherein said cell is selected from the group consisting of Acinetobacter baumannii, Anaplasma marginale, Aspergillus fumigatus, Bacillus anthracis, Bacteroides fragilis, Bordetella pertussis, Borrelia burgdorferi, Burkholderia cepacia, Burkholderia fungorum, Burkholderia mallei, Campylobacter jejuni, Candida albicans, Candida glabrata (also called Torulopsis glabrata), Candida tropicalis, Candida parapsilosis, Candida guilliermondii, Candida krusei, Candida kefyr (also called Candida pseudotropicalis), Candida dubliniensis, Chlamydia pneumoniae, Chlamydia trachomatis, Clostridium acetobutylicum, Clostridium botulinum, Clostridium difficile, Clostridium perfringens, Coccidioides immitis, Corynebacterium diptheriae, Cryptococcus neoformans, Enterobacter cloacae, Enterococcus faecalis, Enterococcus faecium, Escherichia coli, Haemophilus influenzae, Helicobacter pylori, Histoplasma capsulatum, Klebsiella pneumoniae, Legionella pneumophila, Listeria monocytogenes, Moraxella catarrhalis, Mycobacterium avium, Mycobacterium bovis, Mycobacterium leprae, Mycobacterium tuberculosis, Mycoplasma genitalium, Mycoplasma pneumoniae, Neisseria gonorrhoeae, Neisseria meningitidis, Nocardia asteroides, Pasteurella haemolytica, Pasteurella multocida, Pneumocystis carinii, Proteus mirabilis, Proteus vulgaris, Pseudomonas aeruginosa, Pseudomonas putida, Pseudomonas syringae, Salmonella bongori, Salmonella cholerasuis, Salmonella enterica, Salmonella paratyphi, Salmonella typhi, Salmonella typhimurium, Shigella boydii, Shigella dysenteriae, Shigella flexneri, Shigella sonnei, Staphylococcus aureus, Staphylococcus epidermidis, Staphylococcus haemolyticus, Streptococcus pneumoniae, Streptococcus mutans, Streptococcus pyogenes, Treponema pallidum, Ureaplasma urealyticum, Vibrio cholerae, Vibrio parahaemolyticus, Vibrio vulnificans, Yersinia enterocolitica, Yersinia pestis and any species falling within the genera of any of the above species.

[1052] 634. The method of Paragraph 633, wherein said gene product is a polypeptide comprising a sequence selected from the group consisting of SEQ ID NOs: 42398-78581 and sequences having at least 25% amino acid identity to any one of SEQ ID NOs: 42398-78581.

[1053] 635. The method of Paragraph 630, wherein said cell is selected from the group consisting of Acinetobacter baumannii, Anaplasma marginale, Aspergillus fumigatus, Bacillus anthracis, Bacteroides fragilis, Bordetella pertussis, Borrelia burgdorferi, Burkholderia cepacia, Burkholderia fungorum, Burkholderia mallei, Campylobacter jejuni, Candida albicans, Candida glabrata (also called Torulopsis glabrata), Candida tropicalis, Candida parapsilosis, Candida guilliermondii, Candida krusei, Candida kefyr (also called Candida pseudotropicalis), Candida dubliniensis, Chlamydia pneumoniae, Chlamydia trachomatis, Clostridium acetobutylicum, Clostridium botulinum, Clostridium difficile, Clostridium perfringens, Coccidioides immitis, Corynebacterium diptheriae, Cryptococcus neoformans, Enterobacter cloacae, Enterococcus faecalis, Enterococcus faecium, Escherichia coli, Haemophilus influenzae, Helicobacter pylori, Histoplasma capsulatum, Klebsiella pneumoniae, Legionella pneumophila, Listeria monocytogenes, Moraxella catarrhalis, Mycobacterium avium, Mycobacterium bovis, Mycobacterium leprae, Mycobacterium tuberculosis, Mycoplasma genitalium, Mycoplasma pneumoniae, Neisseria gonorrhoeae, Neisseria meningitidis, Nocardia asteroides, Pasteurella haemolytica, Pasteurella multocida, Pneumocystis carinii, Proteus mirabilis, Proteus vulgaris, Pseudomonas aeruginosa, Pseudomonas putida, Pseudomonas syringae, Salmonella bongori, Salmonella cholerasuis, Salmonella enterica, Salmonella paratyphi, Salmonella typhi, Salmonella typhimurium, Shigella boydii, Shigella dysenteriae, Shigella flexneri, Shigella sonnei, Staphylococcus aureus, Staphylococcus epidermidis, Staphylococcus haemolyticus, Streptococcus pneumoniae, Streptococcus mutans, Streptococcus pyogenes, Treponema pallidum, Ureaplasma urealyticum, Vibrio cholerae, Vibrio parahaemolyticus, Vibrio vulnificans, Yersinia enterocolitica, Yersinia pestis and any species falling within the genera of any of the above species.

[1054] 636. The method of Paragraph 635, wherein said gene product is encoded by a nucleic acid comprising a sequence selected from the group consisting of SEQ ID NOs: 6214-42397 and sequences having at least 70% nucleotide identity to any one of SEQ ID NOs: 6214-42397.

### Definitions

[1055] By “biological pathway” is meant any discrete cell function or process that is carried out by a gene product or a subset of gene products. Biological pathways include anabolic, catabolic, enzymatic, biochemical and metabolic pathways as well as pathways involved in the production of cellular structures such as cell walls. Biological pathways that are usually required for proliferation of cells or microorganisms include, but are not limited to, cell division, DNA synthesis and replication, RNA synthesis (transcription), protein synthesis (translation), protein processing, protein transport, fatty acid biosynthesis, electron transport chains, cell wall synthesis, cell membrane production, synthesis and maintenance, and the like.

[1056] By “inhibit activity of a gene or gene product” is meant having the ability to interfere with the function of a gene or gene product in such a way as to decrease expression of the gene, in such a way as to reduce the level or activity of a product of the gene or in such a way as to inhibit the interaction of the gene or gene product with other biological molecules required for its activity. Agents which inhibit the activity of a gene include agents that inhibit transcription of the gene, agents that inhibit processing of the transcript of the gene, agents that reduce the stability of the transcript of the gene, and agents that inhibit translation of the mRNA transcribed from the gene. In microorganisms, agents which inhibit the activity of a gene can act to decrease expression of the operon in which the gene resides or alter the folding or processing of operon RNA so as to reduce the level or activity of the gene product. The gene product can be a non-translated RNA such as ribosomal RNA, a translated RNA (mRNA) or the protein product resulting from translation of the gene mRNA. Of particular utility to the present invention are antisense RNAs that have activities against the operons or genes to which they specifically hybridze.

[1057] By “activity against a gene product” is meant having the ability to inhibit the function or to reduce the level or activity of the gene product in a cell. This includes, but is not limited to, inhibiting the enzymatic activity of the gene product or the ability of the gene product to interact with other biological molecules required for its activity, including inhibiting the gene product's assembly into a multimeric structure.

[1058] By “activity against a protein” is meant having the ability to inhibit the function or to reduce the level or activity of the protein in a cell. This includes, but is not limited to, inhibiting the enzymatic activity of the protein or the ability of the protein to interact with other biological molecules required for its activity, including inhibiting the protein's assembly into a multimeric structure.

[1059] By “activity against a nucleic acid” is meant having the ability to inhibit the function or to reduce the level or activity of the nucleic acid in a cell. This includes, but is not limited to, inhibiting the ability of the nucleic acid interact with other biological molecules required for its activity, including inhibiting the nucleic acid's assembly into a multimeric structure.

[1060] By “activity against a gene” is meant having the ability to inhibit the function or expression of the gene in a cell. This includes, but is not limited to, inhibiting the ability of the gene to interact with other biological molecules required for its activity.

[1061] By “activity against an operon” is meant having the ability to inhibit the function or reduce the level of one or more products of the operon in a cell. This includes, but is not limited to, inhibiting the enzymatic activity of one or more products of the operon or the ability of one or more products of the operon to interact with other biological molecules required for its activity.

[1062] By “antibiotic” is meant an agent which inhibits the proliferation of a cell or microorganism.

[1063] By “E. coli or Escherichia coli” is meant Escherichia coli or any organism previously categorized as a species of Shigella including Shigella boydii, Shigella flexneri, Shigella dysenteriae, Shigella sonnei, Shigella 2A.

[1064] By “homologous coding nucleic acid” is meant a nucleic acid homologous to a nucleic acid encoding a gene product whose activity or level is inhibited by a nucleic acid selected from the group consisting of SEQ ID NOs.: 1-6213 or a portion thereof. In some embodiments, the homologous coding nucleic acid may have at least 97%, at least 95%, at least 90%, at least 85%, at least 80%, or at least 70% nucleotide sequence identity to a nucleotide sequence selected from the group consisting of SEQ ID NOS.: 6214-42,397 and fragments comprising at least 10, 15, 20, 25, 30, 35, 40, 50, 75, 100, 150, 200, 300, 400, or 500 consecutive nucleotides thereof. In other embodiments the homologous coding nucleic acids may have at least 97%, at least 95%, at least 90%, at least 85%, at least 80%, or at least 70% nucleotide sequence identity to a nucleotide sequence selected from the group consisting of the nucleotide sequences complementary to one of SEQ ID NOs.: 1-6213 and fragments comprising at least 10, 15, 20, 25, 30, 35, 40, 50, 75, 100, 150, 200, 300, 400, or 500 consecutive nucleotides thereof. Identity may be measured using BLASTN version 2.0 with the default parameters or tBLASTX with the default parameters. (Altschul, S. F. et al. Gapped BLAST and PSI-BLAST: A New Generation of Protein Database Search Programs, Nucleic Acid Res. 25: 3389-3402 (1997), the disclosure of which is incorporated herein by reference in its entirety) Alternatively a “homologuous coding nucleic acid” could be identified by membership of the gene of interest to a functional orthologue cluster. All other members of that orthologue cluster would be considered homologues. Such a library of functional orthologue clusters can be found at http://www.ncbi.nlm.nih.gov/COG. A gene can be classified into a cluster of orthologous groups or COG by using the COGNITOR program available at the above web site, or by direct BLASTP comparison of the gene of interest to the members of the COGs and analysis of these results as described by Tatusov, R. L., Galperin, M. Y., Natale, D. A. and Koonin, E. V. (2000) The COG database: a tool for genome-scale analysis of protein functions and evolution. Nucleic Acids Research v. 28 n. 1, pp33-36.

[1065] Homologous coding nucleic acids and the homologous polypeptides which they encode may also be identified using a “reciprocal” best-hit analysis. To facilitate the identification of homologous coding nucleic acids and homologous polypeptides, paralogous genes within each of 51 organisms are identified and clustered prior to comparison to other organisms. Briefly, the polypeptide sequence of each polypeptide encoded by each open reading frame (ORF) in a given organism is compared to the polypeptide sequence encoded by every other ORF for that organism for each of the 51 pathogenic organisms (PathoSeq September 2001 release) using BLASTP 2.09 algorithm without filtering. Simultaneously, the polypeptide sequence encoded by each ORF of an organism is compared to the polypeptide sequences encoded by each of the ORFs in the remaining 51 organisms. Those polypeptides within a single organism that shared a higher degree of sequence identity to one another than to polypeptide sequences obtained from any other organisms are clustered as “paralog” sequences for “reciprocal” best-hit analysis.

[1066] For each reference organism, the 50 homologous coding nucleic acids (and the 50 homologous polypeptides which they encode) can be determined by identifying the ORFs in each of the 50 comparison organisms which encode a polypeptide sharing the highest degree of amino acid sequence identity to the polypeptide encoded by the ORF from the reference organism. The accuracy of the identification of the predicted homologous coding nucleic acids (and the homologous polypeptides which they encode) is confirmed by a “reciprocal” BLAST analysis in which the polypeptide sequence of the predicted homologous polypeptide is compared against the polypeptides encoded by each of the ORFS in the reference organism using BLASTP 2.09 algorithm without filtering. Only those polypeptides that share the highest degree of amino acid sequence identity in each portion of the two-way comparison are retained for further analysis.

[1067] The term “homologous coding nucleic acid” also includes nucleic acids comprising nucleotide sequences which encode polypeptides having at least 99%, at least 95%, at least 90%, at least 85%, at least 80%, at least 70%, at least 60%, at least 50%, at least 40% or at least 25% maino acid identity or similarity to a polypeptide comprising the amino acid sequence of one of SEQ ID NOs: 42,398-78,581 or to a polypeptpide whose expression is inhibited by a nucleic acid comprising a nucleotide sequence of one of SEQ ID NOs: 1-6213 or fragments comprising at least 5, 10, 15, 20, 25, 30, 35, 40, 50, 75, 100, or 150 consecutive amino acids thereof as determined using the FASTA version 3.0t78 algorithm with the default parameters. Alternatively, protein identity or similarity may be identified using BLASTP with the default parameters, BLASTX with the default parameters, TBLASTN with the default parameters, or tBLASTX with the default parameters. (Altschul, S. F. et al. Gapped BLAST and PSI-BLAST: A New Generation of Protein Database Search Programs, Nucleic Acid Res. 25: 3389-3402 (1997), the disclosure of which is incorporated herein by reference in its entirety). Additionally, homologous coding nucleic acids and the homologous polypeptides which they encode may be identified using a “reciprocal” best-hit analysis. To facilitate the identification of homologous coding nucleic acids and homologous polypeptides, paralogous genes within each of 51 organisms are identified and clustered prior to comparison to other organisms. Briefly, the polypeptide sequence of each polypeptide encoded by each open reading frame (ORF) in a given organism is compared to the polypeptide sequence encoded by every other ORF for that organism for each of the 51 pathogenic organisms (PathoSeq September 2001 release) using BLASTP 2.09 algorithm without filtering. Simultaneously, the polypeptide sequence encoded by each ORF of an organism is compared to the polypeptide sequences encoded by each of the ORFs in the remaining 51 organisms. Those polypeptides within a single organism that shared a higher degree of sequence identity to one another than to polypeptide sequences obtained from any other organisms are clustered as “paralog” sequences for “reciprocal” best-hit analysis.

[1068] For each reference organism, the 50 homologous coding nucleic acids (and the 50 homologous polypeptides which they encode) can be determined by identifying the ORFs in each of the 50 comparison organisms which encode a polypeptide sharing the highest degree of amino acid sequence identity to the polypeptide encoded by the ORF from the reference organism. The accuracy of the identification of the predicted homologous coding nucleic acids (and the homologous polypeptides which they encode) is confirmed by a “reciprocal” BLAST analysis in which the polypeptide sequence of the predicted homologous polypeptide is compared against the polypeptides encoded by each of the ORFS in the reference organism using BLASTP 2.09 algorithm without filtering. Only those polypeptides that share the highest degree of amino acid sequence identity in each portion of the two-way comparison are retained for further analysis.

[1069] The term “homologous coding nucleic acid” also includes coding nucleic acids which hybridize under stringent conditions to a nucleic acid selected from the group consisting of the nucleotide sequences complementary to one of SEQ ID NOS.: 6214-42,397 and coding nucleic acids comprising nucleotide sequences which hybridize under stringent conditions to a fragment comprising at least 10, 15, 20, 25, 30, 35, 40, 50, 75, 100, 150, 200, 300, 400, or 500 consecutive nucleotides of the sequences complementary to one of SEQ ID NOS.: 6214-42,397. As used herein, “stringent conditions” means hybridization to filter-bound nucleic acid in 6×SSC at about 45° C. followed by one or more washes in 0.1×SSC/0.2% SDS at about 68° C. Other exemplary stringent conditions may refer, e.g., to washing in 6×SSC/0.05% sodium pyrophosphate at 37° C., 48° C., 55° C., and 60° C. as appropriate for the particular probe being used.

[1070] The term “homologous coding nucleic acid” also includes coding nucleic acids comprising nucleotide sequences which hybridize under moderate conditions to a nucleotide sequence selected from the group consisting of the sequences complementary to one of SEQ ID NOS.: 6214-42,397 and coding nucleic acids comprising nucleotide sequences which hybridize under moderate conditions to a fragment comprising at least 10, 15, 20, 25, 30, 35, 40, 50, 75, 100, 150, 200, 300, 400, or 500 consecutive nucleotides of the sequences complementary to one of SEQ ID NOS.: 6214-42,397. As used herein, “moderate conditions” means hybridization to filter-bound DNA in 6× sodium chloride/sodium citrate (SSC) at about 45° C. followed by one or more washes in 0.2×SSC/0.1% SDS at about 42-65° C.

[1071] The term “homologous coding nucleic acids” also includes nucleic acids comprising nucleotide sequences which encode a gene product whose activity may be complemented by a gene encoding a gene product whose activity is inhibited by a nucleic acid comprising a nucleotide sequence selected from the group consisting of SEQ ID NOs.: 1-6213. In some embodiments, the homologous coding nucleic acids may encode a gene product whose activity is complemented by the gene product encoded by a nucleic acid comprising a nucleotide sequence selected from the group consisting of SEQ ID NOS.: 6214-42,397. In other embodiments, the homologous coding nucleic acids may comprise a nucleotide sequence encode a gene product whose activity is complemented by one of the polypeptides of SEQ ID NOs. 42,398-78,581.

[1072] The term “homologous antisense nucleic acid” includes nucleic acids comprising a nucleotide sequence having at least 97%, at least 95%, at least 90%, at least 85%, at least 80%, or at least 70% nucleotide sequence identity to a nucleotide sequence selected from the group consisting of one of the sequences of SEQ ID NOS. 1-6213 and fragments comprising at least 10, 15, 20, 25, 30, 35, 40, 50, 75, 100, 150, 200, 300, 400, or 500 consecutive nucleotides thereof. Homologous antisense nucleic acids may also comprising nucleotide sequences which have at least 97%, at least 95%, at least 90%, at least 85%, at least 80%, or at least 70% nucleotide sequence identity to a nucleotide sequence selected from the group consisting of the sequences complementary to one of sequences of SEQ ID NOS.: 6214-42,397 and fragments comprising at least 10, 15, 20, 25, 30, 35, 40, 50, 75, 100, 150, 200, 300, 400, or 500 consecutive nucleotides thereof. Nucleic acid identity may be determined as described above.

[1073] The term “homologous antisense nucleic acid” also includes antisense nucleic acids comprising nucleotide sequences which hybridize under stringent conditions to a nucleotide sequence complementary to one of SEQ ID NOs.: 1-6213 and antisense nucleic acids comprising nucleotide sequences which hybridize under stringent conditions to a fragment comprising at least 10, 15, 20, 25, 30, 35, 40, 50, 75, 100, 150, 200, 300, 400, or 500 consecutive nucleotides of the sequence complementary to one of SEQ ID NOs. 1-6213. Homologous antisense nucleic acids also include antisense nucleic acids comprising nucleotide sequences which hybridize under stringent conditions to a nucleotide sequence selected from the group consisting of SEQ ID NOS.: 6214-42,397 and antisense nucleic acids comprising nucleotide sequences which hybridize under stringent conditions to a fragment comprising at least 10, 15, 20, 25, 30, 35, 40, 50, 75, 100, 150, 200, 300, 400, or 500 consecutive nucleotides of one of SEQ ID NOS.: 6214-42,397.

[1074] The term “homologous antisense nucleic acid” also includes antisense nucleic acids comprising nucleotide sequences which hybridize under moderate conditions to a nucleotide sequence complementary to one of SEQ ID NOs.: 1-6213 and antisense nucleic acids comprising nucleotide seuqences which hybridize under moderate conditions to a fragment comprising at least 10, 15, 20, 25, 30, 35, 40, 50, 75, 100, 150, 200, 300, 400, or 500 consecutive nucleotides of the sequence complementary to one of SEQ ID NOs. 1-6213. Homologous antisense nucleic acids also include antisense nucleic acids comprising nucleotide seuqences which hybridize under moderate conditions to a nucleotide sequence selected from the group consisting of SEQ ID NOS.: 6214-42,397 and antisense nucleic acids which comprising nucleotide sequences hybridize under moderate conditions to a fragment comprising at least 10, 15, 20, 25, 30, 35, 40, 50, 75, 100, 150, 200, 300, 400, or 500 consecutive nucleotides of one of SEQ ID NOS.: 6214-42,397.

[1075] By “homologous polypeptide” is meant a polypeptide homologous to a polypeptide whose activity or level is inhibited by a nucleic acid comprising a nucleotide sequence selected from the group consisting of SEQ ID NOs.: 1-6213 or by a homologous antisense nucleic acid. The term “homologous polypeptide” includes polypeptides having at least 99%, at least 95%, at least 90%, at least 85%, at least 80%, at least 70%, at least 60%, at least 50%, at least 40% or at least 25% amino acid identity or similarity to a polypeptide whose activity or level is inhibited by a nucleic acid selected from the group consisting of SEQ ID NOs: 1-6213 or by a homologous antisense nucleic acid, or polypeptides having at least 99%, at least 95%, at least 90%, at least 85%, at least 80%, at least 70%, at least 60%, at least 50%, at least 40% or at least 25% amino acid identity or similarity to a polypeptide to a fragment comprising at least 5, 10, 15, 20, 25, 30, 35, 40, 50, 75, 100, or 150 consecutive amino acids of a polypeptide whose activity or level is inhibited by a nucleic acid selected from the group consisting of SEQ ID NOs.: 1-6213 or by a homologous antisense nucleic acid. Identity or similarity may be determined using the FASTA version 3.0t78 algorithm with the default parameters. Alternatively, protein identity or similarity may be identified using BLASTP with the default parameters, BLASTX with the default parameters, or TBLASTN with the default parameters. (Altschul, S. F. et al. Gapped BLAST and PSI-BLAST: A New Generation of Protein Database Search Programs, Nucleic Acid Res. 25: 3389-3402 (1997), the disclosure of which is incorporated herein by reference in its entirety). Additionally, homologous coding nucleic acids and the homologous polypeptides which they encode may be identified using a “reciprocal” best-hit analysis. To facilitate the identification of homologous coding nucleic acids and homologous polypeptides, paralogous genes within each of 51 organisms are identified and clustered prior to comparison to other organisms. Briefly, the polypeptide sequence of each polypeptide encoded by each open reading frame (ORF) in a given organism is compared to the polypeptide sequence encoded by every other ORF for that organism for each of the 51 pathogenic organisms (PathoSeq September 2001 release) using BLASTP 2.09 algorithm without filtering. Simultaneously, the polypeptide sequence encoded by each ORF of an organism is compared to the polypeptide sequences encoded by each of the ORFs in the remaining 51 organisms. Those polypeptides within a single organism that shared a higher degree of sequence identity to one another than to polypeptide sequences obtained from any other organisms are clustered as “paralog” sequences for “reciprocal” best-hit analysis.

[1076] For each reference organism, the 50 homologous coding nucleic acids (and the 50 homologous polypeptides which they encode) can be determined by identifying the ORFs in each of the 50 comparison organisms which encode a polypeptide sharing the highest degree of amino acid sequence identity to the polypeptide encoded by the ORF from the reference organism. The accuracy of the identification of the predicted homologous coding nucleic acids (and the homologous polypeptides which they encode) is confirmed by a “reciprocal” BLAST analysis in which the polypeptide sequence of the predicted homologous polypeptide is compared against the polypeptides encoded by each of the ORFS in the reference organism using BLASTP 2.09 algorithm without filtering. Only those polypeptides that share the highest degree of amino acid sequence identity in each portion of the two-way comparison are retained for further analysis.

[1077] The term homologous polypeptide also includes polypeptides having at least 99%, at least 95%, at least 90%, at least 85%, at least 80%, at least 70%, at least 60%, at least 50%, at least 40% or at least 25% amino acid identity or similarity to a polypeptide selected from the group consisting of SEQ ID NOs: 42,398-78,581 and polypeptides having at least 99%, at least 95%, at least 90%, at least 85%, at least 80%, at least 70%, at least 60%, at least 50%, at least 40% or at least 25% amino acid identity or similarity to a fragment comprising at least 5, 10, 15, 20, 25, 30, 35, 40, 50, 75, 100, or 150 consecutive amino acids of a polypeptide selected from the group consisting of SEQ ID NOs: 42,398-78,581.

[1078] The invention also includes polynucleotides, preferably DNA molecules, that hybridize to one of the nucleic acids of SEQ ID NOs.: 1-6213, SEQ ID NOs.: 6214-42,397 or the complements of any of the preceding nucleic acids. Such hybridization may be under stringent or moderate conditions as defined above or under other conditions which permit specific hybridization. The nucleic acid molecules of the invention that hybridize to these DNA sequences include oligodeoxynucleotides (“oligos”) which hybridize to the target gene under highly stringent or stringent conditions. In general, for oligos between 14 and 70 nucleotides in length the melting temperature (Tm) is calculated using the formula:

Tm (° C.)=81.5+16.6(log [monovalent cations (molar)]+0.41 (% G+C)−(500/N)

[1079] where N is the length of the probe. If the hybridization is carried out in a solution containing formamide, the melting temperature may be calculated using the equation:

Tm(° C.)=81.5+16.6(log [monovalent cations (molar)]+0.41(% G+C)−(0.61) (% formamide)−(500/N)

[1080] where N is the length of the probe. In general, hybridization is carried out at about 20-25 degrees below Tm (for DNA-DNA hybrids) or about 10-15 degrees below Tm (for RNA-DNA hybrids).

[1081] Other hybridization conditions are apparent to those of skill in the art (see, for example, Ausubel, F. M. et al., eds., 1989, Current Protocols in Molecular Biology, Vol. I, Green Publishing Associates, Inc. and John Wiley & Sons, Inc., New York, at pp. 6.3.1-6.3.6 and 2.10.3, the disclosure of which is incorporated herein by reference in its entirety).

[1082] The term, Salmonella, is the generic name for a large group of gram negative enteric bacteria that are closely related to Escherichia coli. The diseases caused by Salmonella are often due to contamination of foodstuffs or the water supply and affect millions of people each year. Traditional methods of Salmonella taxonomy were based on assigning a separate species name to each serologically distinguishable strain (Kauffmann, F 1966 The bacteriology of the Enterobacteriaceae. Munksgaard, Copenhagen). Serology of Salmonella is based on surface antigens (O [somatic] and H [flagellar]). Over 2,400 serotypes or serovars of Salmonella are known (Popoff, et al. 2000 Res. Microbiol. 151:63-65). Therefore, each serotype was considered to be a separate species and often given names, accordingly (e.g. S. paratyphi, S. typhimurium, S. typhi, S. enteriditis, etc.).

[1083] However, by the 1970s and 1980s it was recognized that this system was not only cumbersome, but also inaccurate. Then, many Salmonella species were lumped into a single species (all serotypes and subgenera I, II, and IV and all serotypes of Arizona) with a second subspecies, S. bongorii also recognized (Crosa, et al., 1973, J. Bacteriol. 115:307-315). Though species designations are based on the highly variable surface antigens, the Salmonella are very similar otherwise with a major exception being pathogenicity determinants.

[1084] There has been some debate on the correct name for the Salmonella species. Currently (Brenner, et al. 2000 J. Clin. Microbiol. 38:2465-2467), the accepted name is Salmonella enterica. S. enterica is divided into six subspecies (I, S. enterica subsp. enterica; II, S. enterica, subsp. salamae; IIIa, S. enterica subsp. arizonàe; IIIb, S. enterica subsp. diarizonae; IV, S. enterica subsp. houtenae; and VI, S. enterica subsp. indica). Within subspecies I, serotypes are used to distinguish each of the serotypes or serovars (e.g. S. enterica serotype Enteriditis, S. enterica serotype Typhimurium, S. enterica serotype Typhi, and S. enterica serotype Choleraesuis, etc.). Current convention is to spell this out on first usage (Salmonella enterica ser. Typhimurium) and then use an abbreviated form (Salmonella Typhimurium or S. Typhimurium). Note, the genus and species names (Salmonella enterica) are italicized but not the serotype/serovar name (Typhimurium). Because the taxonomic committees have yet to officially approve of the actual species name, this latter system is what is employed by the CDC (Brenner, et al. 2000 J. Clin. Microbiol. 38:2465-2467). Due to the concerns of both taxonomic priority and medical importance, some of these serotypes might ultimately receive full species designations (S. typhi would be the most notable).

[1085] Therefore, as used herein “Salmonella enterica or S. enterica” includes serovars Typhi, Typhimurium, Paratyphi, Choleraesuis, etc.” However, appeals of the “official” name are in process and the taxonomic designations may change (S. choleraesuis is the species name that could replace S. enterica based solely on priority).

[1086] By “identifying a compound” is meant to screen one or more compounds in a collection of compounds such as a combinatorial chemical library or other library of chemical compounds or to characterize a single compound by testing the compound in a given assay and determining whether it exhibits the desired activity.

[1087] By “inducer” is meant an agent or solution which, when placed in contact with a cell or microorganism, increases transcription, or inhibitor and/or promoter clearance/fidelity, from a desired promoter.

[1088] As used herein, “nucleic acid” means DNA, RNA, or modified nucleic acids. Thus, the terminology “the nucleic acid of SEQ ID NO: X” or “the nucleic acid comprising the nucleotide sequence” includes both the DNA sequence of SEQ ID NO: X and an RNA sequence in which the thymidines in the DNA sequence have been substituted with uridines in the RNA sequence and in which the deoxyribose backbone of the DNA sequence has been substituted with a ribose backbone in the RNA sequence. Modified nucleic acids are nucleic acids having nucleotides or structures which do not occur in nature, such as nucleic acids in which the internucleotide phosphate residues with methylphosphonates, phosphorothioates, phosphoramidates, and phosphate esters. Nonphosphate internucleotide analogs such as siloxane bridges, carbonate brides, thioester bridges, as well as many others known in the art may also be used in modified nucleic acids. Modified nucleic acids may also comprise, α-anomeric nucleotide units and modified nucleotides such as 1,2-dideoxy-d-ribofuranose, 1,2-dideoxy-1-phenylribofuranose, and N⁴,N⁴-ethano-5-methyl-cytosine are contemplated for use in the present invention. Modified nucleic acids may also be peptide nucleic acids in which the entire deoxyribose-phosphate backbone has been exchanged with a chemically completely different, but structurally homologous, polyamide (peptide) backbone containing 2-aminoethyl glycine units.

[1089] As used herein, “sub-lethal” means a concentration of an agent below the concentration required to inhibit all cell growth.

### BRIEF DESCRIPTION OF THE DRAWINGS

[1090] FIG. 1A illustrates a method for replacing a promoter using a promoter replacement cassette comprising a 5′ region homologous to the sequence which is 5′ of the natural promoter in the chromosome, the promoter which is to replace the chromosomal promoter and a 3′ region which is homologous to sequences 3′ of the natural promoter in the chromosome.

[1091] FIG. 1B illustrates a method for replacing a promoter using a promoter replacement cassette comprising a nucleic acid encoding an identifiable or selectable marker disposed between the 5′ region which is homologous to the sequence 5′ of the natural promoter and the promoter which is to replace the chromosomal promoter and a transcriptional terminator 3′ of the gene encoding an identifiable or selectable marker.

[1092] FIGS. 2A and 2B illustrate one method for identifying amplification products which are underrepresented or overrepresented in a culture.

[1093] FIGS. 3A and 3B illustrate another method for identifying amplification products which are underrepresented or overrepresented in a culture.

[1094] FIG. 4 illustrates the results of a hybridization analysis where the antisense nucleic acid expressed by a strain in the culture is not complementary to all or a portion of the gene encoding the target of the compound (i.e. a nonspecific strain).

[1095] FIG. 5 illustrates the results of a hybridization analysis where the antisense nucleic acid expressed by a strain in the culture is complementary to all or a portion of the gene encoding the target of the compound, the hybridization intensity for that strain will be intimately correlated with the concentration of the compound (i.e. a specific strain).

[1096] FIG. 6 illustrates an oligonucleotide comprising a lac operator flanked on each side by 40 nucleotides homologous to the promoter is the promoter which drives expression of the yahB yabC ftsL ftsI murE genes in an operon for use in inserting the lac operator into the promoter.

[1097] FIG. 7 is an IPTG dose response curve in E. coli transformed with an IPTG-inducible plasmid containing either an antisense clone to the E. coli ribosomal protein rplW (AS-rplW) which is required for protein synthesis and essential for cell proliferation, or an antisense clone to the elaD (AS-elaD) gene which is not known to be involved in protein synthesis and which is also essential for proliferation.

[1098] FIG. 8A is a tetracycline dose response curve in E. coli transformed with an IPTG-inducible plasmid containing antisense to rplW (AS-rplW) in the absence (0) or presence of IPTG at concentrations that result in 20% and 50% growth inhibition.

[1099] FIG. 8B is a tetracycline dose response curve in E. coli transformed with an IPTG-inducible plasmid containing antisense to elaD (AS-elaD)in the absence (0) or presence of IPTG at concentrations that result in 20% and 50% growth inhibition.

[1100] FIG. 9 is a graph showing the fold increase in tetracycline sensitivity of E. coli transfected with antisense clones to essential ribosomal proteins L23 (AS-rplW) and L7/L12 and L10 (AS-rplLrplJ). Antisense clones to genes known to not be directly involved in protein synthesis, atpB/E (AS-atpB/E), visC (AS-visC), elaD (AS-elaD), yohH (AS-yohH), are much less sensitive to tetracycline.

[1101] FIG. 10 illustrates the results of an assay in which Staphylococcus aureus cells transcribing an antisense nucleic acid complementary to the gyrB gene encoding the β subunit of gyrase were contacted with several antibiotics whose targets were known.

[1102] FIG. 11 illustrates a microtitration plate which contains antibiotic and inducer at gradient concentrations in a matrix format in 10 times excess quantity.

[1103] FIG. 12 illustrates the results of an experiment demonstrating that at appropriate concentrations of inducer, cells which overexpress the defB gene product were able to grow at elevated concentrations of the antibiotic actinonin

[1104] FIG. 13 illustrates the results of an experiment demonstrating that at appropriate concentrations of inducer cells which overexpress the folA gene product were able to grow at elevated concentrations of the antibiotic trimethoprim.

[1105] FIG. 14 illustrates the results of an experiment demonstrating that overexpression of the fabI gene confers resistance to triclosan, which acts on the gene product of the fabI gene, but does not confer resistance to cerulenin, trimethoprim, or actinonin, each of which act on other gene products.

[1106] FIG. 15 illustrates the results of an experiment demonstrating that overexpression of the folA gene confers resistance to trimethoprim, which acts on the gene product of the folA gene but does not confer resistance to triclosan, cerulenin, or actinonin, each of which act on other gene products.

[1107] FIG. 16 illustrates the results of an experiment demonstrating that overexpression of the defB gene conferred resistance to actinonin, which acts on the gene product of the defB gene but does not confer resistance to cerulenin, trimethoprim, or triclosan, each of which act on other gene products.

[1108] FIG. 17 illustrates the results of an experiment demonstrating that overexpression of the fabF gene conferred resistance to cerulenin, which acts on the gene product of the fabF gene, β keto-acyl carrier protein synthase but does not confer resistance to triclosan, trimethoprim, or actinonin, each of which act on other gene products.

[1109] FIG. 18 illustrates the results of experiments in which a mixture of nine strains was grown wells in a 96 well plate in medium containing various concentrations of inducer and a sufficient concentration of actinonin, cerulenin, triclosan or trimethoprim to inhibit the growth of strains which do not overexpress the targets of these antibiotics.

### DETAILED DESCRIPTION OF EMBODIMENTS OF THE INVENTION

[1110] The present invention describes a group of prokaryotic genes and gene families required for cellular proliferation. Exemplary genes and gene families from Escherichia coli, Staphylococcus aureus, Enterococcus faecalis, Klebsiella pneumoniae, Pseudomonas aeruginosa, Salmonella typhimurium, Acinetobacter baumannii, Bacillus anthracis, Bacteroides fragilis, Bordetella pertussis, Borrelia burgdorferi, Burkholderia cepacia, Burkholderia fungorum, Burkholderia mallei, Campylobacter jejuni, Chlamydia pneumoniae, Chlamydia trachomatis, Clostridium acetobutylicum, Clostridium botulinum, Clostridium difficile, Corynebacterium diptheriae, Enterobacter cloacae, Enterococcus faecium, Haemophilus influenzae, Helicobacter pylori, Legionella pneumophila, Listeria monocytogenes, Moraxella catarrhalis, Mycobacterium avium, Mycobacterium bovis, Mycobacterium leprae, Mycobacterium tuberculosis, Mycoplasma genitalium, Mycoplasma pneumoniae, Neisseria gonorrhoeae, Neisseria meningitidis, Pasteurella multocida, Proteus mirabilis, Pseudomonas putida, Pseudomonas syringae, Salmonella paratyphi, Salmonella typhi, Staphylococcus epidermidis, Staphylococcus haemolyticus, Streptococcus mutans, Streptococcus pneumoniae, Streptococcus pyogenes, Treponema pallidum, Ureaplasma urealyticum, Vibrio cholera and Yersinia pestis are provided. A proliferation-required gene or gene family is one where, in the absence or substantial reduction of a gene transcript and/or gene product, growth or viability of the cell or microorganism is reduced or eliminated. Thus, as used herein, the terminology “proliferation-required” or “required for proliferation” encompasses instances where the absence or substantial reduction of a gene transcript and/or gene product completely eliminates cell growth as well as instances where the absence of a gene transcript and/or gene product merely reduces cell growth. These proliferation-required genes can be used as potential targets for the generation of new antimicrobial agents. To achieve that goal, the present invention also encompasses assays for analyzing proliferation-required genes and for identifying compounds which interact with the gene and/or gene products of the proliferation-required genes. In addition, the present invention contemplates the expression of genes and the purification of the proteins encoded by the nucleic acid sequences identified as required proliferation genes and reported herein. The purified proteins can be used to generate reagents and screen small molecule libraries or other candidate compound libraries for compounds that can be further developed to yield novel antimicrobial compounds.

[1111] The present invention also describes methods for identification of nucleotide sequences homologous to these genes and polypeptides described herein, including nucleic acids comprising nucleotide sequences homologous to the nucleic acids of SEQ ID NOS.: 6214-42397 and polypeptides homologous to the polypeptides of SEQ ID NOs.: 42398-78581. For example, these sequences may be used to identify homologous coding nucleic acids, homologous antisense nucleic acids, or homologous polypeptides in microorganisms such as Acinetobacter baumannii, Anaplasma marginale, Aspergillus fumigatus, Bacillus anthracis, Bacteroides fragilis, Bordetella pertussis, Borrelia burgdorferi, Burkholderia cepacia, Burkholderia fungorum, Burkholderia mallei, Campylobacter jejuni, Candida albicans, Candida glabrata (also called Torulopsis glabrata), Candida tropicalis, Candida parapsilosis, Candida guilliermondii, Candida krusei, Candida kefyr (also called Candida pseudotropicalis), Candida dubliniensis, Chlamydia pneumoniae, Chlamydia trachomatis, Clostridium acetobutylicum, Clostridium botulinum, Clostridium difficile, Clostridium perfringens, Coccidioides immitis, Corynebacterium diptheriae, Cryptococcus neoformans, Enterobacter cloacae, Enterococcus faecalis, Enterococcus faecium, Escherichia coli, Haemophilus influenzae, Helicobacter pylori, Histoplasma capsulatum, Klebsiella pneumoniae, Legionella pneumophila, Listeria monocytogenes, Moraxella catarrhalis, Mycobacterium avium, Mycobacterium bovis, Mycobacterium leprae, Mycobacterium tuberculosis, Mycoplasma genitalium, Mycoplasma pneumoniae, Neisseria gonorrhoeae, Neisseria meningitidis, Nocardia asteroides, Pasteurella haemolytica, Pasteurella multocida, Pneumocystis carinii, Proteus mirabilis, Proteus vulgaris, Pseudomonas aeruginosa, Pseudomonas putida, Pseudomonas syringae, Salmonella bongori, Salmonella cholerasuis, Salmonella enterica, Salmonella paratyphi, Salmonella typhi, Salmonella typhimurium, Shigella boydii, Shigella dysenteriae, Shigella flexneri, Shigella sonnei, Staphylococcus aureus, Staphylococcus epidermidis, Staphylococcus haemolyticus, Streptococcus pneumoniae, Streptococcus mutans, Streptococcus pyogenes, Treponema pallidum, Ureaplasma urealyticum, Vibrio cholerae, Vibrio parahaemolyticus, Vibrio vulnificans, Yersinia enterocolitica, Yersinia pestis or any species falling within the genera of any of the above species. In some embodiments, the homologous coding nucleic acids, homologus antisense nucleic acids, or homologous polypeptides are identified in an organism other than E. coli.

[1112] The homologous coding nucleic acids, homologous antisense nucleic acids, or homologous polypeptides, may then be used in each of the methods described herein, including methods of identifying compounds which inhibit the proliferation of the organism containing the homologous coding nucleic acid, homologous antisense nucleic acid or homologous polypeptide, methods of inhibiting the growth of the organism containing the homologous coding nucleic acid, homologus antisense nucleic acid or homologous polypeptide, methods of identifying compounds which influence the activity or level of a gene product required for proliferation of the organism containing the homologous coding nucleic acid, homologous antisense nucleic acid or homologous polypeptide, methods for identifying compounds or nucleic acids having the ability to reduce the level or activity of a gene product required for proliferation of the organism containing the homologous coding nucleic acid, homologous antisense nucleic acid or homologous polypeptide, methods of inhibiting the activity or expression of a gene in an operon required for proliferation of the organism containing the homologous coding nucleic acid, homologous antisense nucleic acid or homologous polypeptide, methods for identifying a gene required for proliferation of the organism containing the homologous coding nucleic acid, homologous antisense nucleic acid or homologous polypeptide, methods for identifying the biological pathway in which a gene or gene product required for proliferation of the organism containing the homologous coding nucleic acid, homologous antisense nucleic acid or homologous polypeptide lies, methods for identifying compounds having activity against biological pathway required for proliferation of the organism containing the homologous coding nucleic acid, homologous antisense nucleic acid or homologous polypeptide, methods for determining the biological pathway on which a test compound acts in the organism containing the homologous coding nucleic acid, homologous antisense nucleic acid or homologous polypeptide, methods of replacing an endogenous promoter with a regulatable promoter which controls the expression of the homologous coding nucleic acid, homologous antisense nucleic acid or homologous polypeptide, methods of inserting an operator within or near an endogenous promoter to provide regulatable expression of the homologous coding nucleic acid, homologous antisense nucleic acid or homologous polypeptide, methods of identifying the target on which a compound acts in the organism containing the homologous coding nucleic acid, homologous antisense nucleic acid or homologous polypeptide, and methods of inhibiting the proliferation of the organism containing the homologous coding nucleic acid, homologous antisense nucleic acid or homologous polypeptide in a subject. In some embodiments of the present invention, the methods are performed using an organism, other than E. coli or a gene or gene product from an organism other than E. coli.

[1113] One embodiment of the present invention utilizes a novel method to identify proliferation-required sequences. Generally, a library of nucleic acid sequences from a given source are subcloned or otherwise inserted immediately downstream of an inducible promoter on an appropriate vector, such as a Staphylococcus aureus/E. coli or Pseudomonas aeruginosa/E. coli shuttle vector, or a vector which will replicate in both Salmonella typhimurium and Klebsiella pneumoniae, or other vector or shuttle vector capable of functioning in the intended organism, thus forming an expression library. It is generally preferred that expression is directed by a regulatable promoter sequence such that expression level can be adjusted by addition of variable concentrations of an inducer molecule or of an inhibitor molecule to the medium. For example, a number of regulatable promoters useful for regulating the expression of nucleic acid sequences over a wide range of expression levels are described in U.S. patent application Ser. No. 10/032,393, filed Dec. 21, 2001. Temperature activated promoters, such as promoters regulated by temperature sensitive repressors, such as the lambda C₁₈₅₇ repressor, are also envisioned. Although the insert nucleic acids may be derived from the chromosome of the cell or microorganism into which the expression vector is to be introduced, because the insert is not in its natural chromosomal location, the insert nucleic acid is an exogenous nucleic acid for the purposes of the discussion herein. The term “expression” is defined as the production of a sense or antisense RNA molecule from a gene, gene fragment, genomic fragment, chromosome, operon or portion thereof. Expression can also be used to refer to the process of peptide or polypeptide synthesis. An expression vector is defined as a vehicle by which a ribonucleic acid (RNA) sequence is transcribed from a nucleic acid sequence carried within the expression vehicle. The expression vector can also contain features that permit translation of a protein product from the transcribed RNA message expressed from the exogenous nucleic acid sequence carried by the expression vector. Accordingly, an expression vector can produce an RNA molecule as its sole product or the expression vector can produce a RNA molecule that is ultimately translated into a protein product.

[1114] Once generated, the expression library containing the exogenous nucleic acid sequences is introduced into a population of cells (such as the organism from which the exogenous nucleic acid sequences were obtained) to search for genes that are required for bacterial proliferation. Because the library molecules are foreign, in context, to the population of cells, the expression vectors and the nucleic acid segments contained therein are considered exogenous nucleic acid.

[1115] Expression of the exogenous nucleic acid fragments in the test population of cells containing the expression library is then activated. Activation of the expression vectors consists of subjecting the cells containing the vectors to conditions that result in the expression of the exogenous nucleic acid sequences carried by the expression library. The test population of cells is then assayed to determine the effect of expressing the exogenous nucleic acid fragments on the test population of cells. Those expression vectors that negatively impact the growth of the cells upon induction of expression of the random sequences contained therein are identified, isolated, and purified for further study.

[1116] In some embodiments, vectors which comprises a regulatable fusion promoter selected from a suite of fusion promoters, wherein the promoter suite is useful for modulating both the basal and maximal levels of transcription of a nucleic acid over a wide dynamic range thus allowing the desired level of production of a transcript, can be used to express exogenous nucleic acids, including the nucleic acids of the present invention. Such promoters are described in U.S. patent application Ser. No. 10/032,393, filed Dec. 21, 2001, the disclosure of which is incorported herein by reference in its entirety.

[1117] In some other embodiments, vectors useful for the production of stabilized mRNA having an increased lifetime (including antisense RNA) in Gram negative organisms are described in U.S. Provisional Patent Application Serial No. 60/343,512, filed Dec. 21, 2001, the disclosure of which is incorporated herein by reference in its entirety. Briefly, the stabilized antisense RNA may comprise an antisense RNA which was identified as inhibiting proliferation as described above which has been engineered to contain at least one stem loop flanking each end of the antisense nucleic acid. In some embodiments, the at least one stem-loop structure formed at the 5′ end of the stabilized antisense nucleic acid comprises a flush, double stranded 5′ end. In some embodiments, one or more of the stem loops comprises a rho independent terminator. In additional embodiments, the stabilized antisense RNA lacks a ribosome binding site. In further embodiments, the stabilized RNA lacks sites which are cleaved by one or more RNAses, such as RNAse E or RNAse III. In some embodiments, the stabilized antisense RNA may be transcribed in a cell which the activity of at least one enzyme involved in RNA degradation has been reduced. For example, the activity of an enzyme such as RNase E, RNase II, RNase III, polynucleotide phosphorylase, and poly(A) polymerase, RNA helicase, enolase or an enzyme having similar functions may be reduced in the cell.

[1118] Alternatively, genes required for proliferation may be identified by replacing the natural promoter for the proliferation required gene with a regulatable promoter as described above. The growth of such strains under conditions in which the promoter is active or non-repressed is compared to the growth under conditions in which the promoter is inactive or repressed. If the strains fail to grow or grow at a substantially reduced rate under conditions in which the promoter is inactive or repressed but grow normally under conditions in which the promoter is active or non-repressed, then the gene which is operably linked to the regulatable promoter encodes a gene product required for proliferation. For example, proliferation-required genes and gene products identified using promoter replacement are described in U.S. patent application Ser. No. 09/948,993 (the disclosure of which is incorporated herein by reference in its entirety).

[1119] For example, in some embodiments, the natural promoter may be replaced using techniques which employ homologous recombination to exchange a promoter present on the chromosome of the cell with the desired promoter. In such methodology, a nucleic acid comprising a promoter replacement cassette is introduced into the cell. As illustrated in FIG. 1A, the promoter replacement cassette comprises a 5′ region homologous to the sequence which is 5′ of the natural promoter in the chromosome, the promoter which is to replace the chromosomal promoter and a 3′ region which is homologous to sequences 3′ of the natural promoter in the chromosome. In some embodiments, the promoter replacement cassette may also include a nucleic acid encoding an identifiable or selectable marker disposed between the 5′ region which is homologous to the sequence 5′ of the natural promoter and the promoter which is to replace the chromosomal promoter. If desired, the promoter replacement cassette may also contain a transcriptional terminator 3′ of the gene encoding an identifiable or selectable marker, as illustrated in FIG. 1B. As illustrated in FIGS. 1A and 1B, homologous recombination is allowed to occur between the chromosomal region containing the natural promoter and the promoter replacement cassette. Cells in which the promoter replacement cassette has integrated into the chromosome are identified or selected. To confirm that homologous recombination has occurred, the chromosomal structure of the cells may be verified by Southern analysis or PCR.

[1120] In some embodiments, the promoter replacement cassette may be introduced into the cell as a linear nucleic acid, such a PCR product or a restriction fragment. Alternatively, the promoter replacement may be introduced into the cell on a plasmid. FIGS. 1A and 1B illustrates the replacement of a chromosomal promoter with a desired promoter through homologous recombination.

[1121] In some embodiments, the cell into which the promoter replacement cassette is introduced may carry mutations which enhance its ability to be transformed with linear DNA or which enhance the frequency of homologous recombination. For example, if the cell is an Escherichia coli cell it may have a mutation in the gene encoding Exonuclease V of the RecBCD recombination complex. If the cell is an Escherichia coli cell it may have a mutation that activates the RecET recombinase of the Rae prophage and/or a mutation that enhances recombination through the RecF pathway. For example, the Escherichia coli cells may be RecB or RecC mutants carrying an sbcA or sbcB mutation. Alternatively, the Escherichia coli cells may be recD mutants. In other embodiments the Escherichia coli cells may express the λ Red recombination genes. For example, Escherichia coli cells suitable for use in techniques employing homologous recombination have been described in Datsenko, K. A. and Wanner, B. L., PNAS 97:6640-6645 (2000); Murphy, K. C., J. Bact 180: 2053-2071 (1998); Zhang, Y., et al., Nature Genetics 20: 123-128 (1998); and Muyrers, J. P. P. et al., Genes & Development 14: 1971-1982 (2000), the disclosures of which are incorporated herein by reference in their entireties. It will be appreciated that cells carrying mutations in similar genes may be constructed in organisms other than Escherichia coli.

[1122] In some embodiments of the present invention, a regulatable fusion promoter selected from a suite of fusion promoters, wherein the promoter suite is useful for modulating both the basal and maximal levels of transcription of a nucleic acid over a wide dynamic range thus allowing the desired level of production of a transcript, is with the promoter replacement methods described above. Such promoters are described in U.S. patent application Ser. No. 10/032,393, filed Dec. 21, 2001, the disclosure of which is incorported herein by reference in its entirety.

[1123] A variety of assays are contemplated to identify nucleic acid sequences that negatively impact growth upon expression. In one embodiment, growth in cultures expressing exogenous nucleic acid sequences and growth in cultures not expressing these sequences is compared. Growth measurements are assayed by examining the extent of growth by measuring optical densities. Alternatively, enzymatic assays can be used to measure bacterial growth rates to identify exogenous nucleic acid sequences of interest. Colony size, colony morphology, and cell morphology are additional factors used to evaluate growth of the host cells. Those cultures that fail to grow or grow at a reduced rate under expression conditions are identified as containing an expression vector encoding a nucleic acid fragment that negatively affects a proliferation-required gene.

[1124] Once exogenous nucleic acids of interest are identified, they are analyzed. The first step of the analysis is to acquire the nucleotide sequence of the nucleic acid fragment of interest. To achieve this end, the insert in those expression vectors identified as containing a nucleotide sequence of interest is sequenced, using standard techniques well known in the art. The next step of the process is to determine the source of the nucleotide sequence. As used herein “source” means the genomic region containing the cloned fragment.

[1125] Determination of the gene(s) corresponding to the nucleotide sequence is achieved by comparing the obtained sequence data with databases containing known protein and nucleotide sequences from various microorganisms. Thus, initial gene identification is made on the basis of significant sequence similarity or identity to either characterized or predicted Escherichia coli, Staphylococcus aureus, Enterococcus faecalis, Klebsiella pneumoniae, Pseudomonas aeruginosa, and Salmonella typhimurium genes or their encoded proteins and/or homologues in other species.

[1126] The number of nucleotide and protein sequences available in database systems has been growing exponentially for years. For example, the complete nucleotide sequences of Caenorhabditis elegans and several bacterial genomes, including E. coli, Aeropyrum pernix, Aquifex aeolicus, Archaeoglobus fulgidus, Bacillus subtilis, Borrelia burgdorferi, Chlamydia pneumoniae, Chlamydia trachomatis, Clostridium tetani, Corynebacterium diptheria, Deinococcus radiodurans, Haemophilus influenzae, Helicobacter pylori 26695, Helicobacter pylori J99, Methanobacterium thermoautotrophicum, Methanococcus jannaschii, Mycobacterium tuberculosis, Mycoplasma genitalium, Mycoplasma pneumoniae, Pseudomonas aeruginosa, Pyrococcus abyssi, Pyrococcus horikoshii, Rickettsia prowazekii, Synechocystis PCC6803, Thermotoga maritima, Treponema pallidum, Bordetella pertussis, Campylobacter jejuni, Clostridium acetobutylicum, Mycobacterium tuberculosis CSU#93, Neisseria gonorrhoeae, Neisseria meningitidis, Pseudomonas aeruginosa, Pyrobaculum aerophilum, Pyrococcus furiosus, Rhodobacter capsulatus, Salmonella typhimurium, Streptococcus mutans, Streptococcus pyogenes, Ureaplasma urealyticum and Vibrio cholera are available. This nucleotide sequence information is stored in a number of databanks, such as GenBank, the National Center for Biotechnology Information (NCBI), the Genome Sequencing Center (http://genome.wustl.edu/gsc/salmonella.shtml), and the Sanger Centre (http://www.sanger.ac.uk/projects/S_typhi) which are publicly available for searching.

[1127] A variety of computer programs are available to assist in the analysis of the sequences stored within these databases. FASTA, (W. R. Pearson (1990) “Rapid and Sensitive Sequence Comparison with FASTP and FASTA” Methods in Enzymology 183:63-98), Sequence Retrieval System (SRS), (Etzold & Argos, SRS an indexing and retrieval tool for flat file data libraries. Comput. Appl. Biosci. 9:49-57, 1993) are two examples of computer programs that can be used to analyze sequences of interest. In one embodiment of the present invention, the BLAST family of computer programs, which includes BLASTN version 2.0 with the default parameters, or BLASTX version 2.0 with the default parameters, is used to analyze nucleotide sequences.

[1128] BLAST, an acronym for “Basic Local Alignment Search Tool,” is a family of programs for database similarity searching. The BLAST family of programs includes: BLASTN, a nucleotide sequence database searching program, BLASTX, a protein database searching program where the input is a nucleic acid sequence; and BLASTP, a protein database searching program. BLAST programs embody a fast algorithm for sequence matching, rigorous statistical methods for judging the significance of matches, and various options for tailoring the program for special situations. Assistance in using the program can be obtained by e-mail at blast@ncbi.nlm.nih.gov. tBLASTX can be used to translate a nucleotide sequence in all three potential reading frames into an amino acid sequence.

[1129] Bacterial genes are often transcribed in polycistronic groups. These groups comprise operons, which are a collection of genes and intergenic sequences under common regulation. The genes of an operon are transcribed on the same mRNA and are often related functionally. Given the nature of the screening protocol, it is possible that the identified exogenous nucleic acid corresponds to a gene or portion thereof with or without adjacent noncoding sequences, an intragenic sequence (i.e. a sequence within a gene), an intergenic sequence (i.e. a sequence between genes), a nucleotide sequence spanning at least a portion of two or more genes, a 5′ noncoding region or a 3′ noncoding region located upstream or downstream from the actual nucleotide sequence that is required for bacterial proliferation. Accordingly, it is often desirable to determine which gene(s) that is encoded within the operon is individually required for proliferation.

[1130] In one embodiment of the present invention, an operon is identified and then dissected to determine which gene or genes are required for proliferation. Operons can be identified by a variety of means known to those in the art. For example, the RegulonDB DataBase described by Huerta et al. (Nucl. Acids Res. 26:55-59, 1998), which may also be found on the website http://www.cifn.unam.mx/Computational_Biology/regulondb/, the disclosures of which are incorporated herein by reference in their entireties, provides information about operons in Escherichia Coli. The Subtilist database (http://bioweb.pasteur.fr/GenoList/SubtiList), (Moszer, I., Glaser, P. and Danchin, A. (1995) Microbiology 141: 261-268 and Moszer, (1998) FEBS Letters 430: 28-36, the disclosures of which are incorporated herein in their entireties), may also be used to predict operons. This database lists genes from the fully sequenced, Gram positive bacteria, Bacillus subtilis, together with predicted promoters and terminator sites. This information can be used in conjunction with the Staphylococcus aureus genomic sequence data to predict operons and thus produce a list of the genes affected by the antisense nucleic acids of the present invention. The Pseudomonas aeruginosa web site (http://www.pseudomonas.com) can be used to help predict operon organization in this bacterium. The databases available from the Genome Sequencing Center (http://genome.wustl.edu/gsc/salmonella.shtml), and the Sanger Centre (http://www.sanger.ac.uk/projects/S_typhi) may be used to predict operons in Salmonella typhimurium. The TIGR microbial database has an incomplete version of the E. faecalis genome http://www.tigr.org/cgi-bin/BlastSearch/blast.cgi?organism=e_faecalis. One can take a nucleotide sequence and BLAST it for homologs.

[1131] A number of techniques that are well known in the art can be used to dissect the operon. Analysis of RNA transcripts by Northern blot or primer extension techniques are commonly used to analyze operon transcripts. In one aspect of this embodiment, gene disruption by homologous recombination is used to individually inactivate the genes of an operon that is thought to contain a gene required for proliferation.

[1132] Several gene disruption techniques have been described for the replacement of a functional gene with a mutated, non-functional (null) allele. These techniques generally involve the use of homologous recombination. One technique using homologous recombination in Staphylococcus aureus is described in Xia et al. 1999, Plasmid 42: 144-149, the disclosure of which is incorporated herein by reference in its entirety. This technique uses crossover PCR to create a null allele with an in-frame deletion of the coding region of a target gene. The null allele is constructed in such a way that nucleotide sequences adjacent to the wild type gene are retained. These homologous sequences surrounding the deletion null allele provide targets for homologous recombination so that the wild type gene on the Staphylococcus aureus chromosome can be replaced by the constructed null allele. This method can be used with other bacteria as well, including Salmonella and Klebsiella species. Similar gene disruption methods that employ the counter selectable marker sacB (Schweizer, H. P., Klassen, T. and Hoang, T. (1996) Mol. Biol. of Pseudomonas. ASM press, 229-237, the disclosure of which is incorporated herein by reference in its entirety) are available for Pseudomonas, Salmonella and Klebsiella species. E. faecalis genes can be disrupted by recombining in a non-replicating plasmid that contains an internal fragment to that gene (Leboeuf, C., L. Leblanc, Y. Auffray and A. Hartke. 2000. J. Bacteriol. 182:5799-5806, the disclosure of which is incorporated herein by reference in its entirety).

[1133] The crossover PCR amplification product is subcloned into a suitable vector having a selectable marker, such as a drug resistance marker. In some embodiments the vector may have an origin of replication which is functional in E. coli or another organism distinct from the organism in which homologous recombination is to occur, allowing the plasmid to be grown in E. coli or the organism other than that in which homologous recombination is to occur, but may lack an origin of replication functional in Escherichia coli, Staphylococcus aureus, Enterococcus faecalis, Klebsiella pneumoniae, Pseudomonas aeruginosa, Salmonella typhimurium, Acinetobacter baumannii, Bacillus anthracis, Bacteroides fragilis, Bordetella pertussis, Borrelia burgdorferi, Burkholderia cepacia, Burkholderia fungorum, Burkholderia mallei, Campylobacter jejuni, Chlamydia pneumoniae, Chlamydia trachomatis, Clostridium acetobutylicum, Clostridium botulinum, Clostridium difficile, Corynebacterium diptheriae, Enterobacter cloacae, Enterococcus faecium, Haemophilus influenzae, Helicobacter pylori, Legionella pneumophila, Listeria monocytogenes, Moraxella catarrhalis, Mycobacterium avium, Mycobacterium bovis, Mycobacterium leprae, Mycobacterium tuberculosis, Mycoplasma genitalium, Mycoplasma pneumoniae, Neisseria gonorrhoeae, Neisseria meningitidis, Pasteurella multocida, Proteus mirabilis, Pseudomonas putida, Pseudomonas syringae, Salmonella paratyphi, Salmonella typhi, Staphylococcus epidermidis, Staphylococcus haemolyticus, Streptococcus mutans, Streptococcus pneumoniae, Streptococcus pyogenes, Treponema pallidum, Ureaplasma urealyticum, Vibrio cholerae or Yersinia pestis such that selection of the selectable marker requires integration of the vector into the homologous region of the Escherichia coli, Staphylococcus aureus, Enterococcus faecalis, Klebsiella pneumoniae, Pseudomonas aeruginosa, Salmonella typhimurium, Acinetobacter baumannii, Bacillus anthracis, Bacteroides fragilis, Bordetella pertussis, Borrelia burgdorferi, Burkholderia cepacia, Burkholderia fungorum, Burkholderia mallei, Campylobacter jejuni, Chlamydia pneumoniae, Chlamydia trachomatis, Clostridium acetobutylicum, Clostridium botulinum, Clostridium difficile, Corynebacterium diptheriae, Enterobacter cloacae, Enterococcus faecium, Haemophilus influenzae, Helicobacter pylori, Legionella pneumophila, Listeria monocytogenes, Moraxella catarrhalis, Mycobacterium avium, Mycobacterium bovis, Mycobacterium leprae, Mycobacterium tuberculosis, Mycoplasma genitalium, Mycoplasma pneumoniae, Neisseria gonorrhoeae, Neisseria meningitidis, Pasteurella multocida, Proteus mirabilis, Pseudomonas putida, Pseudomonas syringae, Salmonella paratyphi, Salmonella typhi, Staphylococcus epidermidis, Staphylococcus haemolyticus, Streptococcus mutans, Streptococcus pneumoniae, Streptococcus pyogenes, Treponema pallidum, Ureaplasma urealyticum, Vibrio cholerae or Yersinia pestis chromosome. Usually a single crossover event is responsible for this integration event such that the Escherichia coli, Staphylococcus aureus, Enterococcus faecalis, Klebsiella pneumoniae, Pseudomonas aeruginosa, Salmonella typhimurium, Acinetobacter baumannii, Bacillus anthracis, Bacteroides fragilis, Bordetella pertussis, Borrelia burgdorferi, Burkholderia cepacia, Burkholderia fungorum, Burkholderia mallei, Campylobacter jejuni, Chlamydia pneumoniae, Chlamydia trachomatis, Clostridium acetobutylicum, Clostridium botulinum, Clostridium difficile, Corynebacterium diptheriae, Enterobacter cloacae, Enterococcus faecium, Haemophilus influenzae, Helicobacter pylori, Legionella pneumophila, Listeria monocytogenes, Moraxella catarrhalis, Mycobacterium avium, Mycobacterium bovis, Mycobacterium leprae, Mycobacterium tuberculosis, Mycoplasma genitalium, Mycoplasma pneumoniae, Neisseria gonorrhoeae, Neisseria meningitidis, Pasteurella multocida, Proteus mirabilis, Pseudomonas putida, Pseudomonas syringae, Salmonella paratyphi, Salmonella typhi, Staphylococcus epidermidis, Staphylococcus haemolyticus, Streptococcus mutans, Streptococcus pneumoniae, Streptococcus pyogenes, Treponema pallidum, Ureaplasma urealyticum, Vibrio cholera or Yersinia pestis chromosome now contains a tandem duplication of the target gene consisting of one wild type allele and one deletion null allele separated by vector sequence. Subsequent resolution of the duplication results in both removal of the vector sequence and either restoration of the wild type gene or replacement by the in-frame deletion. The latter outcome will not occur if the gene should prove essential. A more detailed description of this method is provided in Example 10 below. It will be appreciated that this method may be practiced with any of the nucleic acids or organisms described herein.

[1134] Recombinant DNA techniques can be used to express the entire coding sequences of the gene identified as required for proliferation, or portions thereof. The over-expressed proteins can be used as reagents for further study. The identified exogenous sequences are isolated, purified, and cloned into a suitable expression vector using methods well known in the art. If desired, the nucleic acids can contain the nucleotide sequences encoding a signal peptide to facilitate secretion of the expressed protein.

[1135] Expression of fragments of the bacterial genes identified as required for proliferation is also contemplated by the present invention. The fragments of the identified genes can encode a polypeptide comprising at least 5, at least 10, at least 15, at least 20, at least 25, at least 30, at least 35, at least 40, at least 45, at least 50, at least 55, at least 60, at least 65, at least 75, or more than 75 consecutive amino acids of a gene complementary to one of the identified sequences of the present invention. The nucleic acids inserted into the expression vectors can also contain endogenous sequences upstream and downstream of the coding sequence.

[1136] When expressing the encoded protein of the identified nucleic acid required for bacterial proliferation or a fragment thereof, the nucleic acid to be expressed is operably linked to a promoter in an expression vector using conventional cloning technology. The expression vector can be any of the bacterial, insect, yeast, or mammalian expression systems known in the art. Commercially available vectors and expression systems are available from a variety of suppliers including Genetics Institute (Cambridge, Mass.), Stratagene (La Jolla, Calif.), Promega (Madison, Wis.), and Invitrogen (San Diego, Calif.). If desired, to enhance expression and facilitate proper protein folding, the codon usage and codon bias of the sequence can be optimized for the particular expression organism in which the expression vector is introduced, as explained by Hatfield, et al., U.S. Pat. No. 5,082,767, incorporated herein by this reference. Fusion protein expression systems are also contemplated by the present invention.

[1137] Following expression of the protein encoded by the identified exogenous nucleic acid, the protein may be purified. Protein purification techniques are well known in the art. Proteins encoded and expressed from identified exogenous nucleic acids can be partially purified using precipitation techniques, such as precipitation with polyethylene glycol. Alternatively, epitope tagging of the protein can be used to allow simple one step purification of the protein. In addition, chromatographic methods such as ion-exchange chromatography, gel filtration, use of hydroxyapaptite columns, immobilized reactive dyes, chromatofocusing, and use of high-performance liquid chromatography, may also be used to purify the protein. Electrophoretic methods such as one-dimensional gel electrophoresis, high-resolution two-dimensional polyacrylamide electrophoresis, isoelectric focusing, and others are contemplated as purification methods. Also, affinity chromatographic methods, comprising antibody columns, ligand presenting columns and other affinity chromatographic matrices are contemplated as purification methods in the present invention.

[1138] The purified proteins produced from the gene encoding sequences identified as required for proliferation can be used in a variety of protocols to generate useful antimicrobial reagents. In one embodiment of the present invention, antibodies are generated against the proteins expressed from the identified exogenous nucleic acids. Both monoclonal and polyclonal antibodies can be generated against the expressed proteins. Methods for generating monoclonal and polyclonal antibodies are well known in the art. Also, antibody fragment preparations prepared from the produced antibodies discussed above are contemplated.

[1139] In addition, the purified protein, fragments thereof, or derivatives thereof may be administered to an individual in a pharmaceutically acceptable carrier to induce an immune response against the protein. Preferably, the immune response is a protective immune response which protects the individual. Methods for determining appropriate dosages of the protein and pharmaceutically acceptable carriers may be determined empiracally and are familiar to those skilled in the art.

[1140] Another application for the purified proteins of the present invention is to screen small molecule libraries for candidate compounds active against the various target proteins of the present invention. Advances in the field of combinatorial chemistry provide methods, well known in the art, to produce large numbers of candidate compounds that can have a binding, or otherwise inhibitory effect on a target protein. Accordingly, the screening of small molecule libraries for compounds with binding affinity or inhibitory activity for a target protein produced from an identified gene is contemplated by the present invention.

[1141] In some embodiments of the present invention, a cell sensitized by expressing an an antisense nucleic acid comprising a nucleotide sequence selected from the group consisting of SEQ ID NOs.: 1-6213, an antisense nucleic acid comprising at least 10, 15, 20, 25, 30, 35, 40, 50, 75, 100,150, 200, 300, 400, or 500 consecutive nucleotides of a nucleotide sequence selected from the group consisting of SEQ ID NOs.: 1-6213, a nucleic acid complementary to a nucleic acid comprising a nucleotide sequence selected from the group consisting of SEQ ID NOs.: 6214-42397, a nucleic acid complementary to a nucleic acid comprising at least 10, 15, 20, 25, 30, 35, 40, 50, 75, 100, 150, 200, 300, 400, or 500 consecutive nucleotides of a nucleotide sequence selected from the group consisting of SEQ ID NOs.: 6214-42397, a nucleic acid complementary to a nucleic acid which encodes a polypeptide comprising an amino acid sequence selected from the group consisting of SEQ ID NOs.: 42398-78581, a nucleic acid complementary to a nucleic acid which encodes at least 5, 10, 15, 20, 25, 30, 35, 40, 50, 75, 100, or 150 consecutive amino acids of a polypeptide sequence selected from the group consisting of SEQ ID NOs.: 42398-78581, a homologous antisense nucleic acid, an antisense nucleic acid comprising at least 10, 15, 20, 25, 30, 35, 40, 50, 75, 100, 150, 200, 300, 400, or 500 consecutive nucleotides of a homologous nucleic acid, a nucleic acid complementary to a homologous coding nucleic acid, a nucleic acid complementary to at least 10, 15, 20, 25, 30, 35, 40, 50, 75, 100, 150, 200, 300, 400, or 500 consecutive nucleotides of a homologous coding nucleic acid, a nucleic acid complementary to a nucleic acid which encodes a homologous polypeptide, or a nucleic acid complementary to a nucleic acid which encodes at least 5, 10, 15, 20, 25, 30, 35, 40, 50, 75, 100, or 150 consecutive amino acids of a homologous polypeptide, is contacted with one or more candidate compounds from a small molecule library. Candidate compounds which further inhibit the proliferation of the sensitized cell may be identified as possessing inhibitory activity for a target protein or product produced by the gene to which the antisense sequence is complementary.

[1142] A number of vectors useful in the above methods are described in U.S. patent application Ser. No. 10/032,393, filed Dec. 21, 2001, the disclosure of which is incorporated herein by reference in its entirety.

[1143] In some embodiments of the present invention, the methods for the production of stabilized RNA, as described in U.S. patent application Ser. No. 60/343,512, the disclosure of which is incorporated herein by reference in its entirety, can be used for the production of a stabilized transcript, which corresponds to a nucleic acid described herein, having an increased lifetime in Gram-negative organisms. Briefly, the stabilized antisense RNA may comprise an antisense RNA which was identified as inhibiting proliferation as described above which has been engineered to contain at least one stem loop flanking each end of the antisense nucleic acid. In some embodiments, the at least one stem-loop structure formed at the 5′ end of the stabilized antisense nucleic acid comprises a flush, double stranded 5′ end. In some embodiments, one or more of the stem loops comprises a rho independent terminator. In additional embodiments, the stabilized antisense RNA lacks a ribosome binding site. In further embodiments, the stabilized RNA lacks sites which are cleaved by one or more RNAses, such as RNAse E or RNAse III. In some embodiments, the stabilized antisense RNA may be transcribed in a cell which the activity of at least one enzyme involved in RNA degradation has been reduced. For example, the activity of an enzyme such as RNase E, RNase II, RNase III, polynucleotide phosphorylase, and poly(A) polymerase, RNA helicase, enolase or an enzyme having similar functions may be reduced in the cell.

[1144] The present invention further contemplates utility against a variety of other pathogenic microorganisms in addition to Escherichia coli, Staphylococcus aureus, Enterococcus faecalis, Klebsiella pneumoniae, Pseudomonas aeruginosa, Salmonella typhimurium, Acinetobacter baumannii, Bacillus anthracis, Bacteroides fragilis, Bordetella pertussis, Borrelia burgdorferi, Burkholderia cepacia, Burkholderia fungorum, Burkholderia mallei, Campylobacter jejuni, Chlamydia pneumoniae, Chlamydia trachomatis, Clostridium acetobutylicum, Clostridium botulinum, Clostridium difficile, Corynebacterium diptheriae, Enterobacter cloacae, Enterococcus faecium, Haemophilus influenzae, Helicobacter pylori, Legionella pneumophila, Listeria monocytogenes, Moraxella catarrhalis, Mycobacterium avium, Mycobacterium bovis, Mycobacterium leprae, Mycobacterium tuberculosis, Mycoplasma genitalium, Mycoplasma pneumoniae, Neisseria gonorrhoeae, Neisseria meningitidis, Pasteurella multocida, Proteus mirabilis, Pseudomonas putida, Pseudomonas syringae, Salmonella paratyphi, Salmonella typhi, Staphylococcus epidermidis, Staphylococcus haemolyticus, Streptococcus mutans, Streptococcus pneumoniae, Streptococcus pyogenes, Treponema pallidum, Ureaplasma urealyticum, Vibrio cholerae and Yersinia pestis. For example, homologous coding nucleic acids, homologous antisense nucleic acids or homologous polypeptides from other pathogenic microorganisms (including nucleic acids homologous to the nucleic acids of SEQ ID NOs.: 6214-42397, nucleic acids homologous to the antisense nucleic acids of SEQ ID NOs.: 1-6213, and polypeptides homologous to the polypeptides of SEQ ID NOs.: 42398-78581) may be identified using methods such as those described herein. The homologous coding nucleic acids, homologous antisense nucleic acids or homologous polypeptides may be used to identify compounds which inhibit the proliferation of these other pathogenic microorganisms using methods such as those described herein.

[1145] For example, the proliferation-required nucleic acids, antisense nucleic acids, and polypeptides from Escherichia coli, Staphylococcus aureus, Enterococcus faecalis, Klebsiella pneumoniae, Pseudomonas aeruginosa, Salmonella typhimurium, Acinetobacter baumannii, Bacillus anthracis, Bacteroides fragilis, Bordetella pertussis, Borrelia burgdorferi, Burkholderia cepacia, Burkholderia fungorum, Burkholderia mallei, Campylobacter jejuni, Chlamydia pneumoniae, Chlamydia trachomatis, Clostridium acetobutylicum, Clostridium botulinum, Clostridium difficile, Corynebacterium diptheriae, Enterobacter cloacae, Enterococcus faecium, Haemophilus influenzae, Helicobacter pylori, Legionella pneumophila, Listeria monocytogenes, Moraxella catarrhalis, Mycobacterium avium, Mycobacterium bovis, Mycobacterium leprae, Mycobacterium tuberculosis, Mycoplasma genitalium, Mycoplasma pneumoniae, Neisseria gonorrhoeae, Neisseria meningitidis, Pasteurella multocida, Proteus mirabilis, Pseudomonas putida, Pseudomonas syringae, Salmonella paratyphi, Salmonella typhi, Staphylococcus epidermidis, Staphylococcus haemolyticus, Streptococcus mutans, Streptococcus pneumoniae, Streptococcus pyogenes, Treponema pallidum, Ureaplasma urealyticum, Vibrio cholerae or Yersinia pestis described herein (including the nucleic acids of SEQ ID NOs.: 6214-42397, the antisense nucleic acids of SEQ ID NOs: 1-6213, and the polypeptides of SEQ ID NOs.: 42398-78581) may be used to identify homologous coding nucleic acids, homologous antisense nucleic acids or homologous polypeptides required for proliferation in prokaryotes and eukaryotes. For example, nucleic acids or polypeptides required for the proliferation of protists, such as Plasmodium spp.; plants; animals, such as Entamoeba spp. and Contracaecum spp; and fungi including Candida spp., (e.g., Candida albicans), Cryptococcus neoformans, and Aspergillus fumigatus may be identified. In one embodiment of the present invention, monera, specifically bacteria, including both Gram positive and Gram negative bacteria, are probed in search of novel gene sequences required for proliferation. Likewise, homologous antisense nucleic acids which may be used to inhibit growth of these organisms or to identify antibiotics may also be identified. These embodiments are particularly important given the rise of drug resistant bacteria.

[1146] The number of bacterial species that are becoming resistant to existing antibiotics is growing. A partial list of these microorganisms includes: Escherichia spp., such as E. coli, Enterococcus spp, such as E. faecalis; Pseudomonas spp., such as P. aeruginosa, Clostridium spp., such as C. botulinum, Haemophilus spp., such as H. influenzae, Enterobacter spp., such as E. cloacae, Vibrio spp., such as V. cholera; Moraxala spp., such as M. catarrhalis; Streptococcus spp., such as S. pneumoniae, Neisseria spp., such as N. gonorrhoeae; Mycoplasma spp., such as Mycoplasma pneumoniae; Salmonella typhimurium; Helicobacter pylori; Escherichia coli; and Mycobacterium tuberculosis. The genes and polypeptides identified as required for the proliferation of Escherichia coli, Staphylococcus aureus, Enterococcus faecalis, Klebsiella pneumoniae, Pseudomonas aeruginosa, Salmonella typhimurium, Acinetobacter baumannii, Bacillus anthracis, Bacteroides fragilis, Bordetella pertussis, Borrelia burgdorferi, Burkholderia cepacia, Burkholderia fungorum, Burkholderia mallei, Campylobacter jejuni, Chlamydia pneumoniae, Chlamydia trachomatis, Clostridium acetobutylicum, Clostridium botulinum, Clostridium difficile, Corynebacterium diptheriae, Enterobacter cloacae, Enterococcus faecium, Haemophilus influenzae, Helicobacter pylori, Legionella pneumophila, Listeria monocytogenes, Moraxella catarrhalis, Mycobacterium avium, Mycobacterium bovis, Mycobacterium leprae, Mycobacterium tuberculosis, Mycoplasma genitalium, Mycoplasma pneumoniae, Neisseria gonorrhoeae, Neisseria meningitidis, Pasteurella multocida, Proteus mirabilis, Pseudomonas putida, Pseudomonas syringae, Salmonella paratyphi, Salmonella typhi, Staphylococcus epidermidis, Staphylococcus haemolyticus, Streptococcus mutans, Streptococcus pneumoniae, Streptococcus pyogenes, Treponema pallidum, Ureaplasma urealyticum, Vibrio cholerae or Yersinia pestis (including the nucleic acids of SEQ ID NOs.: 6214-42397, the sequences complementary to the nucleic acids of SEQ ID NOs.: 6214-42397, and the polypeptides of SEQ ID NOs.: 42398-78581) can be used to identify homologous coding nucleic acids or homologous polypeptides required for proliferation from these and other organisms using methods such as nucleic acid hybridization and computer database analysis. Likewise, the antisense nucleic acids which inhibit proliferation of Escherichia coli, Staphylococcus aureus, Enterococcus faecalis, Klebsiella pneumoniae, Pseudomonas aeruginosa, Salmonella typhimurium, Acinetobacter baumannii, Bacillus anthracis, Bacteroides fragilis, Bordetella pertussis, Borrelia burgdorferi, Burkholderia cepacia, Burkholderia fungorum, Burkholderia mallei, Campylobacter jejuni, Chlamydia pneumoniae, Chlamydia trachomatis, Clostridium acetobutylicum, Clostridium botulinum, Clostridium difficile, Corynebacterium diptheriae, Enterobacter cloacae, Enterococcus faecium, Haemophilus influenzae, Helicobacter pylori, Legionella pneumophila, Listeria monocytogenes, Moraxella catarrhalis, Mycobacterium avium, Mycobacterium bovis, Mycobacterium leprae, Mycobacterium tuberculosis, Mycoplasma genitalium, Mycoplasma pneumoniae, Neisseria gonorrhoeae, Neisseria meningitidis, Pasteurella multocida, Proteus mirabilis, Pseudomonas putida, Pseudomonas syringae, Salmonella paratyphi, Salmonella typhi, Staphylococcus epidermidis, Staphylococcus haemolyticus, Streptococcus mutans, Streptococcus pneumoniae, Streptococcus pyogenes, Treponema pallidum, Ureaplasma urealyticum, Vibrio cholerae or Yersinia pestis (including the antisense nucleic acids of SEQ ID NOs.: 1-6213 or the sequences complementary thereto) may also be used to identify antisense nucleic acids which inhibit proliferation of these and other microorganisms or cells using nucleic acid hybridization or computer database analysis.

[1147] In one embodiment of the present invention, the nucleic acid sequences from Escherichia coli, Staphylococcus aureus, Enterococcus faecalis, Klebsiella pneumoniae, Pseudomonas aeruginosa, Salmonella typhimurium, Acinetobacter baumannii, Bacillus anthracis, Bacteroides fragilis, Bordetella pertussis, Borrelia burgdorferi, Burkholderia cepacia, Burkholderia fungorum, Burkholderia mallei, Campylobacter jejuni, Chlamydia pneumoniae, Chlamydia trachomatis, Clostridium acetobutylicum, Clostridium botulinum, Clostridium difficile, Corynebacterium diptheriae, Enterobacter cloacae, Enterococcus faecium, Haemophilus influenzae, Helicobacter pylori, Legionella pneumophila, Listeria monocytogenes, Moraxella catarrhalis, Mycobacterium avium, Mycobacterium bovis, Mycobacterium leprae, Mycobacterium tuberculosis, Mycoplasma genitalium, Mycoplasma pneumoniae, Neisseria gonorrhoeae, Neisseria meningitidis, Pasteurella multocida, Proteus mirabilis, Pseudomonas putida, Pseudomonas syringae, Salmonella paratyphi, Salmonella typhi, Staphylococcus epidermidis, Staphylococcus haemolyticus, Streptococcus mutans, Streptococcus pneumoniae, Streptococcus pyogenes, Treponema pallidum, Ureaplasma urealyticum, Vibrio cholerae or Yersinia pestis (including the nucleic acids of SEQ ID NOs.: 6214-42397 and the antisense nucleic acids of SEQ ID NOs. 1-6213) are used to screen genomic libraries generated from Escherichia coli, Staphylococcus aureus, Enterococcus faecalis, Klebsiella pneumoniae, Pseudomonas aeruginosa, Salmonella typhimurium, Acinetobacter baumannii, Bacillus anthracis, Bacteroides fragilis, Bordetella pertussis, Borrelia burgdorferi, Burkholderia cepacia, Burkholderia fungorum, Burkholderia mallei, Campylobacter jejuni, Chlamydia pneumoniae, Chlamydia trachomatis, Clostridium acetobutylicum, Clostridium botulinum, Clostridium difficile, Corynebacterium diptheriae, Enterobacter cloacae, Enterococcus faecium, Haemophilus influenzae, Helicobacter pylori, Legionella pneumophila, Listeria monocytogenes, Moraxella catarrhalis, Mycobacterium avium, Mycobacterium bovis, Mycobacterium leprae, Mycobacterium tuberculosis, Mycoplasma genitalium, Mycoplasma pneumoniae, Neisseria gonorrhoeae, Neisseria meningitidis, Pasteurella multocida, Proteus mirabilis, Pseudomonas putida, Pseudomonas syringae, Salmonella paratyphi, Salmonella typhi, Staphylococcus epidermidis, Staphylococcus haemolyticus, Streptococcus mutans, Streptococcus pneumoniae, Streptococcus pyogenes, Treponema pallidum, Ureaplasma urealyticum, Vibrio cholerae, Yersinia pestis and other bacterial species of interest. For example, the genomic library may be from Gram positive bacteria, Gram negative bacteria or other organisms including Acinetobacter baumannii, Anaplasma marginale, Aspergillus fumigatus, Bacillus anthracis, Bacteroides fragilis, Bordetella pertussis, Borrelia burgdorferi, Burkholderia cepacia, Burkholderia fungorum, Burkholderia mallei, Campylobacter jejuni, Candida albicans, Candida glabrata (also called Torulopsis glabrata), Candida tropicalis, Candida parapsilosis, Candida guilliermondii, Candida krusei, Candida kefyr (also called Candida pseudotropicalis), Candida dubliniensis, Chlamydia pneumoniae, Chlamydia trachomatis, Clostridium acetobutylicum, Clostridium botulinum, Clostridium difficile, Clostridium perfringens, Coccidioides immitis, Corynebacterium diptheriae, Cryptococcus neoformans, Enterobacter cloacae, Enterococcus faecalis, Enterococcus faecium, Escherichia coli, Haemophilus influenzae, Helicobacter pylori, Histoplasma capsulatum, Klebsiella pneumoniae, Legionella pneumophila, Listeria monocytogenes, Moraxella catarrhalis, Mycobacterium avium, Mycobacterium bovis, Mycobacterium leprae, Mycobacterium tuberculosis, Mycoplasma genitalium, Mycoplasma pneumoniae, Neisseria gonorrhoeae, Neisseria meningitidis, Nocardia asteroides, Pasteurella haemolytica, Pasteurella multocida, Pneumocystis carinii, Proteus mirabilis, Proteus vulgaris, Pseudomonas aeruginosa, Pseudomonas putida, Pseudomonas syringae, Salmonella bongori, Salmonella cholerasuis, Salmonella enterica, Salmonella paratyphi, Salmonella typhi, Salmonella typhimurium, Shigella boydii, Shigella dysenteriae, Shigella flexneri, Shigella sonnei, Staphylococcus aureus, Staphylococcus epidermidis, Staphylococcus haemolyticus, Streptococcus pneumoniae, Streptococcus mutans, Streptococcus pyogenes, Treponema pallidum, Ureaplasma urealyticum, Vibrio cholerae, Vibrio parahaemolyticus, Vibrio vulnificans, Yersinia enterocolitica, Yersinia pestis or any species falling within the genera of any of the above species, including coagulase negative species of Staphylococcus. In some embodiments, the genomic library may be from an organism other than E. coli. Standard molecular biology techniques are used to generate genomic libraries from various cells or microorganisms. In one aspect, the libraries are generated and bound to nitrocellulose paper. The identified exogenous nucleic acid sequences of the present invention can then be used as probes to screen the libraries for homologous sequences.

[1148] For example, the libraries may be screened to identify homologous coding nucleic acids or homologous antisense nucleic acids comprising nucleotide sequences which hybridize under stringent conditions to a nucleic acid selected from the group consisting of SEQ ID NOs.: 1-6213, nucleic acids comprising nucleotide sequences which hybridize under stringent conditions to a fragment comprising at least 10, 15, 20, 25, 30, 35, 40, 50, 75, 100, 150, 200, 300, 400, or 500 consecutive nucleotides of one of SEQ ID NOs. 1-6213, nucleic acids comprising nucleotide sequences which hybridize under stringent conditions to a nucleic acid complementary to one of SEQ ID NOs. 1-6213, nucleic acids comprising nucleotide sequences which hybridize under stringent conditions to a fragment comprising at least 10, 15, 20, 25, 30, 35, 40, 50, 75, 100, 150, 200, 300, 400, or 500 consecutive nucleotides of the sequence complementary to one of SEQ ID NOs. 1-6213, nucleic acids comprising nucleotide sequences which hybridize under stringent conditions to a nucleic acid selected from the group consisting of SEQ ID NOS.: 6214-42397, nucleic acids comprising nucleotide sequences which hybridize under stringent conditions to a fragment comprising at least 10, 15, 20, 25, 30, 35, 40, 50, 75, 100, 150, 200, 300,400, or 500 consecutive nucleotides of one of SEQ ID NOS.: 6214-42397, nucleic acids comprising nucleotide sequences which hybridize under stringent conditions to a nucleic acid complementary to one of SEQ ID NOS.: 6214-42397, nucleic acids comprising nucleotide sequences which hybridize under stringent conditions to a fragment comprising at least 10, 15, 20, 25, 30, 35, 40, 50, 75, 100, 150, 200, 300, 400, or 500 consecutive nucleotides of the sequence complementary to one of SEQ ID NOS.: 6214-42397.

[1149] The libraries may also be screened to identify homologous nucleic coding nucleic acids or homologous antisense nucleic acids comprising nucleotide sequences which hybridize under moderate conditions to a nucleic acid selected from the group consisting of SEQ ID NOs.: 1-6213, nucleic acids comprising nucleotide sequences which hybridize under moderate conditions to a fragment comprising at least 10, 15, 20, 25, 30, 35, 40, 50, 75, 100, 150, 200, 300, 400, or 500 consecutive nucleotides of one of SEQ ID NOs. 1-6213, nucleic acids comprising nucleotide sequences which hybridize under moderate conditions to a nucleic acid complementary to one of SEQ ID NOs. 1-6213, nucleic acids comprising nucleotide sequences which hybridize under moderate conditions to a fragment comprising at least 10, 15, 20, 25, 30, 35, 40, 50, 75, 100, 150, 200, 300, 400, or 500 consecutive nucleotides of the sequence complementary to one of SEQ ID NOs. 1-6213, nucleic acids comprising nucleotide sequences which hybridize under moderate conditions to a nucleic acid selected from the group consisting of SEQ ID NOS.: 6214-42397, nucleic acids comprising nucleic acid sequences which hybridize under moderate conditions to a fragment comprising at least 10, 15, 20, 25, 30, 35, 40, 50, 75, 100, 150, 200, 300, 400, or 500 consecutive nucleotides of one of SEQ ID NOS.: 6214-42397, nucleic acids comprising nucleotide sequences which hybridize under moderate conditions to a nucleic acid complementary to one of SEQ ID NOS.: 6214-42397 and nucleic acids comprising nucleotide sequences which hybridize under moderate conditions to a fragment comprising at least 10, 15, 20, 25, 30, 35, 40, 50, 75, 100, 150, 200, 300, 400, or 500 consecutive nucleotides of the sequence complementary to one of SEQ ID NOS.: 6214-42397.

[1150] The homologous coding nucleic acids, homologous antisense nucleic acids or homologous polypeptides identified as above can then be used as targets or tools for the identification of new, antimicrobial compounds using methods such as those described herein. In some embodiments, the homologous coding nucleic acids, homologous antisense nucleic acids, or homologous polypeptides may be used to identify compounds with activity against more than one microorganism. [Placeholder]

[1151] For example, the preceding methods may be used to isolate homologous coding nucleic acids or homologous antisense nucleic acids comprising a nucleotide sequence with at least 97%, at least 95%, at least 90%, at least 85%, at least 80%, or at least 70% nucleotide sequence identity to a nucleotide sequence selected from the group consisting of one of the sequences of SEQ ID NOS. 1-6213, fragments comprising at least 10, 15, 20, 25, 30, 35, 40, 50, 75, 100, 150, 200, 300, 400, or 500 consecutive nucleotides thereof, and the sequences complementary thereto. The preceding methods may also be used to isolate homologous coding nucleic acids or homologous antisense nucleic acids comprising a nucleotide sequence with at least 97%, at least 95%, at least 90%, at least 85%, at least 80%, or at least 70% nucleotide sequence identity to a nucleotide sequence selected from the group consisting of one of the nucleotide sequences of SEQ ID NOS.: 6214-42397, fragments comprising at least 10, 15, 20, 25, 30, 35, 40, 50, 75, 100, 150, 200, 300, 400, or 500 consecutive nucleotides thereof, and the sequences complementary thereto. Identity may be measured using BLASTN version 2.0 with the default parameters. (Altschul, S. F. et al. Gapped BLAST and PSI-BLAST: A New Generation of Protein Database Search Programs, Nucleic Acid Res. 25: 3389-3402 (1997), the disclosure of which is incorporated herein by reference in its entirety). For example, the homologous polynucleotides may comprise a coding sequence which is a naturally occurring allelic variant of one of the coding sequences described herein. Such allelic variants may have a substitution, deletion or addition of one or more nucleotides when compared to the nucleic acids of SEQ ID NOs: 1-6213, SEQ ID NOS.: 6214-42397 or the nucleotide sequences complementary thereto.

[1152] Additionally, the above procedures may be used to isolate homologous coding nucleic acids which encode polypeptides having at least 99%, at least 95%, at least 90%, at least 85%, at least 80%, at least 70%, at least 60%, at least 50%, at least 40% or at least 25% amino acid identity or similarity to a polypeptide comprising the sequence of one of SEQ ID NOs: 42398-78581 or to a polypeptpide whose expression is inhibited by a nucleic acid of one of SEQ ID NOs: 1-6213 or fragmnents comprising at least 5, 10, 15, 20, 25, 30, 35, 40, 50, 75, 100, or 150 consecutive amino acids thereof as determined using the FASTA version 3.0t78 algorithm with the default parameters. Alternatively, protein identity or similarity may be identified using BLASTP with the default parameters, BLASTX with the default parameters, or TBLASTN with the default parameters. (Altschul, S. F. et al. Gapped BLAST and PSI-BLAST: A New Generation of Protein Database Search Programs, Nucleic Acid Res. 25: 3389-3402 (1997), the disclosure of which is incorporated herein by reference in its entirety).

[1153] Alternatively, homologous coding nucleic acids, homologous antisense nucleic acids or homologous polypeptides may be identified by searching a database to identify sequences having a desired level of nucleotide or amino acid sequence homology to a nucleic acid or polypeptide involved in proliferation or an antisense nucleic acid to a nucleic acid involved in microbial proliferation. A variety of such databases are available to those skilled in the art, including GenBank and GenSeq. In some embodiments, the databases are screened to identify nucleic acids with at least 97%, at least 95%, at least 90%, at least 85%, at least 80%, or at least 70% nucleotide sequence identity to a nucleic acid required for proliferation, an antisense nucleic acid which inhibits proliferation, or a portion of a nucleic acid required for proliferation or a portion of an antisense nucleic acid which inhibits proliferation. For example, homologous coding sequences may be identified by using a database to identify nucleic acids homologous to one of SEQ ID Nos. 1-6213, homologous to fragments comprising at least 10, 15, 20, 25, 30, 35, 40, 50, 75, 100, 150, 200, 300, 400, or 500 consecutive nucleotides thereof, nucleic acids homologous to one of SEQ ID NOS.: 6214-42397, homologous to fragments comprising at least 10, 15, 20, 25, 30, 35, 40, 50, 75, 100, 150, 200, 300, 400, or 500 consecutive nucleotides of one of SEQ ID NOS.: 6214-42397, nucleic acids homologous to one of SEQ ID Nos. 1-6213, homologous to fragments comprising at least 10, 15, 20, 25, 30, 35, 40, 50, 75, 100, 150, 200, 300, 400, or 500 consecutive nucleotides thereof or nucleic acids homologous to the sequences complementary to any of the preceding nucleic acids. In other embodiments, the databases are screened to identify polypeptides having at least 99%, at least 95%, at least 90%, at least 85%, at least 80%, at least 70%, at least 60%, at least 50%, at least 40% or at least 25% amino acid sequence identity or similarity to a polypeptide involved in proliferation or a portion thereof. For example, the database may be screened to identify polypeptides homologous to a polypeptide comprising one of SEQ ID NOs: 42398-78581, a polypeptide whose expression is inhibited by a nucleic acid of one of SEQ ID NOs: 1-6213 or homologous to fragments comprising at least 5, 10, 15, 20, 25, 30, 35, 40, 50, 75, 100, or 150 consecutive amino acids of any of the preceding polypeptides. In some embodiments, the database may be screened to identify homologous coding nucleic acids, homologous antisense nucleic acids or homologous polypeptides from cells or microorganisms other than the Escherichia coli, Staphylococcus aureus, Enterococcus faecalis, Klebsiella pneumoniae, Pseudomonas aeruginosa, Salmonella typhimurium, Acinetobacter baumannii, Bacillus anthracis, Bacteroides fragilis, Bordetella pertussis, Borrelia burgdorferi, Burkholderia cepacia, Burkholderia fungorum, Burkholderia mallei, Campylobacter jejuni, Chlamydia pneumoniae, Chlamydia trachomatis, Clostridium acetobutylicum, Clostridium botulinum, Clostridium difficile, Corynebacterium diptheriae, Enterobacter cloacae, Enterococcus faecium, Haemophilus influenzae, Helicobacter pylori, Legionella pneumophila, Listeria monocytogenes, Moraxella catarrhalis, Mycobacterium avium, Mycobacterium bovis, Mycobacterium leprae, Mycobacterium tuberculosis, Mycoplasma genitalium, Mycoplasma pneumoniae, Neisseria gonorrhoeae, Neisseria meningitidis, Pasteurella multocida, Proteus mirabilis, Pseudomonas putida, Pseudomonas syringae, Salmonella paratyphi, Salmonella typhi, Staphylococcus epidermidis, Staphylococcus haemolyticus, Streptococcus mutans, Streptococcus pneumoniae, Streptococcus pyogenes, Treponema pallidum, Ureaplasma urealyticum, Vibrio cholerae or Yersinia pestis species from which they were obtained. For example the database may be screened to identify homologous coding nucleic acids, homologous antisense nucleic acids or homologous polypeptides from microorganisms such as Acinetobacter baumannii, Anaplasma marginale, Aspergillus fumigatus, Bacillus anthracis, Bacteroides fragilis, Bordetella pertussis, Borrelia burgdorferi, Burkholderia cepacia, Burkholderia fungorum, Burkholderia mallei, Campylobacter jejuni, Candida albicans, Candida glabrata (also called Torulopsis glabrata), Candida tropicalis, Candida parapsilosis, Candida guilliermondii, Candida krusei, Candida kefyr (also called Candida pseudotropicalis), Candida dubliniensis, Chlamydia pneumoniae, Chlamydia trachomatis, Clostridium acetobutylicum, Clostridium botulinum, Clostridium difficile, Clostridium perfringens, Coccidioides immitis, Corynebacterium diptheriae, Cryptococcus neoformans, Enterobacter cloacae, Enterococcus faecalis, Enterococcus faecium, Escherichia coli, Haemophilus influenzae, Helicobacter pylori, Histoplasma capsulatum, Klebsiella pneumoniae, Legionella pneumophila, Listeria monocytogenes, Moraxella catarrhalis, Mycobacterium avium, Mycobacterium bovis, Mycobacterium leprae, Mycobacterium tuberculosis, Mycoplasma genitalium, Mycoplasma pneumoniae, Neisseria gonorrhoeae, Neisseria meningitidis, Nocardia asteroides, Pasteurella haemolytica, Pasteurella multocida, Pneumocystis carinii, Proteus mirabilis, Proteus vulgaris, Pseudomonas aeruginosa, Pseudomonas putida, Pseudomonas syringae, Salmonella bongori, Salmonella cholerasuis, Salmonella enterica, Salmonella paratyphi, Salmonella typhi, Salmonella typhimurium, Shigella boydii, Shigella dysenteriae, Shigella flexneri, Shigella sonnei, Staphylococcus aureus, Staphylococcus epidermidis, Staphylococcus haemolyticus, Streptococcus pneumoniae, Streptococcus mutans, Streptococcus pyogenes, Treponema pallidum, Ureaplasma urealyticum, Vibrio cholerae, Vibrio parahaemolyticus, Vibrio vulnificans, Yersinia enterocolitica, Yersinia pestis or any species falling within the genera of any of the above species, including coagulase negative Staphylococcus. In some embodiments, the homologous coding nucleic acids, homologous antisense nucleic acids, or homologous polypeptides are from an organism other than E. coli.

[1154] In another embodiment, gene expression arrays and microarrays can be employed. Gene expression arrays are high density arrays of DNA samples deposited at specific locations on a glass chip, nylon membrane, or the like. Such arrays can be used by researchers to quantify relative gene expression under different conditions. Gene expression arrays are used by researchers to help identify optimal drug targets, profile new compounds, and determine disease pathways. An example of this technology is found in U.S. Pat. No. 5,807,522, the disclousre of which is incorporated herein by reference in its entirety.

[1155] It is possible to study the expression of all genes in the genome of a particular microbial organism using a single array. For example, the arrays may consist of 12×24 cm nylon filters containing PCR products corresponding to ORFs from Escherichia coli, Staphylococcus aureus, Enterococcus faecalis, Klebsiella pneumoniae, Pseudomonas aeruginosa, Salmonella typhimurium, Acinetobacter baumannii, Bacillus anthracis, Bacteroides fragilis, Bordetella pertussis, Borrelia burgdorferi, Burkholderia cepacia, Burkholderia fungorum, Burkholderia mallei, Campylobacter jejuni, Chlamydia pneumoniae, Chlamydia trachomatis, Clostridium acetobutylicum, Clostridium botulinum, Clostridium difficile, Corynebacterium diptheriae, Enterobacter cloacae, Enterococcus faecium, Haemophilus influenzae, Helicobacter pylori, Legionella pneumophila, Listeria monocytogenes, Moraxella catarrhalis, Mycobacterium avium, Mycobacterium bovis, Mycobacterium leprae, Mycobacterium tuberculosis, Mycoplasma genitalium, Mycoplasma pneumoniae, Neisseria gonorrhoeae, Neisseria meningitidis, Pasteurella multocida, Proteus mirabilis, Pseudomonas putida, Pseudomonas syringae, Salmonella paratyphi, Salmonella typhi, Staphylococcus epidermidis, Staphylococcus haemolyticus, Streptococcus mutans, Streptococcus pneumoniae, Streptococcus pyogenes, Treponema pallidum, Ureaplasma urealyticum, Vibrio cholerae or Yersinia pestis (including the nucleic acids of SEQ ID NOs.: 6214-42397). 10 ngs of each PCR product are spotted every 1.5 mm on the filter. Single stranded labeled cDNAs are prepared for hybridization to the array (no second strand synthesis or amplification step is done) and placed in contact with the filter. Thus the labeled cDNAs are of “antisense” orientation. Quantitative analysis is done by phosphorimager.

[1156] Hybridization of cDNA made from a sample of total cell mRNA to such an array followed by detection of binding by one or more of various techniques known to those in the art results in a signal at each location on the array to which cDNA hybridized. The intensity of the hybridization signal obtained at each location in the array thus reflects the amount of mRNA for that specific gene that was present in the sample. Comparing the results obtained for mRNA isolated from cells grown under different conditions thus allows for a comparison of the relative amount of expression of each individual gene during growth under the different conditions.

[1157] Gene expression arrays may be used to analyze the total mRNA expression pattern at various time points after induction of an antisense nucleic acid complementary to a proliferation-required gene. Analysis of the expression pattern indicated by hybridization to the array provides information on other genes whose expression is influenced by antisense expression. For example, if the antisense is complementary to a gene for ribosomal protein L7/L12 in the 50S subunit, levels of other mRNAs may be observed to increase, decrease or stay the same following expression of antisense to the L7/L12 gene. If the antisense is complementary to a different 50S subunit ribosomal protein mRNA (e.g. L25), a different mRNA expression pattern may result. Thus, the mRNA expression pattern observed following expression of an antisense nucleic acid comprising a nucleotide sequence complementary to a proliferation required gene may identify other proliferation-required nucleic acids. In addition, the mRNA expression patterns observed when the bacteria are exposed to candidate drug compounds or known antibiotics may be compared to those observed with antisense nucleic acids comprising a nucleotide sequence complementary to a proliferation-required nucleic acid. If the mRNA expression pattern observed with the candidate drug compound is similar to that observed with the antisense nucleic acid, the drug compound may be a promising therapeutic candidate. Thus, the assay would be useful in assisting in the selection of promising candidate drug compounds for use in drug development.

[1158] In cases where the source of nucleic acid deposited on the array and the source of the nucleic acid being hybridized to the array are from two different cells or microorganisms, gene expression arrays can identify homologous nucleic acids in the two cells or microorganisms.

[1159] The present invention also contemplates additional methods for screening other microorganisms for proliferation-required genes. In one aspect of this embodiment, an antisense nucleic acid comprising a nucleotide sequence complementary to the proliferation-required sequences from Escherichia coli, Staphylococcus aureus, Enterococcus faecalis, Klebsiella pneumoniae, Pseudomonas aeruginosa, Salmonella typhimurium, Acinetobacter baumannii, Bacillus anthracis, Bacteroides fragilis, Bordetella pertussis, Borrelia burgdorferi, Burkholderia cepacia, Burkholderia fungorum, Burkholderia mallei, Campylobacter jejuni, Chlamydia pneumoniae, Chlamydia trachomatis, Clostridium acetobutylicum, Clostridium botulinum, Clostridium difficile, Corynebacterium diptheriae, Enterobacter cloacae, Enterococcus faecium, Haemophilus influenzae, Helicobacter pylori, Legionella pneumophila, Listeria monocytogenes, Moraxella catarrhalis, Mycobacterium avium, Mycobacterium bovis, Mycobacterium leprae, Mycobacterium tuberculosis, Mycoplasma genitalium, Mycoplasma pneumoniae, Neisseria gonorrhoeae, Neisseria meningitidis, Pasteurella multocida, Proteus mirabilis, Pseudomonas putida, Pseudomonas syringae, Salmonella paratyphi, Salmonella typhi, Staphylococcus epidermidis, Staphylococcus haemolyticus, Streptococcus mutans, Streptococcus pneumoniae, Streptococcus pyogenes, Treponema pallidum, Ureaplasma urealyticum, Vibrio cholerae or Yersinia pestis, or a portion thereof, is transcribed in an antisense orientation in such a way as to alter the level or activity of a nucleic acid required for proliferation of an autologous or heterologous cell or microorganism. For example, the antisense nucleic acid may be a homologous antisense nucleic acid such as an antisense nucleic acid homologous to the nucleotide sequence complementary to one of SEQ ID NOs.: 6214-42397, an antisense nucleic acid comprising a nucleotide sequence homologous to one of SEQ ID Nos.: 1-6213, or an antisense nucleic acid comprising a nucleotide sequence complementary to a portion of any of the preceding nucleic acids. The cell or microorganism transcribing the homologous antisense nucleic acid may be used in a cell-based assay, such as those described herein, to identify candidate antibiotic compounds. In another embodiment, the conserved portions of nucleotide sequences identified as proliferation-required can be used to generate degenerate primers for use in the polymerase chain reaction (PCR). The PCR technique is well known in the art. The successful production of a PCR product using degenerate primers generated from the nucleotide sequences identified herein indicates the presence of a homologous gene sequence in the species being screened. This homologous gene is then isolated, expressed, and used as a target for candidate antibiotic compounds. In another aspect of this embodiment, the homologous gene (for example a homologous coding nucleic acid) thus identified, or a portion thereof, is transcribed in an autologous cell or microorganism or in a heterologous cell or microorganism in an antisense orientation in such a way as to alter the level or activity of a homologous gene required for proliferation in the autologous or heterologous cell or microorganism. Alternatively, a homologous antisense nucleic acid may be transcribed in an autologous or heterologous cell or microorganism in such a way as to alter the level or activity of a gene product required for proliferation in the autologous or heterologous cell or microorganism.

[1160] The nucleic acids homologous to the genes required for the proliferation of Escherichia coli, Staphylococcus aureus, Enterococcus faecalis, Klebsiella pneumoniae, Pseudomonas aeruginosa, Salmonella typhimurium, Acinetobacter baumannii, Bacillus anthracis, Bacteroides fragilis, Bordetella pertussis, Borrelia burgdorferi, Burkholderia cepacia, Burkholderia fungorum, Burkholderia mallei, Campylobacter jejuni, Chlamydia pneumoniae, Chlamydia trachomatis, Clostridium acetobutylicum, Clostridium botulinum, Clostridium difficile, Corynebacterium diptheriae, Enterobacter cloacae, Enterococcus faecium, Haemophilus influenzae, Helicobacter pylori, Legionella pneumophila, Listeria monocytogenes, Moraxella catarrhalis, Mycobacterium avium, Mycobacterium bovis, Mycobacterium leprae, Mycobacterium tuberculosis, Mycoplasma genitalium, Mycoplasma pneumoniae, Neisseria gonorrhoeae, Neisseria meningitidis, Pasteurella multocida, Proteus mirabilis, Pseudomonas putida, Pseudomonas syringae, Salmonella paratyphi, Salmonella typhi, Staphylococcus epidermidis, Staphylococcus haemolyticus, Streptococcus mutans, Streptococcus pneumoniae, Streptococcus pyogenes, Treponema pallidum, Ureaplasma urealyticum, Vibrio cholerae or Yersinia pestis or the sequences complementary thereto may be used to identify homologous coding nucleic acids or homologous antisense nucleic acids from cells or microorganisms other than Escherichia coli, Staphylococcus aureus, Enterococcus faecalis, Klebsiella pneumoniae, Pseudomonas aeruginosa, Salmonella typhimurium, Acinetobacter baumannii, Bacillus anthracis, Bacteroides fragilis, Bordetella pertussis, Borrelia burgdorferi, Burkholderia cepacia, Burkholderia fungorum, Burkholderia mallei, Campylobacter jejuni, Chlamydia pneumoniae, Chlamydia trachomatis, Clostridium acetobutylicum, Clostridium botulinum, Clostridium difficile, Corynebacterium diptheriae, Enterobacter cloacae, Enterococcus faecium, Haemophilus influenzae, Helicobacter pylori, Legionella pneumophila, Listeria monocytogenes, Moraxella catarrhalis, Mycobacterium avium, Mycobacterium bovis, Mycobacterium leprae, Mycobacterium tuberculosis, Mycoplasma genitalium, Mycoplasma pneumoniae, Neisseria gonorrhoeae, Neisseria meningitidis, Pasteurella multocida, Proteus mirabilis, Pseudomonas putida, Pseudomonas syringae, Salmonella paratyphi, Salmonella typhi, Staphylococcus epidermidis, Staphylococcus haemolyticus, Streptococcus mutans, Streptococcus pneumoniae, Streptococcus pyogenes, Treponema pallidum, Ureaplasma urealyticum, Vibrio cholerae or Yersinia pestis to inhibit the proliferation of cells or microorganisms other than Escherichia coli, Staphylococcus aureus, Enterococcus faecalis, Klebsiella pneumoniae, Pseudomonas aeruginosa, Salmonella typhimurium, Acinetobacter baumannii, Bacillus anthracis, Bacteroides fragilis, Bordetella pertussis, Borrelia burgdorferi, Burkholderia cepacia, Burkholderia fungorum, Burkholderia mallei, Campylobacter jejuni, Chlamydia pneumoniae, Chlamydia trachomatis, Clostridium acetobutylicum, Clostridium botulinum, Clostridium difficile, Corynebacterium diptheriae, Enterobacter cloacae, Enterococcus faecium, Haemophilus influenzae, Helicobacter pylori, Legionella pneumophila, Listeria monocytogenes, Moraxella catarrhalis, Mycobacterium avium, Mycobacterium bovis, Mycobacterium leprae, Mycobacterium tuberculosis, Mycoplasma genitalium, Mycoplasma pneumoniae, Neisseria gonorrhoeae, Neisseria meningitidis, Pasteurella multocida, Proteus mirabilis, Pseudomonas putida, Pseudomonas syringae, Salmonella paratyphi, Salmonella typhi, Staphylococcus epidermidis, Staphylococcus haemolyticus, Streptococcus mutans, Streptococcus pneumoniae, Streptococcus pyogenes, Treponema pallidum, Ureaplasma urealyticum, Vibrio cholerae or Yersinia pestis by inhibiting the activity or reducing the amount of the identified homologous coding nucleic acid or homologous polypeptide in the cell or microorganism other than Escherichia coli, Staphylococcus aureus, Enterococcus faecalis, Klebsiella pneumoniae, Pseudomonas aeruginosa, Salmonella typhimurium, Acinetobacter baumannii, Bacillus anthracis, Bacteroides fragilis, Bordetella pertussis, Borrelia burgdorferi, Burkholderia cepacia, Burkholderia fungorum, Burkholderia mallei, Campylobacter jejuni, Chlamydia pneumoniae, Chlamydia trachomatis, Clostridium acetobutylicum, Clostridium botulinum, Clostridium difficile, Corynebacterium diptheriae, Enterobacter cloacae, Enterococcus faecium, Haemophilus influenzae, Helicobacter pylori, Legionella pneumophila, Listeria monocytogenes, Moraxella catarrhalis, Mycobacterium avium, Mycobacterium bovis, Mycobacterium leprae, Mycobacterium tuberculosis, Mycoplasma genitalium, Mycoplasma pneumoniae, Neisseria gonorrhoeae, Neisseria meningitidis, Pasteurella multocida, Proteus mirabilis, Pseudomonas putida, Pseudomonas syringae, Salmonella paratyphi, Salmonella typhi, Staphylococcus epidermidis, Staphylococcus haemolyticus, Streptococcus mutans, Streptococcus pneumoniae, Streptococcus pyogenes, Treponema pallidum, Ureaplasma urealyticum, Vibrio cholerae or Yersinia pestis or to identify compounds which inhibit the growth of cells or microorganisms other than Escherichia coli, Staphylococcus aureus, Enterococcus faecalis, Klebsiella pneumoniae, Pseudomonas aeruginosa, Salmonella typhimurium, Acinetobacter baumannii, Bacillus anthracis, Bacteroides fragilis, Bordetella pertussis, Borrelia burgdorferi, Burkholderia cepacia, Burkholderia fungorum, Burkholderia mallei, Campylobacter jejuni, Chlamydia pneumoniae, Chlamydia trachomatis, Clostridium acetobutylicum, Clostridium botulinum, Clostridium difficile, Corynebacterium diptheriae, Enterobacter cloacae, Enterococcus faecium, Haemophilus influenzae, Helicobacter pylori, Legionella pneumophila, Listeria monocytogenes, Moraxella catarrhalis, Mycobacterium avium, Mycobacterium bovis, Mycobacterium leprae, Mycobacterium tuberculosis, Mycoplasma genitalium, Mycoplasma pneumoniae, Neisseria gonorrhoeae, Neisseria meningitidis, Pasteurella multocida, Proteus mirabilis, Pseudomonas putida, Pseudomonas syringae, Salmonella paratyphi, Salmonella typhi, Staphylococcus epidermidis, Staphylococcus haemolyticus, Streptococcus mutans, Streptococcus pneumoniae, Streptococcus pyogenes, Treponema pallidum, Ureaplasma urealyticum, Vibrio cholerae or Yersinia pestis as described below. For example, the nucleic acids homologous to proliferation-required genes from Escherichia coli, Staphylococcus aureus, Enterococcus faecalis, Klebsiella pneumoniae, Pseudomonas aeruginosa, Salmonella typhimurium, Acinetobacter baumannii, Bacillus anthracis, Bacteroides fragilis, Bordetella pertussis, Borrelia burgdorferi, Burkholderia cepacia, Burkholderia fungorum, Burkholderia mallei, Campylobacter jejuni, Chlamydia pneumoniae, Chlamydia trachomatis, Clostridium acetobutylicum, Clostridium botulinum, Clostridium difficile, Corynebacterium diptheriae, Enterobacter cloacae, Enterococcus faecium, Haemophilus influenzae, Helicobacter pylori, Legionella pneumophila, Listeria monocytogenes, Moraxella catarrhalis, Mycobacterium avium, Mycobacterium bovis, Mycobacterium leprae, Mycobacterium tuberculosis, Mycoplasma genitalium, Mycoplasma pneumoniae, Neisseria gonorrhoeae, Neisseria meningitidis, Pasteurella multocida, Proteus mirabilis, Pseudomonas putida, Pseudomonas syringae, Salmonella paratyphi, Salmonella typhi, Staphylococcus epidermidis, Staphylococcus haemolyticus, Streptococcus mutans, Streptococcus pneumoniae, Streptococcus pyogenes, Treponema pallidum, Ureaplasma urealyticum, Vibrio cholerae or Yersinia pestis or the sequences complementary thereto may be used to identify compounds which inhibit the growth of Acinetobacter baumannii, Anaplasma marginale, Aspergillus fumigatus, Bacillus anthracis, Bacteroides fragilis, Bordetella pertussis, Borrelia burgdorferi, Burkholderia cepacia, Burkholderia fungorum, Burkholderia mallei, Campylobacter jejuni, Candida albicans, Candida glabrata (also called Torulopsis glabrata), Candida tropicalis, Candida parapsilosis, Candida guilliermondii, Candida krusei, Candida kefyr (also called Candida pseudotropicalis), Candida dubliniensis, Chlamydia pneumoniae, Chlamydia trachomatis, Clostridium acetobutylicum, Clostridium botulinum, Clostridium difficile, Clostridium perfringens, Coccidioides immitis, Corynebacterium diptheriae, Cryptococcus neoformans, Enterobacter cloacae, Enterococcus faecalis, Enterococcus faecium, Escherichia coli, Haemophilus influenzae, Helicobacter pylori, Histoplasma capsulatum, Klebsiella pneumoniae, Legionella pneumophila, Listeria monocytogenes, Moraxella catarrhalis, Mycobacterium avium, Mycobacterium bovis, Mycobacterium leprae, Mycobacterium tuberculosis, Mycoplasma genitalium, Mycoplasma pneumoniae, Neisseria gonorrhoeae, Neisseria meningitidis, Nocardia asteroides, Pasteurella haemolytica, Pasteurella multocida, Pneumocystis carinii, Proteus mirabilis, Proteus vulgaris, Pseudomonas aeruginosa, Pseudomonas putida, Pseudomonas syringae, Salmonella bongori, Salmonella cholerasuis, Salmonella enterica, Salmonella paratyphi, Salmonella typhi, Salmonella typhimurium, Shigella boydii, Shigella dysenteriae, Shigella flexneri, Shigella sonnei, Staphylococcus aureus, Staphylococcus epidermidis, Staphylococcus haemolyticus, Streptococcus pneumoniae, Streptococcus mutans, Streptococcus pyogenes, Treponema pallidum, Ureaplasma urealyticum, Vibrio cholerae, Vibrio parahaemolyticus, Vibrio vulnificans, Yersinia enterocolitica, Yersinia pestis or any species falling within the genera of any of the above species. In some embodiments of the present invention, the nucleic acids homologous to proliferation-required sequences from Escherichia coli, Staphylococcus aureus, Enterococcus faecalis, Klebsiella pneumoniae, Pseudomonas aeruginosa, Salmonella typhimurium, Acinetobacter baumannii, Bacillus anthracis, Bacteroides fragilis, Bordetella pertussis, Borrelia burgdorferi, Burkholderia cepacia, Burkholderia fungorum, Burkholderia mallei, Campylobacter jejuni, Chlamydia pneumoniae, Chlamydia trachomatis, Clostridium acetobutylicum, Clostridium botulinum, Clostridium difficile, Corynebacterium diptheriae, Enterobacter cloacae, Enterococcus faecium, Haemophilus influenzae, Helicobacter pylori, Legionella pneumophila, Listeria monocytogenes, Moraxella catarrhalis, Mycobacterium avium, Mycobacterium bovis, Mycobacterium leprae, Mycobacterium tuberculosis, Mycoplasma genitalium, Mycoplasma pneumoniae, Neisseria gonorrhoeae, Neisseria meningitidis, Pasteurella multocida, Proteus mirabilis, Pseudomonas putida, Pseudomonas syringae, Salmonella paratyphi, Salmonella typhi, Staphylococcus epidermidis, Staphylococcus haemolyticus, Streptococcus mutans, Streptococcus pneumoniae, Streptococcus pyogenes, Treponema pallidum, Ureaplasma urealyticum, Vibrio cholerae or Yersinia pestis (including nucleic acids homologous to one of SEQ ID NOs.: 6214-42397) or the sequences complementary thereto (including nucleic acids homologous to one of SEQ ID NOs.: 1-6213) are used to identify proliferation-required sequences in an organism other than E. coli.

[1161] In another embodiment of the present invention, antisense nucleic acids complementary to the sequences identified as required for proliferation or portions thereof (including antisense nucleic acids comprising a nucleotide sequence complementary to one of SEQ ID NOs.: 6214-42397 or portions thereof, such as the nucleic acids of SEQ ID NOs.: 1-6213) are transferred to vectors capable of function within a species other than the species from which the sequences were obtained. For example, the vector may be functional in Acinetobacter baumannii, Anaplasma marginale, Aspergillus fumigatus, Bacillus anthracis, Bacteroides fragilis, Bordetella pertussis, Borrelia burgdorferi, Burkholderia cepacia, Burkholderia fungorum, Burkholderia mallei, Campylobacter jejuni, Candida albicans, Candida glabrata (also called Torulopsis glabrata), Candida tropicalis, Candida parapsilosis, Candida guilliermondii, Candida krusei, Candida kefyr (also called Candida pseudotropicalis), Candida dubliniensis, Chlamydia pneumoniae, Chlamydia trachomatis, Clostridium acetobutylicum, Clostridium botulinum, Clostridium difficile, Clostridium perfringens, Coccidioides immitis, Corynebacterium diptheriae, Cryptococcus neoformans, Enterobacter cloacae, Enterococcus faecalis, Enterococcus faecium, Escherichia coli, Haemophilus influenzae, Helicobacter pylori, Histoplasma capsulatum, Klebsiella pneumoniae, Legionella pneumophila, Listeria monocytogenes, Moraxella catarrhalis, Mycobacterium avium, Mycobacterium bovis, Mycobacterium leprae, Mycobacterium tuberculosis, Mycoplasma genitalium, Mycoplasma pneumoniae, Neisseria gonorrhoeae, Neisseria meningitidis, Nocardia asteroides, Pasteurella haemolytica, Pasteurella multocida, Pneumocystis carinii, Proteus mirabilis, Proteus vulgaris, Pseudomonas aeruginosa, Pseudomonas putida, Pseudomonas syringae, Salmonella bongori, Salmonella cholerasuis, Salmonella enterica, Salmonella paratyphi, Salmonella typhi, Salmonella typhimurium, Shigella boydii, Shigella dysenteriae, Shigella flexneri, Shigella sonnei, Staphylococcus aureus, Staphylococcus epidermidis, Staphylococcus haemolyticus, Streptococcus pneumoniae, Streptococcus mutans, Streptococcus pyogenes, Treponema pallidum, Ureaplasma urealyticum, Vibrio cholerae, Vibrio parahaemolyticus, Vibrio vulnificans, Yersinia enterocolitica, Yersinia pestis or any species falling within the genera of any of the above species. In some embodiments of the present invention, the vector may be functional in an organism other than E. coli. As would be appreciated by one of ordinary skill in the art, vectors may contain certain elements that are species specific. These elements can include promoter sequences, operator sequences, repressor genes, origins of replication, ribosomal binding sequences, termination sequences, and others. To use the antisense nucleic acids, one of ordinary skill in the art would know to use standard molecular biology techniques to isolate vectors containing the sequences of interest from cultured bacterial cells, isolate and purify those sequences, and subclone those sequences into a vector adapted for use in the species of bacteria to be screened.

[1162] Vectors for a variety of other species are known in the art. For example, numerous vectors which function in E. coli are known in the art. Also, Pla et al. have reported an expression vector that is functional in a number of relevant hosts including: Salmonella typhimurium, Pseudomonas putida, and Pseudomonas aeruginosa. J. Bacteriol. 172(8):4448-55 (1990). Brunschwig and Darzins (Gene (1992) 111:35-4, the disclosure of which is incorporated herein by reference in its entirety) described a shuttle expression vector for Pseudomonas aeruginosa. Vectors useful for the production of stabilized mRNA having an increased lifetime (including antisense RNA) in Gram negative organisms are described in U.S. Provisional Patent Application Serial No. 60/343,512, filed Dec. 21, 2001, the disclosure of which is incorporated herein by reference in its entirety. Similarly many examples exist of expression vectors that are freely transferable among various Gram positive microorganisms. Expression vectors for Enterococcus faecalis may be engineered by incorporating suitable promoters into a pAK80 backbone (Israelsen, H., S. M. Madsen, A. Vrang, E. B. Hansen and E. Johansen. 1995. Appl. Environ. Microbiol. 61:2540-2547, the disclosure of which is incorporated herein by reference in its entirety). A number of vectors useful for nucleic acid expression (including antisense nucleic acid expression) in Enterococcus faecalis, Staphylococcus areus as well as other Gram positive organisms are described in U.S. patent application Ser. No. 10/032,393, filed Dec. 21, 2001, the disclosure of which is incorporated herein by reference in its entirety.

[1163] Following the subcloning of the antisense nucleic acids complementary to proliferation-required sequences from Escherichia coli, Staphylococcus aureus, Enterococcus faecalis, Klebsiella pneumoniae, Pseudomonas aeruginosa, Salmonella typhimurium, Acinetobacter baumannii, Bacillus anthracis, Bacteroides fragilis, Bordetella pertussis, Borrelia burgdorferi, Burkholderia cepacia, Burkholderia fungorum, Burkholderia mallei, Campylobacter jejuni, Chlamydia pneumoniae, Chlamydia trachomatis, Clostridium acetobutylicum, Clostridium botulinum, Clostridium difficile, Corynebacterium diptheriae, Enterobacter cloacae, Enterococcus faecium, Haemophilus influenzae, Helicobacter pylori, Legionella pneumophila, Listeria monocytogenes, Moraxella catarrhalis, Mycobacterium avium, Mycobacterium bovis, Mycobacterium leprae, Mycobacterium tuberculosis, Mycoplasma genitalium, Mycoplasma pneumoniae, Neisseria gonorrhoeae, Neisseria meningitidis, Pasteurella multocida, Proteus mirabilis, Pseudomonas putida, Pseudomonas syringae, Salmonella paratyphi, Salmonella typhi, Staphylococcus epidermidis, Staphylococcus haemolyticus, Streptococcus mutans, Streptococcus pneumoniae, Streptococcus pyogenes, Treponema pallidum, Ureaplasma urealyticum, Vibrio cholerae or Yersinia pestis or portions thereof into a vector functional in a second cell or microorganism of interest (i.e. a cell or microorganism other than the one from which the identified nucleic acids were obtained), the antisense nucleic acids are conditionally transcribed to test for bacterial growth inhibition. The nucleotide sequences of the nucleic acids from Escherichia coli, Staphylococcus aureus, Enterococcus faecalis, Klebsiella pneumoniae, Pseudomonas aeruginosa, Salmonella typhimurium, Acinetobacter baumannii, Bacillus anthracis, Bacteroides fragilis, Bordetella pertussis, Borrelia burgdorferi, Burkholderia cepacia, Burkholderia fungorum, Burkholderia mallei, Campylobacter jejuni, Chlamydia pneumoniae, Chlamydia trachomatis, Clostridium acetobutylicum, Clostridium botulinum, Clostridium difficile, Corynebacterium diptheriae, Enterobacter cloacae, Enterococcus faecium, Haemophilus influenzae, Helicobacter pylori, Legionella pneumophila, Listeria monocytogenes, Moraxella catarrhalis, Mycobacterium avium, Mycobacterium bovis, Mycobacterium leprae, Mycobacterium tuberculosis, Mycoplasma genitalium, Mycoplasma pneumoniae, Neisseria gonorrhoeae, Neisseria meningitidis, Pasteurella multocida, Proteus mirabilis, Pseudomonas putida, Pseudomonas syringae, Salmonella paratyphi, Salmonella typhi, Staphylococcus epidermidis, Staphylococcus haemolyticus, Streptococcus mutans, Streptococcus pneumoniae, Streptococcus pyogenes, Treponema pallidum, Ureaplasma urealyticum, Vibrio cholerae or Yersinia pestis that, when transcribed, inhibit growth of the second cell or microorganism are compared to the known genomic sequence of the second cell or microorganism to identify the homologous gene from the second organism. If the homologous sequence from the second cell or microorganism is not known, it may be identified and isolated by hybridization to the proliferation-required Escherichia coli, Staphylococcus aureus, Enterococcus faecalis, Klebsiella pneumoniae, Pseudomonas aeruginosa, Salmonella typhimurium, Acinetobacter baumannii, Bacillus anthracis, Bacteroides fragilis, Bordetella pertussis, Borrelia burgdorferi, Burkholderia cepacia, Burkholderia fungorum, Burkholderia mallei, Campylobacter jejuni, Chlamydia pneumoniae, Chlamydia trachomatis, Clostridium acetobutylicum, Clostridium botulinum, Clostridium difficile, Corynebacterium diptheriae, Enterobacter cloacae, Enterococcus faecium, Haemophilus influenzae, Helicobacter pylori, Legionella pneumophila, Listeria monocytogenes, Moraxella catarrhalis, Mycobacterium avium, Mycobacterium bovis, Mycobacterium leprae, Mycobacterium tuberculosis, Mycoplasma genitalium, Mycoplasma pneumoniae, Neisseria gonorrhoeae, Neisseria meningitidis, Pasteurella multocida, Proteus mirabilis, Pseudomonas putida, Pseudomonas syringae, Salmonella paratyphi, Salmonella typhi, Staphylococcus epidermidis, Staphylococcus haemolyticus, Streptococcus mutans, Streptococcus pneumoniae, Streptococcus pyogenes, Treponema pallidum, Ureaplasma urealyticum, Vibrio cholerae or Yersinia pestis sequence of interest or by amplification using PCR primers based on the proliferation-required nucleotide sequence of interest as described above. In this way, sequences which may be required for the proliferation of the second cell or microorganism may be identified. For example, the second microorganism may be Acinetobacter baumannii, Anaplasma marginale, Aspergillus fumigatus, Bacillus anthracis, Bacteroides fragilis, Bordetella pertussis, Borrelia burgdorferi, Burkholderia cepacia, Burkholderia fungorum, Burkholderia mallei, Campylobacter jejuni, Candida albicans, Candida glabrata (also called Torulopsis glabrata), Candida tropicalis, Candida parapsilosis, Candida guilliermondii, Candida krusei, Candida kefyr (also called Candida pseudotropicalis), Candida dubliniensis, Chlamydia pneumoniae, Chlamydia trachomatis, Clostridium acetobutylicum, Clostridium botulinum, Clostridium difficile, Clostridium perfringens, Coccidioides immitis, Corynebacterium diptheriae, Cryptococcus neoformans, Enterobacter cloacae, Enterococcus faecalis, Enterococcus faecium, Escherichia coli, Haemophilus influenzae, Helicobacter pylori, Histoplasma capsulatum, Klebsiella pneumoniae, Legionella pneumophila, Listeria monocytogenes, Moraxella catarrhalis, Mycobacterium avium, Mycobacterium bovis, Mycobacterium leprae, Mycobacterium tuberculosis, Mycoplasma genitalium, Mycoplasma pneumoniae, Neisseria gonorrhoeae, Neisseria meningitidis, Nocardia asteroides, Pasteurella haemolytica, Pasteurella multocida, Pneumocystis carinii, Proteus mirabilis, Proteus vulgaris, Pseudomonas aeruginosa, Pseudomonas putida, Pseudomonas syringae, Salmonella bongori, Salmonella cholerasuis, Salmonella enterica, Salmonella paratyphi, Salmonella typhi, Salmonella typhimurium, Shigella boydii, Shigella dysenteriae, Shigella flexneri, Shigella sonnei, Staphylococcus aureus, Staphylococcus epidermidis, Staphylococcus haemolyticus, Streptococcus pneumoniae, Streptococcus mutans, Streptococcus pyogenes, Treponema pallidum, Ureaplasma urealyticum, Vibrio cholerae, Vibrio parahaemolyticus, Vibrio vulnificans, Yersinia enterocolitica, Yersinia pestis or any species falling within the genera of any of the above species. In some embodiments of the present invention, the second microorganism is an organism other than E. coli.

[1164] The homologous nucleic acid sequences from the second cell or microorganism which are identified as described above may then be operably linked to a promoter, such as an inducible promoter, in an antisense orientation and introduced into the second cell or microorganism. The techniques described herein for identifying Escherichia coli, Staphylococcus aureus, Enterococcus faecalis, Klebsiella pneumoniae, Pseudomonas aeruginosa, Salmonella typhimurium, Acinetobacter baumannii, Bacillus anthracis, Bacteroides fragilis, Bordetella pertussis, Borrelia burgdorferi, Burkholderia cepacia, Burkholderia fungorum, Burkholderia mallei, Campylobacter jejuni, Chlamydia pneumoniae, Chlamydia trachomatis, Clostridium acetobutylicum, Clostridium botulinum, Clostridium difficile, Corynebacterium diptheriae, Enterobacter cloacae, Enterococcus faecium, Haemophilus influenzae, Helicobacter pylori, Legionella pneumophila, Listeria monocytogenes, Moraxella catarrhalis, Mycobacterium avium, Mycobacterium bovis, Mycobacterium leprae, Mycobacterium tuberculosis, Mycoplasma genitalium, Mycoplasma pneumoniae, Neisseria gonorrhoeae, Neisseria meningitidis, Pasteurella multocida, Proteus mirabilis, Pseudomonas putida, Pseudomonas syringae, Salmonella paratyphi, Salmonella typhi, Staphylococcus epidermidis, Staphylococcus haemolyticus, Streptococcus mutans, Streptococcus pneumoniae, Streptococcus pyogenes, Treponema pallidum, Ureaplasma urealyticum, Vibrio cholerae or Yersinia pestis genes required for proliferation may thus be employed to determine whether the identified nucleotide sequences from a second cell or microorganism inhibit the proliferation of the second cell or microorganism. For example, the second microorganism may be Acinetobacter baumannii, Anaplasma marginale, Aspergillus fumigatus, Bacillus anthracis, Bacteroides fragilis, Bordetella pertussis, Borrelia burgdorferi, Burkholderia cepacia, Burkholderia fungorum, Burkholderia mallei, Campylobacter jejuni, Candida albicans, Candida glabrata (also called Torulopsis glabrata), Candida tropicalis, Candida parapsilosis, Candida guilliermondii, Candida krusei, Candida kefyr (also called Candida pseudotropicalis), Candida dubliniensis, Chlamydia pneumoniae, Chlamydia trachomatis, Clostridium acetobutylicum, Clostridium botulinum, Clostridium difficile, Clostridium perfringens, Coccidioides immitis, Corynebacterium diptheriae, Cryptococcus neoformans, Enterobacter cloacae, Enterococcus faecalis, Enterococcus faecium, Escherichia coli, Haemophilus influenzae, Helicobacter pylori, Histoplasma capsulatum, Klebsiella pneumoniae, Legionella pneumophila, Listeria monocytogenes, Moraxella catarrhalis, Mycobacterium avium, Mycobacterium bovis, Mycobacterium leprae, Mycobacterium tuberculosis, Mycoplasma genitalium, Mycoplasma pneumoniae, Neisseria gonorrhoeae, Neisseria meningitidis, Nocardia asteroides, Pasteurella haemolytica, Pasteurella multocida, Pneumocystis carinii, Proteus mirabilis, Proteus vulgaris, Pseudomonas aeruginosa, Pseudomonas putida, Pseudomonas syringae, Salmonella bongori, Salmonella cholerasuis, Salmonella enterica, Salmonella paratyphi, Salmonella typhi, Salmonella typhimurium, Shigella boydii, Shigella dysenteriae, Shigella flexneri, Shigella sonnei, Staphylococcus aureus, Staphylococcus epidermidis, Staphylococcus haemolyticus, Streptococcus pneumoniae, Streptococcus mutans, Streptococcus pyogenes, Treponema pallidum, Ureaplasma urealyticum, Vibrio cholerae, Vibrio parahaemolyticus, Vibrio vulnificans, Yersinia enterocolitica, Yersinia pestis or any species falling within the genera of any of the above species. In some embodiments of the present invention, the second microorganism may be an organism other than E. coli.

[1165] Antisense nucleic acids required for the proliferation of microorganisms other than Escherichia coli, Staphylococcus aureus, Enterococcus faecalis, Klebsiella pneumoniae, Pseudomonas aeruginosa, Salmonella typhimurium, Acinetobacter baumannii, Bacillus anthracis, Bacteroides fragilis, Bordetella pertussis, Borrelia burgdorferi, Burkholderia cepacia, Burkholderia fungorum, Burkholderia mallei, Campylobacter jejuni, Chlamydia pneumoniae, Chlamydia trachomatis, Clostridium acetobutylicum, Clostridium botulinum, Clostridium difficile, Corynebacterium diptheriae, Enterobacter cloacae, Enterococcus faecium, Haemophilus influenzae, Helicobacter pylori, Legionella pneumophila, Listeria monocytogenes, Moraxella catarrhalis, Mycobacterium avium, Mycobacterium bovis, Mycobacterium leprae, Mycobacterium tuberculosis, Mycoplasma genitalium, Mycoplasma pneumoniae, Neisseria gonorrhoeae, Neisseria meningitidis, Pasteurella multocida, Proteus mirabilis, Pseudomonas putida, Pseudomonas syringae, Salmonella paratyphi, Salmonella typhi, Staphylococcus epidermidis, Staphylococcus haemolyticus, Streptococcus mutans, Streptococcus pneumoniae, Streptococcus pyogenes, Treponema pallidum, Ureaplasma urealyticum, Vibrio cholerae or Yersinia pestis or the genes corresponding thereto, may also be hybridized to a microarray containing the Escherichia coli, Staphylococcus aureus, Enterococcus faecalis, Klebsiella pneumoniae, Pseudomonas aeruginosa, Salmonella typhimurium, Acinetobacter baumannii, Bacillus anthracis, Bacteroides fragilis, Bordetella pertussis, Borrelia burgdorferi, Burkholderia cepacia, Burkholderia fungorum, Burkholderia mallei, Campylobacter jejuni, Chlamydia pneumoniae, Chlamydia trachomatis, Clostridium acetobutylicum, Clostridium botulinum, Clostridium difficile, Corynebacterium diptheriae, Enterobacter cloacae, Enterococcus faecium, Haemophilus influenzae, Helicobacter pylori, Legionella pneumophila, Listeria monocytogenes, Moraxella catarrhalis, Mycobacterium avium, Mycobacterium bovis, Mycobacterium leprae, Mycobacterium tuberculosis, Mycoplasma genitalium, Mycoplasma pneumoniae, Neisseria gonorrhoeae, Neisseria meningitidis, Pasteurella multocida, Proteus mirabilis, Pseudomonas putida, Pseudomonas syringae, Salmonella paratyphi, Salmonella typhi, Staphylococcus epidermidis, Staphylococcus haemolyticus, Streptococcus mutans, Streptococcus pneumoniae, Streptococcus pyogenes, Treponema pallidum, Ureaplasma urealyticum, Vibrio cholerae or Yersinia pestis (including the nucleic acids of SEQ ID NOs.: 6214-42397) to gauge the homology between the Escherichia coli, Staphylococcus aureus, Enterococcus faecalis, Klebsiella pneumoniae, Pseudomonas aeruginosa, Salmonella typhimurium, Acinetobacter baumannii, Bacillus anthracis, Bacteroides fragilis, Bordetella pertussis, Borrelia burgdorferi, Burkholderia cepacia, Burkholderia fungorum, Burkholderia mallei, Campylobacter jejuni, Chlamydia pneumoniae, Chlamydia trachomatis, Clostridium acetobutylicum, Clostridium botulinum, Clostridium difficile, Corynebacterium diptheriae, Enterobacter cloacae, Enterococcus faecium, Haemophilus influenzae, Helicobacter pylori, Legionella pneumophila, Listeria monocytogenes, Moraxella catarrhalis, Mycobacterium avium, Mycobacterium bovis, Mycobacterium leprae, Mycobacterium tuberculosis, Mycoplasma genitalium, Mycoplasma pneumoniae, Neisseria gonorrhoeae, Neisseria meningitidis, Pasteurella multocida, Proteus mirabilis, Pseudomonas putida, Pseudomonas syringae, Salmonella paratyphi, Salmonella typhi, Staphylococcus epidermidis, Staphylococcus haemolyticus, Streptococcus mutans, Streptococcus pneumoniae, Streptococcus pyogenes, Treponema pallidum, Ureaplasma urealyticum, Vibrio cholerae or Yersinia pestis sequences and the proliferation-required nucleic acids from other cells or microorganisms. For example, the proliferation-required nucleic acid may be from Acinetobacter baumannii, Anaplasma marginale, Aspergillus fumigatus, Bacillus anthracis, Bacteroides fragilis, Bordetella pertussis, Borrelia burgdorferi, Burkholderia cepacia, Burkholderia fungorum, Burkholderia mallei, Campylobacter jejuni, Candida albicans, Candida glabrata (also called Torulopsis glabrata), Candida tropicalis, Candida parapsilosis, Candida guilliermondii, Candida krusei, Candida kefyr (also called Candida pseudotropicalis), Candida dubliniensis, Chlamydia pneumoniae, Chlamydia trachomatis, Clostridium acetobutylicum, Clostridium botulinum, Clostridium difficile, Clostridium perfringens, Coccidioides immitis, Corynebacterium diptheriae, Cryptococcus neoformans, Enterobacter cloacae, Enterococcus faecalis, Enterococcus faecium, Escherichia coli, Haemophilus influenzae, Helicobacter pylori, Histoplasma capsulatum, Klebsiella pneumoniae, Legionella pneumophila, Listeria monocytogenes, Moraxella catarrhalis, Mycobacterium avium, Mycobacterium bovis, Mycobacterium leprae, Mycobacterium tuberculosis, Mycoplasma genitalium, Mycoplasma pneumoniae, Neisseria gonorrhoeae, Neisseria meningitidis, Nocardia asteroides, Pasteurella haemolytica, Pasteurella multocida, Pneumocystis carinii, Proteus mirabilis, Proteus vulgaris, Pseudomonas aeruginosa, Pseudomonas putida, Pseudomonas syringae, Salmonella bongori, Salmonella cholerasuis, Salmonella enterica, Salmonella paratyphi, Salmonella typhi, Salmonella typhimurium, Shigella boydii, Shigella dysenteriae, Shigella flexneri, Shigella sonnei, Staphylococcus aureus, Staphylococcus epidermidis, Staphylococcus haemolyticus, Streptococcus pneumoniae, Streptococcus mutans, Streptococcus pyogenes, Treponema pallidum, Ureaplasma urealyticum, Vibrio cholerae, Vibrio parahaemolyticus, Vibrio vulnificans, Yersinia enterocolitica, Yersinia pestis or any species falling within the genera of any of the above species. In some embodiments of the present invention, the proliferation-required nucleotide sequences from Escherichia coli, Staphylococcus aureus, Enterococcus faecalis, Klebsiella pneumoniae, Pseudomonas aeruginosa, Salmonella typhimurium, Acinetobacter baumannii, Bacillus anthracis, Bacteroides fragilis, Bordetella pertussis, Borrelia burgdorferi, Burkholderia cepacia, Burkholderia fungorum, Burkholderia mallei, Campylobacter jejuni, Chlamydia pneumoniae, Chlamydia trachomatis, Clostridium acetobutylicum, Clostridium botulinum, Clostridium difficile, Corynebacterium diptheriae, Enterobacter cloacae, Enterococcus faecium, Haemophilus influenzae, Helicobacter pylori, Legionella pneumophila, Listeria monocytogenes, Moraxella catarrhalis, Mycobacterium avium, Mycobacterium bovis, Mycobacterium leprae, Mycobacterium tuberculosis, Mycoplasma genitalium, Mycoplasma pneumoniae, Neisseria gonorrhoeae, Neisseria meningitidis, Pasteurella multocida, Proteus mirabilis, Pseudomonas putida, Pseudomonas syringae, Salmonella paratyphi, Salmonella typhi, Staphylococcus epidermidis, Staphylococcus haemolyticus, Streptococcus mutans, Streptococcus pneumoniae, Streptococcus pyogenes, Treponema pallidum, Ureaplasma urealyticum, Vibrio cholerae or Yersinia pestis or homologous nucleic acids are used to identify proliferation-required sequences in an organism other than E. coli. In some embodiments of the present invention, the proliferation-required sequences may be from an organism other than E. coli. The proliferation-required nucleic acids from a cell or microorganism other than Escherichia coli, Staphylococcus aureus, Enterococcus faecalis, Klebsiella pneumoniae, Pseudomonas aeruginosa, Salmonella typhimurium, Acinetobacter baumannii, Bacillus anthracis, Bacteroides fragilis, Bordetella pertussis, Borrelia burgdorferi, Burkholderia cepacia, Burkholderia fungorum, Burkholderia mallei, Campylobacter jejuni, Chlamydia pneumoniae, Chlamydia trachomatis, Clostridium acetobutylicum, Clostridium botulinum, Clostridium difficile, Corynebacterium diptheriae, Enterobacter cloacae, Enterococcus faecium, Haemophilus influenzae, Helicobacter pylori, Legionella pneumophila, Listeria monocytogenes, Moraxella catarrhalis, Mycobacterium avium, Mycobacterium bovis, Mycobacterium leprae, Mycobacterium tuberculosis, Mycoplasma genitalium, Mycoplasma pneumoniae, Neisseria gonorrhoeae, Neisseria meningitidis, Pasteurella multocida, Proteus mirabilis, Pseudomonas putida, Pseudomonas syringae, Salmonella paratyphi, Salmonella typhi, Staphylococcus epidermidis, Staphylococcus haemolyticus, Streptococcus mutans, Streptococcus pneumoniae, Streptococcus pyogenes, Treponema pallidum, Ureaplasma urealyticum, Vibrio cholerae or Yersinia pestis may be hybridized to the array under a variety of conditions which permit hybridization to occur when the probe has different levels of homology to the nucleotide sequence on the microarray. This would provide an indication of homology across the cells or microorganisms as well as clues to other possible essential genes in these cells or microorganisms.

[1166] In some embodiments of the present invention, the essential gene products described herein are used in methods of identifying a target on which a compound that inhibits cellular proliferation acts. Such methods are described in the U.S. Patent Application entitled METHODS FOR IDENTIFYING THE TARGET OF A COMPOUND WHICH INHIBITS CELLULAR PROLIFERATION, filed Feb. 8, 2002, the disclosure of which is incorporated herein by reference in its entirety. As employed herein, some embodiments of methods used to identify a target on which a compound that inhibits cellular proliferation acts utilize collections or cultures of strains comprising strains which either overexpress a different gene product which is required for cellular proliferation (such as the gene products described herein) or underexpress a different gene product (such as the gene products described herein) which is required for cellular proliferation (i.e. at least some of the strains in the culture overexpress or underexpress a gene product required for cellular proliferation). In some embodiments, the present invention uses collections or cultures of strains comprising both strains which overexpress gene products required for cellular proliferation and strains which underexpress the same gene products required for cellular proliferation. Preferably, each of the strains present in the culture or collection either overexpresses or underexpresses a different gene product which is required for cellular proliferation (i.e. all of the strains in the culture overexpress or underexpress a gene product required for cellular proliferation). However, in some embodiments, the culture or collection may include one or more strains which do not overexpress or underexpress a gene product which is required for proliferation. The gene product which is overexpressed or underexpressed in each strain may be any gene product which is required for cellular prolifereation, including a gene product whose activity or level is inhibited by a nucleic acid comprising a nucleotide sequence selected from the group consisting of SEQ ID NOs.: 1-6213, a gene product encoded by a nucleic acid comprising a nucleotide sequence selected from the group consisting of SEQ ID NOs.: 6214-42397, a gene product comprising an amino acid sequence selected from the group consisting of SEQ ID NOs.: 42398-78581, a gene product whose activity or level is inhibited by a homologous antisense nucleic acid, a gene product encoded by a homologous coding nucleic acid, and a gene product comprising a homologous polypeptide.

[1167] As used herein the term “culture” refers to a plurality of strains growing in a single aliquot of a liquid growth medium and the term “collection” refers to a plurality of strains each of which is growing in a separate aliquot of liquid growth medium or a different location on a solid growth medium.

[1168] In some embodiments, if desired, one or more of the strains in the culture or collection of strains may overexpress or underexpress more than one gene product described herein which is required for cellular proliferation. In this embodiment, the gene products which are overexpressed or underexpressed in one or more of the strains may be functionally related or functionally unrelated. This may facilitate the identification of compounds when two or more gene products share similar functions in the cell or where the cell has multiple biochemical pathways which lead to a particular end product.

[1169] Alternatively, if the gene product described herein to be overexpressed or underexpressed is encoded by a gene which is part of an operon containing a plurality of genes, the desired gene may be overexpressed or underexpressed while the remaining genes in the operon are expressed at levels where they do not impact the ability of the cell to grow in the presence of a particular compound. For example, the desired gene may be placed under the control of a regulatable promoter, a transcriptional terminator may be placed 3′ of the desired gene and a promoter, preferably a constitutive promoter, may be placed 3′ of the transcriptional terminator and 5′ of the remaining genes in the operon.

[1170] In some embodiments, the culture or collection of strains may comprise a strain which overexpresses or underexpresses a gene product whose activity or level is inhibited by a nucleic acid comprising a nucleotide sequence selected from the group consisting of SEQ ID NOs.: 1-6213. In some embodiments, the culture or collection of strains may comprise strains which in aggregate overexpress or underexpress at least two gene products whose activity or level is inhibited by a nucleic acid selected from the group consisting of SEQ ID NOS.: 1-6213, at least 10 gene products whose activity or level is inhibited by a nucleic acid selected from the group consisting of SEQ ID NOS.: 1-6213, at least 20 gene products whose activity or level is inhibited by a nucleic acid selected from the group consisting of SEQ ID NOS.: 1-6213, at least 30 gene products whose activity or level is inhibited by a nucleic acid selected from the group consisting of SEQ ID NOS.: 1-6213, at least 50 gene products whose activity or level is inhibited by a nucleic acid selected from the group consisting of SEQ ID NOS.: 1-6213, at least 100 gene products whose activity or level is inhibited by a nucleic acid selected from the group consisting of SEQ ID NOS.: 1-6213, at least 300 gene products whose activity or level is inhibited by a nucleic acid selected from the group consisting of SEQ ID NOS.: 1-6213 or more than 300 gene products whose activity or level is inhibited by a nucleic acid selected from the group consisting of SEQ ID NOS.: 1-6213, wherein each strain in the culture or collection of strains overexpresses or underexpresses a single gene product whose activity or level is inhibited by a nucleic acid selected from the group consisting of SEQ ID NOs. 1-6213. Alternatively, if desired, one or more of the strains in the culture or collection of strains may overexpress or underexpress more than one gene product whose activity or level is inhibited by a nucleic acid selected from the group consisting of SEQ ID NOs. 1-6213.

[1171] In other embodiments, the culture or collection of strains may comprise a strain which overexpresses or underexpresses a gene product encoded by a nucleic acid comprising a nucleotide sequence selected from the group consisting of SEQ ID NOs.: 6214-42397. In some embodiments, the culture or collection of strains may comprise strains which in aggregate overexpress or underexpress at least two gene products encoded by a nucleic acid comprising a nucleotide sequence selected from the group consisting of SEQ ID NOs.: 6214-42397, at least 10 gene products encoded by a nucleic acid comprising a nucleotide sequence selected from the group consisting of SEQ ID NOs.: 6214-42397, at least 20 gene products encoded by a nucleic acid comprising a nucleotide sequence selected from the group consisting of SEQ ID NOs.: 6214-42397, at least 30 gene products encoded by a nucleic acid comprising a nucleotide sequence selected from the group consisting of SEQ ID NOs.: 6214-42397, at least 50 gene products encoded by a nucleic acid comprising a nucleotide sequence selected from the group consisting of SEQ ID NOs.: 6214-42397, at least 100 gene products encoded by a nucleic acid comprising a nucleotide sequence selected from the group consisting of SEQ ID NOs.: 6214-42397, at least 300 gene products encoded by a nucleic acid comprising a nucleotide sequence selected from the group consisting of SEQ ID NOs.: 6214-42397 or more than 300 gene products encoded by a nucleic acid comprising a nucleotide sequence selected from the group consisting of SEQ ID NOs.: 6214-42397, wherein each strain in the culture or collection of strains overexpresses or underexpresses a single gene product encoded by a nucleic acid selected from the group consisting of SEQ ID NOs. 6214-42397. Alternatively, if desired, one or more strains in the culture or collection of strains may overexpress or underexpress more than one gene product encoded by a nucleic acid selected from the group consisting of SEQ ID NOs. 6214-42397.

[1172] In some embodiments the culture or collection of strains comprises a strain in which a gene product comprising an amino acid sequence selected from the group consisting of SEQ ID NOs.: 42938-78581 is overexpressed or underexpressed. In some embodiments, the culture or collection of strains may comprise strains which in aggregate overexpress or underexpress at least two gene products comprising an amino acid sequence selected from the group consisting of SEQ ID NOs.: 42938-78581, at least 10 gene products comprising an amino acid sequence selected from the group consisting of SEQ ID NOs.: 42938-78581, at least 20 gene products comprising an amino acid sequence selected from the group consisting of SEQ ID NOs.: 42938-78581, at least 30 gene products comprising an amino acid sequence selected from the group consisting of SEQ ID NOs.: 42938-78581, at least 50 gene products comprising an amino acid sequence selected from the group consisting of SEQ ID NOs.: 42938-78581, at least 100 gene products comprising an amino acid sequence selected from the group consisting of SEQ ID NOs.: 42938-78581, at least 300 gene products comprising an amino acid sequence selected from the group consisting of SEQ ID NOs.: 42938-78581 or more than 300 gene products comprising an amino acid sequence selected from the group consisting of SEQ ID NOs.: 42938-78581, wherein each strain in the culture or collection of strains overexpresses or underexpresses a single gene product selected from the group consisting of SEQ ID NOs. 42938-78581. Alternatively, if desired one or more of the strains in the culture or collection of strains may overexpress or underexpress more than one gene product selected from the group consisting of SEQ ID NOs. 42938-78581.

[1173] In other embodiments, the culture or collection of strains comprises a strain in which at least one of the gene products encoded by a homologous coding nucleic acid as defined above is overexpressed or underexpressed. In some embodiments, the culture or collection of strains may comprise strains which in aggregate overexpress or underexpress at least 2, at least 10, at least 20, at least 30, at least 50, at least 100, at least 300 or more than 300 gene products encoded by a homologous coding nucleic acid as defined above. If desired the culture or collection of strains may comprise one or more strains which overexpress or underexpress more than one gene product encoded by a homologous coding nucleic acid. In further embodiments, the culture or collection of strains comprises a strain in which at least one, at least 10, at least 20, at least 30, at least 50, at least 100, at least 300 or more than 300 homologous polypeptides as defined above is overexpressed or underexpressed. If desired the culture or collection of strains may comprise one or more strains which overexpress or underexpress more than one homologous polypeptide.

[1174] For example, in some embodiments, the culture or collection of strains comprises a strain in which at least one gene product selected from the group consisting of a gene product having at least 70% nucleotide sequence identity as determined using BLASTN version 2.0 with the default parameters to a gene product whose expression is inhibited by an antisense nucleic acid comprising a nucleotide sequence selected from the group consisting of SEQ ID NOs.: 1-6213, a gene product encoded by a nucleic acid having at least 70% nucleotide sequence identity as determined using BLASTN version 2.0 with the default parameters to a nucleic acid encoding a gene product whose expression is inhibited by an antisense nucleic acid comprising a nucleotide sequence selected from the group consisting of SEQ ID NOs: 1-6213, a gene product having at least 25% amino acid identity as determined using FASTA version 3.0t78 with the default parameters to a gene product whose expression is inhibited by an antisense nucleic acid comprising a nucleotide sequence selected from the group consisting of SEQ ID NOs.: 1-6213, a gene product encoded by a nucleic acid which hybridizes to a nucleic acid comprising a nucleotide sequence selected from the group consisting of SEQ ID NOs.: 1-6213 under stringent conditions, a gene product encoded by a nucleic acid which hybridizes to a nucleic acid comprising a nucleotide sequence selected from the group consisting of SEQ ID NOs.: 1-6213 under moderate conditions, and a gene product whose activity may be complemented by the gene product whose activity is inhibited by a nucleic acid comprising a nucleotide sequence selected from the group consisting of SEQ ID NOs: 1-6213 is overexpressed or underexpressed, wherein each strain overexpresses or underexpresses one gene product. In some embodiments, the culture or collection of strains may comprise strains in which in aggregate at least 2, at least 10, at least 20, at least 30, at least 50, at least 100, at least 300, or more than 300 gene products selected from the group consisting of a gene product having at least 70% nucleotide sequence identity as determined using BLASTN version 2.0 with the default parameters to a gene product whose expression is inhibited by an antisense nucleic acid comprising a nucleotide sequence selected from the group consisting of SEQ ID NOs.: 1-6213, a gene product encoded by a nucleic acid having at least 70% nucleotide sequence identity as determined using BLASTN version 2.0 with the default parameters to a nucleic acid encoding a gene product whose expression is inhibited by an antisense nucleic acid comprising a nucleotide sequence selected from the group consisting of SEQ ID NOs: 1-6213, a gene product having at least 25% amino acid identity as determined using FASTA version 3.0t78 with the default parameters to a gene product whose expression is inhibited by an antisense nucleic acid comprising a nucleotide sequence selected from the group consisting of SEQ ID NOs.: 1-6213, a gene product encoded by a nucleic acid which hybridizes to a nucleic acid comprising a nucleotide sequence selected from the group consisting of SEQ ID NOs.: 1-6213 under stringent conditions, a gene product encoded by a nucleic acid which hybridizes to a nucleic acid comprising a nucleotide sequence selected from the group consisting of SEQ ID NOs.: 1-6213 under moderate conditions, and a gene product whose activity may be complemented by the gene product whose activity is inhibited by a nucleic acid comprising a nucleotide sequence selected from the group consisting of SEQ ID NOs: 1-6213 is overexpressed or underexpressed, wherein each strain overexpresses or underexpresses one gene product.

[1175] If desired, one or more of the strains in the culture or collection of strains may overexpress or underexpress more than one gene product selected from the group consisting of a gene product having at least 70% nucleotide sequence identity as determined using BLASTN version 2.0 with the default parameters to a gene product whose expression is inhibited by an antisense nucleic acid comprising a nucleotide sequence selected from the group consisting of SEQ ID NOs.: 1-6213, a gene product encoded by a nucleic acid having at least 70% nucleotide sequence identity as determined using BLASTN version 2.0 with the default parameters to a nucleic acid encoding a gene product whose expression is inhibited by an antisense nucleic acid comprising a nucleotide sequence selected from the group consisting of SEQ ID NOs: 1-6213, a gene product having at least 25% amino acid identity as determined using FASTA version 3.0t78 with the default parameters to a gene product whose expression is inhibited by an antisense nucleic acid comprising a nucleotide sequence selected from the group consisting of SEQ ID NOs.: 1-6213, a gene product encoded by a nucleic acid which hybridizes to a nucleic acid comprising a nucleotide sequence selected from the group consisting of SEQ ID NOs.: 1-6213 under stringent conditions, a gene product encoded by a nucleic acid which hybridizes to a nucleic acid comprising a nucleotide sequence selected from the group consisting of SEQ ID NOs.: 1-6213 under moderate conditions, and a gene product whose activity may be complemented by the gene product whose activity is inhibited by a nucleic acid comprising a nucleotide sequence selected from the group consisting of SEQ ID NOs: 1-6213.

[1176] In further embodiments, the culture or collection of strains comprises a strain in which at least one gene product encoded by a nucleic acid comprising a nucleotide sequence selected from the group consisting of a nucleic acid comprising a nucleic acid having at least 70% nucleotide sequence identity as determined using BLASTN version 2.0 with the default parameters to a nucleotide sequence selected from the group consisting of SEQ ID NOS.: 6214-42397, a nucleic acid comprising a nucleotide sequence which hybridizes to a sequence selected from the group consisting of SEQ ID NOS.: 6214-42397 under stringent conditions, and a nucleic acid comprising a nucleotide sequence which hybridizes to a nucleotide sequence selected from the group consisting of SEQ ID NOS.: 6214-42397 under moderate conditions is overexpressed or underexpressed, wherein each strain overexpresses or underexpresses one gene product. In some embodiments, the culture or collection of strains comprises a strain or a group of strains in which in aggregate at least 2, at least 10, at least 20, at least 30, at least 50, at least 100, at least 300, or more than 300 gene products encoded by a nucleic acid comprising a nucleotide sequence selected from the group consisting of a nucleic acid comprising a nucleic acid having at least 70% nucleotide sequence identity as determined using BLASTN version 2.0 with the default parameters to a nucleotide sequence selected from the group consisting of SEQ ID NOS.: 6214-42397, a nucleic acid comprising a nucleotide sequence which hybridizes to a sequence selected from the group consisting of SEQ ID NOS.: 6214-42397 under stringent conditions, and a nucleic acid comprising a nucleotide sequence which hybridizes to a nucleotide sequence selected from the group consisting of SEQ ID NOS.: 6214-42397 under moderate conditions is overexpressed or underexpressed, wherein each strain overexpresses or underexpresses one gene product.

[1177] If desired, one or more of the strains in the culture or collection of strains may overexpress or underexpress more than one gene product encoded by a nucleic acid comprising a nucleotide sequence selected from the group consisting of a nucleic acid comprising a nucleic acid having at least 70% nucleotide sequence identity as determined using BLASTN version 2.0 with the default parameters to a nucleotide sequence selected from the group consisting of SEQ ID NOS.: 6214-42397, a nucleic acid comprising a nucleotide sequence which hybridizes to a sequence selected from the group consisting of SEQ ID NOS.: 6214-42397 under stringent conditions, and a nucleic acid comprising a nucleotide sequence which hybridizes to a nucleotide sequence selected from the group consisting of SEQ ID NOS.: 6214-42397 under moderate conditions.

[1178] In additional embodiments, the culture or collection of strains comprises a strain in which at least one gene product comprising a polypeptide selected from the group consisting of a polypeptide having at least 25% amino acid identity as determined using FASTA version 3.0t78 to a polypeptide selected from the group consisting of SEQ ID NOs.: 42938-78581 and a polypeptide whose activity may be complemented by a polypeptide selected from the group consisting of SEQ ID NOs: 42938-78581 is overexpressed or underexpressed, wherein each strain overexpresses or underexpresses one gene product. In some embodiments, the culture or collection of strains comprises a strain or a group of strains in which in aggregate at least 2, at least 10, at least 20, at least 30, at least 50, at least 100, at least 300, or more than 300 gene products comprising a polypeptide selected from the group consisting of a polypeptide having at least 25% amino acid identity as determined using FASTA version 3.0t78 to a polypeptide selected from the group consisting of SEQ ID NOs.: 42938-78581 and a polypeptide whose activity may be complemented by a polypeptide selected from the group consisting of SEQ ID NOs: 42938-78581 is overexpressed or underexpressed, wherein each strain overexpresses or underexpresses one gene product.

[1179] If desired, one or more of the strains in the culture or collection of strains may overexpress or underexpress more than one polypeptide selected from the group consisting of a polypeptide having at least 25% amino acid identity as determined using FASTA version 3.0t78 to a polypeptide selected from the group consisting of SEQ ID NOs.: 42938-78581 and a polypeptide whose activity may be complemented by a polypeptide selected from the group consisting of SEQ ID NOs: 42938-78581.

[1180] The methods of the present invention may be used to identify the targets of compounds which inhibit the proliferation of any desired cell or organism. In some embodiments, these methods are employed to identify the targets of compounds which inhibit the proliferation of bacteria, fungi, or protozoans. In further embodiments, these methods are employed to identify the targets of compounds which inhibit the growth of an organism selected from the group consisting of Acinetobacter baumannii, Anaplasma marginale, Aspergillus fumigatus, Bacillus anthracis, Bacteroides fragilis, Bordetella pertussis, Borrelia burgdorferi, Burkholderia cepacia, Burkholderia fungorum, Burkholderia mallei, Campylobacter jejuni, Candida albicans, Candida glabrata (also called Torulopsis glabrata), Candida tropicalis, Candida parapsilosis, Candida guilliermondii, Candida krusei, Candida kefyr (also called Candida pseudotropicalis), Candida dubliniensis, Chiamydia pneumoniae, Chlamydia trachomatis, Clostridium acetobutylicum, Clostridium botulinum, Clostridium difficile, Clostridium perfringens, Coccidioides immitis, Corynebacterium diptheriae, Cryptococcus neoformans, Enterobacter cloacae, Enterococcus faecalis, Enterococcus faecium, Escherichia coli, Haemophilus influenzae, Helicobacter pylori, Histoplasma capsulatum, Klebsiella pneumoniae, Legionella pneumophila, Listeria monocytogenes, Moraxella catarrhalis, Mycobacterium avium, Mycobacterium bovis, Mycobacterium leprae, Mycobacterium tuberculosis, Mycoplasma genitalium, Mycoplasma pneumoniae, Neisseria gonorrhoeae, Neisseria meningitidis, Nocardia asteroides, Pasteurella haemolytica, Pasteurella multocida, Pneumocystis carinii, Proteus mirabilis, Proteus vulgaris, Pseudomonas aeruginosa, Pseudomonas putida, Pseudomonas syringae, Salmonella bongori, Salmonella cholerasuis, Salmonella enterica, Salmonella paratyphi, Salmonella typhi, Salmonella typhimurium, Shigella boydii, Shigella dysenteriae, Shigella flexneri, Shigella sonnei, Staphylococcus aureus, Staphylococcus epidermidis, Staphylococcus haemolyticus, Streptococcus pneumoniae, Streptococcus mutans, Streptococcus pyogenes, Treponema pallidum, Ureaplasma urealyticum, Vibrio cholerae, Vibrio parahaemolyticus, Vibrio vulnificans, Yersinia enterocolitica, Yersinia pestis or any species falling within the genera of any of the above species. Overexpression may be obtained using a variety of techniques familiar to those skilled in the art. For example, overexpression may be obtained by operably linking a gene encoding a gene product whose activity or level is inhibited by a nucleic acid comprising a nucleotide sequence selected from the group consisting of SEQ ID NOs.: 1-6213, a gene product encoded by a nucleic acid comprising a nucleotide sequence selected from the group consisting of SEQ ID NOs.: 6214-42397, a gene product comprising an amino acid sequence selected from the group consisting of SEQ ID NOs.: 42398-78581, a gene product whose activity or level is inhibited by a homologous antisense nucleic acid, a gene product encoded by a homologous coding nucleic acid, or a gene product comprising a homologous polypeptide to a promoter which transcribes a higher level of mRNA encoding or comprising the gene product than does a wild type cell.

[1181] A variety of promoters may be used to overexpress the gene product described herein, including a gene product whose activity or level is inhibited by a nucleic acid comprising a nucleotide sequence selected from the group consisting of SEQ ID NOs.: 1-6213, a gene product encoded by a nucleic acid comprising a nucleotide sequence selected from the group consisting of SEQ ID NOs.: 6214-42397, a gene product comprising an amino acid sequence selected from the group consisting of SEQ ID NOs.: 42398-78581, a gene product whose activity or level is inhibited by a homologous antisense nucleic acid, a gene product encoded by a homologous coding nucleic acid, and a gene product comprising a homologous polypeptide. The promoters used to overexpress the gene product may be relatively strong promoters, promoters which possess a moderate level of activity, or relatively weak promoters and may be either constitutive or regulatable promoters. In some embodiments, several strains, each of which overexpresses the gene product to a different extent, may be used in order to optimize the degree of overexpression of the gene product.

[1182] In some embodiments, each of the gene products required for proliferation may be placed under the control of several different promoters of varying strengths to create several different strains which express the gene product at varying levels. The level of expression of the gene product in each of the strains is compared to that in wild type cells in order to identify a promoter which provides a desired level of expression relative to wild type cells (i.e. a desired level of overexpression or underexpression). The strain having the desired level of expression is then included in a culture or collection of strains to be contacted with a test compound as discussed below. Examples of suites of regulatable promoters having varying strengths that are useful for the expression of gene products at varying levels are described in U.S. patent application Ser. No. 10/032,393, filed on Dec. 21, 2002, the disclosure of which is incorporated herein by reference in its entirety.

[1183] The promoter is selected to be active in the type of cell in which the gene product is to be expressed. For example, for overexpression of the gene product in mammalian cells, the gene encoding the gene product may be operably linked to promoters such as the SV40 promoter, the metallothionine promoter, the MMTV promoter, the RSV promoter, the tetP promoter, the adenovirus major late promoter or other promoters known to those skilled in the art. In yeast, the gene encoding the gene product may be operably linked to promoters such as the CYC1, ADHI, ADHII, GAL1, GAL10, PHO5, PGK or other promoters used in the art. Similarly, in bacteria, the gene encoding the gene product may be operably linked to the, SP6, T3, trc promoter, lac promoter, temperature regulated lambda promoters, the Bacillus aprE and nprE promoters (U.S. Pat. No. 5,387,521), the bacteriophage lambda P_{L} and P_{R} promoters (Renaut, et al., (1981) Gene 15: 81) the trp promoter (Russell, et al., (1982) Gene 20: 23), the tac promoter (de Boer et al., (1983) Proc. Natl. Acad. Sci. USA 80: 21), B. subtilis alkaline protease promoter (Stahl et al, (1984) J. Bacteriol. 158, 411-418) alpha amylase promoter of B. subtilis (Yang et al., (1983) Nucleic Acids Res. 11, 237-249) or B. amyloliquefaciens (Tarkinen, et al, (1983) J. Biol. Chem. 258, 1007-1013), the neutral protease promoter from B. subtilis (Yang et al, (1984) J. Bacteriol. 160, 15-21), T7 RNA polymerase promoter (Studier and Moffatt (1986) J Mol Biol. 189(1):113-30), B. subtilis xyl promoter or mutant tetR promoter active in bacilli (Geissendorfer & Hillen (1990) Appl. Microbiol. Biotechnol. 33:657-663), Staphylococcal enterotoxin D promoter (Zhang and Stewart (2000) J. Bacteriol. 182(8):2321-5), cap8 operon promoter from Staphylococcus aureus (Ouyang et al., (1999) J. Bacteriol. 181(8):2492-500), the lactococcal nisA promoter (Eichenbaum (1998) Appl Environ Microbiol. 64(8):2763-9), promoters from in Acholeplasma laidlawii (Jarhede et al., (1995) Microbiology 141 (Pt 9):2071-9), porA promoter of Neisseria meningitidis (Sawaya et al., (1999) Gene 233:49-57), the fbpA promoter of Neisseria gonorrhoeae (Forng et al., (1997) J. Bacteriol. 179:3047-3052), Corynebacterium diphtheriae toxin gene promoter (Schmitt and Holmes (1994) J. Bacteriol. 176(4):1141-9), the hasA operon promoter from Group A Streptococci (Alberti et al., (1998) Mol Microbiol 28(2):343-53), the rpoS promoter of Pseudomonas putida (Kojic and Venturi (2001) J. Bacteriol. 183:3712-3720), the Acinetobacter baumannii phosphate regulated ppk gene promoter (Gavigan et al., Microbiology 145:2931-7 (1999)); the Acinetobacter baumannii adhC1 promoter which is induced under iron limitation and repressed when the cells are cultured in the presence of free inorganic iron (Echenique et al., Microbiology 147:2805-15 (2001)); the flaB promoter of pGK12 active in Borrelia burgdorferi (Sartakova et al., Proc Natl Acad Sci U S A. 97(9):4850-5 (2000)); the use of Ptrc promoter results in strong inducer-dependent expression in Burkholderia spp (Santos et al., FEMS Microbiol Lett 195(1):91-6 (2001)); the iron regulated sodA promoter of Bordetella pertussis (Graeff-Wohlleben et al., J Bacteriol 179(7):2194-201 (1997)); UV-inducible bcn and uviAB promoters in Clostrdia spp (Garnier and Cole Mol Microbiol 2(5):607-14 (1988)); the heat-inducible clpB promoter of Campylobacter jejuni (Thies et al., Gene 230(1):61-7 (1999)); promoters carrying bacteriophage C1 operator sites in Klebsiella pneumoniae (Schoefield et al, J Bacteriol 183(23):6947-50 (2001)); the Proteus mirabilis ureR promoter (Poore et al., J Bacteriol 183(15):4526-35 (2001)); and the heat-inducible groESL promoter in Listeria monocytogenes, and the IPTG inducible promoter in pLEX5BA (Krause et al., J. Mol. Biol. 274: 365 (1997). In another embodiment, which may be useful in Staphylococcus aureus, the promoter is a novel inducible promoter system, XylT5, comprising a modified T5 promoter fused to the xylO operator from the xylA promoter of Staphylococcus aureus. This promoter is described in U.S. patent application Ser. No. 10/032,393, the disclosure of which is incorporated herein by reference in its entirety. In another embodiment the promoter may be a two-component inducible promoter system in which the T7 RNA polymerase gene is integrated on the chromosome and is regulated by lacUV5/lacO (Brunschwig, E. and Darzins, A. 1992. Gene 111:35-41, the disclosure of which is incorporated herein by reference in its entirety) and a T7 gene 10 promoter, which is transcribed by T7 RNA polymerase, is fused with a lacO operator. In another embodiment the promoter may be the promoters from the plasmids pEPEF3 or pEPEF14, which harbor xylose inducible promoters functional in E. faecalis, described in U.S. patent application Ser. No. 10/032,393, the disclosure of which is incorporated herein by reference in its entirety. Other promoters which may be used are familiar to those skilled in the art. In fungi, the gene encoding the gene product may be operably linked to the CaACT1 promoter (Morschhauser, Mol. Gen. Genet. 257: 412-420 (1998), the disclosure of which is incorporated herein by reference in its entirety), or other promoters familiar to those skilled in the art. It will appreciated that other combinations of organisms and promoters may also be used in the present invention.

[1184] In some embodiments, overexpression may be achieved by using homologous recombination to replace the natural promoter which drives expression of the proliferation-required genes described herein with a regulatable promoter. For example, the methods described in U.S. patent application Ser. No. 09/948,993 (the disclosure of which is incorporated herein by reference in its entirety) may be used to place the gene required for proliferation under the control of a regulatable promoter. Examples of gene products, which are encoded by genes that can be overexpressed by regulatable promoters introduced by such promoter replacement methods include a gene product whose activity or level is inhibited by a nucleic acid comprising a nucleotide sequence selected from the group consisting of SEQ ID NOs.: 1-6213, a gene product encoded by a nucleic acid comprising a nucleotide sequence selected from the group consisting of SEQ ID NOs.: 6214-42397, a gene product comprising an amino acid sequence selected from the group consisting of SEQ ID NOs.: 42398-78581, a gene product whose activity or level is inhibited by a homologous antisense nucleic acid, a gene product encoded by a homologous coding nucleic acid, and a gene product comprising a homologous polypeptide.

[1185] Briefly, in some embodiments of these methods in which natural promoters are replaced by regulatable promoters, the cells may be haploid, such as bacterial cells. Regulatable promoters that are useful for promoter replacement in bacterial cells include, but are not limited to, the promoters described in U.S. patent application Ser. No. 10/032,393 filed Dec. 21, 2001, the disclosure of which is incorporated herein by reference in its entirety. A linear promoter replacement cassette comprising a regulatable promoter flanked by nucleotide sequences having homology to the natural promoter is introduced into the cell. In some embodiments, the cassette also comprises a nucleotide sequence encoding a selectable marker or a marker whose expression is readily identified. The cassette may be a double stranded nucleic acid or a single stranded nucleic acid as described in U.S. patent application Ser. No. 09/948,993, the disclosure of which is incorporated herein by reference in its entirety. Upon homologous recombination, the natural promoter is replaced with the regulatable promoter, leaving the gene required for proliferation under the control of the regulatable promoter. Strains in which the gene required for proliferation is under control of the regulatable promoter are grown under conditions in which the regulatable promoter provides a level of the proliferation-required gene product which is above the level in a wild type cell. For example, the strains may be grown in the presence of an inducer which induces expression from the regulatable promoter, or under conditions in which the action of a repressor on the regulatable promoter is reduced or eliminated.

[1186] Alternatively, rather than replacing the native promoters of each of the genes encoding a proliferation-required gene product described herein with a single desired replacement promoter, a plurality of replacement promoters which provide desired expression levels for the gene products to be overexpressed or underexpressed are used. The method is performed as described above except that rather than using a single labeled primer complementary to a nucleotide sequence within the single replacement promoter, a plurality of labeled primers complementary to suitable nucleotide sequences in the plurality of replacement promoters are used.

[1187] Alternatively, in embodiments in which the level or activity of proliferation-required gene products described herein is reduced by transcribing an antisense nucleic acid complementary to at least a portion of the genes encoding such gene products, the strains may be designed such that the length of the nucleotide sequence encoding the antisense nucleic acid is different for each gene. Amplification reactions are performed as described above using primers at each end of the gene encoding the antisense nucleic acid such that the amplification product corresponding to each gene has a unique length or a dye which allows it to be distinguished from other amplification products of the same length. Alternatively, the lengths of the nucleotide sequences encoding the antisense nucleic acids may not be unique for each gene, but the primers used in the amplification reaction may be selected such that the length of the amplification product corresponding to each gene is unique.

[1188] In another embodiment, the native promoters may be replaced with promoters which include therein or adjacent thereto a unique nucleotide sequence which is distinct from that present in the other replacement promoters in the strains in the culture or collection of strains. In this embodiment, each promoter includes or has adjacent thereto a unique “tag” which may be used to identify strains which proliferate more rapidly or more slowly in the culture or collection of strains. The tag may be detected using hybridization based methods or amplification based methods, including the amplification method which generates amplification products having a unique size for each proliferation required gene described above.

[1189] Alternatively, the native promoter which directs the transcription of the proliferation-required genes described herein may rendered regulatable by inserting a regulatory element into the chromosome of the cell via homologous recombination such that the regulatory element regulates the level of transcription from the promoter. Examples of gene products, which are encoded by genes that have promoters which can be rendered regulatable by regulatory elements inserted by such methods include a gene product whose activity or level is inhibited by a nucleic acid comprising a nucleotide sequence selected from the group consisting of SEQ ID NOs.: 1-6213, a gene product encoded by a nucleic acid comprising a nucleotide sequence selected from the group consisting of SEQ ID NOs.: 6214-42397, a gene product comprising an amino acid sequence selected from the group consisting of SEQ ID NOs.: 42398-78581, a gene product whose activity or level is inhibited by a homologous antisense nucleic acid, a gene product encoded by a homologous coding nucleic acid, and a gene product comprising a homologous polypeptide.

[1190] A variety of regulatory elements may be used to regulate the expression of essential gene products described herein. The regulatory element may be an operator which is recognized by a repressor (e.g. lac, tet, araBAD repressors) or a nucleotide sequence which is recognized by a transcriptional activator. In some embodiments, the regulatory element may be a transcriptional terminator, a nucleotide sequence which introduces a bend in the DNA or an upstream activating sequence. A linear regulatory element insertion cassette comprising a regulatory element flanked by nucleotide sequences having homology to the natural promoter is introduced into the cell. In some embodiments, the cassette also comprises a nucleotide sequence encoding a selectable marker or a marker whose expression is readily identified. The cassette may be a double stranded nucleic acid or a single stranded nucleic acid as described in U.S. patent application Ser. No. 09/948,993, the disclosure of which is incorporated herein by reference in its entirety. Upon homologous recombination, the regulatory element is inserted into the chromosome, leaving the gene required for proliferation under the control of the regulatory element. Strains in which the gene required for proliferation is under control of the regulatory element are grown under conditions in which the regulatable promoter provides a level of the proliferation-required gene product which is above the level in a wild type cell. For example, the strains may be grown in the presence of an inducer which induces expression from the promoter, or under conditions in which the action of a repressor on the promoter is reduced or eliminated. It will be appreciated that the amplification method which generates amplification products having a unique size for each proliferation required gene may be used to detect strains which are overrepresented or underrepresented in the culture or collection of strains. For example, if desired, primers complementary to a nucleotide sequence within the regulatory element may be used in the amplification reaction.

[1191] The promoter replacement cassette or regulatory element insertion cassette may be a double stranded nucleic acid, such as an amplicon generated through PCR or other amplification methods, or a single stranded nucleic acid, such as an oligonucleotide. For example, single stranded nucleic acids may be introduced into the chromosome using the methods described in Ellis et al., PNAS 98: 6742-6746, 2001, the disclosure of which is incorporated herein by reference in its entirety.

[1192] In some embodiments, the cell into which the promoter replacement cassette or regulatory element insertion cassette is introduced has an enhanced frequency of recombination. For example, the cells may lack or have a reduced level or activity of one or more exonucleases which would ordinarily degrade the DNA to be inserted into the chromosome. In further embodiments, the cells may both lack or have reduced levels of exonucleases and express or overexpress proteins involved in mediating homologous recombination. For example, if the methods are performed in Escherichia coli or other enteric prokaryotes, cells in which the activity of exonuclease V of the RecBCD recombination pathway, which degrades linear nucleic acids, has been reduced or eliminated, such as recB, recC, or recD mutants may be used. In some embodiments, the cells have mutations in more than one of the recB, recC, and recD genes which enhance the frequency of homologous recombination. For example the cells may have mutations in both the recB and recC genes.

[1193] The promoter replacement or regulatory element insertion methods may also be performed in Escherichia coli cells in which the activity of the RecET recombinase system of the Rac prophage has been activated, such as cells which carry an sbcA mutation. The RecE gene of the rac prophage encodes ExoVIII a 5′-3′ exonuclease, while the RecT gene of the Rac prophage encodes a single stranded DNA binding protein which facilitates renaturation and D-loop formation. Thus, the gene products of the RecE and RecT genes or proteins with analogous functions facilitate homologous recombination. The RecE and RecT genes lie in the same operon but are normally not expressed. However, sbcA mutants activate the expression the RecE and RecT genes. In some embodiments, the methods may be performed in cells which carry mutations in the recB and recC genes as well as the sbcA mutation. The RecE and RecT gene may be constitutively or conditionally expressed. For example, the methods may be performed in E. coli strain JC8679, which carries the sbcA23, recB21 and recC22 mutations.

[1194] In some embodiments, the methods may be performed in Escherichia coli cells in which recombination via the RecF pathway has been enhanced, such as cells which carry an sbcB mutation.

[1195] It will be appreciated that the RecE and RecT gene products, or proteins with analogous functions may be conditionally or constitutively expressed in prokaryotic organisms other than E. coli. In some embodiments, these proteins may be conditionally or constitutively expressed in Acinetobacter baumannii, Anaplasma marginale, Aspergillus fumigatus, Bacillus anthracis, Bacteroides fragilis, Bordetella pertussis, Borrelia burgdorferi, Burkholderia cepacia, Burkholderia fungorum, Burkholderia mallei, Campylobacter jejuni, Candida albicans, Candida glabrata (also called Torulopsis glabrata), Candida tropicalis, Candida parapsilosis, Candida guilliermondii, Candida krusei, Candida kefyr (also called Candida pseudotropicalis), Candida dubliniensis, Chlamydia pneumoniae, Chlamydia trachomatis, Clostridium acetobutylicum, Clostridium botulinum, Clostridium difficile, Clostridium perfringens, Coccidioides immitis, Corynebacterium diptheriae, Cryptococcus neoformans, Enterobacter cloacae, Enterococcus faecalis, Enterococcus faecium, Escherichia coli, Haemophilus influenzae, Helicobacter pylori, Histoplasma capsulatum, Klebsiella pneumoniae, Legionella pneumophila, Listeria monocytogenes, Moraxella catarrhalis, Mycobacterium avium, Mycobacterium bovis, Mycobacterium leprae, Mycobacterium tuberculosis, Mycoplasma genitalium, Mycoplasma pneumoniae, Neisseria gonorrhoeae, Neisseria meningitidis, Nocardia asteroides, Pasteurella haemolytica, Pasteurella multocida, Pneumocystis carinii, Proteus mirabilis, Proteus vulgaris, Pseudomonas aeruginosa, Pseudomonas putida, Pseudomonas syringae, Salmonella bongori, Salmonella cholerasuis, Salmonella enterica, Salmonella paratyphi, Salmonella typhi, Salmonella typhimurium, Shigella boydii, Shigella dysenteriae, Shigella flexneri, Shigella sonnei, Staphylococcus aureus, Staphylococcus epidermidis, Staphylococcus haemolyticus, Streptococcus pneumoniae, Streptococcus mutans, Streptococcus pyogenes, Treponema pallidum, Ureaplasma urealyticum, Vibrio cholerae, Vibrio parahaemolyticus, Vibrio vulnificans, Yersinia enterocolitica, Yersinia pestis or any species falling within the genera of any of the above species. For example, plasmids encoding these gene products may be introduced into the organism. If desired, the coding sequences encoding these gene products may be optimized to reflect the codon preferences of the organism in which they are to be expressed. Similarly, in some embodiments, the organism may contain mutations analogous to the recB, recC, recD, sbcA or sbcB mutations which enhance the frequency of homologous recombination.

[1196] In further embodiments, the promoter replacement or regulatory element insertion methods may be conducted in cells which utilize the Red system of bacteriophage lambda (λ) or analogous systems from other phages to enhance the frequency of homologous recombination. The Red system contains three genes, γγ, β and exo whose products are the Gam, Bet and Exo proteins (see Ellis et al. PNAS 98:6742-6746, 2001, the disclosure of which is incorporated herein by reference in its entirety). The Gam protein inhibits the RecBCD exonuclease V, thus permitting Beta and Exo to gain access to the ends of the DNA to be integrated and facilitating homologous recombination. The Beta protein is a single stranded DNA binding protein that promotes the annealing of a single stranded nucleic acid to a complementary single stranded nucleic acid and mediates strand exchange. The Exo protein is a double-stranded DNA dependent 5′-3′ exonuclease that leaves 3′ overhangs that can act as substrates for recombination. Thus, constitutive or conditional expression of the λ Red proteins or proteins having analogous functions facilitates homologous recombination. It will be appreciated that the λ Beta, Gam and Exo proteins, or proteins with analagous functions may be expressed constitutively or conditionally in prokaryotic organisms other than E. coli. In some embodiments, these proteins may be conditionally or constitutively expressed in Acinetobacter baumannii, Anaplasma marginale, Aspergillus fumigatus, Bacillus anthracis, Bacteroides fragilis, Bordetella pertussis, Borrelia burgdorferi, Burkholderia cepacia, Burkholderia fungorum, Burkholderia mallei, Campylobacter jejuni, Candida albicans, Candida glabrata (also called Torulopsis glabrata), Candida tropicalis, Candida parapsilosis, Candida guilliermondii, Candida krusei, Candida kefyr (also called Candida pseudotropicalis), Candida dubliniensis, Chlamydia pneumoniae, Chlamydia trachomatis, Clostridium acetobutylicum, Clostridium botulinum, Clostridium difficile, Clostridium perfringens, Coccidioides immitis, Corynebacterium diptheriae, Cryptococcus neoformans, Enterobacter cloacae, Enterococcus faecalis, Enterococcus faecium, Escherichia coli, Haemophilus influenzae, Helicobacter pylori, Histoplasma capsulatum, Klebsiella pneumoniae, Legionella pneumophila, Listeria monocytogenes, Moraxella catarrhalis, Mycobacterium avium, Mycobacterium bovis, Mycobacterium leprae, Mycobacterium tuberculosis, Mycoplasma genitalium, Mycoplasma pneumoniae, Neisseria gonorrhoeae, Neisseria meningitidis, Nocardia asteroides, Pasteurella haemolytica, Pasteurella multocida, Pneumocystis carinii, Proteus mirabilis, Proteus vulgaris, Pseudomonas aeruginosa, Pseudomonas putida, Pseudomonas syringae, Salmonella bongori, Salmonella cholerasuis, Salmonella enterica, Salmonella paratyphi, Salmonella typhi, Salmonella typhimurium, Shigella boydii, Shigella dysenteriae, Shigella flexneri, Shigella sonnei, Staphylococcus aureus, Staphylococcus epidermidis, Staphylococcus haemolyticus, Streptococcus pneumoniae, Streptococcus mutans, Streptococcus pyogenes, Treponema pallidum, Ureaplasma urealyticum, Vibrio cholerae, Vibrio parahaemolyticus, Vibrio vulnificans, Yersinia enterocolitica, Yersinia pestis or any species falling within the genera of any of the above species. For example, plasmids encoding these gene products may be introduced into the organism. If desired, the coding sequences encoding these gene products may be optimized to reflect the codon preferences of the organism in which they are to be expressed.

[1197] In some embodiments, the cells may have an increased frequency of homologous recombination as a result of more than one of the aforementioned characteristics. In some embodiments, the enhanced frequency of recombination may be a conditional characteristic of the cells which depends on the culture conditions in which the cells are grown. For example, in some embodiments, expression of the λ Red Gam, Exo, and Beta proteins or recE and recT proteins may be regulated. Thus, the cells may have an increased frequency of homologous recombination as a result of any combination of the aforementioned characteristics. For example, in some embodiments, the cell may carry the sbcA and recBC mutations.

[1198] In some embodiments, a linear double stranded DNA to be inserted into the chromosome of the organism is introduced into an organism constitutively or conditionally expressing the recE and recT or the λ Beta, Gam and Exo proteins or proteins with analogous functions as described above. In some embodiments, the organism may be Acinetobacter baumannii, Anaplasma marginale, Aspergillus fumigatus, Bacillus anthracis, Bacteroides fragilis, Bordetella pertussis, Borrelia burgdorferi, Burkholderia cepacia, Burkholderia fungorum, Burkholderia mallei, Campylobacter jejuni, Candida albicans, Candida glabrata (also called Torulopsis glabrata), Candida tropicalis, Candida parapsilosis, Candida guilliermondii, Candida krusei, Candida kefyr (also called Candida pseudotropicalis), Candida dubliniensis, Chlamydia pneumoniae, Chlamydia trachomatis, Clostridium acetobutylicum, Clostridium botulinum, Clostridium difficile, Clostridium perfringens, Coccidioides immitis, Corynebacterium diptheriae, Cryptococcus neoformans, Enterobacter cloacae, Enterococcus faecalis, Enterococcus faecium, Escherichia coli, Haemophilus influenzae, Helicobacter pylori, Histoplasma capsulatum, Klebsiella pneumoniae, Legionella pneumophila, Listeria monocytogenes, Moraxella catarrhalis, Mycobacterium avium, Mycobacterium bovis, Mycobacterium leprae, Mycobacterium tuberculosis, Mycoplasma genitalium, Mycoplasma pneumoniae, Neisseria gonorrhoeae, Neisseria meningitidis, Nocardia asteroides, Pasteurella haemolytica, Pasteurella multocida, Pneumocystis carinii, Proteus mirabilis, Proteus vulgaris, Pseudomonas aeruginosa, Pseudomonas putida, Pseudomonas syringae, Salmonella bongori, Salmonella cholerasuis, Salmonella enterica, Salmonella paratyphi, Salmonella typhi, Salmonella typhimurium, Shigella boydii, Shigella dysenteriae, Shigella flexneri, Shigella sonnei, Staphylococcus aureus, Staphylococcus epidermidis, Staphylococcus haemolyticus, Streptococcus pneumoniae, Streptococcus mutans, Streptococcus pyogenes, Treponema pallidum, Ureaplasma urealyticum, Vibrio cholerae, Vibrio parahaemolyticus, Vibrio vulnificans, Yersinia enterocolitica, Yersinia pestis or any species falling within the genera of any of the above species. In some embodiments, the double stranded DNA may be introduced into an organism having the recBC and sbcA mutations or analogous mutations.

[1199] In other embodiments, a single stranded DNA to be inserted into the chromosome of the organism is introduced into an organism expressing the λ Beta protein or a protein with an analogous function. In some embodiments the single stranded DNA is introduced into an organism expressing both the λ Beta and Gam proteins or proteins with analogous functions. In further embodiments, the single stranded DNA is introduced into an organism expressing the λ Beta, Gam and Exo proteins or proteins with analogous functions. The λ proteins or analogous proteins may be expressed constitutively or conditionally. In some embodiments, the organism may be Acinetobacter baumannii, Anaplasma marginale, Aspergillus fumigatus, Bacillus anthracis, Bacteroides fragilis, Bordetella pertussis, Borrelia burgdorferi, Burkholderia cepacia, Burkholderia fungorum, Burkholderia mallei, Campylobacter jejuni, Candida albicans, Candida glabrata (also called Torulopsis glabrata), Candida tropicalis, Candida parapsilosis, Candida guilliermondii, Candida krusei, Candida kefyr (also called Candida pseudotropicalis), Candida dubliniensis, Chlamydia pneumoniae, Chlamydia trachomatis, Clostridium acetobutylicum, Clostridium botulinum, Clostridium difficile, Clostridium perfringens, Coccidioides immitis, Corynebacterium diptheriae, Cryptococcus neoformans, Enterobacter cloacae, Enterococcus faecalis, Enterococcus faecium, Escherichia coli, Haemophilus influenzae, Helicobacter pylori, Histoplasma capsulatum, Klebsiella pneumoniae, Legionella pneumophila, Listeria monocytogenes, Moraxella catarrhalis, Mycobacterium avium, Mycobacterium bovis, Mycobacterium leprae, Mycobacterium tuberculosis, Mycoplasma genitalium, Mycoplasma pneumoniae, Neisseria gonorrhoeae, Neisseria meningitidis, Nocardia asteroides, Pasteurella haemolytica, Pasteurella multocida, Pneumocystis carinii, Proteus mirabilis, Proteus vulgaris, Pseudomonas aeruginosa, Pseudomonas putida, Pseudomonas syringae, Salmonella bongori, Salmonella cholerasuis, Salmonella enterica, Salmonella paratyphi, Salmonella typhi, Salmonella typhimurium, Shigella boydii, Shigella dysenteriae, Shigella flexneri, Shigella sonnei, Staphylococcus aureus, Staphylococcus epidermidis, Staphylococcus haemolyticus, Streptococcus pneumoniae, Streptococcus mutans, Streptococcus pyogenes, Treponema pallidum, Ureaplasma urealyticum, Vibrio cholerae, Vibrio parahaemolyticus, Vibrio vulnificans, Yersinia enterocolitica, Yersinia pestis or any species falling within the genera of any of the above species.

[1200] In some embodiments, the linear nucleic acid may be introduced into the chromosome of a first organism which has an enhanced frequency of homologous recombination and then transferred to a second organism which is less amenable to direct application of the present methods. For example, the linear nucleic acid may be introduced into the chromosome of E. coli and transferred into a second organism via conjugation or transduction. After introduction into the second organism, the nucleic acid is inserted into the chromosome of the second organism via homologous recombination, thereby effectively transferring the regulatory element from the chromosome of the first organism into the corresponding location in the chromosome of the second organism.

[1201] In other embodiments, the cells may be diploid cells, such as fungal cells. In some embodiments, one copy of the gene encoding the proliferation-required gene product may be disrupted, rendering it inactive. In further embodiments, one copy of the gene encoding the proliferation-required gene product may be disrupted and the other copy of the gene encoding the proliferation-required gene product may be placed under the control of a regulatable promoter. Such strains may be generated by disrupting the first copy of the gene encoding the proliferation-required gene product by homologous recombination using a disruption cassette comprising a nucleotide sequence encoding an expressible dominant selectable marker flanked on each side by nucleic acids homologous to the target sequence to be disrupted. The second copy of the gene encoding the proliferation-required gene product may be placed under the control of a regulatable promoter by homologous recombination using a promoter replacement cassette comprising a regulatable promoter flanked on each side by nucleic acids homologous to the natural promoter for the proliferation-required gene. The promoter replacement cassette may also include a nucleotide sequence encoding a selectable marker located 5′ of the regulatable promoter but between the nucleic acids homologous to the natural promoter.

[1202] In other embodiments, overexpression may be achieved by operably linking a proliferation-required gene product described herein to a desired promoter in a vector. The vector may be a vector which replicates extrachromosomally or a vector which integrates into the chromosome. For example, if the vector is to be used in bacterial cells, the vector may be a pBR322 based vector or a bacteriophage based vector such as P1 or lambda. If the vector is to be used in Saccharomyces cerevisae, it may be a vector based on the 2 micron circle or a vector incorporating a yeast chromosomal origin of replication. If the vector is to be used in mammalian cells, it may be a retroviral vector, SV40 based vector, a vector based on bovine papilloma virus, a vector based on adenovirus, or a vector based on adeno-associated virus. If the vector is to be used in Candida albicans it may be a vector comprising a promoter selected from the group consisting of the CaPCK1, MET25, MAL2, PHO5, GAL1,10, STE2 or STE3 promoters. In some embodiments, the vectors described in the following publications (the disclosures of which are incorporated herein by reference in their entireties) may be used: CIp10, an efficient and convenient integrating vector for Candida albicans. Murad et al., Yeast 16(4):325-7 (2000); Transforming vector pCPW7, Kvaal et al.,: Infect Immun 67(12):6652-62 (1999); Transforming vector pCWOP16, Kvaal et al.,: Infect Immun 65(11):4668-75 (1997); double-ARS vector, pRM1, to be used for direct cloning in Ca by complementation of the histidine auxotrophy of strain CA9, Pla et al., Gene 165(1):115-20 (1995); pMK16, that was developed for the transformation of C. albicans and carries an ADE2 gene marker and a Candida autonomously replicating sequence (CARS) element promoting autonomous replication (cited in Sanglard and Fiechter Yeast 8(12):1065-75 (1992); A plasmid vector (denoted pRC2312) was constructed, which replicates autonomously in Escherichia coli, Saccharomyces cerevisiae and Candida albicans. It contains LEU2, URA3 and an autonomously replicating sequence (ARS) from C. albicans, Cannon et al., Mol Gen Genet 235(2-3):453-7 (1992); Expression vector (CIp10-MAL2p) for use in Candida albicans has been constructed in which a gene of interest can be placed under the control of the CaMAL2 maltase promoter and stably integrated at the CaRP10 locus (Backen et al., Yeast 16(12):1121-9 (2000)); (Volker, R. S., A. Sonneborn, C. E. Leuker, and J. F. Ernst. 1997. Efglp, an essential regulator of morphogenesis of the human pathogen Candida albicans, is a member of a conserved class of bHLH proteins regulating morphogenetic processes in fungi. EMBO 16:1982-1991.); and a C. albicans transformation vector containing the C. albicans URA3 gene, a Candida ARS sequence, and a portion of the Saccharomyces cerevisiae 2 microns circle containing the replication origin was constructed. Goshorn et al., Infect Immun 60(3):876-84 (1992). A variety of other vectors suitable for use in foregoing organisms or in any other organism in which the present invention is to be practiced are familiar to those skilled in the art.

[1203] Underexpression of a proliferation-required gene product described herein may be obtained in a variety of ways. For example, in one embodiment underexpression of the proliferation-required gene product may be achieved by providing an agent, such as an antisense nucleic acid comprising a nucleotide sequence selected from the group consisting of SEQ ID NOs.: 1-6213, an antisense nucleic acid comprising at least 10, 15, 20, 25, 30, 35, 40, 50, 75, 100, 150, 200, 300, 400, or 500 consecutive nucleotides of a nucleotide sequence selected from the group consisting of SEQ ID NOs.: 1-6213, a nucleic acid complementary to a nucleic acid comprising a nucleotide sequence selected from the group consisting of SEQ ID NOs.: 6214-42397, a nucleic acid complementary to a nucleic acid comprising at least 10, 15, 20, 25, 30, 35, 40, 50, 75, 100, 150, 200, 300, 400, or 500 consecutive nucleotides of a nucleotide sequence selected from the group consisting of SEQ ID NOs.: 6214-42397, a nucleic acid complementary to a nucleic acid which encodes a polypeptide comprising an amino acid sequence selected from the group consisting of SEQ ID NOs.: 42398-78581, a nucleic acid complementary to a nucleic acid which encodes at least 5, 10, 15, 20, 25, 30, 35, 40, 50, 75, 100, or 150 consecutive amino acids of a polypeptide sequence selected from the group consisting of SEQ ID NOs.: 42398-78581, a homologous antisense nucleic acid, an antisense nucleic acid comprising at least 10, 15, 20, 25, 30, 35, 40, 50, 75, 100, 150, 200, 300, 400, or 500 consecutive nucleotides of a homologous nucleic acid, a nucleic acid complementary to a homologous coding nucleic acid, a nucleic acid complementary to at least 10, 15, 20, 25, 30, 35, 40, 50, 75, 100, 150, 200, 300, 400, or 500 consecutive nucleotides of a homologous coding nucleic acid, a nucleic acid complementary to a nucleic acid which encodes a homologous polypeptide, or a nucleic acid complementary to a nucleic acid which encodes at least 5, 10, 15, 20, 25, 30, 35, 40, 50, 75, 100, or 150 consecutive amino acids of a homologous polypeptide, which reduces the level or activity of the gene product within the cell. In one embodiment, the agent may comprise an antisense nucleic acid comprising a nucleotide sequence selected from the group consisting of SEQ ID NOs.: 1-6213 which is complementary to a nucleic acid encoding the proliferation-required gene product or complementary to a portion of a nucleic acid encoding the proliferation-required gene product.

[1204] In one example of antisense-inhibition-based underexpression, a nucleic acid which encodes the antisense nucleic acid may be operably linked to a regulatable promoter. When grown under appropriate conditions, such as media containing an inducer of transcription or an agent which alleviates repression of transcription, the antisense nucleic acid is expressed in the cell, thereby reducing the level or activity of the gene product within the cell. In some embodiments, the concentration of the inducer of transcription or the agent which alleviates repression of transcription may be varied to provide optimal results. Such methods have been described previously herein and in U.S. patent application Ser. No. 09/815,242 (the disclosure of which is incorporated herein by reference in its entirety), U.S. patent application Ser. No. 09/492,709 (the disclosure of which is incorporated herein by reference in its entirety), U.S. patent application Ser. No. 09/711,164 (the disclosure of which is incorporated herein by reference in its entirety), or U.S. patent application Ser. No. 09/741,669 (the disclosure of which is incorporated herein by reference in its entirety).

[1205] Alternatively, underexpression of a proliferation-required gene product described herein may be achieved by constructing strains in which the expression of the gene product is under the control of a constitutive or regulatable promoter using methods such as those described above with respect to methods in which the gene product is overexpressed. To provide cells which underexpress the gene product, the cells are grown under conditions in which the gene product is expressed at a level lower than that of a wild type cell. For example, the cells may be grown under conditions in which a repressor reduces the level of transcription from the regulatable promoter.

[1206] In other embodiments, underexpression may be achieved by operably linking the gene required for proliferation to a desired promoter in a vector as described above with respect to embodiments in which gene products required for proliferation are overexpressed. In some embodiments, the vector may be present in cells in which the chromosomal copy or copies of the gene has been disrupted.

[1207] Examples of gene products, which are encoded by genes that can be underexpressed using methods such as those described above with respect to methods in which the gene product is overexpressed include a gene product whose activity or level is inhibited by a nucleic acid comprising a nucleotide sequence selected from the group consisting of SEQ ID NOs.: 1-6213, a gene product encoded by a nucleic acid comprising a nucleotide sequence selected from the group consisting of SEQ ID NOs.: 6214-42397, a gene product comprising an amino acid sequence selected from the group consisting of SEQ ID NOs.: 42398-78581, a gene product whose activity or level is inhibited by a homologous antisense nucleic acid, a gene product encoded by a homologous coding nucleic acid, and a gene product comprising a homologous polypeptide.

[1208] One embodiment of the invention includes a method for identifying a gene product described herein on which a compound which inhibits the proliferation of an organism acts. The method employs a culture which comprises a mixture of strains of the organism. At least some of the strains in the culture overexpress a different gene product which is required for the proliferation of the organism. Preferably, each of the strains in the culture overexpresses a different gene product which is required for proliferation of the organism (i.e. all of the strains in the culture overexpress a gene product which is required for proliferation of the organism). For example, the gene product which is overexpressed in each strain may be a gene product whose activity or level is inhibited by a nucleic acid comprising a nucleotide sequence selected from the group consisting of SEQ ID NOs.: 1-6213, a gene product encoded by a nucleic acid comprising a nucleotide sequence selected from the group consisting of SEQ ID NOs.: 6214-42397, a gene product comprising an amino acid sequence selected from the group consisting of SEQ ID NOs.: 42398-78581, a gene product whose activity or level is inhibited by a homologous antisense nucleic acid, a gene product encoded by a homologous coding nucleic acid, and a gene product comprising a homologous polypeptide.

[1209] Strains that overexpress the proliferation-required gene product may be obtained using the methods described above. The culture may comprise any number of strains which overexpress a gene product required for proliferation. For example the culture may comprise at least two strains, at least 10 strains, at least 20 strains, at least 30, strains, at least 50 strains, at least 100 strains, at least 300 strains or more than 300 strains which overexpress a gene product required for proliferation. In some embodiments, the culture may comprise strains which in aggregate overexpress all or most of the gene products required for proliferation of the organism.

[1210] The culture is contacted with a compound which inhibits proliferation of the organism. The compound may be a candidate drug compound obtained from any source. For example, the compound may be a compound generated using combinatorial chemistry, a compound from a natural product library, or an impure or partially purified compound, such as a compound in a partially purified natural extract. The culture is contacted with a sufficient concentration of the compound to inhibit the proliferation of strains of the organism in the culture which do not overexpress the gene product on which the compound acts, such that strains which overexpress said gene product on which the compound acts proliferate more rapidly in the culture than strains which do not overexpress said gene product on which said compound acts. Thus, after a sufficient period of time, the strain which overexpresses the gene product on which the compound acts will be more prevalent in the culture than strains which do not overexpress the gene product on which the compound acts. In a preferred embodiment, the growth conditions and incubation period are selected so that only one strain, the strain overexpressing the target of the compound, is recovered from the culture. Thus, in one embodiment, a plurality of cultures containing a plurality of strains each of which overexpresses a different proliferation-required gene product may be grown in the presence of varying concentrations of the compound. In addition to varying the compound concentrations, in embodiments where expression of the proliferation-required gene product is under the control of a regulatable promoter, the plurality of cultures may be grown at varying concentrations of an agent which regulates the level of expression from the promoter, such as an inducer or an agent which reduces the effect of a repressor on transcription from the promoter. It will be appreciated, that the cultures may be grown in liquid medium in the presence of the compound whose target is to be identified (and where appropriate in the presence of an agent which regulates the level of expression from the promoter) or alternatively, a liquid culture comprising the strains which overexpress the proliferation-required gene products may be grown in the absence of the compound whose target is to be identified and then introduced onto a solid medium containing the compound (and, where appropriate, also containing an agent which regulates the level of expression from the promoter).

[1211] The identity of the overexpressed gene product which is the target of the compound may be determined using a variety of methods. For example, in some embodiments of the present invention, the nucleic acids present in the culture or collection of strains which was contacted with the compound may be compared to the nucleic acids present in a control culture or collection of strains which was not contacted with the compound to identify nucleic acids which are overrepresented in the culture or collection of strains contacted with the test compound relative to the control culture or collection of strains. Alternatively, in some embodiments, the nucleic acids present in a culture or collection of strains contacted with the test compound may be analyzed to identify those nucleic acids which are present without comparison to a control culture or collection of strains.

[1212] In some embodiments, the strains which proliferated more rapidly in the culture or collection of strains, i.e. strains having an enhanced ability to proliferate in the presence of a test compound relative to other strains in the culture or collection of strains, are identified as follows. Amplification products which are correlated with each of the overexpressed genes and which are distinguishable from one another are obtained from a culture or collection grown in the presence of a test compound. The amplification products are distinguished from one another to determine whether a particular amplification product is overrepresented in the culture or collection of strains. In some embodiments, the amplification products corresponding to each of the gene products have lengths which permit them to be distinguished from one another. In another embodiment, one or more of the amplification products have similar or identical lengths but are distinguishable from one another based on a detectable agent, such as a dye, attached thereto. In some embodiments, amplification products which are overrepresented are identified by comparing the amplification products from the culture or collection of strains which was contacted with the test compound to the amplification products from a culture or collection of strains which was not contacted with the test compound. Alternatively, amplification products which are overrepresented may be identified by simply identifying the amplification products obtained from the culture or collection of strains contacted with the test compound (for example, only one or a few strains may have proliferated in the presence of the test compound). The above methods for generating distinguishable amplification products may be used in conjunction with any of the methods for generating strains which overexpress gene products required for proliferation described herein in order to facilitate the identification of strains which proliferate more rapidly or more slowly in the presence of a test compound.

[1213] For example, in some embodiments of the present invention, each of the native promoters of each of the genes encoding gene product required for proliferation are replaced by a single desired replacement promoter. After growth of the culture or collection of strains containing the strains in which the promoters have been replaced in the presence of a test compound for a desired period of time, an amplification reaction is performed on nucleic acids obtained from the culture as follows.

[1214] The nucleic acids from the culture or collection of strains may be divided into at least two aliquots if desired. In a preferred embodiment the nucleic acids from the culture or collection of strains are divided into four aliquots. A single primer complementary to a nucleotide sequence within the replacement promoter, within the proliferation required genes, or within nucleic acid sequences adjacent to the promoter or proliferation required genes is divided into at least two portions, one portion for each aliquot of nucleic acids. Each portion of the primer is labeled with a distinct detectable dye, such as the 6FAM™, TET™, VIC™, HEX™, NED™, and PET™ dyes obtainable from Applied Biosystems (Foster City, Calif.). For example, the DS-31 or DS-33 dye sets available from Applied Biosystems (Foster City, Calif.) may be used to label the primers. Alternatively, the HEX™, NED, JOE, TMR and TET™ dyes available from Amersham Biosciences may be used. Thus, if the nucleic acids from the culture are not divided into aliquots, a single primer labeled with a single dye may be used. If the nucleic acids from the culture are divided into aliquots, at least 2, at least 3, at least 4 or more than 4 primers labeled with distinguishable dyes may be used. Each of the portions of labeled primers are added to each of the aliquots of the nucleic acids from the culture or collection of strains such that each aliquot of nucleic acid receives a single labeled primer with a single detectable dye thereon. In some embodiments, the primers are divided into 3 portions, 4 portions or more than 4 portions, with each portion having a dye which is distinguishable from the dyes on the other portions thereon.

[1215] Each of the aliquots of nucleic acids also receives a set of unlabeled primers, with each of the unlabeled primers being complementary to a nucleotide sequence within the promoter, within a nucleotide sequence which is unique to one of the genes encoding gene products required for proliferation which were placed under the control of the replacement promoter, or within nucleotide sequences adjacent to the promoter or proliferation required genes. Each of the aliquots receives primers unique to 1/N proliferation required genes which were placed under the control of the replacement promoter, where N is the number of aliquots (i.e. if the culture or collection of strains consisted of 100 strains in which a gene required for proliferation was placed under the control of the replacement promoter and was divided into four aliquots, then each of the four aliquots of nucleic acids from the culture or collection of strains would receive primers complementary to 25 of the genes). The unlabeled primers are selected so that each will yield an amplification product having a length distinguishable from the length of the amplification product produced with the other unlabeled primers. Preferably, the amplification products are between about 100-about 400 nucleotides in length, but any lengths which may be distinguished from each other may be used. In addition, in some of the embodiments some of the amplification products may have identical or very similar lengths but be distinguishable from one another due to labeling with distinguishable dyes.

[1216] A nucleic acid amplification reaction is conducted on each of the nucleic acid aliquots. The amplification products are then separated by length to identify amplification products having increased representation in the culture or collection of strains (i.e. amplification products derived from cells which proliferated more rapidly in the culture or collection of strains). The amplification products are then correlated with the corresponding genes to determine which strains proliferated more rapidly in the culture or collection of strains. If desired, amplification products having increased representation in the culture may be identified by comparing the amplification products obtained from a culture or collection of strains which was contacted with the compound to amplification products obtained from a control culture or collection of strains which was not contacted with the compound. Alternatively, if desired, the amplification products which are obtained from a culture which was contacted with the compound may be directly identified without comparison to a control culture which was not contacted with the compound.

[1217] For example, in some embodiments, the amplification products from each of the nucleic acid aliquots are pooled and subjected to capillary electrophoresis. The amplification products are detected by detecting the fluorescent dyes attached thereto and their lengths are determined to identify those amplification products having increased or decreased representation in the culture or collection of strains. FIGS. 2A and 2B illustrate one embodiment of this method in which the absence of an amplification product from an amplification reaction performed on a culture comprising a plurality of strains underexpressing genes required for proliferation indicates that a test compound acts on the gene corresponding to the missing amplification product. It will be appreciated that the method may also be used to identify an amplification product which is overrepresented in an amplification reaction conducted on a culture or collection of strains overexpressing genes required for proliferation because the test compound acted on the corresponding gene.

[1218] Alternatively, in another embodiment, a first amplification reaction is performed on nucleic acids obtained from a culture or collection of strains which was contacted with the compound using a first primer complementary to a nucleotide sequence present upstream or downstream of all of the overexpressed genes (such as a primer complementary to a nucleotide sequence in a replacement promoter upstream of all of the overexpressed genes) and a set of primers complementary to a nucleotide sequence unique to each of the strains (such as a primer complementary to a nucleotide sequence within each of the proliferation-required genes). One of the two amplification primers for each of the proliferation required genes is labeled with a dye as described above. Preferably, the common primer complementary to a nucleotide sequence upstream or downstream of all of the overexpressed genes is labeled with the dye. The primers used in the amplification reaction are designed so that the amplification product corresponding to each proliferation-required gene has a unique length or a dye which allows it to be distinguished from other amplification products of the same length. A second amplification reaction is conducted on a control culture or collection of strains which was not contacted with the compound using the same primers as in the first amplification reaction. The amplification products from the first amplification reaction are compared to those from the second amplification reaction to identify one or more amplification products which are overrepresented in the culture or collection of strains. For example, the amplification products from the first amplification reaction may be run in a separate lane of a polyacrylamide gel or a separate capillary than the amplification products from the second amplification reaction and the two lanes or capillaries are compared to one another. If desired, in the embodiment where the amplification products from the first amplification reaction are run in a different lane or capillary than the amplification products from the second amplification reaction, the same dye may be used to label the primers in the first and second amplification reactions. Alternatively, if desired, different dyes may be used to label the primers in the first and second amplification reactions. If desired, in the embodiment where the amplification products from the first amplification reaction are run in a different lane or capillary than the amplification products from the second amplification reaction, the same dye may be used to label the primers in the first and second amplification reactions. Alternatively, if desired, different dyes may be used to label the primers in the first and second amplification reactions.

[1219] Alternatively, in some embodiments, the primers in the second amplification reaction are labeled with a different dye which is distinguishable from the dye used in the first amplification reaction. In this embodiment, the amplification reactions may be pooled and run in the same lane on a polyacrylamide gel or in the same capillary and the products from each amplification reaction are compared by comparing the amount of each dye present for each amplification product. FIGS. 3A and 3B illustrate one embodiment of this method in which the absence of an amplification product from the amplification reaction performed on a culture comprising a plurality of strains underexpressing genes required for proliferation which was contacted with the compound indicates that a test compound acts on the gene corresponding to the missing amplification product. It will be appreciated that the method may also be used to identify an amplification product which is overrepresented in an amplification reaction conducted on a culture or collection of strains overexpressing genes required for proliferation because the test compound acted on the corresponding gene.

[1220] If desired, rather than dividing the culture into aliquots, individual amplification reactions may be conducted on nucleic acids obtained from the culture or collection of strains. Each amplification reaction contains primers which will yield an amplification product specific for only one of the proliferation required genes. The resulting amplification products from each of the individual amplification reactions are pooled and amplification products having increased representation in the culture are identified as described above.

[1221] In another embodiment, a culture or collection of strains in which gene products required for proliferation are overexpressed from regulatable promoters which replaced the native promoters of the genes encoding these gene products is allowed to grow in the presence of a test compound for a desired number of generations. Preferably, the culture or collection of strains is allowed to grow in the presence of the test compound for at least 20 generations. Nucleic acids are isolated from the culture or collection of strains and an amplification reaction is performed using a primer which is complementary to a nucleotide sequence within the replacement promoter(s) or a nucleotide sequence adjacent to the a 5′ end thereof and primers which are complementary to a nucleotide sequence within the proliferation required genes or nucleotide sequences adjacent thereto. The resulting amplification product(s) is directly sequenced using a primer complementary to a nucleotide sequence within the replacement promoter.

[1222] In one embodiment of the present invention, the vector containing the nucleotide sequence encoding the proliferation-required gene product is obtained from a strain which proliferated more rapidly in the culture using methods such as plasmid preparation techniques. Nucleic acid sequencing techniques are then employed to determine the nucleotide sequence of the gene which was overexpressed.

[1223] Alternatively, the identity of the overexpressed gene product which is the target of the compound may be determined by performing a nucleic acid amplification reaction, such as a polymerase chain reaction (PCR), to identify the nucleotide sequence of the gene which was overexpressed. For example, aliquots of a nucleic acid preparation, such as a purified plasmid, from the strain which is recovered from the culture may each be contacted with pairs of PCR primers which would amplify a different proliferation-required gene to determine which pair of primers yields an amplification product.

[1224] An alternative method for determining the identity of the gene product described herein which is the target of the compound involves obtaining a nucleic acid array, such as a DNA chip, which contains each of the proliferation-required genes which were overexpressed in the strains in the culture. Each proliferation-required gene occupies a known location in the array. A nucleic acid preparation, such as a plasmid preparation, from the recovered strain is labeled with a detectable agent, such as radioactive or fluorescent moiety, and placed in contact with the nucleic acid array under conditions which permit the labeled nucleic acid to hybridize to complementary nucleic acids on the array. The location on the array to which the labeled nucleic acids hybridize is determined to identify the gene which was overexpressed in the recovered strain. If desired the hybridized nucleic acids from a culture which was contacted with the compound may be compared to the hybridized nucleic acids from a control culture which was not contacted with the compound. Alternatively, the hybridized nucleic acids from a culture which was contacted with the compound may be directly identified without comparison to nucleic acids from a control culture.

[1225] In some instances, more than one strain may proliferate more rapidly in the presence of the compound. This may result from a variety of causes. For example, the concentration of the compound may not have been high enough to restrict proliferation only to cells which overexpress one gene product (i.e. the target gene product). While strains which overexpress the target gene product will be the most prevalent strain in the culture, other strains may also have proliferated. In such instances, the identity of the gene product in the strain which is most prevalent in the culture may be identified by quantitating the levels of each of the genes encoding proliferation-required proteins in the culture. This may be accomplished by quantitative PCR, DNA sequencing, hybridization, or array technology as described above.

[1226] In other instances, multiple strains will exhibit more rapid proliferation in the culture as a result of a common functional attribute. For example, the strains which proliferate more rapidly may each overexpress a gene product with a common enzymatic activity, such as serine protease activity for example. Alternatively, the strains which proliferate more rapidly may each overexpress a gene product with a common functional domain, such as a cAMP binding domain. In such instances, the common attribute of the strains which proliferate more rapidly may provide information as to the mode of action of the compound or the biochemical activity of the target of the compound. For example, if all of the overexpressed genes in the strains which proliferated more rapidly are serine proteases, the compound acts by inhibiting serine protease activity and the target protein is a serine protease. If desired, the compound may be derivatized and the efficacy of the derivatized compound against each of the strains which proliferated more rapidly may be assessed as described herein in order to identify derivatives which are capable of interacting with a wide range of targets sharing a common activity or binding site (i.e. derivatives which have a greater ability to inhibit the proliferation of all the strains than the original compound) or to identify derivatives having greater specificity for a desired target (i.e. derivatives which have a greater specificity for one of the strains than the original compound). For example, it is possible that a nonessential gene product expressed in the cell might also bind to the initial test compound in addition to the gene product required for proliferation. In such an instance, it is desirable to obtain a derivative of the initial test compound which is specific for the gene product required for proliferation. In addition, it is possible that two gene products required for proliferation might bind to the initial test compound but specificity for one of the gene products is desired.

[1227] Rather than employing a single culture which contains multiple strains each of which overexpresses a proliferation-required gene product described herein, the methods of the present invention may be performed using an array of individual strains (i.e. a collection of strains) each of which overexpresses a different proliferation-required gene product. For example, individual strains each overexpressing a different proliferation-required gene product may be grown in different wells of a multiwell plate. Each well is contacted with the compound (and, where appropriate an agent which regulates the level of expression from the promoter). The level of proliferation of the strains in each of the wells is determined to identify a strain which proliferated more rapidly. The identity of the overexpressed gene product in the strain that proliferated more rapidly is determined as described above.

[1228] In another embodiment, individual strains each overexpressing a different proliferation-required gene product (i.e. a collection of strains) are grown at different locations on a solid medium, such as an agar plate. The medium contains the compound and where appropriate an agent which regulates the level of expression from the promoter). The level of proliferation of each of the strains is determined to identify a strain which proliferated more rapidly. The identity of the overexpressed gene product in the strain that proliferated more rapidly is determined as described above.

[1229] The above methods may be used to prioritize compound development or to determine whether the compound has been previously identified or whether the target of the compound is the target of a previously identified drug. In particular, if the product is a natural product, it is advantageous to determine whether it has been previously identified prior to investing significant effort in developing it. Thus, in some embodiments of the present invention, the target of a partially purified or purified natural product or a compound produced by combinatorial chemistry is identified using the methods described above and compared to the targets of known drugs. If the target is identical to that of a known drug, further development of the compound is halted.

[1230] Alternatively, an array of strains each of which overexpresses a different gene product described herein (i.e. a collection of strains) is grown on solid medium containing a compound to be evaluated. The location of each strain in the array and the gene product overexpressed by that strain is known. The pattern of colonies which grow in the presence of the compound is evaluated and compared to the pattern of colonies which grow in the presence of previously identified drugs. If the pattern of colonies which grow in the presence of the compound being evaluated is the same as the pattern of colonies which grow in the presence of a previously identified drug, further development of the compound is halted.

[1231] Additionally in some embodiments, the sequence of the gene product in a strain which proliferated more rapidly in the assays described above is compared to the sequence of gene products from heterologous organisms to determine the likely spectrum of species whose growth would be inhibited by the compound. If the gene product has a high degree of homology to gene products from heterologous species, it is likely that the compound would also inhibit the growth of these heterologous species. Homology may be determined using any of a variety of methods familiar to those skilled in the art. For example, homology may be determined using a computer program such as BLASTP or FASTA. The ability of the compound to inhibit the growth of the heterologous species may then be confirmed by comparing the growth of cells of the heterologous species in the presence and absence of the compound.

[1232] Current methods for identifying the target of compounds which inhibit cellular proliferation are laborious and time consuming. The above methods may be employed to allow the targets of a large number of compounds to be rapidly identified. In such methods, the methods described above are simultaneously performed for each of a large number of compounds. For example, the compounds may be members of a library of compounds generated using combinatorial chemistry or members of a natural product library. In such methods, a plurality of cultures each comprising a plurality of strains each of which overexpresses a different gene product required for proliferation or a plurality of collections of individual strains each of which overexpresses a different gene product required for proliferation is obtained. Each culture or collection of strains is contacted with a different compound in the library and the target of the compound is identified as described above.

[1233] In another embodiment, the gene product described herein on which a compound which inhibits the proliferation of an organism acts is identified using a culture which comprises a mixture of strains of the organism including strains which underexpress a different gene product which is required for proliferation of the organism (i.e. at least some of the strains in the culture underexpress a gene product which is required for proliferation of the organism). Preferably, each of the strains in the culture underexpress a different a gene product which is required for the proliferation of the organism (i.e. all of the strains in the culture underexpress a gene product which is required for the proliferation of the organism). In some embodiments, the culture comprises at least one strain which underexpresses a gene product selected from the group consisting of a gene product whose activity or level is inhibited by a nucleic acid comprising a nucleotide sequence selected from the group consisting of SEQ ID NOs.: 1-6213, a gene product encoded by a nucleic acid comprising a nucleotide sequence selected from the group consisting of SEQ ID NOs.: 6214-42397, a gene product comprising an amino acid sequence selected from the group consisting of SEQ ID NOs.: 42398-78581, a gene product whose activity or level is inhibited by a homologous antisense nucleic acid, a gene product encoded by a homologous coding nucleic acid, and a gene product comprising a homologous polypeptide.

[1234] Strains underexpressing the proliferation-required gene products described herein may be obtained using the methods described above. The culture may comprise any number of strains. For example the culture may comprise at least two strains, at least 10 strains, at least 20 strains, at least 30, strains, at least 50 strains, at least 100 strains, at least 300 strains or more than 300 strains which underexpress a gene product required for proliferation. In some embodiments, the strains in the culture in aggregate may underexpress all or most of the gene products required for proliferation of the organism.

[1235] The culture is contacted with a compound which inhibits proliferation of the organism. The compound may be a candidate drug compound obtained from any source. For example, the compound may be a compound generated using combinatorial chemistry, a compound from a natural product library, or an impure or partially purified compound, such as a compound in a partially purified natural extract. The culture is contacted with a sufficient concentration of the compound to inhibit the proliferation of strains of the organism in the culture which underexpress the gene product on which the compound acts, such that strains which do not underexpress the gene product on which the compound acts proliferate more rapidly in the culture than strains which do underexpress said gene product on which said compound acts. Thus, after a sufficient period of time, the strain which underexpresses the gene product on which the compound acts will be less prevalent in the culture than strains which do not underexpress the gene product on which the compound acts. In one embodiment, the growth conditions and incubation period are selected so that only one strain, the strain underexpressing the target of the compound, proliferates at a reduced rate in the culture. In another embodiment, the growth conditions may be selected so that the strain underexpressing the target of the compound is not recovered from the culture. Thus, in one embodiment, a plurality of cultures containing a plurality of strains each of which underexpresses a different proliferation-required gene product may be grown in the presence of varying concentrations of the compound. In addition to varying the compound concentrations, in embodiments where expression of the proliferation-required gene product is under the control of a regulatable promoter, the plurality of cultures may be grown at varying concentrations of an agent which regulates the level of expression from the promoter, such as an inducer or an agent which reduces the effect of a repressor on transcription from the promoter. It will be appreciated, that the cultures may be grown in liquid medium in the presence of the compound whose target is to be identified (and where appropriate in the presence of an agent which regulates the level of expression from the promoter) or alternatively, a liquid culture comprising the strains which underexpress the proliferation-required gene products may be grown in the absence of the compound whose target is to be identified and then introduced onto a solid medium containing the compound (and, where appropriate, also containing an agent which regulates the level of expression from the promoter).

[1236] The identity of the underexpressed gene product which is the target of the compound may be determined using a variety of methods. For example, in some embodiments of the present invention, the nucleic acids present in the culture or collection of strains which was contacted with the compound may be compared to the nucleic acids present in a control culture or collection of strains which was not contacted with the compound to identify nucleic acids which are underrepresented in the culture or collection of strains contacted with the test compound relative to the control culture or strains. Alternatively, in some embodiments, the nucleic acids present in a culture or collection of strains contacted with the test compound may be analyzed to identify those nucleic acids which are missing or present at reduced levels without comparison to a control culture or collection of strains.

[1237] In some embodiments of the present invention, the strains which proliferated more slowly in the culture or collection of strains, i.e. strains having an decreased ability to proliferate in the presence of a test compound or which do not proliferate in the presence of a test compound, are identified as follows. Amplification products which are correlated with each of the underexpressed genes and which are distinguishable from one another are obtained from a culture or collection grown in the presence of a test compound. The amplification products are distinguished from one another to determine whether a particular amplification product is underrepresented in the culture or collection of strains. In some embodiments, the amplification products corresponding to each of the gene products have lengths which permit them to be distinguished from one another. In another embodiment, one or more of the amplification products have similar or identical lengths but are distinguishable from one another based on a detectable agent, such as a dye, attached thereto. In some embodiments, amplification products which are underrepresented are identified by comparing the amplification products from the culture or collection of strains which was contacted with the test compound to the amplification products from a culture or collection of strains which was not contacted with the test compound. Alternatively, amplification products which are underrepresented in the culture or collection of strains may be identified simply by determining which amplification products are missing or present at reduced levels in the culture or collection of strains. The above methods for generating distinguishable amplification products may be used in conjunction with any of the methods for generating strains which underexpress gene products required for proliferation described herein in order to facilitate the identification of strains which proliferate more slowly in the presence of a test compound. For example, in some embodiments of the present invention, each of the native promoters of each of the genes encoding gene product required for proliferation are replaced by a single desired replacement promoter. After growth of the culture or collection of strains containing the strains in which the promoters have been replaced in the presence of a test compound for a desired period of time, an amplification reaction is performed on nucleic acids obtained from the culture as follows.

[1238] The nucleic acids from the culture or collection of strains are divided into at least two aliquots. In a preferred embodiment the nucleic acids from the culture or collection of strains are divided into four aliquots. A single primer complementary to a nucleotide sequence within the replacement promoter, within the proliferation required genes, or within nucleic acid sequences adjacent to the promoter or proliferation required genes is divided into four groups Each group is labeled with a distinct detectable dye, such as the 6FAM™, TET™, VIC™, HEX™, NED™, and PET™ dyes obtainable from Applied Biosystems (Foster City, Calif.). For example, the DS-3 1 or DS-33 dye sets available from Applied Biosystems (Foster City, Calif.) may be used to label the primers. Each of the groups of labeled primers are added to each of the aliquots of the nucleic acids from the culture or collection of strains such that each aliquot of nucleic acid receives a single labeled primer with a single detectable dye thereon.

[1239] Each of the aliquots of nucleic acids also receives a set of unlabeled primers, with each of the unlabeled primers being complementary to a nucleotide sequence within the promoter, within a nucleotide sequence which is unique to one of the genes encoding gene products required for proliferation which were placed under the control of the replacement promoter, or within nucleotide sequences adjacent to the promoter or proliferation required genes. Each of the aliquots receives primers unique to 1/N proliferation required genes which were placed under the control of the replacement promoter, where N is the number of aliquots (i.e. if the culture or collection of strains consisted of 100 strains in which a gene required for proliferation was placed under the control of the replacement promoter and was divided into four aliquots, then each of the four aliquots of nucleic acids from the culture or collection of strains would receive primers complementary to 25 of the genes). The unlabeled primers are selected so that each will yield an amplification product having a length distinguishable from the length of the amplification product produced with the other unlabeled primers. Preferably, the amplification products are between about 100-about 400 nucleotides in length, but any lengths which may be distinguished from each other may be used. In addition, in some of the embodiments some of the amplification products may have identical or very similar lengths but be distinguishable from one another due to labeling with distinguishable dyes.

[1240] A nucleic acid amplification reaction is conducted on each of the nucleic acid aliquots. The amplification products are then separated by length to identify amplification products decreased representation or which are absent in the culture or collection of strains. The amplification products are then correlated with the corresponding genes to determine which strains proliferated more slowly in the culture or collection of strains. If desired, amplification products having decreased representation in the culture may be identified by comparing the amplification products obtained from a culture or collection of strains which was contacted with the compound to amplification products obtained from a control culture or collection of strains which was not contacted with the compound. Alternatively, if desired, the amplification products which are missing or present at reduced levels in a culture which was contacted with the compound may be directly identified without comparison to a control culture which was not contacted with the compound.

[1241] For example, in some embodiments, the amplification products from each of the nucleic acid aliquots are pooled and subjected to capillary electrophoresis. The amplification products are detected by detecting the fluorescent dyes attached thereto and their lengths are determined to identify those amplification products having decreased representation in the culture or collection of strains. FIGS. 2A and 2B illustrate one embodiment of this method in which the absence of an amplification product from an amplification reaction performed on a culture comprising a plurality of strains underexpressing genes required for proliferation indicates that a test compound acts on the gene corresponding to the missing amplification product.

[1242] Alternatively, in another embodiment, a first amplification reaction is performed on nucleic acids obtained from a culture or collection of strains which was contacted with the compound using a first primer complementary to a nucleotide sequence present upstream or downstream of all of the overexpressed genes (such as a primer complementary to a nucleotide sequence in a replacement promoter upstream of all of the overexpressed genes) and a set of primers complementary to a nucleotide sequence unique to each of the strains (such as a primer complementary to a nucleotide sequence within each of the proliferation-required genes). One of the two amplification primers for each of the proliferation required genes is labeled with a dye as described above. Preferably, the common primer complementary to a nucleotide sequence upstream or downstream of all of the overexpressed genes is labeled with the dye. The primers used in the amplification reaction are designed so that the amplification product corresponding to each proliferation-required gene has a unique length. A second amplification reaction is conducted on a control culture or collection of strains which was not contacted with the compound using the same primers as in the first amplification reaction. The amplification products from the first amplification reaction are compared to those from the second amplification reaction to identify one or more amplification products which are underrepresented in the culture or collection of strains. For example, the amplification products from the first amplification reaction may be run in a separate lane of a polyacrylamide gel or a separate capillary than the amplification products from the second amplification reaction and the two lanes or capillaries are compared to one another.

[1243] Alternatively, in some embodiments, the primers in the second amplification reaction are labeled with a different dye which is distinguishable from the dye used in the first amplification reaction. In this embodiment, the amplification reactions may be pooled and run in the same lane on a polyacrylamide gel or in the same capillary and the products from each amplification reaction are compared by comparing the amount of each dye present for each amplification product. FIGS. 3A and 3B illustrate one embodiment of this method in which the absence of an amplification product from the amplification reaction performed on a culture comprising a plurality of strains underexpressing genes required for proliferation which was contacted with the compound indicates that a test compound acts on the gene corresponding to the missing amplification product.

[1244] If desired, rather than dividing the culture into aliquots, individual amplification reactions may be conducted on nucleic acids obtained from the culture or collection of strains. Each amplification reaction contains primers which will yield an amplification product specific for only one of the proliferation required genes. The resulting amplification products from each of the individual amplification reactions are pooled and amplification products having decreased representation in the culture are identified as described above.

[1245] In an alternative embodiment, the representation of each strain in the culture may be assessed by hybridizing detectably labeled nucleic acids encoding the proliferation-required gene products, or portions thereof, obtained from the culture to an array comprising nucleic acids encoding the gene products required for proliferation or portions thereof. Each nucleic acid encoding a gene product required for proliferation or portion thereof occupies a known location on the array. The signal from each location on the array is quantitated to identify those nucleic acids encoding a proliferation-required gene product which are underrepresented in the culture. If desired the hybridized nucleic acids from a culture which was contacted with the compound may be compared to the hybridized nucleic acids from a control culture which was not contacted with the compound. Alternatively, the hybridized nucleic acids from a culture which was contacted with the compound may be directly analyzed without comparison to nucleic acids from a control culture.

[1246] In another alternative, each strain underexpressing a gene product required for proliferation may be constructed to contain a unique nucleic acid sequence (referred to herein as a “tag”). The tag may be included in the chromosome of each strain or in an extrachromosomal vector. For example, the tag could be included in a vector encoding an antisense nucleic acid complementary to a gene encoding a gene product required for proliferation or a portion of such a gene or the tag may be included in the antisense nucleic acid itself. The representation of each strain in the culture may be assessed by performing an amplification reaction using primers complementary to each of the tags and quantitating the levels of the resulting amplification products to identify a tag which is underrepresented or absent from the culture. Since each tag corresponds to one strain, the strain which is underrepresented or absent from the culture may be identified. If desired the tags present in a culture which was contacted with the compound may be compared to the tags present in a control culture which was not contacted with the compound. Alternatively, the tags present in a culture which was contacted with the compound may be analyzed without comparison to a control culture.

[1247] It will be appreciated that, if desired, unique tags may also be used in embodiments in which gene products required for proliferation are overexpressed. In some aspects of such embodiments, the tags may be within or adjacent to the promoter which drives expression of the gene encoding the gene product. In such embodiments, the gene product which is overexpressed in strains which proliferate more rapidly in the culture may be identified by detecting the presence or amount of the unique tag corresponding to that gene product in the culture.

[1248] In some instances, more than one strain may proliferate less rapidly in the presence of the compound. This may result from a variety of causes. For example, the concentration of the compound may not have been high enough to reduce the proliferation only in cells which underexpress one gene product (i.e. the target gene product). While strains which underexpress the target gene product will be the least prevalent strain in the culture, other strains may also be underrepresented. In such instances, the identity of the gene product in the strain which is least prevalent in the culture (or not recovered from the culture) may be identified by quantitating the levels of each of the genes encoding proliferation-required proteins in the culture. This may be accomplished by quantitative PCR, DNA sequencing, hybridization, or array technology as described above.

[1249] In other instances, multiple strains will exhibit less rapid proliferation in the culture as a result of a common functional attribute. For example, the strains which proliferate less rapidly (or the strains which are not recovered from the culture) may each underexpress a gene product with a common enzymatic activity, such as serine protease activity for example. Alternatively, the strains which proliferate less rapidly (or the strains which are not recovered from the culture) may each underexpress a gene product with a common functional domain, such as a cAMP binding domain. In such instances, the common attribute of the strains which proliferate less rapidly (or the strains which are not recovered from the culture) may provide information as to the mode of action of the compound or the biochemical activity of the target of the compound. For example, if all of the underexpressed genes in the strains which proliferated less rapidly are serine proteases, the compound acts by inhibiting serine protease activity and the target protein is a serine protease. If desired, the compound may be derivatized and the efficacy of the derivatized compound against each of the strains which proliferated more rapidly may be assessed as described herein in order to identify derivatives which are capable of interacting with a wide range of targets sharing a common activity or binding site (i.e. derivatives which have a greater ability to inhibit the proliferation of all the strains than the original compound) or to identify derivatives having greater specificity for a desired target (i.e. derivatives which have a greater specificity for one of the strains than the original compound).

[1250] Rather than employing a single culture which contains multiple strains each of which underexpresses a proliferation-required gene product described herein, the methods of the present invention may be performed using an array of individual strains (i.e. a collection of strains) each of which underexpresses a different proliferation-required gene product. For example, individual strains each underexpressing a different proliferation-required gene product may be grown in different wells of a multiwell plate. Each well is contacted with the compound (and, where appropriate an agent which regulates the level of expression from the promoter). The level of proliferation of the strains in each of the wells is determined to identify a strain which proliferated less rapidly or which did not proliferate at all. The identity of the underexpressed gene product in the strain that proliferated less rapidly or which did not proliferate at all is determined as described above.

[1251] In another embodiment, individual strains each underexpressing a different proliferation-required gene product (i.e. a collection of strains) are grown at different locations on a solid medium, such as an agar plate. The medium contains the compound and, where appropriate, an agent which regulates the level of expression from the promoter. The level of proliferation of each of the strains is determined to identify a strain which proliferated less rapidly (or a strain which is not recovered from the culture). The identity of the underexpressed gene product in the strain that proliferated less rapidly (or the strain which is not recovered from the culture) is determined as described above.

[1252] The above methods may be used to prioritize compound development or to determine whether the compound has been previously identified or whether the target of the compound is the target of a previously identified drug. In particular, if the product is a natural product is advantageous to determine whether it has been previously identified prior to investing significant effort in developing it. Thus, in some embodiments of the present invention, the target of a partially purified or purified natural product or a compound produced by combinatorial chemistry is identified using the methods described above and compared to the targets of known drugs. If the target is identical to that of a known drug, further development of the compound is halted.

[1253] Alternatively, an array of strains each of which underexpresses a different gene product described herein (i.e. a collection of strains) is grown on solid medium containing a compound to be evaluated. The location of each strain in the array and the gene product underexpressed by that strain is known. The pattern of colonies which grow less rapidly or fail to grow in the presence of the compound is evaluated and compared to the pattern of colonies which grow less rapidly or fail to grow in the presence of previously identified drugs. If the pattern of colonies which grow less rapidly or fail to grow in the presence of the compound being evaluated is the same as the pattern of colonies which grow less rapidly or fail to grow in the presence of a previously identified drug, further development of the compound is halted.

[1254] Additionally, the nucleotide sequence of the gene product described herein in a strain which proliferated less rapidly (or a strain which was not recovered from the culture) in the assays described above is compared to the nucleotide sequence of gene products from heterologous organisms to determine the likely spectrum of species whose growth would be inhibited by the compound. If the gene product has a high degree of homology to gene products from heterologous species, it is likely that the compound would also inhibit the growth of these heterologous species. Homology may be determined using any of a variety of methods familiar to those skilled in the art. For example, homology may be determined using a computer program such as BLASTP or FASTA. The ability of the compound to inhibit the growth of the heterologous species may then be confirmed by comparing the growth of cells of the heterologous species in the presence and absence of the compound.

[1255] In other embodiments, the present invention uses collections or cultures of strains comprising both strains which overexpress gene products described herein required for cellular proliferation and strains which underexpress the same gene products required for cellular proliferation. The gene product which is overexpressed or underexpressed in each strain may be a gene product whose activity or level is inhibited by a nucleic acid comprising a nucleotide sequence selected from the group consisting of SEQ ID NOs.: 1-6213, a gene product encoded by a nucleic acid comprising a nucleotide sequence selected from the group consisting of SEQ ID NOs.: 6214-42397, a gene product comprising an amino acid sequence selected from the group consisting of SEQ ID NOs.: 42398-78581, a gene product whose activity or level is inhibited by a homologous antisense nucleic acid, a gene product encoded by a homologous coding nucleic acid, and a gene product comprising a homologous polypeptide.

[1256] The culture or collection of strains is contacted with a compound and the nucleic acids present in the culture or collection of strains are analyzed. Preferably, nucleic acids derived from overexpressing strains can be distinguished from those derived from underexpressing strains. For example, the overexpressing strains may be obtained using promoter replacement as described above while the underexpressing strains may be obtained by expressing antisense nucleic acids. Accordingly, in one embodiment, amplification primers may be designed which will uniquely amplify nucleic acids from the overexpressing strains or the underexpressing strains. If a compound acts on a gene product which was overexpressed and underexpressed in the culture, then the amplification product obtained from the strain in the culture or collection which overexpressed gene product will be overrepresented in the culture or collection while the amplification product obtained from the strain which underexpressed the gene product will be underrepresented in the culture or collection. If desired, nucleic acids from a culture or collection which was contacted with the compound may be compared to nucleic acids from a control culture or collection which was not contacted with the compound. Alternatively, nucleic acids from a culture or collection which was contacted with the compound may be directly analyzed without comparison to a control culture or collection.

[1257] In some embodiments, strains are constructed in which a nucleic acid complementary to a gene encoding a gene product described herein required for proliferation or a portion thereof is operably linked to a regulatable promoter. For example, in some embodiments, the strains may transcribe an antisense nucleic acid selected from the group consisting of SEQ ID NOs.: 1-6213 or fragments thereof which inhibit proliferation or reduce the activity or level of the gene product encoded by the gene comprising a nucleotide sequence complementary to the antisense nucleic acid or homologous antisense nucleic acids or fragments thereof. In other embodiments, the strains may transcribe an antisense nucleic acid which reduces the activity or level of a gene product encoded by SEQ ID NOs.: 6214-42397, the polypeptides of SEQ ID NOs.: 42398-78581, homologous coding nucleic acids or homologous polypeptides. A culture comprising a plurality of such strains wherein each strain expresses an antisense nucleic acid against a different gene product required for proliferation is grown in the presence of varying levels of a compound which inhibits proliferation and in the presence of varying levels of an agent which regulates the level of transcription from the regulatable promoter. Nucleic acids samples are obtained from the culture, detectably labeled and hybridized to a solid support comprising nucleic acids containing the genes encoding the proliferation-required gene products or a portion thereof. The level of hybridization is quantitated for each nucleic acid encoding each of the proliferation-required gene products to determine the rate at which each of the strains proliferated in the culture. If the antisense nucleic acid expressed by a strain in the culture is not complementary to all or a portion of the gene encoding the target of the compound (i.e. a nonspecific strain), then the hybridization intensity for that strain will not be correlated with the concentration of the compound (See FIG. 4), while if the antisense nucleic acid expressed by a strain in the culture is complementary to all or a portion of the gene encoding the target of the compound, the hybridization intensity for that strain will be intimately correlated with the concentration of the compound (See FIG. 5). In this manner, the target of the compound may be identified. It will be appreciated that, as described above, rather than growing the strains in a single culture, each strain may be grown in a different location on a solid medium or in a different well of a multiwell plate.

[1258] The methods described above can be simultaneously performed for each of a large number of compounds. For example, the compounds may be members of a library of compounds generated using combinatorial chemistry or members of a natural product library. In such methods, a plurality of cultures each comprising a plurality of strains each of which overexpresses or underexpresses a different gene product required for proliferation or a plurality of collections of individual strains each of which overexpresses or underexpresses a different gene product required for proliferation is obtained. Each culture or collection of strains is contacted with a different compound in the library and the target of the compound is identified as described above.

[1259] In still another embodiment, the antisense nucleic acids of the present invention (including the antisense nucelic acids of SEQ ID NOs. 1-6213 fragments thereof or homologous antisense nucleic acids or fragements thereof) that inhibit bacterial growth or proliferation can be used as antisense therapeutics for killing bacteria. The antisense sequences can be complementary to one of SEQ ID NOs.: 6214-42397 or fragments thereof, homologous coding nucleic acids or fragments thereof. Alternatively, antisense therapeutics can be complementary to operons in which proliferation-required genes reside (i.e. the antisense nucleic acid may hybridize to a nucleotide sequence of any gene in the operon in which the proliferation-required genes reside). Further, antisense therapeutics can be complementary to a proliferation-required gene or portion thereof with or without adjacent noncoding sequences, an intragenic sequence (i.e. a sequence within a gene), an intergenic sequence (i.e. a sequence between genes), a sequence spanning at least a portion of two or more genes, a 5′ noncoding region or a 3′ noncoding region located upstream or downstream from the actual sequence that is required for bacterial proliferation or an operon containing a proliferation-required gene.

[1260] In addition to therapeutic applications, the present invention encompasses the use of nucleic acids complementary to nucleic acids required for proliferation as diagnostic tools. For example, nucleic acid probes comprising nucleotide sequences complementary to proliferation-required sequences that are specific for particular species of cells or microorganisms can be used as probes to identify particular microorganism species or cells in clinical specimens. This utility provides a rapid and dependable method by which to identify the causative agent or agents of a bacterial infection. This utility would provide clinicians the ability to accurately identify the species responsible for the infection and administer a compound effective against it. In an extension of this utility, antibodies generated against proteins translated from mRNA transcribed from proliferation-required sequences can also be used to screen for specific cells or microorganisms that produce such proteins in a species-specific manner.

[1261] Other embodiments of the present invention include methods of identifying compounds which inhibit the activity of gene products required for cellular proliferation using rational drug design. As discussed in more detail below, in such methods, the structure of the gene product is determined using techniques such as x-ray crystallography or computer modeling. Compounds are screened to identify those which have a structure which would allow them to interact with the gene product or a portion thereof to inhibit its activity. The compounds may be obtained using any of a variety of methods familiar to those skilled in the art, including combinatorial chemistry. In some embodiments, the compounds may be obtained from a natural product library. In some embodiments, compounds having a structure which allows them to interact with the active site of a gene product, such as the active site of an enzyme, or with a portion of the gene product which interacts with another biomolecule to form a complex are identified. If desired, lead compounds may be identified and further optimized to provide compounds which are highly effective against the gene product.

[1262] The following examples teach the genes of the present invention and a subset of uses for the genes identified as required for proliferation. These examples are illustrative only and are not intended to limit the scope of the present invention.

### EXAMPLES

[1263] The following examples are directed to the identification and exploitation of genes required for proliferation. Methods of gene identification are discussed as well as a variety of methods to utilize the identified sequences. It will be appreciated that any of the antisense nucleic acids, proliferartion-required genes or proliferation-required gene products described herein, or portions thereof, may be used in the procedures described below, including the antisense nucleic acids of SEQ ID NOs.: 1-6213, the nucleic acids of SEQ ID NOS.: 6214-42397, or the polypeptides of SEQ ID NOs.: 42398-78581. Likewise, homologous antisense nucleic acids, homologous coding nucleic acids, homologous polypeptides or portions of any of the above-mentioned nucleic acids or polypeptides, may be used in any of the procedures described below.

[1264] Genes Identified as Required for Proliferation of Escherichia coli, Staphylococcus aureus, Enterococcus faecalis, Klebsiella pneumoniae, Pseudomonas aeruginosa and Salmonella typhimurium.

[1265] Genomic fragments were operably linked to an inducible promoter in a vector and assayed for growth inhibition activity. Example 1 describes the examination of a library of genomic fragments cloned into vectors comprising inducible promoters. Upon induction with xylose or IPTG, the vectors produced an RNA molecule corresponding to the subcloned genomic fragments. In those instances where the genomic fragments were in an antisense orientation with respect to the promoter, the transcript produced was complementary to at least a portion of an mRNA (messenger RNA) encoding a Escherichia coli, Staphylococcus aureus, Enterococcus faecalis, Klebsiella pneumoniae, Pseudomonas aeruginosa or Salmonella typhimurium gene product such that they interacted with sense mRNA produced from various Escherichia coli, Staphylococcus aureus, Enterococcus faecalis, Klebsiella pneumoniae, Pseudomonas aeruginosa or Salmonella typhimurium genes and thereby decreased the translation efficiency or the level of the sense messenger RNA thus decreasing production of the protein encoded by these sense mRNA molecules. In cases where the sense mRNA encoded a protein required for proliferation, bacterial cells containing a vector from which transcription from the promoter had been induced failed to grow or grew at a substantially reduced rate. Additionally, in cases where the transcript produced was complementary to at least a portion of a non-translated RNA and where that non-translated RNA was required for proliferation, bacterial cells containing a vector from which transcription from the promoter had been induced also failed to grow or grew at a substantially reduced rate. In contrast, cells grown under non-inducing conditions grow at a normal rate.

[1266] The above method was used to identify genes required for cellular proliferation in Escherichia coli, Staphylococcus aureus, Enterococcus faecalis, Klebsiella pneumoniae, Pseudomonas aeruginosa and Salmonella typhimurium. Additionally, a number of genes required for cellular proliferation in Escherichia coli, Staphylococcus aureus, Enterococcus faecalis, Klebsiella pneumoniae, Pseudomonas aeruginosa and Salmonella typhimurium, which have been described in the following U.S. Patent Applications, the disclosures of which are incorporated herein by reference in their entireties: U.S. patent application Ser. No. 09/492,709, filed Jan. 27, 2000; U.S. patent application Ser. No. 09/711,164, filed Nov. 9, 2000; U.S. patent application Ser. No. 09/741,669, filed Dec. 19, 2000 and U.S. patent application Ser. No. 09/815,242 filed Mar. 21, 2001, U.S. Provisional Patent Application Serial No. 60/342,923, filed Oct. 25, 2001, have been previously identified using the above method.

### Example 1

[1267] Inhibition of Bacterial Proliferation after Induction of Antisense Expression

[1268] To identify genes required for proliferation of E. coli, random genomic fragments were cloned into the IPTG-inducible expression vector pLEX5BA (Krause et al., J. Mol. Biol. 274: 365 (1997), the disclosure of which is incorporated herein by reference in its entirety) or a modified version of pLEX5BA, pLEX5BA-3′ in which a synthetic linker containing a T7 terminator was ligated between the PstI and HindIII sites of pLEX5BA. In particular, to construct pLEX5BA-3′, the following oligonucleotides were annealed and inserted into the PstI and HindIII sites of pLEX5BA:

| | |
|---|---|
| 5′-GTCTAGCATAACCCCTTGGGGCCTCTAAACGGGTCCTTGAGGGGTTTTTTGA-3′ | (SEQ ID NO: 78584) |
| 5′-AGCTTCAAAAAACCCCTCAAGGACCCGTTTAGAGGCCCCAAGGGGTTAT | (SEQ ID NO: 78585) |
| GCTAGACTGCA-3′ | |

[1269] Random fragments of E. coli genomic DNA were generated by DNAseI digestion or sonication, filled in with T4 polymerase, and cloned into the SmaI site of pLEX5BA or pLEX5BA-3′. Upon activation or induction, the promoter transcribed the random genomic fragments.

[1270] A number of vectors which allow the production of transcripts which have an extended lifetime in E. coli as well as other Gram negative bacteria can also be utilized in conjunction with these antisense inhibition experiments. Such vectors are described in U.S. Provisional Patent Application Serial No. 60/343,512, filed Dec. 21, 2001, the disclosure of which is incorporated herein by reference in its entirety. Briefly, the stabilized antisense RNA may comprise an antisense RNA which was identified as inhibiting proliferation as described above which has been engineered to contain at least one stem loop flanking each end of the antisense nucleic acid. In some embodiments, the at least one stem-loop structure formed at the 5′ end of the stabilized antisense nucleic acid comprises a flush, double stranded 5′ end. In some embodiments, one or more of the stem loops comprises a rho independent terminator. In additional embodiments, the stabilized antisense RNA lacks a ribosome binding site. In further embodiments, the stabilized RNA lacks sites which are cleaved by one or more RNAses, such as RNAse E or RNAse III. In some embodiments, the stabilized antisense RNA may be transcribed in a cell which the activity of at least one enzyme involved in RNA degradation has been reduced. For example, the activity of an enzyme such as RNase E, RNase II, RNase III, polynucleotide phosphorylase, and poly(A) polymerase, RNA helicase, enolase or an enzyme having similar functions may be reduced in the cell.

[1271] To study the effects of transcriptional induction in liquid medium, growth curves were carried out by back diluting cultures 1:200 into fresh media with or without 1 mM IPTG and measuring the OD₄₅₀ every 30 minutes (min). To study the effects of transcriptional induction on solid medium, 10², 10³, 10⁴, 10⁵, 10⁶, 10⁷ and 10⁸ fold dilutions of overnight cultures were prepared. Aliquots of from 0.5 to 3 μl of these dilutions were spotted on selective agar plates with or without 1 mM IPTG. After overnight incubation, the plates were compared to assess the sensitivity of the clones to IPTG.

[1272] Of the numerous clones tested, some clones were identified as containing a sequence that inhibited E. coli growth after IPTG induction. Accordingly, the gene to which the inserted nucleic acid sequence corresponds, or a gene within the operon containing the inserted nucleic acid, is required for proliferation in E. coli.

[1273] Nucleic acids involved in proliferation of Staphylococcus aureus, Enterococcus faecalis, Klebsiella pneumoniae, Pseudomonas aeruginosa and Salmonella typhimurium were identified as follows. Randomly generated fragments of Staphylococcus aureus, Enterococcus faecalis, Klebsiella pneumoniae, Pseudomonas aeruginosa or Salmonella typhimurium genomic DNA were transcribed from inducible promoters.

[1274] In the case of Staphylococcus aureus, a novel inducible promoter system, XylT5, comprising a modified T5 promoter fused to the xylO operater from the xylA promoter of Staphylococcus aureus was used. The promoter is described in U.S. patent application Ser. No. 10/032,393, filed Dec. 21, 2001, the disclosure of which is incorporated herein by reference in its entirety. Transcription from this hybrid promoter is inducible by xylose.

[1275] Randomly generated fragments of Salmonella typhimurium genomic DNA were transcribed from an IPTG inducible promoter in pLEX5BA (Krause et al., J. Mol. Biol. 274: 365 (1997) or a derivative thereof Randomly generated fragements of Klebsiella pneumoniae genomic DNA were expressed from an IPTG inducible promoter in pLEX5BA-Kan. To construct pLEX5BA-kan, pLEX5BA was digested to completion with ClaI in order to remove the bla gene. Then the plasmid was treated with a partial NotI digestion and blunted with T4 DNA polymerase. A 3.2 kbp fragment was then gel purified and ligated to a blunted 1.3 kbp kan gene from pKanπ. Kan resistant transformants were selected on Kan plates. Orientation of the kan gene was checked by SmaI digestion. A clone, which had the kan gene in the same orientation as the bla gene, was used to identify genes required for proliferation of Klebsiella pneumoniae.

[1276] Randomly generated fragments of Pseudomonas aeruginosa genomic DNA were trancribed from a two-component inducible promoter system. Integrated on the chromosome was the T7 RNA polymerase gene regulated by lacUV5/lacO (Brunschwig, E. and Darzins, A. 1992. Gene 111:35-41, the disclosure of which is incorporated herein by reference in its entirety). On a separate plasmid, a T7 gene 10 promoter, which is transcribed by T7 RNA polymerase, was fused with a lacO operator followed by a multiple cloning site.

[1277] Should the genomic DNA downstream of the promoter contain, in an antisense orientation, at least a portion of an mRNA or a non-translated RNA encoding a gene product involved in proliferation, then induction of transcription from the promoter will result in detectable inhibition of proliferation.

[1278] In the case of Staphylococcus aureus, a shotgun library of Staphylococcus aureus genomic fragments was cloned into the vector pXyIT5-P15a, which harbors the XylT5 inducible promoter. The vector was linearized at a unique BamHI site immediately downstream of the XyIT5 promoter/operator. The linearized vector was treated with shrimp alkaline phosphatase to prevent reclosure of the linearized ends. Genomic DNA isolated from Staphylococcus aureus strain RN450 was fully digested with the restriction enzyme Sau3A , or , alternatively, partially digested with DNase I and “blunt-ended” by incubating with T4 DNA polymerase. Random genomic fragments between 200 and 800 base pairs in length were selected by gel purification. The size-selected genomic fragments were added to the linearized and dephosphorylated vector at a molar ratio of 0.1 to 1, and ligated to form a shotgun library.

[1279] The ligated products were transformed into electrocompetent E. coli strain XL1-Blue MRF (Stratagene) and plated on LB medium with supplemented with carbenicillin at 100 μg/ml. Resulting colonies numbering 5×10⁵ or greater were scraped and combined, and were then subjected to plasmid purification.

[1280] The purified library was then transformed into electrocompetent Staphylococcus aureus RN4220. Resulting transformants were plated on agar containing LB+0.2% glucose (LBG medium)+chloramphenicol at 15 μg/ml (LBG+CM15 medium) in order to generate 100 to 150 platings at 500 colonies per plating. The colonies were subjected to robotic picking and arrayed into wells of 384 well culture dishes. Each well contained 100 μl of LBG+CM15 liquid medium. Inoculated 384 well dishes were incubated 16 hours at 37° C., and each well was robotically gridded onto solid LBG+CM15 medium with or without 2% xylose. Gridded plates were incubated 16 hours at 37° C., and then manually scored for arrayed colonies that were growth-compromised in the presence of xylose.

[1281] Arrayed colonies that were growth-sensitive on medium containing 2% xylose, yet were able to grow on similar medium lacking xylose, were subjected to further growth sensitivity analysis as follows: Colonies from the plate lacking xylose were manually picked and inoculated into individual wells of a 96 well culture dish containing LBG+CM15, and were incubated for 16 hours at 37° C. These cultures were robotically diluted 1/100 into fresh medium and allowed to incubate for 4 hours at 37° C., after which they were subjected to serial dilutions in a 384 well array and then gridded onto media containing 2% xylose or media lacking xylose. After growth for 16 hours at 37° C., the arrays that resulted on the two media were compared to each other. Clones that grew similarly at all dilutions on both media were scored as a negative and were no longer considered. Clones that grew on xylose medium but failed to grow at the same serial dilution on the non-xylose plate were given a score based on the differential, i.e. should the clone grow at a serial dilution of 10⁴ or less on the xylose plate and grow at a serial dilution of 10⁸ or less on the non-xylose plate, then the corresponding clone received a score of “4” representing the log difference in growth observed.

[1282] For Salmonella typhimurium and Klebsiella pneumoniae growth curves were carried out by back diluting cultures 1:200 into fresh media containing 1 mM IPTG or media lacking IPTG and measuring the OD₄₅₀ every 30 minutes (min). To study the effects of transcriptional induction on solid medium, 10², 10³, 10⁴, 10⁵, 10⁶, 10⁷ and 10⁸ fold dilutions of overnight cultures were prepared. Aliquots of from 0.5 to 3 μl of these dilutions were spotted on selective agar plates with or without 1 mM IPTG. After overnight incubation, the plates were compared to assess the sensitivity of the clones to IPTG.

[1283] Nucleic acids involved in proliferation of Pseudomonas aeruginosa were identified as follows. Randomly generated fragments of Pseudomonas aeruginosa genomic DNA were transcribed from a two-component inducible promoter system. Integrated on the chromosome was the T7 RNA polymerase gene regulated by lacUV5/lacO (Brunschwig, E. and Darzins, A. 1992. Gene 111:35-41). On an expression plasmid there was a T7 gene 10 promoter, which is transcribed by T7 RNA polymerase, fused with a lacO operator followed by a multiple cloning site. Transcription from this hybrid promoter is inducible by IPTG. Should the genomic DNA downstream of the promoter contain, in an antisense orientation, at least a portion of an mRNA encoding a gene product involved in proliferation, then induction of expression from the promoter will result in detectable inhibition of proliferation.

[1284] A shotgun library of Pseudomonas aeruginosa genomic fragments was cloned into the vectors pEP5, pEP5S, or other similarly constructed vectors which harbor the T7lacO inducible promoter. The vector was linearized at a unique SmaI site immediately downstream of the T7lacO promoter/operator. The linearized vector was treated with shrimp alkaline phosphatase to prevent reclosure of the linearized ends. Genomic DNA isolated from Pseudomonas aeruginosa strain PAO1 was partially digested with DNase I and “blunt-ended” by incubating with T4 DNA polymerase. Random genomic fragments between 200 and 800 base pairs in length were selected by gel purification. The size-selected genomic fragments were added to the linearized and dephosphorylated vector at a molar ratio of 2 to 1, and ligated to form a shotgun library.

[1285] The ligated products were transformed into electrocompetent E. coli strain XL1-Blue MRF (Stratagene) and plated on LB medium with carbenicillin at 100 i g/ml or Streptomycin 100 i g/ml. Resulting colonies numbering 5×10⁵ or greater were scraped and combined, and were then subjected to plasmid purification.

[1286] The purified library was then transformed into electrocompetent Pseudomonas aeruginosa strain PAO1. Resulting transformants were plated on LB agar with carbenicillin at 100 i g/ml or Streptomycin 40 i g/ml in order to generate 100 to 150 platings at 500 colonies per plating. The colonies were subjected to robotic picking and arrayed into wells of 384 well culture dishes. Each well contained 100 i l of LB+CB 100 or Streptomycin 40 liquid medium. Inoculated 384 well dishes were incubated 16 hours at room temperature, and each well was robotically gridded onto solid LB+CB100 or Streptomycin 40 medium with or without 1 mM IPTG. Gridded plates were incubated 16 hours at 37° C., and then manually scored for arrayed colonies that were growth-compromised in the presence of IPTG.

[1287] Arrayed colonies that were growth-sensitive on medium containing 1 mM IPTG, yet were able to grow on similar medium lacking IPTG, were subjected to further growth sensitivity analysis as follows: Colonies from the plate lacking IPTG were manually picked and inoculated into individual wells of a 96 well culture dish containing LB+CB100 or Streptomycin 40, and were incubated for 16 hours at 30° C. These cultures were robotically diluted 1/100 into fresh medium and allowed to incubate for 4 hours at 37° C., after which they were subjected to serial dilutions in a 384 well array and then gridded onto media with and without 1 mM IPTG. After growth for 16 hours at 37° C., the arrays of serially diluted spots that resulted were compared between the two media. Clones that grew similarly at all dilutions on both media were scored as a negative and were no longer considered. Clones that grew on IPTG medium but failed to grow at the same serial dilution on the non-IPTG plate were given a score based on the differential, i.e. should the clone grow at a serial dilution of 10⁴ or less on the IPTG plate and grow at a serial dilution of 10⁸ or less on the IPTG plate, then the corresponding clone received a score of “4” representing the log difference in growth observed.

[1288] Following the identification of those vectors that, upon induction, negatively impacted Pseudomonas aeruginosa growth or proliferation, the inserts or nucleic acid fragments contained in those vectors were isolated for subsequent characterization. Vectors of interest were subjected to nucleic acid sequence determination.

[1289] Nucleic acids involved in proliferation of E. faecalis were identified as follows. Randomly generated fragments of genomic DNA were expressed from the vectors pEPEF3 or pEPEF14, which contain the CP25 or P59 promoter, respectively, regulated by the xyl operator/repressor. These plasmids as well as other vectors useful for the expression of nucleic acids in Enterococcus faecalis and other Gram positive organisms are described in U.S. patent application Ser. No. 10/032,393, filed Dec. 21, 2001, the disclosure or which is incorportated herein by reference in its entirety. Should the genomic DNA downstream of the promoter contain, in an antisense orientation, at least a portion of a mRNA encoding a gene product involved in proliferation, then induction of expression from the promoter will result in detectable inhibition of proliferation.

[1290] A shotgun library of E. faecalis genomic fragments was cloned into the vector pEPEF3 or pEPEF14, which harbor xylose inducible promoters. The vector was linearized at a unique SmaI site immediately downstream of the promoter/operator. The linearized vector was treated with alkaline phosphatase to prevent reclosure of the linearized ends. Genomic DNA isolated from E. faecalis strain OG1RF was partially digested with DNase I and “blunt-ended” by incubating with T4 DNA polymerase. Random genomic fragments between 200 and 800 base pairs in length were selected by gel purification. The size-selected genomic fragments were added to the linearized and dephosphorylated vector at a molar ratio of 2 to 1, and ligated to form a shotgun library.

[1291] The ligated products were transformed into electrocompetent E. coli strain TOP10 cells (Invitrogen) and plated on LB medium with erythromycin (Erm) at 150 μg/ml. Resulting colonies numbering 5×10⁵ or greater were scraped and combined, and were then subjected to plasmid purification.

[1292] The purified library was then transformed into electrocompetent E. faecalis strain OG1RF. Resulting transformants were plated on Todd-Hewitt (TH) agar with erythromycin at 10 μg/ml in order to generate 100 to 150 platings at 500 colonies per plating. The colonies were subjected to robotic picking and arrayed into wells of 384 well culture dishes. Each well contained 100 μl of THB+Erm 10 μg/ml. Inoculated 384 well dishes were incubated 16 hours at room temperature, and each well was robotically gridded onto solid TH agar+Erm with or without 5% xylose. Gridded plates were incubated 16 hours at 37° C., and then manually scored for arrayed colonies that were growth-compromised in the presence of xylose.

[1293] Arrayed colonies that were growth-sensitive on medium containing 5% xylose, yet were able to grow on similar medium lacking xylose, were subjected to further growth sensitivity analysis. Colonies from the plate lacking xylose were manually picked and inoculated into individual wells of a 96 well culture dish containing THB+Erm 10, and were incubated for 16 hours at 30° C. These cultures were robotically diluted 1/100 into fresh medium and allowed to incubate for 4 hours at 37° C., after which they were subjected to serial dilution on plates containing 5% xylose or plates lacking xylose. After growth for 16 hours at 37° C., the arrays of serially diluted spots that resulted were compared between the two media. Colonies that grew similarly on both media were scored as a negative and corresponding colonies were no longer considered. Colonies on xylose medium that failed to grow to the same serial dilution compared to those on the non-xylose plate were given a score based on the differential. For example, colonies on xylose medium that only grow to a serial dilution of −4 while they were able to grow to −8 on the non-xylose plate, then the corresponding transformant colony received a score of “4” representing the log difference in growth observed.

[1294] Following the identification of those vectors that, upon induction, negatively impacted E. faecalis growth or proliferation, the inserts or nucleic acid fragments contained in those expression vectors were isolated for subsequent characterization. The inserts in the vectors of interest were subjected to nucleotide sequence determination.

[1295] It will be appreciated that other restriction enzymes and other endonucleases or methodologies may be used to generate random genomic fragments. In addition, random genomic fragments may be generated by mechanical shearing. Sonication and nebulization are two such techniques commonly used for mechanical shearing of DNA.

### Example 2

[1296] Nucleotide Sequence Determination of Identified Clones Transcribing Nucleic Acid Fragments with Detrimental Effects on Escherichia coli, Staphylococcus aureus, Enterococcus faecalis, Klebsiella pneumoniae, Pseudomonas aeruinosa or Salmonella typhimurium Proliferation

[1297] Plasmids from clones that received a dilution plating score of “2” or greater were isolated to obtain the genomic DNA insert responsible for growth inhibition as follows.

[1298] The nucleotide sequences of the nucleic acid sequences which inhibited the growth of Escherichia coli were determined using plasmid DNA isolated using QIAPREP (Qiagen, Valencia, Calif.) and methods supplied by the manufacturer. The primers used for sequencing the inserts were 5′-TGTTTATCAGACCGCTT-3′ (SEQ ID NO: 78586) and 5′-ACAATTTCACACAGCCTC-3′ (SEQ ID NO: 78587). These sequences flank the polylinker in pLEX5BA.

[1299] The nucleotide sequences of the nucleic acid sequences which inhibited the growth of Staphylococcus aureus were determined as follows. Staphylococcus aureus were grown in standard laboratory media (LB or TB with 15 ug/ml Chloramphenicol to select for the plasmid). Growth was carried out at 37° C. overnight in culture tubes or 2 ml deep well microtiter plates.

[1300] Lysis of Staphylococcus aureus was performed as follows. Cultures (2-5 ml) were centrifuged and the cell pellets resuspended in 1.5 mg/ml solution of lysostaphin (20 μl/ml of original culture) followed by addition of 250 μl of resuspension buffer (Qiagen). Alternatively, cell pellets were resuspended directly in 250 μl of resuspension buffer (Qiagen) to which 5-20 μl of a 1 mg/ml lysostaphin solution were added.

[1301] DNA was isolated using Qiagen miniprep kits or Wizard (Qiagen) miniprep kits according to the instructions provided by the manufacturer.

[1302] The genomic DNA inserts were amplified from the purified plasmids by PCR as follows.

[1303] 1 μl of Qiagen purified plasmid was put into a total reaction volume of 25 μl Qiagen Hot Start PCR mix. For Staphylococcus aureus, the following primers were used in the PCR reaction:

[1304] pXylT5F: CAGCAGTCTGAGTTATAAAATAG (SEQ ID NO: 78588)

[1305] LexL TGTTTTATCAGACCGCTT (SEQ ID NO: 78589)

[1306] Similar methods were conducted for Salmonella typhimurium and Klebsiella pneumoniae. For Salmonella typhimurium and Klebsiella pneumoniae the following primers were used:

[1307] 5′-TGTTTTATCAGACCGCTT-3′ (SEQ ID NO: 78589) and

[1308] 5′-ACAATTTCACACAGCCTC-3′ (SEQ ID NO: 78587)

[1309] PCR was carried out in a PE GenAmp with the following cycle times:

[1310] Step 1. 95° C. 15 min

[1311] Step 2. 94° C. 45 sec

[1312] Step 3. 54° C. 45 sec

[1313] Step 4. 72° C. 1 minute

[1314] Step 5. Return to step 2, 29 times

[1315] Step 6. 72° C. 10 minutes

[1316] Step 7. 4° C. hold

[1317] The PCR products were cleaned using Qiagen Qiaquick PCR plates according to the manufacturer's instructions.

[1318] For Pseudomonas aeruginosa, plasmids from transformant colonies that received a dilution plating score of “2” or greater were isolated to obtain the genomic DNA insert responsible for growth inhibition as follows. Pseudomonas aeruginosa were grown in standard laboratory media (LB with carbenicillin at 100 i g/ml or Streptomycin 40 i g/ml to select for the plasmid). Growth was carried out at 30° C. overnight in 100 ul culture wells in microtiter plates. To amplify insert DNA 2 ul of culture were placed into 25 ul Qiagen Hot Start PCR mix. PCR reactions were in 96 well microtiter plates. For plasmid pEP5S the following primers were used in the PCR reaction:

[1319] T7L1+: GTCGGCGATATAGGCGCCAGCAACCG (SEQ ID NO: 78590)

[1320] pStrA3: ATAATCGAGCATGAGTATCATACG (SEQ ID NO: 78591)

[1321] PCR was carried out in a PE GenAmp with the following cycle times:

[1322] Step 1. 95° C. 15min

[1323] Step 2. 94° C. 45 sec

[1324] Step 3. 54° C. 45 sec

[1325] Step 4. 72° C. 1 minute

[1326] Step 5. Return to step 2, 29 times

[1327] Step 6. 72° C. 10 minutes

[1328] Step 7. 4° C. hold

[1329] The PCR products were cleaned using Qiagen Qiaquick PCR plates according to the manufacturer's instructions.

[1330] The purified PCR products were then directly cycle sequenced with Qiagen Hot Start PCR mix. The following primers were used in the sequencing reaction:

[1331] T7/L2: ATGCGTCCGGCGTAGAGGAT (SEQ ID NO: 78592)

[1332] PCR was carried out in a PE GenAmp with the following cycle times:

[1333] Step 1. 94° C. 15 min

[1334] Step 2. 96° C. 10 sec

[1335] Step 3. 50° C. 5 sec

[1336] Step 4. 60 C 4 min

[1337] Step 5. Return to step 2, 24 times

[1338] Step 6. 4° C. hold

[1339] The PCR products were cleaned using Qiagen Qiaquick PCR plates according to the manufacturer's instructions.

[1340] For E. faecalis, plasmids from transformant colonies that received a dilution plating score of “2” or greater were isolated to obtain the genomic DNA insert responsible for growth inhibition as follows. E. faecalis were grown in THB 10 μg/ml Erm at 30° C. overnight in 100 ul culture wells in microtiter plates. To amplify insert DNA 2 ul of culture were placed into 25 μl Qiagen Hot Start PCR mix. PCR reactions were in 96 well microtiter plates. The following primers were used in the PCR reaction:

[1341] pXylT5: CAGCAGTCTGAGTTATAAAATAG (SEQ ID NO: 78588) and the pEP/pAK1 primer.

[1342] PCR was carried out in a PE GenAmp with the following cycle times:

[1343] Step 1. 95° C 15 min

[1344] Step 2. 940 C 45 sec

[1345] Step 3. 54° C 45 sec

[1346] Step 4. 72° C 1 minute

[1347] Step 5. Return to step 2, 29 times

[1348] Step 6. 72° C 10 minutes

[1349] Step 7. 4° C hold

[1350] The PCR products were cleaned using Qiagen Qiaquick PCR plates according to the manufacturer's instructions.

[1351] The purified PCR products were then directly cycle sequenced with Qiagen Hot Start PCR mix. The following primers were used in the PCR reaction:

[1352] pXylT5: CAGCAGTCTGAGTTATAAAATAG (SEQ ID NO: 78588)

[1353] PCR was carried out in a PE GenAmp with the following cycle times:

[1354] Step 1. 94° C. 15 min

[1355] Step 2. 96° C. 10 sec

[1356] Step 3. 50° C. 5 sec

[1357] Step 4. 60° C. 4 min

[1358] Step 5. Return to step 2, 24 times

[1359] Step 6. 4° C. hold

[1360] The PCR products were cleaned using Qiagen Qiaquick PCR plates according to the manufacturer's instructions.

[1361] The amplified genomic DNA inserts from each of the above procedures were subjected to automated sequencing. Sequence identification numbers (SEQ ID NOs) and clone names for the identified inserts are listed in Table IA and discussed below. Table IA is provided in electronic format on duplicate copies of a CD-ROM filed herewith and marked “Tables-Copy 1” and “Tables-Copy 2.” The duplicate copies of the CD-ROM each contain a file entitled FINAL_CLONE_LIST created on Feb. 26, 2002 which is 248,535 bytes in size and which contains Table IA. The information on these duplicate CD-ROMs is incorporated herein by reference in its entirety.

### Example 3

[1362] Comparison of Isolated Nucleic Acids to Known Sequences

[1363] The nucleotide sequences of the subcloned fragments from Escherichia coli, Staphylococcus aureus, Enterococcus faecalis, Klebsiella pneumoniae, Pseudomonas aeruginosa and Salmonella typhimurium obtained from the expression vectors discussed above were compared to known sequences from Escherichia coli, Staphylococcus aureus, Enterococcus faecalis, Klebsiella pneumoniae, Pseudomonas aeruginosa, Salmonella typhimurium and other microorganisms as follows. First, to confirm that each clone originated from one location on the chromosome and was not chimeric, the nucleotide sequences of the selected clones were compared against the Escherichia coli, Staphylococcus aureus, Enterococcus faecalis, Klebsiella pneumoniae, Pseudomonas aeruginosa or Salmonella typhimurium genomic sequences to align the clone to the correct position on the chromosome. The NCBI BLASTN v 2.0.9 program was used for this comparison, and the incomplete Staphylococcus aureus genomic sequences licensed from TIGR, as well as the NCBI nonredundant GenBank database were used as the source of genomic data. Salmonella typhimurium sequences were compared to sequences available from the Genome Sequencing Center (http://genome.wustl.edu/gsc/salmonella.shtml), and the Sanger Centre (http://www.sanger.ac.uk/projects/S_typhi). Pseudomonas aeruginosa sequences were compared to a proprietary database and the NCBI GenBank database. The E. faecalis sequences were compared to a proprietary database.

[1364] The BLASTN analysis was performed using the default parameters except that the filtering was turned off. No further analysis was performed on inserts which resulted from the ligation of multiple fragments.

[1365] In general, antisense molecules and their complementary genes are identified as follows. First, all possible full length open reading frames (ORFs) are extracted from available genomic databases. Such databases include the GenBank nonredundant (nr) database, the unfinished genome database available from TIGR and the PathoSeq database developed by Incyte Genomics. The latter database comprises over 40 annotated bacterial genomes including complete ORF analysis. If databases are incomplete with regard to the bacterial genome of interest, it is not necessary to extract all ORFs in the genome but only to extract the ORFs within the portions of the available genomic sequences which are complementary to the clones of interest. Computer algorithms for identifying ORFs, such as GeneMark, are available and well known to those in the art. Comparison of the clone DNA to the complementary ORF(s) allows determination of whether the clone is a sense or antisense clone. Furthermore, each ORF extracted from the database can be compared to sequences in well annotated databases including the GenBank (nr) protein database, SWISSPROT and the like. A description of the gene or of a closely related gene in a closely related microorganism is often available in these databases. Similar methods are used to identify antisense clones corresponding to genes encoding non-translated RNAs.

[1366] In order to generate the gene identification data compiled in Table IB, each of the cloned nucleic acid sequences discussed above corresponding to SEQ ID NO.s 1-6213 was used to identify the corresponding Escherichia coli, Staphylococcus aureus, Enterococcus faecalis, Klebsiella pneumoniae, Pseudomonas aeruginosa or Salmonella typhimurium ORFs in the PathoSeq v.4.1 (March 2000 release) database of microbial genomic sequences. For this purpose, the NCBI BLASTN 2.0.9 computer algorithm was used. The default parameters were used except that filtering was turned off. The default parameters for the BLASTN and BLASTX analyses were:

[1367] Expectation value (e)=10

[1368] Alignment view options: pairwise

[1369] Filter query sequence (DUST with BLASTN, SEG with others)=T

[1370] Cost to open a gap (zero invokes behavior)=0

[1371] Cost to extend a gap (zero invokes behavior)=−0

[1372] X dropoff value for gapped alignment (in bits) (zero invokes behavior)=0

[1373] Show GI's in deflines=F

[1374] Penalty for a nucleotide mismatch (BLASTN only)=3

[1375] Reward for a nucleotide match (BLASTN only)=1

[1376] Number of one-line descriptions (V)=500

[1377] Number of alignments to show (B)=250

[1378] Threshold for extending hits=default

[1379] Perform gapped alignment (not available with BLASTX)=T

[1380] Query Genetic code to use=1

[1381] DB Genetic code (for TBLAST[nx] only=1

[1382] Number of processors to use=1

[1383] SeqAlign file

[1384] Believe the query defline=F

[1385] Matrix=BLOSUM62

[1386] Word Size=default

[1387] Effective length of the database (use zero for the real size)=0

[1388] Number of best hits from a region to keep=100

[1389] Length of region used to judge hits=20

[1390] Effective length of the search space (use zero for the real size)=0

[1391] Query strands to search against database (for BLAST[nx] and TBLASTX), 3 is both, 1 is top, 2 is bottom=3

[1392] Produce HTML output=F

[1393] Table IB is provided in electronic format on duplicate copies of a CD-ROM filed herewith and marked “Tables-Copy 1” and “Tables-Copy 2.” The duplicate copies of the CD-ROM each contain a file entitled FINAL_CLONE_GENE created on Feb. 26, 2002 which is 191,382 bytes in size and which contains Table IB. The information on these duplicate CD-ROMs is incorporated herein by reference in its entirety.

[1394] Alternatively, ORFs were identified and refined by conducting a survey of the public and private data sources. Full-length gene protein and nucleotide sequences for these organisms were assembled from various sources. For Pseudomonas aeruginosa, gene sequences were adopted from the Pseudomonas genome sequencing project (downloaded from http://www.pseudomonas.com). For Klebsiella pneumoniae, Staphylococcus aureus, Streptococcus pneumoniae and Salmonella typhi, genomic sequences from PathoSeq v 4.1 (March 2000 release) was reanalyzed for ORFs using the gene finding software GeneMark v 2.4a, which was purchased from GenePro Inc. 451 Bishop St., N.W., Suite B, Atlanta, Ga., 30318, USA.

[1395] Antisense clones were identified as those clones for which transcription from the inducible promoter would result in the expression of an RNA antisense to a complementary ORF, intergenic or intragenic sequence. Those clones containing single inserts and that caused growth sensitivity upon induction are listed in Table IA.

[1396] The gene descriptions in the PathoSeq database derive from annotations available in the public sequence databases described above. Where a clone was found to share significant sequence identity to two or more adjacent ORFs, it was listed once for each ORF and the PathoSeq information for each ORF was compiled in Table IB.

[1397] Table IA lists the SEQ ID NOs. and clone names of the inserts which inhibited proliferation and the organism in which the clone was identified. This information was used to identify the ORFs (SEQ ID NOs.: 6214-42397) whose gene products (SEQ ID NOs. 42398-78581) were inhibited by the nucleic acids comprising the nucleotide sequences of SEQ ID NOs. 1-6213. Table IB lists the clone name and the PathoSeq Locus containing the clone.

[1398] Table IC provides a cross reference between PathoSeq Gene Loci listed in Table IB and the SEQ ID NOs. of the corresponding PathoSeq polypeptides and the SEQ ID NOs. of the nucleic acids which encode them. The organisms from which these sequences were identified are also indicated. Table IC is provided in electronic format on duplicate copies of a CD-ROM filed herewith and marked “Tables-Copy 1” and “Tables-Copy 2.” The duplicate copies of the CD-ROM each contain a file entitled FINAL_GENE_LIST created on Feb. 26, 2002 which is 1,569,997 bytes in size and which contains Table IC. The information on these duplicate CD-ROMs is incorporated herein by reference in its entirety.

[1399] It will be appreciated that ORFs may also be identified using databases other than PathoSeq. For example, the ORFs may be identified using the methods described in U.S. Provisional Patent Application Serial No. 60/191,078, filed Mar. 21, 2000, the disclosure of which is incorporated herein by reference in its entirety.

### Example 4

[1400] Transfer of Exogenous Nucleic Acid Sequences to other Bacterial Species

[1401] The ability of an antisense molecule identified in a first organism to inhibit the proliferation of a second organism (thereby confirming that a gene in the second organism which is homologous to the gene from the first organism is required for proliferation of the second organism) was validated using antisense nucleic acids which inhibit the growth of E. coli which were identified using methods similar to those described above. Expression vectors which inhibited growth of E. coli upon induction of antisense RNA expression with IPTG were transformed directly into Enterobacter cloacae, Klebsiella pneumonia or Salmonella typhimurium. The transformed cells were then assayed for growth inhibition according to the method of Example 1. After growth in liquid culture, cells were plated at various serial dilutions and a score determined by calculating the log difference in growth for INDUCED vs. UNINDUCED antisense RNA expression as determined by the maximum 10 fold dilution at which a colony was observed. The results of these experiments are listed below in Table II. If there was no effect of antisense RNA expression in a microorganism, the clone is minus in Table II. In contrast, a positive in Table II means that at least 10 fold more cells were required to observe a colony on the induced plate than on the non-induced plate under the conditions used and in that microorganism.

TABLE II
Sensitivity of Other Microorganisms to Antisense Nucleic Acids That
Inhibit Proliferation in E. coli

| Mol. No. | S. typhimurium | E. cloacae | K. pneumoniae |
|---|---|---|---|
| EcXA001 | + | + | − |
| EcXA004 | + | − | − |
| EcXA005 | + | + | + |
| EcXA006 | − | − | − |
| EcXA007 | − | + | − |
| EcXA008 | + | − | + |
| EcXA009 | − | − | − |
| EcXA010 | + | + | + |
| EcXA011 | − | + | − |
| EcXA012 | − | + | − |
| EcXA013 | + | + | + |
| EcXA014 | + | + | − |
| EcXA015 | + | + | + |
| EcXA016 | + | + | + |
| EcXA017 | + | + | + |
| EcXA018 | + | + | + |
| EcXA019 | + | + | + |
| EcXA020 | + | + | + |
| EcXA021 | + | + | + |
| EcXA023 | + | + | + |
| EcXA024 | + | − | + |
| EcXA025 | − | − | − |
| EcXA026 | + | + | − |
| EcXA027 | + | + | − |
| EcXA028 | + | − | − |
| EcXA029 | − | − | − |
| EcXA030 | + | + | + |
| EcXA031 | + | − | − |
| EcXA032 | + | + | − |
| EcXA033 | + | + | + |
| EcXA034 | + | + | + |
| EcXA035 | − | − | − |
| EcXA036 | + | − | + |
| EcXA037 | + | + | − |
| EcXA038 | + | + | + |
| EcXA039 | + | − | − |
| EcXA041 | + | + | + |
| EcXA042 | − | + | + |
| EcXA043 | − | − | − |
| EcXA044 | − | − | − |
| EcXA045 | + | + | + |
| EcXA046 | − | − | − |
| EcXA047 | + | + | − |
| EcXA048 | − | − | − |
| EcXA049 | + | − | − |
| EcXA050 | − | − | − |
| EcXA051 | + | − | − |
| EcXA052 | + | − | − |
| EcXA053 | + | + | + |
| EcXA054 | − | − | + |
| EcXA055 | + | − | − |
| EcXA056 | + | − | + |
| EcXA057 | + | + | − |
| EcXA058 | − | − | − |
| EcXA059 | + | + | + |
| EcXA060 | − | − | − |
| EcXA061 | − | − | − |
| EcXA062 | − | − | − |
| EcXA063 | + | + | − |
| EcXA064 | − | − | − |
| EcXA065 | + | + | − |
| EcXA066 | − | − | − |
| EcXA067 | − | + | − |
| EcXA068 | − | − | − |
| EcXA069 | − | + | − |
| EcXA070 | − | − | − |
| EcXA071 | + | − | − |
| EcXA072 | + | − | + |
| EcXA073 | + | + | + |
| EcXA074 | + | + | + |
| EcXA075 | + | − | − |
| EcXA076 | − | + | − |
| EcXA077 | + | + | − |
| EcXA079 | + | + | + |
| EcXA080 | + | − | − |
| EcXA082 | − | + | − |
| EcXA083 | − | − | − |
| EcXA084 | − | + | − |
| EcXA086 | − | − | − |
| EcXA087 | − | − | − |
| EcXA088 | − | − | − |
| EcXA089 | − | − | − |
| EcXA090 | − | − | − |
| EcXA091 | − | − | − |
| EcXA092 | − | − | − |
| EcXA093 | − | − | − |
| EcXA094 | + | + | + |
| EcXA095 | + | + | − |
| EcXA096 | − | − | − |
| EcXA097 | + | − | − |
| EcXA098 | + | − | − |
| EcXA099 | − | − | − |
| EcXA100 | − | − | − |
| EcXA101 | − | − | − |
| EcXA102 | − | − | − |
| EcXA103 | − | + | − |
| EcXA104 | + | + | + |
| EcXA106 | + | + | − |
| EcXA107 | − | − | − |
| EcXA108 | − | − | − |
| EcXA109 | − | − | − |
| EcXA110 | + | + | − |
| EcXA111 | − | − | − |
| EcXA112 | − | + | − |
| EcXA113 | + | + | + |
| EcXA114 | − | + | − |
| EcXA115 | − | + | − |
| EcXA116 | + | + | − |
| EcXA117 | + | − | − |
| EcXA118 | − | − | − |
| EcXA119 | + | + | − |
| EcXA120 | − | − | − |
| EcXA121 | − | − | − |
| EcXA122 | + | − | + |
| EcXA123 | + | − | − |
| EcXA124 | − | − | − |
| EcXA125 | − | − | − |
| EcXA126 | − | − | − |
| EcXA127 | + | + | − |
| EcXA128 | − | − | − |
| EcXA129 | − | + | − |
| EcXA130 | + | + | − |
| EcXA132 | − | − | − |
| EcXA133 | − | − | − |
| EcXA136 | − | − | − |
| EcXA137 | − | − | − |
| EcXA138 | + | − | − |
| EcXA139 | − | − | − |
| EcXA140 | + | − | − |
| EcXA141 | + | − | − |
| EcXA142 | − | − | − |
| EcXA143 | − | + | − |
| EcXA144 | + | + | − |
| EcXA145 | − | − | − |
| EcXA146 | − | − | − |
| EcXA147 | − | − | − |
| EcXA148 | − | − | − |
| EcXA149 | + | + | + |
| EcXA150 | − | − | − |
| EcXA151 | + | − | − |
| EcXA152 | − | − | − |
| EcXA153 | + | + | − |
| EcXA154 | − | − | − |
| EcXA155 | − | − | ND |
| EcXA156 | − | + | − |
| EcXA157 | − | − | − |
| EcXA158 | − | − | − |
| EcXA159 | + | − | − |
| EcXA160 | + | − | − |
| EcXA162 | − | − | − |
| EcXA163 | − | − | − |
| EcXA164 | − | − | − |
| EcXA165 | − | − | − |
| EcXA166 | − | − | − |
| EcXA167 | − | − | − |
| EcXA168 | − | − | − |
| EcXA169 | − | + | − |
| EcXA171 | − | − | − |
| EcXA172 | − | − | − |
| EcXA173 | − | − | − |
| EcXA174 | − | − | − |
| EcXA175 | − | − | − |
| EcXA176 | − | − | − |
| EcXA178 | − | − | − |
| EcXA179 | − | − | − |
| EcXA180 | + | − | − |
| EcXA181 | − | − | − |
| EcXA182 | − | − | − |
| EcXA183 | − | − | − |
| EcXA184 | − | − | − |
| EcXA185 | − | − | − |
| EcXA186 | − | − | − |
| EcXA187 | + | + | + |
| EcXA189 | + | − | − |
| EcXA190 | + | + | + |
| EcXA191 | + | + | − |
| EcXA192 | − | + | − |

[1402] Thus, the ability of an antisense nucleic acid which inhibits the proliferation of Escherichia coli, Staphylococcus aureus, Enterococcus faecalis, Klebsiella pneumoniae, Pseudomonas aeruginosa, Salmonella typhimurium, Acinetobacter baumannii, Bacillus anthracis, Bacteroides fragilis, Bordetella pertussis, Borrelia burgdorferi, Burkholderia cepacia, Burkholderia fungorum, Burkholderia mallei, Campylobacter jejuni, Chlamydia pneumoniae, Chlamydia trachomatis, Clostridium acetobutylicum, Clostridium botulinum, Clostridium difficile, Corynebacterium diptheriae, Enterobacter cloacae, Enterococcus faecium, Haemophilus influenzae, Helicobacter pylori, Legionella pneumophila, Listeria monocytogenes, Moraxella catarrhalis, Mycobacterium avium, Mycobacterium bovis, Mycobacterium leprae, Mycobacterium tuberculosis, Mycoplasma genitalium, Mycoplasma pneumoniae, Neisseria gonorrhoeae, Neisseria meningitidis, Pasteurella multocida, Proteus mirabilis, Pseudomonas putida, Pseudomonas syringae, Salmonella paratyphi, Salmonella typhi, Staphylococcus epidermidis, Staphylococcus haemolyticus, Streptococcus mutans, Streptococcus pneumoniae, Streptococcus pyogenes, Treponema pallidum, Ureaplasma urealyticum, Vibrio cholerae or Yersinia pestis to inhibit the growth of other organims may be evaluated by transforming the antisense nucleic acid directly into species other than the organism from which they were obtained. In particular, the ability of the antisense nucleic acid to inhibit the growth of Acinetobacter baumannii, Anaplasma marginale, Aspergillus fumigatus, Bacillus anthracis, Bacteroides fragilis, Bordetella pertussis, Borrelia burgdorferi, Burkholderia cepacia, Burkholderia fungorum, Burkholderia mallei, Campylobacter jejuni, Candida albicans, Candida glabrata (also called Torulopsis glabrata), Candida tropicalis, Candida parapsilosis, Candida guilliermondii, Candida krusei, Candida kefyr (also called Candida pseudotropicalis), Candida dubliniensis, Chlamydia pneumoniae, Chlamydia trachomatis, Clostridium acetobutylicum, Clostridium botulinum, Clostridium difficile, Clostridium perfringens, Coccidioides immitis, Corynebacterium diptheriae, Cryptococcus neoformans, Enterobacter cloacae, Enterococcus faecalis, Enterococcus faecium, Escherichia coli, Haemophilus influenzae, Helicobacter pylori, Histoplasma capsulatum, Klebsiella pneumoniae, Legionella pneumophila, Listeria monocytogenes, Moraxella catarrhalis, Mycobacterium avium, Mycobacterium bovis, Mycobacterium leprae, Mycobacterium tuberculosis, Mycoplasma genitalium, Mycoplasma pneumoniae, Neisseria gonorrhoeae, Neisseria meningitidis, Nocardia asteroides, Pasteurella haemolytica, Pasteurella multocida, Pneumocystis carinii, Proteus mirabilis, Proteus vulgaris, Pseudomonas aeruginosa, Pseudomonas putida, Pseudomonas syringae, Salmonella bongori, Salmonella cholerasuis, Salmonella enterica, Salmonella paratyphi, Salmonella typhi, Salmonella typhimurium, Shigella boydii, Shigella dysenteriae, Shigella flexneri, Shigella sonnei, Staphylococcus aureus, Staphylococcus epidermidis, Staphylococcus haemolyticus, Streptococcus pneumoniae, Streptococcus mutans, Streptococcus pyogenes, Treponema pallidum, Ureaplasma urealyticum, Vibrio cholerae, Vibrio parahaemolyticus, Vibrio vulnificans, Yersinia enterocolitica, Yersinia pestis or any species falling within the genera of any of the above species may be evaluated. In some embodiments of the present invention, the ability of the antisense nucleic acid to inhibit the growth of an organism other than E. coli may be evaluated. In such embodiments, the antisense nucleic acids are inserted into expression vectors functional in the organisms in which the antisense nucleic acids are evaluated.

[1403] It will be appreciated that the above methods for evaluating the ability of an antisense nucleic acid to inhibit the proliferation of a heterologous organism may be performed using antisense nucleic acids complementary to any of the proliferation-required nucleic acids from Escherichia coli, Staphylococcus aureus, Enterococcus faecalis, Klebsiella pneumoniae, Pseudomonas aeruginosa, Salmonella typhimurium, Acinetobacter baumannii, Bacillus anthracis, Bacteroides fragilis, Bordetella pertussis, Borrelia burgdorferi, Burkholderia cepacia, Burkholderia fungorum, Burkholderia mallei, Campylobacter jejuni, Chlamydia pneumoniae, Chlamydia trachomatis, Clostridium acetobutylicum, Clostridium botulinum, Clostridium difficile, Corynebacterium diptheriae, Enterobacter cloacae, Enterococcus faecium, Haemophilus influenzae, Helicobacter pylori, Legionella pneumophila, Listeria monocytogenes, Moraxella catarrhalis, Mycobacterium avium, Mycobacterium bovis, Mycobacterium leprae, Mycobacterium tuberculosis, Mycoplasma genitalium, Mycoplasma pneumoniae, Neisseria gonorrhoeae, Neisseria meningitidis, Pasteurella multocida, Proteus mirabilis, Pseudomonas putida, Pseudomonas syringae, Salmonella paratyphi, Salmonella typhi, Staphylococcus epidermidis, Staphylococcus haemolyticus, Streptococcus mutans, Streptococcus pneumoniae, Streptococcus pyogenes, Treponema pallidum, Ureaplasma urealyticum, Vibrio cholerae or Yersinia pestis (including antisense nucleic acids complementary to SEQ ID NOs.: 6214-42397, such as the antisense nucleic acids of SEQ ID NOs.: 1-6213) or portions thereof, antisense nucleic acids complementary to homologous coding nucleic acids or portions thereof, or homologous antisense nucleic acids.

[1404] Those skilled in the art will appreciate that a negative result in a heterologous cell or microorganism does not mean that that cell or microorganism is missing that gene nor does it mean that the gene is unessential. However, a positive result means that the heterologous cell or microorganism contains a homologous gene which is required for proliferation of that cell or microorganism. The homologous gene may be obtained using the methods described herein. For example, the homologous gene may be isolated by performing a PCR procedure using primers based on the antisense sequence which reduced the level or activity of the gene product encoded by the homologous gene or by performing a Southern blot. Those cells that are inhibited by antisense may be used in cell-based assays as described herein for the identification and characterization of compounds in order to develop antibiotics effective in these cells or microorganisms.

[1405] Those skilled in the art will appreciate that an antisense molecule which works in the microorganism from which it was obtained will not always work in a heterologous cell or microorganism.

### Example 5

[1406] Transfer of Exogenous Nucleic Acid Sequences to Other Bacterial Species using the Escherichia coli, Staphylococcus aureus, Enterococcus faecalis, Klebsiella pneumoniae, Pseudomonas aeruginosa, Salmonella typhimurium, Acinetobacter baumannii, Bacillus anthracis, Bacteroides fragilis, Bordetella pertussis, Borrelia burgdorferi, Burkholderia cepacia, Burkholderia fungorum, Burkholderia mallei, Campylobacter jejuni, Chlamydia pneumoniae, Chlamydia trachomatis, Clostridium acetobutylicum, Clostridium botulinum, Clostridium difficile, Corynebacterium diptheriae, Enterobacter cloacae, Enterococcus faecium, Haemophilus influenzae, Helicobacter pylori, Legionella pneumophila, Listeria monocytogenes, Moraxella catarrhalis, Mycobacterium avium, Mycobacterium bovis, Mycobacterium leprae, Mycobacterium tuberculosis, Mycoplasma genitalium, Mycoplasma pneumoniae, Neisseria gonorrhoeae, Neisseria meningitidis. Pasteurella multocida, Proteus mirabilis, Pseudomonas putida, Pseudomonas syringae. Salmonella paratyphi, Salmonella typhi, Staphylococcus epidermidis, Staphylococcus haemolyticus, Streptococcus mutans, Streptococcus pneumoniae, Streptococcus pyogenes, Treponema pallidum, Ureaplasma urealyticum, Vibrio cholerae or Yersinia pestis Expression Vectors or Expression Vectors Functional in Bacterial Species Other than the Foregoing Bacterial Species

[1407] The antisense nucleic acids that inhibit the growth of Escherichia coli, Staphylococcus aureus, Enterococcus faecalis, Klebsiella pneumoniae, Pseudomonas aeruginosa, Salmonella typhimurium, Acinetobacter baumannii, Bacillus anthracis, Bacteroides fragilis, Bordetella pertussis, Borrelia burgdorferi, Burkholderia cepacia, Burkholderia fungorum, Burkholderia mallei, Campylobacter jejuni, Chlamydia pneumoniae, Chlamydia trachomatis, Clostridium acetobutylicum, Clostridium botulinum, Clostridium difficile, Corynebacterium diptheriae, Enterobacter cloacae, Enterococcus faecium, Haemophilus influenzae, Helicobacter pylori, Legionella pneumophila, Listeria monocytogenes, Moraxella catarrhalis, Mycobacterium avium, Mycobacterium bovis, Mycobacterium leprae, Mycobacterium tuberculosis, Mycoplasma genitalium, Mycoplasma pneumoniae, Neisseria gonorrhoeae, Neisseria meningitidis, Pasteurella multocida, Proteus mirabilis, Pseudomonas putida, Pseudomonas syringae, Salmonella paratyphi, Salmonella typhi, Staphylococcus epidermidis, Staphylococcus haemolyticus, Streptococcus mutans, Streptococcus pneumoniae, Streptococcus pyogenes, Treponema pallidum, Ureaplasma urealyticum, Vibrio cholerae or Yersinia pestis, or portions thereof, may also be evaluated for their ability to inhibit the growth of cells or microorganisms other than Escherichia coli, Staphylococcus aureus, Enterococcus faecalis, Klebsiella pneumoniae, Pseudomonas aeruginosa, Salmonella typhimurium, Acinetobacter baumannii, Bacillus anthracis, Bacteroides fragilis, Bordetella pertussis, Borrelia burgdorferi, Burkholderia cepacia, Burkholderia fungorum, Burkholderia mallei, Campylobacter jejuni, Chlamydia pneumoniae, Chlamydia trachomatis, Clostridium acetobutylicum, Clostridium botulinum, Clostridium difficile, Corynebacterium diptheriae, Enterobacter cloacae, Enterococcus faecium, Haemophilus influenzae, Helicobacter pylori, Legionella pneumophila, Listeria monocytogenes, Moraxella catarrhalis, Mycobacterium avium, Mycobacterium bovis, Mycobacterium leprae, Mycobacterium tuberculosis, Mycoplasma genitalium, Mycoplasma pneumoniae, Neisseria gonorrhoeae, Neisseria meningitidis, Pasteurella multocida, Proteus mirabilis, Pseudomonas putida, Pseudomonas syringae, Salmonella paratyphi, Salmonella typhi, Staphylococcus epidermidis, Staphylococcus haemolyticus, Streptococcus mutans, Streptococcus pneumoniae, Streptococcus pyogenes, Treponema pallidum, Ureaplasma urealyticum, Vibrio cholerae or Yersinia pestis. For example, the antisense nucleic acids that inhibit the growth of Escherichia coli, Staphylococcus aureus, Enterococcus faecalis, Klebsiella pneumoniae, Pseudomonas aeruginosa, Salmonella typhimurium, Acinetobacter baumannii, Bacillus anthracis, Bacteroides fragilis, Bordetella pertussis, Borrelia burgdorferi, Burkholderia cepacia, Burkholderia fungorum, Burkholderia mallei, Campylobacter jejuni, Chlamydia pneumoniae, Chlamydia trachomatis, Clostridium acetobutylicum, Clostridium botulinum, Clostridium difficile, Corynebacterium diptheriae, Enterobacter cloacae, Enterococcus faecium, Haemophilus influenzae, Helicobacter pylori, Legionella pneumophila, Listeria monocytogenes, Moraxella catarrhalis, Mycobacterium avium, Mycobacterium bovis, Mycobacterium leprae, Mycobacterium tuberculosis, Mycoplasma genitalium, Mycoplasma pneumoniae, Neisseria gonorrhoeae, Neisseria meningitidis, Pasteurella multocida, Proteus mirabilis, Pseudomonas putida, Pseudomonas syringae, Salmonella paratyphi, Salmonella typhi, Staphylococcus epidermidis, Staphylococcus haemolyticus, Streptococcus mutans, Streptococcus pneumoniae, Streptococcus pyogenes, Treponema pallidum, Ureaplasma urealyticum, Vibrio cholerae or Yersinia pestis may be evaluated for their ability to inhibit the growth of other organisms. In particular, the ability of the antisense nucleic acid to inhibit the growth of Acinetobacter baumannii, Anaplasma marginale, Aspergillus fumigatus, Bacillus anthracis, Bacteroides fragilis, Bordetella pertussis, Borrelia burgdorferi, Burkholderia cepacia, Burkholderia fungorum, Burkholderia mallei, Campylobacter jejuni, Candida albicans, Candida glabrata (also called Torulopsis glabrata), Candida tropicalis, Candida parapsilosis, Candida guilliermondii, Candida krusei, Candida kefyr (also called Candida pseudotropicalis), Candida dubliniensis, Chlamydia pneumoniae, Chlamydia trachomatis, Clostridium acetobutylicum, Clostridium botulinum, Clostridium difficile, Clostridium perfringens, Coccidioides immitis, Corynebacterium diptheriae, Cryptococcus neoformans, Enterobacter cloacae, Enterococcus faecalis, Enterococcus faecium, Escherichia coli, Haemophilus influenzae, Helicobacter pylori, Histoplasma capsulatum, Klebsiella pneumoniae, Legionella pneumophila, Listeria monocytogenes, Moraxella catarrhalis, Mycobacterium avium, Mycobacterium bovis, Mycobacterium leprae, Mycobacterium tuberculosis, Mycoplasma genitalium, Mycoplasma pneumoniae, Neisseria gonorrhoeae, Neisseria meningitidis, Nocardia asteroides, Pasteurella haemolytica, Pasteurella multocida, Pneumocystis carinii, Proteus mirabilis, Proteus vulgaris, Pseudomonas aeruginosa, Pseudomonas putida, Pseudomonas syringae, Salmonella bongori, Salmonella cholerasuis, Salmonella enterica, Salmonella paratyphi, Salmonella typhi, Salmonella typhimurium, Shigella boydii, Shigella dysenteriae, Shigella flexneri, Shigella sonnei, Staphylococcus aureus, Staphylococcus epidermidis, Staphylococcus haemolyticus, Streptococcus pneumoniae, Streptococcus mutans, Streptococcus pyogenes, Treponema pallidum, Ureaplasma urealyticum, Vibrio cholerae, Vibrio parahaemolyticus, Vibrio vulnificans, Yersinia enterocolitica, Yersinia pestis or any species falling within the genera of any of the above species may be evaluated. In some embodiments of the present invention, the ability of the antisense nucleic acid to inhibit the growth of an organism other than E. coli may be evaluated.

[1408] In such methods, expression vectors in which the expression of an antisense nucleic acid that inhibits the growth of Escherichia coli, Staphylococcus aureus, Enterococcus faecalis, Klebsiella pneumoniae, Pseudomonas aeruginosa, Salmonella typhimurium, Acinetobacter baumannii, Bacillus anthracis, Bacteroides fragilis, Bordetella pertussis, Borrelia burgdorferi, Burkholderia cepacia, Burkholderia fungorum, Burkholderia mallei, Campylobacter jejuni, Chlamydia pneumoniae, Chlamydia trachomatis, Clostridium acetobutylicum, Clostridium botulinum, Clostridium difficile, Corynebacterium diptheriae, Enterobacter cloacae, Enterococcus faecium, Haemophilus influenzae, Helicobacter pylori, Legionella pneumophila, Listeria monocytogenes, Moraxella catarrhalis, Mycobacterium avium, Mycobacterium bovis, Mycobacterium leprae, Mycobacterium tuberculosis, Mycoplasma genitalium, Mycoplasma pneumoniae, Neisseria gonorrhoeae, Neisseria meningitidis, Pasteurella multocida, Proteus mirabilis, Pseudomonas putida, Pseudomonas syringae, Salmonella paratyphi, Salmonella typhi, Staphylococcus epidermidis, Staphylococcus haemolyticus, Streptococcus mutans, Streptococcus pneumoniae, Streptococcus pyogenes, Treponema pallidum, Ureaplasma urealyticum, Vibrio choleraei or Yersinia pestisis under the control of an inducible promoter are introduced into the cells or microorganisms in which they are to be evaluated. In some embodiments, the antisense nucleic acids may be evaluated in cells or microorganisms which are closely related to Escherichia coli, Staphylococcus aureus, Enterococcus faecalis, Klebsiella pneumoniae, Pseudomonas aeruginosa, Salmonella typhimurium, Acinetobacter baumannii, Bacillus anthracis, Bacteroides fragilis, Bordetella pertussis, Borrelia burgdorferi, Burkholderia cepacia, Burkholderia fungorum, Burkholderia mallei, Campylobacter jejuni, Chlamydia pneumoniae, Chlamydia trachomatis, Clostridium acetobutylicum, Clostridium botulinum, Clostridium difficile, Corynebacterium diptheriae, Enterobacter cloacae, Enterococcus faecium, Haemophilus influenzae, Helicobacter pylori, Legionella pneumophila, Listeria monocytogenes, Moraxella catarrhalis, Mycobacterium avium, Mycobacterium bovis, Mycobacterium leprae, Mycobacterium tuberculosis, Mycoplasma genitalium, Mycoplasma pneumoniae, Neisseria gonorrhoeae, Neisseria meningitidis, Pasteurella multocida, Proteus mirabilis, Pseudomonas putida, Pseudomonas syringae, Salmonella paratyphi, Salmonella typhi, Staphylococcus epidermidis, Staphylococcus haemolyticus, Streptococcus mutans, Streptococcus pneumoniae, Streptococcus pyogenes, Treponema pallidum, Ureaplasma urealyticum, Vibrio cholerae or Yersinia pestis. The ability of these antisense nucleic acids to inhibit the growth of the related cells or microorganisms in the presence of the inducer is then measured.

### Example 6

[1409] Identification of Nucleic Acids Homologous to Nucleic Acids Required for the Proliferation of Staphylococcus aureus in other Bacterial Species

[1410] Nucleic acids homologous to proliferation-required nucleic acids from Staphylococcus aureus were identified as follows. For example, thirty-nine antisense nucleic acids which inhibited the growth of Staphylococcus aureus were identified using methods such as those described herein and were inserted into an expression vector such that their expression was under the control of a xylose-inducible Xyl-T5 promoter. A vector with a reporter gene under control of the Xyl-T5 promoter was used to show that expression from the Xyl-T5 promoter in Staphylococcus epidermidis was comparable to that in Staphylococcus aureus.

[1411] The vectors were introduced into Staphylococcus epidermidis by electroporation as follows: Staphylococcus epidermidis was grown in liquid culture to mid-log phase and then harvested by centrifugation. The cell pellet was resuspended in ⅓ culture volume of ice-cold EP buffer (0.625 M sucrose, 1 mM MgCl₂, pH=4.0), and then harvested again by centrifugation. The cell pellet was then resuspended with 1/40 volume EP buffer and allowed to incubate on ice for 1 hour. The cells were then frozen for storage at −80° C. For electroporation, 50 μl of thawed electrocompetent cells were combined with 0.5 μg plasmid DNA and then subjected to an electrical pulse of 10 kV/cm, 25 uFarads, 200 ohm using a biorad gene pulser electroporation device. The cells were immediately resuspended with 200 μl outgrowth medium and incubated for 2 hours prior to plating on solid growth medium with drug selection to maintain the plasmid vector. Colonies resulting from overnight growth of these platings were selected, cultured in liquid medium with drug selection, and then subjected to dilution plating analysis as described for Staphylococcus aureus in Example 1 above to test growth sensitivity in the presence of the inducer xylose.

[1412] The results are shown in Table III below. The first column indicates the Molecule Number of the Staphylococcus aureus antisense nucleic acid which was introduced into Staphylococcus epidermidis. The second column indicates whether the antisense nucleic acid inhibited the growth of Staphylococcus epidermidis, with a “+” indicating that growth was inhibited. Of the 39 Staphylococcus aureus antisense nucleic acids evaluated, 20 inhibited the growth of Staphylococcus epidermidis.

TABLE III
Sensitivity of Other Microorganisms to Antisense Nucleic Acids That
Inhibit Proliferation of Staphylococcus aureus

| Mol. No. | S. epidermidis |
|---|---|
| SaXA005 | + |
| SaXA007 | + |
| SaXA008 | + |
| SaXA009 | + |
| SaXA010 | + |
| SaXA011 | − |
| SaXA012 | − |
| SaXA013 | − |
| SaXA015 | + |
| SaXA017 | − |
| SaXA022 | + |
| SaXA023 | − |
| SaXA024 | − |
| SaXA025 | + |
| SaXA026 | + |
| SaXA027 | − |
| SaXA027b | − |
| SaXA02c | − |
| SaXA028 | − |
| SaXA029 | + |
| SaXA030 | + |
| SaXA032 | + |
| SaXA033 | + |
| SaXA034 | − |
| SaXA035 | + |
| SaXA037 | + |
| SaXA039 | − |
| SaXA042 | − |
| SaXA043 | − |
| SaXA044 | − |
| SaXA045 | + |
| SaXA051 | + |
| SaXA053 | − |
| SaXA056b | − |
| SaXA059a | + |
| SaXA060 | − |
| SaXA061 | + |
| SaXA062 | + |
| SaXA063 | − |
| SaXA065 | − |

[1413] Although the results shown above were obtained using a subset of proliferation-required nucleic acids from Staphylococcus aureus, it will be appreciated that similar analyses may be performed using the nucleic acids of the present invention to determine whether they inhibit the proliferation of cells or microorganisms other than Escherichia coli, Staphylococcus aureus, Enterococcus faecalis, Klebsiella pneumoniae, Pseudomonas aeruginosa, Salmonella typhimurium, Acinetobacter baumannii, Bacillus anthracis, Bacteroides fragilis, Bordetella pertussis, Borrelia burgdorferi, Burkholderia cepacia, Burkholderia fungorum, Burkholderia mallei, Campylobacter jejuni, Chlamydia pneumoniae, Chlamydia trachomatis, Clostridium acetobutylicum, Clostridium botulinum, Clostridium difficile, Corynebacterium diptheriae, Enterobacter cloacae, Enterococcus faecium, Haemophilus influenzae, Helicobacter pylori, Legionella pneumophila, Listeria monocytogenes, Moraxella catarrhalis, Mycobacterium avium, Mycobacterium bovis, Mycobacterium leprae, Mycobacterium tuberculosis, Mycoplasma genitalium, Mycoplasma pneumoniae, Neisseria gonorrhoeae, Neisseria meningitidis, Pasteurella multocida, Proteus mirabilis, Pseudomonas putida, Pseudomonas syringae, Salmonella paratyphi, Salmonella typhi, Staphylococcus epidermidis, Staphylococcus haemolyticus, Streptococcus mutans, Streptococcus pneumoniae, Streptococcus pyogenes, Treponema pallidum, Ureaplasma urealyticum, Vibrio cholerae or Yersinia pestis.

[1414] Thus, it will be appreciated that the above methods for evaluating the ability of an antisense nucleic acid to inhibit the proliferation of a heterologous organism may be performed using antisense nucleic acids complementary to any of the proliferation-required nucleic acids from Escherichia coli, Staphylococcus aureus, Enterococcus faecalis, Klebsiella pneumoniae, Pseudomonas aeruginosa, Salmonella typhimurium, Acinetobacter baumannii, Bacillus anthracis, Bacteroides fragilis, Bordetella pertussis, Borrelia burgdorferi, Burkholderia cepacia, Burkholderia fungorum, Burkholderia mallei, Campylobacter jejuni, Chlamydia pneumoniae, Chlamydia trachomatis, Clostridium acetobutylicum, Clostridium botulinum, Clostridium difficile, Corynebacterium diptheriae, Enterobacter cloacae, Enterococcus faecium, Haemophilus influenzae, Helicobacter pylori, Legionella pneumophila, Listeria monocytogenes, Moraxella catarrhalis, Mycobacterium avium, Mycobacterium bovis, Mycobacterium leprae, Mycobacterium tuberculosis, Mycoplasma genitalium, Mycoplasma pneumoniae, Neisseria gonorrhoeae, Neisseria meningitidis, Pasteurella multocida, Proteus mirabilis, Pseudomonas putida, Pseudomonas syringae, Salmonella paratyphi, Salmonella typhi, Staphylococcus epidermidis, Staphylococcus haemolyticus, Streptococcus mutans, Streptococcus pneumoniae, Streptococcus pyogenes, Treponema pallidum, Ureaplasma urealyticum, Vibrio cholerae or Yersinia pestis, (including antisense nucleic acids complementary to SEQ ID NOs.: 6214-42397, such as the antisense nucleic acids of SEQ ID NOs.: 1-6213) or portions thereof, antisense nucleic acids complementary to homologous coding nucleic acids or portions thereof, or homologous antisense nucleic acids.

### Example 7

[1415] Identification of Homologous Nucleic Acids by Functional Complementation

[1416] Homologous coding nucleic acids, homologous antisense nucleic acids or nucleic acids encoding homologous polypeptides may be identified as follows. Gene products whose activities may be complemented by a proliferation-required gene product from Escherichia coli, Staphylococcus aureus, Enterococcus faecalis, Klebsiella pneumoniae, Pseudomonas aeruginosa, Salmonella typhimurium, Acinetobacter baumannii, Bacillus anthracis, Bacteroides fragilis, Bordetella pertussis, Borrelia burgdorferi, Burkholderia cepacia, Burkholderia fungorum, Burkholderia mallei, Campylobacter jejuni, Chlamydia pneumoniae, Chlamydia trachomatis, Clostridium acetobutylicum, Clostridium botulinum, Clostridium difficile, Corynebacterium diptheriae, Enterobacter cloacae, Enterococcus faecium, Haemophilus influenzae, Helicobacter pylori, Legionella pneumophila, Listeria monocytogenes, Moraxella catarrhalis, Mycobacterium avium, Mycobacterium bovis, Mycobacterium leprae, Mycobacterium tuberculosis, Mycoplasma genitalium, Mycoplasma pneumoniae, Neisseria gonorrhoeae, Neisseria meningitidis, Pasteurella multocida, Proteus mirabilis, Pseudomonas putida, Pseudomonas syringae, Salmonella paratyphi, Salmonella typhi, Staphylococcus epidermidis, Staphylococcus haemolyticus, Streptococcus mutans, Streptococcus pneumoniae, Streptococcus pyogenes, Treponema pallidum, Ureaplasma urealyticum, Vibrio cholerae, Yersinia pestis or homologous polypeptides are identified using merodiploids, created by introducing a plasmid or Bacterial Artificial Chromosome into an organism having a mutation in the essential gene which reduces or eliminates the activity of the gene product. In some embodiments, the mutation may be a conditional mutation, such as a temperature sensitive mutation, such that the organism proliferates under permissive conditions but is unable to proliferate under non-permissive conditions in the absence of complementation by the gene on the plasmid or Bacterial Artificial Chromosome. Alternatively, duplications may be constructed as described in Roth et al. (1987) Biosynthesis of Aromatic Amino Acids in Escherichia coli and Salmonella typhimurium, F. C. Neidhardt, ed., American Society for Microbiology, publisher, pp. 2269-2270, the disclosure of which is incorporated herein by reference in its entirety. Such methods are familiar to those skilled in the art. Alternatively, homologous coding nucleic acids, homologous antisense nucleic acids or nucleic acids encoding homologous polypeptides may be identified by placing a gene required for proliferation or a nucleic acid complementary to at least a portion of a gene required for proliferation under the control of a regulatable promoter as described above, introducing a plasmid or Bacterial Artificial Chromosome into the cell, and identifying cells which are able to proliferate under conditions which would prevent or reduce proliferation in the absence of the plasmid or Bacterial Artificial Chromosome.

[1417] Homologous coding nucleic acids, homologous antisense nucleic acids or nucleic acids encoding homologous polypeptides may be identified using databases as follows.

### Example 8

[1418] Identification of Homologous Nucleic Acids by Database Analysis

[1419] As a demonstration of the methodology required to find homologues to an essential gene, fifty-one prokaryotic organisms were analyzed and compared in detail. First, the most reliable source of gene sequences for each organism was assessed by conducting a survey of the public and private data sources. The fifty-one organisms studied were Escherichia coli, Staphylococcus aureus, Enterococcus faecalis, Klebsiella pneumoniae, Pseudomonas aeruginosa, Salmonella typhimurium, Acinetobacter baumannii, Bacillus anthracis, Bacteroides fragilis, Bordetella pertussis, Borrelia burgdorferi, Burkholderia cepacia, Burkholderia fungorum, Burkholderia mallei, Campylobacter jejuni, Chlamydia pneumoniae, Chlamydia trachomatis, Clostridium acetobutylicum, Clostridium botulinum, Clostridium difficile, Corynebacterium diptheriae, Enterobacter cloacae, Enterococcus faecium, Haemophilus influenzae, Helicobacter pylon, Legionella pneumophila, Listeria monocytogenes, Moraxella catarrhalis, Mycobacterium avium, Mycobacterium bovis, Mycobacterium leprae, Mycobacterium tuberculosis, Mycoplasma genitalium, Mycoplasma pneumoniae, Neisseria gonorrhoeae, Neisseria meningitidis, Pasteurella multocida, Proteus mirabilis, Pseudomonas putida, Pseudomonas syringae, Salmonella paratyphi, Salmonella typhi, Staphylococcus epidermidis, Staphylococcus haemolyticus, Streptococcus mutans, Streptococcus pneumoniae, Streptococcus pyogenes, Treponema pallidum, Ureaplasma urealyticum, Vibrio cholerae and Yersinia pestis. Full-length gene, protein and nucleotide sequences for these organisms were assembled from various sources. For Escherichia coli, Haemophilus influenzae and Helicobacter pylori, gene sequences were adopted from the public sequencing projects, and derived from the GenPept 115 database (available from NCBI). For Pseudomonas aeruginosa, gene sequences were adopted from the Pseudomonas genome sequencing project (downloaded from http://www.pseudomonas.com). For Klebsiella pneumoniae, Staphylococcus aureus, Streptococcus pneumoniae and Salmonella typhi, genomic sequences from PathoSeq v 4.1 (March 2000 release) were reanalyzed for ORFs using the gene finding software GeneMark v 2.4a, which was purchased from GenePro Inc. 451 Bishop St., N.W., Suite B, Atlanta, Ga., 30318, USA. Similar analyses were conducted for the other organisms using publically available and proprietary databases.

[1420] Homologous coding nucleic acids and the homologous polypeptides which they encode may be identified using a “reciprocal” best-hit analysis. To facilitate the identification of homologous coding nucleic acids and homologous polypeptides, paralogous genes within each of 51 organisms were identified and clustered prior to comparison to other organisms. Briefly, the polypeptide sequence of each polypeptide encoded by each open reading frame (ORF) in a given organism was compared to the polypeptide sequence encoded by every other ORF for that organism for each of the 51 pathogenic organisms (PathoSeq September 2001 release) using BLASTP 2.09 algorithm without filtering. Simultaneously, the polypeptide sequence encoded by each ORF of an organism was compared to the polypeptide sequences encoded by each of the ORFs in the remaining 51 organisms. Those polypeptides within a single organism that shared a higher degree of sequence identity to one another than to polypeptide sequences obtained from any other organisms were clustered as “paralog” sequences for “reciprocal” best-hit analysis.

[1421] For each reference organism, the 50 homologous coding nucleic acids (and the 50 homologous polypeptides which they encode) were determined by identifying the ORFs in each of the 50 comparison organisms which encode a polypeptide sharing the highest degree of amino acid sequence identity to the polypeptide encoded by the ORF from the reference organism. The accuracy of the identification of the predicted homologous coding nucleic acids (and the homologous polypeptides which they encode) was confirmed by a “reciprocal” BLAST analysis in which the polypeptide sequence of the predicted homologous polypeptide was compared against the polypeptides encoded by each of the ORFs in the reference organism using BLASTP 2.09 algorithm without filtering. Only those polypeptides that shared the highest degree of amino acid sequence identity in each portion of the two-way comparison were retained for further analysis.

[1422] The best homolog for each of the fifty-one organisms, defined as the most significantly scoring match which also fulfilled the above criteria, is reported in Table IV.

[1423] Table IV is provided in electronic format on duplicate copies of a CD-ROM filed herewith and marked “Tables-Copy 1” and “Tables-Copy 2.” The duplicate copies of the CD-ROM each contain a file entitled FINAL_HOMOLOGY_LOOKUP_WITH_GENE_NAMES created on Oct. 25, 2002 which is 3,334,161 bytes in size and which contains Table IV. The information on these duplicate CD-ROMs is incorporated herein by reference in its entirety.

[1424] Table IV lists the best ORF identified as described above (column labeled Homolog LocusID) that matches the query sequence (column labeled Query LocusID), the organism from which the best matched homolog is identified (column labeled Homolog Organism), % identity between the query sequence and the homolog, and the amount of each sequence that aligns together well (columns labeled Query Coverage and Homolog Coverage) for the gene identified in each of the fifty-one organisms evaluated as described above.

[1425] The Query LocusID in Table IV corresponds to the Gene Locus ID in Table IC. Table IC links the Gene LocusID to the SEQ ID NO: for the coding nucleic acid with the SEQ ID NO: for the polypeptide encoded by the coding nucleic acid.

[1426] Table IV also provides the generic designation for each group of homologous polypeptides which share sufficient sequence identity or similarity such that they can be identified as a group of orthologous polypeptides (column entitled GENE NAME). Each polypeptide listed in Table IV has been given a generic name which is shared with the other orthologous polypeptides listed in Table IV. “Orthologous polypeptides” include, but are not limited to, polypeptides having at least 99%, at least 95%, at least 90%, at least 85%, at least 80%, at least 70%, at least 60%, at least 50%, at least 40% or at least 25% amino acid identity or similarity to each other. Accordingly, each of the polypeptide orthologs in Table IV that are provided with identical generic designations are polypeptides having at least 99%, at least 95%, at least 90%, at least 85%, at least 80%, at least 70%, at least 60%, at least 50%, at least 40% or at least 25% amino acid identity or similarity to each other. In some embodiments, the orthologous polypeptides are polypeptides which are naturally produced by an organism (i.e. polypeptides whose sequence has not been altered by genetic engineering to generate a polypeptide not found in nature). Identity or similarity may be determined using the FASTA version 3.0t78 algorithm with the default parameters. Alternatively, protein identity or similarity may be identified using BLASTP with the default parameters, BLASTX with the default parameters, or TBLASTN with the default parameters. (Altschul, S. F. et al. Gapped BLAST and PSI-BLAST: A New Generation of Protein Database Search Programs, Nucleic Acid Res. 25: 3389-3402 (1997), the disclosure of which is incorporated herein by reference in its entirety). It will be appreciated, however, that orthologous polypeptides which fall within the generic designations provided in Table IV are not limited only to those sequences specifically listed in Table IV which share at least 99%, at least 95%, at least 90%, at least 85%, at least 80%, at least 70%, at least 60%, at least 50%, at least 40% or at least 25% amino acid identity or similarity, but rather, encompass any polypeptide falling within these defined amino acid identity or similarity parameters. Thus, as used herein, each generic designation includes the orthologous polypeptides specifically listed in Table IV as well as other orthologs. For example, as used herein the terminology thrA (having Query Locus ID Number ECO100002) includes all the polypeptides labeled as ThrA in Table IV as well as orthologous polypeptides from organisms other than those provided in Table IV.

[1427] Nucleic acids which encode the orthologous polypeptides are provided with the same designation as given to the group of polypeptides which they encode. Each coding nucleic acid listed in Table IV has been given a generic name which is shared with the other orthologous nucleic acids listed in Table IV. “Orthologous coding nucleic acids” include, but are not limited to, coding nucleic acid having at least 97%, at least 95%, at least 90%, at least 85%, at least 80%, at least 70%, at least 60%, at least 50%, at least 40%, at least 30%, or at least 20% nucleotide sequence identity to each other. In some embodiments, the orthologous coding nucleic acids are nucleic acids which are naturally produced by an organism (i.e. nucleic acids whose sequence has not been altered by genetic engineering to generate a nucleic acid not found in nature). Identity may be measured using BLASTN version 2.0 with the default parameters or tBLASTX with the default parameters. (Altschul, S. F. et al. Gapped BLAST and PSI-BLAST: A New Generation of Protein Database Search Programs, Nucleic Acid Res. 25: 3389-3402 (1997), the disclosure of which is incorporated herein by reference in its entirety). Alternatively a gene can be classified into a cluster of orthologous groups (COG) by using the COGNITOR program available at the above web site, or by direct BLASTP comparison of the gene of interest to the members of the COGs and analysis of these results as described by Tatusov, R. L., Galperin, M. Y., Natale, D. A. and Koonin, E. V. (2000) The COG database: a tool for genome-scale analysis of protein functions and evolution. Nucleic Acids Research v. 28 n. 1, pp33-36, the disclosure of which is incorporated herein by reference in its entirety. Thus, as used herein, each generic designation includes the orthologous coding nucleic aicds specifically listed in Table IV as well as other orthologs. For example, as used herein the terminology thrA (having Query Locus ID Number ECO100002) includes all the coding nucleic acids labeled as ThrA in Table IV as well as orthologous coding nucleic acids from organisms other than those provided in Table IV.

[1428] An attempt has been made here to designate polypeptide and nucleic acid orthologs using the polypeptide and gene names provided in the art. As such, the same name is used to group both orthologous coding nucleic acids and orthologous polypeptides. In general, however, the designation for a specific group of polypeptides will begin with a capital letter whereas the corresponding identifier for the orthologous genes which encode the polypeptide orthologs will begin with a lower case letter and be in italics.

[1429] It will be appreciated that in some instances in the scientific literature, the same name will be given to a gene or polypeptide in multiple organisms but not all of these genes or polypeptides will necessarily be orthologous. For example, the yjbN gene in Gram positive organisms such as Staphylococcus and Bacillus encodes orthologous polypeptides; however, the gene designated as yjbN in E. coli does not encode a polypeptide orthologous to those from the Gram positive organisms. Rather, in E. coli, the gene orthologous to the yjbN gene in Gram positive organisms has been named yfjB in the scientific literature. In Table IV, this orthologous gene group, which encodes orthologous polypeptides, is labelled yjbN/yfjB to accurately reflect each of the names known in the art for gene that fall into this ortholog family. The yjbN gene from E. coli, which does not belong to the yjbN/yfjB ortholog family, belongs to a separate orthologous gene group. This orthologous gene group has given the designation yjbN in order to maintain consistency with the name that has been provided in the art. There are at least thirty two similar instances, for the sequences listed in Table IV, where identical names have been provided in the scientific literature for genes which fall into different ortholog groups. In each of these cases, the naming convention described above has been implemented to ensure that each orthologous sequence group appearing in Table IV has been provided with a unique designation.

[1430] In a related instance, the gene designated as glyS in Staphylococcus aureus does not fall into the group of glyS orthologs obtained from each of the other organisms listed in Table IV. To eliminate any unclarity with respect to ortholog naming, the group of glyS genes from several organisms, which does not include the Staphylococcus aureus gene, have been given the glyS designation in Table IV. It appears that Staphylococcus aureus does not possess any ortholog belonging to the glyS group. Rather, the gene designated as glyS in Staphylococcus aureus has been designated as “sa-glyS” in Table IV and corresponds to a gene which was discovered as encoding a polypeptide essential for cellular proliferation in cell based assays using a specific antisense nucleic acid obtained from fragments of the Staphylococcus genome as described in previous examples. Other examples similar to that described above are generally designated as “sa-xxx” wherein xxx indicates the gene designation for the orthologous group.

[1431] In some cases, groups of orthologous genes have been found for which no name exists in the scientific literature. This results from the fact that many organisms have genomes which have not been completely annotated. Some ortholog groups present in Table IV include genes or polypeptides from only organisms for which no gene designation exists in the scientific literature. For example in some cases, the orthologous group has been designated based on the gene corresponding to the antisense nucleic acid clone from either Staphylococcus aureus or Enterococcus faecalis which was used to identify the genes/polypeptides in the ortholog group as essential. In the case of Staphylococcus aureus, the antisense clone name has been matched to an ORF designation as provided in Kuroda, et al. (2001) Lancet 357:1225-1240. This ORF designation, which begins with the letters “SAV,” is used as the orthologous group designation. For Enterococcus faecalis, the Gene Locus Identification Number as provided in Tables IB and IC is used as the orthologous group designation.

[1432] It will be appreciated that Applicant may specifically exclude any of the individual orthologous proteins listed in Table IV or their corresponding genes or antisense nucleic acids from the claims should Applicant so desire.

[1433] The data in Table IV demonstrates the methods described herein identified genes required for proliferation in several species which share homology.

### Example 9

[1434] Identification of Genes and their Corresponding Operons Affected by Antisense Inhibition

[1435] Once the genes involved in Escherichia coli, Staphylococcus aureus, Enterococcus faecalis, Klebsiella pneumoniae, Pseudomonas aeruginosa, Salmonella typhimurium, Acinetobacter baumannii, Bacillus anthracis, Bacteroides fragilis, Bordetella pertussis, Borrelia burgdorferi, Burkholderia cepacia, Burkholderia fungorum, Burkholderia mallei, Campylobacter jejuni, Chlamydia pneumoniae, Chlamydia trachomatis, Clostridium acetobutylicum, Clostridium botulinum, Clostridium difficile, Corynebacterium diptheriae, Enterobacter cloacae, Enterococcus faecium, Haemophilus influenzae, Helicobacter pylori, Legionella pneumophila, Listeria monocytogenes, Moraxella catarrhalis, Mycobacterium avium, Mycobacterium bovis, Mycobacterium leprae, Mycobacterium tuberculosis, Mycoplasma genitalium, Mycoplasma pneumoniae, Neisseria gonorrhoeae, Neisseria meningitidis, Pasteurella multocida, Proteus mirabilis, Pseudomonas putida, Pseudomonas syringae, Salmonella paratyphi, Salmonella typhi, Staphylococcus epidermidis, Staphylococcus haemolyticus, Streptococcus mutans, Streptococcus pneumoniae, Streptococcus pyogenes, Treponema pallidum, Ureaplasma urealyticum, Vibrio cholerae or Yersinia pestis proliferation are identified as described above, the operons in which these genes lie may be identified by comparison with known microbial genomes. Since bacterial genes are transcribed in a polycistronic manner, the antisense inhibition of a single gene in an operon might affect the expression of all the other genes on the operon or the genes downstream from the single gene identified. Accordingly, each of the genes contained within an operon may be analyzed for their effect on proliferation.

[1436] Operons are predicted by looking for all adjacent genes in a genomic region that lie in the same orientation with no large noncoding gaps in between. First, full-length ORFs complementary to the antisense molecules are identified as described above. Adjacent ORFs are then identified and their relative orientation determined either by directly analyzing the genomic sequences surrounding the ORFs complementary to the antisense clones or by extracting adjacent ORFs from the collection obtained through whole genome ORF analysis described above followed by ORF alignment. Operons predicted in this way may be confirmed by comparison to the arrangement of the homologous nucleic acids in the Bacillus subtilis complete genome sequence, as reported by the genome database compiled at Institut Pasteur Subtilist Release R15.1 (Jun. 24, 1999) which can be found at http://bioweb.pasteur.fr/GenoList/SubtiList/. The Bacillus subtilis genome is the only fully sequenced and annotated genome from a Gram positive microorganism, and appears to have a high level of similarity to Staphylococcus aureus both at the level of conservation of gene sequence and genomic organization including operon structure. Operons for Salmonella typhimurium and Klebsiella pneumoniae may be identified by comparison with E. coli, Haemophilus, or Pseudomonas sequences. The Pseudomonas aeruginosa web site (http://www.pseudomonas.com) can also be used to help predict operon organization in this bacterium.

[1437] Extensive DNA sequences of Salmonella typhimurium are available through the Salmonella Genome Center (Washington University, St. Louis, Mo.) the Sanger Centre (United Kingdom) and the PathoSeq database (Incyte). Annotation of some of the DNA sequences in some of the aforementioned databases is lacking, but comparisons may be made to E. coli using tools such as BLASTX.

[1438] Public or proprietary databases may be used to analyzed E. faecalis sequences as well as sequences from the organisms listed above.

[1439] The analysis of the operons on which essential genes lie may be conducted for each of the sequences which are listed in Table IA which inhibit proliferation and the ORFs listed in Table IC. Once the full length ORFs and/or the operons containing them have been identified using the methods described above, they can be obtained from a genomic library by performing a PCR amplification using primers at each end of the desired sequence. Those skilled in the art will appreciate that a comparison of the ORFs to homologous sequences in other cells or microorganisms will facilitate confirmation of the start and stop codons at the ends of the ORFs.

[1440] In some embodiments, the primers may contain restriction sites which facilitate the insertion of the gene or operon into a desired vector. For example, the gene may be inserted into an expression vector and used to produce the proliferation-required protein as described below. Other methods for obtaining the full length ORFs and/or operons are familiar to those skilled in the art. For exmaple, natural restriction sites may be employed to insert the full length ORFs and/or operons into a desired vector.

### Example 10

[1441] Identification of Individual Genes within an Operon Required for Proliferation

[1442] The following example illustrates a method for determining if a targeted gene within an operon is required for cell proliferation by replacing the targeted allele in the chromosome with an in-frame deletion of the coding region of the targeted gene.

[1443] Deletion inactivation of a chromosomal copy of a gene in Escherichia coli, Staphylococcus aureus, Enterococcus faecalis, Klebsiella pneumoniae, Pseudomonas aeruginosa, Salmonella typhimurium, Acinetobacter baumannii, Bacillus anthracis, Bacteroides fragilis, Bordetella pertussis, Borrelia burgdorferi, Burkholderia cepacia, Burkholderia fungorum, Burkholderia mallei, Campylobacter jejuni, Chlamydia pneumoniae, Chlamydia trachomatis, Clostridium acetobutylicum, Clostridium botulinum, Clostridium difficile, Corynebacterium diptheriae, Enterobacter cloacae, Enterococcus faecium, Haemophilus influenzae, Helicobacter pylori, Legionella pneumophila, Listeria monocytogenes, Moraxella catarrhalis, Mycobacterium avium, Mycobacterium bovis, Mycobacterium leprae, Mycobacterium tuberculosis, Mycoplasma genitalium, Mycoplasma pneumoniae, Neisseria gonorrhoeae, Neisseria meningitidis, Pasteurella multocida, Proteus mirabilis, Pseudomonas putida, Pseudomonas syringae, Salmonella paratyphi, Salmonella typhi, Staphylococcus epidermidis, Staphylococcus haemolyticus, Streptococcus mutans, Streptococcus pneumoniae, Streptococcus pyogenes, Treponema pallidum, Ureaplasma urealyticum, Vibrio cholerae or Yersinia pestis can be accomplished by integrative gene replacement. The principles of this method were described in Xia, M., et al. 1999 Plasmid 42:144-149 and Hamilton, C. M., et al 1989. J. Bacteriol. 171: 4617-4622, the disclosures of which are incorporated herein by reference in their entireties. A similar gene disruption method is available for Pseudomonas aeruginosa, except the counter selectable marker is sacB (Schweizer, H. P., Klassen, T. and Hoang, T. (1996) Mol. Biol. of Pseudomonas. ASM press, 229-237, the disclosure of which is incorporated herein by reference in its entirety). In this approach, a mutant allele of the targeted gene is constructed by way of an in-frame deletion and introduced into the chromosome using a suicide vector. This results in a tandem duplication comprising a deleted (null) allele and a wild type allele of the target gene. Cells in which the vector sequences have been deleted are isolated using a counter-selection technique. Removal of the vector sequence from the chromosomal insertion results in either restoration of the wild-type target sequence or replacement of the wild type sequence with the deletion (null) allele. E. faecalis genes can be disrupted using a suicide vector that contains an internal fragment to a gene of interest. With the appropriate selection this plasmid will homologously recombine into the chromosome (Nallapareddy, S. R., X. Qin, G. M. Weinstock, M. Hook, B. E. Murray. 2000. Infect. Immun. 68:5218-5224, the disclosure of which is incorporated herein by reference).

[1444] The resultant population of Escherichia coli, Staphylococcus aureus, Enterococcus faecalis, Klebsiella pneumoniae, Pseudomonas aeruginosa, Salmonella typhimurium, Acinetobacter baumannii, Bacillus anthracis, Bacteroides fragilis, Bordetella pertussis, Borrelia burgdorferi, Burkholderia cepacia, Burkholderia fungorum, Burkholderia mallet, Campylobacter jejuni, Chlamydia pneumoniae, Chlamydia trachomatis, Clostridium acetobutylicum, Clostridium botulinum, Clostridium difficile, Corynebacterium diptheriae, Enterobacter cloacae, Enterococcus faecium, Haemophilus influenzae, Helicobacter pylori, Legionella pneumophila, Listeria monocytogenes, Moraxella catarrhalis, Mycobacterium avium, Mycobacterium bovis, Mycobacterium leprae, Mycobacterium tuberculosis, Mycoplasma genitalium, Mycoplasma pneumoniae, Neisseria gonorrhoeae, Neisseria meningitidis, Pasteurella multocida, Proteus mirabilis, Pseudomonas putida, Pseudomonas syringae, Salmonella paratyphi, Salmonella typhi, Staphylococcus epidermidis, Staphylococcus haemolyticus, Streptococcus mutans, Streptococcus pneumoniae, Streptococcus pyogenes, Treponema pallidum, Ureaplasma urealyticum, Vibrio cholerae or Yersinia pestis colonies can then be evaluated to determine whether the target sequence is required for proliferation by PCR amplification of the affected target sequence. If the targeted gene is not required for proliferation, then PCR analysis will show that roughly equal numbers of colonies have retained either the wild-type or the mutant allele. If the targeted gene is required for proliferation, then only wild-type alleles will be recovered in the PCR analysis.

[1445] The method of cross-over PCR is used to generate the mutant allele by amplification of nucleotide sequences flanking but not including the coding region of the gene of interest, using specifically designed primers such that overlap between the resulting two PCR amplification products allows them to hybridize. Further PCR amplification of this hybridization product using primers representing the extreme 5′ and 3′ ends can produce an amplification product containing an in-frame deletion of the coding region but retaining substantial flanking sequences.

[1446] For Staphylococcus aureus, this amplification product is subcloned into the suicide vector pSA3182 (Xia, M., et al. 1999 Plasmid 42:144-149, the disclosure of which is incorporated herein by reference in its entirety) which is host-dependent for autonomous replication. This vector includes a tetC tetracycline-resistance marker and the origin of replication of the well-known Staphylococcus aureus plasmid pT181 (Mojumdar, M and Kahn, S. A., Characterisation of the Tetracycline Resistance Gene of Plasmid pT181, J. Bacteriol. 170: 5522 (1988), the disclosure of which is incorporated herein by reference in its entirety). The vector lacks the repC gene which is required for autonomous replication of the vector at the pT181 origin. This vector can be propagated in a Staphylococcus aureus host strain such as SA3528, which expresses repC in trans. Once the amplified truncated target gene sequence is cloned and propagated in the pSA3182 vector, it can then be introduced into a repC minus strain such as RN4220 (Kreiswirth, B. N. et al., The Toxic Shock Syndrome Exotoxin Structural Gene is Not Detectably Transmitted by a Prophage, Nature 305:709-712 (1983), the disclosure of which is incorporated herein by reference in its entirety) by electroporation with selection for tetracycline resistance. In this strain, the vector must integrate by homologous recombination at the targeted gene in the chromosome to impart drug resistance. This results in a inserted truncated copy of the allele, followed by pSA3182 vector sequence, and finally an intact and functional allele of the targeted gene.

[1447] Once a tetracycline resistant Staphylococcus aureus strain is isolated using the above technique and shown to include truncated and wild-type alleles of the targeted gene as described above, a second plasmid, pSA7592 (Xia, M., et al. 1999 Plasmid 42:144-149, the disclosure of which is incorporated herein by reference in its entirety) is introduced into the strain by electroporation. This gene includes an erythromycin resistance gene and a repC gene that is expressed at high levels. Expression of repC in these transformants is toxic due to interference of normal chromosomal replication at the integrated pT181 origin of replication. This selects for strains that have removed the vector sequence by homologous recombination, resulting in either of two outcomes: The selected cells either possess a wild-type allele of the targeted gene or a gene in which the wild-type allele has been replaced by the engineered in-frame deletion of the truncated allele.

[1448] PCR amplification can be used to determine the genetic outcome of the above process in the resulting erythromycin resistant, tet sensitive transformant colonies. If the targeted gene is not required for cellular replication, then PCR evidence for both wild-type and mutant alleles will be found among the population of resultant transformants. However, if the targeted gene is required for cellular proliferation, then only the wild-type form of the gene will be evident among the resulting transformants.

[1449] Similarly, for Escherichia coli, Staphylococcus aureus, Enterococcus faecalis, Klebsiella pneumoniae, Pseudomonas aeruginosa, Salmonella typhimurium, Acinetobacter baumannii, Bacillus anthracis, Bacteroides fragilis, Bordetella pertussis, Borrelia burgdorferi, Burkholderia cepacia, Burkholderia fungorum, Burkholderia mallei, Campylobacter jejuni, Chlamydia pneumoniae, Chlamydia trachomatis, Clostridium acetobutylicum, Clostridium botulinum, Clostridium difficile, Corynebacterium diptheriae, Enterobacter cloacae, Enterococcus faecium, Haemophilus influenzae, Helicobacter pylori, Legionella pneumophila, Listeria monocytogenes, Moraxella catarrhalis, Mycobacterium avium, Mycobacterium bovis, Mycobacterium leprae, Mycobacterium tuberculosis, Mycoplasma genitalium, Mycoplasma pneumoniae, Neisseria gonorrhoeae, Neisseria meningitidis, Pasteurella multocida, Proteus mirabilis, Pseudomonas putida, Pseudomonas syringae, Salmonella paratyphi, Salmonella typhi, Staphylococcus epidermidis, Staphylococcus haemolyticus, Streptococcus mutans, Streptococcus pneumoniae, Streptococcus pyogenes, Treponema pallidum, Ureaplasma urealyticum, Vibrio cholerae or Yersinia pestis the PCR products containing the mutant allele of the target sequence may be introduced into an appropriate knockout vector and cells in which the wild type target has been disrupted are selected using the appropriate methodology.

[1450] The above methods have the advantage that insertion of an in-frame deletion mutation is far less likely to cause downstream polar effects on genes in the same operon as the targeted gene. However, it will be appreciated that other methods for disrupting Escherichia coli, Staphylococcus aureus, Enterococcus faecalis, Klebsiella pneumoniae, Pseudomonas aeruginosa, Salmonella typhimurium, Acinetobacter baumannii, Bacillus anthracis, Bacteroides fragilis, Bordetella pertussis, Borrelia burgdorferi, Burkholderia cepacia, Burkholderia fungorum, Burkholderia mallei, Campylobacter jejuni, Chlamydia pneumoniae, Chlamydia trachomatis, Clostridium acetobutylicum, Clostridium botulinum, Clostridium difficile, Corynebacterium diptheriae, Enterobacter cloacae, Enterococcus faecium, Haemophilus influenzae, Helicobacter pylori, Legionella pneumophila, Listeria monocytogenes, Moraxella catarrhalis, Mycobacterium avium, Mycobacterium bovis, Mycobacterium leprae, Mycobacterium tuberculosis, Mycoplasma genitalium, Mycoplasma pneumoniae, Neisseria gonorrhoeae, Neisseria meningitidis, Pasteurella multocida, Proteus mirabilis, Pseudomonas putida, Pseudomonas syringae, Salmonella paratyphi, Salmonella typhi, Staphylococcus epidermidis, Staphylococcus haemolyticus, Streptococcus mutans, Streptococcus pneumoniae, Streptococcus pyogenes, Treponema pallidum, Ureaplasma urealyticum, Vibrio cholerae or Yersinia pestis genes which are familiar to those skilled in the art may also be used.

[1451] Each gene in the operon may be disrupted using the methodology above to determine whether it is required for proliferation.

### Example 11

[1452] Expression of the Proteins Encoded by Genes Identified as Required for Escherichia coli, Staphylococcus aureus, Enterococcus faecalis, Klebsiella pneumoniae, Pseudomonas aeruginosa, Salmonella typhimurium, Acinetobacter baumannii, Bacillus anthracis, Bacteroides fragilis, Bordetella pertussis, Borrelia burgdorferi, Burkholderia cepacia, Burkholderia fungorum, Burkholderia mallei, Campylobacter jejuni, Chlamydia pneumoniae, Chlamydia trachomatis, Clostridium acetobutylicum, Clostridium botulinum, Clostridium difficile, Corynebacterium diptheriae, Enterobacter cloacae, Enterococcus faecium, Haemophilus influenzae, Helicobacter pylori, Legionella pneumophila. Listeria monocytogenes, Moraxella catarrhalis, Mycobacterium avium, Mycobacterium bovis, Mycobacterium leprae, Mycobacterium tuberculosis, Mycoplasma genitalium, Mycoplasma pneumoniae, Neisseria gonorrhoeae, Neisseria meningitidis, Pasteurella multocida, Proteus mirabilis, Pseudomonas putida, Pseudomonas syringae, Salmonella paratyphi, Salmonella typhi, Staphylococcus epidermidis, Staphylococcus haemolyticus, Streptococcus mutans, Streptococcus pneumoniae, Streptococcus pyogenes, Treponema pallidum, Ureaplasma urealyticum, Vibrio cholerae, Yersinia pestis Proliferation

[1453] The following is provided as one exemplary method to express the proliferation-required proteins idenfied as described above. The proliferation-required proteins may be expressed using any of the bacterial, insect, yeast, or mammalian expression systems known in the art. In some embodiments, the proliferation-required proteins encoded by the identified nucleotide sequences described above (including the proteins of SEQ ID NOs.: 42398-78581 encoded by the nucleic acids of SEQ ID NOs.: 6214-42397 are expressed using expression systems designed either for E. coli or for Staphylococcus aureus, Enterococcus faecalis, Klebsiella pneumoniae, Pseudomonas aeruginosa, Salmonella typhimurium, Acinetobacter baumannii, Bacillus anthracis, Bacteroides fragilis, Bordetella pertussis, Borrelia burgdorferi, Burkholderia cepacia, Burkholderia fungorum, Burkholderia mallei, Campylobacter jejuni, Chlamydia pneumoniae, Chlamydia trachomatis, Clostridium acetobutylicum, Clostridium botulinum, Clostridium difficile, Corynebacterium diptheriae, Enterobacter cloacae, Enterococcus faecium, Haemophilus influenzae, Helicobacter pylori, Legionella pneumophila, Listeria monocytogenes, Moraxella catarrhalis, Mycobacterium avium, Mycobacterium bovis, Mycobacterium leprae, Mycobacterium tuberculosis, Mycoplasma genitalium, Mycoplasma pneumoniae, Neisseria gonorrhoeae, Neisseria meningitidis, Pasteurella multocida, Proteus mirabilis, Pseudomonas putida, Pseudomonas syringae, Salmonella paratyphi, Salmonella typhi, Staphylococcus epidermidis, Staphylococcus haemolyticus, Streptococcus mutans, Streptococcus pneumoniae, Streptococcus pyogenes, Treponema pallidum, Ureaplasma urealyticum, Vibrio cholerae or Yersinia pestis. First, the initiation and termination codons for the gene are identified. If desired, methods for improving translation or expression of the protein are well known in the art. For example, if the nucleic acid encoding the polypeptide to be expressed lacks a methionine codon to serve as the initiation site, a strong Shine-Delgarno sequence, or a stop codon, these nucleotide sequences can be added. Similarly, if the identified nucleic acid lacks a transcription termination signal, this nucleotide sequence can be added to the construct by, for example, splicing out such a sequence from an appropriate donor sequence. In addition, the coding sequence may be operably linked to a strong constitutive promoter or an inducible promoter if desired. The identified nucleic acid or portion thereof encoding the polypeptide to be expressed is obtained by, for example, PCR from the bacterial expression vector or genome using oligonucleotide primers complementary to the identified nucleic acid or portion thereof and containing restriction endonuclease sequences appropriate for inserting the coding sequences into the vector such that the coding sequences can be expressed from the vector's promoter. Alternatively, other conventional cloning techniques may be used to place the coding sequence under the control of the promoter. In some embodiments, a termination signal may be located downstream of the coding sequence such that transcription of the coding sequence ends at an appropriate position.

[1454] Several expression vector systems for protein expression in E. coli are well known and available to those knowledgeable in the art. The coding sequence may be inserted into any of these vectors and placed under the control of the promoter. The expression vector may then be transformed into DH5α or some other E. coli strain suitable for the over expression of proteins.

[1455] Alternatively, an expression vector encoding a protein required for proliferation of Escherichia coli, Staphylococcus aureus, Enterococcus faecalis, Klebsiella pneumoniae, Pseudomonas aeruginosa, Salmonella typhimurium, Acinetobacter baumannii, Bacillus anthracis, Bacteroides fragilis, Bordetella pertussis, Borrelia burgdorferi, Burkholderia cepacia, Burkholderia fungorum, Burkholderia mallei, Campylobacter jejuni, Chlamydia pneumoniae, Chlamydia trachomatis, Clostridium acetobutylicum, Clostridium botulinum, Clostridium difficile, Corynebacterium diptheriae, Enterobacter cloacae, Enterococcus faecium, Haemophilus influenzae, Helicobacter pylori, Legionella pneumophila, Listeria monocytogenes, Moraxella catarrhalis, Mycobacterium avium, Mycobacterium bovis, Mycobacterium leprae, Mycobacterium tuberculosis, Mycoplasma genitalium, Mycoplasma pneumoniae, Neisseria gonorrhoeae, Neisseria meningitidis, Pasteurella multocida, Proteus mirabilis, Pseudomonas putida, Pseudomonas syringae, Salmonella paratyphi, Salmonella typhi, Staphylococcus epidermidis, Staphylococcus haemolyticus, Streptococcus mutans, Streptococcus pneumoniae, Streptococcus pyogenes, Treponema pallidum, Ureaplasma urealyticum, Vibrio cholerae or Yersinia pestis may be introduced into Escherichia coli, Staphylococcus aureus, Enterococcus faecalis, Klebsiella pneumoniae, Pseudomonas aeruginosa, Salmonella typhimurium, Acinetobacter baumannii, Bacillus anthracis, Bacteroides fragilis, Bordetella pertussis, Borrelia burgdorferi, Burkholderia cepacia, Burkholderia fungorum, Burkholderia mallei, Campylobacter jejuni, Chlamydia pneumoniae, Chlamydia trachomatis, Clostridium acetobutylicum, Clostridium botulinum, Clostridium difficile, Corynebacterium diptheriae, Enterobacter cloacae, Enterococcus faecium, Haemophilus influenzae, Helicobacter pylori, Legionella pneumophila, Listeria monocytogenes, Moraxella catarrhalis, Mycobacterium avium, Mycobacterium bovis, Mycobacterium leprae, Mycobacterium tuberculosis, Mycoplasma genitalium, Mycoplasma pneumoniae, Neisseria gonorrhoeae, Neisseria meningitidis, Pasteurella multocida, Proteus mirabilis, Pseudomonas putida, Pseudomonas syringae, Salmonella paratyphi, Salmonella typhi, Staphylococcus epidermidis, Staphylococcus haemolyticus, Streptococcus mutans, Streptococcus pneumoniae, Streptococcus pyogenes, Treponema pallidum, Ureaplasma urealyticum, Vibrio cholerae or Yersinia pestis. Protocols for introducing nucleic acids into these organisms are well known in the art. For example, the protocols described in J. C. Lee “Electroporation of Staphylococci” from Methods in Molecular Biology vol 47: Electroporation Protocols for Microorganisms Edited by: J. A. Nickoloff Humana Press Inc., Totowa, N.J. pp209-216, the disclosure of which is incorporated herein by reference in its entirety, may be used to introduce nucleic acids into Staphylococcus aureus. Nucleic acids may also be introduced into Salmonella typhimurium, Klebsiella pneumoniae, Pseudomonas aeruginosa or Enterococcus faecalis using methods familiar to those skilled in the art. Positive transformants are selected after growing the transformed cells on plates containing an antibiotic to which the vector confers resistance. In one embodiment, Staphylococcus aureus is transformed with an expression vector in which the coding sequence is operably linked to the T5 promoter containing a xylose operator such that expression of the encoded protein is inducible with xylose.

[1456] In one embodiment, the protein is expressed and maintained in the cytoplasm as the native sequence. In an alternate embodiment, the expressed protein can be modified to include a protein tag that allows for differential cellular targeting, such as to the periplasmic space of Gram negative or Gram positive expression hosts or to the exterior of the cell (i.e., into the culture medium). In some embodiments, the osmotic shock cell lysis method described in Chapter 16 of Current Protocols in Molecular Biology, Vol. 2, (Ausubel, et al., Eds.) John Wiley & Sons, Inc. (1997) may be used to liberate the polypeptide from the cell. In still another embodiment, such a protein tag could also facilitate purification of the protein from either fractionated cells or from the culture medium by affinity chromatography. Each of these procedures can be used to express a proliferation-required protein.

[1457] Expressed proteins, whether in the culture medium or liberated from the periplasmic space or the cytoplasm, are then purified or enriched from the supernatant using conventional techniques such as ammonium sulfate precipitation, standard chromatography, immunoprecipitation, immunochromatography, size exclusion chromatography, ion exchange chromatography, and HPLC. Alternatively, the polypeptide may be secreted from the host cell in a sufficiently enriched or pure state in the supernatant or growth media of the host cell to permit it to be used for its intended purpose without further enrichment. The purity of the protein product obtained can be assessed using techniques such as SDS PAGE, which is a protein resolving technique well known to those skilled in the art. Coomassie, silver staining or staining with an antibody are typical methods used to visualize the protein of interest.

[1458] Antibodies capable of specifically recognizing the protein of interest can be generated using synthetic peptides using methods well known in the art. See, Antibodies: A Laboratory Manual, (Harlow and Lane, Eds.) Cold Spring Harbor Laboratory (1988). For example, 15-mer peptides having an amino acid sequence encoded by the appropriate identified gene sequence of interest or portion thereof can be chemically synthesized. The synthetic peptides are injected into mice to generate antibodies to the polypeptide encoded by the identified nucleic acid sequence of interest or portion thereof. Alternatively, samples of the protein expressed from the expression vectors discussed above can be purified and subjected to amino acid sequencing analysis to confirm the identity of the recombinantly expressed protein and subsequently used to raise antibodies. An Example describing in detail the generation of monoclonal and polyclonal antibodies appears in Example 12.

[1459] The protein encoded by the identified nucleic acid of interest or portion thereof can be purified using standard immunochromatography techniques. In such procedures, a solution containing the secreted protein, such as the culture medium or a cell extract, is applied to a column having antibodies against the secreted protein attached to the chromatography matrix. The secreted protein is allowed to bind the immunochromatography column. Thereafter, the column is washed to remove non-specifically bound proteins. The specifically-bound secreted protein is then released from the column and recovered using standard techniques. These procedures are well known in the art.

[1460] In an alternative protein purification scheme, the identified nucleic acid of interest or portion thereof can be incorporated into expression vectors designed for use in purification schemes employing chimeric polypeptides. In such strategies the coding sequence of the identified nucleic acid of interest or portion thereof is inserted in-frame with the gene encoding the other half of the chimera. The other half of the chimera can be maltose binding protein (MBP) or a nickel binding polypeptide encoding sequence. A chromatography matrix having maltose or nickel attached thereto is then used to purify the chimeric protein. Protease cleavage sites can be engineered between the MBP gene or the nickel binding polypeptide and the identified expected gene of interest, or portion thereof. Thus, the two polypeptides of the chimera can be separated from one another by protease digestion.

[1461] One useful expression vector for generating maltose binding protein fusion proteins is pMAL (New England Biolabs), which encodes the malE gene. In the pMal protein fusion system, the cloned gene is inserted into a pMal vector downstream from the malE gene. This results in the expression of an MBP-fusion protein. The fusion protein is purified by affinity chromatography. These techniques as described are well known to those skilled in the art of molecular biology.

### Example 12

[1462] Production of an Antibody to an isolated Escherichia coli, Staphylococcus aureus, Enterococcus faecalis, Klebsiella pneumoniae, Pseudomonas aeruginosa, Salmonella typhimurium, Acinetobacter baumannii, Bacillus anthracis, Bacteroides fragilis, Bordetella pertussis, Borrelia burgdorferi, Burkholderia cepacia, Burkholderia fungorum, Burkholderia mallei, Campylobacter jejuni, Chlamydia pneumoniae, Chlamydia trachomatis, Clostridium acetobutylicum, Clostridium botulinum, Clostridium difficile, Corynebacterium diptheriae, Enterobacter cloacae, Enterococcus faecium, Haemophilus influenzae, Helicobacter pylori, Legionella pneumophila, Listeria monocytogenes, Moraxella catarrhalis, Mycobacterium avium, Mycobacterium bovis, Mycobacterium leprae, Mycobacterium tuberculosis, Mycoplasma genitalium, Mycoplasma pneumoniae, Neisseria gonorrhoeae, Neisseria meningitidis, Pasteurella multocida, Proteus mirabilis, Pseudomonas putida, Pseudomonas syringae, Salmonella paratyphi, Salmonella typhi, Staphylococcus epidermidis, Staphylococcus haemolyticus, Streptococcus mutans, Streptococcus pneumoniae, Streptococcus pyogenes, Treponema pallidum, Ureaplasma urealyticum, Vibrio cholerae or Yersinia pestis Protein

[1463] Substantially pure protein or polypeptide (including one of the polypeptides of SEQ ID NOs.: 42398-78581) is isolated from the transformed cells as described in Example 11. The concentration of protein in the final preparation is adjusted, for example, by concentration on a 10,000 molecular weight cut off AMICON filter device (Millipore, Bedford, Mass.), to the level of a few micrograms/ml. Monoclonal or polyclonal antibody to the protein can then be prepared as follows:

[1464] Monoclonal Antibody Production by Hybridoma Fusion

[1465] Monoclonal antibody to epitopes of any of the peptides identified and isolated as described can be prepared from murine hybridomas according to the classical method of Kohler, G. and Milstein, C., Nature 256:495 (1975) or any of the well-known derivative methods thereof. Briefly, a mouse is repetitively inoculated with a few micrograms of the selected protein or peptides derived therefrom over a period of a few weeks. The mouse is then sacrificed, and the antibody-producing cells of the spleen isolated. The spleen cells are fused by means of polyethylene glycol with mouse myeloma cells, and the excess unfused cells are destroyed by growth of the system on selective medium comprising aminopterin (HAT medium). The successfully-fused cells are diluted and aliquots of the dilution placed in wells of a microtiter plate where growth of the culture is continued. Antibody-producing clones are identified by detection of antibody in the supernatant fluid of the wells by immunoassay procedures, such as ELISA, as described by Engvall, E., “Enzyme immunoassay ELISA and EMIT,” Meth. Enzymol. 70:419 (1980), and derivative methods thereof. Selected positive clones can be expanded and their monoclonal antibody product harvested for use. Detailed procedures for monoclonal antibody production are described in Davis, L. et al. Basic Methods in Molecular Biology Elsevier, New York. Section 21-2.

[1466] Polyclonal Antibody Production by Immunization

[1467] Polyclonal antiserum containing antibodies to heterogeneous epitopes of a single protein or a peptide can be prepared by immunizing suitable animals with the expressed protein or peptides derived therefrom described above, which can be unmodified or modified to enhance immunogenicity. Effective polyclonal antibody production is affected by many factors related both to the antigen and the host species. For example, small molecules tend to be less immunogenic than larger molecules and can require the use of carriers and adjuvant. Also, host animals vary in response to site of inoculations and dose, with both inadequate or excessive doses of antigen resulting in low titer antisera. Small doses (ng level) of antigen administered at multiple intradermal sites appears to be most reliable. An effective immunization protocol for rabbits can be found in Vaitukaitis, J. et al. J. Clin. Endocrinol. Metab. 33:988-991 (1971).

[1468] Booster injections can be given at regular intervals, and antiserum harvested when antibody titer thereof, as determined semi-quantitatively, for example, by double immunodiffusion in agar against known concentrations of the antigen, begins to fall. See, for example, Ouchterlony, O. et al., Chap. 19 in: Handbook of Experimental Immunology D. Wier (ed) Blackwell (1973). Plateau concentration of antibody is usually in the range of 0.1 to 0.2 mg/ml of serum (about 12 μM). Affinity of the antisera for the antigen is determined by preparing competitive binding curves, as described, for example, by Fisher, D., Chap. 42 in: Manual of Clinical Immunology, 2d Ed. (Rose and Friedman, Eds.) Amer. Soc. For Microbiol., Washington, D.C. (1980).

[1469] Antibody preparations prepared according to either protocol are useful in quantitative immunoassays which determine concentrations of antigen-bearing substances in biological samples; they are also used semi-quantitatively or qualitatively to identify the presence of antigen in a biological sample. The antibodies can also be used in therapeutic compositions for killing bacterial cells expressing the protein.

### Example 13

[1470] Construction of Strains which Overexpress or Underexpress Gene Products Required for Proliferation by Promoter Replacement

[1471] Strains which overexpress or underexpress gene products required for proliferation may also be constructed by replacing the promoters which naturally direct transcription of these gene products with promoters which provide the desired level of expression. As described above, such strains are useful in methods for identifying essential genes, in methods for identifying compounds which inhibit cellular proliferation, in methods for identifying the targets) of compounds which inhibit proliferation, as well as in methods for identifying genes encoding gene products required for proliferation. Some embodiments of the present invention contemplate the use of a vector that comprises a regulatable fusion promoter selected from a suite of fusion promoters wherein the promoter suite is useful for modulating both the basal and maximal levels of transcription of a nucleic acid over a wide dynamic range thus allowing the desired level of production of a transcript which corresponds to a nucleic acid described herein. Such promoters are described in U.S. patent application Ser. No. 10/032,393, filed Dec. 21, 2001, the disclosure of which is incorported herein by reference in its entirety.

[1472] For example, in some embodiments, the natural promoter may be replaced using techniques which employ homologous recombination to exchange a promoter present on the chromosome of the cell with the desired promoter. In such methodology, a nucleic acid comprising a promoter replacement cassette is introduced into the cell. As illustrated in FIG. 1A, the promoter replacement cassette comprises a 5′ region homologous to the sequence which is 5′ of the natural promoter in the chromosome, the promoter which is to replace the chromosomal promoter and a 3′ region which is homologous to sequences 3′ of the natural promoter in the chromosome. In some embodiments, the promoter replacement cassette may also include a nucleic acid encoding an identifiable or selectable marker disposed between the 5′ region which is homologous to the sequence 5′ of the natural promoter and the promoter which is to replace the chromosomal promoter. If desired, the promoter replacement cassette may also contain a transcriptional terminator 3′ of the gene encoding an identifiable or selectable marker, as illustrated in FIG. 1B. As illustrated in FIGS. 1A and 1B, homologous recombination is allowed to occur between the chromosomal region containing the natural promoter and the promoter replacement cassette. Cells in which the promoter replacement cassette has integrated into the chromosome are identified or selected. To confirm that homologous recombination has occurred, the chromosomal structure of the cells may be verified by Southern analysis or PCR.

[1473] In some embodiments, the promoter replacement cassette may be introduced into the cell as a linear nucleic acid, such a PCR product or a restriction fragment. Alternatively, the promoter replacement may be introduced into the cell on a plasmid. FIGS. 1A and 1B illustrates the replacement of a chromosomal promoter with a desired promoter through homologous recombination.

[1474] In some embodiments, the cell into which the promoter replacement cassette is introduced may carry mutations which enhance its ability to be transformed with linear DNA or which enhance the frequency of homologous recombination. For example, if the cell is an Escherichia coli cell it may have a mutation in the gene encoding Exonuclease V of the RecBCD recombination complex. If the cell is an Escherichia coli cell it may have a mutation that activates the RecET recombinase of the Rac prophage and/or a mutation that enhances recombination through the RecF pathway. For example, the Escherichia coli cells may be RecB or RecC mutants carrying an sbcA or sbcB mutation. Alternatively, the Escherichia coli cells may be recD mutants. In other embodiments the Escherichia coli cells may express the λ Red recombination genes. For example, Escherichia coli cells suitable for use in techniques employing homologous recombination have been described in Datsenko, K. A. and Wanner, B. L., PNAS 97:6640-6645 (2000); Murphy, K. C., J. Bact 180: 2053-2071 (1998); Zhang, Y., et al., Nature Genetics 20: 123-128 (1998); and Muyrers, J. P. P. et al., Genes & Development 14: 1971-1982 (2000), the disclosures of which are incorporated herein by reference in their entireties. It will be appreciated that cells carrying mutations in similar genes may be constructed in organisms other than Escherichia coli.

[1475] In some embodiments, the methods described in U.S. patent application Ser. No. 09/948,993 (the disclosure of which is incorporated herein by reference in its entirety), may be used to place the gene required for proliferation under the control of a regulatable promoter.

[1476] If the organism in which promoter replacement is to be performed is diploid, strains in which genes encoding gene products required for proliferation are under the control of a desired promoter may be constructed by inactivating one chromosomal copy of a gene encoding a gene product required for proliferation. For example, the gene may be inactivated by insertion of or replacement by a nucleotide sequence encoding a selectable or detectable gene product, such as a polypeptide which provides resistance to a drug or which allows growth under certain culture conditions. The other chromosomal copy of the gene encoding a gene product required for proliferation is placed under the control of a regulatable promoter, such as the tetracycline regulatable promoter similar to that described in Gari et al., (1997) Yeast 13:837-848 and Nagahashi et al., (1997) Mol. Gen. Genet. 255:372-375, by homologous recombination. The resultant strains may be used to identify genes which encode gene products required for proliferation and in the methods of the present invention.

[1477] The method may also be applied to haploid organisms by modifying the single allele of the gene via recombination of the allele with a promoter replacement fragment comprising a nucleotide sequence encoding a heterologous promoter, such that the expression of the gene is conditionally regulated by the heterologous promoter. By repeating this process for a preferred subset of genes in a haploid pathogenic organism, or its entire genome, a collection or a complete set of conditional mutant strains can be obtained.

[1478] It will be appreciated that the means to achieve conditional expression are not restricted to the promoters discussed above and can be performed with other conditional promoters. Such conditional promoter may, for example, be regulated by a repressor which repress transcription from the promoter under particular condition or by a transactivator which increases transcription from the promoter, such as, when in the presence of an inducer.

[1479] Although not mandatory, performing the gene disruption first enables heterozygous strains to be constructed and separately collected as a heterozygote strain collection during the process of drug target validation. Heterozygous strains for a given gene express approximately half the normal diploid level of a particular gene product. Consequently, these strains provide constructions having a diminished level of the encoded gene product, and they may be used in the methods described herein. However, it is clear to those skilled in the art that the order of allele modification followed in this embodiment of the invention is not critical, and that it is feasible to perform these steps in a different order such that the conditional-expressing allele is constructed first and the disruption of the remaining wild type gene allele be performed subsequently. However, where the promoter replacement step is carried out first, it is preferable to delete sequences homologous to those employed in the gene disruption step.

[1480] Alternatively, conditional expression could be achieved by means other than the reliance of conditional promoters. For example, conditional expression could be achieved by the replacement of the wild type allele in haploid or heterozygous strains with temperature sensitive alleles derived in vitro, and their phenotype would then be analyzed at the nonpermissive temperature. In a related approach, in heterozygous strains, insertion of a ubiquitination signal into the remaining wild type allele to destabilize the gene product during activation conditions can be adopted to examine phenotypic effects resulting from gene inactivation.

[1481] In another alternative, a constitutive promoter regulated by an excisable transactivator can be used. The promoter is placed upstream to a target gene to repress expression to the basal level characteristic of the promoter. For example, if the strains are fungal organisms, a heterologous promoter containing lexA operator elements may be used in combination with a fusion protein composed of the lexA DNA binding domain and any transcriptional activator domain (e.g. GAL4, HAP4, VP16) to provide constitutive expression of a target gene. Counterselection mediated by 5-FOA can be used to select those cells which have excised the gene encoding the fusion protein. This procedure enables an examination of the phenotype associated with repression of the target gene to the basal level of expression provided by the lexA heterologous promoter in the absence of a functional transcription activator. The strains generated by this approach may be used in the present invention.

[1482] Alternatively, conditional expression of a target gene can be achieved without the use of a transactivator containing a DNA binding, transcriptional activator domain. A cassette could be assembled to contain a heterologous constitutive promoter downstream of, for example, the URA3 selectable marker, which is flanked with a direct repeat containing homologous sequences to the 5′ portion of the target gene. Additional homologous sequences upstream of the target, when added to this cassette would facilitate homologous recombination and replacement of the native promoter with e above-described heterologous promoter cassette immediately upstream of the start codon of the target gene or open reading frame. Conditional expression is achieved by selecting strains, by using 5-FOA containing media, which have excised the heterologous constitutive promoter and URA3 marker (and consequently lack those regulatory sequences upstream of the target gene required for expression of the gene) and examining the growth of the resulting strain versus a wild type strain grown under identical conditions.

### Example 14

[1483] Promoter Replacement to Generate Cells Capable of Overexpressing or Underexpressing a Gene Encoding a Gene Product Required for Proliferation

[1484] A target for promoter replacement is selected. A promoter replacement cassette is obtained by inserting a nucleic acid comprising the rrnBT1T2 transcriptional terminator followed by the lac promoter into pACYC184 such that the rrnB terminator and lac promoter are positioned 3′ of the CAT gene. The promoter replacement cassette (CAT-rrnBT1T2-plac) is amplified by PCR. The PCR product is used as the template for another round of PCR using primers with 60-80 bp of homology to a target promoter (i.e. a promoter which directs expression of a gene encoding a gene product required for proliferation) and 20 bp of homology to the CAT/rrnBT1T2/plac template as described above. The region of homology is chosen such that upon homologous recombination, the CAT/rrnBT1T2/plac cassette replaces the promoter of the target gene but leaves its Shine-Delgarno motif untouched.

[1485] The promoter replacement cassette is transformed into competent JC8679. JC8679 is available from the E. coli genetics stock center. JC8679 allows recombination of short linear DNAs and also contains a lacY mutation which allows titratable regulation of the lac promoter. The transformed cells are plated onto LB/chloramphenicol plates containing various levels of IPTG to assure that the correct level of expression is achieved to allow survival. The correct integration of the promoter replacement cassette is confirmed by colony PCR. If desired, proper regulation of the target gene by the inserted promoter may be confirmed by testing the integrants for growth defects when inducer is absent or present at levels lower than that at which the original colonies were obtained. The inability to grow in the absence of inducer (IPTG) or in the presence of lower levels of the inducer than were used to obtain the clones confirms that the target gene is properly regulated by the inserted promoter. It will be appreciated that although the lac promoter and the strain JC8679 are used as examples, the method may be performed using any suitable regulatable promoter and organism or strain to generate cells which are capable of overexpressing or underexpressing a gene encoding a gene product required for proliferation. Examples of promoters that are useful for the regulating the expression of gene products in Gram-positive organisms over a wide dynamic range are described in U.S. patent application Ser. No. 10/032,393, filed Dec. 21, 2001, the disclosure of which is incorporated herein by reference in its entirety.

[1486] The following example describes one method for promoter replacement in a prokaryotic cell. It will be appreciated that promoter replacement can be used in a variety of organisms as previously indicated.

### Example 15

[1487] Operator Insertion to Generate Cells Capable of Overexpressing or Underexpressing a Gene Encoding a Gene Product Required for Proliferation

[1488] An oligonucleotide comprising a lac operator flanked on each side by 40 nucleotides homologous to the target promoter is designed. The target promoter is the promoter which drives expression of a gene encoding a gene product required for proliferation, such as the yabB yabC ftsL ftsI murE genes in an operon. The sequence of the oligonucleotide (SEQ ID NO. 78582) and locations of the regions homologous to the promoter are illustrated in FIG. 6. The sequence of the promoter is also shown with the locations of the −10 and −35 regions indicated (SEQ ID NO.78583). The single stranded oligonucleotide is transformed into a bacterium expressing the λ Beta and Gam proteins. The cells in the transformation mixture are diluted and plated on medium containing IPTG. Colonies in which the lac operator has integrated into the target promoter are identified by colony PCR. If desired, proper regulation of the target promoter by the inserted operator is confirmed by growing the identified colonies in medium containing or lacking IPTG. The colonies proliferate on medium containing IPTG but fail to grow on medium lacking IPTG, thereby confirming that the target promoter is properly regulated by the inserted operator. It will be appreciated that the preceding method may be performed with any target promoter and any operator to generate cells which overexpress or underexpress a gene encoding a gene product required for proliferation.

### Example 16

[1489] Screening Chemical Libraries

[1490] A. Protein-Based Assays

[1491] Having isolated and expressed bacterial proteins shown to be required for bacterial proliferation, the present invention further contemplates the use of these expressed target proteins in assays to screen libraries of compounds for potential drug candidates. The generation of chemical libraries is well known in the art. For example, combinatorial chemistry can be used to generate a library of compounds to be screened in the assays described herein. A combinatorial chemical library is a collection of diverse chemical compounds generated by either chemical synthesis or biological synthesis by combining a number of chemical “building block” reagents. For example, a linear combinatorial chemical library such as a polypeptide library is formed by combining amino acids in every possible combination to yield peptides of a given length. Millions of chemical compounds theoretically can be synthesized through such combinatorial mixings of chemical building blocks. For example, one commentator observed that the systematic, combinatorial mixing of 100 interchangeable chemical building blocks results in the theoretical synthesis of 100 million tetrameric compounds or 10 billion pentameric compounds. (Gallop et al., “Applications of Combinatorial Technologies to Drug Discovery, Background and Peptide Combinatorial Libraries,” Journal of Medicinal Chemistry, Vol. 37, No. 9, 1233-1250 (1994). Other chemical libraries known to those in the art may also be used, including natural product libraries.

[1492] Once generated, combinatorial libraries can be screened for compounds that possess desirable biological properties. For example, compounds which may be useful as drugs or to develop drugs would likely have the ability to bind to the target protein identified, expressed and purified as discussed above. Further, if the identified target protein is an enzyme, candidate compounds would likely interfere with the enzymatic properties of the target protein. For example, the enzymatic function of a target protein may be to serve as a protease, nuclease, phosphatase, dehydrogenase, transporter protein, transcriptional enzyme, and any other type of enzyme known or unknown. Thus, the present invention contemplates using the protein products described above to screen combinatorial chemical libraries.

[1493] In one example, the target protein is a serine protease and the substrate of the enzyme is known. The present example is directed towards the analysis of libraries of compounds to identify compounds that function as inhibitors of the target enzyme. First, a library of small molecules is generated using methods of combinatorial library formation well known in the art. U.S. Pat. Nos. 5,463,564 and 5,574, 656, to Agrafiotis, et al., entitled “System and Method of Automatically Generating Chemical Compounds with Desired Properties,” the disclosures of which are incorporated herein by reference in their entireties, are two such teachings. Then the library compounds are screened to identify those compounds that possess desired structural and functional properties. U.S. Pat. No. 5,684,711, the disclosure of which is incorporated herein by reference in its entirety, also discusses a method for screening libraries.

[1494] To illustrate the screening process, the target polypeptide and chemical compounds of the library are combined with one another and permitted to interact with one another. A labeled substrate is added to the incubation. The label on the substrate is such that a detectable signal is emitted from the products of the substrate molecules that result from the activity of the target polypeptide. The emission of this signal permits one to measure the effect of the combinatorial library compounds on the enzymatic activity of target enzymes by comparing it to the signal emitted in the absence of combinatorial library compounds. The characteristics of each library compound are encoded so that compounds demonstrating activity against the enzyme can be analyzed and features common to the various compounds identified can be isolated and combined into future iterations of libraries.

[1495] Once a library of compounds is screened, subsequent libraries are generated using those chemical building blocks that possess the features shown in the first round of screen to have activity against the target enzyme. Using this method, subsequent iterations of candidate compounds will possess more and more of those structural and functional features required to inhibit the function of the target enzyme, until a group of enzyme inhibitors with high specificity for the enzyme can be found. These compounds can then be further tested for their safety and efficacy as antibiotics for use in mammals.

[1496] It will be readily appreciated that this particular screening methodology is exemplary only. Other methods are well known to those skilled in the art. For example, a wide variety of screening techniques are known for a large number of naturally-occurring targets when the biochemical function of the target protein is known. For example, some techniques involve the generation and use of small peptides to probe and analyze target proteins both biochemically and genetically in order to identify and develop drug leads. Such techniques include the methods described in PCT publications No. WO9935494, WO9819162, WO9954728, the disclosures of which are incorporated herein by reference in their entireties. Other techniques utilize natural product libraries or libraries of larger molecules such as proteins.

[1497] It will be appreciated that the above protein-based assays may be performed with any of the proliferation-required polypeptides from Escherichia coli, Staphylococcus aureus, Enterococcus faecalis, Klebsiella pneumoniae, Pseudomonas aeruginosa, Salmonella typhimurium, Acinetobacter baumannii, Bacillus anthracis, Bacteroides fragilis, Bordetella pertussis, Borrelia burgdorferi, Burkholderia cepacia, Burkholderia fungorum, Burkholderia mallei, Campylobacter jejuni, Chlamydia pneumoniae, Chlamydia trachomatis, Clostridium acetobutylicum, Clostridium botulinum, Clostridium difficile, Corynebacterium diptheriae, Enterobacter cloacae, Enterococcus faecium, Haemophilus influenzae, Helicobacter pylori, Legionella pneumophila, Listeria monocytogenes, Moraxella catarrhalis, Mycobacterium avium, Mycobacterium bovis, Mycobacterium leprae, Mycobacterium tuberculosis, Mycoplasma genitalium, Mycoplasma pneumoniae, Neisseria gonorrhoeae, Neisseria meningitidis, Pasteurella multocida, Proteus mirabilis, Pseudomonas putida, Pseudomonas syringae, Salmonella paratyphi, Salmonella typhi, Staphylococcus epidermidis, Staphylococcus haemolyticus, Streptococcus mutans, Streptococcus pneumoniae, Streptococcus pyogenes, Treponema pallidum, Ureaplasma urealyticum, Vibrio cholerae or Yersinia pestis (including the polypeptides of SEQ ID NOs.: 42398-78581) or portions thereof. In addition, the above protein-based assays may be performed with homologous polypeptides or portions thereof.

[1498] B. Cell-Based Assays

[1499] Current cell-based assays used to identify or to characterize compounds for drug discovery and development frequently depend on detecting the ability of a test compound to modulate the activity of a target molecule located within a cell or located on the surface of a cell. An advantage of cell-based assays is that they allow the effect of a compound on a target molecule's activity to be detected within the physiologically relevant environment of the cell as opposed to an in vitro environment. Most often such target molecules are proteins such as enzymes, receptors and the like. However, target molecules may also include other molecules such as DNAs, lipids, carbohydrates and RNAs including messenger RNAs, ribosomal RNAs, tRNAs, regulatory RNAs and the like. A number of highly sensitive cell-based assay methods are available to those of skill in the art to detect binding and interaction of test compounds with specific target molecules. However, these methods are generally not highly effective when the test compound binds to or otherwise interacts with its target molecule with moderate or low affinity. In addition, the target molecule may not be readily accessible to a test compound in solution, such as when the target molecule is located inside the cell or within a cellular compartment. Thus, current cell-based assay methods are limited in that they are not effective in identifying or characterizing compounds that interact with their targets with moderate to low affinity or compounds that interact with targets that are not readily accessible.

[1500] The cell-based assay methods of the present invention have substantial advantages over current cell-based assays. These advantages derive from the use of sensitized cells in which the level or activity of at least one proliferation-required gene product (the target molecule) has been specifically reduced to the point where the presence or absence of its function becomes a rate-determining step for cellular proliferation. Bacterial, fungal, plant, or animal cells can all be used with the present method. Such sensitized cells become much more sensitive to compounds that are active against the affected target molecule. Thus, cell-based assays of the present invention are capable of detecting compounds exhibiting low or moderate potency against the target molecule of interest because such compounds are substantially more potent on sensitized cells than on non-sensitized cells. The effect may be such that a test compound may be two to several times more potent, at least 10 times more potent, at least 20 times more potent, at least 50 times more potent, at least 100 times more potent, at least 1000 times more potent, or even more than 1000 times more potent when tested on the sensitized cells as compared to the non-sensitized cells. The proliferation-required nucleic acids or polypeptides from Escherichia coli, Staphylococcus aureus, Enterococcus faecalis, Klebsiella pneumoniae, Pseudomonas aeruginosa, Salmonella typhimurium, Acinetobacter baumannii, Bacillus anthracis, Bacteroides fragilis, Bordetella pertussis, Borrelia burgdorferi, Burkholderia cepacia, Burkholderia fungorum, Burkholderia mallei, Campylobacter jejuni, Chlamydia pneumoniae, Chlamydia trachomatis, Clostridium acetobutylicum, Clostridium botulinum, Clostridium difficile, Corynebacterium diptheriae, Enterobacter cloacae, Enterococcus faecium, Haemophilus influenzae, Helicobacter pylori, Legionella pneumophila, Listeria monocytogenes, Moraxella catarrhalis, Mycobacterium avium, Mycobacterium bovis, Mycobacterium leprae, Mycobacterium tuberculosis, Mycoplasma genitalium, Mycoplasma pneumoniae, Neisseria gonorrhoeae, Neisseria meningitidis, Pasteurella multocida, Proteus mirabilis, Pseudomonas putida, Pseudomonas syringae, Salmonella paratyphi, Salmonella typhi, Staphylococcus epidermidis, Staphylococcus haemolyticus, Streptococcus mutans, Streptococcus pneumoniae, Streptococcus pyogenes, Treponema pallidum, Ureaplasma urealyticum, Vibrio cholerae or Yersinia pestis, or portions thereof, may be employed in any of the cell-based assays described herein. Similarly, homologous coding nucleic acids, homologous antisense nucleic acids, or homologous polypeptides or portions of the homologous nucleic acids or homologous polypeptides, may be employed in any of the cell-based assays described herein.

[1501] Due in part to the increased appearance of antibiotic resistance in pathogenic microorganisms and to the significant side-effects associated with some currently used antibiotics, novel antibiotics acting at new targets are highly sought after in the art. Yet, another limitation in the current art related to cell-based assays is the problem of repeatedly identifying hits against the same kinds of target molecules in the same limited set of biological pathways. This may occur when compounds acting at such new targets are discarded, ignored or fail to be detected because compounds acting at the “old” targets are encountered more frequently and are more potent than compounds acting at the new targets. As a result, the majority of antibiotics in use currently interact with a relatively small number of target molecules within an even more limited set of biological pathways.

[1502] The use of sensitized cells of the current invention provides a solution to the above problem in two ways. First, desired compounds acting at a target of interest, whether a new target or a previously known but poorly exploited target, can now be detected above the “noise” of compounds acting at the “old” targets due to the specific and substantial increase in potency of such desired compounds when tested on the sensitized cells of the current invention. Second, the methods used to sensitize cells to compounds acting at a target of interest may also sensitize these cells to compounds acting at other target molecules within the same biological pathway. For example, expression of an antisense molecule to a gene encoding a ribosomal protein is expected to sensitize the cell to compounds acting at that ribosomal protein and may also sensitize the cells to compounds acting at any of the ribosomal components (proteins or rRNA) or even to compounds acting at any target which is part of the protein synthesis pathway. Thus an important advantage of the present invention is the ability to reveal new targets and pathways that were previously not readily accessible to drug discovery methods.

[1503] Sensitized cells of the present invention are prepared by reducing the activity or level of a target molecule. The target molecule may be a gene product, such as an RNA or polypeptide produced from the proliferation-required nucleic acids from Escherichia coli, Staphylococcus aureus, Enterococcus faecalis, Klebsiella pneumoniae, Pseudomonas aeruginosa, Salmonella typhimurium, Acinetobacter baumannii, Bacillus anthracis, Bacteroides fragilis, Bordetella pertussis, Borrelia burgdorferi, Burkholderia cepacia, Burkholderia fungorum, Burkholderia mallei, Campylobacter jejuni, Chlamydia pneumoniae, Chlamydia trachomatis, Clostridium acetobutylicum, Clostridium botulinum, Clostridium difficile, Corynebacterium diptheriae, Enterobacter cloacae, Enterococcus faecium, Haemophilus influenzae, Helicobacter pylori, Legionella pneumophila, Listeria monocytogenes, Moraxella catarrhalis, Mycobacterium avium, Mycobacterium bovis, Mycobacterium leprae, Mycobacterium tuberculosis, Mycoplasma genitalium, Mycoplasma pneumoniae, Neisseria gonorrhoeae, Neisseria meningitidis, Pasteurella multocida, Proteus mirabilis, Pseudomonas putida, Pseudomonas syringae, Salmonella paratyphi, Salmonella typhi, Staphylococcus epidermidis, Staphylococcus haemolyticus, Streptococcus mutans, Streptococcus pneumoniae, Streptococcus pyogenes, Treponema pallidum, Ureaplasma urealyticum, Vibrio cholerae or Yersinia pestis (including a gene product produced from the nucleic acids of SEQ ID NOs.: 6214-42397, such as the polypeptides of SEQ ID NOs.: 42398-78581) or from homologous nucleic acids. For example, the target molecule may be one of the polypeptides of SEQ ID NOs. 42398-78581 or a homologous polypeptide. Alternatively, the target may be a gene product such as an RNA or polypeptide which is produced from a sequence within the same operon as the proliferation-required nucleic acids Escherichia coli, Staphylococcus aureus, Enterococcus faecalis, Klebsiella pneumoniae, Pseudomonas aeruginosa, Salmonella typhimurium, Acinetobacter baumannii, Bacillus anthracis, Bacteroides fragilis, Bordetella pertussis, Borrelia burgdorferi, Burkholderia cepacia, Burkholderia fungorum, Burkholderia mallei, Campylobacter jejuni, Chlamydia pneumoniae, Chlamydia trachomatis, Clostridium acetobutylicum, Clostridium botulinum, Clostridium difficile, Corynebacterium diptheriae, Enterobacter cloacae, Enterococcus faecium, Haemophilus influenzae, Helicobacter pylori, Legionella pneumophila, Listeria monocytogenes, Moraxella catarrhalis, Mycobacterium avium, Mycobacterium bovis, Mycobacterium leprae, Mycobacterium tuberculosis, Mycoplasma genitalium, Mycoplasma pneumoniae, Neisseria gonorrhoeae, Neisseria meningitidis, Pasteurella multocida, Proteus mirabilis, Pseudomonas putida, Pseudomonas syringae, Salmonella paratyphi, Salmonella typhi, Staphylococcus epidermidis, Staphylococcus haemolyticus, Streptococcus mutans, Streptococcus pneumoniae, Streptococcus pyogenes, Treponema pallidum, Ureaplasma urealyticum, Vibrio cholerae or Yersinia pestis or from homologous nucleic acids. In addition, the target may be an RNA or polypeptide in the same biological pathway as the proliferation-required nucleic acids from Escherichia coli, Staphylococcus aureus, Enterococcus faecalis, Klebsiella pneumoniae, Pseudomonas aeruginosa, Salmonella typhimurium, Acinetobacter baumannii, Bacillus anthracis, Bacteroides fragilis, Bordetella pertussis, Borrelia burgdorferi, Burkholderia cepacia, Burkholderia fungorum, Burkholderia mallei, Campylobacter jejuni, Chlamydia pneumoniae, Chlamydia trachomatis, Clostridium acetobutylicum, Clostridium botulinum, Clostridium difficile, Corynebacterium diptheriae, Enterobacter cloacae, Enterococcus faecium, Haemophilus influenzae, Helicobacter pylori, Legionella pneumophila, Listeria monocytogenes, Moraxella catarrhalis, Mycobacterium avium, Mycobacterium bovis, Mycobacterium leprae, Mycobacterium tuberculosis, Mycoplasma genitalium, Mycoplasma pneumoniae, Neisseria gonorrhoeae, Neisseria meningitidis, Pasteurella multocida, Proteus mirabilis, Pseudomonas putida, Pseudomonas syringae, Salmonella paratyphi, Salmonella typhi, Staphylococcus epidermidis, Staphylococcus haemolyticus, Streptococcus mutans, Streptococcus pneumoniae, Streptococcus pyogenes, Treponema pallidum, Ureaplasma urealyticum, Vibrio cholerae or Yersinia pestis or from homologous nucleic acids. Such biological pathways include, but are not limited to, enzymatic, biochemical and metabolic pathways as well as pathways involved in the production of cellular structures such as the cell wall.

[1504] Current methods employed in the arts of medicinal and combinatorial chemistries are able to make use of structure-activity relationship information derived from testing compounds in various biological assays including direct binding assays and cell-based assays. Occasionally compounds are directly identified in such assays that are sufficiently potent to be developed as drugs. More often, initial hit compounds exhibit moderate or low potency. Once a hit compound is identified with low or moderate potency, directed libraries of compounds are synthesized and tested in order to identify more potent leads. Generally these directed libraries are combinatorial chemical libraries consisting of compounds with structures related to the hit compound but containing systematic variations including additions, subtractions and substitutions of various structural features. When tested for activity against the target molecule, structural features are identified that either alone or in combination with other features enhance or reduce activity. This information is used to design subsequent directed libraries containing compounds with enhanced activity against the target molecule. After one or several iterations of this process, compounds with substantially increased activity against the target molecule are identified and may be further developed as drugs. This process is facilitated by use of the sensitized cells of the present invention since compounds acting at the selected targets exhibit increased potency in such cell-based assays, thus; more compounds can now be characterized providing more useful information than would be obtained otherwise.

[1505] Thus, it is now possible using cell-based assays of the present invention to identify or characterize compounds that previously would not have been readily identified or characterized including compounds that act at targets that previously were not readily exploited using cell-based assays. The process of evolving potent drug leads from initial hit compounds is also substantially improved by the cell-based assays of the present invention because, for the same number of test compounds, more structure-function relationship information is likely to be revealed.

[1506] The method of sensitizing a cell entails selecting a suitable gene or operon. A suitable gene or operon is one whose transcription and/or expression is required for the proliferation of the cell to be sensitized. The next step is to introduce into the cells to be sensitized, an antisense RNA capable of hybridizing to the suitable gene or operon or to the RNA encoded by the suitable gene or operon. Introduction of the antisense RNA can be in the form of a vector in which antisense RNA is produced under the control of an inducible promoter. The amount of antisense RNA produced is modulated by varying an inducer concentration to which the cell is exposed and thereby varying the activity of the promoter driving transcription of the antisense RNA. Thus, cells are sensitized by exposing them to an inducer concentration that results in a sub-lethal level of antisense RNA expression. The requisite amount of inducer may be derived empiracally by one of skill in the art.

[1507] In one embodiment of the cell-based assays, antisense nucleic acids complementary to the identified Escherichia coli, Staphylococcus aureus, Enterococcus faecalis, Klebsiella pneumoniae, Pseudomonas aeruginosa, Salmonella typhimurium, Acinetobacter baumannii, Bacillus anthracis, Bacteroides fragilis, Bordetella pertussis, Borrelia burgdorferi, Burkholderia cepacia, Burkholderia fungorum, Burkholderia mallei, Campylobacter jejuni, Chlamydia pneumoniae, Chlamydia trachomatis, Clostridium acetobutylicum, Clostridium botulinum, Clostridium difficile, Corynebacterium diptheriae, Enterobacter cloacae, Enterococcus faecium, Haemophilus influenzae, Helicobacter pylori, Legionella pneumophila, Listeria monocytogenes, Moraxella catarrhalis, Mycobacterium avium, Mycobacterium bovis, Mycobacterium leprae, Mycobacterium tuberculosis, Mycoplasma genitalium, Mycoplasma pneumoniae, Neisseria gonorrhoeae, Neisseria meningitidis, Pasteurella multocida, Proteus mirabilis, Pseudomonas putida, Pseudomonas syringae, Salmonella paratyphi, Salmonella typhi, Staphylococcus epidermidis, Staphylococcus haemolyticus, Streptococcus mutans, Streptococcus pneumoniae, Streptococcus pyogenes, Treponema pallidum, Ureaplasma urealyticum, Vibrio cholerae or Yersinia pestis nucleotide sequences or portions thereof (including antisense nucleic acids comprising a nucleotide sequence complementary to one of SEQ ID NOs.: 6214-42397, and the antisense nucleic acids of SEQ ID NOs.: 1-6213 or antisense nucleic acids comprising a nucleotide sequence complementary to portions of the foregoing nucleic acids thereof), antisense nucleic complementary to homologous coding nucleic acids or portions thereof or homologous antisense nucleic acids are used to inhibit the production of a proliferation-required protein. Vectors producing antisense RNA complementary to identified genes required for proliferation, or portions thereof, are used to limit the concentration of a proliferation-required protein without severely inhibiting growth. The proliferation-required protein may be one of the proteins of SEQ ID NOs.: 42398-78581 or a homologous polypeptide. To achieve that goal, a growth inhibition dose curve of inducer is calculated by plotting various doses of inducer against the corresponding growth inhibition caused by the antisense expression. From this curve, the concentration of inducer needed to achieve various percentages of antisense induced growth inhibition, from I to 100% can be determined.

[1508] In some embodiments of the present invention, promoter replacement methods, such as those describe above and in U.S. patent application Ser. No. 09/948,993 (the disclosure of which is incorporated herein by reference in its entirety), are used to express the proliferation-inhibiting nucleic acid. In other embodiments, the methods for the production of stabilized RNA in Gram-negative organisms, as described in U.S. Provisional Patent Application Serial No. 60/343,512, the disclosure of which is incorporated herein by reference in its entirety, are used for the production of proliferation-inhibiting transcripts corresponding to the nucleic acid sequences described herein. Briefly, the stabilized antisense RNA may comprise an antisense RNA which was identified as inhibiting proliferation as described above which has been engineered to contain at least one stem loop flanking each end of the antisense nucleic acid. In some embodiments, the at least one stem-loop structure formed at the 5′ end of the stabilized antisense nucleic acid comprises a flush, double stranded 5′ end. In some embodiments, one or more of the stem loops comprises a rho independent terminator. In additional embodiments, the stabilized antisense RNA lacks a ribosome binding site. In further embodiments, the stabilized RNA lacks sites which are cleaved by one or more RNAses, such as RNAse E or RNAse III. In some embodiments, the stabilized antisense RNA may be transcribed in a cell which the activity of at least one enzyme involved in RNA degradation has been reduced. For example, the activity of an enzyme such as RNase E, RNase II, RNase III, polynucleotide phosphorylase, and poly(A) polymerase, RNA helicase, enolase or an enzyme having similar functions may be reduced in the cell.

[1509] A variety of different regulatable promoters may be used to produce the antisense nucleic acid. Transcription from the regulatable promoters may be modulated by controlling the activity of a transcription factor repressor which acts at the regulatable promoter. For example, if transcription is modulated by affecting the activity of a repressor, the choice of inducer to be used depends on the repressor/operator responsible for regulating transcription of the antisense nucleic acid. If the regulatable promoter comprises a T5 promoter fused to a xylO (xylose operator; e.g. derived from Staphylococcus xylosis (Schnappinger, D. et al., FEMS Microbiol. Let. 129: 126214-423978 (1995), the disclosure of which is incorporated herein by reference in its entirety) then transcription of the antisense nucleic acid may be regulated by a xylose repressor. The xylose repressor may be provided by ectoptic expression within an S. aureus cell of an exogenous xylose repressor gene, e.g. derived from S. xylosis DNA. In such cases transcription of antisense RNA from the promoter is inducible by adding xylose to the medium and the promoter is thus “xylose inducible.” Similarly, IPTG inducible promoters may be used. For example, the highest concentration of the inducer that does not reduce the growth rate significantly can be estimated from the curve. Cellular proliferation can be monitored by growth medium turbidity via OD measurements. In another example, the concentration of inducer that reduces growth by 25% can be predicted from the curve. In still another example, a concentration of inducer that reduces growth by 50% can be calculated. Additional parameters such as colony forming units (cfu) can be used to measure cellular viability. Some embodiments of the present invention contemplate the use of a vector that comprises a regulatable fusion promoter selected from a suite of fusion promoters wherein the promoter suite is useful for modulating both the basal and maximal levels of transcription of a nucleic acid over a wide dynamic range thus allowing the desired level of production of a transcript which corresponds to a nucleic acid described herein. Such promoters are described in U.S. patent application Ser. No. 10/032,393, filed Dec. 21, 2001, the disclosure of which is incorported herein by reference in its entirety.

[1510] Cells to be assayed are exposed to the above-determined concentrations of inducer. The presence of the inducer at this sub-lethal concentration reduces the amount of the proliferation required gene product to a sub-optimal amount in the cell that will still support growth. Cells grown in the presence of this concentration of inducer are therefore specifically more sensitive to inhibitors of the proliferation-required protein or RNA of interest or to inhibitors of proteins or RNAs in the same biological pathway as the proliferation-required protein or RNA of interest but not to inhibitors of unrelated proteins or RNAs.

[1511] Cells pretreated with sub-inhibitory concentrations of inducer and thus containing a reduced amount of proliferation-required target gene product are then used to screen for compounds that reduce cell growth. The sub-lethal concentration of inducer may be any concentration consistent with the intended use of the assay to identify candidate compounds to which the cells are more sensitive. For example, the sub-lethal concentration of the inducer may be such that growth inhibition is at least about 5%, at least about 8%, at least about 10%, at least about 20%, at least about 30%, at least about 40%, at least about 50%, at least about 60% at least about 75%, or more. Cells which are pre-sensitized using the preceding method are more sensitive to inhibitors of the target protein because these cells contain less target protein to inhibit than do wild-type cells.

[1512] It will be appreciated that the above cell-based assays may be performed using antisense nucleic acids comprising a nucleotide sequence complementary to any of the proliferation-required nucleic acids from Escherichia coli, Staphylococcus aureus, Enterococcus faecalis, Klebsiella pneumoniae, Pseudomonas aeruginosa, Salmonella typhimurium, Acinetobacter baumannii, Bacillus anthracis, Bacteroides fragilis, Bordetella pertussis, Borrelia burgdorferi, Burkholderia cepacia, Burkholderia fungorum, Burkholderia mallei, Campylobacter jejuni, Chlamydia pneumoniae, Chlamydia trachomatis, Clostridium acetobutylicum, Clostridium botulinum, Clostridium difficile, Corynebacterium diptheriae, Enterobacter cloacae, Enterococcus faecium, Haemophilus influenzae, Helicobacter pylori, Legionella pneumophila, Listeria monocytogenes, Moraxella catarrhalis, Mycobacterium avium, Mycobacterium bovis, Mycobacterium leprae, Mycobacterium tuberculosis, Mycoplasma genitalium, Mycoplasma pneumoniae, Neisseria gonorrhoeae, Neisseria meningitidis, Pasteurella multocida, Proteus mirabilis, Pseudomonas putida, Pseudomonas syringae, Salmonella paratyphi, Salmonella typhi, Staphylococcus epidermidis, Staphylococcus haemolyticus, Streptococcus mutans, Streptococcus pneumoniae, Streptococcus pyogenes, Treponema pallidum, Ureaplasma urealyticum, Vibrio cholerae or Yersinia pestis or portions thereof, antisense nucleic acids complementary to homologous coding nucleic acids or portions thereof or homologous antisense nucleic acids. In this way, the level or activity of a target, such as any of the proliferation-required polypeptides from Escherichia coli, Staphylococcus aureus, Enterococcus faecalis, Klebsiella pneumoniae, Pseudomonas aeruginosa, Salmonella typhimurium, Acinetobacter baumannii, Bacillus anthracis, Bacteroides fragilis, Bordetella pertussis, Borrelia burgdorferi, Burkholderia cepacia, Burkholderia fungorum, Burkholderia mallei, Campylobacter jejuni, Chlamydia pneumoniae, Chlamydia trachomatis, Clostridium acetobutylicum, Clostridium botulinum, Clostridium difficile, Corynebacterium diptheriae, Enterobacter cloacae, Enterococcus faecium, Haemophilus influenzae, Helicobacter pylori, Legionella pneumophila, Listeria monocytogenes, Moraxella catarrhalis, Mycobacterium avium, Mycobacterium bovis, Mycobacterium leprae, Mycobacterium tuberculosis, Mycoplasma genitalium, Mycoplasma pneumoniae, Neisseria gonorrhoeae, Neisseria meningitidis, Pasteurella multocida, Proteus mirabilis, Pseudomonas putida, Pseudomonas syringae, Salmonella paratyphi, Salmonella typhi, Staphylococcus epidermidis, Staphylococcus haemolyticus, Streptococcus mutans, Streptococcus pneumoniae, Streptococcus pyogenes, Treponema pallidum, Ureaplasma urealyticum, Vibrio cholerae or Yersinia pestis or homologous polypeptides.

[1513] In another embodiment of the cell-based assays of the present invention, the level or activity of a proliferation required gene product is reduced using a mutation, such as a temperature sensitive mutation, in the gene encoding a gene product required for proliferation and an antisense nucleic acid comprising a nucleotide sequence complementary to the gene encoding the gene product required for proliferation or a portion thereof. Growing the cells at an intermediate temperature between the permissive and restrictive temperatures of the temperature sensitive mutant where the mutation is in a proliferation-required gene produces cells with reduced activity of the proliferation-required gene product. The antisense RNA complementary to the proliferation-required sequence further reduces the activity of the proliferation required gene product. Drugs that may not have been found using either the temperature sensitive mutation or the antisense nucleic acid alone may be identified by determining whether cells in which transcription of the antisense nucleic acid has been induced and which are grown at a temperature between the permissive temperature and the restrictive temperature are substantially more sensitive to a test compound than cells in which expression of the antisense nucleic acid has not been induced and which are grown at a permissive temperature. Also drugs found previously from either the antisense nucleic acid alone or the temperature sensitive mutation alone may have a different sensitivity profile when used in cells combining the two approaches, and that sensitivity profile may indicate a more specific action of the drug in inhibiting one or more activities of the gene product.

[1514] Temperature sensitive mutations may be located at different sites within the gene and correspond to different domains of the protein. For example, the dnaB gene of Escherichia coli encodes the replication fork DNA helicase. DnaB has several domains, including domains for oligomerization, ATP hydrolysis, DNA binding, interaction with primase, interaction with DnaC, and interaction with DnaA [(Biswas, E. E. and Biswas, S. B. 1999. Mechanism and DnaB helicase of Escherichia coli: structural domains involved in ATP hydrolysis, DNA binding, and oligomerization. Biochem. 38:10919-10928; Hiasa, H. and Marians, K. J. 1999. Initiation of bidirectional replication at the chromosomal origin is directed by the interaction between helicase and primase. J. Biol. Chem. 274:27244-27248; San Martin, C., Radermacher, M., Wolpensinger, B., Engel, A., Miles, C. S., Dixon, N. E., and Carazo, J. M. 1998. Three-dimensional reconstructions from cryoelectron microscopy images reveal an intimate complex between helicase DnaB and its loading partner DnaC. Structure 6:501-9; Sutton, M. D., Carr, K. M., Vicente, M., and Kaguni, J. M. 1998. Escherichia coli DnaA protein. The N-terminal domain and loading of DnaB helicase at the E. coli chromosomal origin. J. Biol. Chem. 273:34255-62.), the disclosures of which are incorporated herein by reference in their entireties]. Temperature sensitive mutations in different domains of DnaB confer different phenotypes at the restrictive temperature, which include either an abrupt stop or slow stop in DNA replication with or without DNA breakdown (Wechsler, J. A. and Gross, J. D. 1971. Escherichia coli mutants temperature-sensitive for DNA synthesis. Mol. Gen. Genetics 113:273-284, the disclosure of which is incorporated herein by reference in its entirety) and termination of growth or cell death. Combining the use of temperature sensitive mutations in the dnaB gene that cause cell death at the restrictive temperature with an antisense to the dnaB gene could lead to the discovery of very specific and effective inhibitors of one or a subset of activities exhibited by DnaB.

[1515] It will be appreciated that the above method may be performed with any mutation which reduces but does not eliminate the activity or level of the gene product which is required for proliferation.

[1516] It will be appreciated that the above cell-based assays may be performed using mutations in, such as temperature sensitive mutations, and antisense nucleic acids comprising a nucleotide sequence complementary to any of the genes encoding proliferation-required gene products from from Escherichia coli, Staphylococcus aureus, Enterococcus faecalis, Klebsiella pneumoniae, Pseudomonas aeruginosa, Salmonella typhimurium, Acinetobacter baumannii, Bacillus anthracis, Bacteroides fragilis, Bordetella pertussis, Borrelia burgdorferi, Burkholderia cepacia, Burkholderia fungorum, Burkholderia mallei, Campylobacter jejuni, Chlamydia pneumoniae, Chlamydia trachomatis, Clostridium acetobutylicum, Clostridium botulinum, Clostridium difficile, Corynebacterium diptheriae, Enterobacter cloacae, Enterococcus faecium, Haemophilus influenzae, Helicobacter pylori, Legionella pneumophila, Listeria monocytogenes, Moraxella catarrhalis, Mycobacterium avium, Mycobacterium bovis, Mycobacterium leprae, Mycobacterium tuberculosis, Mycoplasma genitalium, Mycoplasma pneumoniae, Neisseria gonorrhoeae, Neisseria meningitidis, Pasteurella multocida, Proteus mirabilis, Pseudomonas putida, Pseudomonas syringae, Salmonella paratyphi, Salmonella typhi, Staphylococcus epidermidis, Staphylococcus haemolyticus, Streptococcus mutans, Streptococcus pneumoniae, Streptococcus pyogenes, Treponema pallidum, Ureaplasma urealyticum, Vibrio cholerae or Yersinia pestis or portions thereof (including the nucleic acids of SEQ ID NOs.: 6214-42397), mutations in and antisense nucleic acids complementary to homologous coding nucleic acids or portions thereof or homologous antisense nucleic acids. In this way, the level or activity of a target, such as any of the proliferation-required polypeptides from Escherichia coli, Staphylococcus aureus, Enterococcus faecalis, Klebsiella pneumoniae, Pseudomonas aeruginosa, Salmonella typhimurium, Acinetobacter baumannii, Bacillus anthracis, Bacteroides fragilis, Bordetella pertussis, Borrelia burgdorferi, Burkholderia cepacia, Burkholderia fungorum, Burkholderia mallei, Campylobacter jejuni, Chlamydia pneumoniae, Chlamydia trachomatis, Clostridium acetobutylicum, Clostridium botulinum, Clostridium difficile, Corynebacterium diptheriae, Enterobacter cloacae, Enterococcus faecium, Haemophilus influenzae, Helicobacter pylori, Legionella pneumophila, Listeria monocytogenes, Moraxella catarrhalis, Mycobacterium avium, Mycobacterium bovis, Mycobacterium leprae, Mycobacterium tuberculosis, Mycoplasma genitalium, Mycoplasma pneumoniae, Neisseria gonorrhoeae, Neisseria meningitidis, Pasteurella multocida, Proteus mirabilis, Pseudomonas putida, Pseudomonas syringae, Salmonella paratyphi, Salmonella typhi, Staphylococcus epidermidis, Staphylococcus haemolyticus, Streptococcus mutans, Streptococcus pneumoniae, Streptococcus pyogenes, Treponema pallidum, Ureaplasma urealyticum, Vibrio cholerae or Yersinia pestis (including the polypeptides of SEQ ID NOs.: 42398-78581), or homologous polypeptides may be reduced.

[1517] When screening for antimicrobial agents against a gene product required for proliferation, growth inhibition of cells containing a limiting amount of that proliferation-required gene product can be assayed. Growth inhibition can be measured by directly comparing the amount of growth, measured by the optical density of the growth medium, between an experimental sample and a control sample. Alternative methods for assaying cell proliferation include measuring the signal from a reporter construct, various enzymatic activity assays, and other methods well known in the art.

[1518] It will be appreciated that the above method may be performed in solid phase, liquid phase or a combination of the two. For example, cells grown on nutrient agar containing the inducer of the antisense construct may be exposed to compounds spotted onto the agar surface. If desired, the cells may be grown on agar containing varying concentrations of the inducer. A compound's effect may be judged from the diameter of the resulting killing zone, the area around the compound application point in which cells do not grow. Multiple compounds may be transferred to agar plates and simultaneously tested using automated and semi-automated equipment including but not restricted to multi-channel pipettes (for example the Beckman Multimek) and multi-channel spotters (for example the Genomic Solutions Flexys). In this way multiple plates and thousands to millions of compounds may be tested per day.

[1519] The compounds may also be tested entirely in liquid phase using microtiter plates as described below. Liquid phase screening may be performed in microtiter plates containing 96, 384, 1536 or more wells per microtiter plate to screen multiple plates and thousands to millions of compounds per day. Automated and semi-automated equipment may be used for addition of reagents (for example cells and compounds) and determination of cell density.

### Example 17

[1520] Cell-Based Assay Using Antisense Complementary to Genes Encoding Ribosomal Proteins

[1521] The effectiveness of the above cell-based assay was validated using constructs transribing antisense RNA to the proliferation required E. coli genes rplL, rplJ, and rplW encoding ribosomal proteins L7/L12, L10 and L23 respectively. These proteins are essential components of the protein synthesis apparatus of the cell and as such are required for proliferation. These constructs were used to test the effect of antisense transcription on cell sensitivity to antibiotics known to bind to the ribosome and thereby inhibit protein synthesis. Constructs transcribing antisense RNA to several other genes (elaD, visC, yohH, and atpE/B), the products of which are not involved in protein synthesis were used for comparison.

[1522] First, pLex5BA (Krause et al., J. Mol. Biol. 274: 365 (1997), the disclosure of which is incorporated herein by reference in its entirety) vectors containing antisense constructs to either rplW or to elaD were introduced into separate E. coli cell populations. Vector introduction is a technique well known to those of ordinary skill in the art. The vectors of this example contain IPTG inducible promoters that drive the transcription of the antisense RNA in the presence of the inducer. However, those skilled in the art will appreciate that other inducible promoters may also be used. Suitable vectors are also well known in the art. For example, a number of promoters useful for nucleic acid transcription (including the nucleic acids described herein) in Enterococcus faecalis, Staphylococcus areus as well as other Gram positive organisms are described in U.S. patent application Ser. No. 10/032,393, filed Dec. 21, 2001, the disclosure of which is incorporated herein by reference in its entirety. Antisense clones to genes encoding different ribosomal proteins or to genes encoding proteins that are not involved in protein synthesis were utilized to test the effect of antisense transcription on cell sensitivity to the antibiotics known to bind to ribosomal proteins and inhibit protein synthesis. Antisense nucleic acids comprising a nucleotide sequence complementarty to the elaD, atpB&atpE, visC and yohH genes are referred to as AS-elaD, AS-atpB/E, AS-visC, AS-yohH respectively. These genes are not known to be involved in protein synthesis. Antisense nucleic acids to the rplL, rplL&rplJ and rplW genes are referred to as AS-rplL, AS-rplL/J, and AS-rplW respectively. These genes encode ribosomal proteins L7/L12 (rplL) L10 (rplJ) and L23 (rplW). Vectors containing these antisense nucleic acids were introduced into separate E. coli cell populations.

[1523] The cell populations containing vectors producing AS-elaD or AS-rplW were exposed to a range of IPTG concentrations in liquid medium to obtain the growth inhibitory dose curve for each clone (FIG. 7). First, seed cultures were grown to a particular turbidity measured by the optical density (OD) of the growth solution. The OD of the solution is directly related to the number of bacterial cells contained therein. Subsequently, sixteen 200 μl liquid medium cultures were grown in a 96 well microtiter plate at 37° C. with a range of IPTG concentrations in duplicate two-fold serial dilutions from 1600 uM to 12.5 μM (final concentration). Additionally, control cells were grown in duplicate without IPTG. These cultures were started from an inoculum of equal amounts of cells derived from the same initial seed culture of a clone of interest. The cells were grown for up to 15 hours and the extent of growth was determined by measuring the optical density of the cultures at 600 nm. When the control culture reached mid-log phase the percent growth (relative to the control culture) for each of the IPTG containing cultures was plotted against the log concentrations of IPTG to produce a growth inhibitory dose response curve for the IPTG. The concentration of IPTG that inhibits cell growth to 50% (IC₅₀) as compared to the 0 mM IPTG control (0% growth inhibition) was then calculated from the curve. Under these conditions, an amount of antisense RNA was produced that reduced the expression levels of rplW or elaD to a degree such that growth of cells containing their respective antisense vectors was inhibited by 50%.

[1524] Alternative methods of measuring growth are also contemplated. Examples of these methods include measurements of proteins, the expression of which is engineered into the cells being tested and can readily be measured. Examples of such proteins include luciferase and various enzymes.

[1525] Cells were pretreated with the selected concentration of IPTG and then used to test the sensitivity of cell populations to tetracycline, erythromycin and other known protein synthesis inhibitors. FIG. 7 is an IPTG dose response curve in E. coli transformed with an IPTG-inducible plasmid containing either an antisense clone to the E. coli rplW gene (AS-rplW) which encodes ribosomal protein L23 which is required for protein synthesis and essential for cell proliferation, or an antisense clone to the elaD (AS-elaD) gene which is not known to be involved in protein synthesis.

[1526] An example of a tetracycline dose response curve is shown in FIGS. 8A and 13B for the rplW and elaD genes, respectively. Cells were grown to log phase and then diluted into medium alone or medium containing IPTG at concentrations which give 20% and 50% growth inhibition as determined by IPTG dose response curves. After 2.5 hours, the cells were diluted to a final OD₆₀₀ of 0.002 into 96 well plates containing (1) +/− IPTG at the same concentrations used for the 2.5 hour pre-incubation; and (2) serial two-fold dilutions of tetracycline such that the final concentrations of tetracycline range from 1 μg/ml to 15.6 ng/ml and 0 μg/ml. The 96 well plates were incubated at 37° C. and the OD₆₀₀ was read by a plate reader every 5 minutes for up to 15 hours. For each IPTG concentration and the no IPTG control, tetracycline dose response curves were determined when the control (absence of tetracycline) reached 0.1 OD₆₀₀.

[1527] To compare tetracycline sensitivity with and without IPTG, tetracycline IC₅₀ₛ were determined from the dose response curves (FIGS. 8A-B). Cells transcribing antisense nucleic acids AS-rplL or AS-rplW to genes encoding ribosomal proteins L7/L12 and L23 respectively showed increased sensitivity to tetracycline (FIG. 8A) as compared to cells with reduced levels of the elaD gene product (AS-elaD) (FIG. 8B). FIG. 9 shows a summary bar chart in which the ratios of tetracycline IC₅₀, determined in the presence of IPTG which gives 50% growth inhibition versus tetracycline IC₅₀, determined without IPTG (fold increase in tetracycline sensitivity) were plotted. Cells with reduced levels of either L7/L12 (encoded by genes rplL, rplJ) or L23 (encoded by the rplW gene) showed increased sensitivity to tetracycline (FIG. 9). Cells expressing antisense to genes not known to be involved in protein synthesis (AS-atpB/E, AS-visC, AS-elaD, AS-yohH) did not show the same increased sensitivity to tetracycline, validating the specificity of this assay (FIG. 9).

[1528] In addition to the above, it has been observed in initial experiments that clones transcribing antisense RNA to genes involved in protein synthesis (including genes encoding ribosomal proteins L7/L12 & L10, L7/L12 alone, L22, and L18, as well as genes encoding rRNA and Elongation Factor G) have increased sensitivity to the macrolide, erythromycin, whereas clones transcribing antisense to the non-protein synthesis genes elaD, atpB/E and visC do not. Furthermore, the clone transcribing antisense to rplL and rplJ (AS-rplL/J) does not show increased sensitivity to nalidixic acid and ofloxacin, antibiotics which do not inhibit protein synthesis.

[1529] The results with the ribosomal protein genes rplL, rplJ, and rplW as well as the initial results using various other antisense clones and antibiotics show that limiting the concentration of an antibiotic target makes cells more sensitive to the antimicrobial agents that specifically interact with that protein. The results also show that these cells are sensitized to antimicrobial agents that inhibit the overall function in which the protein target is involved but are not sensitized to antimicrobial agents that inhibit other functions. It will be appreciated that the cell-based assays described above may be implemented using the Escherichia coli, Staphylococcus aureus, Enterococcus faecalis, Klebsiella pneumoniae, Pseudomonas aeruginosa, Salmonella typhimurium, Acinetobacter baumannii, Bacillus anthracis, Bacteroides fragilis, Bordetella pertussis, Borrelia burgdorferi, Burkholderia cepacia, Burkholderia fungorum, Burkholderia mallei, Campylobacter jejuni, Chlamydia pneumoniae, Chlamydia trachomatis, Clostridium acetobutylicum, Clostridium botulinum, Clostridium difficile, Corynebacterium diptheriae, Enterobacter cloacae, Enterococcus faecium, Haemophilus influenzae, Helicobacter pylori, Legionella pneumophila, Listeria monocytogenes, Moraxella catarrhalis, Mycobacterium avium, Mycobacterium bovis, Mycobacterium leprae, Mycobacterium tuberculosis, Mycoplasma genitalium, Mycoplasma pneumoniae, Neisseria gonorrhoeae, Neisseria meningitidis, Pasteurella multocida, Proteus mirabilis, Pseudomonas putida, Pseudomonas syringae, Salmonella paratyphi, Salmonella typhi, Staphylococcus epidermidis, Staphylococcus haemolyticus, Streptococcus mutans, Streptococcus pneumoniae, Streptococcus pyogenes, Treponema pallidum, Ureaplasma urealyticum, Vibrio cholerae or Yersinia pestis antisense nucleotide sequences which inhibit the activity of genes required for proliferation described herein (including the antisense nucleic acids of SEQ ID NOs.: 1-6213) or antisense nucleic acids comprising nucleotide sequences which are complementary to the sequences of SEQ ID NOs.: 6214-42397 or portions thereof.

[1530] It will be appreciated that the above cell-based assays may be performed using antisense nucleic acids complementary to any of the proliferation-required nucleic acids from Escherichia coli, Staphylococcus aureus, Enterococcus faecalis, Klebsiella pneumoniae, Pseudomonas aeruginosa, Salmonella typhimurium, Acinetobacter baumannii, Bacillus anthracis, Bacteroides fragilis, Bordetella pertussis, Borrelia burgdorferi, Burkholderia cepacia, Burkholderia fungorum, Burkholderia mallei, Campylobacter jejuni, Chlamydia pneumoniae, Chlamydia trachomatis, Clostridium acetobutylicum, Clostridium botulinum, Clostridium difficile, Corynebacterium diptheriae, Enterobacter cloacae, Enterococcus faecium, Haemophilus influenzae, Helicobacter pylori, Legionella pneumophila, Listeria monocytogenes, Moraxella catarrhalis, Mycobacterium avium, Mycobacterium bovis, Mycobacterium leprae, Mycobacterium tuberculosis, Mycoplasma genitalium, Mycoplasma pneumoniae, Neisseria gonorrhoeae, Neisseria meningitidis, Pasteurella multocida, Proteus mirabilis, Pseudomonas putida, Pseudomonas syringae, Salmonella paratyphi, Salmonella typhi, Staphylococcus epidermidis, Staphylococcus haemolyticus, Streptococcus mutans, Streptococcus pneumoniae, Streptococcus pyogenes, Treponema pallidum, Ureaplasma urealyticum, Vibrio cholerae or Yersinia pestis or portions thereof, antisense nucleic acids complementary to homologous coding nucleic acids or portions thereof, or homologous antisense nucleic acids. In this way, the level or activity of a target, such as any of the proliferation-required polypeptides from Escherichia coli, Staphylococcus aureus, Enterococcus faecalis, Klebsiella pneumoniae, Pseudomonas aeruginosa, Salmonella typhimurium, Acinetobacter baumannii, Bacillus anthracis, Bacteroides fragilis, Bordetella pertussis, Borrelia burgdorferi, Burkholderia cepacia, Burkholderia fungorum, Burkholderia mallei, Campylobacter jejuni, Chlamydia pneumoniae, Chlamydia trachomatis, Clostridium acetobutylicum, Clostridium botulinum, Clostridium difficile, Corynebacterium diptheriae, Enterobacter cloacae, Enterococcus faecium, Haemophilus influenzae, Helicobacter pylori, Legionella pneumophila, Listeria monocytogenes, Moraxella catarrhalis, Mycobacterium avium, Mycobacterium bovis, Mycobacterium leprae, Mycobacterium tuberculosis, Mycoplasma genitalium, Mycoplasma pneumoniae, Neisseria gonorrhoeae, Neisseria meningitidis, Pasteurella multocida, Proteus mirabilis, Pseudomonas putida, Pseudomonas syringae, Salmonella paratyphi, Salmonella typhi, Staphylococcus epidermidis, Staphylococcus haemolyticus, Streptococcus mutans, Streptococcus pneumoniae, Streptococcus pyogenes, Treponema pallidum, Ureaplasma urealyticum, Vibrio cholerae or Yersinia pestis or homologous polypeptides may be reduced.

[1531] In some embodiments of the present invention, the methods for the production of stabilized RNA, as described in U.S. Provisional Patent Application Serial No. 60/343,512, the disclosure of which is incorporated herein by reference in its entirety, can be used in the above cell-based assays in Gram-negative organisms to extend the lifetime of transcripts corresponding to the nucleic acids described herein.

[1532] The cell-based assay described above may also be used to identify the biological pathway in which a proliferation-required nucleic acid or its gene product lies. In such methods, cells transcribing a sub-lethal level of antisense to a target proliferation-required nucleic acid and control cells in which transcription of the antisense has not been induced are contacted with a panel of antibiotics known to act in various pathways. If the antibiotic acts in the pathway in which the target proliferation-required nucleic acid or its gene product lies, cells in which transcription of the antisense has been induced will be more sensitive to the antibiotic than cells in which expression of the antisense has not been induced.

[1533] As a control, the results of the assay may be confirmed by contacting a panel of cells transcribing antisense nucleic acids to many different proliferation-required genes including the target proliferation-required gene. If the antibiotic is acting specifically, heightened sensitivity to the antibiotic will be observed only in the cells transcribing antisense to a target proliferation-required gene (or cells expressing antisense to other proliferation-required genes in the same pathway as the target proliferation-required gene) but will not be observed generally in all cells expressing antisense to proliferation-required genes.

[1534] It will be appreciated that the above cell-based assays may be performed using antisense nucleic acids complementary to any of the proliferation-required nucleic acids from Escherichia coli, Staphylococcus aureus, Enterococcus faecalis, Klebsiella pneumoniae, Pseudomonas aeruginosa, Salmonella typhimurium, Acinetobacter baumannii, Bacillus anthracis, Bacteroides fragilis, Bordetella pertussis, Borrelia burgdorferi, Burkholderia cepacia, Burkholderia fungorum, Burkholderia mallei, Campylobacter jejuni, Chlamydia pneumoniae, Chlamydia trachomatis, Clostridium acetobutylicum, Clostridium botulinum, Clostridium difficile, Corynebacterium diptheriae, Enterobacter cloacae, Enterococcus faecium, Haemophilus influenzae, Helicobacter pylori, Legionella pneumophila, Listeria monocytogenes, Moraxella catarrhalis, Mycobacterium avium, Mycobacterium bovis, Mycobacterium leprae, Mycobacterium tuberculosis, Mycoplasma genitalium, Mycoplasma pneumoniae, Neisseria gonorrhoeae, Neisseria meningitidis, Pasteurella multocida, Proteus mirabilis, Pseudomonas putida, Pseudomonas syringae, Salmonella paratyphi, Salmonella typhi, Staphylococcus epidermidis, Staphylococcus haemolyticus, Streptococcus mutans, Streptococcus pneumoniae, Streptococcus pyogenes, Treponema pallidum, Ureaplasma urealyticum, Vibrio cholerae or Yersinia pestis (including antisense nucleic acids complementary to SEQ ID NOs: 6214-42397, or the antisense nucleic acids of SEQ ID NOs.: 1-6213) or portions thereof, antisense nucleic acids comprising nucleotide sequences complementary to homologous coding nucleic acids or portions thereof, or homologous antisense nucleic acids In this way, the level or activity of a target, such as any of the proliferation-required polypeptides from Escherichia coli, Staphylococcus aureus, Enterococcus faecalis, Klebsiella pneumoniae, Pseudomonas aeruginosa, Salmonella typhimurium, Acinetobacter baumannii, Bacillus anthracis, Bacteroides fragilis, Bordetella pertussis, Borrelia burgdorferi, Burkholderia cepacia, Burkholderia fungorum, Burkholderia mallei, Campylobacter jejuni, Chlamydia pneumoniae, Chlamydia trachomatis, Clostridium acetobutylicum, Clostridium botulinum, Clostridium difficile, Corynebacterium diptheriae, Enterobacter cloacae, Enterococcus faecium, Haemophilus influenzae, Helicobacter pylori, Legionella pneumophila, Listeria monocytogenes, Moraxella catarrhalis, Mycobacterium avium, Mycobacterium bovis, Mycobacterium leprae, Mycobacterium tuberculosis, Mycoplasma genitalium, Mycoplasma pneumoniae, Neisseria gonorrhoeae, Neisseria meningitidis, Pasteurella multocida, Proteus mirabilis, Pseudomonas putida, Pseudomonas syringae, Salmonella paratyphi, Salmonella typhi, Staphylococcus epidermidis, Staphylococcus haemolyticus, Streptococcus mutans, Streptococcus pneumoniae, Streptococcus pyogenes, Treponema pallidum, Ureaplasma urealyticum, Vibrio cholerae or Yersinia pestis (including the polypeptides of SEQ ID NOs.: 42398-78581), or homologous polypeptides may be reduced.

[1535] In some embodiments of the present invention, the methods for the production of stabilized RNA, as described in U.S. Provisional Patent Application Serial No. 60/343,512, the disclosure of which is incorporated herein by reference in its entirety, can be used in the above cell-based assays in Gram-negative organisms to extend the lifetime of transcripts corresponding to the nucleic acids described herein.

[1536] Similarly, the above method may be used to determine the pathway on which a test compound, such as a test antibiotic acts. A panel of cells, each of which transcribes an antisense to a proliferation-required nucleic acid in a known pathway, is contacted with a compound for which it is desired to determine the pathway on which it acts. The sensitivity of the panel of cells to the test compound is determined in cells in which transcription of the antisense has been induced and in control cells in which expression of the antisense has not been induced. If the test compound acts on the pathway on which an antisense nucleic acid acts, cells in which expression of the antisense has been induced will be more sensitive to the compound than cells in which expression of the antisense has not been induced. In addition, control cells in which expression of antisense to proliferation-required genes in other pathways has been induced will not exhibit heightened sensitivity to the compound. In this way, the pathway on which the test compound acts may be determined.

[1537] It will be appreciated that the above cell-based assays may be performed using antisense nucleic acids comprising nucleotide sequences complementary to any of the proliferation-required nucleic acids from Escherichia coli, Staphylococcus aureus, Enterococcus faecalis, Klebsiella pneumoniae, Pseudomonas aeruginosa, Salmonella typhimurium, Acinetobacter baumannii, Bacillus anthracis, Bacteroides fragilis, Bordetella pertussis, Borrelia burgdorferi, Burkholderia cepacia, Burkholderia fungorum, Burkholderia mallei, Campylobacter jejuni, Chlamydia pneumoniae, Chlamydia trachomatis, Clostridium acetobutylicum, Clostridium botulinum, Clostridium difficile, Corynebacterium diptheriae, Enterobacter cloacae, Enterococcus faecium, Haemophilus influenzae, Helicobacter pylori, Legionella pneumophila, Listeria monocytogenes, Moraxella catarrhalis, Mycobacterium avium, Mycobacterium bovis, Mycobacterium leprae, Mycobacterium tuberculosis, Mycoplasma genitalium, Mycoplasma pneumoniae, Neisseria gonorrhoeae, Neisseria meningitidis, Pasteurella multocida, Proteus mirabilis, Pseudomonas putida, Pseudomonas syringae, Salmonella paratyphi, Salmonella typhi, Staphylococcus epidermidis, Staphylococcus haemolyticus, Streptococcus mutans, Streptococcus pneumoniae, Streptococcus pyogenes, Treponema pallidum, Ureaplasma urealyticum, Vibrio cholerae or Yersinia pestis (including antisense nucleic acids complementary to SEQ ID NOs: 6214-42397, such as the antisense nucleic acids of SEQ ID NOs.: 1-6213) or portions thereof, antisense nucleic acids complementary to homologous coding nucleic acids or portions thereof, or homologous antisense nucleic acids In this way, the level or activity of a target, such as any of the proliferation-required polypeptides from Escherichia coli, Staphylococcus aureus, Enterococcus faecalis, Klebsiella pneumoniae, Pseudomonas aeruginosa, Salmonella typhimurium, Acinetobacter baumannii, Bacillus anthracis, Bacteroides fragilis, Bordetella pertussis, Borrelia burgdorferi, Burkholderia cepacia, Burkholderia fungorum, Burkholderia mallei, Campylobacter jejuni, Chlamydia pneumoniae, Chlamydia trachomatis, Clostridium acetobutylicum, Clostridium botulinum, Clostridium difficile, Corynebacterium diptheriae, Enterobacter cloacae, Enterococcus faecium, Haemophilus influenzae, Helicobacter pylori, Legionella pneumophila, Listeria monocytogenes, Moraxella catarrhalis, Mycobacterium avium, Mycobacterium bovis, Mycobacterium leprae, Mycobacterium tuberculosis, Mycoplasma genitalium, Mycoplasma pneumoniae, Neisseria gonorrhoeae, Neisseria meningitidis, Pasteurella multocida, Proteus mirabilis, Pseudomonas putida, Pseudomonas syringae, Salmonella paratyphi, Salmonella typhi, Staphylococcus epidermidis, Staphylococcus haemolyticus, Streptococcus mutans, Streptococcus pneumoniae, Streptococcus pyogenes, Treponema pallidum, Ureaplasma urealyticum, Vibrio cholerae or Yersinia pestis (including the polypeptides of SEQ ID NOs.: 42398-78581) or homologous polypeptides may be reduced.

[1538] In some embodiments of the present invention, the methods for the production of stabilized RNA, as described in U.S. Provisional Patent Application Serial No. 60/343,512, the disclosure of which is incorporated herein by reference in its entirety, can be used in the above cell-based assays in Gram-negative organisms to extend the lifetime of transcripts corresponding to the nucleic acids described herein.

[1539] The Example below provides one method for performing such assays.

### Example 18

[1540] Identification of the Pathway in which a Proliferation-Required Gene Lies or the Pathway on which an Antibiotic Acts

[1541] A. Preparation of Bacterial Stocks for Assay

[1542] To provide a consistent source of cells to screen, frozen stocks of host bacteria containing the desired antisense construct are prepared using standard microbiological techniques. For example, a single clone of the microorganism can be isolated by streaking out a sample of the original stock onto an agar plate containing nutrients for cell growth and an antibiotic for which the antisense construct contains a selectable marker which confers resistance. After overnight growth an isolated colony is picked from the plate with a sterile needle and transferred to an appropriate liquid growth medium containing the antibiotic required for maintenance of the plasmid. The cells are incubated at 30° C. to 37° C. with vigorous shaking for 4 to 6 hours to yield a culture in exponential growth. Sterile glycerol is added to 15% (volume to volume) and 100 μL to 500 μL aliquots are distributed into sterile cryotubes, snap frozen in liquid nitrogen, and stored at −80° C. for future assays.

[1543] B. Growth of Bacteria for Use in the Assay

[1544] A day prior to an assay, a stock vial is removed from the freezer, rapidly thawed (37° C. water bath) and a loop of culture is streaked out on an agar plate containing nutrients for cell growth and an antibiotic to which the selectable marker of the antisense construct confers resistance. After overnight growth at 37° C., ten randomly chosen, isolated colonies are transferred from the plate (sterile inoculum loop) to a sterile tube containing 5 mL of LB medium containing the antibiotic to which the antisense vector confers resistance. After vigorous mixing to form a homogeneous cell suspension, the optical density of the suspension is measured at 600 nm (OD₆₀₀) and if necessary an aliquot of the suspension is diluted into a second tube of 5 mL, sterile, LB medium plus antibiotic to achieve an OD₆₀₀≦0.02 absorbance units. The culture is then incubated at 37° C. for 1-2 hrs with shaking until the OD₆₀₀ reaches OD 0.2-0.3. At this point the cells are ready to be used in the assay.

[1545] C. Selection of Media to be Used in Assay

[1546] Two-fold dilution series of the inducer are generated in culture media containing the appropriate antibiotic for maintenance of the antisense construct. Several media are tested side by side and three to four wells are used to evaluate the effects of the inducer at each concentration in each media. For example, LB broth, TBD broth and Muller-Hinton media may be tested with the inducer xylose at the following concentrations, 5 mM, 10 mM, 20 mM, 40 mM, 80 mM, 120 mM and 160 mM. Equal volumes of test media-inducer and cells are added to the wells of a 384 well microtiter plate and mixed. The cells are prepared as described above and diluted 1:100 in the appropriate media containing the test antibiotic immediately prior to addition to the microtiter plate wells. For a control, cells are also added to several wells of each media that do not contain inducer, for example 0 mM xylose. Cell growth is monitored continuously by incubation at 37° C. in a microtiter plate reader monitoring the OD₆₀₀ of the wells over an 18-hour period. The percent inhibition of growth produced by each concentration of inducer is calculated by comparing the rates of logarithmic growth against that exhibited by cells growing in medium without inducer. The medium yielding greatest sensitivity to inducer is selected for use in the assays described below.

[1547] D. Measurement of Test Antibiotic Sensitivity in the Absence of Antisense Construct Induction

[1548] Two-fold dilution series of antibiotics of known mechanism of action are generated in the culture medium selected for further assay development that has been supplemented with the antibiotic used to maintain the construct. A panel of test antibiotics known to act on different pathways is tested side by side with three to four wells being used to evaluate the effect of a test antibiotic on cell growth at each concentration. Equal volumes of test antibiotic and cells are added to the wells of a 384 well microtiter plate and mixed. Cells are prepared as described above using the medium selected for assay development supplemented with the antibiotic required to maintain the antisense construct and are diluted 1:100 in identical medium immediately prior to addition to the microtiter plate wells. For a control, cells are also added to several wells that lack antibiotic, but contain the solvent used to dissolve the antibiotics. Cell growth is monitored continuously by incubation at 37° C. in a microtiter plate reader monitoring the OD₆₀₀ of the wells over an 18-hour period. The percent inhibition of growth produced by each concentration of antibiotic is calculated by comparing the rates of logarithmic growth against that exhibited by cells growing in medium without antibiotic. A plot of percent inhibition against log [antibiotic concentration] allows extrapolation of an IC₅₀ value for each antibiotic.

[1549] E. Measurement of Test Antibiotic Sensitivity in the Presence of Antisense Construct Inducer

[1550] The culture medium selected for use in the assay is supplemented with inducer at concentrations shown to inhibit cell growth by 50% and 80% as described above, as well as the antibiotic used to maintain the construct. Two-fold dilution series of the panel of test antibiotics used above are generated in each of these media. Several antibiotics are tested side by side in each medium with three to four wells being used to evaluate the effects of an antibiotic on cell growth at each concentration. Equal volumes of test antibiotic and cells are added to the wells of a 384 well microtiter plate and mixed. Cells are prepared as described above using the medium selected for use in the assay supplemented with the antibiotic required to maintain the antisense construct. The cells are diluted 1:100 into two 50 mL aliquots of identical medium containing concentrations of inducer that have been shown to inhibit cell growth by 50% and 80% respectively and incubated at 37° C. with shaking for 2.5 hours. Immediately prior to addition to the microtiter plate wells, the cultures are adjusted to an appropriate OD₆₀₀ (typically 0.002) by dilution into warm (37° C.) sterile medium supplemented with identical concentrations of the inducer and antibiotic used to maintain the antisense construct. For a control, cells are also added to several wells that contain solvent used to dissolve test antibiotics but which contain no antibiotic. Cell growth is monitored continuously by incubation at 37° C. in a microtiter plate reader monitoring the OD₆₀₀ of the wells over an 18-hour period. The percent inhibition of growth produced by each concentration of antibiotic is calculated by comparing the rates of logarithmic growth against that exhibited by cells growing in medium without antibiotic. A plot of percent inhibition against log [antibiotic concentration] allows extrapolation of an IC₅₀ value for each antibiotic.

[1551] F. Determining the Specificity of the Test Antibiotics

[1552] A comparison of the IC₅₀s generated by antibiotics of known mechanism of action under antisense induced and non-induced conditions allows the pathway in which a proliferation-required nucleic acid lies to be identified. If cells expressing an antisense nucleic acid comprising a nucleotide sequence complementary to a proliferation-required gene are selectively sensitive to an antibiotic acting via a particular pathway, then the gene against which the antisense acts is involved in the pathway on which the antibiotic acts.

[1553] G. Identification of Pathway in which a Test Antibiotic Acts

[1554] As discussed above, the cell-based assay may also be used to determine the pathway against which a test antibiotic acts. In such an analysis, the pathways against which each member of a panel of antisense nucleic acids acts are identified as described above. A panel of cells, each containing an inducible vector which transcribes an antisense nucleic acid comprising a nucleotide sequence complementary to a gene in a known proliferation-required pathway, is contacted with a test antibiotic for which it is desired to determine the pathway on which it acts under inducing and non-inducing conditions. If heightened sensitivity is observed in induced cells transcribing antisense complementary to a gene in a particular pathway but not in induced cells transcribing antisense nucleic acids comprising nucleotide sequences complementary to genes in other pathways, then the test antibiotic acts against the pathway for which heightened sensitivity was observed.

[1555] One skilled in the art will appreciate that further optimization of the assay conditions, such as the concentration of inducer used to induce antisense transcription and/or the growth conditions used for the assay (for example incubation temperature and medium components) may further increase the selectivity and/or magnitude of the antibiotic sensitization exhibited.

[1556] It will be appreciated that the above cell-based assays may be performed using antisense nucleic acids comprising nucleotide sequences complementary to any of the proliferation-required nucleic acids from Escherichia coli, Staphylococcus aureus, Enterococcus faecalis, Klebsiella pneumoniae, Pseudomonas aeruginosa, Salmonella typhimurium, Acinetobacter baumannii, Bacillus anthracis, Bacteroides fragilis, Bordetella pertussis, Borrelia burgdorferi, Burkholderia cepacia, Burkholderia fungorum, Burkholderia mallei, Campylobacter jejuni, Chlamydia pneumoniae, Chlamydia trachomatis, Clostridium acetobutylicum, Clostridium botulinum, Clostridium difficile, Corynebacterium diptheriae, Enterobacter cloacae, Enterococcus faecium, Haemophilus influenzae, Helicobacter pylori, Legionella pneumophila, Listeria monocytogenes, Moraxella catarrhalis, Mycobacterium avium, Mycobacterium bovis, Mycobacterium leprae, Mycobacterium tuberculosis, Mycoplasma genitalium, Mycoplasma pneumoniae, Neisseria gonorrhoeae, Neisseria meningitidis, Pasteurella multocida, Proteus mirabilis, Pseudomonas putida, Pseudomonas syringae, Salmonella paratyphi, Salmonella typhi, Staphylococcus epidermidis, Staphylococcus haemolyticus, Streptococcus mutans, Streptococcus pneumoniae, Streptococcus pyogenes, Treponema pallidum, Ureaplasma urealyticum, Vibrio cholerae or Yersinia pestis (including antisense nucleic acids comprising nucleotide sequences complemenatary to SEQ ID NOS: 6214-42397, such as the antisense nucleic acids of SEQ ID NOS.: 1-6213) or portions thereof, antisense nucleic acids complementary to homologous coding nucleic acids or portions thereof, or homologous antisense nucleic acids. In this way, the level or activity of a target, such as any of the proliferation-required polypeptides from Escherichia coli, Staphylococcus aureus, Enterococcus faecalis, Klebsiella pneumoniae, Pseudomonas aeruginosa, Salmonella typhimurium, Acinetobacter baumannii, Bacillus anthracis, Bacteroides fragilis, Bordetella pertussis, Borrelia burgdorferi, Burkholderia cepacia, Burkholderia fungorum, Burkholderia mallei, Campylobacter jejuni, Chlamydia pneumoniae, Chlamydia trachomatis, Clostridium acetobutylicum, Clostridium botulinum, Clostridium difficile, Corynebacterium diptheriae, Enterobacter cloacae, Enterococcus faecium, Haemophilus influenzae, Helicobacter pylori, Legionella pneumophila, Listeria monocytogenes, Moraxella catarrhalis, Mycobacterium avium, Mycobacterium bovis, Mycobacterium leprae, Mycobacterium tuberculosis, Mycoplasma genitalium, Mycoplasma pneumoniae, Neisseria gonorrhoeae, Neisseria meningitidis, Pasteurella multocida, Proteus mirabilis, Pseudomonas putida, Pseudomonas syringae, Salmonella paratyphi, Salmonella typhi, Staphylococcus epidermidis, Staphylococcus haemolyticus, Streptococcus mutans, Streptococcus pneumoniae, Streptococcus pyogenes, Treponema pallidum, Ureaplasma urealyticum, Vibrio cholerae or Yersinia pestis (including the polypeptides of SEQ ID NOS.: 42398-78581), or homologous polypeptides may be reduced.

[1557] In some embodiments of the present invention, the methods for the production of stabilized RNA, as described in U.S. Provisional Patent Application Serial No. 60/343,512, the disclosure of which is incorporated herein by reference in its entirety, can be used in the above cell-based assays in Gram-negative organisms to extend the lifetime of transcripts corresponding to the nucleic acids described herein.

[1558] The following example confirms the effectiveness of the methods described above.

### Example 19

[1559] Identification of the Biological Pathway in which a Proliferation-Required Gene Lies

[1560] The effectiveness of the above assays was validated using proliferation-required genes from E. coli which were identified using procedures similar to those described above. Antibiotics of various chemical classes and modes of action were purchased from Sigma Chemicals (St. Louis, Mo.). Stock solutions were prepared by dissolving each antibiotic in an appropriate aqueous solution based on information provided by the manufacturer. The final working solution of each antibiotic contained no more than 0.2% (w/v) of any organic solvent. To determine their potency against a bacterial strain engineered for transcription of an antisense comprising a nucleotide sequence complementary to a proliferation-required 50S ribosomal protein, each antibiotic was serially diluted two- or three-fold in growth medium supplemented with the appropriate antibiotic for maintenance of the antisense construct. At least ten dilutions were prepared for each antibiotic. 25 μL aliquots of each dilution were transferred to discrete wells of a 384-well microplate (the assay plate) using a multi-channel pipette. Quadruplicate wells were used for each dilution of an antibiotic under each treatment condition (plus and minus inducer). Each assay plate contained twenty wells for cell growth controls (growth medium replacing antibiotic), ten wells for each treatment (plus and minus inducer, in this example IPTG). Assay plates were usually divided into the two treatments: half the plate containing induced cells and an appropriate concentrations of inducer (in this example IPTG) to maintain the state of induction, the other half containing non-induced cells in the absence of IPTG.

[1561] Cells for the assay were prepared as follows. Bacterial cells containing a construct, from which transcription of antisense nucleic acid comprising a nucleotide sequence complementary to rplL and rplJ (AS-rplL/J), which encode proliferation-required 50S ribosomal subunit proteins, is inducible in the presence of IPTG, were grown into exponential growth (OD₆₀₀ 0.2 to 0.3) and then diluted 1:100 into fresh medium containing either 400 μM or 0 μM inducer (IPTG). These cultures were incubated at 37° C. for 2.5 hr. After a 2.5 hr incubation, induced and non-induced cells were respectively diluted into an assay medium at a final OD₆₀₀ value of 0.0004. The medium contained an appropriate concentration of the antibiotic for the maintenance of the antisense construct. In addition, the medium used to dilute induced cells was supplemented with 800 μM IPTG so that addition to the assay plate would result in a final IPTG concentration of 400 μM. Induced and non-induced cell suspensions were dispensed (25 μl/well) into the appropriate wells of the assay plate as discussed previously. The plate was then loaded into a plate reader, incubated at constant temperature, and cell growth was monitored in each well by the measurement of light scattering at 595 nm. Growth was monitored every 5 minutes until the cell culture attained a stationary growth phase. For each concentration of antibiotic, a percentage inhibition of growth was calculated at the time point corresponding to mid-exponential growth for the associated control wells (no antibiotic, plus or minus IPTG). For each antibiotic and condition (plus or minus IPTG), a plot of percent inhibition versus log of antibiotic concentration was generated and the IC₅₀ determined. A comparison of the IC₅₀ for each antibiotic in the presence and absence of IPTG revealed whether induction of the antisense construct sensitized the cell to the mechanism of action exhibited by the antibiotic. Cells which exhibited a statistically significant decrease in the IC₅₀ value in the presence of inducer were considered to have an increased sensitivity to the test antibiotic.

[1562] The results are provided in the table below, which lists the classes and names of the antibiotics used in the analysis, the targets of the antibiotics, the IC₅₀ in the absence of IPTG, the IC₅₀ in the presence of IPTG, the concentration units for the IC₅₀ₛ, the fold increase in IC₅₀ in the presence of IPTG, and whether increased sensitivity was observed in the presence of IPTG.

TABLE V
Effect of Expression of Antisense RNA to rplL and rplJ on Antibiotic Sensitivity

| | | | | | | |
|---|---|---|---|---|---|---|
| | | | | | Fold | |
| | | IC₅₀ | IC₅₀ | Conc. | Increase in | Sensitivity |
| ANTIBIOTIC CLASS/Names | TARGET | (−IPTG) | (+IPTG) | Unit | Sensitivity | Increased? |

PROTEIN SYNTHESIS INHIBITOR

| | | | | | | |
|---|---|---|---|---|---|---|
| AMINOGLYCOSIDES | | | | | | |
| Gentamicin | 30S ribosome function | 2715 | 19.19 | ng/ml | 141 | Yes |
| Streptomycin | 30S ribosome function | 11280 | 161 | ng/ml | 70 | Yes |
| Spectinomycin | 30S ribosome function | 18050 | <156 | ng/ml | | Yes |
| Tobramycin | 30S ribosome function | 3594 | 70.58 | ng/ml | 51 | Yes |
| MACROLIDES | | | | | | |
| Erythromycin | 50S ribosome function | 7467 | 187 | ng/ml | 40 | Yes |
| AROMATIC POYKETIDES | | | | | | |
| Tetracycline | 30S ribosome function | 199.7 | 1.83 | ng/ml | 109 | Yes |
| Minocycline | 30S ribosome function | 668.4 | 3.897 | ng/ml | 172 | Yes |
| Doxycycline | 30S ribosome function | 413.1 | 27.81 | ng/ml | 15 | Yes |
| OTHER PROTEIN SYNTHESIS | | | | | | |
| INHIBITORS | | | | | | |
| Fusidic acid | Elongation Factor G function | 59990 | 641 | ng/ml | 94 | Yes |
| Chloramphenicol | 30S ribosome function | 465.4 | 1.516 | ng/ml | 307 | Yes |
| Lincomycin | 50S ribosome function | 47150 | 324.2 | ng/ml | 145 | Yes |

OTHER ANTIBIOTIC MECHANISMS

| | | | | | | |
|---|---|---|---|---|---|---|
| B-LACTAMS | | | | | | |
| Cefoxitin | Cell wall biosynthesis | 2782 | 2484 | ng/ml | 1 | No |
| Cefotaxime | Cell wall biosynthesis | 24.3 | 24.16 | ng/ml | 1 | No |
| DNA SYNTHESIS INHIBITORS | | | | | | |
| Nalidixic acid | DNA Gyrase activity | 6973 | 6025 | ng/ml | 1 | No |
| Ofloxacin | DNA Gyrase activity | 49.61 | 45.89 | ng/ml | 1 | No |
| OTHER | | | | | | |
| Bacitracin | Cell membrane function | 4077 | 4677 | mg/ml | 1 | No |
| Trimethoprim | Dihydrofolate Reductase | 128.9 | 181.97 | ng/ml | 1 | No |
| | activity | | | | | |
| Vancomycin | Cell wall biosynthesis | 145400 | 72550 | ng/ml | 2 | No |

[1563] The above results demonstrate that induction of an antisense RNA complementary to genes encoding 50S ribosomal subunit proteins results in a selective and highly significant sensitization of cells to antibiotics that inhibit ribosomal function and protein synthesis. The above results further demonstrate that induction of an antisense to an essential gene sensitizes a cell or microorganism to compounds that interfere with that gene product's biological role. This sensitization is restricted to compounds that interfere with pathways associated with the targeted gene and its product.

[1564] It will be appreciated that the above cell-based assays may be performed using antisense nucleic acids complementary to any of the proliferation-required nucleic acids from Escherichia coli, Staphylococcus aureus, Enterococcus faecalis, Klebsiella pneumoniae, Pseudomonas aeruginosa, Salmonella typhimurium, Acinetobacter baumannii, Bacillus anthracis, Bacteroides fragilis, Bordetella pertussis, Borrelia burgdorferi, Burkholderia cepacia, Burkholderia fungorum, Burkholderia mallei, Campylobacter jejuni, Chlamydia pneumoniae, Chlamydia trachomatis, Clostridium acetobutylicum, Clostridium botulinum, Clostridium difficile, Corynebacterium diptheriae, Enterobacter cloacae, Enterococcus faecium, Haemophilus influenzae, Helicobacter pylori, Legionella pneumophila, Listeria monocytogenes, Moraxella catarrhalis, Mycobacterium avium, Mycobacterium bovis, Mycobacterium leprae, Mycobacterium tuberculosis, Mycoplasma genitalium, Mycoplasma pneumoniae, Neisseria gonorrhoeae, Neisseria meningitidis, Pasteurella multocida, Proteus mirabilis, Pseudomonas putida, Pseudomonas syringae, Salmonella paratyphi, Salmonella typhi, Staphylococcus epidermidis, Staphylococcus haemolyticus, Streptococcus mutans, Streptococcus pneumoniae, Streptococcus pyogenes, Treponema pallidum, Ureaplasma urealyticum, Vibrio cholerae or Yersinia pestis (including antisense nucleic acids complementary to SEQ ID NOS. 6214-42397, such as the antisense nucleic acids of SEQ ID NOS.: 1-6213) or portions thereof, antisense nucleic acids complementary to homologous coding nucleic acids or portions thereof or homologous antisense nucleic acids. In this way, the level or activity of a target, such as any of the proliferation-required polypeptides from Escherichia coli, Staphylococcus aureus, Enterococcus faecalis, Klebsiella pneumoniae, Pseudomonas aeruginosa, Salmonella typhimurium, Acinetobacter baumannii, Bacillus anthracis, Bacteroides fragilis, Bordetella pertussis, Borrelia burgdorferi, Burkholderia cepacia, Burkholderia fungorum, Burkholderia mallei, Campylobacter jejuni, Chlamydia pneumoniae, Chlamydia trachomatis, Clostridium acetobutylicum, Clostridium botulinum, Clostridium difficile, Corynebacterium diptheriae, Enterobacter cloacae, Enterococcus faecium, Haemophilus influenzae, Helicobacter pylori, Legionella pneumophila, Listeria monocytogenes, Moraxella catarrhalis, Mycobacterium avium, Mycobacterium bovis, Mycobacterium leprae, Mycobacterium tuberculosis, Mycoplasma genitalium, Mycoplasma pneumoniae, Neisseria gonorrhoeae, Neisseria meningitidis, Pasteurella multocida, Proteus mirabilis, Pseudomonas putida, Pseudomonas syringae, Salmonella paratyphi, Salmonella typhi, Staphylococcus epidermidis, Staphylococcus haemolyticus, Streptococcus mutans, Streptococcus pneumoniae, Streptococcus pyogenes, Treponema pallidum, Ureaplasma urealyticum, Vibrio cholerae or Yersinia pestis (including the polypeptides of SEQ ID NOS.: 42398-78581), or homologous polypeptides may be reduced.

[1565] In some embodiments of the present invention, the methods for the production of stabilized RNA, as described in U.S. Provisional Patent Application Serial No. 60/343,512, the disclosure of which is incorporated herein by reference in its entirety, can be used in the above cell-based assays in Gram-negative organisms to extend the lifetime of transcripts corresponding to the nucleic acids described herein.

[1566] Example 20 below describes an analysis performed in Staphylococcus aureus.

### Example 20

[1567] Identification of the Biological Pathway in which a Gene Required for Proliferation of Staphylococcus aureus Lies

[1568] Antibiotics of various chemical classes and modes of action were purchased from chemical suppliers, for example Sigma Chemicals (St. Louis, Mo.). Stock solutions were prepared by dissolving each antibiotic in an appropriate aqueous solution based on information provided by the manufacturer. The final working solution of each antibiotic contained no more than 0.2% (w/v) of any organic solvent.

[1569] To determine its potency against a bacterial strain containing an antisense nucleic acid comprising a nucleotide sequence complementary to the nucleotide sequence encoding the Beta subunit of DNA gyrase (which is required for proliferation) under the control of a xylose inducible promoter, each antibiotic was serially diluted two- or three-fold in growth medium supplemented with the appropriate antibiotic for maintenance of the antisense construct. At least ten dilutions were prepared for each antibiotic.

[1570] Aliquots (25 μL) of each dilution were transferred to discrete wells of a 384-well microplate (the assay plate) using a multi-channel pipette. Quadruplicate wells were used for each dilution of an antibiotic under each treatment condition (plus and minus inducer). Each assay plate contained twenty wells for cell growth controls (growth medium, no antibiotic), ten wells for each treatment (plus and minus inducer, xylose, in this example). Half the assay plate contained induced cells (in this example Staphylococcus aureus cells) and appropriate concentrations of inducer (xylose, in this example) to maintain the state of induction while the other half of the assay plate contained non-induced cells maintained in the absence of inducer.

[1571] Preparation of Bacterial Cells

[1572] Cells of a bacterial clone containing a construct in which transcription of antisense comprising a nucleotide sequence complementary to the sequence encoding the Beta subunit of DNA gyrase under the control of the xylose inducible promoter (S1M10000001F08) were grown into exponential growth (OD₆₀₀ 0.2 to 0.3) and then diluted 1:100 into fresh medium containing either 12 mM or 0 mM inducer (xylose). These cultures were incubated at 37° C. for 2.5 hr. The presence of inducer (xylose) in the medium initiates and maintains production of antisense RNA from the antisense construct. After a 2.5 hr incubation, induced and non-induced cells were respectively diluted into an assay medium containing an appropriate concentration of the antibiotic for the maintenance of the antisense construct. In addition, medium used to dilute induced cells was supplemented with 24 mM xylose so that addition to the assay plate would result in a final xylose concentration of 12 mM. The cells were diluted to a final OD₆₀₀ value of 0.0004.

[1573] Induced and non-induced cell suspensions were dispensed (25 μl/well) into the appropriate wells of the assay plate as discussed previously. The plate was then loaded into a plate reader and incubated at constant temperature while cell growth was monitored in each well by the measurement of light scattering at 595 nm. Growth was monitored every 5 minutes until the cell culture attained a stationary growth phase. For each concentration of antibiotic, a percentage inhibition of growth was calculated at the time point corresponding to mid-exponential growth for the associated control wells (no antibiotic, plus or minus xylose). For each antibiotic and condition (plus or minus xylose), plots of percent inhibition versus Log of antibiotic concentration were generated and IC₅₀s determined.

[1574] A comparison of each antibiotic's IC₅₀ in the presence and absence of inducer (xylose, in this example) reveals whether induction of the antisense construct sensitized the cell to the antibiotic's mechanism of action. If the antibiotic acts against the β subunit of DNA gyrase, the IC₅₀ of induced cells will be significantly lower than the IC₅₀ of uninduced cells.

[1575] FIG. 10 lists the antibiotics tested, their targets, and their fold increase in potency between induced cells and uninduced cells. As illustrated in FIG. 10, the potency of cefotaxime, cefoxitin, fusidic acid, lincomycin, tobramycin, trimethoprim and vancomycin, each of which act on targets other than the β subunit of gyrase, was not significantly different in induced cells as compared to uninduced cells. However, the potency of novobiocin, which is known to act against the Beta subunit of DNA gyrase, was significantly different between induced cells and uninduced cells.

[1576] Thus, induction of an antisense nucleic acid comprising a nucleotide sequence complementary to the sequence encoding the β subunit of gyrase results in a selective and significant sensitization of Staphylococcus aureus cells to an antibiotic which inhibits the activity of this protein. Furthermore, the results demonstrate that induction of an antisense construct to an essential gene sensitizes a cell or microorganism to compounds that interfere with that gene product's biological role. This sensitization is apparently restricted to compounds that interfere with the targeted gene and its product.

[1577] It will be appreciated that the above cell-based assays may be performed using antisense nucleic acids complementary to any of the proliferation-required nucleic acids from Escherichia coli, Staphylococcus aureus, Enterococcus faecalis, Klebsiella pneumoniae, Pseudomonas aeruginosa, Salmonella typhimurium, Acinetobacter baumannii, Bacillus anthracis, Bacteroides fragilis, Bordetella pertussis, Borrelia burgdorferi, Burkholderia cepacia, Burkholderia fungorum, Burkholderia mallei, Campylobacter jejuni, Chlamydia pneumoniae, Chlamydia trachomatis, Clostridium acetobutylicum, Clostridium botulinum, Clostridium difficile, Corynebacterium diptheriae, Enterobacter cloacae, Enterococcus faecium, Haemophilus influenzae, Helicobacter pylori, Legionella pneumophila, Listeria monocytogenes, Moraxella catarrhalis, Mycobacterium avium, Mycobacterium bovis, Mycobacterium leprae, Mycobacterium tuberculosis, Mycoplasma genitalium, Mycoplasma pneumoniae, Neisseria gonorrhoeae, Neisseria meningitidis, Pasteurella multocida, Proteus mirabilis, Pseudomonas putida, Pseudomonas syringae, Salmonella paratyphi, Salmonella typhi, Staphylococcus epidermidis, Staphylococcus haemolyticus, Streptococcus mutans, Streptococcus pneumoniae, Streptococcus pyogenes, Treponema pallidum, Ureaplasma urealyticum, Vibrio cholerae or Yersinia pestis (including antisense nucleic acids complementary to SEQ ID NOS.: 6214-42397, such as the antisense nucleic acids of SEQ ID NOS. 1-6213), or portions thereof, antisense nucleic acids complementary to homologous coding nucleic acids or portions thereof, or homologous antisense nucleic acids. In this way, the level or activity of a target, such as any of the proliferation-required polypeptides from Escherichia coli, Staphylococcus aureus, Enterococcus faecalis, Klebsiella pneumoniae, Pseudomonas aeruginosa, Salmonella typhimurium, Acinetobacter baumannii, Bacillus anthracis, Bacteroides fragilis, Bordetella pertussis, Borrelia burgdorferi, Burkholderia cepacia, Burkholderia fungorum, Burkholderia mallei, Campylobacter jejuni, Chlamydia pneumoniae, Chlamydia trachomatis, Clostridium acetobutylicum, Clostridium botulinum, Clostridium difficile, Corynebacterium diptheriae, Enterobacter cloacae, Enterococcus faecium, Haemophilus influenzae, Helicobacter pylori, Legionella pneumophila, Listeria monocytogenes, Moraxella catarrhalis, Mycobacterium avium, Mycobacterium bovis, Mycobacterium leprae, Mycobacterium tuberculosis, Mycoplasma genitalium, Mycoplasma pneumoniae, Neisseria gonorrhoeae, Neisseria meningitidis, Pasteurella multocida, Proteus mirabilis, Pseudomonas putida, Pseudomonas syringae, Salmonella paratyphi, Salmonella typhi, Staphylococcus epidermidis, Staphylococcus haemolyticus, Streptococcus mutans, Streptococcus pneumoniae, Streptococcus pyogenes, Treponema pallidum, Ureaplasma urealyticum, Vibrio cholerae or Yersinia pestis or homologous polypeptides may be reduced.

[1578] In some embodiments of the present invention, the methods for the production of stabilized RNA, as described in U.S. Provisional Patent Application Serial No. 60/343,512, the disclosure of which is incorporated herein by reference in its entirety, can be used in the above cell-based assays in Gram-negative organisms to extend the lifetime of transcripts corresponding to the nucleic acids described herein.

[1579] Assays utilizing antisense constructs to essential genes or portions thereof can be used to identify compounds that interfere with the activity of those gene products. Such assays could be used to identify drug leads, for example antibiotics.

[1580] Panels of cells transcribing different antisense nucleic acids can be used to characterize the point of intervention of a compound affecting an essential biochemical pathway including antibiotics with no known mechanism of action.

[1581] Assays utilizing antisense constructs to essential genes can be used to identify compounds that specifically interfere with the activity of multiple targets in a pathway. Such constructs can be used to simultaneously screen a sample against multiple targets in one pathway in one reaction (Combinatorial HTS).

[1582] Furthermore, as discussed above, panels of antisense construct-containing cells may be used to characterize the point of intervention of any compound affecting an essential biological pathway including antibiotics with no known mechanism of action.

[1583] It will be appreciated that the above cell-based assays may be performed using antisense nucleic acids complementary to any of the proliferation-required nucleic acids from Escherichia coli, Staphylococcus aureus, Enterococcus faecalis, Klebsiella pneumoniae, Pseudomonas aeruginosa, Salmonella typhimurium, Acinetobacter baumannii, Bacillus anthracis, Bacteroides fragilis, Bordetella pertussis, Borrelia burgdorferi, Burkholderia cepacia, Burkholderia fungorum, Burkholderia mallei, Campylobacter jejuni, Chlamydia pneumoniae, Chlamydia trachomatis, Clostridium acetobutylicum, Clostridium botulinum, Clostridium difficile, Corynebacterium diptheriae, Enterobacter cloacae, Enterococcus faecium, Haemophilus influenzae, Helicobacter pylori, Legionella pneumophila, Listeria monocytogenes, Moraxella catarrhalis, Mycobacterium avium, Mycobacterium bovis, Mycobacterium leprae, Mycobacterium tuberculosis, Mycoplasma genitalium, Mycoplasma pneumoniae, Neisseria gonorrhoeae, Neisseria meningitidis, Pasteurella multocida, Proteus mirabilis, Pseudomonas putida, Pseudomonas syringae, Salmonella paratyphi, Salmonella typhi, Staphylococcus epidermidis, Staphylococcus haemolyticus, Streptococcus mutans, Streptococcus pneumoniae, Streptococcus pyogenes, Treponema pallidum, Ureaplasma urealyticum, Vibrio cholerae or Yersinia pestis (including antisense nucleic acids comprising nucleotide sequences complementary to SEQ ID NOS.: 6214-42397, such as the antisense nucleic acids of SEQ ID NOS. 1-6213), or portions thereof, antisense nucleic acids complementary to homologous coding nucleic acids or portions thereof, or homologous antisense nucleic acids. In this way, the level or activity of a target, such as any of the proliferation-required polypeptides from Escherichia coli, Staphylococcus aureus, Enterococcus faecalis, Klebsiella pneumoniae, Pseudomonas aeruginosa, Salmonella typhimurium, Acinetobacter baumannii, Bacillus anthracis, Bacteroides fragilis, Bordetella pertussis, Borrelia burgdorferi, Burkholderia cepacia, Burkholderia fungorum, Burkholderia mallei, Campylobacter jejuni, Chlamydia pneumoniae, Chlamydia trachomatis, Clostridium acetobutylicum, Clostridium botulinum, Clostridium difficile, Corynebacterium diptheriae, Enterobacter cloacae, Enterococcus faecium, Haemophilus influenzae, Helicobacter pylori, Legionella pneumophila, Listeria monocytogenes, Moraxella catarrhalis, Mycobacterium avium, Mycobacterium bovis, Mycobacterium leprae, Mycobacterium tuberculosis, Mycoplasma genitalium, Mycoplasma pneumoniae, Neisseria gonorrhoeae, Neisseria meningitidis, Pasteurella multocida, Proteus mirabilis, Pseudomonas putida, Pseudomonas syringae, Salmonella paratyphi, Salmonella typhi, Staphylococcus epidermidis, Staphylococcus haemolyticus, Streptococcus mutans, Streptococcus pneumoniae, Streptococcus pyogenes, Treponema pallidum, Ureaplasma urealyticum, Vibrio cholerae or Yersinia pestis or homologous polypeptides may be reduced.

[1584] In some embodiments of the present invention, the methods for the production of stabilized RNA, as described in U.S. Provisional Patent Application Serial No. 60/343,512, the disclosure of which is incorporated herein by reference in its entirety, can be used in the above cell-based assays in Gram-negative organisms to extend the lifetime of transcripts corresponding to the nucleic acids described herein.

[1585] Another embodiment of the present invention is a method for determining the pathway against which a test antibiotic compound is active, in which the activity of target proteins or nucleic acids involved in proliferation-required pathways is reduced by contacting cells with a sub-lethal concentration of a known antibiotic which acts against the target protein or nucleic acid. In one embodiment, the target protein or nucleic acid corresponds to a proliferation-required nucleic acid identified using the methods described above, such as the polypeptides of SEQ ID NOS.: 42398-78581, or homologous polypeptides. The method is similar to those described above for determining which pathway a test antibiotic acts against, except that rather than reducing the activity or level of a proliferation-required gene product using a sub-lethal level of antisense to a proliferation-required nucleic acid, the sensitized cell is generated by reducing the activity or level of the proliferation-required gene product using a sub-lethal level of a known antibiotic which acts against the proliferation required gene product. Heightened sensitivity determines the pathway on which the test compound is active.

[1586] Interactions between drugs which affect the same biological pathway have been described in the literature. For example, Mecillinam (Amdinocillin) binds to and inactivates the penicillin binding protein 2 (PBP2, product of the mrdA in E. coli). This antibiotic interacts with other antibiotics that inhibit PBP2 as well as antibiotics that inhibit other penicillin binding proteins such as PBP3 [(Gutmann, L., Vincent, S., Billot-Klein, D., Acar, J. F., Mrena, E., and Williamson, R. (1986) Involvement of penicillin-binding protein 2 with other penicillin-binding proteins in lysis of Escherichia coli by some beta-lactam antibiotics alone and in synergistic lytic effect of amdinocillin (mecillinam). Antimicrobial Agents & Chemotherapy, 30:906-912), the disclosure of which is incorporated herein by reference in its entirety]. Interactions between drugs could, therefore, involve two drugs that inhibit the same target protein or nucleic acid or inhibit different proteins or nucleic acids in the same pathway [(Fukuoka, T., Domon, H., Kakuta, M., Ishii, C., Hirasawa, A., Utsui, Y., Ohya, S., and Yasuda, H. (1997) Combination effect between panipenem and vancomycin on highly methicillin-resistant Staphylococcus aureus. Japan. J. Antibio. 50:411-419; Smith, C. E., Foleno, B. E., Barrett, J. F., and Frosc, M. B. (1997) Assessment of the synergistic interactions of levofloxacin and ampicillin against Enterococcus faecium by the checkerboard agar dilution and time-kill methods. Diagnos. Microbiol. Infect. Disease 27:85-92; den Hollander, J. G., Horrevorts, A. M., van Goor, M. L., Verbrugh, H. A., and Mouton, J. W. (1997) Synergism between tobramycin and ceftazidime against a resistant Pseudomonas aeruginosa strain, tested in an in vitro pharmacokinetic model. Antimicrobial Agents & Chemotherapy. 41:95-110), the disclosure of all of which are incorporated herein by reference in their entireties].

[1587] Two drugs may interact even though they inhibit different targets. For example, the proton pump inhibitor, Omeprazole, and the antibiotic, Amoxycillin, two synergistic compounds acting together, can cure Helicobacter pylori infection [(Gabryelewicz, A., Laszewicz, W., Dzieniszewski, J., Ciok, J., Marlicz, K., Bielecki, D., Popiela, T., Legutko, J., Knapik, Z., Poniewierka, E. (1997) Multicenter evaluation of dual-therapy (omeprazol and amoxycillin) for Helicobacter pylori-associated duodenal and gastric ulcer (two years of the observation). J. Physiol. Pharmacol. 48 Suppl 4:93-105), the disclosure of which is incorporated herein by reference in its entirety].

[1588] The growth inhibition from the sub-lethal concentration of the known antibiotic may be at least about 5%, at least about 8%, at least about 10%, at least about 20%, at least about 30%, at least about 40%, at least about 50%, at least about 60%, or at least about 75%, or more.

[1589] Alternatively, the sub-lethal concentration of the known antibiotic may be determined by measuring the activity of the target proliferation-required gene product rather than by measuring growth inhibition.

[1590] Cells are contacted with a combination of each member of a panel of known antibiotics at a sub-lethal level and varying concentrations of the test antibiotic. As a control, the cells are contacted with varying concentrations of the test antibiotic alone. The IC₅₀ of the test antibiotic in the presence and absence of the known antibiotic is determined. If the IC₅₀s in the presence and absence of the known drug are substantially similar, then the test drug and the known drug act on different pathways. If the IC₅₀s are substantially different, then the test drug and the known drug act on the same pathway.

[1591] It will be appreciated that the above cell-based assays may be performed using a sub-lethal concentration of a known antibiotic which acts against the product of any of the proliferation-required nucleic acids from Escherichia coli, Staphylococcus aureus, Enterococcus faecalis, Klebsiella pneumoniae, Pseudomonas aeruginosa, Salmonella typhimurium, Acinetobacter baumannii, Bacillus anthracis, Bacteroides fragilis, Bordetella pertussis, Borrelia burgdorferi, Burkholderia cepacia, Burkholderia fungorum, Burkholderia mallei, Campylobacter jejuni, Chlamydia pneumoniae, Chlamydia trachomatis, Clostridium acetobutylicum, Clostridium botulinum, Clostridium difficile, Corynebacterium diptheriae, Enterobacter cloacae, Enterococcus faecium, Haemophilus influenzae, Helicobacter pylori, Legionella pneumophila, Listeria monocytogenes, Moraxella catarrhalis, Mycobacterium avium, Mycobacterium bovis, Mycobacterium leprae, Mycobacterium tuberculosis, Mycoplasma genitalium, Mycoplasma pneumoniae, Neisseria gonorrhoeae, Neisseria meningitidis, Pasteurella multocida, Proteus mirabilis, Pseudomonas putida, Pseudomonas syringae, Salmonella paratyphi, Salmonella typhi, Staphylococcus epidermidis, Staphylococcus haemolyticus, Streptococcus mutans, Streptococcus pneumoniae, Streptococcus pyogenes, Treponema pallidum, Ureaplasma urealyticum, Vibrio cholerae or Yersinia pestis (including the products of SEQ ID NOS: 6214-42397, or portions thereof, or the products of homologous coding nucleic acids or portions thereof. In this way, the level or activity of a target, such as any of the proliferation-required polypeptides from Escherichia coli, Staphylococcus aureus, Enterococcus faecalis, Klebsiella pneumoniae, Pseudomonas aeruginosa, Salmonella typhimurium, Acinetobacter baumannii, Bacillus anthracis, Bacteroides fragilis, Bordetella pertussis, Borrelia burgdorferi, Burkholderia cepacia, Burkholderia fungorum, Burkholderia mallei, Campylobacter jejuni, Chlamydia pneumoniae, Chlamydia trachomatis, Clostridium acetobutylicum, Clostridium botulinum, Clostridium difficile, Corynebacterium diptheriae, Enterobacter cloacae, Enterococcus faecium, Haemophilus influenzae, Helicobacter pylori, Legionella pneumophila, Listeria monocytogenes, Moraxella catarrhalis, Mycobacterium avium, Mycobacterium bovis, Mycobacterium leprae, Mycobacterium tuberculosis, Mycoplasma genitalium, Mycoplasma pneumoniae, Neisseria gonorrhoeae, Neisseria meningitidis, Pasteurella multocida, Proteus mirabilis, Pseudomonas putida, Pseudomonas syringae, Salmonella paratyphi, Salmonella typhi, Staphylococcus epidermidis, Staphylococcus haemolyticus, Streptococcus mutans, Streptococcus pneumoniae, Streptococcus pyogenes, Treponema pallidum, Ureaplasma urealyticum, Vibrio cholerae or Yersinia pestis (including the polypeptides of SEQ ID NOS.: 42398-78581), or homologous polypeptides may be reduced.

[1592] Another embodiment of the present invention is a method for identifying a candidate compound for use as an antibiotic in which the activity of target proteins or nucleic acids involved in proliferation-required pathways is reduced by contacting cells with a sub-lethal concentration of a known antibiotic which acts against the target protein or nucleic acid. In one embodiment, the target protein or nucleic acid is a target protein or nucleic acid corresponding to a proliferation-required nucleic acid identified using the methods described above. The method is similar to those described previously herein for identifying candidate compounds for use as antibiotics except that rather than reducing the activity or level of a proliferation-required gene product using a sub-lethal level of antisense to a proliferation-required nucleic acid, the activity or level of the proliferation-required gene product is reduced using a sub-lethal level of a known antibiotic which acts against the proliferation required gene product.

[1593] The growth inhibition from the sub-lethal concentration of the known antibiotic may be at least about 5%, at least about 8%, at least about 10%, at least about 20%, at least about 30%, at least about 40%, at least about 50%, at least about 60%, or at least about 75%, or more.

[1594] Alternatively, the sub-lethal concentration of the known antibiotic may be determined by measuring the activity of the target proliferation-required gene product rather than by measuring growth inhibition.

[1595] In order to characterize test compounds of interest, cells are contacted with a panel of known antibiotics at a sub-lethal level and one or more concentrations of the test compound. As a control, the cells are contacted with the same concentrations of the test compound alone. The IC₅₀ of the test compound in the presence and absence of the known antibiotic is determined. If the IC₅₀ of the test compound is substantially different in the presence and absence of the known drug then the test compound is a good candidate for use as an antibiotic. As discussed above, once a candidate compound is identified using the above methods its structure may be optimized using standard techniques such as combinatorial chemistry.

[1596] Representative known antibiotics which may be used in each of the above methods are provided in Table VI below. However, it will be appreciated that other antibiotics may also be used.

TABLE VI
Antibiotics and Their Targets

| | | |
|---|---|---|
| | | RESISTANT |
| ANTIBIOTIC | INHIBITS/TARGET | MUTANTS |

Inhibitors of Transcription

| | | |
|---|---|---|
| Rifamycin, Rifampicin | Inhibits initiation of transcription/β- | rpoB, crp, cyaA |
| Rifabutin Rifaximin | subunit RNA polymerase, rpoB | |
| Streptolydigin | Accelerates transcription chain | rpoB |
| | termination/β-subunit RNA | |
| | polymerase | |
| Streptovaricin | an acyclic ansamycin, inhibits RNA | rpoB |
| | polymerase | |
| Actinomycin D+EDTA | Intercalates between 2 successive G- | pldA |
| | C pairs, rpoB, inhibits RNA | |
| | synthesis | |

Inhibitors of Nucleic Acid Metabolism

| | | |
|---|---|---|
| Quinolones, | á subunit gyrase and/or | |
| Nalidixic acid | topoisomerase IV, gyrA | gyrAorB, icd, sloB |
| Oxolinic acid | | |
| Fluoroquinolones | á subunit gyrase, gyrA and/or | gyrA |
| Ciprofloxacin, | topoisomerase IV (probable target in | norA (efflux in |
| Norfloxacin | Staph) | Staph) |
| | | hipQ |
| Coumerins | Inhibits ATPase activity of β-subunit | |
| Novobiocin | gyrase, gyrB | gyrB, cysB, cysE, |
| | | nov, ompA |
| Coumermycin | Inhibits ATPase activity of β-subunit | gyrB, hisW |
| | gyrase, gyrB | |
| Albicidin | DNA synthesis | tsx (nucleoside |
| | | channel) |
| Metronidazole | Causes single-strand breaks in DNA | nar |

Inhibitors of Metabolic Pathways

| | | |
|---|---|---|
| Sulfonamides, | blocks synthesis of | folP, gpt, pabA, |
| Sulfanilamide | dihydrofolate,dihydro-pteroate | pabB, pabC |
| | synthesis, folP | |
| Trimethoprim, | Inhibits dihydrofolate reductase, | folA, thyA |
| | folA | |
| Showdomycin | Nucleoside analogue capable of | nupC, pnp |
| | alkylating sulfhydryl groups, inhibitor | |
| | of thymidylate synthetase | |
| Thiolactomycin | type II fatty acid synthase inhibitor | emrB |
| | | fadB, emrB due to |
| | | gene dosage |
| Psicofuranine | Adenosine glycoside antibiotic, | guaA,B |
| | target is GMP synthetase | |
| Triclosan | Inhibits fatty acid synthesis | fabl (envM) |
| Diazoborines Isoniazid, | heterocyclic, contain boron, inhibit | fabl (envM) |
| Ethionamide | fatty acid synthesis, enoyl-ACP | |
| | reductase, fabl | |

Inhibitors of Translation

| | | |
|---|---|---|
| Phenylpropanoids | Binds to ribosomal peptidyl transfer | |
| Chloramphenicol, | center preventing peptide | rrn, cmlA, marA, |
| | translocation/binds to S6, L3, L6, | ompF, ompR |
| | L14, L16, L25, L26, L27, but | |
| | preferentially to L16 | |
| Tetracyclines, type II | Binding to 30S ribosomal subunit, | clmA (cmr), mar, |
| polyketides | “A” site | ompF |
| Minocycline | on 30S subunit, blocks peptide | |
| Doxycycline | elongation, strongest binding to S7 | |
| Macrolides (type I | Binding to 50 S ribosomal subunit, | |
| polyketides) | 23S rRNA, blocks peptide | |
| Erythromycin, | translocation, L15, L4, L12 | rrn, rplC, rplD, |
| Carbomycin, | | rplV, mac |
| Spiramycin etc | | |
| Aminoglycosides | Irreversible binding to 30S | |
| Streptomycin, | ribosomal subunit, prevents | rpsL, strC,M, ubiF |
| | translation or causes mistranslation | atpA-E, ecfB, |
| Neomycin | of mRNA/16S rRNA | hemAC,D,E,G, |
| | | topA, |
| Spectinomycin | | rpsC,D,E, rrn, spcB |
| | | atpA-atpE, cpxA, |
| Kanamycin | | ecfB, hemA,B,L, |
| | | topA |
| Kasugamycin | | ksgA,B,C,D, |
| | | rplB,K, |
| | | rpsI,N,M,R |
| Gentamicin, | | rplF, ubiF |
| Amikacin | | cpxA |
| Paromycin | | rpsL |
| Lincosamides | Binding to 50 S ribosomal subunit, | |
| Lincomycin, | blocks peptide translocation | linB, rplN,O, rpsG |
| Clindamycin | | |
| Streptogramins | 2 components, Streptogramins | |
| Virginiamycin, | A&B, bind to the 50S ribosomal | |
| Pristinamycin | subunit blocking peptide | |
| Synercid: quinupristin/ | translocation and peptide bond | |
| dalfopristin | formation | |
| Fusidanes | Inhibition of elongation factor G | fusA |
| Fusidic Acid | (EF-G) prevents peptide | |
| | translocation | |
| Kirromycin (Mocimycin) | Inhibition of elongation factor TU | tufA,B |
| | (EF-Tu), prevents peptide bond | |
| | formation | |
| Pulvomycin | Binds to and inhibits EF-TU | |
| Thiopeptin | Sulfur-containing antibiotic, inhibits | rplE |
| | protein synthesis, EF-G | |
| Tiamulin | Inhibits protein synthesis | rplC, rplD |
| Negamycin | Inhibits termination process of | prfB |
| | protein synthesis | |
| Oxazolidinones Linezolid | 23S rRNA | |
| Isoniazid | | |
| | | pdx |
| Nitrofurantoin | Inhibits protein synthesis, | nfnA,B |
| | nitroreductases convert | |
| | nitrofurantoin to highly reactive | |
| | electrophilic intermediates which | |
| | attack bacterial ribosomal | |
| | proteins non-specifically | |
| Pseudomonic Acids | Inhibition of isoleucyl tRNA | ileS |
| Mupirocin (Bactroban) | synthetase-used for Staph, topical | |
| | cream, nasal spray | |
| Indolmycin | Inhibits tryptophanyl-tRNA | trpS |
| | synthetase | |
| Viomycin | | rrmA (23S rRNA |
| | | methyltransferase; |
| | | mutant has slow |
| | | growth rate, slow |
| | | chain elongation |
| | | rate, and |
| | | viomycin |
| | | resistance) |
| Thiopeptides | Binds to L11-23S RNA complex | |
| Thiostrepton | Inhibits GTP hydrolysis by EF-G | |
| Micrococcin | Stimulates GTP hydrolysis by EF-G | |

Inhibitors of Cell Walls/Membranes

| | | |
|---|---|---|
| β-lactams | Inhibition of one or more cell wall | |
| Penicillin, Ampicillin | transpeptidases, endopeptidases, | |
| Methicillin, | and glycosidases (PBPs), of the 12 | ampC, ampD, |
| Cephalosporins, | PBPs only 2 are essential; mrdA | ampE, envZ, |
| | (PBP2) and ftsl (pbpB, PBP3) | galU, hipA, |
| | | hipQ, ompC, |
| | | ompF, ompR, |
| | | ptsI, rfa, tolD, |
| Mecillinam | Binds to and inactivates PBP2 | tolE |
| (amdinocillin) | (mrdA) | tonB |
| Aztreonam | Inactivates PBP3 (ftsI) | alaS, argS, crp, |
| (Furazlocillin) | | cyaA, envB, |
| | | mrdA,B, |
| | | mreB,C,D |
| Bacilysin, Tetaine | Dipeptide, inhib glucosamine | dppA |
| | synthase | |
| Glycopeptides Vancomycin, | Inhib G+ cell wall syn, binds to | |
| | terminal D-ala-D-ala of | |
| | pentapeptide, | |
| Polypeptides Bacitracin | Prevents dephosphorylation and | rfa |
| | regeneration of lipid carrier | |
| Cyclic lipopeptide | Disrupts multiple aspects of | |
| Daptomycin, | membrane function, including | |
| | peptidoglycan synthesis, | |
| | lipoteichoic acid synthesis, and the | |
| | bacterial membrane potential | |
| Cyclic polypeptides | Surfactant action disrupts cell | pmrA |
| Polymixin, | membrane lipids, binds lipid A | |
| | mioety of LPS | |
| Fosfomycin, | Analogue of P-enolpyruvate, | murA, crp, cyaA |
| | inhibits 1^{st} step in peptidoglycan | glpT, hipA, ptsI, |
| | synthesis - UDP-N- | uhpT |
| | acetylglucosamine enolpyruvyl | |
| | transferase, murA. Also acts as | |
| | Immunosuppressant | |
| Cycloserine | Prevents formation of D-ala dimer, | hipA, cycA |
| | inhibits D-ala ligase, ddlA,B | |
| Alafosfalin | phosphonodipeptide, cell wall | pepA, tpp |
| | synthesis inhibitor, potentiator of | |
| | β-lactams | |

Inhibitors of Protein Processing/Transport

| | | |
|---|---|---|
| Globomycin | Inhibits signal peptidase II | lpp, dnaE |
| | (cleaves prolipoproteins | |
| | subsequent to lipid modification, | |
| | lspA | |

[1597] It will be appreciated that the above cell-based assays may be performed using a sub-lethal concentration of a known antibiotic which acts against the product of any of the proliferation-required nucleic acids from Escherichia coli, Staphylococcus aureus, Enterococcus faecalis, Klebsiella pneumoniae, Pseudomonas aeruginosa, Salmonella typhimurium, Acinetobacter baumannii, Bacillus anthracis, Bacteroides fragilis, Bordetella pertussis, Borrelia burgdorferi, Burkholderia cepacia, Burkholderia fungorum, Burkholderia mallei, Campylobacter jejuni, Chlamydia pneumoniae, Chlamydia trachomatis, Clostridium acetobutylicum, Clostridium botulinum, Clostridium difficile, Corynebacterium diptheriae, Enterobacter cloacae, Enterococcus faecium, Haemophilus influenzae, Helicobacter pylori, Legionella pneumophila, Listeria monocytogenes, Moraxella catarrhalis, Mycobacterium avium, Mycobacterium bovis, Mycobacterium leprae, Mycobacterium tuberculosis, Mycoplasma genitalium, Mycoplasma pneumoniae, Neisseria gonorrhoeae, Neisseria meningitidis, Pasteurella multocida, Proteus mirabilis, Pseudomonas putida, Pseudomonas syringae, Salmonella paratyphi, Salmonella typhi, Staphylococcus epidermidis, Staphylococcus haemolyticus, Streptococcus mutans, Streptococcus pneumoniae, Streptococcus pyogenes, Treponema pallidum, Ureaplasma urealyticum, Vibrio cholerae or Yersinia pestis or portions thereof, or homologous nucleic acids. In this way, the level or activity of a target, such as any of the proliferation-required polypeptides from Escherichia coli, Staphylococcus aureus, Enterococcus faecalis, Klebsiella pneumoniae, Pseudomonas aeruginosa, Salmonella typhimurium, Acinetobacter baumannii, Bacillus anthracis, Bacteroides fragilis, Bordetella pertussis, Borrelia burgdorferi, Burkholderia cepacia, Burkholderia fungorum, Burkholderia mallei, Campylobacter jejuni, Chlamydia pneumoniae, Chlamydia trachomatis, Clostridium acetobutylicum, Clostridium botulinum, Clostridium difficile, Corynebacterium diptheriae, Enterobacter cloacae, Enterococcus faecium, Haemophilus influenzae, Helicobacter pylori, Legionella pneumophila, Listeria monocytogenes, Moraxella catarrhalis, Mycobacterium avium, Mycobacterium bovis, Mycobacterium leprae, Mycobacterium tuberculosis, Mycoplasma genitalium, Mycoplasma pneumoniae, Neisseria gonorrhoeae, Neisseria meningitidis, Pasteurella multocida, Proteus mirabilis, Pseudomonas putida, Pseudomonas syringae, Salmonella paratyphi, Salmonella typhi, Staphylococcus epidermidis, Staphylococcus haemolyticus, Streptococcus mutans, Streptococcus pneumoniae, Streptococcus pyogenes, Treponema pallidum, Ureaplasma urealyticum, Vibrio cholerae or Yersinia pestis or homologous polypeptides may be reduced.

### Example 21

[1598] Strains in which a Gene Encoding a Gene Product Required for Proliferation is Overexpressed are able to Grow at Elevated Antibiotic Concentrations

[1599] To confirm that cells which overexpress a gene product required for proliferation are able to grow at elevated antibiotic concentrations, 11 such genes from Staphylococcus aureus which are the targets of known antibiotics were operably linked to the xylose inducible promoter XylT5 (described in U.S. patent application Ser. No. 10/032,393, the diclosure of which is incorporated herein by reference in its entirety) as follows. The genes and the antibiotics which target the products of these genes are listed in Table VII below.

[1600] PCR primer pairs were designed for each of the 11 genes encoding a gene product required for proliferation of Staphylococcus aureus as shown in Table VII. The upstream primers for each gene included the native ribosomal binding sites (S-D sequences). In addition, restriction sites for appropriate restriction enzymes were designed into the primers to facilitate directional cloning of the genes. PCR reactions were carried out using Pfu DNA polymerase (Stratagene, San Diego) under the following conditions per 50 μl reaction: Pfu polymerase 2U, dNTP 200 μM, primers 400 nM each, S. aureus RN450 genomic DNA (template) 5-10 ng. The reaction involved an initial heating at 94° C. for 5 min, followed by 25 cycles of 30 sec at 94° C./30 sec at 55° C./5 min at 72° C., and ending with 7 min of extension at 72° C.

[1601] The amplified genes were operably linked to the XylT5 promoter as follows. PCR products were cleaned using QIAGEN PCR Cleaning Kits and then were digested with the proper restriction enzymes. The resulting fragments were ligated overnight at 16° C. with precut vector DNA containing the XylT5 promoter. Ligation mixtures were ethanol precipitated at −80° C. for 20 min in the presence of 0.3 M sodium acetate. The precipitated DNA was spun down at 14,000 rpm for 30 min at 4° C. and washed with 1 ml of 70% EtoH. The DNA pellets were air-dried and dissolved in EB or sterile water. To transform Staphylococcus aureus cells, the precipitated DNA was mixed with 45 μl of electroporation competent cells and incubated at room temperature for 30 min. The DNA/cell mixtures were electroporated (settings: 2 volts, 25 μF, 200 Ω) in 2 mm cuvettes and mixed with 450 μl B2 medium containing 0.2 μg/ml chloramphenicol. The cells were incubated at 37° C. with shaking for 90 min. Transformed cells were plated onto LB agar plates containing chloramphenicol (34 μg/ml) for the selection of plasmids. Several colonies for each cloning reaction were picked and streaked to obtain a pure culture. Colony PCR reactions using vector-specific primers were performed to verify the size and identity of the inserts.

[1602] Gene-walking sequencing was employed to completely sequence the entire insert for several clones of each cloned gene. This was carried out to avoid using a cloned gene whose DNA sequence was mutated during the PCR process.

[1603] To demonstrate that genes encoding gene products required for proliferation can confer resistance to their specific inhibitors upon induction at proper inducer levels, cells of each clone in which the genes were operably linked to the xylose inducible promoter were grown in LB medium with chloramphenicol (34 μg/ml) at a combination of differing antibiotic and inducer concentrations. This was accomplished by using microtitration plates (96 or 384 wells) which contained antibiotic and inducer at gradient concentrations in a matrix format in 10 times excess quantity (see FIG. 11). Media containing inoculated cells (9 volume) was dispensed into the wells containing 1 volume of antibiotic/inducer for a final volume of 50 μl (for 384 well plates) or 200 μl (for 96 well plates). The plates were incubated at 37° C. with periodic shaking and growth of cells was monitored by automatic measurement of optical density at OD600 using a Ultramark reader. A clone over-expressing a particular gene was considered resistant to its specific antibiotic (inhibitor) if significant growth was observed at appropriate inducer concentrations in the presence of a particular concentration of antibiotic but not in the absence of inducer at that concentration of antibiotic.

[1604] The results are indicated in FIG. 12 and FIG. 13. As illustrated in FIG. 12, at appropriate concentrations of inducer cells which overexpress the defB gene product were able to grow at elevated concentrations of the antibiotic actinonin, which acts on the defB gene product. Similarly, as illustrated in FIG. 13, at appropriate concentrations of inducer cells which overexpress the folA gene product were able to grow at elevated concentrations of the antibiotic trimethoprim, which acts on the folA gene product.

[1605] Thus, elevated expression of a gene product required for proliferation enables cells to grow in the presence of antibiotic concentrations which inhibit or prevent growth of wild type cells.

TABLE VII

Essential Genes/Proteins and Specific Inhibitors

| | | | |
|---|---|---|---|
| Gene | Target | Inhibitor | Primers |

| | | | |
|---|---|---|---|
| gyrβ | β subunit of DNA gyrase or | Novobiocin | GCCGGATCCTTATAAAGTAACAGAAAGCGATGGTGACTGC (SEQ ID NO.: |
| | topoisomerase II | | 78593); |
| | | | CAGGTCGACCAGCGCTTAGAAGTCTAAGTTTGCATAAACTG (SEQ ID |
| | | | NO.: 78594) |
| murA | UDP-N-acetylglucosamine | Fosfomycin | CCTGGATCCTTCTAAGTGGAGGATTTACG (SEQ ID NO.: 78595); |
| | enolpyruvyl transferase | | CAGGTCGACGAATTAATCGTTAATACGTT (SEQ ID NO.: 78596) |
| fabl | Enoyl-acyl carrier protein | Triclosan | GCCGGATCCATAAGGAGTTATCTTACATG (SEQ ID NO.: 78597); |
| | reductase | | CGCGTCGACTTATTTAATTGCGTGGAATC (SEQ ID NO.: 78598) |
| rpoB | RNA polymerase β subunit | Rifampicin | GCTGGATCCTGAGGGGTGAATCTGTTTGGC (SEQ ID NO.: 78599); |
| | | | CTGCTCGAGTGCGTATTAATCAGTAACTT (SEQ ID NO.: 78600) |
| fusA | Elongation factor G | Fusidic acid | GCTGGATCCCTGGAAGGAGAAAAAATACATGGCTAGAG (SEQ ID NO.: |
| | | | 78601); |
| | | | CCGGTCGACGGCTAGCTAGTCAAAACAAGTTATATTATTCAC (SEQ ID |
| | | | NO.: 78602) |
| folA | Dihydrofolate reductase | Trimethoprim | GCTGGATCCAGAAGAAGGAGGATAATTATG (SEQ ID NO.: 78603); |
| | | | CCGGTCGACTTTTCCCCCUATTTTTTAC (SEQ ID NO.: 78604) |
| ileS | Isoleucyl tRNA synthetase | Mupirocin | GCTGGATCCTAAGGAGTGAAAAAAATGGATTACAAAGAAACG (SEQ ID |
| | | (bactroban)* | NO.: 78605); |
| | | | CCGGTCGACCAATTATACAAGTGATTTTACAACTTGTTGGCATC (SEQ ID |
| | | | NO.: 78606) |
| trpS | Tryptophanyl tRNA | Indolmycin* | GCGGGATCCCTAAGAAAGTAGGCATTTAAATGGAGAC (SEQ ID NO.: |
| | | | 78607); |
| | synthetase | | CCGGTCGACGTTfATTUATCTCTTACGTCCTAAACC (SEQ ID NO.: |
| | | | 78608) |
| fabF | β-keto-acyl carrier protein | Cerulenin | GCTGGATCCAATAGGAGGATAACGAATGAG (SEQ ID NO.: 78609); |
| | synthase | | CAGGTCGACAATTATGCTTCAAATTTCTT (SEQ ID NO.: 78610) |
| defB | Peptide deformylase | Actinonin | GCTGGATCCATAAGGAAGGTGCAATATATG (SEQ ID NO.: 78611); |
| | | | CAGGTCGACGTTTTAAACTTCTACTGCAT (SEQ ID NO.: 78612) |
| PBP-2a | Penicillin binding protein 2 | Cloxacillin | GCCGGATCCCAAATGTAGTCTTATATAAGGAGGATATTGATG (SEQ ID |
| | | | NO.: 78613); |
| | | | CAGGTCGACGCTTCACTGTTTTGTTATTCATCTATATC (SEQ ID NO.: |
| | | | 78614) |

*antibiotics unavailable commercially

### Example 22

[1606] Overexpression of Genes Encoding Gene Products Required for Proliferation Confers Specific Resistance to Antibiotics which Target the Overexpressed Gene Product

[1607] To demonstrate that cells which overexpress a gene encoding a gene product required for proliferation are specifically resistant to antibiotics which target that gene product, the following experiments were performed. Several identical compound plates were prepared as described above in which different antibiotics were present in different wells. Media containing cells overexpressing different genes were separately dispensed into each one of these plates. Plate incubation and growth measurement were the same as described in Example 21 above. Growth was deemed specific if cells overexpressing one particular gene only gained resistance to antibiotics which target the product of the overexpressed gene but not to other antibiotics which target the products of genes which were not overexpressed.

[1608] As indicated in FIG. 14 overexpression of the fabI gene conferred resistance to triclosan, which acts on the gene product of the fabI gene, enoyl-acyl carrier protein reductase. However, overexpression of the fabI gene did not confer resistance to cerulenin, trimethoprim, or actinonin, each of which act on other gene products.

[1609] Similarly, as indicated in FIG. 15 overexpression of the folA gene conferred resistance to trimethoprim, which acts on the gene product of the folA gene, dihydrofolate reductase. However, overexpression of the folA gene did not confer resistance to triclosan, cerulenin, or actinonin, each of which act on other gene products.

[1610] As indicated in FIG. 16 overexpression of the defB gene conferred resistance to actinonin, which acts on the gene product of the defB gene, peptide deformylase. However, overexpression of the defB gene did not confer resistance to cerulenin, trimethoprim, or triclosan, each of which act on other gene products.

[1611] As indicated in FIG. 17 overexpression of the fabF gene conferred resistance to cerulenin, which acts on the gene product of the fabF gene, β keto-acyl carrier protein synthase II. However, overexpression of the fabF gene did not confer resistance to triclosan, trimethoprim, or actinonin, each of which act on other gene products.

[1612] Thus, overexpression of a gene encoding a gene product required for proliferation confers specific resistance to antibiotics which target the overexpressed gene product.

### Example 23

[1613] Selection of a Strain Overexpressing a Gene Encoding a Target Gene Product from a Mixture of Strains Overexpressing Genes Required for Proliferation

[1614] To confirm that a strain expressing the gene product targeted by an antibiotic can be selected from a mixture of strains which each overexpress a different gene required for proliferation, the following experiment was performed. S. aureus strains overexpressing one of nine genes encoding a gene product required for proliferation were constructed as described above. The nine overexpressed genes were fabF, defB, folA, fabI, ileS, fusA, gyrB, murA, rpoB. A mixture of the nine strains was grown wells in a 96 well plate in medium containing various concentrations of inducer and a sufficient concentration of actinonin, cerulenin, triclosan or trimethoprim to inhibit the growth of strains which do not overexpress the targets of these antibiotics.

[1615] Growth was observed in wells containing appropriate inducer concentrations and each one of the four antibiotics (See FIG. 18). The cultures which grew in the presence of one of the antibiotics were analyzed as follows. The cultures were removed from the wells of the plate and single colonies were obtained by plating serial dilutions LB agar plates containing an appropriate antibiotic. Plasmids were isolated from at least 60 individual colonies for each culture and the genes which conferred antibiotic resistance were amplified by performing PCR reactions using vector-specific primers. The PCR products were then sequenced.

[1616] All of the plasmids obtained from the culture which grew in the presence of cerulenin contained the fabF sequence. Similarly, all of the plasmids obtained from clones which grew in the presence of triclosan contained the fabI gene. All of the plasmid obtained from colonies which grew in the presence of actinonin contained the defB gene. In addition, 81% of the plasmids obtained from colonies which grew in the presence of trimethoprim contained the folA gene. Growth conditions could be further optimized to provide 100% recovery of plasmids containing the folA gene.

[1617] These results demonstrate that a strain expressing the gene product targeted by an antibiotic can be selected from a mixture of strains which each overexpress a different gene required for proliferation.

### Example 24

[1618] Identification of Amplification Products Having Distinguishable Lengths

[1619] The following genes were identified as being required for proliferation as previously described in U.S. patent application Ser. No. 09/815,242, filed march 21, 2001, the disclosure of which is incorporated herein by reference in its entirety. Plasmids in which antisense nucleic acids complementary to nucleotide sequences the essential pbpC, secA, ylaO(Bs), yphC(Bs), trpS, polC, fabI, rpsR (Bs), fabF(yjaY), ileS, murC, fmhB, murA (Bs), murF (Bs), ftsZ, tufA, gyrA, rpoB, grlA or folA (dfrA) genes were transcribed from the XylT5 promoter in Staphylococcus aureus.

[1620] Amplification primers were designed which would yield amplification products of the following lengths if the plasmid encoding the corresponding antisense nucleic acid is present in a mixture of nucleic acids:

| | | | |
|---|---|---|---|
| yphC | 260 bp | secA | 267 bp |
| folA | 230 bp | tufA | 243 bp |
| fabI | 220 bp | gyrA | 225 bp |
| trpS | 208 bp | ileS | 215 bp |
| fabF | 189 bp | murF | 203 bp |
| murA | 176 bp | fmhB | 181 bp |
| rpoB | 159 bp | ylaO | 169 bp |
| grlA | 151 bp | pbpC | 156 bp |
| murC | 129 bp | polC | 145 bp |
| rpsR | 109 bp | ftsZ | 117 bp |

[1621] The 5′ primer of each pair was complementary to a nucleotide sequence within the xylT5 promoter while 3′ primer was complementary to a nucleotide sequence within the antisense clone. The 5′ primer of each pair was identical for each amplification reaction. The nucleotide sequence GTTTCTT was appended on the 5′ end of the 3′ primers. One primer in each pair was labeled with either VIC or 6FAM.

[1622] Two sets of ten plasmids containing the antisense nucleic acids complementary to the genes listed in each of the columns above were mixed in equal amounts in 11 tubes except that either the plasmid encoding antisense nucleic acids complementary to a nucleotide sequence in the grlA gene or the plasmid encoding antisense nucleic acids complementary to nucleotide sequences in the fmhB gene were serially diluted two fold in each of the 11 tubes (i.e. the first tube had 100 pg of the grlA plasmid or the fmhB plasmid while the last tube had 0.10 pg of the grlA plasmid or the fmhB plasmid). Amplification reactions were conducted on the mixtures and the amplification products were separated on a 5% NuSieve 3:1 agarose gel (BioWhittaker Molecular Applications Rockland, Me.). The levels of the 151 bp or 181 amplification products for the grlA or fmhB primer respectively were specifically reduced in a stepwise fashion with increasing dilutions while the levels of the undiluted products remained constant. The assay readily detected a 10-fold decrease in template concentration reflected in the amplification products corresponding to the grlA or fmhB plasmids.

[1623] Although this method has been described using examples of antisense nucleic acids to specific essential genes, it will be appreciated that this method can be used with any of the antisense nucleic acids described herein, such as an antisense nucleic acid comprising a nucleotide sequence selected from the group consisting of SEQ ID NOS.: 1-6213, an antisense nucleic acid comprising at least 10, 15, 20, 25, 30, 35, 40, 50, 75, 100, 150, 200, 300, 400, or 500 consecutive nucleotides of a nucleotide sequence selected from the group consisting of SEQ ID NOS.: 1-6213, a nucleic acid complementary to a nucleic acid comprising a nucleotide sequence selected from the group consisting of SEQ ID NOS.: 6214-42397, a nucleic acid complementary to a nucleic acid comprising at least 10, 15, 20, 25, 30, 35, 40, 50, 75, 100, 150, 200, 300, 400, or 500 consecutive nucleotides of a nucleotide sequence selected from the group consisting of SEQ ID NOS.: 6214-42397, a nucleic acid complementary to a nucleic acid which encodes a polypeptide comprising an amino acid sequence selected from the group consisting of SEQ ID NOS.: 42398-78581, a nucleic acid complementary to a nucleic acid which encodes at least 5, 10, 15, 20, 25, 30, 35, 40, 50, 75, 100, or 150 consecutive amino acids of a polypeptide sequence selected from the group consisting of SEQ ID NOS.: 42398-78581, a homologous antisense nucleic acid, an antisense nucleic acid comprising at least 10, 15, 20, 25, 30, 35, 40, 50, 75, 100, 150, 200, 300, 400, or 500 consecutive nucleotides of a homologous nucleic acid, a nucleic acid complementary to a homologous coding nucleic acid, a nucleic acid complementary to at least 10, 15, 20, 25, 30, 35, 40, 50, 75, 100, 150, 200, 300, 400, or 500 consecutive nucleotides of a homologous coding nucleic acid, a nucleic acid complementary to a nucleic acid which encodes a homologous polypeptide, or a nucleic acid complementary to a nucleic acid which encodes at least 5, 10, 15, 20, 25, 30, 35, 40, 50, 75, 100, or 150 consecutive amino acids of a homologous polypeptide. It will also be appreciated that promoters other than XlyT5 can be used to express the gene products described herein. For example, a number of promoters useful for nucleic acid expression (including antisense nucleic acid expression) in Enterococcus faecalis, Staphylococcus areus as well as other Gram positive organisms are described in U.S. patent application Ser. No. 10/032,393, filed Dec. 21, 2001, the disclosure of which is incorporated herein by reference in its entirety.

[1624] Additionally, the above methods can be used with any organism including Acinetobacter baumannii, Anaplasma marginale, Aspergillus fumigatus, Bacillus anthracis, Bacteroides fragilis, Bordetella pertussis, Borrelia burgdorferi, Burkholderia cepacia, Burkholderia fungorum, Burkholderia mallei, Campylobacter jejuni, Candida albicans, Candida glabrata (also called Torulopsis glabrata), Candida tropicalis, Candida parapsilosis, Candida guilliermondii, Candida krusei, Candida kefyr (also called Candida pseudotropicalis), Candida dubliniensis, Chlamydia pneumoniae, Chlamydia trachomatis, Clostridium acetobutylicum, Clostridium botulinum, Clostridium difficile, Clostridium perfringens, Coccidioides immitis, Corynebacterium diptheriae, Cryptococcus neoformans, Enterobacter cloacae, Enterococcus faecalis, Enterococcus faecium, Escherichia coli, Haemophilus influenzae, Helicobacter pylori, Histoplasma capsulatum, Klebsiella pneumoniae, Legionella pneumophila, Listeria monocytogenes, Moraxella catarrhalis, Mycobacterium avium, Mycobacterium bovis, Mycobacterium leprae, Mycobacterium tuberculosis, Mycoplasma genitalium, Mycoplasma pneumoniae, Neisseria gonorrhoeae, Neisseria meningitidis, Nocardia asteroides, Pasteurella haemolytica, Pasteurella multocida, Pneumocystis carinii, Proteus mirabilis, Proteus vulgaris, Pseudomonas aeruginosa, Pseudomonas putida, Pseudomonas syringae, Salmonella bongori, Salmonella cholerasuis, Salmonella enterica, Salmonella paratyphi, Salmonella typhi, Salmonella typhimurium, Shigella boydii, Shigella dysenteriae, Shigella flexneri, Shigella sonnei, Staphylococcus aureus, Staphylococcus epidermidis, Staphylococcus haemolyticus, Streptococcus pneumoniae, Streptococcus mutans, Streptococcus pyogenes, Treponema pallidum, Ureaplasma urealyticum, Vibrio cholerae, Vibrio parahaemolyticus, Vibrio vulnificans, Yersinia enterocolitica, Yersinia pestis or any species falling within the genera of any of the above species.

### Example 25

[1625] Selective Disappearance of Amplification Products Corresponding to Strains Underexpressing a Gene Product on which a Compound which Inhibits Proliferation Acts

[1626] Strains of Staphylococcus aureus containing plasmids encoding antisense nucleic acids complementary to nucleotide sequences within the yphC, folA, fabI, trpS, fabF, murA, rpoB, grlA, murC or rpsR genes (described in Example 24 above) were mixed together in identical cultures such that the number of cells of each strain in the culture was identical. Each of the cultures containing the ten strains was contacted with one of the following antibiotics at one of the following concentrations:

[1627] spectinomycin-2.5, 5.0 ug/ml

[1628] mupriocin-4.3, 8.6, 17.2 ug/ml.

[1629] cerulenin-4.5, 9.0, 18.0 ug/ml

[1630] Spectinomycin acts on the product of the rpsR gene, mupriocin acts on the product of the ileS gene and cerulenin acts on the product of the FabF gene. The middle concentration for each antibiotic is its IC50.

[1631] The culture containing the ten strains were grown in rich medium (L-Broth; for antisense LB+chloroamphenicol to maintain antisense plasmid) until the cells reached early log phase then contacted with of one of the above-stated compounds at one of the concentrations listed above (preferably near IC50). The cultures were grown for a sufficient length of time to permit the compounds to specifically inhibit the growth of strains underexpressing their targets. Preferably the cultures were grown at least 16 hr, more preferably between 24 and 48 hrs. It is desirable to avoid allowing the culture to grow for time periods which might places selective pressure on the strains which could lead to false positives.

[1632] The cells were harvested by centrifugation and plasmid DNA was isolated from the cultures. PCR amplifications were performed as described in Example 24. Amplification products were run on NuSieve agarose gels as described above. The amounts of the amplification products corresponding to each antisense nucleic acid were determined and compared to those in a control culture which was not contacted with the drug or to the amounts of the amplification products corresponding to the other antisense nucleic acids which were not complementary to nucleotide sequences in the genes encoding the gene products on which the compounds act. In each case, only the amplification product corresponding to the target on which the antibiotic acts was not detectable on the gel.

[1633] It is desirable, in embodiments in which the level or activity of gene products is regulated by transcribing antisense nucleic acids complementary to gene products required for proliferation or by replacing the native promoters of such genes with regulatable promoters, to perform dose-response curve for the inducer used to induce transcription of the antisense nucleic acids or induce transcription from the regulatable promoter. In such embodiments, it is desirable to use the lowest concentration of inducer which provides optimal transcription levels for detecting the effects of a particular test compound while interfering as little as possible with the growth of strains which do not overexpress or underexpress the target on which the compound acts. It also desirable contact the cultures with varying amounts of test compounds to determine the optimal amounts for obtaining differential growth of strains which overexpress or underexpress the targets on which the compounds act. Preferably, if the strains overexpress gene products required for proliferation, the level of the compound is preferably about IC₉₀ or above. Preferably, if the strains underexpress gene products required for proliferation, the level of the compound is preferably about IC₅₀ or below.

[1634] It will be appreciated that, if desired, the amplification products may be detected using the dyes described above. It will also be appreciated that amplification products may be detected using any desired amplification method including RT-PCR and PCR. Although this method has been described using examples of antisense nucleic acids to specific essential genes, it will be appreciated that this method can be used with any of the antisense nucleic acids described herein, such as an antisense nucleic acid comprising a nucleotide sequence selected from the group consisting of SEQ ID NOS.: 1-6213, a nucleic acid sequence complementary to a nucleic acid comprising a nucleotide sequence selected from the group consisting of SEQ ID NOS.: 6214-42397, a nucleic acid sequence complementary to a nucleic acid sequence which encodes a polypeptide comprising an amino acid sequence selected from the group consisting of SEQ ID NOS.: 42398-78581, a homologous antisense nucleic acid, a nucleic acid sequence complementary to a homologous coding nucleic acid, or a nucleic acid complementary to a nucleic acid which encodes a homologous polypeptide. It will also be appreciated that promoters other than XlyT5 can be used to express the gene products described herein. For example, a number of promoters useful for nucleic acid expression (including antisense nucleic acid expression) in Enterococcus faecalis, Staphylococcus areus as well as other Gram positive organisms are described in U.S. patent application Ser. No. 10/032,393, filed Dec. 21, 2001, the disclosure of which is incorporated herein by reference in its entirety.

[1635] Additionally, the above methods can be used with any organism including Acinetobacter baumannii, Anaplasma marginale, Aspergillus fumigatus, Bacillus anthracis, Bacteroides fragilis, Bordetella pertussis, Borrelia burgdorferi, Burkholderia cepacia, Burkholderia fungorum, Burkholderia mallei, Campylobacter jejuni, Candida albicans, Candida glabrata (also called Torulopsis glabrata), Candida tropicalis, Candida parapsilosis, Candida guilliermondii, Candida krusei, Candida kefyr (also called Candida pseudotropicalis), Candida dubliniensis, Chlamydia pneumoniae, Chlamydia trachomatis, Clostridium acetobutylicum, Clostridium botulinum, Clostridium difficile, Clostridium perfringens, Coccidioides immitis, Corynebacterium diptheriae, Cryptococcus neoformans, Enterobacter cloacae, Enterococcus faecalis, Enterococcus faecium, Escherichia coli, Haemophilus influenzae, Helicobacter pylori, Histoplasma capsulatum, Klebsiella pneumoniae, Legionella pneumophila, Listeria monocytogenes, Moraxella catarrhalis, Mycobacterium avium, Mycobacterium bovis, Mycobacterium leprae, Mycobacterium tuberculosis, Mycoplasma genitalium, Mycoplasma pneumoniae, Neisseria gonorrhoeae, Neisseria meningitidis, Nocardia asteroides, Pasteurella haemolytica, Pasteurella multocida, Pneumocystis carinii, Proteus mirabilis, Proteus vulgaris, Pseudomonas aeruginosa, Pseudomonas putida, Pseudomonas syringae, Salmonella bongori, Salmonella cholerasuis, Salmonella enterica, Salmonella paratyphi, Salmonella typhi, Salmonella typhimurium, Shigella boydii, Shigella dysenteriae, Shigella flexneri, Shigella sonnei, Staphylococcus aureus, Staphylococcus epidermidis, Staphylococcus haemolyticus, Streptococcus pneumoniae, Streptococcus mutans, Streptococcus pyogenes, Treponema pallidum, Ureaplasma urealyticum, Vibrio cholerae, Vibrio parahaemolyticus, Vibrio vulnificans, Yersinia enterocolitica, Yersinia pestis or any species falling within the genera of any of the above species.

### Example 26

[1636] Use of Identified Nucleic Acid Sequences as Probes

[1637] The sequences from Escherichia coli, Staphylococcus aureus, Enterococcus faecalis, Klebsiella pneumoniae, Pseudomonas aeruginosa, Salmonella typhimurium, Acinetobacter baumannii, Bacillus anthracis, Bacteroides fragilis, Bordetella pertussis, Borrelia burgdorferi, Burkholderia cepacia, Burkholderia fungorum, Burkholderia mallei, Campylobacter jejuni, Chlamydia pneumoniae, Chlamydia trachomatis, Clostridium acetobutylicum, Clostridium botulinum, Clostridium difficile, Corynebacterium diptheriae, Enterobacter cloacae, Enterococcus faecium, Haemophilus influenzae, Helicobacter pylori, Legionella pneumophila, Listeria monocytogenes, Moraxella catarrhalis, Mycobacterium avium, Mycobacterium bovis, Mycobacterium leprae, Mycobacterium tuberculosis, Mycoplasma genitalium, Mycoplasma pneumoniae, Neisseria gonorrhoeae, Neisseria meningitidis, Pasteurella multocida, Proteus mirabilis, Pseudomonas putida, Pseudomonas syringae, Salmonella paratyphi, Salmonella typhi, Staphylococcus epidermidis, Staphylococcus haemolyticus, Streptococcus mutans, Streptococcus pneumoniae, Streptococcus pyogenes, Treponema pallidum, Ureaplasma urealyticum, Vibrio cholerae or Yersinia pestis described herein, homologous coding nucleic acids, or homologous antisense nucleic acids can be used as probes to obtain the sequence of additional genes of interest from a second cell or microorganism. For example, probes to genes encoding potential bacterial target proteins may be hybridized to nucleic acids from other organisms including other bacteria and higher organisms, to identify homologous sequences in these other organisms. For example, the identified sequences from Escherichia coli, Staphylococcus aureus, Enterococcus faecalis, Klebsiella pneumoniae, Pseudomonas aeruginosa, Salmonella typhimurium, Acinetobacter baumannii, Bacillus anthracis, Bacteroides fragilis, Bordetella pertussis, Borrelia burgdorferi, Burkholderia cepacia, Burkholderia fungorum, Burkholderia mallei, Campylobacter jejuni, Chlamydia pneumoniae, Chlamydia trachomatis, Clostridium acetobutylicum, Clostridium botulinum, Clostridium difficile, Corynebacterium diptheriae, Enterobacter cloacae, Enterococcus faecium, Haemophilus influenzae, Helicobacter pylori, Legionella pneumophila, Listeria monocytogenes, Moraxella catarrhalis, Mycobacterium avium, Mycobacterium bovis, Mycobacterium leprae, Mycobacterium tuberculosis, Mycoplasma genitalium, Mycoplasma pneumoniae, Neisseria gonorrhoeae, Neisseria meningitidis, Pasteurella multocida, Proteus mirabilis, Pseudomonas putida, Pseudomonas syringae, Salmonella paratyphi, Salmonella typhi, Staphylococcus epidermidis, Staphylococcus haemolyticus, Streptococcus mutans, Streptococcus pneumoniae, Streptococcus pyogenes, Treponema pallidum, Ureaplasma urealyticum, Vibrio cholerae or Yersinia pestis, homologous coding nucleic acids, or homologous antisense nucleic acids may be used to identify homologous sequences in Acinetobacter baumannii, Anaplasma marginale, Aspergillus fumigatus, Bacillus anthracis, Bacteroides fragilis, Bordetella pertussis, Borrelia burgdorferi, Burkholderia cepacia, Burkholderia fungorum, Burkholderia mallei, Campylobacter jejuni, Candida albicans, Candida glabrata (also called Torulopsis glabrata), Candida tropicalis, Candida parapsilosis, Candida guilliermondii, Candida krusei, Candida kefyr (also called Candida pseudotropicalis), Candida dubliniensis, Chlamydia pneumoniae, Chlamydia trachomatis, Clostridium acetobutylicum, Clostridium botulinum, Clostridium difficile, Clostridium perfringens, Coccidioides immitis, Corynebacterium diptheriae, Cryptococcus neoformans, Enterobacter cloacae, Enterococcus faecalis, Enterococcus faecium, Escherichia coli, Haemophilus influenzae, Helicobacter pylori, Histoplasma capsulatum, Klebsiella pneumoniae, Legionella pneumophila, Listeria monocytogenes, Moraxella catarrhalis, Mycobacterium avium, Mycobacterium bovis, Mycobacterium leprae, Mycobacterium tuberculosis, Mycoplasma genitalium, Mycoplasma pneumoniae, Neisseria gonorrhoeae, Neisseria meningitidis, Nocardia asteroides, Pasteurella haemolytica, Pasteurella multocida, Pneumocystis carinii, Proteus mirabilis, Proteus vulgaris, Pseudomonas aeruginosa, Pseudomonas putida, Pseudomonas syringae, Salmonella bongori, Salmonella cholerasuis, Salmonella enterica, Salmonella paratyphi, Salmonella typhi, Salmonella typhimurium, Shigella boydii, Shigella dysenteriae, Shigella flexneri, Shigella sonnei, Staphylococcus aureus, Staphylococcus epidermidis, Staphylococcus haemolyticus, Streptococcus pneumoniae, Streptococcus mutans, Streptococcus pyogenes, Treponema pallidum, Ureaplasma urealyticum, Vibrio cholerae, Vibrio parahaemolyticus, Vibrio vulnificans, Yersinia enterocolitica, Yersinia pestis or any species falling within the genera of any of the above species. In some embodiments of the present invention, the nucleic acids from Escherichia coli, Staphylococcus aureus, Enterococcus faecalis, Klebsiella pneumoniae, Pseudomonas aeruginosa, Salmonella typhimurium, Acinetobacter baumannii, Bacillus anthracis, Bacteroides fragilis, Bordetella pertussis, Borrelia burgdorferi, Burkholderia cepacia, Burkholderia fungorum, Burkholderia mallei, Campylobacter jejuni, Chlamydia pneumoniae, Chlamydia trachomatis, Clostridium acetobutylicum, Clostridium botulinum, Clostridium difficile, Corynebacterium diptheriae, Enterobacter cloacae, Enterococcus faecium, Haemophilus influenzae, Helicobacter pylori, Legionella pneumophila, Listeria monocytogenes, Moraxella catarrhalis, Mycobacterium avium, Mycobacterium bovis, Mycobacterium leprae, Mycobacterium tuberculosis, Mycoplasma genitalium, Mycoplasma pneumoniae, Neisseria gonorrhoeae, Neisseria meningitidis, Pasteurella multocida, Proteus mirabilis, Pseudomonas putida, Pseudomonas syringae, Salmonella paratyphi, Salmonella typhi, Staphylococcus epidermidis, Staphylococcus haemolyticus, Streptococcus mutans, Streptococcus pneumoniae, Streptococcus pyogenes, Treponema pallidum, Ureaplasma urealyticum, Vibrio cholerae or Yersinia pestis described herein, homologous coding nucleic acids, or homologous antisense nucleic acids may be used to identify homologous nucleic acids from a heterologous organism other than E. coli.

[1638] Hybridization between the nucleic acids from Escherichia coli, Staphylococcus aureus, Enterococcus faecalis, Klebsiella pneumoniae, Pseudomonas aeruginosa, Salmonella typhimurium, Acinetobacter baumannii, Bacillus anthracis, Bacteroides fragilis, Bordetella pertussis, Borrelia burgdorferi, Burkholderia cepacia, Burkholderia fungorum, Burkholderia mallei, Campylobacter jejuni, Chlamydia pneumoniae, Chlamydia trachomatis, Clostridium acetobutylicum, Clostridium botulinum, Clostridium difficile, Corynebacterium diptheriae, Enterobacter cloacae, Enterococcus faecium, Haemophilus influenzae, Helicobacter pylori, Legionella pneumophila, Listeria monocytogenes, Moraxella catarrhalis, Mycobacterium avium, Mycobacterium bovis, Mycobacterium leprae, Mycobacterium tuberculosis, Mycoplasma genitalium, Mycoplasma pneumoniae, Neisseria gonorrhoeae, Neisseria meningitidis, Pasteurella multocida, Proteus mirabilis, Pseudomonas putida, Pseudomonas syringae, Salmonella paratyphi, Salmonella typhi, Staphylococcus epidermidis, Staphylococcus haemolyticus, Streptococcus mutans, Streptococcus pneumoniae, Streptococcus pyogenes, Treponema pallidum, Ureaplasma urealyticum, Vibrio cholerae or Yersinia pestis described herein, homologous coding nucleic acids, or homologous antisense nucleic acids and nucleic acids from humans might indicate that the protein encoded by the gene to which the probe corresponds is found in humans and therefore not necessarily an optimal drug target. Alternatively, the gene can be conserved only in bacteria and therefore would be a good drug target for a broad spectrum antibiotic or antimicrobial. These probes can also be used in a known manner to isolate homologous nucleic acids from Staphylococcus, Salmonella, Klebsiella, Pseudomonas, Enterococcus or other cells or microorganisms, e.g. by screening a genomic or cDNA library.

[1639] Probes derived from the nucleic acid sequences from Escherichia coli, Staphylococcus aureus, Enterococcus faecalis, Klebsiella pneumoniae, Pseudomonas aeruginosa, Salmonella typhimurium, Acinetobacter baumannii, Bacillus anthracis, Bacteroides fragilis, Bordetella pertussis, Borrelia burgdorferi, Burkholderia cepacia, Burkholderia fungorum, Burkholderia mallei, Campylobacter jejuni, Chlamydia pneumoniae, Chlamydia trachomatis, Clostridium acetobutylicum, Clostridium botulinum, Clostridium difficile, Corynebacterium diptheriae, Enterobacter cloacae, Enterococcus faecium, Haemophilus influenzae, Helicobacter pylori, Legionella pneumophila, Listeria monocytogenes, Moraxella catarrhalis, Mycobacterium avium, Mycobacterium bovis, Mycobacterium leprae, Mycobacterium tuberculosis, Mycoplasma genitalium, Mycoplasma pneumoniae, Neisseria gonorrhoeae, Neisseria meningitidis, Pasteurella multocida, Proteus mirabilis, Pseudomonas putida, Pseudomonas syringae, Salmonella paratyphi, Salmonella typhi, Staphylococcus epidermidis, Staphylococcus haemolyticus, Streptococcus mutans, Streptococcus pneumoniae, Streptococcus pyogenes, Treponema pallidum, Ureaplasma urealyticum, Vibrio cholerae or Yersinia pestis described herein, homologous coding nucleic acids, or homologous antisense nucleic acids, or portions thereof, can be labeled with detectable labels familiar to those skilled in the art, including radioisotopes and non-radioactive labels, to provide a detectable probe. The detectable probe can be single stranded or double stranded and can be made using techniques known in the art, including in vitro transcription, nick translation, or kinase reactions. A nucleic acid sample containing a sequence capable of hybridizing to the labeled probe is contacted with the labeled probe. If the nucleic acid in the sample is double stranded, it can be denatured prior to contacting the probe. In some applications, the nucleic acid sample can be immobilized on a surface such as a nitrocellulose or nylon membrane. The nucleic acid sample can comprise nucleic acids obtained from a variety of sources, including genomic DNA, cDNA libraries, RNA, or tissue samples.

[1640] Procedures used to detect the presence of nucleic acids capable of hybridizing to the detectable probe include well known techniques such as Southern blotting, Northern blotting, dot blotting, colony hybridization, and plaque hybridization. In some applications, the nucleic acid capable of hybridizing to the labeled probe can be cloned into vectors such as expression vectors, sequencing vectors, or in vitro transcription vectors to facilitate the characterization and expression of the hybridizing nucleic acids in the sample. For example, such techniques can be used to isolate, purify and clone sequences from a genomic library, made from a variety of bacterial species, which are capable of hybridizing to probes made from the sequences identified as decribed herein.

### Example 27

[1641] Preparation of PCR Primers and Amplification of DNA

[1642] The identified Escherichia coli, Staphylococcus aureus, Enterococcus faecalis, Klebsiella pneumoniae, Pseudomonas aeruginosa, Salmonella typhimurium, Acinetobacter baumannii, Bacillus anthracis, Bacteroides fragilis, Bordetella pertussis, Borrelia burgdorferi, Burkholderia cepacia, Burkholderia fungorum, Burkholderia mallei, Campylobacter jejuni, Chlamydia pneumoniae, Chlamydia trachomatis, Clostridium acetobutylicum, Clostridium botulinum, Clostridium difficile, Corynebacterium diptheriae, Enterobacter cloacae, Enterococcus faecium, Haemophilus influenzae, Helicobacter pylori, Legionella pneumophila, Listeria monocytogenes, Moraxella catarrhalis, Mycobacterium avium, Mycobacterium bovis, Mycobacterium leprae, Mycobacterium tuberculosis, Mycoplasma genitalium, Mycoplasma pneumoniae, Neisseria gonorrhoeae, Neisseria meningitidis, Pasteurella multocida, Proteus mirabilis, Pseudomonas putida, Pseudomonas syringae, Salmonella paratyphi, Salmonella typhi, Staphylococcus epidermidis, Staphylococcus haemolyticus, Streptococcus mutans, Streptococcus pneumoniae, Streptococcus pyogenes, Treponema pallidum, Ureaplasma urealyticum, Vibrio cholerae or Yersinia pestis genes corresponding directly to or located within the operon of nucleic acid sequences required for proliferation, homologous coding nucleic acids, or homologous antisense nucleic acids or portions thereof can be used to prepare PCR primers for a variety of applications, including the identification or isolation of homologous sequences from other species. For example, the Escherichia coli, Staphylococcus aureus, Enterococcus faecalis, Klebsiella pneumoniae, Pseudomonas aeruginosa, Salmonella typhimurium, Acinetobacter baumannii, Bacillus anthracis, Bacteroides fragilis, Bordetella pertussis, Borrelia burgdorferi, Burkholderia cepacia, Burkholderia fungorum, Burkholderia mallei, Campylobacter jejuni, Chlamydia pneumoniae, Chlamydia trachomatis, Clostridium acetobutylicum, Clostridium botulinum, Clostridium difficile, Corynebacterium diptheriae, Enterobacter cloacae, Enterococcus faecium, Haemophilus influenzae, Helicobacter pylori, Legionella pneumophila, Listeria monocytogenes, Moraxella catarrhalis, Mycobacterium avium, Mycobacterium bovis, Mycobacterium leprae, Mycobacterium tuberculosis, Mycoplasma genitalium, Mycoplasma pneumoniae, Neisseria gonorrhoeae, Neisseria meningitidis, Pasteurella multocida, Proteus mirabilis, Pseudomonas putida, Pseudomonas syringae, Salmonella paratyphi, Salmonella typhi, Staphylococcus epidermidis, Staphylococcus haemolyticus, Streptococcus mutans, Streptococcus pneumoniae, Streptococcus pyogenes, Treponema pallidum, Ureaplasma urealyticum, Vibrio cholerae or Yersinia pestis genes may be used to prepare PCR primers to identify or isolate homologous sequences from Acinetobacter baumannii, Anaplasma marginale, Aspergillus fumigatus, Bacillus anthracis, Bacteroides fragilis, Bordetella pertussis, Borrelia burgdorferi, Burkholderia cepacia, Burkholderia fungorum, Burkholderia mallei, Campylobacter jejuni, Candida albicans, Candida glabrata (also called Torulopsis glabrata), Candida tropicalis, Candida parapsilosis, Candida guilliermondii, Candida krusei, Candida kefyr (also called Candida pseudotropicalis), Candida dubliniensis, Chlamydia pneumoniae, Chlamydia trachomatis, Clostridium acetobutylicum, Clostridium botulinum, Clostridium difficile, Clostridium perfringens, Coccidioides immitis, Corynebacterium diptheriae, Cryptococcus neoformans, Enterobacter cloacae, Enterococcus faecalis, Enterococcus faecium, Escherichia coli, Haemophilus influenzae, Helicobacter pylori, Histoplasma capsulatum, Klebsiella pneumoniae, Legionella pneumophila, Listeria monocytogenes, Moraxella catarrhalis, Mycobacterium avium, Mycobacterium bovis, Mycobacterium leprae, Mycobacterium tuberculosis, Mycoplasma genitalium, Mycoplasma pneumoniae, Neisseria gonorrhoeae, Neisseria meningitidis, Nocardia asteroides, Pasteurella haemolytica, Pasteurella multocida, Pneumocystis carinii, Proteus mirabilis, Proteus vulgaris, Pseudomonas aeruginosa, Pseudomonas putida, Pseudomonas syringae, Salmonella bongori, Salmonella cholerasuis, Salmonella enterica, Salmonella paratyphi, Salmonella typhi, Salmonella typhimurium, Shigella boydii, Shigella dysenteriae, Shigella flexneri, Shigella sonnei, Staphylococcus aureus, Staphylococcus epidermidis, Staphylococcus haemolyticus, Streptococcus pneumoniae, Streptococcus mutans, Streptococcus pyogenes, Treponema pallidum, Ureaplasma urealyticum, Vibrio cholerae, Vibrio parahaemolyticus, Vibrio vulnificans, Yersinia enterocolitica, Yersinia pestis or any species falling within the genera of any of the above species. In some embodiments of the present invention, the PCR primers may be used to identify or isolate homologous nucleic acids from an organism other than E. coli.

[1643] The identified or isolated nucleic acids obtained using the PCR primers may contain part or all of the homologous nucleic acids. Because homologous nucleic acids are related but not identical in sequence, those skilled in the art will often employ degenerate sequence PCR primers. Such degenerate sequence primers are designed based on sequence regions that are either known to be conserved or suspected to be conserved such as conserved coding regions. The successful production of a PCR product using degenerate probes generated from the sequences identified herein would indicate the presence of a homologous gene sequence in the species being screened. The PCR primers are at least 10 nucleotides, and preferably at least 20 nucleotides in length. More preferably, the PCR primers are at least 20-30 nucleotides in length. In some embodiments, the PCR primers can be more than 30 nucleotides in length. It is preferred that the primer pairs have approximately the same G/C ratio, so that melting temperatures are approximately the same. A variety of PCR techniques are familiar to those skilled in the art. For a review of PCR technology, see Molecular Cloning to Genetic Engineering White, B. A. Ed. in Methods in Molecular Biology 67: Humana Press, Totowa 1997. When the entire coding sequence of the target gene is known, the 5′ and 3′ regions of the target gene can be used as the sequence source for PCR probe generation. In each of these PCR procedures, PCR primers on either side of the nucleic acid sequences to be amplified are added to a suitably prepared nucleic acid sample along with dNTPs and a thermostable polymerase such as Taq polymerase, Pfu polymerase, or Vent polymerase. The nucleic acid in the sample is denatured and the PCR primers are specifically hybridized to complementary nucleic acid sequences in the sample. The hybridized primers are extended. Thereafter, another cycle of denaturation, hybridization, and extension is initiated. The cycles are repeated multiple times to produce an amplified fragment containing the nucleic acid sequence between the primer sites.

### Example 28

[1644] Inverse PCR

[1645] The technique of inverse polymerase chain reaction can be used to extend the known nucleic acid sequence identified as described herein. The inverse PCR reaction is described generally by Ochman et al., in Ch. 10 of PCR Technology: Principles and Applications for DNA Amplification, (Henry A. Erlich, Ed.) W. H. Freeman and Co. (1992). Traditional PCR requires two primers that are used to prime the synthesis of complementary strands of DNA. In inverse PCR, only a core sequence need be known.

[1646] Using the sequences identified as relevant from the techniques taught in Examples 10 and 11 and applied to other species of bacteria, a subset of nucleic sequences are identified that correspond to genes or operons that are required for bacterial proliferation. In species for which a genome sequence is not known, the technique of inverse PCR provides a method for obtaining the gene in order to determine the sequence or to place the probe sequences in full context to the target sequence to which the identified nucleic acid sequence binds.

[1647] To practice this technique, the genome of the target organism is digested with an appropriate restriction enzyme so as to create fragments of nucleic acid that contain the identified sequence as well as unknown sequences that flank the identified sequence. These fragments are then circularized and become the template for the PCR reaction. PCR primers are designed in accordance with the teachings of Example 27 and directed to the ends of the identified sequence.. The primers direct nucleic acid synthesis away from the known sequence and toward the unknown sequence contained within the circularized template. After the PCR reaction is complete, the resulting PCR products can be sequenced so as to extend the sequence of the identified gene past the core sequence of the identified exogenous nucleic acid sequence identified. In this manner, the full sequence of each novel gene can be identified. Additionally the sequences of adjacent coding and noncoding regions can be identified.

### Example 29

[1648] Identification of Genes Required for Escherichia coli Proliferation

[1649] Genes required for proliferation in Escherichia coli are identified according to the methods described above. For example, promoters and vectors described herein can be used to identify essential genes described herein.

### Example 30

[1650] Identification of Genes Required for Staphylococcus aureus Proliferation

[1651] Genes required for proliferation in Staphylococcus aureus are identified according to the methods described above. For example, promoters and vectors described herein can be used to identify essential genes described herein.

### Example 31

[1652] Identification of Genes Required for Enterococcus faecalis Proliferation Genes required for proliferation in Enterococcus faecalis are identified according to the methods described above. For example, promoters and vectors described herein can be used to identify essential genes described herein.

### Example 32

[1653] Identification of Genes Required for Klebsiella pneumoniae Proliferation Genes required for proliferation in Klebsiella pneumoniae are identified according to the methods described above. For example, promoters and vectors described herein can be used to identify essential genes described herein.

### Example 33

[1654] Identification of Genes Required for Pseudomonas aeruginosa Proliferation

[1655] Genes required for proliferation in Pseudomonas aeruginosa are identified according to the methods described above. For example, promoters and vectors described herein can be used to identify essential genes described herein.

### Example 34

[1656] Identification of Genes Required for Salmonella typhimurium Proliferation

[1657] Genes required for proliferation in Salmonella typhimurium are identified according to the methods described above. For example, promoters and vectors described herein can be used to identify essential genes described herein.

### Example 35

[1658] Identification of Genes Required for Acinetobacter baumannii Proliferation Genes required for proliferation in Acinetobacter baumannii are identified according to the methods described above. For example, promoters and vectors described herein can be used to identify essential genes described herein.

### Example 36

[1659] Identification of Genes Required for Bacillus anthracis Proliferation

[1660] Genes required for proliferation in Bacillus anthracis are identified according to the methods described above. For example, promoters and vectors described herein can be used to identify essential genes described herein.

### Example 37

[1661] Identification of Genes Required for Bordetella pertussis Proliferation

[1662] Genes required for proliferation in Bordetella pertussis are identified according to the methods described above. For example, promoters and vectors described herein can be used to identify essential genes described herein.

### Example 38

[1663] Identification of Genes Required for Borrelia burgdorferi Proliferation

[1664] Genes required for proliferation in Borrelia burgdorferi are identified according to the methods described above. For example, promoters and vectors described herein can be used to identify essential genes described herein.

### Example 39

[1665] Identification of Genes Required for Burkholderia cepacia Proliferation Genes required for proliferation in Burkholderia cepacia are identified according to the methods described above. For example, promoters and vectors described herein can be used to identify essential genes described herein.

### Example 40

[1666] Identification of Genes Required for Burkholderia fungorum Proliferation

[1667] Genes required for proliferation in Burkholderia fungorum are identified according to the methods described above. For example, promoters and vectors described herein can be used to identify essential genes described herein.

### Example 41

[1668] Identification of Genes Required for Burkholderia mallei Proliferation

[1669] Genes required for proliferation in Burkholderia mallei are identified according to the methods described above. For example, promoters and vectors described herein can be used to identify essential genes described herein.

### Example 42

[1670] Identification of Genes Required for Campylobacter jejuni Proliferation

[1671] Genes required for proliferation in Campylobacter jejuni are identified according to the methods described above. For example, promoters and vectors described herein can be used to identify essential genes described herein.

### Example 43

[1672] Identification of Genes Required for Chlamydia pneumoniae Proliferation

[1673] Genes required for proliferation in Chlamydia pneumoniae are identified according to the methods described above. For example, promoters and vectors described herein can be used to identify essential genes described herein.

### Example 44

[1674] Identification of Genes Required for Chlamydia trachomatis Proliferation

[1675] Genes required for proliferation in Chlamydia trachomatis are identified according to the methods described above. For example, promoters and vectors described herein can be used to identify essential genes described herein.

### Example 45

[1676] Identification of Genes Required for Clostridium acetobutylicum Proliferation

[1677] Genes required for proliferation in Clostridium acetobutylicum are identified according to the methods described above. For example, promoters and vectors described herein can be used to identify essential genes described herein.

### Example 46

[1678] Identification of Genes Required for Clostridium botulinum Proliferation

[1679] Genes required for proliferation in Clostridium botulinum are identified according to the methods described above. For example, promoters and vectors described herein can be used to identify essential genes described herein.

### Example 47

[1680] Identification of Genes Required for Clostridium difficile Proliferation Genes required for proliferation in Clostridium difficile are identified according to the methods described above. For example, promoters and vectors described herein can be used to identify essential genes described herein.

### Example 48

[1681] Identification of Genes Required for Corynebacterium diptheriae Proliferation

[1682] Genes required for proliferation in Corynebacterium diptheriae are identified according to the methods described above. For example, promoters and vectors described herein can be used to identify essential genes described herein.

### Example 49

[1683] Identification of Genes Required for Enterobacter cloacae Proliferation

[1684] Genes required for proliferation in Enterobacter cloacae are identified according to the methods described above. For example, promoters and vectors described herein can be used to identify essential genes described herein.

### Example 50

[1685] Identification of Genes Required for Enterococcus faecium Proliferation

[1686] Genes required for proliferation in Enterococcus faecium are identified according to the methods described above. For example, promoters and vectors described herein can be used to identify essential genes described herein.

### Example 51

[1687] Identification of Genes Required for Haemophilus influenzae Proliferation

[1688] Genes required for proliferation in Haemophilus influenzae are identified according to the methods described above. For example, promoters and vectors described herein can be used to identify essential genes described herein.

### Example 52

[1689] Identification of Genes Required for Helicobacter pylori Proliferation

[1690] Genes required for proliferation in Helicobacter pylori are identified according to the methods described above. For example, promoters and vectors described herein can be used to identify essential genes described herein.

### Example 53

[1691] Identification of Genes Required for Legionella pneumophila Proliferation

[1692] Genes required for proliferation in Legionella pneumophila are identified according to the methods described above. For example, promoters and vectors described herein can be used to identify essential genes described herein.

### Example 54

[1693] Identification of Genes Required for Listeria monocytogenes Proliferation

[1694] Genes required for proliferation in Listeria monocytogenes are identified according to the methods described above. For example, promoters and vectors described herein can be used to identify essential genes described herein.

### Example 55

[1695] Identification of Genes Required for Moraxella catarrhalis Proliferation

[1696] Genes required for proliferation in Moraxella catarrhalis are identified according to the methods described above. For example, promoters and vectors described herein can be used to identify essential genes described herein.

### Example 56

[1697] Identification of Genes Required for Mycobacterium avium Proliferation

[1698] Genes required for proliferation in Mycobacterium avium are identified according to the methods described above. For example, promoters and vectors described herein can be used to identify essential genes described herein.

### Example 57

[1699] Identification of Genes Required for Mycobacterium bovis Proliferation

[1700] Genes required for proliferation in Mycobacterium bovis are identified according to the methods described above. For example, promoters and vectors described herein can be used to identify essential genes described herein.

### Example 58

[1701] Identification of Genes Required for Mycobacterium leprae Proliferation Genes required for proliferation in Mycobacterium leprae are identified according to the methods described above. For example, promoters and vectors described herein can be used to identify essential genes described herein.

### Example 59

[1702] Identification of Genes Required for Mycobacterium tuberculosis Proliferation

[1703] Genes required for proliferation in Mycobacterium tuberculosis are identified according to the methods described above. For example, promoters and vectors described herein can be used to identify essential genes described herein.

### Example 60

[1704] Identification of Genes Required for Mycoplasma genitalium Proliferation

[1705] Genes required for proliferation in Mycoplasma genitalium are identified according to the methods described above. For example, promoters and vectors described herein can be used to identify essential genes described herein.

### Example 61

[1706] Identification of Genes Required for Mycoplasma pneumoniae Proliferation

[1707] Genes required for proliferation in Mycoplasma pneumoniae are identified according to the methods described above. For example, promoters and vectors described herein can be used to identify essential genes described herein.

### Example 62

[1708] Identification of Genes Required for Neisseria gonorrhoeae Proliferation

[1709] Genes required for proliferation in Neisseria gonorrhoeae are identified according to the methods described above. For example, promoters and vectors described herein can be used to identify essential genes described herein.

### Example 63

[1710] Identification of Genes Required for Neisseria meningitidis Proliferation

[1711] Genes required for proliferation in Neisseria meningitidis are identified according to the methods described above. For example, promoters and vectors described herein can be used to identify essential genes described herein.

### Example 64

[1712] Identification of Genes Required for Pasteurella multocida Proliferation

[1713] Genes required for proliferation in Pasteurella multocida are identified according to the methods described above. For example, promoters and vectors described herein can be used to identify essential genes described herein.

### Example 65

[1714] Identification of Genes Required for Proteus mirabilis Proliferation

[1715] Genes required for proliferation in Proteus mirabilis are identified according to the methods described above. For example, promoters and vectors described herein can be used to identify essential genes described herein.

### Example 66

[1716] Identification of Genes Required for Pseudomonas putida Proliferation

[1717] Genes required for proliferation in Pseudomonas putida are identified according to the methods described above. For example, promoters and vectors described herein can be used to identify essential genes described herein.

### Example 67

[1718] Identification of Genes Required for Pseudomonas syringae Proliferation

[1719] Genes required for proliferation in Pseudomonas syringae are identified according to the methods described above. For example, promoters and vectors described herein can be used to identify essential genes described herein.

### Example 68

[1720] Identification of Genes Required for Salmonella paratyphi Proliferation

[1721] Genes required for proliferation in Salmonella paratyphi are identified according to the methods described above. For example, promoters and vectors described herein can be used to identify essential genes described herein.

### Example 69

[1722] Identification of Genes Required for Salmonella typhi Proliferation

[1723] Genes required for proliferation in Salmonella typhi are identified according to the methods described above. For example, promoters and vectors described herein can be used to identify essential genes described herein.

### Example 70

[1724] Identification of Genes Required for Staphylococcus epidermidis Proliferation

[1725] Genes required for proliferation in Staphylococcus epidermidis are identified according to the methods described above. For example, promoters and vectors described herein can be used to identify essential genes described herein.

### Example 71

[1726] Identification of Genes Required for Staphylococcus haemolyticus Proliferation

[1727] Genes required for proliferation in Staphylococcus haemolyticus are identified according to the methods described above. For example, promoters and vectors described herein can be used to identify essential genes described herein.

### Example 72

[1728] Identification of Genes Required for Streptococcus mutans Proliferation

[1729] Genes required for proliferation in Streptococcus mutans are identified according to the methods described above. For example, promoters and vectors described herein can be used to identify essential genes described herein.

### Example 73

[1730] Identification of Genes Required for Streptococcus pneumoniae Proliferation

[1731] Genes required for proliferation in Streptococcus pneumoniae are identified according to the methods described above. For example, promoters and vectors described herein can be used to identify essential genes described herein.

### Example 74

[1732] Identification of Genes Required for Streptococcus pyogenes Proliferation

[1733] Genes required for proliferation in Streptococcus pyogenes are identified according to the methods described above. For example, promoters and vectors described herein can be used to identify essential genes described herein.

### Example 75

[1734] Identification of Genes Required for Treponema pallidum Proliferation

[1735] Genes required for proliferation in Treponema pallidum are identified according to the methods described above. For example, promoters and vectors described herein can be used to identify essential genes described herein.

### Example 76

[1736] Identification of Genes Required for Ureaplasma urealyticum Proliferation

[1737] Genes required for proliferation in Ureaplasma urealyticum are identified according to the methods described above. For example, promoters and vectors described herein can be used to identify essential genes described herein.

### Example 77

[1738] Identification of Genes Required for Vibrio cholerae Proliferation

[1739] Genes required for proliferation in Vibrio cholerae are identified according to the methods described above. For example, promoters and vectors described herein can be used to identify essential genes described herein.

### Example 78

[1740] Identification of Genes Required for Yersinia pestis Proliferation

[1741] Genes required for proliferation in Yersinia pestis are identified according to the methods described above. For example, promoters and vectors described herein can be used to identify essential genes described herein.

### Example 79

[1742] Identification of Genes Required for Salmonella enterica Proliferation

[1743] Genes required for proliferation in Salmonella enterica are identified according to the methods described above. For example, promoters and vectors described herein can be used to identify essential genes described herein.

### Example 80

[1744] Identification of Genes Required for Aspergillus fumigatus Proliferation

[1745] Genes required for proliferation in Aspergillus fumigatus are identified according to the methods described above. For example, promoters and vectors described herein can be used to identify essential genes described herein.

### Example 81

[1746] Identification of Genes Required for Plasmodium ovale Proliferation

[1747] Genes required for proliferation in Plasmodium ovale are identified according to the methods described above. For example, promoters and vectors described herein can be used to identify essential genes described herein.

### Example 82

[1748] Identification of Genes Required for Entamoeba histolytica Proliferation

[1749] Genes required for proliferation in Entamoeba histolytica are identified according to the methods described above. For example, promoters and vectors described herein can be used to identify essential genes described herein.

### Example 83

[1750] Identification of Genes Required for Candida albicans Proliferation

[1751] Genes required for proliferation in Candida albicans are identified according to the methods described above. For example, promoters and vectors described herein can be used to identify essential genes described herein.

### Example 84

[1752] Identification of Genes Required for Histoplasma capsulatum Proliferation

[1753] Genes required for proliferation in Histoplasma capsulatum are identified according to the methods described above. For example, promoters and vectors described herein can be used to identify essential genes described herein.

### Example 85

[1754] Identification of Genes Required for Salmonella cholerasuis Proliferation

[1755] Genes required for proliferation in Salmonella cholerasuis are identified according to the methods described above. For example, promoters and vectors described herein can be used to identify essential genes described herein.

[1756] Use of Isolated Exogenous Nucleic Acid Fragments as Antisense Antibiotics

[1757] In addition to using the identified sequences to enable screening of molecule libraries to identify compounds useful to identify antibiotics, antisense nucleic acids complementary to the proliferation-required sequences or portions thereof, antisense nucleic acids complementary to homologous coding nucleic acids, or homologous antisense nucleic acids can be used as therapeutic agents. Specifically, the proliferation-required sequences or homolgous coding nucleic acids, or portions therof, in an antisense orientation or homologous antisense nucleic acids can be provided to an individual to inhibit the translation of a bacterial target gene or the processing, folding, or assembly into a protein/RNA complex of a nontranslated RNA.

### Example 86

[1758] Generation of Antisense Therapeutics from Identified Exogenous Sequences

[1759] Antisense nucleic acids complementary to the proliferation-required sequences described herein, or portions thereof, antisense nucleic acids complementary to homologous coding nucleic acids, or portions thereof, or homologous antisense nucleic acids or portions thereof can be used as antisense therapeutics for the treatment of bacterial infections or simply for inhibition of bacterial growth in vitro or in vivo. For example, the antisense therapeutics may be used to treat bacterial infections caused by Escherichia coli, Staphylococcus aureus, Enterococcus faecalis, Klebsiella pneumoniae, Pseudomonas aeruginosa, Salmonella typhimurium, Acinetobacter baumannii, Bacillus anthracis, Bacteroides fragilis, Bordetella pertussis, Borrelia burgdorferi, Burkholderia cepacia, Burkholderia fungorum, Burkholderia mallei, Campylobacter jejuni, Chlamydia pneumoniae, Chlamydia trachomatis, Clostridium acetobutylicum, Clostridium botulinum, Clostridium difficile, Corynebacterium diptheriae, Enterobacter cloacae, Enterococcus faecium, Haemophilus influenzae, Helicobacter pylori, Legionella pneumophila, Listeria monocytogenes, Moraxella catarrhalis, Mycobacterium avium, Mycobacterium bovis, Mycobacterium leprae, Mycobacterium tuberculosis, Mycoplasma genitalium, Mycoplasma pneumoniae, Neisseria gonorrhoeae, Neisseria meningitidis, Pasteurella multocida, Proteus mirabilis, Pseudomonas putida, Pseudomonas syringae, Salmonella paratyphi, Salmonella typhi, Staphylococcus epidermidis, Staphylococcus haemolyticus, Streptococcus mutans, Streptococcus pneumoniae, Streptococcus pyogenes, Treponema pallidum, Ureaplasma urealyticum, Vibrio cholerae or Yersinia pestis or to inhibit the growth of these organisms. The antisense therapeutics may also be used to treat infections caused by or to inhibit the growth of Acinetobacter baumannii, Anaplasma marginale, Aspergillus fumigatus, Bacillus anthracis, Bacteroides fragilis, Bordetella pertussis, Borrelia burgdorferi, Burkholderia cepacia, Burkholderia fungorum, Burkholderia mallei, Campylobacter jejuni, Candida albicans, Candida glabrata (also called Torulopsis glabrata), Candida tropicalis, Candida parapsilosis, Candida guilliermondii, Candida krusei, Candida kefyr (also called Candida pseudotropicalis), Candida dubliniensis, Chlamydia pneumoniae, Chlamydia trachomatis, Clostridium acetobutylicum, Clostridium botulinum, Clostridium difficile, Clostridium perfringens, Coccidioides immitis, Corynebacterium diptheriae, Cryptococcus neoformans, Enterobacter cloacae, Enterococcus faecalis, Enterococcus faecium, Escherichia coli, Haemophilus influenzae, Helicobacter pylori, Histoplasma capsulatum, Klebsiella pneumoniae, Legionella pneumophila, Listeria monocytogenes, Moraxella catarrhalis, Mycobacterium avium, Mycobacterium bovis, Mycobacterium leprae, Mycobacterium tuberculosis, Mycoplasma genitalium, Mycoplasma pneumoniae, Neisseria gonorrhoeae, Neisseria meningitidis, Nocardia asteroides, Pasteurella haemolytica, Pasteurella multocida, Pneumocystis carinii, Proteus mirabilis, Proteus vulgaris, Pseudomonas aeruginosa, Pseudomonas putida, Pseudomonas syringae, Salmonella bongori, Salmonella cholerasuis, Salmonella enterica, Salmonella paratyphi, Salmonella typhi, Salmonella typhimurium, Shigella boydii, Shigella dysenteriae, Shigella flexneri, Shigella sonnei, Staphylococcus aureus, Staphylococcus epidermidis, Staphylococcus haemolyticus, Streptococcus pneumoniae, Streptococcus mutans, Streptococcus pyogenes, Treponema pallidum, Ureaplasma urealyticum, Vibrio cholerae, Vibrio parahaemolyticus, Vibrio vulnificans, Yersinia enterocolitica, Yersinia pestis or any species falling within the genera of any of the above species. In some embodiments of the present invention, the antisense therapuetics may be used to treat infection by or inhibit the growth of an organism other than E. coli.

[1760] The therapy exploits the biological process in cells where genes are transcribed into messenger RNA (mRNA) that is then translated into proteins. Antisense RNA technology contemplates the use of antisense nucleic acids, including antisense oligonucleotides, complementary to a target gene that will bind to its target nucleic acid and decrease or inhibit the expression of the target gene. For example, the antisense nucleic acid may inhibit the translation or transcription of the target nucleic acid. In one embodiment, antisense oligonucleotides can be used to treat and control a bacterial infection of a cell culture containing a population of desired cells contaminated with bacteria. In another embodiment, the antisense oligonucleotides can be used to treat an organism with a bacterial infection.

[1761] Antisense oligonucleotides can be synthesized from any of the sequences of the present invention using methods well known in the art. In a preferred embodiment, antisense oligonucleotides are synthesized using artificial means. Uhlmann & Peymann, Chemical Rev. 90:543-584 (1990) review antisense oligonucleotide technology in detail. Modified or unmodified antisense oligonucleotides can be used as therapeutic agents. Modified antisense oligonucleotides are preferred. Modification of the phosphate backbones of the antisense oligonucleotides can be achieved by substituting the internucleotide phosphate residues with methylphosphonates, phosphorothioates, phosphoramidates, and phosphate esters. Nonphosphate internucleotide analogs such as siloxane bridges, carbonate brides, thioester bridges, as well as many others known in the art may also be used. The preparation of certain antisense oligonucleotides with modified internucleotide linkages is described in U.S. Pat. No. 5,142,047, hereby incorporated by reference.

[1762] Modifications to the nucleoside units of the antisense oligonucleotides are also contemplated. These modifications can increase the half-life and increase cellular rates of uptake for the oligonucleotides in vivo. For example, α-anomeric nucleotide units and modified nucleotides such as 1,2-dideoxy-d-ribofuranose, 1,2-dideoxy-1-phenylribofuranose, and N^{4,} N⁴-ethano-5-methyl-cytosine are contemplated for use in the present invention.

[1763] An additional form of modified antisense molecules is found in peptide nucleic acids. Peptide nucleic acids (PNA) have been developed to hybridize to single and double stranded nucleic acids. PNA are nucleic acid analogs in which the entire deoxyribose-phosphate backbone has been exchanged with a chemically different, but structurally homologous, polyamide (peptide) backbone containing 2-aminoethyl glycine units. Unlike DNA, which is highly negatively charged, the PNA backbone is neutral. Therefore, there is much less repulsive energy between complementary strands in a PNA-DNA hybrid than in the comparable DNA-DNA hybrid, and consequently they are much more stable. PNA can hybridize to DNA in either a Watson/Crick or Hoogsteen fashion (Demidov et al., Proc. Natl. Acad. Sci. U.S.A. 92:2637-2641, 1995; Egholm, Nature 365:566-568, 1993; Nielsen et al., Science 254:1497-1500, 1991; Dueholm et al., New J. Chem. 21:19-31, 1997).

[1764] Molecules called PNA “clamps” have been synthesized which have two identical PNA sequences joined by a flexible hairpin linker containing three 8-amino-3,6-dioxaoctanoic acid units. When a PNA clamp is mixed with a complementary homopurine or homopyrimidine DNA target sequence, a PNA-DNA-PNA triplex hybrid can form which has been shown to be extremely stable (Bentin et al., Biochemistry 35:8863-8869, 1996; Egholm et al., Nucleic Acids Res. 23:217-222, 1995; Griffith et al., J. Am. Chem. Soc. 117:831-832, 1995).

[1765] The sequence-specific and high affinity duplex and triplex binding of PNA have been extensively described (Nielsen et al., Science 254:1497-1500, 1991; Egholm et al., J. Am. Chem. Soc. 114:9677-9678, 1992; Egholm et al., Nature 365:566-568, 1993; Almarsson et al., Proc. Natl. Acad. Sci. U.S.A. 90:9542-9546, 1993; Demidov et al., Proc. Natl. Acad. Sci. U.S.A. 92:2637-2641, 1995). They have also been shown to be resistant to nuclease and protease digestion (Demidov et al., Biochem. Pharm. 48:1010-1313, 1994). PNA has been used to inhibit gene expression (Hanvey et al., Science 258:1481-1485, 1992; Nielsen et al., Nucl. Acids. Res., 21:197-200, 1993; Nielsen et al., Gene 149:139-145, 1994; Good & Nielsen, Science, 95: 2073-2076, 1998; all of which are hereby incorporated by reference), to block restriction enzyme activity (Nielsen et al., supra., 1993), to act as an artificial transcription promoter (Mollegaard, Proc. Natl. Acad. Sci. U.S.A. 91:3892-3895, 1994) and as a pseudo restriction endonuclease (Demidov et al., Nucl. Acids. Res. 21:2103-2107, 1993). Recently, PNA has also been shown to have antiviral and antitumoral activity mediated through an antisense mechanism (Norton, Nature Biotechnol., 14:615-619, 1996; Hirschman et al., J. Investig. Med. 44:347-351, 1996). PNAs have been linked to various peptides in order to promote PNA entry into cells (Basu et al., Bioconj. Chem. 8:481-488, 1997; Pardridge et al., Proc. Natl. Acad. Sci. U.S.A. 92:5592-5596, 1995).

[1766] The antisense oligonucleotides contemplated by the present invention can be administered by direct application of oligonucleotides to a target using standard techniques well known in the art. The antisense oligonucleotides can be generated within the target using a plasmid, or a phage. Alternatively, the antisense nucleic acid may be expressed from a sequence in the chromosome of the target cell. For example, a promoter may be introduced into the chromosome of the target cell near the target gene such that the promoter directs the transcription of the antisense nucleic acid. Alternatively, a nucleic acid containing the antisense sequence operably linked to a promoter may be introduced into the chromosome of the target cell. It is further contemplated that the antisense oligonucleotides are incorporated in a ribozyme sequence to enable the antisense to specifically bind and cleave its target mRNA. For technical applications of ribozyme and antisense oligonucleotides see Rossi et al., Pharmacol. Ther. 50(2):245-254, (1991), which is hereby incorporated by reference. The present invention also contemplates using a retron to introduce an antisense oligonucleotide to a cell. Retron technology is exemplified by U.S. Pat. No. 5,405,775, which is hereby incorporated by reference. Antisense oligonucleotides can also be delivered using liposomes or by electroporation techniques which are well known in the art.

[1767] The antisense nucleic acids described above can also be used to design antibiotic compounds comprising nucleic acids which function by intracellular triple helix formation. Triple helix oligonucleotides are used to inhibit transcription from a genome. The antisense nucleic acids can be used to inhibit cell or microorganism gene expression in individuals infected with such microorganisms or containing such cells. Traditionally, homopurine sequences were considered the most useful for triple helix strategies. However, homopyrimidine sequences can also inhibit gene expression. Such homopyrimidine oligonucleotides bind to the major groove at homopurine:homopyrimidine sequences. Thus, both types of sequences based on the sequences from Escherichia coli, Staphylococcus aureus, Enterococcus faecalis, Klebsiella pneumoniae, Pseudomonas aeruginosa, Salmonella typhimurium, Acinetobacter baumannii, Bacillus anthracis, Bacteroides fragilis, Bordetella pertussis, Borrelia burgdorferi, Burkholderia cepacia, Burkholderia fungorum, Burkholderia mallei, Campylobacter jejuni, Chlamydia pneumoniae, Chlamydia trachomatis, Clostridium acetobutylicum, Clostridium botulinum, Clostridium difficile, Corynebacterium diptheriae, Enterobacter cloacae, Enterococcus faecium, Haemophilus influenzae, Helicobacter pylori, Legionella pneumophila, Listeria monocytogenes, Moraxella catarrhalis, Mycobacterium avium, Mycobacterium bovis, Mycobacterium leprae, Mycobacterium tuberculosis, Mycoplasma genitalium, Mycoplasma pneumoniae, Neisseria gonorrhoeae, Neisseria meningitidis, Pasteurella multocida, Proteus mirabilis, Pseudomonas putida, Pseudomonas syringae, Salmonella paratyphi, Salmonella typhi, Staphylococcus epidermidis, Staphylococcus haemolyticus, Streptococcus mutans, Streptococcus pneumoniae, Streptococcus pyogenes, Treponema pallidum, Ureaplasma urealyticum, Vibrio cholerae or Yersinia pestis or homologous nucleic acids that are required for proliferation are contemplated for use as antibiotic compound templates.

[1768] The antisense nucleic acids, such as antisense oligonucleotides, which are complementary to the proliferation-required nucleic acids from Escherichia coli, Staphylococcus aureus, Enterococcus faecalis, Klebsiella pneumoniae, Pseudomonas aeruginosa, Salmonella typhimurium, Acinetobacter baumannii, Bacillus anthracis, Bacteroides fragilis, Bordetella pertussis, Borrelia burgdorferi, Burkholderia cepacia, Burkholderia fungorum, Burkholderia mallei, Campylobacter jejuni, Chlamydia pneumoniae, Chlamydia trachomatis, Clostridium acetobutylicum, Clostridium botulinum, Clostridium difficile, Corynebacterium diptheriae, Enterobacter cloacae, Enterococcus faecium, Haemophilus influenzae, Helicobacter pylori, Legionella pneumophila, Listeria monocytogenes, Moraxella catarrhalis, Mycobacterium avium, Mycobacterium bovis, Mycobacterium leprae, Mycobacterium tuberculosis, Mycoplasma genitalium, Mycoplasma pneumoniae, Neisseria gonorrhoeae, Neisseria meningitidis, Pasteurella multocida, Proteus mirabilis, Pseudomonas putida, Pseudomonas syringae, Salmonella paratyphi, Salmonella typhi, Staphylococcus epidermidis, Staphylococcus haemolyticus, Streptococcus mutans, Streptococcus pneumoniae, Streptococcus pyogenes, Treponema pallidum, Ureaplasma urealyticum, Vibrio cholerae or Yersinia pestis or to homologous coding nucleic acids, or portions thereof, may be used to induce bacterial cell death or at least bacterial stasis by inhibiting target nucleic acid transcription or translation. Antisense oligonucleotides complementary to about 8 to 40 nucleotides of the proliferation-required nucleic acids described herein or homologous coding nucleic acids have sufficient complementarity to form a duplex with the target sequence under physiological conditions.

[1769] To kill bacterial cells or inhibit their growth, the antisense oligonucleotides are applied to the bacteria or to the target cells under conditions that facilitate their uptake. These conditions include sufficient incubation times of cells and oligonucleotides so that the antisense oligonucleotides are taken up by the cells. In one embodiment, an incubation period of 7-10 days is sufficient to kill bacteria in a sample. An optimum concentration of antisense oligonucleotides is selected for use.

[1770] The concentration of antisense oligonucleotides to be used can vary depending on the type of bacteria sought to be controlled, the nature of the antisense oligonucleotide to be used, and the relative toxicity of the antisense oligonucleotide to the desired cells in the treated culture. Antisense oligonucleotides can be introduced to cell samples at a number of different concentrations preferably between 1×10⁻¹⁰M to 1×10⁻⁴M. Once the minimum concentration that can adequately control gene expression is identified, the optimized dose is translated into a dosage suitable for use in vivo. For example, an inhibiting concentration in culture of 1×10⁻⁷ translates into a dose of approximately 0.6 mg/kg body weight. Levels of oligonucleotide approaching 100 mg/kg body weight or higher may be possible after testing the toxicity of the oligonucleotide in laboratory animals. It is additionally contemplated that cells from the subject are removed, treated with the antisense oligonucleotide, and reintroduced into the subject. This range is merely illustrative and one of skill in the art are able to determine the optimal concentration to be used in a given case.

[1771] After the bacterial cells have been killed or controlled in a desired culture, the desired cell population may be used for other purposes.

### Example 87

[1772] Use of Antisense Oligonucleotides to Treat Contaminated Cell Cultures

[1773] The following example demonstrates the ability of an Escherichia coli, Staphylococcus aureus, Enterococcus faecalis, Klebsiella pneumoniae, Pseudomonas aeruginosa, Salmonella typhimurium, Acinetobacter baumannii, Bacillus anthracis, Bacteroides fragilis, Bordetella pertussis, Borrelia burgdorferi, Burkholderia cepacia, Burkholderia fungorum, Burkholderia mallei, Campylobacter jejuni, Chlamydia pneumoniae, Chlamydia trachomatis, Clostridium acetobutylicum, Clostridium botulinum, Clostridium difficile, Corynebacterium diptheriae, Enterobacter cloacae, Enterococcus faecium, Haemophilus influenzae, Helicobacter pylori, Legionella pneumophila, Listeria monocytogenes, Moraxella catarrhalis, Mycobacterium avium, Mycobacterium bovis, Mycobacterium leprae, Mycobacterium tuberculosis, Mycoplasma genitalium, Mycoplasma pneumoniae, Neisseria gonorrhoeae, Neisseria meningitidis, Pasteurella multocida, Proteus mirabilis, Pseudomonas putida, Pseudomonas syringae, Salmonella paratyphi, Salmonella typhi, Staphylococcus epidermidis, Staphylococcus haemolyticus, Streptococcus mutans, Streptococcus pneumoniae, Streptococcus pyogenes, Treponema pallidum, Ureaplasma urealyticum, Vibrio cholerae or Yersinia pestis antisense oligonucleotide or an antisense oligonucleotide complementary to a homologous coding nucleic acid, or portions thereof, to act as a bacteriocidal or bacteriostatic agent to treat a contaminated cell culture system. The application of the antisense oligonucleotides of the present invention are thought to inhibit the translation of bacterial gene products required for proliferation. The antisense nucleic acids may also inhibit the transcription, folding or processing of the target RNA.

[1774] In one embodiment of the present invention, the antisense oligonucleotide may comprise a phosphorothioate modified nucleic acid comprising at least about 15, at least about 20, at least about 25, at least about 30, at least about 35, at least about 40, or more than 40 consecutive nucleotides of an antisense nucleic acid listed in Table IA (SEQ ID NOS.: 1-6213). A sense oligodeoxynucleotide complementary to the antisense sequence is synthesized and used as a control. The oligonucleotides are synthesized and purified according to the procedures of Matsukura, et al., Gene 72:343 (1988). The test oligonucleotides are dissolved in a small volume of autoclaved water and added to culture medium to make a 100 micromolar stock solution.

[1775] Human bone marrow cells are obtained from the peripheral blood of two patients and cultured according standard procedures well known in the art. The culture is contaminated with Escherichia coli, Staphylococcus aureus, Enterococcus faecalis, Klebsiella pneumoniae, Pseudomonas aeruginosa, Salmonella typhimurium, Acinetobacter baumannii, Bacillus anthracis, Bacteroides fragilis, Bordetella pertussis, Borrelia burgdorferi, Burkholderia cepacia, Burkholderia fungorum, Burkholderia mallei, Campylobacter jejuni, Chlamydia pneumoniae, Chlamydia trachomatis, Clostridium acetobutylicum, Clostridium botulinum, Clostridium difficile, Corynebacterium diptheriae, Enterobacter cloacae, Enterococcus faecium, Haemophilus influenzae, Helicobacter pylori, Legionella pneumophila, Listeria monocytogenes, Moraxella catarrhalis, Mycobacterium avium, Mycobacterium bovis, Mycobacterium leprae, Mycobacterium tuberculosis, Mycoplasma genitalium, Mycoplasma pneumoniae, Neisseria gonorrhoeae, Neisseria meningitidis, Pasteurella multocida, Proteus mirabilis, Pseudomonas putida, Pseudomonas syringae, Salmonella paratyphi, Salmonella typhi, Staphylococcus epidermidis, Staphylococcus haemolyticus, Streptococcus mutans, Streptococcus pneumoniae, Streptococcus pyogenes, Treponema pallidum, Ureaplasma urealyticum, Vibrio cholerae or Yersinia pestis or an organism containing a homologous nucleic acid and incubated at 37° C. overnight to establish bacterial infection.

[1776] The control and antisense oligonucleotide containing solutions are added to the contaminated cultures and monitored for bacterial growth. After a 10 hour incubation of culture and oligonucleotides, samples from the control and experimental cultures are drawn and analyzed for the translation of the target bacterial gene using standard microbiological techniques well known in the art. The target Escherichia coli, Staphylococcus aureus, Enterococcus faecalis, Klebsiella pneumoniae, Pseudomonas aeruginosa, Salmonella typhimurium, Acinetobacter baumannii, Bacillus anthracis, Bacteroides fragilis, Bordetella pertussis, Borrelia burgdorferi, Burkholderia cepacia, Burkholderia fungorum, Burkholderia mallei, Campylobacter jejuni, Chlamydia pneumoniae, Chlamydia trachomatis, Clostridium acetobutylicum, Clostridium botulinum, Clostridium difficile, Corynebacterium diptheriae, Enterobacter cloacae, Enterococcus faecium, Haemophilus influenzae, Helicobacter pylori, Legionella pneumophila, Listeria monocytogenes, Moraxella catarrhalis, Mycobacterium avium, Mycobacterium bovis, Mycobacterium leprae, Mycobacterium tuberculosis, Mycoplasma genitalium, Mycoplasma pneumoniae, Neisseria gonorrhoeae, Neisseria meningitidis, Pasteurella multocida, Proteus mirabilis, Pseudomonas putida, Pseudomonas syringae, Salmonella paratyphi, Salmonella typhi, Staphylococcus epidermidis, Staphylococcus haemolyticus, Streptococcus mutans, Streptococcus pneumoniae, Streptococcus pyogenes, Treponema pallidum, Ureaplasma urealyticum, Vibrio cholerae or Yersinia pestis gene or an organism containing the homologous coding nucleic acid is found to be translated in the control culture treated with the control oligonucleotide, however, translation of the target gene in the experimental culture treated with the antisense oligonucleotide of the present invention is not detected or reduced, indicating that the culture is no longer contaminated or is contaminated at a reduced level.

### Example 88

[1777] Use of Antisense Oligonucleotides to Treat Infections

[1778] A subject suffering from a Escherichia coli, Staphylococcus aureus, Enterococcus faecalis, Klebsiella pneumoniae, Pseudomonas aeruginosa, Salmonella typhimurium, Acinetobacter baumannii, Bacillus anthracis, Bacteroides fragilis, Bordetella pertussis, Borrelia burgdorferi, Burkholderia cepacia, Burkholderia fungorum, Burkholderia mallei, Campylobacter jejuni, Chlamydia pneumoniae, Chlamydia trachomatis, Clostridium acetobutylicum, Clostridium botulinum, Clostridium difficile, Corynebacterium diptheriae, Enterobacter cloacae, Enterococcus faecium, Haemophilus influenzae, Helicobacter pylori, Legionella pneumophila, Listeria monocytogenes, Moraxella catarrhalis, Mycobacterium avium, Mycobacterium bovis, Mycobacterium leprae, Mycobacterium tuberculosis, Mycoplasma genitalium, Mycoplasma pneumoniae, Neisseria gonorrhoeae, Neisseria meningitidis, Pasteurella multocida, Proteus mirabilis, Pseudomonas putida, Pseudomonas syringae, Salmonella paratyphi, Salmonella typhi, Staphylococcus epidermidis, Staphylococcus haemolyticus, Streptococcus mutans, Streptococcus pneumoniae, Streptococcus pyogenes, Treponema pallidum, Ureaplasma urealyticum, Vibrio cholerae, Yersinia pestis infection or an infection with an organism containing a homologous coding nucleic acid is treated with the antisense oligonucleotide preparation above. The antisense oligonucleotide is provided in a pharmaceutically acceptable carrier at a concentration effective to inhibit the transcription or translation of the target nucleic acid. The present subject is treated with a concentration of antisense oligonucleotide sufficient to achieve a blood concentration of about 0.1-100 micromolar. The patient receives daily injections of antisense oligonucleotide to maintain this concentration for a period of 1 week. At the end of the week a blood sample is drawn and analyzed for the presence or absence of the organism using standard techniques well known in the art. There is no detectable evidence of Escherichia coli, Staphylococcus aureus, Enterococcus faecalis, Klebsiella pneumoniae, Pseudomonas aeruginosa, Salmonella typhimurium, Acinetobacter baumannii, Bacillus anthracis, Bacteroides fragilis, Bordetella pertussis, Borrelia burgdorferi, Burkholderia cepacia, Burkholderia fungorum, Burkholderia mallei, Campylobacter jejuni, Chlamydia pneumoniae, Chlamydia trachomatis, Clostridium acetobutylicum, Clostridium botulinum, Clostridium difficile, Corynebacterium diptheriae, Enterobacter cloacae, Enterococcus faecium, Haemophilus influenzae, Helicobacter pylori, Legionella pneumophila, Listeria monocytogenes, Moraxella catarrhalis, Mycobacterium avium, Mycobacterium bovis, Mycobacterium leprae, Mycobacterium tuberculosis, Mycoplasma genitalium, Mycoplasma pneumoniae, Neisseria gonorrhoeae, Neisseria meningitidis, Pasteurella multocida, Proteus mirabilis, Pseudomonas putida, Pseudomonas syringae, Salmonella paratyphi, Salmonella typhi, Staphylococcus epidermidis, Staphylococcus haemolyticus, Streptococcus mutans, Streptococcus pneumoniae, Streptococcus pyogenes, Treponema pallidum, Ureaplasma urealyticum, Vibrio cholerae, Yersinia pestis or an organim containing a homologous coding nucleic acid and the treatment is terminated.

[1779] Antisense nucleic acids complementary to a homologous coding nucleic acid or a portion thereof may be used in the preceding method to treat individuals infected with an organism containing the homologous coding nucleic acid.

### Example 89

[1780] Preparation and Use of Triple Helix Forming Oligonucleotides

[1781] The sequences of proliferation-required nucleic acids, homologous coding nucleic acids, or homologous antisense nucleic acids are scanned to identify 10-mer to 20-mer homopyrimidine or homopurine stretches that could be used in triple-helix based strategies for inhibiting gene expression. Following identification of candidate homopyrimidine or homopurine stretches, their efficiency in inhibiting gene expression is assessed by introducing varying amounts of oligonucleotides containing the candidate sequences into a population of bacterial cells that normally express the target gene. The oligonucleotides may be prepared on an oligonucleotide synthesizer or they may be purchased commercially from a company specializing in custom oligonucleotide synthesis.

[1782] The oligonucleotides can be introduced into the cells using a variety of methods known to those skilled in the art, including but not limited to calcium phosphate precipitation, DEAE-Dextran, electroporation, liposome-mediated transfection or native uptake.

[1783] Treated cells are monitored for a reduction in proliferation using techniques such as monitoring growth levels as compared to untreated cells using optical density measurements. The oligonucleotides that are effective in inhibiting gene expression in cultured cells can then be introduced in vivo using the techniques well known in that art at a dosage level shown to be effective.

[1784] In some embodiments, the natural (beta) anomers of the oligonucleotide units can be replaced with alpha anomers to render the oligonucleotide more resistant to nucleases. Further, an intercalating agent such as ethidium bromide, or the like, can be attached to the 3′ end of the alpha oligonucleotide to stabilize the triple helix. For information on the generation of oligonucleotides suitable for triple helix formation see Griffin et al. (Science 245:967-971 (1989), which is hereby incorporated by this reference).

### Example 90

[1785] Identification of Bacterial Strains from Isolated Specimens by PCR

[1786] Classical bacteriological methods for the detection of various bacterial species are time consuming and costly. These methods include growing the bacteria isolated from a subject in specialized medium, cultivation on selective agar medium, followed by a set of confirmation assays that can take from 8 to 10 days or longer to complete. Use of the identified sequences of the present invention provides a method to dramatically reduce the time necessary to detect and identify specific bacterial species present in a sample.

[1787] In one exemplary method, bacteria are grown in enriched medium and DNA samples are isolated from specimens of, for example, blood, urine, stool, saliva or central nervous system fluid by conventional methods. A panel of PCR primers based on identified sequences unique to various species or types of cells or microorganisms are then utilized in accordance with Example 27 to amplify DNA of approximately 100-200 nucleotides in length from the specimen. A separate PCR reaction is set up for each pair of PCR primers and after the PCR reaction is complete, the reaction mixtures are assayed for the presence of PCR product. The presence or absence of bacteria from the species to which the PCR primer pairs belong is determined by the presence or absence of a PCR product in the various test PCR reaction tubes.

[1788] Although the PCR reaction is used to assay the isolated sample for the presence of various bacterial species, other assays such as the Southern blot hybridization are also contemplated.

[1789] Compounds which inhibit the activity or reduce the amount of gene products required for proliferation may be identified using rational drug design. These methods may be used with the proliferation-required polypeptides described herein or homologous polypeptides. In such methods, the structure of the gene product is determined using methods such as x-ray crystallography, NMR, or computer modelling. Compounds are screened to identify those which have a structure which allows them to interact with the gene product. In some embodiments, the compounds are screened to identify those which have structures which allow them to interact with regions of the gene product which are important for its activity. For example, the compounds may be screened to identify those which have structures which allow them to bind to the active site of the gene product to inhibit its activity. For example, the compound may be a suicide substrate which binds to the active site with high affinity, thereby preventing the gene product from acting on its natural substrate. Alternatively, the compound may bind to a region of the gene product which is involved in complex formation with other biomolecules. In such instances, the activity of the gene product is inhibited by blocking the interaction between the gene product and other members of the complex.

[1790] Thus, one embodiment of the present invention comprises a method of using a crystal of the gene products of the present invention and/or a dataset comprising the three-dimensional coordinates obtained from the crystal in a drug-screening assay. The present invention also includes agents (modulators or drugs) that are identified by the methods of the present invention, along with the method of using agents (modulators or drugs) identified by a method of the present invention, for inhibiting the activity of or modulating the amount of an essential gene product. The present invention also includes crystals comprising the gene products of the present invention or portions thereof.

[1791] In some embodiments of the present invention, the three-dimensional structure of the polypeptides required for proliferation is determined using X-ray crystallography or NMR. The coordinates of the determined structure are used in computer-assisted modeling programs to identify compounds that bind to and/or modulate the activity or amount of the encoded polypeptide. The method may include the following steps: 1) the generation of high-purity crystals of the encoded recombinant (or endogenous) polypeptide for analysis; 2) determination of the three-dimensional structure of the polypeptide; and, 3) the use of computer-assisted “docking” programs to analyze the molecular interaction of compound structure and the polypeptide (i.e., drug screening).

[1792] General methods for performing each of the above steps are described below and are also well known to those of skill in the art. Any method known to those of skill in the art, including those described herein, may be employed for generating the three-dimensional structure for each identified essential gene product and its use in the drug-screening assays.

[1793] Crystals of the gene products required for proliferation may be obtained as follows. Under certain conditions, molecules condense from solution into a highly-ordered crystalline lattice, which is defined by a unit cell, the smallest repeating volume of the crystalline array. The contents of such a cell can interact with and diffract certain electromagnetic and particle waves (e.g., X-rays, neutron beams, electron beams etc.). Due to the symmetry of the lattice, the diffracted waves interact to create a diffraction pattern. By measuring the diffraction pattern, crystallographers are able to reconstruct the three-dimensional structure of the atoms in the crystal.

[1794] Any method known to those of skill in the art, including those set forth below, may be employed to prepare high-purity crystals. For example, crystals of the product of the identified essential gene can be grown by a number of techniques including batch crystallization, vapor diffusion (either by sitting drop or hanging drop) and by microdialysis. Seeding of the crystals in some instances is required to obtain X-ray quality crystals. Standard micro and/or macro seeding of crystals may therefore be used. Exemplified below is the hanging-drop vapor diffusion procedure. Hanging drops of an essential gene product (2.5 μl, 10 mg/ml) in 20 mM Tris, pH=8.0, 100 mM NaCl are mixed with an equal amount of reservoir buffer containing 2.7-3.2 M sodium formate and 100 mM Tris buffer, pH=8.0, and kept at 4° C. Crystal showers may appear after 1-2 days with large single crystals growing to full size (0.3×0.3×0.15 mm³) within 2-3 weeks. Crystals are harvested in 3.5 M sodium formate and 100 mM Tris buffer, pH=8.0 and cryoprotected in 3.5 M sodium formate, 100 mM Tris buffer, pH=8.0, 10% (w/v) sucrose, and 10% (v/v) ethylene glycol before flash freezing in liquid propane.

[1795] In some embodiments, the crystal may be obtained using the methods described in U.S. Pat. No. 5,869,604, the disclosure of which is incorporated herein by reference in its entirety. The method involves (a) contacting a mixture containing uncrystallized polypeptides with an exogenous nucleating agent that has an areal lattice match of at least 90.4% to the polypeptide, (b) crystallizing the polypeptides, thereby forming at least one crystal of the polypeptide attached to the nucleating agent, the attached crystal being of a high purity, and at least one polypeptide crystal unattached to the nucleating agent, the unattached crystal being of a lower purity than the attached crystal, and (c) separating the crystal attached to the nucleating agent from the crystal unattached to the nucleating agent. The crystallized polypeptide may also be purified from contaminants by (a) contacting a mixture containing uncrystallized polypeptides and a contaminant with an exogenous nucleating agent that has an areal lattice match of at least 90.4% to the polypeptide, (b) crystallizing the polypeptides, thereby forming at least one crystal of the polypeptide attached to the nucleating agent, the attached crystal being of a high purity and produced in a high yield, and at least one crystal unattached to the nucleating agent, the unattached crystal being of a lower purity than the attached crystal, and (c) separating the crystal attached to the nucleating agent from the crystal unattached to the nucleating agent.

[1796] Once a crystal of the present invention is grown, X-ray diffraction data can be collected using methods familiar to those skilled in the art. Therefore, any person with skill in the art of protein crystallization having the present teachings and without undue experimentation can crystallize a large number of alternative forms of the essential gene products from a variety of different organisms, or polypeptides having conservative substitutions in their amino acid sequence.

[1797] A crystal lattice is defined by the symmetry of its unit cell and any structural motifs the unit cell contains. For example, there are 230 possible symmetry groups for an arbitrary crystal lattice, while the unit cell of the crystal lattice group may have an arbitrary dimension that depends on the molecules making up the lattice. Biological macromolecules, however, have asymmetric centers and are limited to 65 of the 230 symmetry groups. See Cantor et al., Biophysical Chemistry, Vol. III, W. H. Freeman & Company (1980), the disclosure of which is incorporated herein by reference in its entirety.

[1798] A crystal lattice interacts with electromagnetic or particle waves, such as X-rays or electron beams respectively, that have a wavelength with the same order of magnitude as the spacing between atoms in the unit cell. The diffracted waves are measured as an array of spots on a detection surface positioned adjacent to the crystal. Each spot has a three-dimensional position, hkl, and an intensity, I(hkl), both of which are used to reconstruct the three-dimensional electron density of the crystal with the so-called Electron Density Equation. The Electron Density Equation states that the three-dimensional electron density of the unit cell is the Fourier transform of the structure factors. Thus, in theory, if the structure factors are known for a sufficient number of spots in the detection space, then the three-dimensional electron density of the unit cell could be calculated using the Electron Density Equation.

[1799] In some embodiments of the present invention, an image of a crystal of a gene product required for proliferation or a portion thereof is obtained with the aid of a digital computer and the crystal's diffraction pattern as described in U.S. Pat. No. 5,353,236, the disclosure of which is incorporated herein by reference in its entirety. The diffraction pattern contains a plurality of reflections, each having an associated resolution. The image is obtained by (a) converting the diffraction pattern of the crystal into computer usable normalized amplitudes, the pattern being produced with a diffractometer; (b) determining from the diffraction pattern a dimension of a unit cell of the crystal; (c) providing an envelope defining the region of the unit cell occupied by the gene product or portion thereof in the crystal; (d) distributing a collection of scattering bodies within said envelope, the collection of scattering bodies having various arrangements, each of which has an associated pattern of Fourier amplitudes; (e) condensing the collection of scattering bodies to a condensed arrangement that results in a high correlation between a diffraction pattern and the pattern of Fourier amplitudes for said collection of scattering bodies; (f) determining the phase associated with at least one of the reflections of said diffraction pattern from the condensed arrangement of scattering bodies; (g) calculating an electron density distribution of the gene product or portion thereof within the unit cell from the phase determined in procedure f; and (h) displaying a graphical image of the gene product or portion thereof constructed from said electron density distribution.

[1800] The crystals of the gene products required for proliferation may be used in drug screening methods such as those described in U.S. Pat. No. 6,156,526, the disclosure of which is incorporated herein by reference in its entirety. Briefly, in such methods, a compound which inhibits the formation of a complex comprising the gene product or a portion thereof is identified as follows. A set of atomic coordinates defining the three-dimensional structure of a complex including the gene product of interest or a portion thereof are determined. A potential compound that binds to the gene product or a portion thereof involved in complex formation is selected using the atomic coordinates obtained above. The compound is contacted with the gene product or portion thereof and its binding partner(s) in the complex under conditions which would permit the complex to form in the absence of the potential compound. The binding affinity of the gene product or portion thereof for its binding partner(s) is determined and a potential compound is identified as a compound that inhibits the formation of the complex when there is a decrease in the binding affinity of the gene product or portion thereof for its binding partner(s).

[1801] In some embodiments of the present invention, the three dimensional structure of the essential gene product is determined and potential agonists and/or potential antagonists are designed with the aid of computer modeling [Bugg et al., Scientific American, December: 92-98 (1993); West et al., TIPS, 16:67-74 (1995); Dunbrack et al., Folding & Design, 2:27-42 (1997), the disclosures of which are incorporated herein by reference in their entireties].

[1802] Computer analysis may be performed with one or more of the computer programs including: QUANTA, CHARMM, INSIGHT, SYBYL, MACROMODEL and ICM [Dunbrack et al., Folding & Design, 2:27-42 (1997), the disclosure of which is incorporated herein by reference in its entirety]. In a further embodiment of this aspect of the invention, an initial drug-screening assay is performed using the three-dimensional structure so obtained, preferably along with a docking computer program. Such computer modeling can be performed with one or more Docking programs such as FlexX, DOC, GRAM and AUTO DOCK [Dunbrack et al., Folding & Design, 2:27-42 (1997)].

[1803] It should be understood that for each drug screening assay provided herein, a number of iterative cycles of any or all of the steps may be performed to optimize the selection. The drug screening assays of the present invention may use any of a number of means for determining the interaction between an agent or drug and an essential gene product.

[1804] In some embodiments of the present invention, a drug can be specifically designed to bind to an essential gene product of the present invention through NMR based methodology. [Shuker et al., pi Science 274:1531-1534 (1996) the disclosure of which is incorporated herein by reference herein in its entirety.] NMR spectra may be recorded using devices familiar to those skilled in the art, such as the Varian Unity Plus 500 and unity 600 spectrometers, each equipped with a pulsed-field gradient triple resonance probe as analyzed as described in Bagby et al., [Cell 82:857-867 (1995), the disclosure of which is incorporated herein by reference in its entirety]. Sequential resonance assignments of backbone ¹H, .¹⁵N, and .¹³C atoms may be made using a combination of triple resonance experiments similar to those previously described [Bagby et al., Biochemistry, 33:2409-2421 (1994a), the disclosure of which is incorporated herein by reference in its entirety], except with enhanced sensitivity [Muhandiram and Kay, J. Magn. Reson., 103: 203-216 (1994), the disclosure of which is incorporated herein by reference in its entirety] and minimal H₂O saturation [Kay et al., J. Magn. Reson., 109:129-133 (1994), the disclosure of which is incorporated herein by reference in its entirety]. Side chain ¹H and ¹³C assignments may be made using HCCH-TOCSY [Bax et al., J. Magn. Reson., 87:620-627 (1990), the disclosure of which is incorporated herein by reference in its entirety] experiments with mixing times of 8 ms and 16 ms. in solution but need not be included in structure calculations. Nuclear Overhauser effect (NOE) cross peaks in two-dimensional ¹H—¹H NOE spectroscopy (NOESY), three-dimensional ¹⁵N-edited NOESY-HSQC [Zhang et al., J. Biomol, NMR, 4:845-858 (1994), the disclosure of which is incorporated herein by reference in its entirety] and three-dimensional simultaneous acquisition ¹⁵N/¹³C-edited NOE [Pascal et al., J. Magn. Reson., 103:197-201 (1994), the disclosure of which is incorporated herein by reference in its entirety] spectra may be obtained with 100 ms NOE mixing times. Standard pseudo-atom distance corrections [Wuthrich et al., J. Mol. Biol., 169:949-961 (1983), the disclosure of which is incorporated herein by reference in its entirety] may be incorporated to account for center averaging. An additional 0.5 .ANG. may be added to the upper limits for distances involving methyl groups [Wagner et al., J. Mol. Biol., 196:611-639 (1987); Clore et al., Biochemistry, 26:8012-8023 (1987), the disclosures of which are incorporated herein by reference in their entireties].

[1805] The structures can be calculated using a simulated annealing protocol [Nilges et al., In computational Aspects of the Study of Biological Macromolecules by Nuclear Magnetic Resonance Spectroscopy, J. C. Hoch, F. M. Poulsen, and C. Redfield, eds., New York: Plenum Press, pp. 451-455 (1991, the disclosures of which are incorporated herein by reference in their entireties] within X-PLOR [Brunger, X-PLOR Manual, Version 3.1, New Haven, Conn.: Department of Molecular Biophysics and Biochemistry, Yale University (1993), the disclosure of which is incorporated herein by reference in its entirety] using the previously described strategy [Bagby et al., Structure, 2:107-122 (1994b), the disclosure of which is incorporated herein by reference in its entirety]. Interhelical anges may be calculated using a program written by K. Yap. Accessible surface areas were calculated using the program Naccess, available from Prof. J. Thornton, University College, London.

[1806] Compounds capable of reducing the activity or amount of gene products required for cellular proliferation may be identified using the methods described in U.S. Pat. No. 6,077,682, the disclosure of which is incorporated herein by reference in its entirety. Briefly, the three-dimensional structure of the gene product or portion thereof may be used in a drug screening assay by (a) selecting a potential drug by performing rational drug design with the three-dimensional structure determined from one or more sets of atomic coordinates of the gene product or portion thereof in conjunction with computer modeling; (b) contacting the potential drug with a polypeptide comprising the gene product or portion thereof and (c) detecting the binding of the potential drug with said polypeptide; wherein a potential drug is selected as a drug if the potential drug binds to the polypeptide. In some methods, the three-dimensional structure of the gene product or portion thereof is used in a drug screening assay involving (a) selecting a potential drug by performing structural based rotational drug design with the three-dimensional structure of the gene product or portion thereof; wherein said selecting is performed in conjunction with computer modeling; (b) contacting the potential drug with a polypeptide comprising the gene product or portion thereof in the presence of a substrate of the gene product; wherein in the absence of the potential drug the substrate is acted upon by the gene product; and (c) determining the extent to which the gene product acted upon the substrate; wherein a drug is selected when a decrease in the action of the gene product on the substrate is determined in the presence of the potential drug relative to in its absence. In some embodiments, the preceding method further involves (d) contacting the potential drug with the gene product or portion thereof for NMR analysis; wherein a binding complex forms between the potential drug and said gene product or portion thereof for NMR analysis; wherein the gene product or portion thereof for NMR analysis comprises a conservative amino acid substitution; (e) determining the three-dimensional structure of the binding complex by NMR; and (f) selecting a candidate drug by performing structural based rational drug design with the three-dimensional structure determined for the binding complex; wherein said selecting is performed in conjunction with computer modeling; (g) contacting the candidate drug with a second polypeptide comprising the gene product or portion thereof in the presence of a substrate of the gene product or portion thereof; wherein in the absence of the candidate drug the substrate is acted upon by the second polypeptide; and (h) determining the amount of action of the second polypeptide on the substrate; wherein a drug is selected when a decrease in the amount of action of the second polypeptide is determined in the presence of the candidate drug relative to in its absence.

[1807] Once the three-dimensional structure of a crystal comprising an essential gene product is determined, a potential modulator of its activity, can be examined through the use of computer modeling using a docking program such as FlexX, GRAM, DOCK, or AUTODOCK [Dunbrack et al., 1997, supra], to identify potential modulators. This procedure can include computer fitting of potential modulators to the polypeptide or fragments thereof to ascertain how well the shape and the chemical structure of the potential modulator will bind. Computer programs can also be employed to estimate the attraction, repulsion, and steric hindrance of the two binding partners (e.g., the essential gene product and a potential modulator). Generally the tighter the fit, the lower the steric hindrances, and the greater the attractive forces, the more potent the potential modulator since these properties are consistent with a tighter binding constant. Furthermore, the more specificity in the design of a potential drug the more likely that the drug will not interact as well with other proteins. This will minimize potential side-effects due to unwanted interactions with other proteins.

[1808] Compound and compound analogs can be systematically modified by computer modeling programs until one or more promising potential analogs is identified. In addition systematic modification of selected analogs can then be systematically modified by computer modeling programs until one or more potential analogs are identified. Such analysis has been shown to be effective in the development of HIV protease inhibitors [Lam et al., Science 263:380-384 (1994); Wlodawer et al., Ann. Rev. Biochem. 62:543-585 (1993); Appelt, Perspectives in Drug Discovery and Design 1:23-48 (1993); Erickson, Perspectives in Drug Discovery and Design 1:109-128 (1993), the disclosures of which are incorporated herein by reference in their entireties]. Alternatively a potential modulator could be obtained by initially screening a random peptide library produced by recombinant bacteriophage for example, [Scott and Smith, Science, 249:386-390 (1990); Cwirla et al., Proc. Natl. Acad. Sci., 87:6378-6382 (1990); Devlin et al., Science, 249:404-406 (1990), the disclosures of which are incorporated herein by reference in their entireties]. A peptide selected in this manner would then be systematically modified by computer modeling programs as described above, and then treated analogously to a structural analog.

[1809] Example 91 describes computer modelling of the structures of gene products required for proliferation.

### Example 91

[1810] Determination of the Structure of Gene Products Required for Proliferation Using Computer Modelling

[1811] Three dimensional models were built by applying computer modelling methods to some of the gene products required for proliferation of Staphylococcus aureus using the amino acid sequences of the encoded proteins as follows. Sir Tom Blundell's program COMPOSER as provided by Tripos Associates in their BIOPOLYMER module to SYBYL was used to build the models. Skolnik's method of topology fingerprinting as implemented in Matchmaker was used to score the average mutation free energy. This number is in Boltzmans (units of kT) and should be negative (the more negative, the better the model.

[1812] Composer uses a Needleman Wunsch alignment with jumbling to find significant alignments. The reported parameters are percent identity and significance as measured from the jumbling. Those matches which were 30% identical and had a significance greater that 4 on the scale were judged to be good candidates for model building templates. If no three dimensional structures met these criteria, then a BLAST search was conducted against the most recent PDB sequence database. Any significant hits discovered in this manner were then added to the binary protein structure database and the candidate search was repeated in the manner discussed above.

[1813] In the next phase, Composer assigned structurally conserved and structurally variable regions and built the backbone structure and then searched the database for structures of the variable loops. These were then spliced in and a model of the protein resulted. Any loops (variable regions) which were unassignable were manually built and refined with a combination of dynamics.

[1814] The structure was then refined. Hydrogen atoms were added and a non-active aggregate was defined. 1000 pS of dynamics using AMBER ALL-ATOM and Kollman charges are performed. Next a minimization cycle of up 5000 steepest decent steps were performed and then the aggregate was thawed and the process was repeated on the entire protein.

[1815] The resulting structure was then validated in MATCHMAKER. The topologicaly scanned free energy determined from empirically derived protein topologies was computed and the average energy/residue is reported in Boltzamans was reported. As this number represents a free energy the more negative it is the more favorable it is.

[1816] Sixty six proteins required for the proliferation of Staphylococcus aureus were modelled as described above. MATCHMAKER energies were computed for these. The distribution of the models built by class is shown in Table VIII below.

TABLE VIII
Distribution of models built with their MATCHMAKER energies in kT

| | | Average |
|---|---|---|
| | | Matchmaker |
| Classification | Number of Models | Energy |
| Acylases | 1 | −0.10 |
| Dehydrogenases | 3 | −0.12 |
| DNA Related | 3 | −0.12 |
| Heat Shock Protein | 2 | −0.16 |
| Hydrolases | 3 | −0.16 |
| Isomerases | 1 | 0.05 |
| Ligases | 7 | −0.07 |
| Lyases | 1 | −0.09 |
| Membrane Anchored | 1 | −0.12 |
| Misc | 18 | −0.21 |
| Oxidoreductases | 6 | −0.09 |
| Proteases | 1 | −0.03 |
| Ribosome | 3 | −0.11 |
| Synthases | 4 | −0.14 |
| Transferases | 6 | −0.12 |

[1817] The validity of the above method was confirmed using FtsZ. In the case of FtsZ, a crystal structure from M. Janeschi was available. Examination of the gross structural features determined using the above modelling showed all of the folds in the correct place, although there were some minor differences from the structure determined by x-ray crystallography.

### Example 92

[1818] Functional Complementation

[1819] In another embodiment, gene products whose activities may be complemented by a proliferation-required gene product from Escherichia coli, Staphylococcus aureus, Enterococcus faecalis, Klebsiella pneumoniae, Pseudomonas aeruginosa, Salmonella typhimurium, Acinetobacter baumannii, Bacillus anthracis, Bacteroides fragilis, Bordetella pertussis, Borrelia burgdorferi, Burkholderia cepacia, Burkholderia fungorum, Burkholderia mallei, Campylobacter jejuni, Chlamydia pneumoniae, Chlamydia trachomatis, Clostridium acetobutylicum, Clostridium botulinum, Clostridium difficile, Corynebacterium diptheriae, Enterobacter cloacae, Enterococcus faecium, Haemophilus influenzae, Helicobacter pylori, Legionella pneumophila, Listeria monocytogenes, Moraxella catarrhalis, Mycobacterium avium, Mycobacterium bovis, Mycobacterium leprae, Mycobacterium tuberculosis, Mycoplasma genitalium, Mycoplasma pneumoniae, Neisseria gonorrhoeae, Neisseria meningitidis, Pasteurella multocida, Proteus mirabilis, Pseudomonas putida, Pseudomonas syringae, Salmonella paratyphi, Salmonella typhi, Staphylococcus epidermidis, Staphylococcus haemolyticus, Streptococcus mutans, Streptococcus pneumoniae, Streptococcus pyogenes, Treponema pallidum, Ureaplasma urealyticum, Vibrio cholerae or Yersinia pestis or homologous polypeptides are identified using merodiploids, created by introducing a plasmid or Bacterial Artificial Chromosome into an organism having a mutation in the essential gene which reduces or eliminates the activity of the gene product. In some embodiments, the mutation may be a conditional mutation, such as a temperature sensitive mutation, such that the organism proliferates under permissive conditions but is unable to proliferate under non-permissive conditions in the absence of complementation by the gene on the plasmid or Bacterial Artificial Chromosome. Alternatively, duplications may be constructed as described in Roth et al. (1987) Biosynthesis of Aromatic Amino Acids in Escherichia coli and Salmonella typhimurium, F. C. Neidhardt, ed., American Society for Microbiology, publisher, pp. 2269-2270, the disclosure of which is incorporated herein by reference in its entirety. Such methods are familiar to those skilled in the art.

[1820] It will be appreciated that no matter how detailed the foregoing appears in text, the invention can be practiced in many ways. As is also stated above, it should further be noted that the use of particular terminology when describing certain features or aspects of the present invention should not be taken to imply that the broadest reasonable meaning of such terminology is not intended, or that the terminology is being re-defined herein to be restricted to including any specific characteristics of the features or aspects of the invention with which that terminology is associated. Thus, although this invention has been described in terms of certain preferred embodiments, other embodiments which will be apparent to those of ordinary skill in the art in view of the disclosure herein are also within the scope of this invention. Accordingly, the scope of the invention is intended to be defined only by reference to the appended claims and any equivalents thereof. All documents cited herein are incorporated herein by reference in their entireties

What is claimed is:

1. A purified or isolated nucleic acid sequence comprising a nucleotide sequence consisting essentially of one of SEQ ID NOS: 1-6213, wherein expression of said nucleic acid inhibits proliferation of a cell.

2. A purified or isolated nucleic acid comprising a fragment of one of SEQ ID NOS.: 1-6213, said fragment selected from the group consisting of fragments comprising at least 10, at least 20, at least 25, at least 30, at least 50 and more than 50 consecutive nucleotides of one of SEQ ID NOS: 1-6213.

3. A vector comprising a promoter operably linked to the nucleic acid of claim 1.

4. A host cell containing the vector of claim 3.

5. A method for screening a candidate compound for the ability to reduce cellular proliferation, said method comprising the steps of:
(a) providing a sublethal level of an antisense nucleic acid complementary to at least a portion of a nucleic acid encoding a gene product in a cell to reduce the activity or amount of said gene product in said cell, thereby producing a sensitized cell, wherein said gene product is a gene product whose activity or amount is reduced by an antisense nucleic acid comprising a nucleotide sequence selected from the group consisting of SEQ ID NOS.: 1-6213;
(b) contacting said sensitized cell with a compound; and
(c) determining the degree to which said compound inhibits proliferation of said sensitized cell relative to a nonsensitized cell.

6. The method of claim 5, wherein said determining step comprises determining whether said compound inhibits the growth of said sensitized cell to a greater extent than said compound inhibits the growth of said nonsensitized cell.

7. The method of claim 5, wherein said gene product is from an organism other than E. coli.

8. The method of claim 5, wherein said cell is not an E. coli cell.

9. The method of claim 5, wherein said cell is selected from the group consisting of bacterial cells, fungal cells, plant cells, and animal cells.

10. The method of claim 5, wherein said cell is an organism selected from the group consisting of Acinetobacter baumannii, Anaplasma marginale, Aspergillus fumigatus, Bacillus anthracis, Bacteroides fragilis, Bordetella pertussis, Borrelia burgdorferi, Burkholderia cepacia, Burkholderia fungorum, Burkholderia mallei, Campylobacter jejuni, Candida albicans, Candida glabrata (also called Torulopsis glabrata), Candida tropicalis, Candida parapsilosis, Candida guilliermondii, Candida krusei, Candida kefyr (also called Candida pseudotropicalis), Candida dubliniensis, Chlamydia pneumoniae, Chlamydia trachomatis, Clostridium acetobutylicum, Clostridium botulinum, Clostridium difficile, Clostridium perfringens, Coccidioides immitis, Corynebacterium diptheriae, Cryptococcus neoformans, Enterobacter cloacae, Enterococcus faecalis, Enterococcus faecium, Escherichia coli, Haemophilus influenzae, Helicobacter pylori, Histoplasma capsulatum, Klebsiella pneumoniae, Legionella pneumophila, Listeria monocytogenes, Moraxella catarrhalis, Mycobacterium avium, Mycobacterium bovis, Mycobacterium leprae, Mycobacterium tuberculosis, Mycoplasma genitalium, Mycoplasma pneumoniae, Neisseria gonorrhoeae, Neisseria meningitidis, Nocardia asteroides, Pasteurella haemolytica, Pasteurella multocida, Pneumocystis carinii, Proteus mirabilis, Proteus vulgaris, Pseudomonas aeruginosa, Pseudomonas putida, Pseudomonas syringae, Salmonella bongori, Salmonella cholerasuis, Salmonella enterica, Salmonella paratyphi, Salmonella typhi, Salmonella typhimurium, Shigella boydii, Shigella dysenteriae, Shigella flexneri, Shigella sonnei, Staphylococcus aureus, Staphylococcus epidermidis, Staphylococcus haemolyticus, Streptococcus pneumoniae, Streptococcus mutans, Streptococcus pyogenes, Treponema pallidum, Ureaplasma urealyticum, Vibrio cholerae, Vibrio parahaemolyticus, Vibrio vulnificans, Yersinia enterocolitica, Yersinia pestis and any species falling within the genera of any of the above species.

11. The method of claim 5, wherein said cell is a Gram positive bacterium.

12. The method of claim 11, wherein said Gram positive bacterium is selected from the group consisting of Staphylococcus species, Streptococcus species, Enterococcus species, Mycobacterium species, Clostridium species, and Bacillus species.

13. The method of claim 11, wherein said Gram positive bacterium is a Staphylococcus species.

14. The method of claim 13, wherein said Staphylococcus species is coagulase negative.

15. The method of claim 13, wherein said Staphylococcus species is Staphylococcus aureus.

16. The method of claim 15, wherein said Staphylococcus aureus is selected from the group consisting of Staphylococcus aureus RN450 and Staphylococcus aureus RN4220.

17. The method of claim 5, wherein said antisense nucleic acid is transcribed from an inducible promoter.

18. The method of claim 5, further comprising the step of contacting said cell with a concentration of inducer which induces transcription of said antisense nucleic acid to a sublethal level.

19. The method of claim 5, wherein growth inhibition is measured by monitoring optical density of a liquid culture.

20. The method of claim 5, wherein said antisense nucleic acid comprises a nucleotide sequence selected from the group consisting of SEQ ID NOS.: 1-6213 or a proliferation-inhibiting portion thereof.

21. The method of claim 20, wherein said proliferation inhibiting portion of one of SEQ ID NOS.: 1-6213 is a fragment comprising at least 10, at least 20, at least 25, at least 30, at least 50 or more than 51 consecutive nucleotides of one of SEQ ID NOS.: 1-6213.

22. The method of claim 5, wherein said gene product is an RNA.

23. The method of claim 5, wherein nucleic acid encoding said gene product comprises a nucleotide sequence selected from the group consisting of SEQ ID NOS.: 6214-42397.

24. The method of claim 5, wherein said gene product is a polypeptide.

25. The method of claim 24, wherein said polypeptide comprises an amino acid sequence selected from the group consisting of SEQ ID NOS.: 42398-78581.

26. A compound identified using the method of claim 5.

27. A method for inhibiting cellular proliferation comprising introducing an effective amount of a compound with activity against a gene whose activity or expression is inhibited by an antisense nucleic acid comprising a nucleotide sequence selected from the group consisting of SEQ ID NOS.: 1-6213 or a compound with activity against the product of said gene into a population of cells expressing said gene.

28. A method for inhibiting the activity or expression of a gene in an operon required for proliferation wherein the activity or expression of at least one gene in said operon is inhibited by an antisense nucleic acid comprising a sequence selected from the group consisting of SEQ ID NOS.: 1-6213, said method comprising contacting a cell in a cell population with an antisense nucleic acid complementary to at least a portion of said operon.

29. The method of claim 28, wherein said antisense nucleic acid comprises a nucleotide sequence selected from the group consisting of SEQ ID NOS.: 1-6213 or a proliferation-inhibiting portion thereof.

30. The method of claim 29, wherein said proliferation inhibiting portion of one of SEQ ID NOS.: 1-6213 is a fragment comprising at least 10, at least 20, at least 25, at least 30, at least 50 or more than 51 consecutive nucleotides of one of SEQ ID NOS.: 1-6213.

31. The method of claim 28, wherein said gene comprises a nucleotide sequence selected from the group consisting of SEQ ID NOS.: 6214-42397.

32. The method of claim 28, wherein said gene encodes a polypeptide comprising a nucleotide sequence selected from the group consisting of SEQ ID NOS.: 42398-78581.

33. A method of screening a candidate compound for the ability to inhibit cellular proliferation, said method comprising:
(a) contacting a cell with a sublethal level of a nucleic acid comprising a nucleotide sequence selected from the group consisting of SEQ ID NOS. 1-6213 or a portion thereof which inhibits the proliferation of the cell from which said nucleic acid was obtained, thus sensitizing said cell;
(b) contacting the sensitized cell with a compound; and
(c) determining the degree to which said compound inhibits proliferation of said sensitized cell relative to a nonsensitized cell.

34. A method for screening a candidate compound for activity against a biological pathway required for proliferation, said method comprising:
(a) sensitizing a cell by providing a sublethal level of an antisense nucleic acid complementary to at least a portion of a nucleic acid encoding a gene product required for proliferation, wherein the activity or expression of said gene product is inhibited by an antisense nucleic acid comprising a nucleotide sequence selected from the group consisting of SEQ ID NOS.: 1-6213, in said cell to reduce the activity or amount of said gene product;
(b) contacting the sensitized cell with a compound; and
(c) determining the degree to which said compound inhibits the growth of said sensitized cell relative to a nonsensitized cell.

35. The method of claim 34, wherein said antisense nucleic acid comprises a nucleotide sequence selected from the group consisting of SEQ ID NOS.: 1-6213 or a proliferation-inhibiting portion thereof.

36. The method of claim 35, wherein said proliferation inhibiting portion of one of SEQ ID NOS.: 1-6213 is a fragment comprising at least 10, at least 20, at least 25, at least 30, at least 50 or more than 51 consecutive nucleotides of one of SEQ ID NOS.: 1-6213.

37. The method of claim 34, wherein nucleic acid encoding said gene product comprises a nucleotide sequence selected from the group consisting of SEQ ID NOS.: 6214-42397.

38. The method of claim 34, wherein said gene product is a polypeptide.

39. The method of claim 38, wherein said polypeptide comprises an amino acid sequence selected from the group consisting of SEQ ID NOS.: 42398-78581.

40. A method for screening a candidate compound for the ability to inhibit cellular proliferation, said method comprising:
(a) contacting a cell with an agent which reduces the activity or level of a gene product required for proliferation of said cell, wherein said gene product is a gene product whose activity or expression is inhibited by an antisense nucleic acid comprising a nucleotide sequence selected from the group consisting of SEQ ID NOS.: 1-6213;
(b) contacting said cell with a compound; and
(c) determining whether said compound reduces proliferation of said contacted cell by acting on said gene product.

41. The method of claim 40, wherein said agent which reduces the activity or level of a gene product required for proliferation of said cell comprises an antisense nucleic acid to a gene or operon required for proliferation.

42. A method for screening a candidate compound for the ability to reduce cellular proliferation comprising:
(a) providing a sublethal level of an antisense nucleic acid complementary to at least a portion of a nucleic acid encoding a gene product in a cell to reduce the activity or amount of said gene product in said cell, thereby producing a sensitized cell, wherein said gene product is selected from the group consisting of a gene product having having at least 70% nucleic acid identity as determined using BLASTN version 2.0 with the default parameters to a gene product whose expression is inhibited by an antisense nucleic acid comprising a nucleotide sequence selected from the group consisting of SEQ ID NOS.: 1-6213, a gene product encoded by a nucleic acid having at least 70% nucleotide sequence identity as determined using BLASTN version 2.0 with the default parameters to a nucleic acid encoding a gene product whose expression is inhibited by an antisense nucleic acid comprising a nucleotide sequence selected from the group consisting of SEQ ID NOS: 1-6213, a gene product having at least 25% amino acid identity as determined using FASTA version 3.0t78 with the default parameters to a gene product whose expression is inhibited by an antisense nucleic acid comprising a nucleotide sequence selected from the group consisting of SEQ ID NOS.: 1-6213, a gene product encoded by a nucleic acid comprising a nucleotide sequence which hybridizes to a nucleic acid selected from the group consisting of SEQ ID NOS.: 1-6213 under stringent conditions, a gene product encoded by a nucleic acid comprising a nucleotide sequence which hybridizes to a nucleic acid comprising a nucleotide sequence selected from the group consisting of SEQ ID NOS.: 1-6213 under moderate conditions, and a gene product whose activity may be complemented by the gene product whose activity is inhibited by a nucleic acid selected from the group consisting of SEQ ID NOS: 1-6213;
(b) contacting said sensitized cell with a compound; and
(c) determining the degree to which said compound inhibits the growth of said sensitized cell relative to a nonsensitized cell.

43. The method of claim 42, wherein said determining step comprises determining whether said compound inhibits the growth of said sensitized cell to a greater extent than said compound inhibits the growth of said nonsensitized cell.

44. The method of claim 42, wherein said gene product is from an organism other than E. coli.

45. The method of claim 42, wherein said cell is not an E. coli cell.

46. The method of claim 42, wherein said cell is selected from the group consisting of bacterial cells, fungal cells, plant cells, and animal cells.

47. The method of claim 42, wherein said cell is an organism selected from the group consisting of Acinetobacter baumannii, Anaplasma marginale, Aspergillus fumigatus, Bacillus anthracis, Bacteroides fragilis, Bordetella pertussis, Borrelia burgdorferi, Burkholderia cepacia, Burkholderia fungorum, Burkholderia mallei, Campylobacter jejuni, Candida albicans, Candida glabrata (also called Torulopsis glabrata), Candida tropicalis, Candida parapsilosis, Candida guilliermondii, Candida krusei, Candida kefyr (also called Candida pseudotropicalis), Candida dubliniensis, Chlamydia pneumoniae, Chlamydia trachomatis, Clostridium acetobutylicum, Clostridium botulinum, Clostridium difficile, Clostridium perfringens, Coccidioides immitis, Corynebacterium diptheriae, Cryptococcus neoformans, Enterobacter cloacae, Enterococcus faecalis, Enterococcus faecium, Escherichia coli, Haemophilus influenzae, Helicobacter pylori, Histoplasma capsulatum, Klebsiella pneumoniae, Legionella pneumophila, Listeria monocytogenes, Moraxella catarrhalis, Mycobacterium avium, Mycobacterium bovis, Mycobacterium leprae, Mycobacterium tuberculosis, Mycoplasma genitalium, Mycoplasma pneumoniae, Neisseria gonorrhoeae, Neisseria meningitidis, Nocardia asteroides, Pasteurella haemolytica, Pasteurella multocida, Pneumocystis carinii, Proteus mirabilis, Proteus vulgaris, Pseudomonas aeruginosa, Pseudomonas putida, Pseudomonas syringae, Salmonella bongori, Salmonella cholerasuis, Salmonella enterica, Salmonella paratyphi, Salmonella typhi, Salmonella typhimurium, Shigella boydii, Shigella dysenteriae, Shigella flexneri, Shigella sonnei, Staphylococcus aureus, Staphylococcus epidermidis, Staphylococcus haemolyticus, Streptococcus pneumoniae, Streptococcus mutans, Streptococcus pyogenes, Treponema pallidum, Ureaplasma urealyticum, Vibrio cholerae, Vibrio parahaemolyticus, Vibrio vulnificans, Yersinia enterocolitica, Yersinia pestis and any species falling within the genera of any of the above species.

48. The method of claim 42, wherein said cell is a Gram positive bacterium.

49. The method of claim 48, wherein said Gram positive bacterium is selected from the group consisting of Staphylococcus species, Streptococcus species, Enterococcus species, Mycobacterium species, Clostridium species, and Bacillus species.

50. The method of claim 48, wherein said Gram positive bacterium is a Staphylococcus species.

51. The method of claim 50, wherein said Staphylococcus species is coagulase negative.

52. The method of claim 50, wherein said Staphylococcus species is Staphylococcus aureus.

53. The method of claim 52, wherein said Staphylococcus aureus is selected from the group consisting of Staphylococcus aureus RN450 and Staphylococcus aureus RN4220.

54. The method of claim 42, wherein said antisense nucleic acid is transcribed from an inducible promoter.

55. The method of claim 42, further comprising the step of contacting said cell with a concentration of inducer which induces transcription of said antisense nucleic acid to a sublethal level.

56. The method of claim 42, wherein growth inhibition is measured by monitoring optical density of a liquid culture.

57. The method of claim 42, wherein said gene product is a polypeptide.

58. The method of claim 57, wherein said polypeptide comprises an amino acid sequence selected from the group consisting of SEQ ID NOS.: 42398-78581.

59. The method of claim 57, wherein said polypeptide comprises a polypeptide selected from the group consisting of a polypeptide having at least 99% amino acid identity as determined using FASTA version 3.0t78 to a polypeptide selected from the group consisting of SEQ ID NOS.: 42398-78581 and a polypeptide whose activity may be complemented by a polypeptide selected from the group consisting of SEQ ID NOS: 42398-78581.

60. The method of claim 57, wherein said polypeptide comprises a polypeptide selected from the group consisting of a polypeptide having at least 95% amino acid identity as determined using FASTA version 3.0t78 to a polypeptide selected from the group consisting of SEQ ID NOS.: 42398-78581 and a polypeptide whose activity may be complemented by a polypeptide selected from the group consisting of SEQ ID NOS: 42398-78581.

61. The method of claim 57, wherein said polypeptide comprises a polypeptide selected from the group consisting of a polypeptide having at least 90% amino acid identity as determined using FASTA version 3.0t78 to a polypeptide selected from the group consisting of SEQ ID NOS.: 42398-78581 and a polypeptide whose activity may be complemented by a polypeptide selected from the group consisting of SEQ ID NOS: 42398-78581.

62. The method of claim 57, wherein said polypeptide comprises a polypeptide selected from the group consisting of a polypeptide having at least 85% amino acid identity as determined using FASTA version 3.0t78 to a polypeptide selected from the group consisting of SEQ ID NOS.: 42398-78581 and a polypeptide whose activity may be complemented by a polypeptide selected from the group consisting of SEQ ID NOS: 42398-78581.

63. The method of claim 57, wherein said polypeptide comprises a polypeptide selected from the group consisting of a polypeptide having at least at least 80% amino acid identity as determined using FASTA version 3.0t78 to a polypeptide selected from the group consisting of SEQ ID NOS.: 42398-78581 and a polypeptide whose activity may be complemented by a polypeptide selected from the group consisting of SEQ ID NOS: 42398-78581.

64. The method of claim 57, wherein said polypeptide comprises a polypeptide selected from the group consisting of a polypeptide having at least 70% amino acid identity as determined using FASTA version 3.0t78 to a polypeptide selected from the group consisting of SEQ ID NOS.: 42398-78581 and a polypeptide whose activity may be complemented by a polypeptide selected from the group consisting of SEQ ID NOS: 42398-78581.

65. The method of claim 57, wherein said polypeptide comprises a polypeptide selected from the group consisting of a polypeptide having at least 60% amino acid identity as determined using FASTA version 3.0t78 to a polypeptide selected from the group consisting of SEQ ID NOS.: 42398-78581 and a polypeptide whose activity may be complemented by a polypeptide selected from the group consisting of SEQ ID NOS: 42398-78581.

66. The method of claim 57, wherein said polypeptide comprises a polypeptide selected from the group consisting of a polypeptide having at least 50% amino acid identity as determined using FASTA version 3.0t78 to a polypeptide selected from the group consisting of SEQ ID NOS.: 42398-78581 and a polypeptide whose activity may be complemented by a polypeptide selected from the group consisting of SEQ ID NOS: 42398-78581.

67. The method of claim 57, wherein said polypeptide comprises a polypeptide selected from the group consisting of a polypeptide having at least 40% amino acid identity as determined using FASTA version 3.0t78 to a polypeptide selected from the group consisting of SEQ ID NOS.: 42398-78581 and a polypeptide whose activity may be complemented by a polypeptide selected from the group consisting of SEQ ID NOS: 42398-78581.

68. The method of claim 57, wherein said polypeptide comprises a polypeptide selected from the group consisting of a polypeptide having at least 25% amino acid identity as determined using FASTA version 3.0t78 to a polypeptide selected from the group consisting of SEQ ID NOS.: 42398-78581 and a polypeptide whose activity may be complemented by a polypeptide selected from the group consisting of SEQ ID NOS: 42398-78581.

69. The method of claim 42, wherein said gene product is an RNA.

70. The method of claim 42, wherein nucleic acid encoding said gene product comprises a nucleotide sequence selected from the group consisting of SEQ ID NOS.: 6214-42397.

71. The method of claim 42, wherein said nucleic acid encoding said gene product comprises a nucleic acid selected from the group consisting of a nucleic acid comprising a nucleic acid having at least 97% nucleic acid identity as determined using BLASTN version 2.0 with the default parameters to a sequence selected from the group consisting of SEQ ID NOS.: 6214-42397, a nucleic acid which hybridizes to a sequence selected from the group consisting of SEQ ID NOS.: 6214-42397 under stringent conditions, and a nucleic acid which hybridizes to a sequence selected from the group consisting of SEQ ID NOS.: 6214-42397 under moderate conditions.

72. The method of claim 42, wherein said nucleic acid encoding said gene product comprises a nucleic acid selected from the group consisting of a nucleic acid comprising a nucleic acid having at least 95% nucleic acid identity as determined using BLASTN version 2.0 with the default parameters to a sequence selected from the group consisting of SEQ ID NOS.: 6214-42397, a nucleic acid which hybridizes to a sequence selected from the group consisting of SEQ ID NOS.: 6214-42397 under stringent conditions, and a nucleic acid which hybridizes to a sequence selected from the group consisting of SEQ ID NOS.: 6214-42397 under moderate conditions.

73. The method of claim 42, wherein said nucleic acid encoding said gene product comprises a nucleic acid selected from the group consisting of a nucleic acid comprising a nucleic acid having at least 90% nucleic acid identity as determined using BLASTN version 2.0 with the default parameters to a sequence selected from the group consisting of SEQ ID NOS.: 6214-42397, a nucleic acid which hybridizes to a sequence selected from the group consisting of SEQ ID NOS.: 6214-42397 under stringent conditions, and a nucleic acid which hybridizes to a sequence selected from the group consisting of SEQ ID NOS.: 6214-42397 under moderate conditions.

74. The method of claim 42, wherein said nucleic acid encoding said gene product comprises a nucleic acid selected from the group consisting of a nucleic acid comprising a nucleic acid having at least 85% nucleic acid identity as determined using BLASTN version 2.0 with the default parameters to a sequence selected from the group consisting of SEQ ID NOS.: 6214-42397, a nucleic acid which hybridizes to a sequence selected from the group consisting of SEQ ID NOS.: 6214-42397 under stringent conditions, and a nucleic acid which hybridizes to a sequence selected from the group consisting of SEQ ID NOS.: 6214-42397 under moderate conditions.

75. The method of claim 42, wherein said nucleic acid encoding said gene product comprises a nucleic acid selected from the group consisting of a nucleic acid comprising a nucleic acid having at least 80% nucleic acid identity as determined using BLASTN version 2.0 with the default parameters to a sequence selected from the group consisting of SEQ ID NOS.: 6214-42397, a nucleic acid which hybridizes to a sequence selected from the group consisting of SEQ ID NOS.: 6214-42397 under stringent conditions, and a nucleic acid which hybridizes to a sequence selected from the group consisting of SEQ ID NOS.: 6214-42397 under moderate conditions.

76. The method of claim 42, wherein said nucleic acid encoding said gene product comprises a nucleic acid selected from the group consisting of a nucleic acid comprising a nucleic acid having at least 70% nucleic acid identity as determined using BLASTN version 2.0 with the default parameters to a sequence selected from the group consisting of SEQ ID NOS.: 6214-42397, a nucleic acid which hybridizes to a sequence selected from the group consisting of SEQ ID NOS.: 6214-42397 under stringent conditions, and a nucleic acid which hybridizes to a sequence selected from the group consisting of SEQ ID NOS.: 6214-42397 under moderate conditions.

77. The method of claim 42, wherein said antisense nucleic acid comprises a nucleic acid having at least 97% nucleotide sequence identity to a nucleotide sequence selected from the group consisting of one of the sequences of SEQ ID NOS. 1-6213.

78. The method of claim 42, wherein said antisense nucleic acid comprises a nucleic acid having at least 95% nucleotide sequence identity to a nucleotide sequence selected from the group consisting of one of the sequences of SEQ ID NOS. 1-6213.

79. The method of claim 42, wherein said antisense nucleic acid comprises a nucleic acid having at least 90% nucleotide sequence identity to a nucleotide sequence selected from the group consisting of one of the sequences of SEQ ID NOS. 1-6213.

80. The method of claim 42, wherein said antisense nucleic acid comprises a nucleic acid having at least 85% nucleotide sequence identity to a nucleotide sequence selected from the group consisting of one of the sequences of SEQ ID NOS. 1-6213.

81. The method of claim 42, wherein said antisense nucleic acid comprises a nucleic acid having at least 80% nucleotide sequence identity to a nucleotide sequence selected from the group consisting of one of the sequences of SEQ ID NOS. 1-6213.

82. The method of claim 42, wherein said antisense nucleic acid comprises a nucleic acid having at least 70% nucleotide sequence identity to a nucleotide sequence selected from the group consisting of one of the sequences of SEQ ID NOS. 1-6213.

83. The method of claim 42, wherein said antisense nucleic acid comprises a nucleic acid having at least 70% nucleotide sequence identity to a nucleotide sequence comprising at least 100 consecutive nucleotides of a nucleotide sequence selected from the group consisting of SEQ ID NOS: 1-6213.

84. A compound identified using the method of claim 42.

85. A method for inhibiting cellular proliferation comprising introducing an effective amount of a compound with activity against a gene product or an effective amount of a compound with activity against a gene encoding said gene product into a population of cells expressing said gene product, wherein said gene product is selected from the group consisting of a gene product having at least 70% nucleotide sequence identity as determined using BLASTN version 2.0 with the default parameters to a gene product whose expression is inhibited by an antisense nucleic acid comprising a nucleotide sequence selected from the group consisting of SEQ ID NOS.: 1-6213, a gene product encoded by a nucleic acid having at least 70% nucleotide sequence identity as determined using BLASTN version 2.0 with the default parameters to a nucleic acid encoding a gene product whose expression is inhibited by an antisense nucleic acid comprising a nucleotide sequence selected from the group consisting of SEQ ID NOS: 1-6213, a gene product having at least 25% amino acid identity as determined using FASTA version 3.0t78 with the default parameters to a gene product whose expression is inhibited by an antisense nucleic acid comprising a nucleotide sequence selected from the group consisting of SEQ ID NOS.: 1-6213, a gene product encoded by a nucleic acid comprising a nucleotide sequence which hybridizes to a nucleic acid selected from the group consisting of SEQ ID NOS.: 1-6213 under stringent conditions, a gene product encoded by a nucleic acid comprising a nucleotide sequence which hybridizes to a nucleic acid selected from the group consisting of SEQ ID NOS.: 1-6213 under moderate conditions, and a gene product whose activity may be complemented by the gene product whose activity is inhibited by a nucleic acid selected from the group consisting of SEQ ID NOS: 1-6213.

86. A method for inhibiting the activity or expression of a gene in an operon which encodes a gene product required for proliferation comprising contacting a cell in a cell population with an antisense nucleic acid comprising at least a proliferation-inhibiting portion of said operon in an antisense orientation, wherein said gene product is selected from the group consisting of a gene product having at least 70% nucleotide sequence identity as determined using BLASTN version 2.0 with the default parameters to a gene product whose expression is inhibited by an antisense nucleic acid comprising a nucleotide sequence selected from the group consisting of SEQ ID NOS.: 1-6213, a gene product encoded by a nucleic acid having at least 70% nucleotide sequence identity as determined using BLASTN version 2.0 with the default parameters to a nucleic acid encoding a gene product whose expression is inhibited by an antisense nucleic acid comprising a nucleotide sequence selected from the group consisting of SEQ ID NOS: 1-6213, a gene product having at least 25% amino acid identity as determined using FASTA version 3.0t78 with the default parameters to a gene product whose expression is inhibited by an antisense nucleic acid comprising a nucleotide sequence selected from the group consisting of SEQ ID NOS.: 1-6213, a gene product encoded by a nucleic acid comprising a nucleotide sequence which hybridizes to a nucleic acid selected from the group consisting of SEQ ID NOS.: 1-6213 under stringent conditions, a gene product encoded by a nucleic acid comprising a nucleotide sequence which hybridizes to a nucleic acid selected from the group consisting of SEQ ID NOS.: 1-6213 under moderate conditions, and a gene product whose activity may be complemented by the gene product whose activity is inhibited by a nucleic acid selected from the group consisting of SEQ ID NOS: 1-6213.

87. The method of claim 86, wherein said antisense nucleic acid comprises a nucleotide sequence having at least 70% nucleotide sequence identity as determined using BLASTN version 2.0 with the default parameters to a nucleotide seqence selected from the group consisting of SEQ ID NOS.: 1-6213, a proliferation inhibiting portion thereof, a nucleic acid comprising a nucleotide sequence which hybridizes to a nucleic acid selected from the group consisting of SEQ ID NOS.: 1-6213 under stringent conditions, and a nucleic acid which comprising a nucleotide sequence which hybridizes to a nucleic acid selected from the group consisting of SEQ ID NOS.: 1-6213 under moderate conditions.

88. The method of claim 86, wherein said antisense nucleic acid has at least 70% nucleotide sequence identity as determined using BLASTN version 2.0 with the default parameters to a nucleotide sequence comprising at least 10, at least 20, at least 25, at least 30, at least 50 or more than 50 consecutive nucleotides of one of SEQ ID NOS.: 1-6213.

89. The method of claim 86, wherein said gene comprises a nucleic acid selected from the group consisting of a nucleic acid comprising a nucleic acid having at least 70% nucleotide sequence identity as determined using BLASTN version 2.0 with the default parameters to a nucleotide sequence selected from the group consisting of SEQ ID NOS.: 6214-42397, a nucleic acid comprising a nucleotide sequence which hybridizes to a sequence selected from the group consisting of SEQ ID NOS.: 6214-42397 under stringent conditions, and a nucleic acid comprising a nucleotide sequence which hybridizes to a nucleotide sequence selected from the group consisting of SEQ ID NOS.: 6214-42397 under moderate condtions.

90. The method of claim 86, wherein said gene encodes a polypeptide comprising a polypeptide selected from the group consisting of a polypeptide having at least 25% amino acid identity as determined using FASTA version 3.0t78 to a polypeptide selected from the group consisting of SEQ ID NOS.: 42398-78581 and a polypeptide whose activity may be complemented by a polypeptide selected from the group consisting of SEQ ID NOS: 42398-78581.

91. A method of screening a candidate compound for the ability to inhibit proliferation comprising:
(a) sensitizing a cell by contacting said cell with a sublethal level of an antisense nucleic acid, wherein said antisense nucleic acid is selected from the group consisting of a nucleic acid having at least 70% nucleotide sequence identity as determined using BLASTN version 2.0 with the default parameters to a nucleotide sequence selected from the group consisting of SEQ ID NOS. 1-6213 or a portion thereof which inhibits the proliferation of the cell from which said nucleic acid was obtained, a nucleic acid comprising a nucleotide sequence which hybridizes to a nucleic acid selected from the group consisting of SEQ ID NOS.: 1-6213 under stringent conditions, and a nucleic acid comprising a nucleotide sequence which hybridizes to a nucleic acid selected from the group consisting of SEQ ID NOS.: 1-6213 under moderate conditions;
(b) contacting the sensitized cell with a compound; and
(c) determining the degree to which said compound inhibits proliferation of said sensitized test cell relative to a nonsensitized cell.

92. A method for screening a compound for activity against a biological pathway required for proliferation comprising:
(a) sensitizing a cell by providing a sublethal level of an antisense nucleic acid complementary to at least a portion of a nucleic acid encoding a gene product required for proliferation, wherein said gene product is selected from the group consisting of a gene product having at least 70% nucleotide sequence identity as determined using BLASTN version 2.0 with the default parameters to a gene product whose expression is inhibited by an antisense nucleic acid comprising a nucleotide sequence selected from the group consisting of SEQ ID NOS.: 1-6213, a gene product encoded by a nucleic acid having at least 70% nucleotide sequence identity as determined using BLASTN version 2.0 with the default parameters to a nucleic acid encoding a gene product whose expression is inhibited by an antisense nucleic acid comprising a nucleotide sequence selected from the group consisting of SEQ ID NOS: 1-6213, a gene product having at least 25% amino acid identity as determined using FASTA version 3.0t78 with the default parameters to a gene product whose expression is inhibited by an antisense nucleic acid comprising a nucleotide sequence selected from the group consisting of SEQ ID NOS.: 1-6213, a gene product encoded by a nucleic acid comprising a nucleotide sequence which hybridizes to a nucleic acid selected from the group consisting of SEQ ID NOS.: 1-6213 under stringent conditions, a gene product encoded by a nucleic acid comprising a nucleotide sequence which hybridizes to a nucleic acid selected from the group consisting of SEQ ID NOS.: 1-6213 under moderate conditions, and a gene product whose activity may be complemented by the gene product whose activity is inhibited by a nucleic acid selected from the group consisting of SEQ ID NOS: 1-6213;
(b) contacting the sensitized cell with a compound; and
(c) determining the extent to which said compound inhibits the growth of said sensitized cell relative to a nonsensitized cell.

93. The method of claim 92, wherein said antisense nucleic acid comprises a nucleotide sequence having at least 70% nucleotide sequence identity as determined using BLASTN version 2.0 with the default parameters to a nucleotide seqence selected from the group consisting of SEQ ID NOS.: 1-6213, a proliferation inhibiting portion thereof, a nucleic acid comprising a nucleotide sequence which hybridizes to a nucleic acid selected from the group consisting of SEQ ID NOS.: 1-6213 under stringent conditions, and a nucleic acid which comprising a nucleotide sequence which hybridizes to a nucleic acid selected from the group consisting of SEQ ID NOS.: 1-6213 under moderate conditions.

94. The method of claim 92, wherein said antisense nucleic acid has at least 70% nucleotide sequence identity as determined using BLASTN version 2.0 with the default parameters to a nucleotide sequence comprising at least 10, at least 20, at least 25, at least 30, at least 50 or more than 50 consecutive nucleotides of one of SEQ ID NOS.: 1-6213.

95. The method of claim 92, wherein said nucleic acid encoding said gene product comprises a nucleic acid selected from the group consisting of a nucleic acid comprising a nucleic acid having at least 70% nucleotide sequence identity as determined using BLASTN version 2.0 with the default parameters to a nucleotide sequence selected from the group consisting of SEQ ID NOS.: 6214-42397, a nucleic acid comprising a nucleotide sequence which hybridizes to a sequence selected from the group consisting of SEQ ID NOS.: 6214-42397 under stringent conditions, and a nucleic acid comprising a nucleotide sequence which hybridizes to a nucleotide sequence selected from the group consisting of SEQ ID NOS.: 6214-42397 under moderate condtions.

96. The method of claim 92, wherein said gene product comprises a polypeptide selected from the group consisting of a polypeptide having at least 25% amino acid identity as determined using FASTA version 3.0t78 to a polypeptide selected from the group consisting of SEQ ID NOS.: 42398-78581 and a polypeptide whose activity may be complemented by a polypeptide selected from the group consisting of SEQ ID NOS: 42398-78581.

97. A method for screening a candidate compound for the ability to inhibit cellular proliferation comprising:
(a) contacting a cell with an agent which reduces the activity or level of a gene product required for proliferation of said cell, wherein said gene product is selected from the group consisting of a gene product having at least 70% nucleotide sequence identity as determined using BLASTN version 2.0 with the default parameters to a gene product whose expression is inhibited by an antisense nucleic acid comprising a nucleotide sequence selected from the group consisting of SEQ ID NOS.: 1-6213, a gene product encoded by a nucleic acid having at least 70% nucleotide sequence identity as determined using BLASTN version 2.0 with the default parameters to a nucleic acid encoding a gene product whose expression is inhibited by an antisense nucleic acid comprising a nucleotide sequence selected from the group consisting of SEQ ID NOS: 1-6213, a gene product having at least 25% amino acid identity as determined using FASTA version 3.0t78 with the default parameters to a gene product whose expression is inhibited by an antisense nucleic acid comprising a nucleotide sequence selected from the group consisting of SEQ ID NOS.: 1-6213, a gene product encoded by a nucleic acid comprising a nucleotide sequence which hybridizes to a nucleic acid selected from the group consisting of SEQ ID NOS.: 1-6213 under stringent conditions, a gene product encoded by a nucleic acid comprising a nucleotide sequence which hybridizes to a nucleic acid selected from the group consisting of SEQ ID NOS.: 1-6213 under moderate conditions, and a gene product whose activity may be complemented by the gene product whose activity is inhibited by a nucleic acid selected from the group consisting of SEQ ID NOS: 1-6213;
(b) contacting said cell with a compound; and
(c) determining the degree to which said compound reduces proliferation of said contacted cell relative to a cell which was not contacted with said agent.

98. The method of claim 97, wherein said agent which reduces the activity or level of a gene product required for proliferation of said cell comprises an antisense nucleic acid to a gene or operon required for proliferation.

99. A method for screening a candidate compound for the ability to reduce cellular proliferation comprising:
(a) producing a sensitized cell by providing in said cell a sublethal level of an antisense nucleic acid complementary to a nucleic acid encoding a polypeptide selected from the group consisting of the polypeptides designated in the column entitled GENE NAME of Table IV;
(b) contacting said sensitized cell with a compound; and
(c) determining the degree to which said compound inhibits the growth of said sensitized cell relative to a nonsensitized cell.

100. A method for sensitizing a cell of a microorganism, comprising inhibiting the production or activity of a gene product selected from the group consisting of the polypeptides designated in the column entitled GENE NAME of Table IV.

101. The method of claim 100, wherein the cell is sensitized by production of an antisense sequence that inhibits production of said gene product.

102. The method of claim 100, wherein the inhibition is a sublethal inhibition, further comprising contacting the sensitized cell with a candidate compound and ascertaining the effect of the candidate compound on the proliferation or viability of the sensitized cell.

103. The method of claim 100, wherein said cell is selected from the group consisting of Acinetobacter baumannii, Anaplasma marginale, Aspergillus fumigatus, Bacillus anthracis, Bacteroides fragilis, Bordetella pertussis, Borrelia burgdorferi, Burkholderia cepacia, Burkholderia fungorum, Burkholderia mallei, Campylobacter jejuni, Candida albicans, Candida glabrata (also called Torulopsis glabrata), Candida tropicalis, Candida parapsilosis, Candida guilliermondii, Candida krusei, Candida kefyr (also called Candida pseudotropicalis), Candida dubliniensis, Chlamydia pneumoniae, Chlamydia trachomatis, Clostridium acetobutylicum, Clostridium botulinum, Clostridium difficile, Clostridium perfringens, Coccidioides immitis, Corynebacterium diptheriae, Cryptococcus neoformans, Enterobacter cloacae, Enterococcus faecalis, Enterococcus faecium, Escherichia coli, Haemophilus influenzae, Helicobacter pylori, Histoplasma capsulatum, Klebsiella pneumoniae, Legionella pneumophila, Listeria monocytogenes, Moraxella catarrhalis, Mycobacterium avium, Mycobacterium bovis, Mycobacterium leprae, Mycobacterium tuberculosis, Mycoplasma genitalium, Mycoplasma pneumoniae, Neisseria gonorrhoeae, Neisseria meningitidis, Nocardia asteroides, Pasteurella haemolytica, Pasteurella multocida, Pneumocystis carinii, Proteus mirabilis, Proteus vulgaris, Pseudomonas aeruginosa, Pseudomonas putida, Pseudomonas syringae, Salmonella bongori, Salmonella cholerasuis, Salmonella enterica, Salmonella paratyphi, Salmonella typhi, Salmonella typhimurium, Shigella boydii, Shigella dysenteriae, Shigella flexneri, Shigella sonnei, Staphylococcus aureus, Staphylococcus epidermidis, Staphylococcus haemolyticus, Streptococcus pneumoniae, Streptococcus mutans, Streptococcus pyogenes, Treponema pallidum, Ureaplasma urealyticum, Vibrio cholerae, Vibrio parahaemolyticus, Vibrio vulnificans, Yersinia enterocolitica, Yersinia pestis and any species falling within the genera of any of the above species.

104. The method of claim 103, wherein said gene product is a polypeptide comprising a sequence selected from the group consisting of SEQ ID NOS: 42398-78581 and sequences having at least 25% amino acid identity to any one of SEQ ID NOS: 42398-78581.

105. The method of claim 100, wherein said cell is selected from the group consisting of Acinetobacter baumannii, Anaplasma marginale, Aspergillus fumigatus, Bacillus anthracis, Bacteroides fragilis, Bordetella pertussis, Borrelia burgdorferi, Burkholderia cepacia, Burkholderia fungorum, Burkholderia mallei, Campylobacter jejuni, Candida albicans, Candida glabrata (also called Torulopsis glabrata), Candida tropicalis, Candida parapsilosis, Candida guilliermondii, Candida krusei, Candida kefyr (also called Candida pseudotropicalis), Candida dubliniensis, Chlamydia pneumoniae, Chlamydia trachomatis, Clostridium acetobutylicum, Clostridium botulinum, Clostridium difficile, Clostridium perfringens, Coccidioides immitis, Corynebacterium diptheriae, Cryptococcus neoformans, Enterobacter cloacae, Enterococcus faecalis, Enterococcus faecium, Escherichia coli, Haemophilus influenzae, Helicobacter pylori, Histoplasma capsulatum, Klebsiella pneumoniae, Legionella pneumophila, Listeria monocytogenes, Moraxella catarrhalis, Mycobacterium avium, Mycobacterium bovis, Mycobacterium leprae, Mycobacterium tuberculosis, Mycoplasma genitalium, Mycoplasma pneumoniae, Neisseria gonorrhoeae, Neisseria meningitidis, Nocardia asteroides, Pasteurella haemolytica, Pasteurella multocida, Pneumocystis carinii, Proteus mirabilis, Proteus vulgaris, Pseudomonas aeruginosa, Pseudomonas putida, Pseudomonas syringae, Salmonella bongori, Salmonella cholerasuis, Salmonella enterica, Salmonella paratyphi, Salmonella typhi, Salmonella typhimurium, Shigella boydii, Shigella dysenteriae, Shigella flexneri, Shigella sonnei, Staphylococcus aureus, Staphylococcus epidermidis, Staphylococcus haemolyticus, Streptococcus pneumoniae, Streptococcus mutans, Streptococcus pyogenes, Treponema pallidum, Ureaplasma urealyticum, Vibrio cholerae, Vibrio parahaemolyticus, Vibrio vulnificans, Yersinia enterocolitica, Yersinia pestis and any species falling within the genera of any of the above species.

106. The method of claim 105, wherein said gene product is encoded by a nucleic acid comprising a sequence selected from the group consisting of SEQ ID NOS: 6214-42397 and sequences having at least 70% nucleotide identity to any one of SEQ ID NOS: 6214-42397.

The application's sequence listing, which the Patent Office published only in electronic form, follows.

SEQUENCE LISTING (78614 sequences)

SEQ ID NO: 1 - DNA, 245 bp, Enterococcus faecalis
ctgataatggacgagtttccatgatttttacgatgtctccaactttcgctgtgttgttttcatcatgcgctttatattttttagaatatttcatacgtttgccatagatagggtggtttttctttgtttcaacgacaactgtgattgttttatccattttgtctgataccacacgaccttggtaaactttacgttgatttctttcttcagtcatacgcgtttggcctccttccactattagttag

SEQ ID NO: 2 - DNA, 245 bp, Enterococcus faecalis; identical to SEQ ID NO: 1

SEQ ID NO: 3 - DNA, 532 bp, Enterococcus faecalis
ctgtagtgttaccaataccataaatgtaagtaagagaaactactacacgtttgtcacgagggatgtctactcctgcaatacgagccattattcgttacacctcctaattatccttgacgttgtttatgttttggatttgctgggcaaataaccataacacgtcctttacggcgaattactttacaatgttcacacattggttttactgatggtcttactttcatgataatacctcctgtggttttacggagtacaattatttaaagcgataagtaatacggccacgcgttaaatcatacggtgataattcaactgttactttgtcaccaggtaagatacggatgtagtgcatacggattttacctgaaacagtagcaagaacttggtgtccattttctagttcgactttaaacattgcattcggcaaagtttcgacgactgtaccttcgacttcaatcatatcttcttttgccacgcacagtacctccttgtacttgtttcgcgttttcacacgataaacggcggaactcca

SEQ ID NO: 4 - DNA, 372 bp, Enterococcus faecalis
cttttgtaacgtccattgttacagtaccagttttagggtttggcattaaaccttttggtcctaagacacggcctaatttaccaactgtagccatcatgtcaggagtcgcaacaactacgtcaaagtcgaaccatccaccttggatttttgcaaccatgtcgtcgtcgcctacgaaatctgcaccagcagcttcagcttctttagctttttcgcctttagcgaatactaaaacagtttgtgttttaccagttccgtttggaagcacaactgctccacggatttgttggtctgcttttttagggtcaacgttcaatttgtaagcaacttcaactgttgcgtcaaatttcgcgatgtttgtatcttttgctaaag

SEQ ID NO: 5 - DNA, 351 bp, Enterococcus faecalis
tgatttgattgtgattaaagattttttcgctccaggaatgtttcctttgattaagataacatttctttctacgtccactttaacaacttcaaggttttgaattgttacgcggtcgccacccatacggccggctagtcgtttatttttaaatacacggttaggcgctactggacccattgacccaggacgacggtgataacgagaaccatgagacataggtccgcggctttggccgtgacgtttgattgccccttggaatcctttacctttcgtagtacctgtaacatcaacaacgtctcctgcttggaaaacatctactttgatttctttacctacttcatattctcctag

SEQ ID NO: 6 - DNA, 372 bp, Enterococcus faecalis; identical to SEQ ID NO: 4

SEQ ID NO: 7 - DNA, 600 bp, Enterococcus faecalis
cttccatactttcgatcagtttttgttggatttcgtctttggcaccgttccaaacgccgattacacgttcataacgttcgtcatcagtaattaaaccacgacggaattgtttagtaattgtttcaacttgtttgtgggcagcatcaatgattgcttgtttttcatgaagaaccatgatatcggcaatccctaccgtcatcccagcatacgttgagtgtttgtaacctaagtctttcatgcggtcaagcattttagaggtttccgtaatgtggaatctcttgaagacttcagcaatgatatttccaagatttttcttcttgaatggtaaaactaattcttgctctttaatgtgtgcaggaatgtctgtaccagcttctacgaagtatttatctggtgtttgaacagttaagttatagtctgttggttcgttcaagtaagggaactcaacaggcatgatttcgttaaagatgatcttaccaactgtggtgattaagattcgttctttttgccaatcagtaaatggtttgtcacctaaaagtgttgtttgaaccccaatccgtgagtgtaaatgcacgtagccattttgccatgctaaaacag

SEQ ID NO: 8 - DNA, 244 bp, Enterococcus faecalis
tgataatggacgagtttccatgatttttacgatgtctccaactttcgctgtgttgttttcatcatgcgctttatattttttagaatatttcatacgtttgccatagatagggtggtttttctttgtttcaacgacaactgtgattgttttatccattttgtctgataccacacgaccttggtaaactttacgttgatttctttcttcagtcatacgcgtttggcctccttccactattagttag

SEQ ID NO: 9 - DNA, 243 bp, Enterococcus faecalis
ctgtcactgattttaatcctccaggatacattgagtgacggtagtaaattttgtctgtagcttttttacctgttaattttactttatcagcgttaattacgattacgaaatctccagtatccacatgtggtgtgaatgttggtttatttttaccacgtagtacagaagcaacaactgctgatagacgtcctaaaggaacatctgttgcatctactacgtaccatttacgttctacttcgccag

SEQ ID NO: 10 - DNA, 256 bp, Enterococcus faecalis
cttgttcacgcaatactgttttgatgcgtgcaatcgattgacgtacttctttaatacgtgcagtgttttctaattgacctgttgctaattggaatcttaagttgaacaattcttcttttaattgtttttctttatctagcatttcggcagtggttaattctctgatttctttaaccttcattcgattcaccacccatttcctcacgttttacgatcttagtttttaccggcaatttgtgagatgcaagacgaagag

SEQ ID NO: 11 - DNA, 256 bp, Enterococcus faecalis; identical to SEQ ID NO: 10

SEQ ID NO: 12 - DNA, 256 bp, Enterococcus faecalis; identical to SEQ ID NO: 10

SEQ ID NO: 13 - DNA, 481 bp, Enterococcus faecalis
ctgttttaccattaccagatgaagtaccacgtccaacacggttacgtacttggcgtgagccctcagcaggttttaattcatgaagtttcataggtttggcacctccttaagcaatcttctattacaaatctataaatcttaaacttcttctacgtccactaaatgtgaaatagtgttaaccatacctttgattgcttcattggcaggttttgtaacagtactattcactttacctaaacctaacgctttaactgtagcacgttggttttgaggacgtccgataacactgcgttttaaagtaatttttaattcagccattatttttgtcctccttaaccgataatttcttctacagatttaccgcgaagtgctgccacttcttcggcacgttttaattgttttagaccttcaacagttgcgcgaacaacgttaataggtgtgtttgaacctagtgatttagatgtaatatctgctacaccag

SEQ ID NO: 14 - DNA, 268 bp, Enterococcus faecalis
ctcttcttgcaataacttgttaaccacacctgggtttgcttgtccacgagttgctttcataatttgtccaacaaggaaaccaactgcacggtcttttccgtttttaaagtcatcaattgattgttggttgttgtctaaaacttcgttaatcattggtaataattgcgctggatcagataactgaacaaggccttttgcttcgacaacttctttagcgtctccaccgttttcaattaactctttgaacactttcttcgcaattttcgag

SEQ ID NO: 15 - DNA, 183 bp, Enterococcus faecalis
cttttttacctgttaattttactttatcagcgttaattacgattacgaaatctccagtatccacatgtggtgtgaatgttggtttatttttaccacgtagtacagaagcaacaactgctgatagacgtcctaaaggaacatctgttgcatctactacgtaccatttacgttctacttcgccag

SEQ ID NO: 16 - DNA, 235 bp, Enterococcus faecalis
tgtgtgaattgaaatgttaacacggtttgcagcgcgttcgatttcaattgtagatacagcagcatcagcaagttttgttgcgataaatttacggattcttaaatcttcgtgtaagaattcagcatactctttttcagcataccatttcgcatcccagtcgcggatgatgcctacacgcattccaattggatgtactttttgacccactgattgtccctcctcttaaatgtttaag

SEQ ID NO: 17 - DNA, 481 bp, Enterococcus faecalis; identical to SEQ ID NO: 13

SEQ ID NO: 18 - DNA, 239 bp, Enterococcus faecalis
ctgtgtgaattgaaatgttaacacaggtttgcagcgcgttcgatttcaattgtagatacagcagcatcagcaagttttgttgcagataaatttacaggattcttaaatcttcgtgtaagaattcagcatactctttttcagcataccatttcgcatcccagtcgcggatgatgcctacacgcattccaattggatgtactttttgacccactgattgtccctcctcttaaatgtttaag

SEQ ID NO: 19 - DNA, 544 bp, Enterococcus faecalis
tttacgttggcttgatgtgcgtcctaatttacggtaactcacgttgggttccctccttcgtttctgttctcacgagccactgctgttaagcaggactggaaacttcgtaaaagtcttaatcgtccttacgtaatcctaatcctagatcatgcaatttaagttttacttcttcaagagatttacgacctaaattacgtactttgatcatttctggttcagatttgtttgtaagttcttgtacagtattaatgcctgcacgttttaaacagttatatgaacgaactgataaatcaagttcttcaatcgtcatttctagcattttctctttttgagtttcttctttttccaccatgatttcagcgtttttcgcttcgtcagtaaggtttacaaagatatctaaatgctcagtcatgattttcgcagctaaacttagtgcttcttgaggaatgattgaaccatctgtccatatttccattgttaatttgtcgaaatcatcacgacgaccaacacgtgtattttctacttggtagttaacacgacgaac

SEQ ID NO: 20 - DNA, 326 bp, Enterococcus faecalis
ctgtatgaacgcggtgttggtccaaagactacgccacctccacgccattgtggtgaacggattgaaccttgacgagcacgaccagttcctttttgacgccatggtttgcggccaccgccacgaacagcgctacggtttttaactgcgtgtgttccttgtcttaatgaagcacgttgcatgatgattgcatcatagacaacactttcattaggttcgattccgaagatttcttcatttaaagtgatttcaccgttttgagttccatcttgtttgaataatgctacattcggcattccttagttcctcctttccctacacttatttag

SEQ ID NO: 21 - DNA, 268 bp, Enterococcus faecalis; identical to SEQ ID NO: 14

SEQ ID NO: 22 - DNA, 268 bp, Enterococcus faecalis; identical to SEQ ID NO: 14

SEQ ID NO: 23 - DNA, 268 bp, Enterococcus faecalis; identical to SEQ ID NO: 14

SEQ ID NO: 24 - DNA, 228 bp, Enterococcus faecalis
cttctacgaagtatttatctggtgtttgaacagttaagttatagtctgttggttcgttcaagtaagggaactcaacaggcatgatttcgttaaagatgatcttaccaactgtggtgattaagattcgttctttttgccaatcagtaaatggtttgtcacctaaaagtgttgtttgaaccccaatccgtgagtgtaaatgcacgtagccattttgccatgctaaaacag

SEQ ID NO: 25 - DNA, 314 bp, Enterococcus faecalis
ctacttctttgagtaagtgtggaataaaaattattctacgatgatacccatgcttcgtgcagttcctgcaaccatgcgcattgctgcttcaacgtcagcggcgtttaggtctgccattttaagttcagcgatttctttcacttgatcgcttgaaactgttgcaactttagttttgtttggttcacctgaacctttttcgatttttgcagcttttttcaataatactgcagcaggtggtgttttagtaatgaatgtaaatgaacgatcttcatatacagagattactactggaataatcaagcctgcttggtcag

SEQ ID NO: 26 - DNA, 265 bp, Enterococcus faecalis
cttgttcacgcaatactgttttgatgcgtgcaatcgattgacgtacttctttaatacgtgcagtgttttctaattgacctgttgctaattggaatcttaagttgaacaattcttcttttaattgtttttctttatctagcatttcggcagtggttaattctctgatttctttaaccttcattcgattcaccacccatttcctcacgttttacgatcttagtttttaccggcaatttgtgagatgcaagacgaagagcttcacgag

SEQ ID NO: 27 - DNA, 256 bp, Enterococcus faecalis; identical to SEQ ID NO: 10

SEQ ID NO: 28 - DNA, 245 bp, Enterococcus faecalis; identical to SEQ ID NO: 1

SEQ ID NO: 29 - DNA, 413 bp, Enterococcus faecalis
acttctaaagtttcatgtttaaccatgttcgcattacgaatgcgagttagaaaatctgcaattggatctgtcatgaccattgaactatttacctcctttatgcgagtttacttgtttaccagctagctttcttcacgccgggaatttgacctttataggcaagttcgcggaagcaaatacggcaaagatgaaatttacgataaactgaatgtggacgtccacaacgttcacaacgagtataagcttgtgttgaatgtttagcaggacgtttgtttttagcaatcattgattttttagccacgtagttcgcctccttatattatttttggaatggcatacctaattgtgccaacaattcgcgagactcttcgtcagtgttcgctgttgtaacaattacgatgtccataccgcgt

SEQ ID NO: 30 - DNA, 364 bp, Enterococcus faecalis
acctcccacgtctttcatatctttaaatatgaaacgaactgagaagctacttctttgagtaagtgtggaataaaaattattctacgatgatacccatgcttcgtgcagttcctgcaaccatgcgcattgctgcttcaacgtcagcggcgtttaggtctgccattttaagttcagcgatttctttcacttgatcgcttgaaactgttgcaactttagttttgtttggttcacctgaacctttttcgatttttgcagcttttttcaataatactgcagcaggtggtgttttagtaatgaatgtaaatgaacgatcttcatatacagagattactactggaataatcaagcctgcttggtcagctgt

SEQ ID NO: 31 - DNA, 422 bp, Enterococcus faecalis
actaagacagctccattggcttgtttggctaattggccgatttctacttctagtgggcggccgccccaagttgttttaaagacttgtttttctgtcatgattcttctcctttactcttgctctttggaaaagtcagacggctactaaacaaatgaaaaagtaacaagtcgttgctgctctttcatttggttagtagttcctaaaaactttccaaagaggaccttcaatagtgacaataagataaaaagcgagattctgattgaacctcgctttatacgtaatgattaacgacgtaatcctaaacgttggatcaattcgcggtaacgttggatgtcagttttacgtaagtaagctaacaagttacgacggtgaccgatttttttcattaaaccacggtaagaatggtgatcttttttgtgtgt

SEQ ID NO: 32 - DNA, 311 bp, Enterococcus faecalis
accaacattaccagggtcttggatattatctaaaagtaaccaaccacctttaaaagaaagcgactgctcttgttgcgtttccaaggtgacaattgccaaaattccttgtgaagttggcagctccgacaaactatttaaaacctcatcacttacaaaaattaatttttctgtttcttgttcagctaaccaagttccccattcttgttgacctctttggttaaacaaaatccactggacatcggcattggccttcacagcttcttcaactaaatgaaatccttctattatatattggttcagttcttctcggt

SEQ ID NO: 33 - DNA, 447 bp, Enterococcus faecalis
actattcactttacctaaacctaacgctttaactgtagcacgttggttttgaggacgtccgataacactgcgttttaaagtaatttttaattcagccattatttttgtcctccttaaccgataatttcttctacagatttaccgcgaagtgctgccacttcttcggcacgttttaattgttttagaccttcaacagttgcgcgaacaacgttaataggtgtgtttgaacctagtgatttagatgtaatatctgctacaccagctaattccaatacggcacgaactggtccaccagcagctaccccagaaccttctactgcaggtttcataaggatacggccgccaccgaatacgccaattacttcgtgcgggatagtagaaccaaccataggcacttcaactaagtttttcttcgcgtcttcgattgctttacggatagcttcaggt

SEQ ID NO: 34 - DNA, 298 bp, Enterococcus faecalis
acacgaacatcttcagatacgccaacgtttgctaaaacttttttagctgtagtgttaccaataccataaatgtaagtaagagaaactactacacgtttgtcacgagggatgtctactcctgcaatacgagccattattcgttacacctcctaattatccttgacgttgtttatgttttggatttgctgggcaaataaccataacacgtcctttacggcgaattactttacaatgttcacacattggttttactgatggtcttactttcatgataatacctcctgtggttttacggagt

SEQ ID NO: 35 - DNA, 493 bp, Enterococcus faecalis
ccacgataagttctagttggtgcaaattcacctaatttatgtcctaccatgtcttcttgaatgtaaacagggacatgtttccgtccatcatatacagcgattgtgaaacctacgaatgatggaaaaattgtagagcggcgagaccaagttttaattacttttttcttttcggcaccttgttgtgcttcgacctttttcatcaaatgatcatcgacgaaaggtcctttttttaaactacgacccatggtgaacctcctctcaaaatgtacgacacatggtcaaaaaaattatttagtacgacgacgaacgataagtttgtctgatttagcttttttattacgtgttttgtatccaattgctggttgaccccatggagatactggcgctttacgtccaattggtgttttaccttcaccaccaccgtgtgggtgatcgttagggttcattacgctaccacgaacagttgggcgtttacgcatccaacgagagcggg

SEQ ID NO: 36 - DNA, 238 bp, Enterococcus faecalis
cccgttaatttagcagctaagcgcgcattttgaccacagtttaccaattgctaatgacaattgataatcaggtacaacgacctgtacatgcctttgcctattttctggatcaaaaataacatctaatacttgagctggattcaaggcattactaatataaatagctggatcttcgttccattccacaatatccatattttcgccttttaattcattcacaatcgcttggacacgttgg

SEQ ID NO: 37 - DNA, 234 bp, Enterococcus faecalis
cccgttaatttagcagctaagcgcgcattttgaccacgtttaccaattgctaatgacaattgataatcaggtacaacgactgtacatgctttgctattttctggatcaaaaataacatctaatacttgagctggattcaaggcattactaatataaatagctggatcttcgttccattccacaatatccatattttcgccttttaattcattcacaatcgcttggacacgttgg

SEQ ID NO: 38 - DNA, 525 bp, Enterococcus faecalis
cctttacgagtacgtgcattatttttcgtgttttgtccacgagttggtaatccacgacggtgacggattccacggtatgaaccgatttccatcaagcgtttgatgtttaagttcacttcacgacgaagatccccttcaacttttaacttatcaatttccgcacgaatcgcatctgtttgttcgtttgttaaatcacgtacacgaacatcttcagatacgccaacgtttgctaaaacttttttagctgtagtgttaccaataccataaatgtaagtaagagaaactactacacgtttgtcacgagggatgtctactcctgcaatacgagccattattcgttacacctcctaattatccttgacgttgtttatgttttggatttgctgggcaaataaccataacacgtcctttacggcgaattactttacaatgttcacacattggttttactgatggtcttactttcatgataatacctcctgtggttttacggagtacaattatttaaagcgataagtaatacgg

SEQ ID NO: 39 - DNA, 442 bp, Enterococcus faecalis
acttgggcacggtatccgaccccgataagttcaagtgctttttggaaaccttcagaaacaccaacaaccatgttgttgaagtttgcacgagttgttccgtggattgttttcatttcttttgaatcgtttggacgagtgaatgtcacttcgtttccttcgatgttcattttgatatcagaagaaaattcgcgtgttaattcacctttaggtcctttaactgtaatgttgtttccgtcttgcttgatttcaacaccagcaggaagaacaacaactttattaccaatacggctcacttagagacacctccttgtgtattttttagaattaccatacgtaggcgattacttcgccgccgatatttttcgctctagcttctttgtcagtaattacaccctctgatgtagagatgattgcaattcctagaccgtttaatacttttggt

SEQ ID NO: 40 - DNA, 364 bp, Enterococcus faecalis; identical to SEQ ID NO: 30

SEQ ID NO: 41 - DNA, 298 bp, Enterococcus faecalis; identical to SEQ ID NO: 34

SEQ ID NO: 42 - DNA, 298 bp, Enterococcus faecalis; identical to SEQ ID NO: 34

SEQ ID NO: 43 - DNA, 361 bp, Enterococcus faecalis
acttgtgccaatgaatttccctccttaaattaagttcgtgatatctaatacttctggttgttgtgcagcatgtggatgctcagctccaccgtatacgttcaatttagtaaattgtttacgtcctaaagtgtttttaggtagcataccttttacagaagtttcgataagacggcgagagtttttgtcgcgtaattcaccagctgtcactgattttaatcctccaggatacattgagtgacggtagtaaattttgtctgtagcttttttacctgttaattttactttatcagcgttaattacgattacgaaatctccagtatccacatgtggtgtgaatgttggtttatttttaccacgtagt

SEQ ID NO: 44 - DNA, 361 bp, Enterococcus faecalis; identical to SEQ ID NO: 43

SEQ ID NO: 45 - DNA, 361 bp, Enterococcus faecalis; identical to SEQ ID NO: 43

SEQ ID NO: 46 - DNA, 538 bp, Enterococcus faecalis
acctgtaacacgacgtggtaaaattttgccacgttctgaaatgaatcgttttaacaattcagtatctttatagtcgatgtattcgatgtggtttgctgcgatatagtcgactttccgacgtttacgtccgcctcttctttgttgtgccattcttgttccctcctatcaaattcgtttagaatggtaaatcatcatctgaaatgtcgatagatgaacctgagccaccaaatggatcagaatctttatcgaaatcaggcataccgttattgttttgcgactgagaagatgatggattgaaactattgttgttgttattaaatccagaaccggcattgttattaccaaagctacgattttgtgattgataaccattttcgttgttattaaagctaccgccgccagttcctctttgttctgaagcagaacgagattctaacaattggaagttttcacaaaccacttcagttacgtagacacgttgaccttgttggttctcgtagttacgagtttgaattcttccgacaacacctaataatgt

SEQ ID NO: 47 - DNA, 364 bp, Enterococcus faecalis; identical to SEQ ID NO: 30

SEQ ID NO: 48 - DNA, 364 bp, Enterococcus faecalis; identical to SEQ ID NO: 30

SEQ ID NO: 49 - DNA, 298 bp, Enterococcus faecalis; identical to SEQ ID NO: 34

SEQ ID NO: 50 - DNA, 361 bp, Enterococcus faecalis; identical to SEQ ID NO: 43

SEQ ID NO: 51 - DNA, 364 bp, Enterococcus faecalis; identical to SEQ ID NO: 30

SEQ ID NO: 52 - DNA, 298 bp, Enterococcus faecalis; identical to SEQ ID NO: 34

SEQ ID NO: 53 - DNA, 502 bp, Enterococcus faecalis
acatcatcgcaatcgtcactgttaataaggttaaaatagcaccaactgaaatgattgtcgcgattgcgccatgattaatgaagcgcatcgcaaaagccaccggatccttgacccctaaatccgtaaatggaacaatcccagttaaaactaacgtaacaacaatatataacaatgttgaaataataatggaaccaataatcccttttggaatatcttttttcggattcttcacttcctccgcggccatgctaaccgcatcaaaccctagaaaggcaaagaaaactaaagcagcaccactgaaaacgcctgaaaaaccataaggaataaatggttgccagttcgttggtttcacataaaagattcccacgagaacaaataataaaataatcccaaacttcacgaaaaccattaagttatttaaacgtaacgctgttttcgcttctaaagatacccaaaaagttacggctacaacgaccaacatggcaatcaaatcaatatatgt

SEQ ID NO: 54 - DNA, 298 bp, Enterococcus faecalis; identical to SEQ ID NO: 34

SEQ ID NO: 55 - DNA, 298 bp, Enterococcus faecalis; identical to SEQ ID NO: 34

SEQ ID NO: 56 - DNA, 346 bp, Enterococcus faecalis
cgccaccgaatacgccaattacttcgtgcgggatagtagaaccaaccataggcacttcaactaagtttttcttcgcgtcttcgattgctttacggatagcttcaggtacttcttgtgctttaccagtaccgaaaccaacgtgtccgtttttgtcaccgacaacaactaaagctgcgaaacgtaaacgacgtccacctttaacaacttttgttacacggttgatcgctacaacgcggtcttctaattccaaatgttttggatcaatataaaccatgaatggtgttcctccttctcctaaaattctagtccattttcacgagcagcttcagctaaagcttgcacgcgg

SEQ ID NO: 57 - DNA, 387 bp, Enterococcus faecalis
ccgtttgatgtagaaccgccaccttttttatgggcaaataattgtaaattcatagtcaataacatagtctgcacctcctatttctcagtgattgtttttatttgaataaattcagtattttcgttctctattgattgtaaacctaataaaagattttctaatagaatttgggcaatatttttttgttcctgattgacagttgttaacatctcgacataaaggtagccaccttctacatcgtcaacttccacaatcggttcaaaacctgctaaggcatcaatcccattgactgtgctaattgctaaggcagaaactgccgcgcaaaccacatcgctgccataaggacctgcttcagcatgcccggttaattcgaatgaaacgattcgg

SEQ ID NO: 58 - DNA, 492 bp, Enterococcus faecalis
ccacgataagttctagttggtgcaaattcacctaatttatgtcctaccatgtcttcttgaatgtaaacagggacatgtttccgtccatcatatacagcgattgtgaaacctacgaatgatggaaaaattgtagagcggcgagaccaagttttaattacttttttcttttcggcaccttgttgtgcttcgacctttttcatcaaatgatcatcgacgaaaggtcctttttttaaactacgacccatggtgaacctcctctcaaaatgtacgacacatggtcaaaaaaattatttagtacgacgacgaacgataagtttgtctgatttagcttttttattacgtgttttgtatccaattgctggttgaccccatggagatactggcgctttacgtccaattggtgttttaccttcaccaccaccgtgtgggtgatcgttagggttcattacgctaccacgaacagttgggcgtttacgcatccaacgagagcgg

SEQ ID NO: 59 - DNA, 347 bp, Enterococcus faecalis
ccgccaccgaatacgccaattacttcgtgcgggatagtagaaccaaccataggcacttcaactaagtttttcttcgcgtcttcgattgctttacggatagcttcaggtacttcttgtgctttaccagtaccgaaaccaacgtgtccgtttttgtcaccgacaacaactaaagctgcgaaacgtaaacgacgtccacctttaacaacttttgttacacggttgatcgctacaacgcggtcttctaattccaaatgttttggatcaatataaaccatgaatggtgttcctccttctcctaaaattctagtccattttcacgagcagcttcagctaaagcttgcacgcgg

SEQ ID NO: 60 - DNA, 467 bp, Enterococcus faecalis
cctgtgccgctatattgtacttgtgccaatgaatttccctccttaaattaagttcgtgatatctaatacttctggttgttgtgcagcatgtggatgctcagctccaccgtatacgttcaatttagtaaattgtttacgtcctaaagtgtttttaggtagcataccttttacagaagtttcgataagacggcgagagtttttgtcgcgtaattcaccagctgtcactgattttaatcctccaggatacattgagtgacggtagtaaattttgtctgtagcttttttacctgttaattttactttatcagcgttaattacgattacgaaatctccagtatccacatgtggtgtgaatgttggtttatttttaccacgtagtacagaagcaacaactgctgatagacgtcctaaaggaacatctgttgcatctactacgtaccatttacgttctacttcgccagctttgg

SEQ ID NO: 61 - DNA, 492 bp, Enterococcus faecalis; identical to SEQ ID NO: 58

SEQ ID NO: 62 - DNA, 532 bp, Enterococcus faecalis
ccttttgcttcgacaacttctttagcagtctccaccgttttcaattaactctttgaacactttcttcgcaattttcgagcctgattgtgccatcgttaatcaaagtaatcatacccgctagattttctggtgttagtttagtatcggctaattcaactttttcacctgtttaagtaagcagaaacttcgcccattaaccagtttgatgcttgtttcgcatctgcaccgtttgctaaggttgcttcaaagaaatctgacatttctttcgttaaagtcaagaccattgcgtcgtattcaggtaaacctaattcactgatataacgggcacgacgtgaggctggcatttctggcaaactagcgcgaactttttcaatccattcatcatcaattgaaaaacgaggaacatctggctctgggaagtaacggtagtcacttgagccttctttaacacgcataagcaacgttgtactagttgcttcatcaaagcggcgtgtttcttgttgaatttcgccaccagataataggactttgg

SEQ ID NO: 63 - DNA, 467 bp, Enterococcus faecalis; identical to SEQ ID NO: 60

SEQ ID NO: 64 - DNA, 525 bp, Enterococcus faecalis; identical to SEQ ID NO: 38

SEQ ID NO: 65 - DNA, 492 bp, Enterococcus faecalis; identical to SEQ ID NO: 58

SEQ ID NO: 66 - DNA, 492 bp, Enterococcus faecalis; identical to SEQ ID NO: 58

SEQ ID NO: 67 - DNA, 492 bp, Enterococcus faecalis; identical to SEQ ID NO: 58

SEQ ID NO: 68 - DNA, 492 bp, Enterococcus faecalis; identical to SEQ ID NO: 58

SEQ ID NO: 69 - DNA, 492 bp, Enterococcus faecalis; identical to SEQ ID NO: 58

SEQ ID NO: 70 - DNA, 492 bp, Enterococcus faecalis; identical to SEQ ID NO: 58

SEQ ID NO: 71 - DNA, 347 bp, Enterococcus faecalis; identical to SEQ ID NO: 59

SEQ ID NO: 72 - DNA, 492 bp, Enterococcus faecalis; identical to SEQ ID NO: 58

SEQ ID NO: 73 - DNA, 387 bp, Enterococcus faecalis; identical to SEQ ID NO: 57

SEQ ID NO: 74 - DNA, 529 bp, Enterococcus faecalis
ccttttgcttcgacaacttctttagcgtctccaccgttttcaattaactctttgaacactttcttcgcaattttcgagctgattgtgccatcgttaatcaaagtaatcatacccgctagattttctggtgttagtttagtatcggctaattcaactttttcactgtttaagtaagcagaaacttcgcccattaaccagtttgatgcttgtttcgcatctgcaccgtttgctaaggttgcttcaaagaaatctgacatttctttcgttaaagtcaagaccattgcgtcgtattcaggtaaacctaattcactgatataacgggcacgacgtgaggctggcatttctggcaaactagcgcgaactttttcaatccattcatcatcaattgaaaaacgaggaacatctggctctgggaagtaacggtagtcacttgagccttctttaacacgcataagcaacgttgtactagttgcttcatcaaagcggcgtgtttcttgttgaatttcgccaccagataataggactttgg

SEQ ID NO: 75 - DNA, 562 bp, Enterococcus faecalis
ccagctgttttaccattaccagatgaagtaccacgtccaacacggttacgtacttggcgtgagccctcagcaggttttaattcatgaagtttcataggtttggcacctccttaagcaatcttctattacaaatctataaatcttaaacttcttctacgtccactaaatgtgaaatagtgttaaccatacctttgattgcttcattggcaggttttgtaacagtactattcactttacctaaacctaacgctttaactgtagcacgttggttttgaggacgtccgataacactgcgttttaaagtaatttttaattcagccattatttttgtcctccttaaccgataatttcttctacagatttaccgcgaagtgctgccacttcttcggcacgttttaattgttttagaccttcaacagttgcgcgaacaacgttaataggtgtgtttgaacctagtgatttagatgtaatatctgctacaccagctaattccaatacggcacgaactggtccaccagcagctaccccagaaccttctactgcaggtttcataaggatacgg

SEQ ID NO: 76 - DNA, 492 bp, Enterococcus faecalis; identical to SEQ ID NO: 58

SEQ ID NO: 77 - DNA, 575 bp, Enterococcus faecalis
actatcgtactacgtctgtcgttgtaattatcttaacacgattactacgataggtaaagtaaaaaaaagcacgtaatgcagaaatcattttaatttctgcactacgtgctgtcttcttttcagtctatagttgaatgttaaatggtatcaccattaaaaatagaattttttacaatcacataatcaactttacgaatcgcttctaaatcacgacctcccgcgtatgaaatggaagattgtaaatcttgttgcatttcgactaaagtatctgccaacttccctttatggcgtaaccagatttttttgccttcaacgtttttcttttcgcctttttggaattcagaggcgctaccaaagtattctttgtaaacaacaccatcttccactttggtttcacctggtgattcttcatgtccagcaaataatgaaccaatcatgaccatagttgccccaaaacgcacagattttgcaatgtctccatgggtccgaattccaccatctgcaataattggtttccgagcagctttggcacaccaacgtaaagccgctaactgccagccacctgtcccaaagcc

SEQ ID NO: 78 - DNA, 373 bp, Enterococcus faecalis
aacaaatttatattgtggaattttacgacgttcgccgaataattgttcatcttcacttggtgtattgtaataaaaaccagttgctaattcacgttgtgctactttccataattcatcaatccactcttgttggcagacatagttttcagggtcttccatgtaagaatcgacggcttttttatacacattagcgactgtcgaaacatagtgaatggatttcatgcggccttcaattttaaaactatcgacaccattttcaattaattctggaatatgttcaatcatagacatatctacggcgctcattgaaaactcttcttcaacttccccttcgctggttttgctccgacgttctgtcccaaaaggcatatca

SEQ ID NO: 79 - DNA, 146 bp, Enterococcus faecalis
tacccacggagagcgtggttgaattaacggcaccgcttgacgctgcatgttggcacccatcaaggcacggttggagtcatcgttttctaagaaaggaatacatgctgttgcgactgcgactacttgttttggtgaaacgtccatgt

SEQ ID NO: 80 - DNA, 342 bp, Enterococcus faecalis
tgtttccgtccatcatatacagcgattgtgaaacctacgaatgatggaaaaattgtagagcggcgagaccaagttttaattacttttttcttttcggcaccttgttgtgcttcgacctttttcatcaaatgatcatcgacgaaaggtcctttttttaaactacgacccatggtgaacctcctctcaaaatgtacgacacatggtcaaaaaaattatttagtacgacgacgaacgataagtttgtctgatttagcttttttattacgtgttttgtatccaattgctggttgaccccatggagatactggcgctttacgtccaattggtgttttaccttcacca

SEQ ID NO: 81 - DNA, 103 bp, Enterococcus faecalis
tgaagcattccttctatgtcaatgtcatctacataaatccctgttcctaaggttttctccactgcatcgacccgttggaagtcttcccctaatttaccatttg

SEQ ID NO: 82 - DNA, 321 bp, Enterococcus faecalis
gcccaaacttccatttccccgaaacgttgtccaccgaattgagctttaccacccaacggttgttgcgtaacaagagagtaaggtccgattgaacgagcatgcaatttgtcatcaaccatgtgggctaatttaatcatatacatgacaccaacggaaatacggttatcaaatggttcacctgtacgtccatcgtaaagaactgttttagcatcgctagccataccagcttcacgaacagtttcccaaacgtcttcatcggttgccccatcgaaaacaggtgttgcgacgtgaatacctaattggcgagcagccatacctaag

SEQ ID NO: 83 - DNA, 199 bp, Enterococcus faecalis
gccttttttaacaaacattactgtttcgcacctcctttaacgtgggcctcgagattataatacttctggtgctagagaaacgatcttcatgaagttgttttcacgtaattcacgtgcaacctggtccgaagatacgtgttccgcgtgggcttttatcgtcacggataattaccgcagcattttcatcaaatttgatgta

SEQ ID NO: 84 - DNA, 529 bp, Enterococcus faecalis
tacgaaatctgcaccagcagcttcagcttctttagctttttcgcctttagcgaatactaaaacagtttgtgttttaccagttccgtttggaagcacaactgctccacggatttgttggtctgcttttttagggtcaacgttcaatttgtaagcaacttcaactgttgcgtcaaatttcgcgatgtttgtatcttttgctaaagctactgcttcttcaactgagtaagcttttgtagcatcaacttttttcaatgcttcttgcatttttttgctctttttagccattttgtttcctccttgattgtggttataacggttgtacctcccacgtctttcatatctttaaatatgaaacgaactgagaagctacttctttgagtaagtgtggaataaaaattattctacgatgatacccatgcttcgtgcagttcctgcaaccatgcgcattgctgcttcaacgtcagcggcgtttaggtctgccattttaagttcagcgatttctttcacttgatcgcttgaaactgttgca

SEQ ID NO: 85 - DNA, 415 bp, Enterococcus faecalis
gccttttttaacaaacattactgtttcgcacctcctttaacgtgggctcgagattataatacttctggtgctagagaaacgatcttcatgaagttgttttcacgtaattcacgtgcaactggtccgaagatacgtgttccgcgtgggcttttatcgtcacggataattaccgcagcattttcatcaaatttgatgtaagaaccgtcagcacgacgagcgccagattttgtacgaacgataacggctttaactacttcaccttttttaacaaccccacctggcgttgcttgtttgacagtagcaacaataacgtcaccgatgttagcagttttacgaccagatccgcctaggactttgatcgttaaaatttcacgtgcgccagaattgtcagcgactcttaaacgactttcttgtt

SEQ ID NO: 86 - DNA, 375 bp, Enterococcus faecalis
gcggacttttttgccgtcgacttctttaaacgcaactttagtagcttctccgtttgaaggatcaatcaccattacattagaaacatgaattggcgcttccacttcaaggattccaccttgtggggctgcttggtttggtttttggtgttttttaacgacgttgacaccttcaacgataactttatcttgtttaggaaacgctgctaagacaacgccttctttgtttttatctttaccagtgataacttttactttatcgccttttttaacaaacattactgtttcgcacctcctttaacgtgggctcgagattataatacttctggtgctagagaaacgatcttcatgaagttgttttcacgtaattcacgtgca

SEQ ID NO: 87 - DNA, 266 bp, Enterococcus faecalis
cacggagagcgtggttgaattaacggcaccgcttgacgctgcatgttggcacccatcaaggcacggttggagtcatcgttttctaagaaaggaatacatgctgttgcgactgcgactacttgttttggtgaaacgtccatgtagtcaactttgtctacggcaacttctaagttttcactttgtagacgcgccataacaacatcattggcaaatgtgccatcttcatttaaaagtgagttcgcttgcgctacgatataatggtcttc

SEQ ID NO: 88 - DNA, 150 bp, Enterococcus faecalis
tggtccaaagactacgccacctccacgccattgtggtgaacggattgaaccttgacgagcacgaccagttcctttttgacgccatggtttgcggccaccgccacgaacagcgctacggtttttaactgcgtgtgttccttgtcttaatga

SEQ ID NO: 89 - DNA, 202 bp, Enterococcus faecalis
ataccagcttcacgaacagtttcccaaacgtcttcatcggttgccccatcgaaaacaggtgttgcgacgtgaatacctaattggcgagcagccatacctaagtgtaattcaagtacttgtccgatattcatacgagaaggtacccctaatgggttcaacatgatatcaacaggtgttccgtcaggtaagaatggcatatctt

SEQ ID NO: 90 - DNA, 122 bp, Enterococcus faecalis
cggattgaatttcctgcctcatcttgattgccattataaattggggcaacgagtaaattgggtccccacatatattggtattgagaatcttttgtatatgctgttccttcattaggaaattc

SEQ ID NO: 91 - DNA, 275 bp, Enterococcus faecalis
caatatttttttgttcctgattgacagttgttaacatctcgacataaaggtagccaccttctacatcgtcaacttccacaatcggttcaaaacctgctaaggcatcaatcccattgactgtgctaattgctaaggcagaaactgccgcgcaaaccacatcgctgccataaggacctgcttcagcatgcccggttaattcgaatgaaacgattcggccggagcctgttcgtttaaaagaacctttaatcattgataggccttctttcctgtcaaca

SEQ ID NO: 92 - DNA, 261 bp, Enterococcus faecalis
tgcttcaatgtctgaaatactataaacgttttcgctagctacgccaacttcttttggttccatgttacggtaacgagccataccagtaccagctgggatgattttaccaatgataacattttctttcaatccaagtaatggatcttttttgccacggatagcagcatctgttaacacgcgtgttgtttcttggaaggatgcagcagataagaagctgtttgtttccaatgacgctttggtaataccaagtaagactggacg

SEQ ID NO: 93 - DNA, 268 bp, Enterococcus faecalis
aactttttttgctgccatgaagttctaacctccttcacttaggaattattttttcttgcctgctactgttttagtagggcctttacgagtacgtgcattatttttcgtgttttgtccacgagttggtaatccacgacggtgacggattccacggtatgaaccgatttccatcaagcgtttgatgtttaagttcacttcacgacgaagatccccttcaacttttaacttatcaatttccgcacgaatcgcatctgtttgttcgtttgtt

SEQ ID NO: 94 - DNA, 267 bp, Enterococcus faecalis
acgttcctaattcaaactcagaatgagtggcgctcattaaacacgacggcgttttggagggcggcatccattatgaggaactggagtcacgtcacgaattgcagtcacttctaaacctgttgcttgtaatgaacgaattgctgcttcacgtccagaaccaggtcctttaactgttacgtctacagttttaagtccatgttccattgccactttagttgcggcttctgcagccatttgagcggcaaaaggagttgattttttgcttcc

SEQ ID NO: 95 - DNA, 126 bp, Enterococcus faecalis
gccaaagggtttgccaagcgcgggcgctttcctgagcggcggccgcaaaagagtccctcggcgtaaacggtacctgccaactttgttcggcgtggctggcttgcacaaagacttgtttttctagcg

SEQ ID NO: 96 - DNA, 220 bp, Enterococcus faecalis
catgcgtaatcaatgtccgcacgtaatgtgtgaagtggtacagttccttcagagtatccttctgaacgagcgatatccgcaccgtttagacgacctgatacttgagttttgattcctttagcgccagcacgcattgcgcgttggatggcttgtttttgagcacgacggaaagcaacacggttttctaattgacgtgcaattccttcgcctactaattttg

SEQ ID NO: 97 - DNA, 343 bp, Enterococcus faecalis
catcttcagcagccatttgtgcttcaatgtctgaaatactataaacgttttcgctagctacgccaacttcttttggttccatgttacaggtaacgagccataccagtaccagctgggatgattttaccaatgataacattttctttcaatccaagtaatggatcttttttgccacggatagcagcatctgttaacacgcgtgttgtttcttggaaggatgcagcagataagaagctgtttgtttccaatgacgctttggtaataccaagtaagactggacgactagtagcagggacgccaccagcaactaatgtgtcgtagttacggtctttaaattctgcga

SEQ ID NO: 98 - DNA, 311 bp, Enterococcus faecalis
acgagtgaagctaccttctaatttttcagtgtcaaagcttacgaatgctggacgtccaacagttgcttcaaccgcttctttaattgttgagatgttttgagatttttcacgaacaccgatcacttgaccaacttcaacgtggtatgatggaatatcaacacgtttgccgtctacagtgatgtggccatggttaactaattgacgtgcttgacgacgagtagttgcaagacctaaacggtaaacaacgttatctaagcgttgttctagtaaaaccatgaagttaacaccgtgtttaccttctttgattttgc

SEQ ID NO: 99 - DNA, 532 bp, Enterococcus faecalis
taattgcaattcacccataccagagataactgtttcaccagtttcaacgtttgtttcaacgcggaatgatggatcttcttcagcaagtttttgtagagccacgcccattttatcttggtcagcttttgatttaggttcaacagcgacttggataactgggtcagggaattcaatagattcaagaataactggtgcatctaatgcacataatgtatcaccagttgttgtgtcttttagaccaacagcagcagcgatatcaccagagtacactttgtcaatttcttgacgagtgttggcgtgcatttgtaggatacgaccgatacgttcttttttgccttttgaagcgttcaatacgtatgaaccactttcaaggacaccagaataaacacggaagaaagttaaacgacctacgaatgggtcagtcataactttaaatgctaatgaagcgaaaggtgcttcgtcatcagctggacgagttgtttcttcgtctgttttagtatcgatccctttgatagcatcgatatctaatgga

SEQ ID NO: 100 - DNA, 222 bp, Enterococcus faecalis
caccagctgtcactgattttaatcctccaggatacattgagtgacggtagtaaattttgtctgtagcttttttacctgttaattttactttatcagcgttaattacgattacgaaatctccagtatccacatgtggtgtgaatgttggtttatttttaccacgtagtacagaagcaacaactgctgatagacgtcctaaaggaacatctgttgcatctacta

SEQ ID NO: 101 - DNA, 532 bp, Enterococcus faecalis; identical to SEQ ID NO: 99

SEQ ID NO: 102 - DNA, 558 bp, Enterococcus faecalis
agcttgttcacgcaatactgttttgatgcgtgcaatcgattgacgtacttctttaatacgtgcagtgttttctaattgacctgttgctaattggaatcttaagttgaacaattcttcttttaattgtttttctttatctagcatttcggcagtggttaattctctgatttctttaaccttcattcgattcaccacccatttcctcacgttttacgatcttagtttttaccggcaatttgtgagatgcaagacgaagagcttcacgagctacttcttcaggaacgcctgcgatttcaaacatgattttaccacgtttaactggtgatacccagccttctggtgcccctttacctttacccatacgtacgccgatagctttacttgtgtaagacttgtgagggaaaattttaatccatactttcccgccacgtttcatgtaacgagtcattgcaatacgggctgcttcgatttgacggttagtaatccagtgagattcagttgcttgtaaaccccattcaccaaatgctacttcttttccgcctttagcttcaccgcgca

SEQ ID NO: 103 - DNA, 310 bp, Enterococcus faecalis
tcaataaagtattgttgaatttgcaagtcttgtggagcaaacattaacacagcatcactaggcagaccgtcacgaccagctcggccggcttcttggtaataagattcaatattccctggtacttgtgcgtgaatgacaaaacgaacattactcttattaatccccataccaaaggcatttgttgctaccatcacttgcacttgatcatacaagaatgcttcttgattttcactacgtaactgttcactcatgcccccatgatacatcccagctgcaatttttttactttctaataaatgataaattcgtt

SEQ ID NO: 104 - DNA, 445 bp, Enterococcus faecalis
caacgcggtaagttactttaccagctttaacttcttcaacagcttttgtaacgtccattgttacagtaccagttttagggtttggcattaaaccttttggtcctaagacacggcctaatttaccaactgtagccatcatgtcaggagtcgcaacaactacgtcaaagtcgaaccatccaccttggatttttgcaaccatgtcgtcgtcgcctacgaaatctgcaccagcagcttcagcttctttagctttttcgcctttagcgaatactaaaacagtttgtgttttaccagttccgtttggaagcacaactgctccacggatttgttggtctgcttttttagggtcaacgttcaatttgtaagcaacttcaactgttgcgtcaaatttcgcgatgtttgtatcttttgctaaagctactgcttcttcaactgagtaagcttttgt

SEQ ID NO: 105 - DNA, 195 bp, Enterococcus faecalis
cacggagagcgtggttgaattaacggcaccgcttgacgctgcatgttggcacccatcaaggcacggttggagtcatcgttttctaagaaaggaatacatgctgttgcgactgcgactacttgttttggtgaaacgtccatgtagtcaactttgtctacggcaacttctaagttttcactttgtagacgcgccata

SEQ ID NO: 106 - DNA, 191 bp, Enterococcus faecalis
gcttgtttcgcatctgcaccgtttgctaaggttgcttcaaagaaatctgacatttctttcgttaaagtcaagaccattgcgtcgtattcaggtaaacctaattcactgatataacgggcacgacgtgaggctggcatttctggcaaactagcgcgaactttttcaatccattcatcatcaattgaaaaacg

SEQ ID NO: 107 - DNA, 191 bp, Enterococcus faecalis
  misc_feature (30)..(30): n=g, a, t or c
gcttgtttcgcatctgcaccgtttgctaangttgcttcaaagaaatctgacatttctttcgttaaagtcaagaccattgcgtcgtattcaggtaaacctaattcactgatataacgggcacgacgtgaggctggcatttctggcaaactagcgcgaactttttcaatccattcatcatcaattgaaaaacg

SEQ ID NO: 108 - DNA, 249 bp, Enterococcus faecalis
tgcgatgctcgctcaccaaagacacgtttgatggccgttgtttccgcagcgtcattcgctggggttgacgtaccatgagcattgatatacccaatttgttccggcgtaatccctgcttccgcaatcgccatttccatcgcagccgccgcgccactaccgtcttttaaaggagcggtcatgtggctagcatcacagttgctgccatagccaacaatttcgccgtagatagttgcgccacgtttctgtgca

SEQ ID NO: 109 - DNA, 220 bp, Enterococcus faecalis; identical to SEQ ID NO: 96

SEQ ID NO: 110 - DNA, 402 bp, Enterococcus faecalis
tgcgcgcttgttccagctgaacggattaattgtccacctttaccaggtttcatttcaatgttgtggataactgtaccaactggaatgttttccaatggtaatgcgttacctactttaatatctgcttctggaccagatactaggcgcatgcctacttctaatccttttggtgctaagatgtatgccttaaccccgtcttcgtaatgaactaacgcgatgttagcagaacggtttggatcgtactcgatcgttttaacaaccgctgcgacgttatctttattacgtttgaagtcaatcacacggtattgacgtttgtgaccgccaccttggtgacgaaccgtaatgcgaccgttgttgttacgaccggcattgttttttaatggctgtaacaatgatttttct

SEQ ID NO: 111 - DNA, 195 bp, Enterococcus faecalis
cgttttattagataataactgcttcttcgactacctctagtaaacggaaacgttttgtagctgataatggacgagtttccatgatttttacgatgtctccaactttcgctgtgttgttttcatcatgcgctttatattttttagaatatttcatacgtttgccatagatagggtggtttttctttgtttcaacga

SEQ ID NO: 112 - DNA, 605 bp, Enterococcus faecalis
tgtctaagtttttagcatttgatactgcatcacccacacccatgttgataacgattttatcaactttaggtgtttgcataactgagctgtaattaaatttttccaccaatgatggtgttacttctttaatatatttttctttcaggcggttcattcagtaagccctccttccgcaatttttatttatctaaaacttcacctgtttttttagaaacgcggacttttttgccgtcgacttctttaaacgcaactttagtagcttctccgtttgaaggatcaatcaccattacattagaaacatgaattggcgcttccacttcaaggattccaccttgtggggctgcttggtttggtttttggtgttttttaacgacgttgacaccttcaacgataactttatcttgtttaggaaacgctgctaagacaacgccttctttgtttttatctttaccagtgataacttttactttatcgccttttttaacaaacattactgtttcgcacctcctttaacgtgggctcgagattataatacttctggtgctagagaaacgatcttcatgaagttgttttcacgtaattcacgtgcaactggtccgaagata

SEQ ID NO: 113 - DNA, 249 bp, Enterococcus faecalis
gattgcttcattggcaggttttgtaacagtactattcactttacctaaacctaacgctttaactgtagcacgttggttttgaggacgtccgataacactgcgttttaaagtaatttttaattcagccattatttttgtcctccttaaccgataatttcttctacagatttaccgcgaagtgctgccacttcttcggcacgttttaattgttttagaccttcaacagttgcgcgaacaacgttaataggt

SEQ ID NO: 114 - DNA, 375 bp, Enterococcus faecalis; identical to SEQ ID NO: 86

SEQ ID NO: 115 - DNA, 174 bp, Enterococcus faecalis
tccaactttcgctgtgttgttttcatcatgcgctttatattttttagaatatttcatacgtttgccatagatagggtggtttttctttgtttcaacgacaactgtgattgttttatccattttgtctgataccacacgaccttggtaaactttacgttgatttctttcttcagt

SEQ ID NO: 116 - DNA, 195 bp, Enterococcus faecalis; identical to SEQ ID NO: 105

SEQ ID NO: 117 - DNA, 375 bp, Enterococcus faecalis; identical to SEQ ID NO: 86

SEQ ID NO: 118 - DNA, 154 bp, Enterococcus faecalis
ggtgttggtccaaagactacgccacctccacgccattgtggtgaacggattgaaccttgacgagcacgaccagttcctttttgacgccatggtttgcggccaccgccacgaacagcgctacggtttttaactgcgtgtgttccttgtcttaatg

SEQ ID NO: 119 - DNA, 191 bp, Enterococcus faecalis; identical to SEQ ID NO: 106

SEQ ID NO: 120 - DNA, 230 bp, Enterococcus faecalis
atcgaaagcttttttgctgacaccgtggaagtcacgtacacgaggtaaagaaactgttactaatttatctaaaaattcgtacattctttcgccgcgtagcgttactttcgcaccgattggcattccttcacgtaaacggaatccagcgatagattttttagcttttgtgataagtggtttttgaccagtgattaatgctaattcttcaacagctttgtctaagtttttag

SEQ ID NO: 121 - DNA, 400 bp, Enterococcus faecalis
cacgtttaagatgtttacgtttgctactttaacatcgaatgctgattcaacagcttgttttactaaagttttgtttgcgcgagtgtccacttcgaaagtatatttcttttcgtccatagctaacatggatttttcagtgatcactgggcgtttgattacgtctagtaattccattatgcaagcacctcctcaatttgagtaagagctgtttgtgttgccaagactttgttagctgacacaacatctaacacactaacgttatcagaagttactacagaaacgtttggtaagttacgagctgataaagctgcaaagtcgttaccattttctaaaacaactaatactttagtatcgatagacaagttagcaagaacttgtttgaattcttttgtttttggtg

SEQ ID NO: 122 - DNA, 222 bp, Enterococcus faecalis; identical to SEQ ID NO: 100

SEQ ID NO: 123 - DNA, 178 bp, Enterococcus faecalis
tacagcgattgtgaaacctacgaatgatggaaaaattgtagagcaggcgagaccaagttttaattacttttttcttttcggcaccttgttgtgccttcgacctttttcatcaaatgatcatcgacgaaaggtcctttttttaaactacgacccatggtgaacctcctctcaaaatgta

SEQ ID NO: 124 - DNA, 366 bp, Enterococcus faecalis
gaattgttacgcggtcgccacccatacggccggctagtcgtttatttttaaatacacggttaggcgctactggacccattgacccaggacgacggtgataacgagaaccatgagacataggtccgcggctttggccgtgacgtttgattgccccttggaatcctttacctttcgtagtacctgtaacatcaacaacgtctcctgcttggaaaacatctactttgatttctttacctacttcatattctcctagctcaacattcttgaattctttaatgaagcgcttaggagccgtgtttgcttttgcaacatgacctttcgcaggtttgtttgataaaacttcacgtttgtcttggtaaccaactt

SEQ ID NO: 125 - DNA, 150 bp, Enterococcus faecalis; identical to SEQ ID NO: 88

SEQ ID NO: 126 - DNA, 239 bp, Enterococcus faecalis
ccaacaaccatgttgttgaagtttgcacgagttgttccgtggattgttttcatttcttttgaatcgtttggacgagtgaatgtcacttcgtttccttcgatgttcattttgatatcagaagaaaattcgcgtgttaattcacctttaggtcctttaactgtaatgttgtttccgtcttgcttgatttcaacaccagcaggaagaacaacaactttattaccaatacggctcacttagag

SEQ ID NO: 127 - DNA, 195 bp, Enterococcus faecalis; identical to SEQ ID NO: 105

SEQ ID NO: 128 - DNA, 607 bp, Enterococcus faecalis
agcttgttcacgcaatactgttttgatgcgtgcaatcgattgacgtacttctttaatacgtgcagtgttttctaattgacctgttgctaattggaatcttaagttgaacaattcttcttttaattgtttttctttatctagcatttcggcagtggttaattctctgatttctttaaccttcattcgattcaccacccatttcctcacgttttacgatcttagtttttaccggcaatttgtgagatgcaagacgaagagcttcacgagctacttcttcaggaacgcctgcgatttcaaacatgattttaccacgtttaactggtgatacccagccttctggtgcccctttacctttacccatacgtacgccgatagctttacttgtgtaagacttgtgagggaaaattttaatccatactttcccgccacgtttcatgtaacgagtcattgcaatacgggctgcttcgatttgacggttagtaatccagtgagattcagttgcttgtaaaccccattcaccaaatgctacttcttttccgcctttagcttcaccgcgcatttttccgcggaattcacgacggtgttttacacgtttaggtactaacat

SEQ ID NO: 129 - DNA, 248 bp, Enterococcus faecalis
aacacaagggttctcgaacattcaaaagttgaatgaattattttactgttactgaagcgccaacttcttctaaagcagcttttaaagcttctgcttcttctttagaaacagcttctttaactggtgcaggagcgccatcaactacagctttagcttctttcaagcctaagccagttgcttcacgaactgctttgataactttaactttttgatcgccagctgctgttaattcaacagtgaattcagtt

SEQ ID NO: 130 - DNA, 272 bp, Enterococcus faecalis
cggcacgataatcctgatcagttaacaagtcaattaccgtttcatctcgctgatcttccgtcgcagaaatgacaccttgtggtttatgcaacatgtaataaaagaatttctgatacgtaagaatttctcccatcaaggcaatttgatctgtttcttcatttacttgtgttttggcttcttttacgacgtcaccattcaccgtaacgacttttttctttaacaattgtttgatttctttacgactaccgataccaacatcggctaaaaattta

SEQ ID NO: 131 - DNA, 513 bp, Enterococcus faecalis
cggtgacggattccacggtatgaaccgatttccatcaagcgtttgatgtttaagttcacttcacgacgaagatccccttcaacttttaacttatcaatttccgcacgaatcgcatctgtttgttcgtttgttaaatcacgtacacgaacatcttcagatacgccaacgtttgctaaaacttttttagctgtagtgttaccaataccataaatgtaagtaagagaaactactacacgtttgtcacgagggatgtctactcctgcaatacgagccattattcgttacacctcctaattatccttgacgttgtttatgttttggatttgctgggcaaataaccataacacgtcctttacggcgaattactttacaatgttcacacattggttttactgatggtcttactttcatgataatacctcctgtggttttacggagtacaattatttaaagcgataagtaatacggccacgcgttaaatcatacggtgataattcaactgttactttgtca

SEQ ID NO: 132 - DNA, 541 bp, Enterococcus faecalis
tcacggataattaccgcagcattttcatcaaatttgatgtaagaaccgtcagcacagacgagcgccagattttgtacgaacagataacggctttaactacttcaccttttttaacaaccccacctggcgttgcttgtttgacagtagcaacaataacgtcaccgatgttagcagttttacgaccagatccgcctaggactttgatcgttaaaatttcacgtgcgccagaattgtcagcgactcttaaacgactttcttgttggatcacgatgtgtatccccctttcagattttgtgcttcaatctattaggaaattctcgttttattagataataactgcttcttcgactacctctagtaaacggaaacgttttgtagctgataatggacgagtttccatgatttttacgatgtctccaactttcgctgtgttgttttcatcatgcgctttatattttttagaatatttcatacgtttgccatagatagggtggtttttctttgtttcaacgacaactgtgattgttttatccattttgtc

SEQ ID NO: 133 - DNA, 156 bp, Enterococcus faecalis
tgactcctttagattactgtcgttgcttgtttttcttcaattttttcatcattgacacgttcaacgttcgcgcctaatttttgaagttttttatggaactcataatagccacgatctaaatatttcaaattagagacacgtgtaatgccatttgca

SEQ ID NO: 134 - DNA, 402 bp, Enterococcus faecalis; identical to SEQ ID NO: 110

SEQ ID NO: 135 - DNA, 584 bp, Enterococcus faecalis
agcttgttcacgcaatactgttttgatgcgtgcaatcgattgacgtacttctttaatacagtgcagtgttttctaattgacctgttgctaattggaatcttaagttgaacaattcttcttttaattgtttttctttatctagcatttcggcagtggttaattctctgatttctttaaccttcattcgattcaccacccatttcctcacgttttacgatcttagtttttaccggcaatttgtgagatgcaagacgaagagcttcacgagctacttcttcaggaacgcctgcgatttcaaacatgattttaccacgtttaactggtgatacccagccttctggtgcccctttacctttacccatacgtacgccgatagctttacttgtgtaagacttgtgagggaaaattttaatccatactttcccgccacgtttcatgtaacgagtcattgcaatacgggctgcttcgatttgacggttagtaatccagtgagattcagttgcttgtaaaccccattcaccaaatgctacttcttttccgcctttagcttcaccgcgcatttttccgcggaattcacgacggtg

SEQ ID NO: 136 - DNA, 79 bp, Enterococcus faecalis
cgattgctacgccccacacgaccacgtaattgatacaacgtagataagcccatgtagtccgcattttctacaaacaagg

SEQ ID NO: 137 - DNA, 133 bp, Enterococcus faecalis
ggcaattaatggtgcacccatcaaatgatccactggaatatcaaagaatccttgaatttggaccgcatgtaagtccaatgtcaacattcttgttgcaccagctttttcaatcatgtttgcaacaagtttagca

SEQ ID NO: 138 - DNA, 195 bp, Enterococcus faecalis; identical to SEQ ID NO: 111

SEQ ID NO: 139 - DNA, 213 bp, Enterococcus faecalis
  misc_feature (74)..(74): n=g, a, t or c
aacggatacgaattttttgttttgccatcttgttccctccttcgcctattttaaaagtagacatagcctccacngaaaatttatccggcatgctcgttcatggcaaagcgtccgagcgtgtcgcaacctctcgcttcacagccggcaaatcaaatcgttgatctaccaatgctttttacactcctgtaaacagcacctttttgattatactat

SEQ ID NO: 140 - DNA, 201 bp, Enterococcus faecalis
ccacctccacgccattgtggtgaacggattgaaccttgacgagcacgaccagttcctttttgacgccatggtttgcggccaccgccacgaacagcgctacggtttttaactgcgtgtgttccttgtcttaatgaagcacgttgcatgatgattgcatcatagacaacactttcattaggttcgattccgaagatttcttca

SEQ ID NO: 141 - DNA, 288 bp, Enterococcus faecalis
gctaagatgataatcgtcaatgaattggcaaatttggtgtaccaaataaaaaagttatttagctgtggaaaaggacgacgaacaaaagaagtaatcgtttgatcaaagcctttgagccaggttggataaaaacgaacaacatagcctaaaaacataaatactaaaagaaaacaactacctgcaaattgataataaagtttgtttttcataaaaaatcctttcaaaaattaatcgcaacaatccgtattataccatcaaaagggtaaaaaattaaaagataatttcatt

SEQ ID NO: 142 - DNA, 262 bp, Enterococcus faecalis
ccttcaacgataactttatcttgtttaggaaacgctgctaagacaacgccttctttgtttttatctttaccagtgataacttttactttatcgccttttttaacaaacattactgtttcgcacctcctttaacgtgggctcgagattataatacttctggtgctagagaaacgatcttcatgaagttgttttcacgtaattcacgtgcaactggtccgaagatacgtgttccgcgtgggcttttatcgtcacggataattac

SEQ ID NO: 143 - DNA, 174 bp, Enterococcus faecalis; identical to SEQ ID NO: 115

SEQ ID NO: 144 - DNA, 289 bp, Enterococcus faecalis
tgaccgccaccttggtgacgaaccgtaatgcgaccgttgttgttacgaccggcattgttttttaatggctgtaacaatgatttttctggtgttgaagttgtgatttcagcgaaatcagaacttgtcatgttacgacggccatttgtggtaggtttgtactttttaatcgccacgtcttatttccctcctacgttgatattgttcaggactgcttattcagcagcttcgaataattgaatttcttttgaatcttcagttaatgtaacgatcgctttgcgacgtttttttg

SEQ ID NO: 145 - DNA, 272 bp, Enterococcus faecalis
aaactgttactaatttatctaaaaattcgtacattctttcgccgcgtagcgttactttcgcaccgattggcattccttcacgtaaacggaatccagcgatagattttttagcttttgtgataagtggtttttgaccagtgattaatgctaattcttcaacagctttgtctaagtttttagcatttgatactgcatcacccacacccatgttgataacgattttatcaactttaggtgtttgcataactgagctgtaattaaatttttccacc

SEQ ID NO: 146 - DNA, 237 bp, Enterococcus faecalis
gctgtacgagcattgaattctttagtgaatcccatgatgttgatacctgcttgacctaacgctggacctactggtggagctggtgttgctttccccgcaggaatttgtaatttaacgattttttctacttttttagccacgaaaatacctccttaagttctcgtgcgtggttaatggggttgagatttcccctcccactcaacgtacatttaaaacataccctattactatacagga

SEQ ID NO: 147 - DNA, 191 bp, Enterococcus faecalis; identical to SEQ ID NO: 106

SEQ ID NO: 148 - DNA, 217 bp, Enterococcus faecalis
gctaccccagaaccttctactgcaggtttcataaggatacggccgccaccgaatacgccaattacttcgtgcgggatagtagaaccaaccataggcacttcaactaagtttttcttcgcgtcttcgattgctttacggatagcttcaggtacttcttgtgctttaccagtaccgaaaccaacgtgtccgtttttgtcaccgacaacaactaaagctg

SEQ ID NO: 149 - DNA, 550 bp, Enterococcus faecalis
cacgtttcatacggtctactaaaacgtctaattgcaattcacccataccagagataactgtttcaccagtttcaacgtttgtttcaacgcggaatgatggatcttcttcagcaagtttttgtagagccacgcccattttatcttggtcagcttttgatttaggttcaacagcgacttggataactgggtcagggaattcaatagattcaagaataactggtgcatctaatgcacataatgtatcaccagttgttgtgtcttttagaccaacagcagcagcgatatcaccagagtacactttgtcaatttcttgacgagtgttggcgtgcatttgtaggatacgaccgatacgttcttttttgccttttgaagcgttcaatacgtatgaaccactttcaaggacaccagaataaacacggaagaaagttaaacgacctacgaatgggtcagtcataactttaaatgctaatgaagcgaaaggtgcttcgtcatcagctggacgagttgtttcttcgtctgttttagtatcgatccctttgatagcatcgat

SEQ ID NO: 150 - DNA, 160 bp, Enterococcus faecalis
accatgttgctgcgtgttgctagaaatggcgactttgccaaaatcaaaagttggtgtgctgataaaaccttcctcatctggtgccacaatttcttgatttttaggttggattctgacagtatcagctgcgtgaacagcagaaaaatttccattcatttca

SEQ ID NO: 151 - DNA, 160 bp, Enterococcus faecalis
ggatcaattcgcggtaacgttggatgtcagttttacgtaagtaagctaacaagttacgacggtgaccgatttttttcattaaaccacggtaagaatggtgatcttttttgtgtgtacgcgcatgttcgttcaattggttaatgtcttcagttaagacagc

SEQ ID NO: 152 - DNA, 293 bp, Enterococcus faecalis
cacctggatccattacgcggattttacgtaacatttgacgaaccattacttcgatatgtttgtcgccgatttctaccccttgcatacggtaaacacgttgtacttcacgtaataggtagttttcaacagataaaacatcacgaacttgtaataattgttttggatcaattgaaccttctgtcaacggtgcaccacggtggatgatgtcgccttcagcaactttcatacgtgcagtgtaagggacagtataggtacgtgtatctgtttttcctttgatggttacttctttttga

SEQ ID NO: 153 - DNA, 195 bp, Enterococcus faecalis; identical to SEQ ID NO: 105

SEQ ID NO: 154 - DNA, 249 bp, Enterococcus faecalis; identical to SEQ ID NO: 108

SEQ ID NO: 155 - DNA, 407 bp, Enterococcus faecalis
gatcttttttgccacggatagcagcatctgttaacacgcgtgttgtttcttggaaggatgcagcagataagaagctgtttgtttccaatgacgctttggtaataccaagtaagactggacgactagtagcagggacgccaccagcaactaatgtgtcgtagttacggtctttaaattctgcgatgtccattaatgttcctggaaggatttcagtgtcacctggatccattacgcggattttacgtaacatttgacgaaccattacttcgatatgtttgtcgccgatttctaccccttgcatacggtaaacacgttgtacttcacgtaataggtagttttcaacagataaaacatcacgaacttgtaataattgttttggatcaattgaaccttctgtcaacggtgca

SEQ ID NO: 156 - DNA, 445 bp, Enterococcus faecalis; identical to SEQ ID NO: 104

SEQ ID NO: 157 - DNA, 198 bp, Enterococcus faecalis
aggtgttccgtcaggtaagaatggcatatcttcttccggcataatacgggaaacaacccctttatttccgtgacgtcccgccattttatctccttcgtgaattttacgtttttgaacgatatagacacgaactaacatgttgacacctggtgataattcatcgccagcttcacgagtaaagattttcacatcatgaac

SEQ ID NO: 158 - DNA, 138 bp, Enterococcus faecalis
taacctgcatatttacccatgcgtttgaattttggacgcacgtttaagatgtttacagtttgctacctttaacatcgaatgctgattcaacagccttgttttactaaagttttgtttgcgcgagtgtccacttcgaaa

SEQ ID NO: 159 - DNA, 398 bp, Enterococcus faecalis
tgtcgtagttacggtctttaaattctgcgatgtccattaatgttcctggaaggatttcagtgtcacctggatccattacgcggattttacgtaacatttgacgaaccattacttcgatatgtttgtcgccgatttctaccccttgcatacggtaaacacgttgtacttcacgtaataggtagttttcaacagataaaacatcacgaacttgtaataattgttttggatcaattgaaccttctgtcaacggtgcaccacggtggatgatgtcgccttcagcaactttcatacgtgcagtgtaagggacagtataggtacgtgtatctgtttttcctttgatggttacttctttttgacgtgtggcaggatcttcagaaatatcgataacttcaccggtt

SEQ ID NO: 160 - DNA, 244 bp, Enterococcus faecalis
caaattcgataactaccattggtgctgcatcgccgcgtcttggttctgtcttcaagatacgagtgtaaccaccttggcgttccgcgaaacgaggtcctaaatcgttaaatagcttttgtaaagctgattcaacaacgatagactcatcttcttcacgaacactagcaacttcattacgaacgaaagtagctgcttgacgacgtgcatgaagatctccacgtttacctaaagtaatcattttttc

SEQ ID NO: 161 - DNA, 227 bp, Enterococcus faecalis
aatgatggaaaaattgtagagcggcgagaccaagttttaattacttttttcttttcggcaccttgttgtgcttcgacctttttcatcaaatgatcatcgacgaaaggtcctttttttaaactacgacccatggtgaacctcctctcaaaatgtacgacacatggtcaaaaaaattatttagtacgacgacgaacgataagtttgtctgatttagcttttttattacg

SEQ ID NO: 162 - DNA, 253 bp, Enterococcus faecalis
aagttattttcagcaactttatctgataatacagatttcattgctaagcgacgaacttttttaggaagtttgtagctgtatgaacgcggtgttggtccaaagactacgccacctccacgccattgtggtgaacggattgaaccttgacgagcacgaccagttcctttttgacgccatggtttgcggccaccgccacgaacagcgctacggtttttaactgcgtgtgttccttgtcttaatgaagcacgttgca

SEQ ID NO: 163 - DNA, 198 bp, Enterococcus faecalis
tgcaaattcacctaatttatgtcctaccatgtcttcttgaatgtaaacagggacatgtttccgtccatcatatacagcgattgtgaaacctacgaatgatggaaaaattgtagagcggcgagaccaagttttaattacttttttcttttcggcaccttgttgtgcttcgacctttttcatcaaatgatcatcgacgaa

SEQ ID NO: 164 - DNA, 202 bp, Enterococcus faecalis
taataagatatgttcacgtgtttgaggcataggaccatcagcagcagaaactactaagatagctccgtccatttgagcagcaccagtgatcatgtttttaacgtagtccgcgtgtcctgggcagtcaacgtgtgcatagtgacgagtttcagtttcatattcgatatgagaagtgttgattgtgattccacgttctttttct

SEQ ID NO: 165 - DNA, 286 bp, Enterococcus faecalis
tcactgtttaagtaagcagaaacttcgcccattaaccagtttgatgcttgtttcgcatctgcaccgtttgctaaggttgcttcaaagaaatctgacatttctttcgttaaagtcaagaccattgcgtcgtattcaggtaaacctaattcactgatataacgggcacgacgtgaggctggcatttctggcaaactagcgcgaactttttcaatccattcatcatcaattgaaaaacgaggaacatctggctctgggaagtaacggtagtcacttgagccttctttaa

SEQ ID NO: 166 - DNA, 234 bp, Enterococcus faecalis
gcgaagtgctgccacttcttcggcacgttttaattgttttagaccttcaacagttgcgcgaacaacgttaataggtgtgtttgaacctagtgatttagatgtaatatctgctacaccagctaattccaatacggcacgaactggtccaccagcagctaccccagaaccttctactgcaggtttcataaggatacggccgccaccgaatacgccaattacttcgtgcgggatagt

SEQ ID NO: 167 - DNA, 198 bp, Enterococcus faecalis; identical to SEQ ID NO: 163

SEQ ID NO: 168 - DNA, 163 bp, Enterococcus faecalis
tgtcttcttgaatgtaaacagggacatgtttccgtccatcatatacagcgattgtgaaacctacgaatgatggaaaaattgtagagcggcgagaccaagttttaattacttttttcttttcggcaccttgttgtgcttcgacctttttcatcaaatgatcatc

SEQ ID NO: 169 - DNA, 164 bp, Enterococcus faecalis
cttttccgtgtaatgcgcgtaagtagtaaagttttgcacgacgtactttaccgtagcgaaccacttcaatttgagcaacacgtggtgtgtgtaatgggaatgtacgttccacaccaacaccatttgaaactttacgtactgtgtaagtttcgctgattccagca

SEQ ID NO: 170 - DNA, 296 bp, Enterococcus faecalis
tcctttaacgtgggctcgagattataatacttctggtgctagagaaacgatcttcatgaagttgttttcacgtaattcacagtgcaactggtccgaagatacgtgttccgcgtgggcttttatcgtcacggataattaccgcagcattttcatcaaatttgatgtaagaaccgtcagcacgacgagcgccagattttgtacgaacgataacggctttaactacttcaccttttttaacaaccccacctggcgttgcttgtttgacagtagcaacaataacgtcaccgatgttagca

SEQ ID NO: 171 - DNA, 295 bp, Enterococcus faecalis
tcctttaacgtgggctcgagattataatacttctggtgctagagaaacgatcttcatgaagttgttttcacgtaattcacgtgcaactggtccgaagatacgtgttccgcgtgggcttttatcgtcacggataattaccgcagcattttcatcaaatttgatgtaagaaccgtcagcacgacgagcgccagattttgtacgaacgataacggctttaactacttcaccttttttaacaaccccacctggcgttgcttgtttgacagtagcaacaataacgtcaccgatgttagca

SEQ ID NO: 172 - DNA, 218 bp, Enterococcus faecalis
gacaccgtggaagtcacgtacacgaggtaaagaaactgttactaatttatctaaaaattcgtacattctttcgccgcgtagcgttactttcgcaccgattggcattccttcacgtaaacggaatccagcgatagattttttagcttttgtgataagtggtttttgaccagtgattaatgctaattcttcaacagctttgtctaagtttttagcatttg

SEQ ID NO: 173 - DNA, 207 bp, Enterococcus faecalis
caccttcaacgataactttatcttgtttaggaaacgctgctaagacaacgccttctttgtttttatctttaccagtgataacttttactttatcgccttttttaacaaacattactgtttcgcacctcctttaacgtgggctcgagattataatacttctggtgctagagaaacgatcttcatgaagttgttttcacgtaattcacg

SEQ ID NO: 174 - DNA, 181 bp, Enterococcus faecalis
ttgttttactaaagttttgtttgcgcgagtgtccacttcgaaagtatatttcttttcgtccatagctaacatggatttttcagtgatcactgggcgtttgattacgtctagtaattccattatgcaagcacctcctcaatttgagtaagagctgtttgtgttgccaagactttgttagctg

SEQ ID NO: 175 - DNA, 198 bp, Enterococcus faecalis; identical to SEQ ID NO: 157

SEQ ID NO: 176 - DNA, 245 bp, Enterococcus faecalis
gataactaaatctttatttaggatctcaacatcactgtccacgataatatcgccggcagtcacggtagcgggtcctgtaatatcgatctcaagggttttctcttcttcagcatataatttcaatgctaagcctttaatattcaaaataatttgtgttacgtcttctcgtacacctggaatggttgagaattcgtgtaaaacaccatcgatttgaatattcgtaattgcagctcctggtaaagaag

SEQ ID NO: 177 - DNA, 309 bp, Enterococcus faecalis
tcacacggtattgacgtttgtgaccgccaccttggtgacgaaccgtaatgcgaccgttgttgttacgaccggcattgttttttaatggctgtaacaatgatttttctggtgttgaagttgtgatttcagcgaaatcagaacttgtcatgttacgacggccatttgtggtaggtttgtactttttaatcgccacgtcttatttccctcctacgttgatattgttcaggactgcttattcagcagcttcgaataattgaatttcttttgaatcttcagttaatgtaacgatcgctttgcgacgtttttttg

SEQ ID NO: 178 - DNA, 208 bp, Enterococcus faecalis
tcgaccttttgaaatcttaaagtttttggttgtagtattcaacgacaagtgcttcgtcgatttctgggtaaagttcatcacgttctggtaaacgagtgaagctaccttctaatttttcagtgtcaaagcttacgaatgctggacgtccaacagttgcttcaaccgcttctttaattgttgagatgttttgagatttttcacgaacacc

SEQ ID NO: 179 - DNA, 432 bp, Enterococcus faecalis
aatattaacaccagacggtaagtcaagcttcattagagcagtcaactgtttttggtgttgggttcacaatgtcaattagacgtttgtgagtacgcatttcgaattgttcgcgagaatctttgtatttatgagtcgcacgaataactgtgtaaagtgagcgttctgttggtaatggaatcggacctgatacgtcagctccagttctttttgctgtttccacaattttatccgctgattgatctaaaatacggtgttcatacgcttttaaacggatacgaattttttgttttgccatcttgttccctccttcgcctattttaaaagtagacatagctccacgaaaatttatccggcatgctcgttcatggcaaagcgtccgagcgtgtcgcaacctctcgcttcacagccggcaaatcaaatcgttgatctacc

SEQ ID NO: 180 - DNA, 155 bp, Enterococcus faecalis
tccgcgtgggcttttatcgtcacggataattaccgcagcattttcatcaaatttgatgtaagaaccgtcagcacgacgagcgccagattttgtacgaacgataacggctttaactacttcaccttttttaacaaccccacctggcgttgcttgtt

SEQ ID NO: 181 - DNA, 76 bp, Enterococcus faecalis
aaaatgtacgacacatggtcaaaaaaattatttagtacgacgacgaacgataagtttgtctgatttagcctttttt

SEQ ID NO: 182 - DNA, 182 bp, Enterococcus faecalis
gaccttcaacagttgcgcgaacaacgttaataggtgtgtttgaacctagtgatttagatgtaatatctgctacaccagctaattccaatacggcacgaactggtccaccagcagctaccccagaaccttctactgcaggtttcataaggatacggccgccaccgaatacgccaattacttcg

SEQ ID NO: 183 - DNA, 393 bp, Enterococcus faecalis
caccagactcagtaaagatttgtgtcattcccacttttttccctaagattcctttggtcatgagtacacctccatcttaattttatagtttgatttcaatattaacaccagacggtaagtcaagcttcattagagcgtcaactgtttttggtgttgggttcacaatgtcaattagacgtttgtgagtacgcatttcgaattgttcgcgagaatctttgtatttatgagtcgcacgaataactgtgtaaagtgagcgttctgttggtaatggaatcggacctgatacgtcagctccagttctttttgctgtttccacaattttatccgctgattgatctaaaatacggtgttcatacgcttttaaacggatacgaattttttgttttgccatct

SEQ ID NO: 184 - DNA, 187 bp, Enterococcus faecalis
accatcagcagcagaaactactaagatagctccgtccatttgagcagcaccagtgatcatgtttttaacgtagtccgcgtgtcctgggcagtcaacgtgtgcatagtgacgagtttcagtttcatattcgatatgagaagtgttgattgtgattccacgttctttttcttctggagcgttatcgata

SEQ ID NO: 185 - DNA, 184 bp, Enterococcus faecalis
aacactttcattaggttcgattccgaagatttcttcatttaaagtgatttcaccgttttgagttccatcttgtttgaataatgctacattcggcattccttagttcctcctttccctacacttatttagctttcacagctgatttgattgtgattaaagattttttcgctccaggaatgtttcc

SEQ ID NO: 186 - DNA, 198 bp, Enterococcus faecalis; identical to SEQ ID NO: 157

SEQ ID NO: 187 - DNA, 186 bp, Enterococcus faecalis
aaactgttactaatttatctaaaaattcgtacattctttcgccgcgtagcgttactttcgcaccgattggcattccttcacgtaaacggaatccagcgatagattttttagcttttgtgataagtggtttttgaccagtgattaatgctaattcttcaacagctttgtctaagtttttagcatttg

SEQ ID NO: 188 - DNA, 275 bp, Enterococcus faecalis
agttagcaagaacttgtttgaattcttttgtttttggtgcatcgaagcttaaaccttctactgctaccaagttattttcagcaactttatctgataatacagatttcattgctaagcgacgaacttttttaggaagtttgtagctgtatgaacgcggtgttggtccaaagactacgccacctccacgccattgtggtgaacggattgaaccttgacgagcacgaccagttcctttttgacgccatggtttgcggccaccgccacgaacagcgcta

SEQ ID NO: 189 - DNA, 205 bp, Enterococcus faecalis
tgaccattgaactatttacctcctttatgcgagtttacttgtttaccagctagctttcttcacgccgggaatttgacctttataggcaagttcgcggaagcaaatacggcaaagatgaaatttacgataaactgaatgtggacgtccacaacgttcacaacgagtataagcttgtgttgaatgtttagcaggacgtttgttttta

SEQ ID NO: 190 - DNA, 370 bp, Enterococcus faecalis
gtagcaacaataacgtcaccgatgttagcagttttacgaccagatccgcctaggactttgatcgttaaaatttcacgtgcgccagaattgtcagcgactcttaaacgactttcttgttggatcacgatgtgtatccccctttcagattttgtgcttcaatctattaggaaattctcgttttattagataataactgcttcttcgactacctctagtaaacggaaacgttttgtagctgataatggacgagtttccatgatttttacgatgtctccaactttcgctgtgttgttttcatcatgcgctttatattttttagaatatttcatacgtttgccatagatagggtggtttttctttgtttcaacga

SEQ ID NO: 191 - DNA, 256 bp, Enterococcus faecalis
caatttagtaaattgtttacgtcctaaagtgtttttaggtagcataccttttacagaagtttcgataagacggcgagagtttttgtcgcgtaattcaccagctgtcactgattttaatcctccaggatacattgagtgacggtagtaaattttgtctgtagcttttttacctgttaattttactttatcagcgttaattacgattacgaaatctccagtatccacatgtggtgtgaatgttggtttatttttacca

SEQ ID NO: 192 - DNA, 276 bp, Enterococcus faecalis
taaaccttctactgctaccaagttattttcagcaactttatctgataatacagatttcattgctaagcgacgaacttttttaggaagtttgtagctgtatgaacgcggtgttggtccaaagactacgccacctccacgccattgtggtgaacggattgaaccttgacgagcacgaccagttcctttttgacgccatggtttgcggccaccgccacgaacagcgctacggtttttaactgcgtgtgttccttgtcttaatgaagcacgttgcatgat

SEQ ID NO: 193 - DNA, 218 bp, Enterococcus faecalis; identical to SEQ ID NO: 172

SEQ ID NO: 194 - DNA, 209 bp, Enterococcus faecalis
tattctacgtcgcggataaatccttcacgtttcaggatttctgcgatatcacgtttgatttttgaagcaggtacttctaaagtttcatgtttaaccatgttcgcattacgaatgcgagttagaaaatctgcaattggatctgtcatgaccattgaactatttacctcctttatgcgagtttacttgtttaccagctagctttcttcacg

SEQ ID NO: 195 - DNA, 255 bp, Enterococcus faecalis
agcaacactacagataactaaatctttatttaggatctcaacatcactgtccacgataatatcgccggcagtcacggtagcgggtcctgtaatatcgatctcaagggttttctcttcttcagcatataatttcaatgctaagcctttaatattcaaaataatttgtgttacgtcttctcgtacacctggaatggttgagaattcgtgtaaaacaccatcgatttgaatattcgtaattgcagctcctggtaaaga

SEQ ID NO: 196 - DNA, 286 bp, Enterococcus faecalis
tgtgccaatgaatttccctccttaaattaagttcgtgatatctaatacttctggttgttgtgcagcatgtggatgctcagctccaccgtatacgttcaatttagtaaattgtttacgtcctaaagtgtttttaggtagcataccttttacagaagtttcgataagacggcgagagtttttgtcgcgtaattcaccagctgtcactgattttaatcctccaggatacattgagtgacggtagtaaattttgtctgtagcttttttacctgttaattttactttatca

SEQ ID NO: 197 - DNA, 205 bp, Enterococcus faecalis; identical to SEQ ID NO: 189

SEQ ID NO: 198 - DNA, 181 bp, Enterococcus faecalis
cccgtgagttgagataaacatttctaagacagaaagtccttcacggaagtttgagatgattggtaattccatgattcgtccattcggagcggccatcaaaccacgcataccagctaactgtgtaaagttggagatgttaccacgggctccagagtcagacatcatgaagattgggttacga

SEQ ID NO: 199 - DNA, 279 bp, Enterococcus faecalis
gcgacgttatctttattacgtttgaagtcaatcacacggtattgacgtttgtgaccgccaccttggtgacgaaccgtaatgcgaccgttgttgttacgaccggcattgttttttaatggctgtaacaatgatttttctggtgttgaagttgtgatttcagcgaaatcagaacttgtcatgttacgacggccatttgtggtaggtttgtactttttaatcgccacgtcttatttccctcctacgttgatattgttcaggactgcttattcagcagcttcg

SEQ ID NO: 200 - DNA, 163 bp, Enterococcus faecalis
tgcgttcgttgatgattaaatcagttgtaatatcacgtagcatagctttacgttggcttgatgtgcgtcctaatttacggtaactcacgttgggttccctccttcgtttctgttctcacgagccactgctgttaagcaggactggaaacttcgtaaaagtctt

SEQ ID NO: 201 - DNA, 298 bp, Enterococcus faecalis
caacggtgcaccacggtggatgatgtcgccttcagcaactttcatacgtgcagtgtaagggacagtataggtacgtgtatctgtttttcctttgatggttacttctttttgacgtgtggcaggatcttcagaaatatcgataacttcaccggttacttctgtaatcactgcttgtcctttcggattacgtgcttcaaagatttcttggatacgaggtaaaccttgagtgatatcgtcaccggcaaccccaccggtatggaacgtacgcatggttaactgtgtaccaggttccccgata

SEQ ID NO: 202 - DNA, 187 bp, Enterococcus faecalis; identical to SEQ ID NO: 184

SEQ ID NO: 203 - DNA, 128 bp, Enterococcus faecalis
taaagtgatttcaccgttttgagttccatcttgtttgaataatgctacattcggcattccttagttcctcctttccctacacttatttagctttcacagctgatttgattgtgattaaagattttttc

SEQ ID NO: 204 - DNA, 140 bp, Enterococcus faecalis
gaccaacgtttgccaaatcataacgttttggatcaaagaaacgtgcagttaacaagctacgtgagctatctgctgtttttggttcgcctgggcgaagacgttcataaatgtctttcaagccttcttctgtacgagaatca

SEQ ID NO: 205 - DNA, 168 bp, Enterococcus faecalis
ggtaatccacgacggtgacggattccacggtatgaaccgatttccatcaagcgtttgatgtttaagttcacttcacgacgaagatccccttcaacttttaacttatcaatttccgcacgaatcgcatctgtttgttcgtttgttaaatcacgtacacgaacatcttca

SEQ ID NO: 206 - DNA, 214 bp, Enterococcus faecalis
taaacgcaactttagtagcttctccgtttgaaggatcaatcaccattacattagaaacatgaattggcgcttccacttcaaggattccaccttgtggggctgcttggtttggtttttggtgttttttaacgacgttgacaccttcaacgataactttatcttgtttaggaaacgctgctaagacaacgccttctttgtttttatctttaccagt

SEQ ID NO: 207 - DNA, 135 bp, Enterococcus faecalis
taacctgcatatttacccatgcgtttgaattttggacgcacgtttaagatgtttacgtttgctactttaacatcgaatgctgattcaacagcttgttttactaaagttttgtttgcgcgagtgtccacttcgaaa

SEQ ID NO: 208 - DNA, 155 bp, Enterococcus faecalis
gagtcacagataatgtttgcagtaagtcttcccagacattttttacattcattaaatgtgttctagtcgcttcgtttaggacttgatatacgcgttctgtgggtacgcggaacgaactttttggcgcttgtggtcgtgcttgttgacgtggcgca

SEQ ID NO: 209 - DNA, 198 bp, Enterococcus faecalis; identical to SEQ ID NO: 157

SEQ ID NO: 210 - DNA, 181 bp, Enterococcus faecalis; identical to SEQ ID NO: 174

SEQ ID NO: 211 - DNA, 188 bp, Enterococcus faecalis
tgccatcttgttccctccttcgcctattttaaaagtagacatagctccacgaaaatttatccggcatgctcgttcatggcaaagcgtccgagcgtgtcgcaacctctcgcttcacagccggcaaatcaaatcgttgatctaccaatgctttttacactcctgtaaacagcacctttttgattatacta

SEQ ID NO: 212 - DNA, 422 bp, Enterococcus faecalis
aatggttcaacgacgaacttaccataatctctattttcatcaattttttcgattcttggtttttcaaattcaatcattcttatctatacccctttcaaaacgaaaagtgtcttgttcaatgacgttcctaattcaaactcagaatgagtggcgctcattaaacacgacggcgttttggagggcggcatccattatgaggaactggagtcacgtcacgaattgcagtcacttctaaacctgttgcttgtaatgaacgaattgctgcttcacgtccagaaccaggtcctttaactgttacgtctacagttttaagtccatgttccattgccactttagttgcggcttctgcagccatttgagcggcaaaaggagttgattttttgcttcctttaaagcctaatgatcctgctgatgaccatgct

SEQ ID NO: 213 - DNA, 405 bp, Enterococcus faecalis
tcacgaacttgtaataattgttttggatcaattgaaccttctgtcaacggtgcaccacggtggatgatgtcgccttcagcaactttcatacgtgcagtgtaagggacagtataggtacgtgtatctgtttttcctttgatggttacttctttttgacgtgtggcaggatcttcagaaatatcgataacttcaccggttacttctgtaatcactgcttgtcctttcggattacgtgcttcaaagatttcttggatacgaggtaaaccttgagtgatatcgtcaccggcaaccccaccggtatggaacgtacgcatggttaactgtgtaccaggttccccgatagattgagcggcgattgtaccaactgcttctccgacttcaacgtcagaaccagttgccaagtta

SEQ ID NO: 214 - DNA, 257 bp, Enterococcus faecalis
ttaacatcgaatgctgattcaacagcttgttttactaaagttttgtttgcgcgagtgtccacttcgaaagtatatttcttttcgtccatagctaacatggatttttcagtgatcactgggcgtttgattacgtctagtaattccattatgcaagcacctcctcaatttgagtaagagctgtttgtgttgccaagactttgttagctgacacaacatctaacacactaacgttatcagaagttactacagaaacgttt

SEQ ID NO: 215 - DNA, 460 bp, Enterococcus faecalis
cttcacgtaaacggaatccagcgatagattttttagcttttgtgataagtggtttttgaccagtgattaatgctaattcttcaacagctttgtctaagtttttagcatttgatactgcatcacccacacccatgttgataacgattttatcaactttaggtgtttgcataactgagctgtaattaaatttttccaccaatgatggtgttacttctttaatatatttttctttcaggcggttcattcagtaagccctccttccgcaatttttatttatctaaaacttcacctgtttttttagaaacgcggacttttttgccgtcgacttctttaaacgcaactttagtagcttctccgtttgaaggatcaatcaccattacattagaaacatgaattggcgcttccacttcaaggattccaccttgtggggctgcttggtttggtttttggtgttttttaa

SEQ ID NO: 216 - DNA, 550 bp, Enterococcus faecalis
tcctttccctacacttatttagctttcacagctgatttgattgtgattaaagattttttcgctccaggaatgtttcctttgattaagataacatttctttctacgtccactttaacaacttcaaggttttgaattgttacgcggtcgccacccatacggccggctagtcgtttatttttaaatacacggttaggcgctactggacccattgacccaggacgacggtgataacgagaaccatgagacataggtccgcggctttggccgtgacgtttgattgccccttggaatcctttacctttcgtagtacctgtaacatcaacaacgtctcctgcttggaaaacatctactttgatttctttacctacttcatattctcctagctcaacattcttgaattctttaatgaagcgcttaggagccgtgtttgcttttgcaacatgacctttcgcaggtttgtttgataaaacttcacgtttgtcttggtaaccaacttggatagcttcgtatccgtcagtttcaacagtttttacttgtaaactacgtttgg

SEQ ID NO: 217 - DNA, 257 bp, Enterococcus faecalis; identical to SEQ ID NO: 214

SEQ ID NO: 218 - DNA, 266 bp, Enterococcus faecalis
aaaacaccatcgatttgaatattcgtaattgcagctcctggtaaagaagacaataaaatacgacgtagagagttacctaaagtagttccgtaaccgcgttctaatggttcaacgacgaacttaccataatctctattttcatcaattttttcgattcttggtttttcaaattcaatcattcttatctatacccctttcaaaacgaaaagtgtcttgttcaatgacgttcctaattcaaactcagaatgagtggcgctcattaaaca

SEQ ID NO: 219 - DNA, 245 bp, Enterococcus faecalis
gtagtgttaccaataccataaatgtaagtaagagaaactactacacgtttgtcacgagggatgtctactcctgcaatacgagccattattcgttacacctcctaattatccttgacgttgtttatgttttggatttgctgggcaaataaccataacacgtcctttacggcgaattactttacaatgttcacacattggttttactgatggtcttactttcatgataatacctcctgtggttttac

SEQ ID NO: 220 - DNA, 258 bp, Enterococcus faecalis
gctgtatgaacgcggtgttggtccaaagactacgccacctccacgccattgtggtgaacggattgaaccttgacgagcacgaccagttcctttttgacgccatggtttgcggccaccgccacgaacagcgctacggtttttaactgcgtgtgttccttgtcttaatgaagcacgttgcatgatgattgcatcatagacaacactttcattaggttcgattccgaagatttcttcatttaaagtgatttcaccgttttg

SEQ ID NO: 221 - DNA, 582 bp, Enterococcus faecalis
tctttaatatatttttctttcaggcggttcattcagtaagccctccttccgcaatttttatttatctaaaacttcacctgtttttttagaaacgcggacttttttgccgtcgacttctttaaacgcaactttagtagcttctccgtttgaaggatcaatcaccattacattagaaacatgaattggcgcttccacttcaaggattccaccttgtggggctgcttggtttggtttttggtgttttttaacgacgttgacaccttcaacgataactttatcttgtttaggaaacgctgctaagacaacgccttctttgtttttatctttaccagtgataacttttactttatcgccttttttaacaaacattactgtttcgcacctcctttaacgtgggctcgagattataatacttctggtgctagagaaacgatcttcatgaagttgttttcacgtaattcacgtgcaactggtccgaagatacgtgttccgcgtgggcttttatcgtcacggataattaccgcagcattttcatcaaatttgatgtaagaaccgtcagcacgacgagcgccagattttgta

SEQ ID NO: 222 - DNA, 334 bp, Enterococcus faecalis
caggtaaacctaattcactgatataacgggcacgacgtgaggctggcatttctggcaaactagcgcgaactttttcaatccattcatcatcaattgaaaaacgaggaacatctggctctgggaagtaacggtagtcacttgagccttctttaacacgcataagcaacgttgtactagttgcttcatcaaagcggcgtgtttcttgttgaatttcgccaccagataataggactttggcctggcgtttttcttcataagctaaacctttttttacaaagttcatagagttcaagttctttaattccgctttagtaccaaattcttcttgaccata

SEQ ID NO: 223 - DNA, 274 bp, Enterococcus faecalis
acctgatacttgagttttgattcctttagcgccagcacgcattgcgcgttggatggcttgtttttgagcacgacggaaagcaacacggttttctaattgacgtgcaattccttcgcctactaattttgcatctaaatctggttttttgatttcaacgatgttgatgtgaactcgtttgccagttaatttgtttaattcttttcttaggttttcgacttcagatccgcctttaccgataaccatacctggtttagctgtgtgaattgaaatgtta

SEQ ID NO: 224 - DNA, 195 bp, Enterococcus faecalis
cggttaggcgctactggacccattgacccaggacgacggtgataacgagaaccatgagacataggtccgcggctttggccgtgacgtttgattgccccttggaatcctttacctttcgtagtacctgtaacatcaacaacgtctcctgcttggaaaacatctactttgatttctttacctacttcatattctcct

SEQ ID NO: 225 - DNA, 301 bp, Enterococcus faecalis
tgtttcttggaaggatgcagcagataagaagctgtttgtttccaatgacgctttggtaataccaagtaagactggacgactagtagcagggacgccaccagcaactaatgtgtcgtagttacggtctttaaattctgcgatgtccattaatgttcctggaaggatttcagtgtcacctggatccattacgcggattttacgtaacatttgacgaaccattacttcgatatgtttgtcgccgatttctaccccttgcatacggtaaacacgttgtacttcacgtaataggtagttttcaaca

SEQ ID NO: 226 - DNA, 244 bp, Enterococcus faecalis; identical to SEQ ID NO: 160

SEQ ID NO: 227 - DNA, 201 bp, Enterococcus faecalis
agctttgtcaacgcggtaagttactttaccagctttaacttcttcaacagcttttgtaacgtccattgttacagtaccagttttagggtttggcattaaaccttttggtcctaagacacggcctaatttaccaactgtagccatcatgtcaggagtcgcaacaactacgtcaaagtcgaaccatccaccttggatttttgc

SEQ ID NO: 228 - DNA, 260 bp, Enterococcus faecalis
tgacaccaacggaaatacggttatcaaatggttcacctgtacgtccatcgtaaagaactgttttagcatcgctagccataccagcttcacgaacagtttcccaaacgtcttcatcggttgccccatcgaaaacaggtgttgcgacgtgaatacctaattggcgagcagccatacctaagtgtaattcaagtacttgtccgatattcatacgagaaggtacccctaatgggttcaacatgatatcaacaggtgttccgtca

SEQ ID NO: 229 - DNA, 269 bp, Enterococcus faecalis
tgtttgaggcataggaccatcagcagcagaaactactaagatagctccgtccatttgagcagcaccagtgatcatgtttttaacgtagtccgcgtgtcctgggcagtcaacgtgtgcatagtgacgagtttcagtttcatattcgatatgagaagtgttgattgtgattccacgttctttttcttctggagcgttatcgatagaatcgtagctttgtgcttccccgccaccgtgttttgataatacagtagcaattgcagctgttaatg

SEQ ID NO: 230 - DNA, 292 bp, Enterococcus faecalis
tcattcaaaacatctcctttcgtcaataaatgtttcatgtgaaacaaattatgcttctaccttcacgatcatatgacggataatatcgtcattgatttttgctaaacgatcaaactcgttgattgcgccagctgttgatggagaagtaacattaacgatatgatagatgccttcacggaatccgttcatttcatatgctaagcggcgtttttcccaatctttagattcgataacttctgctccgttatcttttaagattgtgtcgaaacgttctactaaagcagtttttgct

SEQ ID NO: 231 - DNA, 198 bp, Enterococcus faecalis
acacatggtcaaaaaaattatttagtacgacgacgaacgataagtttgtctgatttagcttttttattacgtgttttgtatccaattgctggttgaccccatggagatactggcgctttacgtccaattggtgttttaccttcaccaccaccgtgtgggtgatcgttagggttcattacgctaccacgaacagttggg

SEQ ID NO: 232 - DNA, 198 bp, Enterococcus faecalis; identical to SEQ ID NO: 157

SEQ ID NO: 233 - DNA, 135 bp, Enterococcus faecalis; identical to SEQ ID NO: 207

SEQ ID NO: 234 - DNA, 75 bp, Enterococcus faecalis
aaaatgtacgacacatggtcaaaaaaattatttagtacgacgacgaacgataagtttgtctgatttagctttttt

SEQ ID NO: 235 - DNA, 320 bp, Enterococcus faecalis
tggatctgtcatgaccattgaactatttacctcctttatgcgagtttacttgtttaccagctagctttcttcacgccgggaatttgacctttataggcaagttcgcggaagcaaatacggcaaagatgaaatttacgataaactgaatgtggacgtccacaacgttcacaacgagtataagcttgtgttgaatgtttagcaggacgtttgtttttagcaatcattgattttttagccacgtagttcgcctccttatattatttttggaatggcatacctaattgtgccaacaattcgcgagactcttcgtcagtgttcgc

SEQ ID NO: 236 - DNA, 244 bp, Enterococcus faecalis; identical to SEQ ID NO: 160

SEQ ID NO: 237 - DNA, 224 bp, Enterococcus faecalis
aatggtaataatcccatgatacgtgcgcgtttaatagcaatcgttaatttacgttggtttttagcgccagtacctgtaacacgacgtggtaaaattttgccacgttctgaaatgaatcgttttaacaattcagtatctttatagtcgatgtattcgatgtggtttgctgcgatatagtcgactttccgacgtttacgtccgcctcttctttgttgtgccattct

SEQ ID NO: 238 - DNA, 198 bp, Enterococcus faecalis; identical to SEQ ID NO: 163

SEQ ID NO: 239 - DNA, 329 bp, Enterococcus faecalis
cattcttgttccctcctatcaaattcgtttagaatggtaaatcatcatctgaaatgtcgatagatgaacctgagccaccaaatggatcagaatctttatcgaaatcaggcataccgttattgttttgcgactgagaagatgatggattgaaactattgttgttgttattaaatccagaaccggcattgttattaccaaagctacgattttgtgattgataaccattttcgttgttattaaagctaccgccgccagttcctctttgttctgaagcagaacgagattctaacaattggaagttttcacaaaccacttcagttacgtagaca

SEQ ID NO: 240 - DNA, 299 bp, Enterococcus faecalis
ttggatcaatataaaccatgaatggtgttcctccttctcctaaaattctagtccattttcacgagcagcttcagctaaagcttgcacgcggccatggtaaaggtatccaccacggtcgaagactacttttttgatgcctttttcagcggcacgttcagcaactagtttaccaacagctgcagctgtttctgtttttgttccacctgaaatttctttatccaaggcagaggcacttgctagcgtcacacccgctacgtcatcaatgacttgcgcgtagatgtttttgttagaacggaaaa

SEQ ID NO: 241 - DNA, 199 bp, Enterococcus faecalis
agctttagcttctttcaagcctaagccagttgcttcacgaactgctttgataactttaactttttgatcgccagctgctgttaattcaacagtgaattcagtttgttcttctgctgctccacctgctgctggtccagctactgctacaggagctgctgctgatacgtcaaatttttcttcgatagctttaactaattcg

SEQ ID NO: 242 - DNA, 223 bp, Enterococcus faecalis
taattccattatgcaagcacctcctcaatttgagtaagagctgtttgtgttgccaagactttgttagcctgacacaacatctaacacacctaacagttatcatgaagttacctacagaaacagtttggtaagttacgagcctgataaagctgcaaagtcgttaccattttctaaaacaactaatactttagtatcgatagacaagttagcaagaacttgtttg

SEQ ID NO: 243 - DNA, 615 bp, Enterococcus faecalis
tgtttcttggaaggatgcagcagataagaagctgtttgtttccaatgacgctttggtaataccaagtaagactggacgactagtagcagggacgccaccagcaactaatgtgtcgtagttacggtctttaaattctgcgatgtccattaatgttcctggaaggatttcagtgtcacctggatccattacgcggattttacgtaacatttgacgaaccattacttcgatatgtttgtcgccgatttctaccccttgcatacggtaaacacgttgtacttcacgtaataggtagttttcaacagataaaacatcacgaacttgtaataattgttttggatcaattgaaccttctgtcaacggtgcaccacggtggatgatgtcgccttcagcaactttcatacgtgcagtgtaagggacagtataggtacgtgtatctgtttttcctttgatggttacttctttttgacgtgtggcaggatcttcagaaatatcgataacttcaccggttacttctgtaatcactgcttgtcctttcggattacgtgcttcaaagatttcttggatacgaggtaaaccttgagtgatatcgtcaccggcaaccccaccggtatggaa

SEQ ID NO: 244 - DNA, 157 bp, Enterococcus faecalis
cgaattttttgttttgccatcttgttccctccttcgcctattttaaaagtagacatagcctccacgaaaatttatccggcatgcctcgttcatggcaaagcgtccgagcgtgtcgcaacctctcgcttcacagccggcaaatcaaatcgttgatcta

SEQ ID NO: 245 - DNA, 276 bp, Enterococcus faecalis
accaagttattttcagcaactttatctgataatacagatttcattgctaagcgacgaacttttttaggaagtttgtagcctgtatgaacgcaggtgttggtccaaagactacgccacctccacgccattgtggtgaacggattgaaccttgacgagcacgaccagttcctttttgacgccatggtttgcggccaccgccacgaacagcgctacggtttttaacctgcgtgtgttccttgtcttaatgaagcacgttgcatgatgattgcatcatag

SEQ ID NO: 246 - DNA, 312 bp, Enterococcus faecalis
tggtgctaagatgtatgccttaaccccgtcttcgtaatgaactaacgcgatgttagcagaacggtttggatcgtactcgatcgttttaacaaccgctgcgacgttatctttattacgtttgaagtcaatcacacggtattgacgtttgtgaccgccaccttggtgacgaaccgtaatgcgaccgttgttgttacgaccggcattgttttttaatggctgtaacaatgatttttctggtgttgaagttgtgatttcagcgaaatcagaacttgtcatgttacgacggccatttgtggtaggtttgtacttttt

SEQ ID NO: 247 - DNA, 236 bp, Enterococcus faecalis
ttatctgataatacagatttcattgctaagcgacgaacttttttaggaagtttgtagctgtatgaacgcggtgttggtccaaagactacgccacctccacgccattgtggtgaacggattgaaccttgacgagcacgaccagttcctttttgacgccatggtttgcggccaccgccacgaacagcgctacggtttttaactgcgtgtgttccttgtcttaatgaagcacgttgcat

SEQ ID NO: 248 - DNA, 181 bp, Enterococcus faecalis
tgtttccgtccatcatatacagcgattgtgaaacctacgaatgatggaaaaattgtagagcggcgagaccaagttttaattacttttttcttttcggcaccttgttgtgcttcgacctttttcatcaaatgatcatcgacgaaaggtcctttttttaaactacgacccatggtgaacctcc

SEQ ID NO: 249 - DNA, 309 bp, Enterococcus faecalis; identical to SEQ ID NO: 177

SEQ ID NO: 250 - DNA, 137 bp, Enterococcus faecalis
cacctccacgccattgtggtgaacggattgaaccttgacgagcacgaccagttcctttttgacgccatggtttgcggccaccgccacgaacagcgctacggtttttaactgcgtgtgttccttgtcttaatgaagca

SEQ ID NO: 251 - DNA, 342 bp, Enterococcus faecalis
tgtccgcttcttcccatgcgtaatcaatgtccgcacgtaatgtgtgaagtggtacagttccttcagagtatccttctgaacgagcgatatccgcaccgtttagacgacctgatacttgagttttgattcctttagcgccagcacgcattgcgcgttggatggcttgtttttgagcacgacggaaagcaacacggttttctaattgacgtgcaattccttcgcctactaattttgcatctaaatctggttttttgatttcaacgatgttgatgtgaactcgtttgccagttaatttgtttaattcttttcttaggttttcgacttcagatccgcctttaccga

SEQ ID NO: 252 - DNA, 309 bp, Enterococcus faecalis
tacttcaactttcacttgtttaccaccagttttgataattgcgtacatgctatacagcacctccttcttctagacttagactcgccatcccaagtgatgattgctcatgcttaaaaacttgttctgtgcggttgtagctgtggagaccacaattacaacactaactataataacagaaccagaaaacctcgtcaatataaactctctattttcttcactttctctctccaaaaaaacttcttctgttatttaaatttccgattgactttctaacactacttccattataattagctttgttgtgttaca

SEQ ID NO: 253 - DNA, 245 bp, Enterococcus faecalis; identical to SEQ ID NO: 1

SEQ ID NO: 254 - DNA, 351 bp, Enterococcus faecalis
tattctacgtcgcggataaatccttcacgtttcaggatttctgcgatatcacgtttgatttttgaagcaggtacttctaaagtttcatgtttaaccatgttcgcattacgaatgcgagttagaaaatctgcaattggatctgtcatgaccattgaactatttacctcctttatgcgagtttacttgtttaccagctagctttcttcacgccgggaatttgacctttataggcaagttcgcggaagcaaatacggcaaagatgaaatttacgataaactgaatgtggacgtccacaacgttcacaacgagtataagcttgtgttgaatgtttagcaggacgtttgtttttag

SEQ ID NO: 255 - DNA, 340 bp, Enterococcus faecalis
taacatttgacgaaccattacttcgatatgtttgtcgccgatttctaccccttgcatacggtaaacacgttgtacttcacgtaataggtagttttcaacagataaaacatcacgaacttgtaataattgttttggatcaattgaaccttctgtcaacggtgcaccacggtggatgatgtcgccttcagcaactttcatacgtgcagtgtaagggacagtataggtacgtgtatctgtttttcctttgatggttacttctttttgacgtgtggcaggatcttcagaaatatcgataacttcaccggttacttctgtaatcactgcttgtcctttcggatta

SEQ ID NO: 256 - DNA, 163 bp, Enterococcus faecalis
cataggaccatcagcagcagaaactactaagatagctccgtccatttgagcagcaccagtgatcatgtttttaacgtagtccgcgtgtcctgggcagtcaacgtgtgcatagtgacgagtttcagtttcatattcgatatgagaagtgttgattgtgattcca

SEQ ID NO: 257 - DNA, 362 bp, Enterococcus faecalis
cacctgaacctttttcgatttttgcagcttttttcaataatactgcagcaggtggtgttttagtaatgaatgtaaatgaacgatcttcatatacagagattactactggaataatcaagcctgcttggtcagctgtacgagcattgaattctttagtgaatcccatgatgttgatacctgcttgacctaacgctggacctactggtggagctggtgttgctttccccgcaggaatttgtaatttaacgattttttctacttttttagccacgaaaatacctccttaagttctcgtgcgtggttaatggggttgagatttcccctcccactcaacgtacatttaaaacataccctattactat

SEQ ID NO: 258 - DNA, 223 bp, Enterococcus faecalis
cctgtgccgctatattgtacttgtgccaatgaatttccctccttaaattaagttcgtgatatctaatacttctggttgttgtgcagcatgtggatgctcagctccaccgtatacgttcaatttagtaaattgtttacgtcctaaagtgtttttaggtagcataccttttacagaagtttcgataagacggcgagagtttttgtcgcgtaatttcaccagctgt

SEQ ID NO: 259 - DNA, 310 bp, Enterococcus faecalis
tacctaaagtagttccgtaaccgcgttctaatggttcaacgacgaacttaccataatctctattttcatcaattttttcgattcttggtttttcaaattcaatcattcttatctatacccctttcaaaacgaaaagtgtcttgttcaatgacgttcctaattcaaactcagaatgagtggcgctcattaaacacgacggcgttttggagggcggcatccattatgaggaactggagtcacgtcacgaattgcagtcacttctaaacctgttgcttgtaatgaacgaattgctgcttcacgtccagaacca

SEQ ID NO: 260 - DNA, 206 bp, Enterococcus faecalis
ccctaaccatttgcctggtgtttcttctaagacggctaaaaggtcttttcctgttatggccaattcatgtctttgatggatgggtaatgccttaactaactcttttgttacttgtacttgactctcttgttggtaataatataaaagcctttcaacaagtactgctgattcttcgcctaattcataaagcatcattggctgccagt

SEQ ID NO: 261 - DNA, 94 bp, Enterococcus faecalis
tacctaaacctaacgctttaactgtagcacgttggttttgaggacgtccgataacactgcgttttaaagtaatttttaattcagccattatttt

SEQ ID NO: 262 - DNA, 468 bp, Enterococcus faecalis
cctgtgccgctatattgtacttgtgccaatgaatttccctccttaaattaagttcgtgatatctaataccttctggttgttgtgcagcatgtggatgctcagctccaccgtatacgttcaatttagtaaattgtttacgtcctaaagtgtttttaggtagcataccttttacagaagtttcgataagacggcgagagtttttgtcgcgtaattcaccagctgtcactgattttaatcctccaggatacattgagtgacggtagtaaattttgtctgtagcttttttacctgttaattttaccttatcagcgttaattacgattacgaaatctccagtatccacatgtggtgtgaatgttggtttatttttaccacgtagtacagaagcaacaactgctgatagacgtcctaaaggaacatctgttgcatctactacgtaccatttacgttctacttcgccagctttgg

SEQ ID NO: 263 - DNA, 468 bp, Enterococcus faecalis
cctgtgccgctatattgtacttgtgccaatgaatttccctccttaaattaagttcgtgatatctaatacttctggttgttgtgcagcatgtggatgctcagctccaccgtatacgttcaatttagtaaattgtttacgtcctaaagtgtttttaggtagcataccttttacagaagtttcgataagacggcgagagtttttgtcgcgtaattcaccagctgtcactgattttaatcctccaggatacattgagtgacggtagtaaattttgtctgtagcttttttacctgttaattttactttatcagcgttaattacgattacgaaatctccagtatccacatgtggtgtgaatgttggtttatttttaccacgtagtacagaagcaacaactgctgatagacgtcctaaaggaacatctgttgcatctactacgtaccattttacgttctacttcgccagctttgg

SEQ ID NO: 264 - DNA, 250 bp, Enterococcus faecalis
tgcttttccgtgtaatgcgcagtaagtagtaaagttttgcacgacgtactttaccgtatcgaaccaccttcaatttgagcaacacgtggtgtgtgtaatgggaatgtacgttccacaccaacaccatttgaaactttacgtactgtgtaagtttcgctgattccagcaccacggcgtttaattacaacaccttcgaataactggatacgttcacgagtaccttcgactactttcgcatgaacgcgaacag

SEQ ID NO: 265 - DNA, 214 bp, Enterococcus faecalis
atcgctttgcgacgtttttttgtataacctgcatatttacccatgcagtttgaattttggacgcacgtttaagatgtttacgtttgcctacctttaacatcgaatgctgattcaacagccttgttttactaaagtttggtttgcgcgagtgtccacttcgaaagtatatttcttttcgtccatagctaacatggatttttcagtgatcactggg

SEQ ID NO: 266 - DNA, 221 bp, Enterococcus faecalis
tctaacctccttcacttatgaattattttttcttgcctgctactgttttagtagggcctttacgagtacagtgcattatttttcgtgttttgtccacgagttggtaatccacgacggtgacggattccacggtatgaaccgatttccatcaagcgtttgatgtttaagttcacttcacgacgaagatccccttcaacttttaacttatcaatttccgcacg

SEQ ID NO: 267 - DNA, 294 bp, Enterococcus faecalis
cgatagacaagttagcaagaacttgtttgaattcttttgtttttggtgcatcgaagcttaaaccttctactgctaccaagttattttcagcaacctttatctgataatacagatttcattgctaagcgacgaacttttttaggaagtttgtagctgtatgaacgcggtgttggtccaaagactacgccacctccacgccattgtggtgaacggattgaaccttgacgagcacgaccagttcctttttgacgccatggtttgcggccaccgccacgaacagcgctacggttttta

SEQ ID NO: 268 - DNA, 165 bp, Enterococcus faecalis
  misc_feature (39)..(39): n=g, a, t or c
  misc_feature (99)..(99): n=g, a, t or c
catctggaaccaacaatgttcgattttcatacgtcccantacttgtcgccaacacttcatcaggtgcagggcgcactttgacttgctgggcctgccacnttacagttgaacaagcacttaataaggtacttagaacgagtaagctcattaaaatgtagggtttcc

SEQ ID NO: 269 - DNA, 568 bp, Enterococcus faecalis
ccagctgttttaccattaccagatgaagtaccacagtccaacacaggttacgtacttggcagtgagccctcagcaggttttaattcatgaagtttcataggtttggcacctccttaagcaatcttctattacaaatctataaatcttaaacttcttctacgtccactaaatgtgaaatagtgttaaccatacctttgattgcttcattggcaggttttgtaacagtactattcactttacctaaacctaacgctttaactgtagcacgttggttttgaggacgtccgataacactgcgttttaaagtaatttttaattcagccattatttttgtcctccttaaccgataatttcttctacagatttaccgcgaagtgctgccacttcttcggcacgttttaattgttttagaccttcaacagtttgcgcgaacaacgttaataggtgtgtttgaacctagtgattttagatgtaatatctgctacaccagctaattccaatacggcacgaactggtccacccagcagctaccccagatccttctactgcaggtttcatatggataccg

SEQ ID NO: 270 - DNA, 263 bp, Enterococcus faecalis
gaaacatgaattggcagcttccacttcaaggattccaccttgtggggctgcttggtttggtttttggtgttttttaacgacgttgacacctttcaacgataactttatcttgtttaggaaacgctgctaagacaacgccttctttgtttttatctttaccagtgataacttttactttatcgccttttttaacaaacattactgtttcgcacctcctttaacgtgggctcgagattataatacttctggtgctagagaaacga

SEQ ID NO: 271 - DNA, 284 bp, Enterococcus faecalis
cgaataattgaatttcttttgaatcttcagttaatgtaacagatcgctttgcgacgtttttttgtataacctgcatatttacccatgcgtttgaattttggacgcacgtttaagatgtttacgtttgctactttaacatcgaatgctgattcaacagcttgttttactaaagttttgtttgcgcgagtgtccacttcgaaagtatatttcttttcgtccatagctaacatggatttttcagtgatcactgggcgtttgattacgtctagtaattccattatgca

SEQ ID NO: 272 - DNA, 120 bp, Enterococcus faecalis
ttcttcacgaatagatgacatttcttcatctaataaataggctgcctctgccgctcgctgaaggcgttctttcatttcttcaggaaagacaccttgatatttataattcaaagaatgttc

SEQ ID NO: 273 - DNA, 82 bp, Enterococcus faecalis
gctcgattcacgtgagaattcccattcatgttcaatttgaaataagggtttcattgctttctttgtcgctgcttcatccaag

SEQ ID NO: 274 - DNA, 237 bp, Enterococcus faecalis
cccctttcagattttgtgcttcaatctattaggaaattctcgttttattagataataacctgcttcttcgactacctctagtaaacaggaaacgttttgtagcctgataatggacgagtttccatgatttttacgatgtctccaactttcgctgtgttgttttcatcatgcgctttatattttttagaatatttcatacgtttgccatagatagggtggtttttctttgtttcaacg

SEQ ID NO: 275 - DNA, 288 bp, Enterococcus faecalis
cggttttcagctaaattctggacaccaagctgaacaagctctgctgcttcctcaattcctactgatttagtgacgccaatcattgtcacatcagcaacagagcgctgtgagcttttgcatgctagctgaagttgattattaatatttgttaagttttcagctatcatttctaatcgatgctccttatcgttttctgcggaaaaatggtggcgtacttaattcgtcatcattgtgatttggttcttcacggtggaatgtgtcaaattcttttttgtctacttgttctaa

SEQ ID NO: 276 - DNA, 225 bp, Enterococcus faecalis
gcatcgtctaagcgagttgcttctgcatcagtatcttctacggaagttttgttgaaagacaagtcaggttgaactagcaggtaagctttagcaacagcaacgccatcacttgcggcaatcccttttagcatctcagacattattcagccaatccttctttttgtaatgtttcaacgattgctgccattccttcagcttcgtcagcaccatcaacagtgattgtta

SEQ ID NO: 277 - DNA, 150 bp, Enterococcus faecalis
cactaacgttatcagaagttactacagaaacgtttggtaagttacgagctgataaagctgcaaagtcgttaccattttctaaaacaactaatactttagtatcgatagacaagttagcaagaacttgtttgaattcttttgtttttggtg

SEQ ID NO: 278 - DNA, 525 bp, Enterococcus faecalis
gtctaagccaccagtaatgtttaataagacttgttccgcaccatcgattgatgtttctaacaatggtgaagaaatagccttttttcgttgcttcaattacacagttcttcgccgctcgctacaccaattcccattaaagctgttccttggttttccatcactgttttcacgtcagcaaagtccaagtttacgtaacctggtgcagtgattaaatctgaaattccttgaacaccttgacgtaatacattatcagcttctctaaatgcttcaagcattggcgttttcttgtcaacgacttctaataagcggttgtttgagataattagtagtgtatcaacgttttcttttaataaggcaattccttcagcggcaaaacgaccacgttttggaccttcaaaactaaatggacgagttactacaccaactgttaaagcgcctaattctttagcgatttttgcaactactggggcagcacctgtaccagttccgccacccataccagcagtaatgaaaatcatatccgcg

SEQ ID NO: 279 - DNA, 276 bp, Enterococcus faecalis
tcacgaatagagaaacgagttccgtcttcgatagcgattgggtgaattaattcaacgtccatagcaacagttatcaccaggcattaccatttcagtaccttctggcaattctacaacaccagtaacgtctgttgtacggaagtagaattgaggacggtagttagtgaagaatggagtgtgacgtccgccttcttcttttgataatacgtatacttcagctttgaattttgtgtgtggagtgattgtagctggtttagctaatacttgtccacgttc

SEQ ID NO: 280 - DNA, 236 bp, Enterococcus faecalis
ggcataggaccatcagcagcagaaactactaagatagctccgtccatttgagcagcaccagtgatcatgtttttaacgtagtccgcgtgtcctgggcagtcaacagtgtgcatagtgacgagtttcagtttcatattcgatatgagaagtgttgattgtgattccacgttctttttcttctggagcgttatcgatagaatcgtagctttgtgcttccccgccaccgtgttttgata

SEQ ID NO: 281 - DNA, 258 bp, Enterococcus faecalis
tgcttgcagcgatttgaatttcttgtccagtttgtgggttacagtcctttacgagctgcgcgttcgcagaacttcaaagttaccaaaaccgattaattgaactttttcacctttagcaagagtttcttgaattgttgaaaagacagcgtctactgctgcagtagcatcttttttagttaaaccagttgaagatgcaacgttttcgattaattctgctttatttgccatggatcatttcacctcctctataagagatac

SEQ ID NO: 282 - DNA, 123 bp, Enterococcus faecalis
aaatgaaactttaccgattggtacagtggatgttaccagctttgtcaacgcggtaagttactttaccagctttaacttcttcaacagcttttgtaacgtccattgttacagtaccagttttag

SEQ ID NO: 283 - DNA, 264 bp, Enterococcus faecalis
gccaacaatttcgccgtatatagttgcgccacgtttctgtgcatgctcgagttcttctaaaaccagcattcctgcgccttcacccatcacaaaaccttttcgttctttatcaaaaggaatcgaagcccgagtcgcatcttctgttgtatttaaagcattcaatgctgcaaagcctgcaatcccaatttcacatactgtggcttctgtcccaccagttaccatcatgtccgctaaaccatatttaatcgtgcgaaaagcttcacc

SEQ ID NO: 284 - DNA, 156 bp, Enterococcus faecalis
ggtggagctggtgttgctttccccgcaggaatttgtaatttaacgattttttctacttttttagccacgaaaatacctccttaagttctcgtgcgtggttaatggggttgagatttcccctcccactcaacgtacatttaaaacataccctattac

SEQ ID NO: 285 - DNA, 133 bp, Enterococcus faecalis
ccaagaatgcaggccttgttcttgtaaaaaggctacagtatttttttaaatctcgttcgtaactccgccgtgtgttatttgataagccccgctctatttgtaaatagtgtaaataatcgactaattgttcttc

SEQ ID NO: 286 - DNA, 317 bp, Enterococcus faecalis
cagatttcattgctaagcgacgaacttttttaggaagtttgtagctgtatgaacgcggtgttggtccaaagactacgccacctccacgccattgtggtgaacggattgaaccttgacgagcacgaccagttcctttttgacgccatggtttgcggccaccgccacgaacagcgctacggtttttaactgcgtgtgttccttgtcttaatgaagcacgttgcatgatgattgcatcatagacaacactttcattaggttcgattccgaagatttcttcatttaaagtgatttcaccgttttgagttccatcttgtttg

SEQ ID NO: 287 - DNA, 251 bp, Enterococcus faecalis
tgcttttccgtgtaatgcgcagtaagtagtaaagttttgcacgacgtactttaccagtatcgaaccacttcaatttgagcaacacagtggtgtgtgtaatgggaatgtacgttccacaccaacaccatttgaaactttacgtactgtgtaagtttcgctgattccagcaccacggcgtttaattacaacaccttcgaataactggatacgttcacgagtaccttcgactactttcgcatgaacgcgaacag

SEQ ID NO: 288 - DNA, 158 bp, Enterococcus faecalis
tacagaagtttcgataagacggcgagagtttttgtcgcgtaattcaccagctgtcactgattttaatcctccaggatacattgagtgacaggtagtaaattttgtctgtagcttttttacctgttaattttactttatcagcgttaattacgattacg

SEQ ID NO: 289 - DNA, 176 bp, Enterococcus faecalis
tcgttaaagtcaagaccattgcgtcgtattcaggtaaacctaattcactgatataacgggcacgacgtgaggctggcatttctggcaaactagcgcgaactttttcaatccattcatcatcaattgaaaaacgaggaacatctggctctgggaagtaacggtagtcacttgagcct

SEQ ID NO: 290 - DNA, 262 bp, Enterococcus faecalis
gaaacatgaattggcgcttccacttcaaggattccaccttgtggggctgcttggtttggtttttggtgttttttaacgacgttgacaccttcaacgataacttttatcttgtttaggaaacgctgctaagacaacgccttctttgtttttatctttaccagtgataacttttactttatcgccttttttaacaaacattactgtttcgcacctcctttaacgtgggctcgagattataatacttctggtgctagagaaacga

SEQ ID NO: 291 - DNA, 202 bp, Enterococcus faecalis
ccagctgctgttaattcaacagtgaattcagtttgttcttctgctgctccacctgctgctggtccagctactgctacaggagctgctgctgatacgtcaaatttttcttcgatagctttaactaattcgcttagttctaagatagttgctgtttctaactcagcaacgatgttttcaatgtttaatgccattttgaatttcc

SEQ ID NO: 292 - DNA, 225 bp, Enterococcus faecalis; identical to SEQ ID NO: 276

SEQ ID NO: 293 - DNA, 237 bp, Enterococcus faecalis
caactaagtttttcttcgcgtcttcgattgctttacggatagcttcaggtacttcttgtgctttaccagtaccgaaaccaacgtgtccagtttttgtcaccgacaacaactaaagctgcgaaacgtaaacgacgtccacctttaacaacttttgttacacggttgatcgctacaacgcggtcttctaattccaaatgttttggatcaatataaaccatgaatggtgttcctccttct

SEQ ID NO: 294 - DNA, 468 bp, Enterococcus faecalis
cctgtgccgctatattgtacttgtgccaatgaatttccctccttaaattaagttcgtgatatctaataccttctggttgttgtgcagcatgtggatgctcagctccaccgtatacgttcaatttagtaaattgtttacgtcctaaagtgtttttaggtagcataccttttacagaagtttcgataagacggcgagagtttttgtcgcgtaattcaccagctgtcactgattttaatcctccaggatacattgagtgacggtagtaaattttgtctgtagcttttttacctgttaattttactttatcagcgttaattacgattacgaaatctccagtatccacatgtggtgtgaatgttggtttatttttaccacgtagtacagaagcaacaactgctgatagacgtcctaaaggaacatctgttgcatctactacgtaccatttacgttctacttcgccagctttgg

SEQ ID NO: 295 - DNA, 483 bp, Enterococcus faecalis
ccggcagtatcaagcgcaccacgaacgatatggtaacagtacccctggtaagtcttttacacagtccaccacgtaataataccacgcctgtgttcttgtaagttgtgaccgatacctgggatataagctgtaacttcgattaagtttgacaaacgaacacgggcatatttacgtaaagctgagttcggttttttaggtgtcatcgtacccacacgtgtacaaactccacgtttttgcggagagttaacgtttgtttgagttttcttaaaactgttatatcctttgtttaaggctggtgaatcagatttttctactttagatttacgaggtttacgtactaattggttaattgtaggcattccttgttctcctccttccttacttcgcttctagttccacacatccaggtggttcttttttcgcgataaaaaataatgcaatctctgcactctttatcaaatatgctttgatagacagtcagca

SEQ ID NO: 296 - DNA, 110 bp, Enterococcus faecalis
tatgcaagacaaaaaaagctgaatccggagattcagctttttaatcgtattagttagctacctggataaactgatacttgttttttgtcgcggcctttacgttcgaaacg

SEQ ID NO: 297 - DNA, 245 bp, Enterococcus faecalis
tcttgtgcttcaaacaaggtcatgtctaagccaccagtaatgtttaataagacttgttccgcaccatcgattgatgtttctaacaatggtgaagaaatagccttttttcgttgcttcaattacacagttcttcgccgctcgctacaccaattcccattaaagctgttccttggttttccatcactgttttcacgtcagcaaagtccaagtttacgtaacctggtgcagtgattaaatctgaaatt

SEQ ID NO: 298 - DNA, 184 bp, Enterococcus faecalis
tgtagcactttcgctttgggacattttcttttgaatatacgttacttctgtttcaatttctaaacgtgggaaaataggtgttcctttacttgttactgttacgtctgttgggaactcaccaaaatgaatattttccatgttcattgtttctggatctaagcctaattgttcgaaaattttccct

SEQ ID NO: 299 - DNA, 216 bp, Enterococcus faecalis
catatgttggcatgtagcgtttataacgatcatctaagccagcataaaggatttcacttgttggaccaaatgtcacagccaaagcgccagcaaccgtgacgatttcaccagcttctgcgatattttcttctaattcttttagttcccgagtcaaggaagcatctaattcttctaaattatggcgctttttcacttgattttctttcaaattactca

SEQ ID NO: 300 - DNA, 171 bp, Enterococcus faecalis
cagaacttccattcctcgagctgctgcttcatcgttaaattcttcatgaacaactgggtacctctgccacaaccaatgacctcaccttgatgcggaattttttcccaaatttcttctgttacaaacggcataattggatgcaataagcgtaagatttgatccaatgtgtac

SEQ ID NO: 301 - DNA, 97 bp, Enterococcus faecalis
ccattatgcaagcacctcctcaatttgagtaagagctgtttgtgttgccaagactttgttagcctgacacaacatctaacacacctaacgttatcag

SEQ ID NO: 302 - DNA, 81 bp, Enterococcus faecalis
tgcaagcacctcctcaatttgagtaagagctgtttgtgttgccaagactttgttagctgacacaacatctaacacactaac

SEQ ID NO: 303 - DNA, 195 bp, Enterococcus faecalis
  misc_feature (60)..(60): n=g, a, t or c
  misc_feature (65)..(65): n=g, a, t or c
  misc_feature (87)..(87): n=g, a, t or c
  misc_feature (107)..(107): n=g, a, t or c
taagtcagctaacattttgcggttgatatcaatctctgccaatttcaaaccgtgcattantttanaatagcttaagccattcatgcngagcctgccgcgttgatacngtgcaatccataatttacggaagtcacgtttcttttgacgacggtctctgaatgcatagtaataagagttcattacttgttcttttgc

SEQ ID NO: 304 - DNA, 566 bp, Enterococcus faecalis
tcattatagctacatttgctcgaccatctgttgccttcggtcaaaggatgacaccgatctgaaaagtcacctaaatcaatggttacgacctgttttgccctctttttggtgcagcgaacgtttggcctttaaccagacgccgtattttgggccaattttcaaagtgagaatgaagatcattggtatggaacaacacaatctcttccactaaaatcgcctcctttattcagcgctctgattaatagtaccatatttatagaagaaagttacaaaaaagaacagatgactttagaagaatttctcctaaaatcacctgctttgatcaggacgaactatgcgttatttttgggacgcttgcgttgcgtcgcttccatgataactggtaagatcacaggacgacgtttggtttgttcaaataaataacggcttaagttttcgcggatttcttgtttcagtttgctccattcaaaatcgtcactttctaaatgtttttcaacaatttctgtaacaatattgctactttctttcattaggtctttacttgttttaacgtaaacaaaacctct

SEQ ID NO: 305 - DNA, 99 bp, Enterococcus faecalis
acgatgacggtgacgttcttggacaacatcttcatttccgtatgctgccgcagttttcgttccttttttcaatttacatggatataaacctaaacgtag

SEQ ID NO: 306 - DNA, 60 bp, Enterococcus faecalis
tggtgaacggattgaaccttgacgagcacgaccagttcctttttgacgccatggtttgcg

SEQ ID NO: 307 - DNA, 97 bp, Enterococcus faecalis
ctggtgtttgaacagttaagttatagtctgttggttcgttcaagtaagggaactcaacaggcatgatttcgttaaagatgatcttaccaactgtggt

SEQ ID NO: 308 - DNA, 184 bp, Enterococcus faecalis
ggtgatacccagccttctggtgcccctttacctttacccatacgtacgccgatagcctttacttgtgtaagacttgtgagggaaaattttaatccatactttcccgccacgtttcatgtaacgagtcattgcaatacgggctgcttcgatttgacggttagtaatccagtgagattcagttgct

SEQ ID NO: 309 - DNA, 204 bp, Enterococcus faecalis
taaaactacttctgcagggtctttcagagggttgtaagtacctacagtttcgatgaaacgtccatcacgaggagaacgagaatcagctactacaatacggtaaaaaggactctttttatatcccatacgttttaaacgaattttaactgccattattaaatacacctccattaacttaatcacaagagttagtttaacagatta

SEQ ID NO: 310 - DNA, 103 bp, Enterococcus faecalis
acggccacaaagtgttggtaatttttcatctgagccgacatcttgacgaacggaacgacaacggtcacacgtttcgccttctgctttttcaactaaaatagcc

SEQ ID NO: 311 - DNA, 218 bp, Enterococcus faecalis
ggctcaatcccagataaatcttgtaacatccgaatcacggtcggatcatcatgtcctagaatatcaagttttaaaatattatcgtgaatggaatggaaatcaaagtgcgtcgttttccattctgcctcttgatcatcagcagggtattgaattggcgtaaagtcataaacatccatgtaatcaggaattacaataataccgccgggatgctgcccagt

SEQ ID NO: 312 - DNA, 209 bp, Enterococcus faecalis
agaacatcaggtccttcaaaaatacagcatcaccttctggatcagtctgttgggatggtttttggcctcaatcccagataaatcttgtaacatccgaatcacaggtcggatcatcatgtcctagaatatcaagttttaaaatattatcgtgaatggaatggaaatcaaagtgcgtcgttttccattctgcctcttgatcatcagcaggg

SEQ ID NO: 313 - DNA, 211 bp, Enterococcus faecalis
ctgcgctgacaccacttttagctagtcctaaaaccaacacttttttgttttgataggttgttatttttttcattgtcaatttcccctttgatagattagaaaagaatccataatgtgattcctgaacagattaaaccgacagaccaaaagacaaaatcaattttccattcagaccaaccacacatttcaaaatggtgatgaattggtgaca

SEQ ID NO: 314 - DNA, 137 bp, Enterococcus faecalis
gaaccttcttccattttcacatcagaaacttctgtaaattggataattgaacgcaacgccttctaaataagcatacagccttcttctggtgaacagcatgtctgccttcagaaacgatttcaattaaaggcgtgcct

SEQ ID NO: 315 - DNA, 69 bp, Enterococcus faecalis
tcctaagacacaggcctaatttaccaactgtagccatcatgtcaggagtcgcaacaactacgtcaaagt

SEQ ID NO: 316 - DNA, 292 bp, Enterococcus faecalis
aactttggttgcatcttttccagaaaaagcaccagccgccatgacgagcataaccagccataagtatcaacgataattttacgaccagttaagccggcatctccttgagggccaccgattacaaagcgaccagttgggttgataaagtattttgtttcatcatctaaaagttcatgagggatcacctcattgattacttgttctttaatgtctttttcgatttgttctaaggttgtttcatcatcatgttgtgtactgatgacaatcgtatccacacgttgtggttgacctt

SEQ ID NO: 317 - DNA, 184 bp, Enterococcus faecalis; identical to SEQ ID NO: 308

SEQ ID NO: 318 - DNA, 97 bp, Enterococcus faecalis
gaaaacgtccaaggcttctaattgttctttaaacgcatgtaacacagttggcactgtttctccttgcaagaattctttcgcagcatcatctaaaact

SEQ ID NO: 319 - DNA, 135 bp, Enterococcus faecalis
tgcctaacgatttactcatcttacggccttcgccatcgagaaccatcccttgagaaatgattgatttataaggcgctaccccattgatagcaacaccttgttgtaatacttgagttaaaccaaccacgatattgg

SEQ ID NO: 320 - DNA, 222 bp, Enterococcus faecalis
gctgagaaacctttcatcatttggaaattagtaaccagtaattgcttgaccaaatgccgacattgctctatctacaaagtttgttcctggcaatttaccagcagattcaccacttaaacctgaatgcgtgctcgtaccaaaaccaaattttttcaaatactccatccatttttcatcacccattttttgttctagttttaccataccaatattactagacca

SEQ ID NO: 321 - DNA, 149 bp, Enterococcus faecalis
tgttgttttaccagcatcaacgtgggccatgataccaatgttacgagttttttcaagtgaaaattctcttgccattttgtatgtttactcctctctttatttaaatcgattgtaaattgactttctgctgccactttacgcgacagaca

SEQ ID NO: 322 - DNA, 320 bp, Enterococcus faecalis
cgtccgcttcacgtgataatgttgagccagcaacatttgttaatgtaagtgatggatgccctaattcattaacctgtaccagtaccttggcagacctatctgccgtttcaccactttgacttaagaaaatgaagaacggtttttcagataaaataggcatgttgtagccaaattcgcttgataaatgaacttccacaggaatacctggcaatcgtttcaattaaagattttccgacccaacctgcattataacttgtcccacaagcaataatgtaaattcggttacattgattaattttttccagtaacgcctcatctaa

SEQ ID NO: 323 - DNA, 238 bp, Enterococcus faecalis
ttcattttgatatcagaagaaaattcgcagtgttaattcacctttaggtcctttaactgtaatgttgtttccgtcttgcttgatttcaacaccagcaggaagaacaacaactttattaccaatacggctcacttagagacacctccttgtgtattttttagaattaccatacgtaggcgattacttcgccgccgatatttttcgctctagcttctttgtcagtaattacaccctctga

SEQ ID NO: 324 - DNA, 227 bp, Enterococcus faecalis
tactttcccgccacgtttcatgtaacgagtcattgcaatacgggctgcttcgatttgacggttagtaatccagtgagattcagttgcttgtaaaccccattcaccaaatgctacttcttttccgcctttagcttcaccgcgcatttttccgcggaattcacgacggtgttttacacgtttaggtactaacatgattatttccctcctttctcagtgttttttttcgt

SEQ ID NO: 325 - DNA, 197 bp, Enterococcus faecalis
tcatcgcttcaacgatacacacaacagtcacccgttttaacagtgtctcctactttgacaaagttctctttatctggtgctggttgtaaataaacagattcctacaataggtgacgtaatttcttctgtcttttcattggttgtcggtgtattagttggcgtttcttcaacgacagaaactgtttcaacaggcactg

SEQ ID NO: 326 - DNA, 211 bp, Enterococcus faecalis; identical to SEQ ID NO: 313

SEQ ID NO: 327 - DNA, 289 bp, Enterococcus faecalis
tgtcatagccgctaacaagcttactttttcatcttgtgcagttgctagaactagtacatcagacaattctttttgtttccattggtcagccaattggcagtaattgattcatgtctttaacattgacttgagcggcaatataacgaacaccgttgatgtctttgacatctttaaaaatgtcaccagcttgttggttcgctaatttgcctgccaattgttcgttttctttttgtagatcacgtaattgttgttgcaattgctctgttttcgtaaccacttcttttaattg

SEQ ID NO: 328 - DNA, 180 bp, Enterococcus faecalis
gctcatggggattaccgacagcacgaatggtttgattagttaaatcttcgataccatcaaataaatcaatgatttcgcctgtgcctgtcgagcgccaaggcattaatcgtaaaatctcgccgttttaagtcttctttcaaggagcgaacaaaggtgacttcatctggtcgacgaaagtct

SEQ ID NO: 329 - DNA, 207 bp, Enterococcus faecalis
tcaccacgtagacgtgcgtagttaactacccaacgtaaacctaaagttgtacgacgttctggacgaaccttcaactggtacttggtagttagaacccccaacacgacgtgctttaacttcaagaacaggcataacgtttttcattgcttgttcaaaaacttccaatggatcgttacctgtagattctttgatgatatcaaatgaatt

SEQ ID NO: 330 - DNA, 113 bp, Enterococcus faecalis
gtttgggataacgaggcaacctgttgtttaggcccttcaaaaagtccttcttttcctagtttttctcttaattctgccaatgcttgataaagtgcacctacaccatctggttc

SEQ ID NO: 331 - DNA, 263 bp, Enterococcus faecalis
taataacaagaattccatttaaactctccttgttccatacaaaagtgagcctgacaggaagccttaaagtggtgccaaattgagaggacccacttgccgctcctccagtaatttccactggggctatcgtatctatttttttcaacaactcatcatttaacagcacctttttatttactcgttcctgttcaattttatttttctttttctcctgttttgtttgttgctccttgtcctgtctcgaggcaataattgatctttct

SEQ ID NO: 332 - DNA, 279 bp, Enterococcus faecalis
ggcgtttctacttcgacatagccattgccatctagataacagacggatttcgctaataatttgactgcgtttcatgaaacgatcaaagctttctttgttactgattaaatccaaatagcgttgacgatagcgttgctccacattcgttaatccatggtatttatctggcaatggacgcaaagctttagttaataacgtaattgtttgagctttaacagtaacttcccccgtattggttttcattacttgacctgtcacaccaaagaagtcgcctaagtc

SEQ ID NO: 333 - DNA, 142 bp, Enterococcus faecalis
cggcgtttaattacaacaccttcgaataactggatacgttcacgagtaccttcgactactttcgcatgaacgcgaacagtgtcaccagggcaggaacgcaggaatatccgtacgtaattgttcttgtgttaattcttgaatt

SEQ ID NO: 334 - DNA, 130 bp, Enterococcus faecalis
ggtaaacgagtgaagctaccttctaatttttcagtgtcaaagcttacgaatgctggacgtccaacagttgcttcaaccgcttctttaattgttgagatgttttgagatttttcacgaacaccgatcactt

SEQ ID NO: 335 - DNA, 122 bp, Enterococcus faecalis
tatccaccacggtcgaagactacttttttgatgcctttttcagcaggcacagttcagcaacctagtttaccaacagcctgcagcctgtttctgtttttgttccaccctgaaatttctttatc

SEQ ID NO: 336 - DNA, 129 bp, Enterococcus faecalis
gtgaaacgttttgaattaattgatttgaaagtttccaagcctttaagaaggagcagaatttctgcttctggtaaattcaacgattgaataagtaacagtccacgcttctgcttctgtttcaatttgacg

SEQ ID NO: 337 - DNA, 162 bp, Enterococcus faecalis
ttgtatgagtctccttcgccaatatgacgattcaaatcatcatggaaatgcatatcatgattctctttcgcttcttttaagaaaatccagcacaaatgacctgttgattccgagtcataaatggcgcggtgatgttgttctaagttgacgccaaattttttc

SEQ ID NO: 338 - DNA, 156 bp, Enterococcus faecalis
taccaatgtcatcccaacccaattcattaaactacttttactttgcaagcgattttcagctggtagcaccagtgtttccacatcgccaactttcagccactctttccacattgccgcttggtctttataggagcccaccagaaaaagtttctgttc

SEQ ID NO: 339 - DNA, 69 bp, Enterococcus faecalis
cacgagcgacattttgtttgccacagtaattttccgttcacttggaaaactacttccacttcatcttct

SEQ ID NO: 340 - DNA, 211 bp, Enterococcus faecalis
tttaccaccagactgacgaacgaatttaccttctgctttagtcgcagcacggaatgtttcgcggtaagataccttgaggagcacctacgttagcttcaactttgaattcacgtttcatacttttttactaaaacgtctaattgcaattcacccataccagagataacttgtttcaccagtttcaacgtttgtttcaacgcggaatgatgga

SEQ ID NO: 341 - DNA, 139 bp, Enterococcus faecalis
gggatgctgcccagtcgtccgtttaacccctgttgaacctttggctaagcagatcaatttcagcaccacgcaaatgtaaattatgatctctttcatatcctttaacaaagccatacgctgttttgtcggctactgtacc

SEQ ID NO: 342 - DNA, 227 bp, Enterococcus faecalis
gataattggtccttcacagcttctttggctgtttgttcaatcatggcagcctaaagcaggggttcctaaaacttctaagtcaccagaaccgagcattttagccgtttgtgattctttcaccaagaattcttttgtaaacatttctgttggcattatgctttctctccttttgaacgttgttttttggcaaacgaaagcagaacttcttgtttattctctaagctacc

SEQ ID NO: 343 - DNA, 213 bp, Enterococcus faecalis
tctttgccatatttttcgccaaataacgccattgcgcccatgtttttcgctgtatcaatatctgtttcaattgtgacaacaggaatagcttcccagattttttcgttaacgatggcttccatccgcgctagttcttctgatgtaacttgcccaaaatgagtaaagtcaaaacgtagatgtcctggtgcaactaatgagcctgcttggttggca

SEQ ID NO: 344 - DNA, 190 bp, Enterococcus faecalis
gatttggattaatgcgaatgtaatttttctttttaaataatgccatttgcttactcctcgtattttagcaggcaagagcacagcctcttgcggcagttctttctttaatgattgctttctggctcccaatttggtagaaatgtttcttgtaaaaagcttgtgtcatagtcacctgtcaaaacattgtcat

SEQ ID NO: 345 - DNA, 288 bp, Enterococcus faecalis
cacatgggcttcgccaatcattgtgatggcagcaacttctggctgagccagattggaaaggaaagaaatttcctgagcatgatccatgcccatttctaaaatcagtttttctgtttcatcaggcatgtgtaaaatagtatagggtaagccaatttgattattgtaattgccttgcgttttgtaagtcacaaacttttcagataaaacagcagcaattaaatctttagtggtagtttttccattactgccagtcacagcgatgacattcggttgcattttatttaaata

SEQ ID NO: 346 - DNA, 161 bp, Enterococcus faecalis
gcagtaagtcttcccagacattttttacattcattaaatgtgttctagtcgccttcgtttaggacttgatatacgcgttctgtgggtaccgcaggaacgaactttttggcgcttgtggtcgtgcttgttgacgtggcgcatctgcttctttggcagctaca

SEQ ID NO: 347 - DNA, 106 bp, Enterococcus faecalis
ttgcttttgcaacatgacctttcgcaggtttgtttgataaaacttcacagtttgtcttggtaaccaaccttggatagccttcgtatccgtcagtttcaacagtttt

SEQ ID NO: 348 - DNA, 150 bp, Enterococcus faecalis
taaaaatagtttttacggtcaaaatgagtttcttttgaaatttcacagttcaacgcaagagcctgctttcatcccaaattctaaagcacctttattcataaccggtaaaacacctgggtaactccagtcaaccacatttgtgttgctgtt

SEQ ID NO: 349 - DNA, 279 bp, Enterococcus faecalis
tcagcaatcagttcccctaaccatttgcctggtgtttcttctaagacggctaaaaggtcttttcctgttatggccaattcatgtctttgatggatgggtaatgccttaactaactcttttgttacttgtacttgactctcttgttggtaataatataaaagcctttcaacaagtactgctgattcttcgcctaattcataaagcatcattggctgccagtcgttactcaagcgaaaacgcaaaccgcgtactaattgtgaaacgttttgaattaattga

SEQ ID NO: 350 - DNA, 66 bp, Enterococcus faecalis
gaagatacgtgttccgcgtgggcttttatcgtcacggataattaccgcagcattttcatcaaattt

SEQ ID NO: 351 - DNA, 313 bp, Enterococcus faecalis
taaaatttcggcaccattcgctgctttcagccattctgtccgattctttgttagttccgctgtagccaatcctttttgaatctcacctatccagttaattggaaataccagaccaataccaattgcgattaatgcattggtgacattataggttcctggcactggaatcgtaaacgtcatttgtgtatcactgattttgaatgaggtttgctctttggcttcatttgtgacgattccttgaagttgactttcctggctaaaaccaaaagtaatcacttgttgcgtgactttttccaccaatggttctagcaaa

SEQ ID NO: 352 - DNA, 586 bp, Enterococcus faecalis
tgctcgctcgaggggtttaccagcgttccaccgatggagtttcccacatcgcttcgtcacctgtggcacctttcaaggatacctttgacatagtcgaaaccttagtcatttttcctgccgttactctaaaagagtaccttagcttatgatttcgctaagcacgaacactacaagcatctcagcttgtgcgagcatggactttcctcagcttgcaaaagcaaaccgcgatcacccgaaaattacaaatctgtttagacgaacagcaaaaatttatacactacaacaagtgtacgctattctaacaaatgctttttgttctccgtgaaaacttgacttaaattgtcttgttaaaattgacgtgtttgtgcattatcaacatcatggttcgctggttctgcagtcattgacggtgcagaaggcgttacaggtgttgaaggtgtttcatctaactttttaccaaaaacttcacgctctaagtttgataaacgttttaaaatatcaaagttggtcactgctgcactttttggtacttcttgagcaacacgaggcgttggttgggcttttgataattggtctaattttgcca

SEQ ID NO: 353 - DNA, 208 bp, Enterococcus faecalis
tcacttcgccgcctttagaagcaacaaatttttcgacagtcatatctggatctttaacaaatggttggtcaaccaaagcgatttctgctttgaatttttgtagacgaccaacaaccattttttcaacgatatttgctggtttaccttcgtttaatgcttgttcagttaacacagctttttcgtgttctaattcttcttgaggaatttg

SEQ ID NO: 354 - DNA, 203 bp, Enterococcus faecalis
aggaaacgctgctaagacaacgccttctttgtttttatctttaccagtgataacttttactttatcagccttttttaacaaacattacctgtttcgcacctcctttaacgtgggctcgagattataatacttctggtgctagagaaacgatcttcatgaagttgttttcacgtaattcacgtgcaactggtccgaagataccg

SEQ ID NO: 355 - DNA, 320 bp, Enterococcus faecalis
cattgcttcaacttcttgtgatagttttgtttggtactcatctttcacattcatttggaccacgtgtaaatcaaatggcgcaattcctgttggccaattaataccgcgctcgtctgcattttgttcaacgattgctgaaagtaaacgactaacgccgatgccatagcaacccatgatcacctgatttttcacgaccgttttcatctaaaactgttgcgcccatagcatcactataacgcgttcctaatttaaagatatgaccaatttcgattcctttagtaaaggctaagacaccattgccatcaggagaaggatcgcct

SEQ ID NO: 356 - DNA, 103 bp, Enterococcus faecalis
gttttagtagggcctttacgagtacagtgcattatttttcgtgttttgtccacgagttggtaatccacgacggtgacggattccacaggtatgaaccgatttc

SEQ ID NO: 357 - DNA, 129 bp, Enterococcus faecalis
aatttttctagcaaagagacattttttagtttctttttgggtaatagagtggggacaggtagtgtttcctcttgcatttttctgtcttgctctgttgccacagttggctgatccatttctggtgcttca

SEQ ID NO: 358 - DNA, 91 bp, Enterococcus faecalis
actttctttcattttttcagttcgttgatctggttggcaccccattaaaataatcattgaacaaaataacccagacaacctatctttttag

SEQ ID NO: 359 - DNA, 105 bp, Enterococcus faecalis
tccccgccaccgtgttttgataatacagtagcaattgcagcctgttaatgtagttttaccatggtcaacgtgtccgatagtaccaatgttaacatgggatttaga

SEQ ID NO: 360 - DNA, 180 bp, Enterococcus faecalis
tcaatgctgcaaagcctgcaatcccaatttcacatacctgtggcttctgtcccaccagttaccatcatgtccgctaaaccatatttaatcgtgcgaaaagccttcaccaatcgcattccgtcgcataagcacaagcagtcacgatagtttgagaaggtcctttgcacctaaacgaatcga

SEQ ID NO: 361 - DNA, 219 bp, Enterococcus faecalis
catatgttggcatgtagcagtttataacgatcatctaagccagcataaaggatttcaccttgttggaccaaatgtcacagccaaagcgccagcaaccagtgacgatttcaccagcttctgcgatattttcttctaattcttttagttcccgagtcaaggaagcatctaattcttctaaattatggcgctttttcacttgattttctttcaaattactca

SEQ ID NO: 362 - DNA, 192 bp, Enterococcus faecalis
tatgttactaaatcttgaacggtttggatgccatcttctgtttcgattttcacatcaaattcatcttcgatttcgttaatgatttggaataaatctaagctatccgcgtctaattcttcttgaatgtttgtagttaattgtacctcttcagcatcttttcctaattcttctacgataattgcttgaattttt

SEQ ID NO: 363 - DNA, 70 bp, Enterococcus faecalis
tcctaagacacggcctaatttaccaacctgtagccatcatgtcaggagtcgcaacaactacagtcaaagt

SEQ ID NO: 364 - DNA, 171 bp, Enterococcus faecalis
ggaagaatttctccacgatagatccacacctttaactcctagttttccgtaagtagtgtccgccttcttcccatgcgtaatcaatgtccgcacgtaatgtgtgaagtggtacagttccttcagagtatccttctgaacgagcgatatccgcaccgtttagacgacctgata

SEQ ID NO: 365 - DNA, 283 bp, Enterococcus faecalis
tccccaatttcagaaatcgccataaattctttagaatctttaccacccatggcaccaccgtccccaataatggcacggaattctagtccacagcgttcaaaaatgcgtgagtaagctttttcgtaatcacggtatgattgatctaaactagcttcatcggcatggaaagaatagccatctttcatgataaattcacggcctcttaataagccagaacgagggccgtttttcatcacgatattttgtttgaatttggtataaattcaaaggtaatcgtttgtaa

SEQ ID NO: 366 - DNA, 216 bp, Enterococcus faecalis
  misc_feature (4)..(4): n=g, a, t or c
agancggccagctttaccaatgttgattaattcgtgttgttcgttaccaactgaaccgattgttgcaccggcaagttgcctaagatcatacgaacttcgccagagtttaagcggattaatacgtatttgccttctttaccaagtacttgcgcgcttgttccagctgaacggattaattgtccacctttaccaggtttcatttcaatgttgtggata

SEQ ID NO: 367 - DNA, 281 bp, Enterococcus faecalis
tcagcaatcagttcccctaaccatttgcctggtgtttcttctaagacggcctaaaaggtcttttcctgttatggccaattcatgtctttgatggatgggtaatgccttaactaactcttttgttacttgtacttgactctcttgttggtaataatataaaagcctttcaacaagtacctgctgattcttcgcctaattcataaagcatcattggctgccagtcgttactcaagcgaaaacgcaaaccgcgtactaattgtgaaacgttttgaattaattga

SEQ ID NO: 368 - DNA, 158 bp, Enterococcus faecalis
aactaaacgacggctcatgataatggcatcctcgtagttgtaaccttcccatgtcatgaaggcaaccaagacgttttgccctaaagccatttcgccttcttccatagaaggtccatccgctaaaagtatcgcctttttcaactttttcacctaagtga

SEQ ID NO: 369 - DNA, 127 bp, Enterococcus faecalis
acctttggctaagcgatcaatttcagcaccacgcaaatgtaaattatgatctctttcatatcctttaacaaagccatacgcctgttttgtcggcctacctgtaccaatggttcctgcccggtagaca

SEQ ID NO: 370 - DNA, 86 bp, Enterococcus faecalis
tcacgtttcaggatttctgcgatatcacgtttgatttttgaagcaggtaccttctaaagtttcatgtttaaccatgttcgcattac

SEQ ID NO: 371 - DNA, 198 bp, Enterococcus faecalis
taaccaacttggatagcttcgtatccgtcagtttcaacagtttttacttgtaaaactacgtttggcagtagccttcaactacttgttacctggaattaattcaccagactcagtaaagatttgtgtcattcccacttttttccctaagattcctttggtcatgagtacacctccatcttaattttatagtttgatttc

SEQ ID NO: 372 - DNA, 229 bp, Enterococcus faecalis
tgccttctttaccaagtacttgcgcgcttgttccagcctgaacggattaattgtccacctttaccaggtttcatttcaatgttgtggataacctgtaccaactggaatgttttccaatggtaatgcgttacctactttaatatctgcttctggaccagatactaggcgcatgcctacttctaatccttttggtgctaagatgtatgccttaaccccgtcttcgtaatga

SEQ ID NO: 373 - DNA, 208 bp, Enterococcus faecalis
caataatactaaattcacgccctaaccattctccagttgtataaatacggtcgcagtgttacagccaggagtatcttctacaatcgagatacgcctcaccggcaatgcaggttaaaaatagtcgatttaccgacattcggtctaccgacaatcgcaatagttggatttgccatttgattccctccttgagaatttcaatccttactag

SEQ ID NO: 374 - DNA, 277 bp, Enterococcus faecalis
tacgtccaattggtgttttaccttcaccaccaccgtgtgggtgatcgttagggttcattacgcctaccacgaacagttgggcgtttacgcatccaaccgagagcggccagctttaccaatgttgattaattcgtgttgttcgttaccaactgaaccgattgttgcacggcaagttgctaagatcatacgaacttcgccagagtttaagcggattaatacgtatttgccttctttaccaagtacttgcgcgcttgttccagctgaacggattaattgt

SEQ ID NO: 375 - DNA, 169 bp, Enterococcus faecalis
tccagaaacagcaattcgaattggcataaacaagtttttgcctttaacgccggtttctttttggacggcctttaatcgcctgcctttaataccttgggacatcgaaaacgtccaaggcttctaattgttctttaaacgcatgtaacacagttggcactgtttctccttg

SEQ ID NO: 376 - DNA, 129 bp, Enterococcus faecalis
gccacgtcttatttccctcctacgttgatattgttcaggactgcttattcagcagccttcgaataattgaatttcttttgaatcttcagttaatgtaacgatcgctttgcgacgtttttttgtataacc

SEQ ID NO: 377 - DNA, 207 bp, Enterococcus faecalis
tcaagttctttaattccgctttagtaccaaattcttcttgaccatacggacgtaaagaaatattggcatcacaacagcatagaaccttcttccattttcacatcagaaacttctgtaaattggataattgaacgcaacgcttctaaataagcatacgccttcttctggtgaacgcatgtctgcttcagaaacgatttcaattaaagg

SEQ ID NO: 378 - DNA, 153 bp, Enterococcus faecalis
taaactatggcgatttaacaggattatgcgccgcccatagacccgactaaaattttccgatagatggcatcttcttcatttaaataatgaacatttccagtggcgacaaccagcttgccaagttcgtcaccgattttcactagattactaata

SEQ ID NO: 379 - DNA, 127 bp, Enterococcus faecalis
cagagtatccttctgaacgagcgatatccgcaccgtttagacgacctgatacttgagttttgattcctttagcgccagcacgcattgcgcagttggatggccttgtttttgagcacgacggaaagca

SEQ ID NO: 380 - DNA, 359 bp, Enterococcus faecalis
taattgcttgaccaaatgccgacattgctctatctacaaagtttgttcctggcaatttaccagcagattcaccaccttaaacctgaatgcgtgctcgtaccaaaaccaaattttttcaaatactccatccatttttcatcacccattttttgttctagttttaccataccaatattactagaccaagaaatggcttgacgataattcaaatattctttgccgttcaaccgagtgtagtcatggtcattcacagttacatccccaacctgaattccaccaacacgattgaataattcattaggattaaactgtccttgttccatagaagcagctgttgtaaataatttgattgttgagcc

SEQ ID NO: 381 - DNA, 125 bp, Enterococcus faecalis
ctctttagtggaggcagtccatccctttgtccgtaatttctttcattcgtgctttcacagccttctttcccttgtgacattgccacctaagtcaaagtcatccgcccgaacggagaaaaatgcac

SEQ ID NO: 382 - DNA, 447 bp, Enterococcus faecalis
cggaccaaagcaccctctaattcacggatgttggaatcaatttgaccagcagatataaccttagtgtatcatccaggaatttctaaacgctcggcatcgtgccttttttgcagcaaaattgcaatccgtgtttctaaatcaggcggggtgatatcgacagacaaaccccaagcaaagcgagaaactaatcgttcaggtaattttggaatatcattcggcgggcgatcacttgttaaaacaatttgtttattttcattgtaaagatcgttgaaggtatggaaaaattcttccaatgttgcttctttttccgccaaaaattgaatatcatcgactaataataagtcaacattgcgatattctttccgaaattgttcggatgtctttgtttgaattgagttgataaattcattcgtaaacgtttcgctactaacatatttgactttggca

SEQ ID NO: 383 - DNA, 221 bp, Enterococcus faecalis
tcctacgaataaagcaacgccgccttcttctgcaacagtttttcatgtaatcgtaagcctgcatctactaatttcacctgttttttgtaagtcaatgatgtagataccgtttctttctgtgaagatatatttcttcatttttgggttccagcgacgagtttggtgaccaaagtgtacgccggcttctagtaattgtttcatagaaattactgccatgttgt

SEQ ID NO: 384 - DNA, 196 bp, Enterococcus faecalis
tgaatacctaattggcgagcagccatacctaagtgtaattcaagtacttgtccgatattcatacgagaaggtacccctaatgggttcaacatgatatcaacaggtgttccgtcaggtaagaatggcatatcttcttccggcataatacgggaaacaacccctttatttccgtgacgtcccgccattttatctcctt

SEQ ID NO: 385 - DNA, 215 bp, Enterococcus faecalis
tggtccatgaactgtgataactgtgaagaaccaaagaattctttgatacttgctaccacctggacggatgttgattaattgttgtggtgtcaatgtttctgtgtcttgaatagacattctttcacgaaccacacgttccatacgggctaaaccaatacggaattggttttgtaataattcgcctactgaacggatacgacgattacctaagtggt

SEQ ID NO: 386 - DNA, 274 bp, Enterococcus faecalis
agatttgtaagttaagatttcttgtaatgtgtaagcagcaccagtaagcttccagtgcccaaacttccatttccccgaaacgttgtccaccgaattgagctttaccacccaacggttgttgcgtaacaagagagtaaggtccgattgaacgagcatgcaatttgtcatcaaccatgtgggctaatttaatcatatacatgacaccaacggaaatacggttatcaaatggttcacctgtacgtccatcgtaaagaactgttttagcatcgctagc

SEQ ID NO: 387 - DNA, 138 bp, Enterococcus faecalis
gaattgagttgataaattcattcgtaaacgtttcgcctactaacatatttgacctttggcatctggttgattcacctaacatttgatgaccaatagcatgcatcaaatgggttttccctaaccctacaccaccataga

SEQ ID NO: 388 - DNA, 151 bp, Enterococcus faecalis
cgcgagaatctttgtatttatgagtcgcacgaataacctgtgtaaagtgagcagttctgttggtaatggaatcggacctgatacgtcagcctccagttctttttgctgtttccacaattttatccgctgattgatctaaaatacggtgttc

SEQ ID NO: 389 - DNA, 112 bp, Enterococcus faecalis
tatttcactgcatctttcaatgctttacctggtttgaatgcaggtactttgcttgcagcagatttgaatttcttgtccagtttgtgggttacagtcctttacgagctgcgcg

SEQ ID NO: 390 - DNA, 408 bp, Enterococcus faecalis
tgaccaatttcgattcctttagtaaaggctaagacaccattgccatcaggagaaggatcgccttcttgaacaaagcgtaaatcttcgtaacctaattggttggaaatcacgatctggatttacatttgtcaaatgatagccatcttcgttagctccaacaatggcgttggctaaatcttgaacagctaaatctgcataaattttaacatcttcggaaacattgactggaccaattgaaccaaagccagctcctaagacacggcgagcatcttcttctgttgcttcatctaggaaatcagcgcctaagaagtttttcaatttgacatcattgacatcatgatcgccacgaaccaagaccattactggctcttcatcggcaataaatagtactgatttaataattcgttg

SEQ ID NO: 391 - DNA, 245 bp, Enterococcus faecalis
tgaaaactctttaaacatgcagtaaaacttcttcttcggattttgaaccgcgcaccatttcatctgtaatcccagttaaattgattgtcgtttgagataatggatggccaggatcaataaactgctcaaaagtctcaatgacatttcctttgtgcattttgactgcggccaattcaataatggtatcataaacagcggaaagccccgttgtttccacgtcaaagaccacataggtagcatctgtt

SEQ ID NO: 392 - DNA, 125 bp, Enterococcus faecalis; identical to SEQ ID NO: 381

SEQ ID NO: 393 - DNA, 82 bp, Enterococcus faecalis
tgtgtttgaacctagtgatttatgatgtaatatctgctacaccagctaattccaatacggcacagaacctggtccaccagca

SEQ ID NO: 394 - DNA, 100 bp, Enterococcus faecalis
caccagtttcaacgtttgtttcaacgcggaatgatggatcttcttcagcaagtttttgtagagccacagcccattttatcttggtcagccttttgattta

SEQ ID NO: 395 - DNA, 127 bp, Enterococcus faecalis
tcctctaaatgcgcttgttgttcttctgccacctgttgttcctccattcttgattttaacctatcctaataatgccacagtaattcgaaaaaaagcaagccgaattttactttcggcttgaattttt

SEQ ID NO: 396 - DNA, 279 bp, Enterococcus faecalis; identical to SEQ ID NO: 349

SEQ ID NO: 397 - DNA, 221 bp, Enterococcus faecalis
caagttgctctttaaatttcgctaaattctcttctgcttcaggcatgtccattttattggcaacaataatttgaggtcgttccatcaaacgtaaattgtgtgaagccaattctttattgattgccaaataatcttcgtaaggatcgcgtccttccatgccactcatatcaatgacatgtaaaataacacgcgtccgttcaatatggcgtaagaactgtgtt

SEQ ID NO: 398 - DNA, 211 bp, Enterococcus faecalis; identical to SEQ ID NO: 313

SEQ ID NO: 399 - DNA, 311 bp, Enterococcus faecalis
accacttaaacctgaatgcagtgctcgtaccaaaaccaaattttttcaaatactccatccatttttcatcacccattttttgttctagttttaccataccaatattactagaccaagaaatggcttgacgataattcaaatattctttgccgttcaaccgagtgtagtcatggtcattcacagttacatccccaacctgaattccaccaacacgattgaataattcattaggattaaactgtccttgttccatagaagcagctgttgtaaataatttgattgttgagcctggttcataaggactttcaact

SEQ ID NO: 400 - DNA, 81 bp, Enterococcus faecalis
tgtgtttgaacctagtgatttatatgtaatatctgctacaccagcctaattccaatacggcacgaacctggtccaccagca

SEQ ID NO: 401 - DNA, 161 bp, Enterococcus faecalis
acaccaccgacaattgcgttttcaaactcgaagcctttaccttcttcatttggtgtaaattcaacccatacgtgaccgtattgtcctttaccaccagactgacgaacgaatttaccttctgctttagtcgcagcacggaatgtttcgcggtaagatacttg

SEQ ID NO: 402 - DNA, 207 bp, Enterococcus faecalis
ttttcaacagttccttcaacagttgcgcctgcaacagttggcagcaccaaccttttgtagattcgccacctacctaagataaccttcgtcaaaaacaacctttctcgccagcctcaacgtttaatttttcaacgtagattgcttgacctacttcaactttcacttgtttaccaccagttttgataattgcgtacatgctatacagca

SEQ ID NO: 403 - DNA, 247 bp, Enterococcus faecalis
tcttgcaaatgggcagaaaccagcttttcctttaccacgttttgtcatcatacgtccagcaacagcctgaccttctgtattcatttcacctaagttcttcttttgtatgattatcatattgttcatgaagttctgctgaattatgagtgcgatcgaaacgtttaccgaaaggatcaatcccttcttcacgtaaagcttccattttttcgcggcgcacgagcatttgatcatttaaatcctctaaatg

SEQ ID NO: 404 - DNA, 116 bp, Enterococcus faecalis
tcattttcaggttcagaatgattcaaactgccctgattttggttaataaaactttgtcttagttttggccagctttctctagtaatgcagaccatttctggtgtatagtccatcaa

SEQ ID NO: 405 - DNA, 265 bp, Enterococcus faecalis
tcactcattttttatgctcctttagttgctgacattaaatttttatcatgtactttttcaccttgtacccagacttctcgaatattttctggtcgtgctaaatataagattttttggaaaatatcaagcaatgattcccctggatttttagggattcgtgcttgtgacaagcttgtattaataatttgaacatcccaagcataccctttttctaattttccaattggtaaacttagcgcttgaccaccaccagcagtagctaaat

SEQ ID NO: 406 - DNA, 204 bp, Enterococcus faecalis
tgggtaactccagtcaaccacatttgtgttgctgtttggttctgctccgaaatgcgcctggcgcagaggagaaaattttagagttggttttcaattctacgtggacttctaatccaatgacagtttcaaagttcattaatcgttcccccctaaaatgactggttttttcgtatggaaatctgtcgcttgttcaaaagcataggc

SEQ ID NO: 407 - DNA, 158 bp, Enterococcus faecalis
gcaataatcgattcatcgatagcaagatttaaaatggtttgagaaatatgttcgccaatttctttccagcgtaaatctggcaacctcatggacggggcgatagatcatattccctttatttgttactagtaaaagatgatctaatgtattgacttcgc

SEQ ID NO: 408 - DNA, 161 bp, Enterococcus faecalis
acactacttacccacaagcgtaagatatctgcacccatttggttgataacctttttcaggtaagatagtattgcctaacgatttacctcatcttacggccttcgccatcgagaaccatcccttgagaaatgattgatttataaggcgctaccccattgata

SEQ ID NO: 409 - DNA, 64 bp, Enterococcus faecalis
gtagttgtaaccttcccatgtcatgaaggcaaccaagacgttttgccctaaagccatttcgcct

SEQ ID NO: 410 - DNA, 283 bp, Enterococcus faecalis
tccccaatttcagaaatcgccataaattctttagaatctttaccacccatggcaccaccgtccccaataatggcacggaattctagtccacagcgttcaaaaatgcagtgagtaagctttttcgtaatcacggtatgattgatctaaactagcttcatcggcatggaaagaatagccatctttcatgataaattcacggcctcttaataagccagaacgagggcgtttttcatcacgatattttgtttgaatttggtataaattcaaaggtaatcgtttgtaa

SEQ ID NO: 411 - DNA, 276 bp, Enterococcus faecalis
gacatggctaattctggcgcttctatttcacgactgatgactaattcctctgggttacagaagcagttctaagtagcctagtattagcctgttaaaaattcttctacttctgtatcgtttgttttaattaacaaggtaattggtttagaaagtggtgtattcacttctgctcgaatattccgaaccgaacgaataacttctttcagaacttccattcctcgagctgctgcttcatcgttaaattcttcatgaacaactgggtactctgccacaacc

SEQ ID NO: 412 - DNA, 146 bp, Enterococcus faecalis
cttcgccgccgatatttttcgctctagcttctttgtcagtaattacaccctctgatgtagagatgattgcaattcctagaccgtttaatacttttggtacttcgtcagcttttacgtatgcacgtaaacctggtttagaaatacgt

SEQ ID NO: 413 - DNA, 248 bp, Enterococcus faecalis
tatcccaaacttcatcttcgccacgttcgattttacgtttcgcatttttaatgtttgtcgcaatttcacgttgtactaattcacagcattacaaatggtttgaataattcaatcgccatttcttttggtaaaccacattggtacatttttaagaacggaccaacgacgattacggaacgaccagaatagtcaacacgtttacctagtaagttttgacggaaacgaccttgtttccctttcaacatgtg

SEQ ID NO: 414 - DNA, 198 bp, Enterococcus faecalis
taaccaacttggatagcttcgtatccgtcagtttcaacagtttttaccttgtaaaactacgtttggcagtagccttcaactactgttacctggaattaattcaccagactcagtaaagatttgtgtcattcccacttttttccctaagattcctttggtcatgagtacacctccatcttaattttatagtttgatttc

SEQ ID NO: 415 - DNA, 178 bp, Enterococcus faecalis
actgcgtgtgttccttgtcttaatgaagcacgttgcatgatgattgcatcatagacaacactttcattaggttcgattccgaagatttcttcatttaaagtgatttcaccgttttgagttccatcttgtttgaataatgctacattcggcattccttagttcctcctttccctacact

SEQ ID NO: 416 - DNA, 132 bp, Enterococcus faecalis
ggtaaacgagtgaagctaccttctaatttttcagtgtcaaagcttacgaatgcctggacgtccaacagttgccttcaaccgcttctttaattgttgagatgttttgagatttttcacgaacaccgatcactt

SEQ ID NO: 417 - DNA, 275 bp, Enterococcus faecalis
agatttgtaagttaagatttcttgtaatgtgtaagcagcaccagtaagcttccagtgcccaaacttccatttccccgaaacgttgtccaccgaattgagcctttaccacccaacggttgttgcgtaacaagagagtaaggtccgattgaacgagcatgcaatttgtcatcaaccatgtgggctaatttaatcatatacatgacaccaacggaaatacggttatcaaatggttcacctgtacgtccatcgtaaagaactgttttagcatcgctagc

SEQ ID NO: 418 - DNA, 280 bp, Enterococcus faecalis
tcagcaatcagttcccctaaccatttgcctggtgtttcttctaagacggcctaaaaggtcttttcctgttatggccaattcatgtctttgatggatgggtaatgccttaactaactcttttgttacttgtacttgactctcttgttggtaataatataaaagcctttcaacaagtactgctgattcttcgcctaattcataaagcatcattggctgccagtcgttactcaagcgaaaacgcaaaccgcgtactaattgtgaaacgttttgaattaattga

SEQ ID NO: 419 - DNA, 199 bp, Enterococcus faecalis
cctgaataaattcccatagcatacaacagtgttattcgggtcccatgtccaaaaagctcgtctggttctaaaaaaagttccagcagttagttaatttgaaggcttctactccgtcagcttgagaaacaaccgtatatggcgcttctatatttttccggatctctttggtcataggatacctttgttttatctcccgtat

SEQ ID NO: 420 - DNA, 188 bp, Enterococcus faecalis
gattgtagctggtttagctaatacttgtccacgttcgatatcttcacgtgctacaccacgtaataaagcaccgatgttgtcgcctgcttcagcagtagtctaataatttacggaacatttcaacacctgtaacagttgttttagatgtttcgtctttaataccaacgatttcaacttcgtcaccaacg

SEQ ID NO: 421 - DNA, 127 bp, Enterococcus faecalis; identical to SEQ ID NO: 369

SEQ ID NO: 422 - DNA, 208 bp, Enterococcus faecalis
aaccattgcaacgattggaatgtttaatttgtgtgcttcttgaacagcaatgcgttctttacgtgggtcaacgatgtacattacatcctggaattcttggcatatcagcgataccacctaagaatttttctaaacgttcacgttctttgtttaagccagcaacttctttcttaggtaaaacttcgaaagtgccgtcttcttccattgc

SEQ ID NO: 423 - DNA, 219 bp, Enterococcus faecalis
taataccaagagcttccagcccattgtggcatagtattcgtttcacagttttcccttcatgccagtttcagggtcgacgacattgacccattcatcaatgtttgctaatggcgattccccagttccacttgggcgaatatccgatgttactggtaaacgtagaggtaactcagattcaggaaccgttgtggttgttccatcttcccaatggatcacagg

SEQ ID NO: 424 - DNA, 234 bp, Enterococcus faecalis
ttgatttctttacctacttcatattctcctagctcaacattcttgaattctttaatgaagcagccttaggagccagtgtttgccttttgcaacatgacctttcgcaggtttgtttgataaaacttcacgtttgtcttggtaaccaacttggatagcttcgtatccgtcagtttcaacagtttttacttgtaaaactacgtttggcgtagcttcaactactgttacctggaatta

SEQ ID NO: 425 - DNA, 90 bp, Enterococcus faecalis
tcttattccattgtcctttacgtaccgtttccataatcttaaaggccatcccacctgtccaaaccagcatgaattaaataaaccatgata

SEQ ID NO: 426 - DNA, 69 bp, Enterococcus faecalis
actacgtcaaagtcgaaccatccaccttggatttttgcaaccatgtcgtcgtcgcctacgaaatctgca

SEQ ID NO: 427 - DNA, 69 bp, Enterococcus faecalis; identical to SEQ ID NO: 426

SEQ ID NO: 428 - DNA, 195 bp, Enterococcus faecalis
tacccgctagattttctggtgttagtttagtatcggctaattcaactttttcacctgtttaagtaagcagaaacttcgcccattaaccagtttgatgcttgtttcgcatctgcaccgtttgctaaggttgcttcaaagaaatctgacatttctttcgttaaagtcaagaccattgcgtcgtattcaggtaaacct

SEQ ID NO: 429 - DNA, 208 bp, Enterococcus faecalis
cacatcggcttccgcgtcaacactacttacccacaagcagtaagatatctgcacccatttggttgataactttttcaggtaagatagtattgcctaacgatttactcatcttacggccttcgccatcgagaaccatcccttgagaaatgattgatttataaggcgctaccccattgatagcaacacttgttgtaatacttgagttaaa

SEQ ID NO: 430 - DNA, 168 bp, Enterococcus faecalis
taatttgacgatttcaaaatgtaatttcaagacatcaccagggaccacctttttgacggaatttggctttgttgataccgccaatataggcctgtttcaccttcaaattgatccatttttaagattaaaatcgaacctacttgtgccaatgcttcaataatcaaaacg

SEQ ID NO: 431 - DNA, 319 bp, Enterococcus faecalis
ggtcaattggatcatttaattctgtaaatgcattagcaaacctcttttccgataataaatagttcaaagcggtcagtgaaacgaccatcttctggatttttcttcgctaatggtgaaacagctactgggtgaccataaataaatgttggttgttgcaacgtatcttctacaaatgtttcgaaaaattcattaatgatatgaccgactgtcatggcatctgtaatttcaacattatgttctttagccaacgcacgggcttcttctatcgtcatctcttgccaaaaatctacgcccgtttgttctttgaccgcatctacca

SEQ ID NO: 432 - DNA, 166 bp, Enterococcus faecalis
gtcataatcactagtttgtgataacgtgctttagaaacatcgaaatcttcgccaaagcctgttcccatagcctgtaaataatgaccgaatttcttcattggctaaaattttatccatgctggctttctcaacattcaagattttcccacgaattggtaaaatggct

SEQ ID NO: 433 - DNA, 149 bp, Enterococcus faecalis
ccttcattacggaagacacgaccaatttcatatactttttccatgccaccgacaattaaacagttttaaatgtaacctctagggcaatgcgtaagtataagtccatatctaatgcattatggtgtgtgataaatggacgagcagcagct

SEQ ID NO: 434 - DNA, 288 bp, Enterococcus faecalis
gtcgcatctgttgcaggtccagctttaaccatcaacataattcgacgaggtttttcaattgcattcacaaattcctcaattgagtatgttgcttgaaagtttttgtcaggatgttcttcaaccacttctgttgtttttgatcctgtacggttatacagcgcaactgtatagcctctgctttcaatgtttaaagcaagattttttcccatgacagccatgccgactacgccaaattgttgttttgtcattttatgacctcctatattataatcaacgaaaattctatga

SEQ ID NO: 435 - DNA, 164 bp, Enterococcus faecalis
taagattaattctggtaaataatgtttgttggtatgttttgtatttatttcatcagatttgctctggtttatttccccaaatacagacctcgtgtccattttcggctaatacttgagctaaagctgtcccccaggaacctggacctaaaacagcgactttttgt

SEQ ID NO: 436 - DNA, 129 bp, Enterococcus faecalis
tccgtttgaaggatcaatcaccattacattagaaacatgaattggcagcttccaccttcaaggattccaccttgtggggcctgcttggtttggtttttggtgttttttaacagacgttgacaccttcaa

SEQ ID NO: 437 - DNA, 69 bp, Enterococcus faecalis
tcctaagacacggcctaatttaccaactgtagccatcatgtcaggagtcgcaacaacctacgtcaaagt

SEQ ID NO: 438 - DNA, 107 bp, Enterococcus faecalis
gccattttgtgtgtgtcttcgcagttttttaacagaagcgccagtgttgttagcagcatccatgatttctttcgctagacgttcttccattgtgtgttcaccacgta

SEQ ID NO: 439 - DNA, 424 bp, Enterococcus faecalis
cactaaaccaggtaagcggacactatggattcgcagaccctcgaaatcagccccgcgtgcccctggtattgattctacctcttgcggattcccttgtttttttgctggccgaacttcttgaatcatttctgcagtttttatagccgttccgctcggtgcatccaatttgttatcatgatgtaattcaatgatttccacatccggaaaatactgtgccgctttttgggcaaattgcatcattaaaactgccccaattgcaaaatttggcgcaattaagccgccgatggctttttctcgagataggtttgtcaattcgttgatttgttcctccgtaaagcctgtcgtcccaacaactggcgccataccatgttccaacgcaaaacgtgtatttggataggcggcttcaggaaccgtaaaatcaatc

SEQ ID NO: 440 - DNA, 167 bp, Enterococcus faecalis
cgtttgctaaaacttttttagctgtagtgttaccaataccataaatgtaagtaagagaaactactacacgtttgtcacgagggatgtctacctcctgcaatacgagccattattcgttacacctcctaattatccttgacgttgtttatgttttggatttgctgggc

SEQ ID NO: 441 - DNA, 275 bp, Enterococcus faecalis
tacgtccaattggtgttttaccttcaccaccaccgtgtgggtgatcgttagggttcattacgctaccacgaacagttgggcgtttacgcatccaacgagagcggccagctttaccaatgttgattaattcgtgttgttcgttaccaactgaaccgattgttgcacggcaagttgctaagatcatacgaacttcgccagagtttaagcggattaatacgtatttgccttctttaccaagtacttgcgcgcttgttccagctgaacggattaattgt

SEQ ID NO: 442 - DNA, 205 bp, Enterococcus faecalis
tgggtaacctccagtcaaccacatttgtgttgctgtttggttctgctccgaaatgcgcctggcgcagaggagaaaattttagagttggttttcaattctacgtggacttctaatccaatgacagtttcaaagttcattaatcgttcccccctaaaatgactggttttttcgtatggaaatctgtcgcttgttcaaaagcataggc

SEQ ID NO: 443 - DNA, 91 bp, Enterococcus faecalis
tcactgatataacgggcacgacgtgaggctggcatttctggcaaactagcagcgaactttttcaatccattcatcatcaattgaaaaacga

SEQ ID NO: 444 - DNA, 234 bp, Enterococcus faecalis
gcggtttctttaagtaatggaaaataatcagcttcgtgattcaacacaatgacctttagaatgtgtaatcaattgacgtttgcaataaaagtaatcgtcaaaggttggatgttcaattggactgatatggtcgggggtaatgtttaaaaaaatgccgacatcaaaaaataaccttgtagacacgattagttttgtaggcttgggaagaaacttccataataaaatgagtcatcc

SEQ ID NO: 445 - DNA, 74 bp, Enterococcus faecalis
  misc_feature (42)..(42): n=g, a, t or c
gctgctccacctgctgctggtccagcctacctgctacagganctgctgcctgatacagtcaaatttttcttcga

SEQ ID NO: 446 - DNA, 188 bp, Enterococcus faecalis
cgcaccaacttttgtagattcgccacctactaagataacttcgtcaaaaacaactttctcgccagcctcaacagtttaatttttcaacgtagattgcttgacctacttcaactttcacttgtttaccaccagttttgataattgcgtacatgctatacagcacctccttcttctagacttagactcgc

SEQ ID NO: 447 - DNA, 65 bp, Enterococcus faecalis
gccacgtcttatttccctcctacgttgatattgttcaggactgcttattcagcagccttcgaata

SEQ ID NO: 448 - DNA, 156 bp, Enterococcus faecalis
aactgtgtaaagttggagatgttaccacgggctccagagtcagacatcatgaagattgggttacgagcttccatactttcgatcagtttttgttggatttcgtctttggcaccgttccaaacgccgattacacgttcataacgttcgtcatcagta

SEQ ID NO: 449 - DNA, 95 bp, Enterococcus faecalis
caacgcgaacttcaccacgttcaacacggcctgtagcaacagtaccaccgtccagtgattgagaataccgtcttcgactggcatcatgaatggtt

SEQ ID NO: 450 - DNA, 184 bp, Enterococcus faecalis
  misc_feature (11)..(11): n=g, a, t or c
tgtcggatgancttttccttcttgcaatgtttgtacacaagcaatcgcttcgataccgccagccgcgcccaataaatgtccagtcatactctttgtacttgaaattggaatttgcgatgctcgctcaccaaagacacgtttgatggccgttgtttccgcagcgtcattcgctggggttgacgta

SEQ ID NO: 451 - DNA, 280 bp, Enterococcus faecalis
tactggcgctttacgtccaattggtgttttaccttcaccaccaccgtgtgggtgatcgttagggttcattacgctaccacgaacagttgggcagtttaccgcatccaacgagagcggccagctttaccaatgttgattaattcgtgttgttcgttaccaactgaaccgattgttgcacggcaagttgctaagatcatacgaacttcgccagagtttaagccggattaatacgtatttgccttctttaccaagtacttgcgcgcttgttccagctgaacgg

SEQ ID NO: 452 - DNA, 248 bp, Enterococcus faecalis
tcagttgcttgtaaaccccattcaccaaatgctacttcttttccgcctttagcttcaccgcgcatttttccgcggaattcacgacggtgttttacacgtttaggtactaacatgattatttccctcctttctcagtgttttttttcgttggaagaatttctccacgatagatccacactttaactcctagttttccgtaagtagtgtccgcttcttcccatgcgtaatcaatgtccgcacgtaatgtg

SEQ ID NO: 453 - DNA, 125 bp, Enterococcus faecalis
gtctgaaatactataaacgttttcgctagctacgccaacttcttttggttccatgttacggtaacgagccataccagtaccagcctgggatgattttaccaatgataacattttctttcaatcca

SEQ ID NO: 454 - DNA, 195 bp, Enterococcus faecalis
ggtgtttcttcaacgaataactcttcagttgcttggtcttccccttggttaccttcgatgaaagcgtcagccattttagcagtgattaatttcacagcgcggattgcatcatcatttgaagggattacaacatcgatctcatcaggatcacagtttgtatcaaccattgcaacgattggaatgtttaatttgtgt

SEQ ID NO: 455 - DNA, 233 bp, Enterococcus faecalis
acttcaacatttcaggcagtcatttctactgattccaacatgtcaggtcgacagtaaaaaggtccagtcgtaatgattcttttagttgccattctgcaattaatttatggttaccattcgttagcacggcagggacttccatatcgttgaaaatagcaggtctggtatattgtggatgctctaataggccagtggaatgtgaatccgtttgtgcagaaagattgttacctaag

SEQ ID NO: 456 - DNA, 243 bp, Enterococcus faecalis
ttttaacgcttcaactttatctgtttgttcccacggtaaatcaatatctgttcgaccaaaatgaccataagccgcagtttgtttataaattgggcgacgtaaatctagcatttcaataatacctgctggacgtaaatcaaagtttttacgaactgcttcgattaatttactttctggaagatcacctcgtaccaaacgtattaatagaaatagacacctggttgcgccacaccaattgcataa

SEQ ID NO: 457 - DNA, 85 bp, Enterococcus faecalis
tcacgtttcaggatttctgcgatatcacgtttgatttttgaagcaggtacttctaaagtttcatgtttaaccatgttcgcattac

SEQ ID NO: 458 - DNA, 259 bp, Enterococcus faecalis
ttgttttttcaataatcgatgaaacacaacgttgtacgtctttatagccatttttagttggaataataattgagactaacttttcagattcaatgtcataataaacatcgtataagccattcgccgccccatgcgttgcatgaccattaatacctcgacgaacgagcgcatcttgcacggctcttagccccgcttcaaaagcataacctttggagccctgatccactgctgttgaggttggcagcatccgccaatagta

SEQ ID NO: 459 - DNA, 98 bp, Enterococcus faecalis
caccagtttcaacgtttgtttcaacgcggaatgatggatcttcttcagcaagtttttgtagagccacgcccattttatcttggtcagcttttgattta

SEQ ID NO: 460 - DNA, 233 bp, Enterococcus faecalis
caagctctaaaaattcgaatcgcaatttcgccacgattggcaactaatacctttttcataacagtcactcctaccatcaatttccttcaaatttattggttctgttctaaagataaatagtactcattttctaatttctgacgtgtttcatctgcactgatattcaggacaaaggccacagcaatcgaaataatcagcaaactattcccaccttgactcaagaacgggaaagt

SEQ ID NO: 461 - DNA, 183 bp, Enterococcus faecalis
cctgtaacagttgttttagatgtttcgtctttaataccaacgatttcaaccttcgtcaccaacgcgaaccttcaccacgttcaacacaggcctgtagcaacagtaccacgtccagtgattgagaatacgtcttcgactggcatcatgaatggtttgtcagtatcacgttctggagttgggata

SEQ ID NO: 462 - DNA, 236 bp, Enterococcus faecalis
  misc_feature (32)..(32): n=g, a, t or c
ttgatttctttacctacttcatattctcctanctcaacattcttgaattctttaatgaagcagccttaggagccagtgtttgccttttgcaacatgacctttcgcaggtttgtttgataaaacttcacgtttgtcttggtaaccaacttggatagccttcgtatccgtcagtttcaacagtttttacttgtaaaactacgtttggcgtagccttcaactactgttacctggaatta

SEQ ID NO: 463 - DNA, 69 bp, Enterococcus faecalis; identical to SEQ ID NO: 437

SEQ ID NO: 464 - DNA, 116 bp, Enterococcus faecalis
cagctccaccgtatacgttcaatttagtaaattgtttacagtcctaaagtgtttttaggtagcataccttttacagaagtttcgataagacggcgagagtttttgtcgcgtaattc

SEQ ID NO: 465 - DNA, 219 bp, Enterococcus faecalis
tcctacgaataaagcaacgccgccttcttctgcaacgtttttcatgtaatcgtaagcctgcatctactaatttcactgttttttgtaagtcaatgatgtagataccgtttctttctgtgaagatatatttcttcatttttgggttccagcgacgagtttggtgaccaaagtgtacgccggcttctagtaattgtttcatagaaattactgccatgttgt

SEQ ID NO: 466 - DNA, 134 bp, Enterococcus faecalis
caatcttggtaacttttccagattctttaattaattcccaaaattttgggattaagccttggtggtaaattgtcgatacagaaatagcccatgtcttcaaagctttgaacagcgactgtttttccagcgccact

SEQ ID NO: 467 - DNA, 143 bp, Enterococcus faecalis
cggcgtttaattacaacaccttcgaataactggatacgttcacgagtaccttcgactacctttcgcatgaacgcgaacagtgtcaccagggcaggaacgcaggaatatccgtacgtaattgttcttgtgttaattcttgaatt

SEQ ID NO: 468 - DNA, 522 bp, Enterococcus faecalis
gccgggaatttagaaactgcttcataagtaaccccgcctgcttctgtggcctacctaattgttgcaagtttaattcagcaacatatgtttcaggaatatcagtacgcctttcgctgtcgttggatgaacttgtccgacaaaaccaaccacttcatcttctaaataaatccatgcctgtccggcctggatgcatttctggaatcgccgctgtcgcttgataactgattttttctgttaatcctaaaacagctacaatactttccactaagccttttactgtataaaaatcaacggctgttgcttttgtttgccaatctttaaccattgtattaccagttaaagcaagtgctaagtgattttcttctgtaggtaaattttttgttggatcttctgtttggtacaaaacgcgtcctacttcgtagaaggcgatattattatttttacgcgccacattgtatgcgacatcatctaataaaccagaaattaagttcatacgtaacacagaacgctcttcactcattg

SEQ ID NO: 469 - DNA, 84 bp, Enterococcus faecalis
ccaacaatttcgccgtatatagttgcgccacgtttctgtgcatgcctcgagttcttctaaaaccagcattcctgcgccttcacc

SEQ ID NO: 470 - DNA, 209 bp, Enterococcus faecalis
tcaccacgtagacgtgcgtagttaactacccaacgtaaacctaaagttgtacgacgttctggacgaacttcaacctggtaccttggtagttagaacccccaacacgacgtgcctttaacttcaagaacaggcataacgtttttcattgcttgttcaaaaacttccaatggatcgttacctgtagattctttgatgatatcaaatgaatt

SEQ ID NO: 471 - DNA, 371 bp, Enterococcus faecalis
aaattcatggggcctgtgtaggcagccttcaggcgtgtgggcaatgtcaaaataatcgagaagcatgcctgaccttcgccaacctgtttcggcctcctgagtcaattaatgtcacatgactccccatcacattttgaatcaccggacgtaacaacgggtaatgggtacaacctaaaatcaacgtatcaagtccttttaattgtagtgcttgaagtgtttctgccacaattttttttgctacggaagaacgatattgattactttcaacaatggggacaaatttagggcaagctaaactagtcacctcaattgttggtgccttacttttaatggcgatttcataggaagcacttttgattgtccctaacgta

SEQ ID NO: 472 - DNA, 259 bp, Enterococcus faecalis; identical to SEQ ID NO: 458

SEQ ID NO: 473 - DNA, 160 bp, Enterococcus faecalis
attcgtaaacgtttcgctactaacatatttgactttggcatctggttgattcactaacatttgatgaccaatagcatgcatcaaatgggttttccctaaccctacaccaccatagaagaaaaggggattgtaaatcgaacctggatcctcggcaacaaca

SEQ ID NO: 474 - DNA, 222 bp, Enterococcus faecalis
taattgaggtgatttaactaatgtagcaatctctttcaattgacagttcttcttcttgtaaaagttgatacgccttctttactcgtcacctgcttcaatacaggcgtactcctgcaccaattccagattcagaaacaattttgaaaatcccgatatcttctgtattagcaacgtgtgttccaccacataattcgatagagtaatccccaatattaactacac

SEQ ID NO: 475 - DNA, 90 bp, Enterococcus faecalis
actttctttcattttttcagttcgttgatctggttggcaccccattaaaataatcattgaacaaaataacccgacaacctatctttttag

SEQ ID NO: 476 - DNA, 227 bp, Enterococcus faecalis
ccttcataaatgccatattgctctgcataagattgaggaatgtctttgcctactttatttactaccatgtctatatttcctcctcggtaattaatttagccgccaatgctaacgcaatgacccgttcagctcgttcaacaattggtttatcaaccatttttccatttacggagataacaccggaaccttttgcttcggcttcccgaatgccccagattacttcctta

SEQ ID NO: 477 - DNA, 196 bp, Enterococcus faecalis; identical to SEQ ID NO: 384

SEQ ID NO: 478 - DNA, 166 bp, Enterococcus faecalis
aatacgcatcacttctggatcgtctgttgggatggtttttggctcaatcccagataaatcttgtaacatccgaatcacggtcggatcatcatgtcctagaatatcaagttttaaaatattatcgtgaatggaatggaaatcaaagtgcgtcgttttccattctgcc

SEQ ID NO: 479 - DNA, 194 bp, Enterococcus faecalis
ggaatttggtggccccaccataattgtcgcgaaataacccagtcatgaatattttccatccaacagtaaaaatgtttgattgaagcgtggtggataaaattcaacagcgtcttctgttttttgattttctattgctttttcagctaatggtcccatttttacaaaccattgggtcgataaacgtggttccacga

SEQ ID NO: 480 - DNA, 311 bp, Enterococcus faecalis
cgcgattgccatcgattgtatgcatcaagccttgttctttatagaaagctaagattggtgcagcctacctttcaatgttgacctgccaaacgatttttaaccagtttcgggcttatcatcttctctttggtagaattcatgtccgccacagcgatcacaagtgccttcaacttttggcgggttgaataatttatgatacgttgcgccacatgtgcgacagatgaatcgtccagctaaacgctcgattaatacatcttcttctacatggatgtcaatgacagcatcaatttttttgtttaattctttaagca

SEQ ID NO: 481 - DNA, 256 bp, Enterococcus faecalis
tgcgaaaagcttcaccaatcgcattcgtcgcagaagcacaagcagtcacgatagtttgagaaggtccttttgcacctaaacgaatcgaaatatttcccgctgccatattagcaattaccatgggcacgaaaaatggtgttacgcgttttgcgccttttttatccattacccgtacttggtcttgtaaggtagtcattccgccaatcccactaccgacaatcacacctaaacgagtcgggtcaatcgttgcttctgt

SEQ ID NO: 482 - DNA, 131 bp, Enterococcus faecalis
ggtaaacgagtgaagctaccttctaatttttcagtgtcaaagcttacgaatgctggacagtccaacagttgcttcaaccgcttctttaattgttgagatgttttgagatttttcacgaacaccgatcactt

SEQ ID NO: 483 - DNA, 123 bp, Enterococcus faecalis
ttatcgccttttttaacaaacattactgtttcgcacctcctttaacagtgggctcgagattataataccttctggtgctagagaaacgatcttcatgaagttgttttcacgtaattcacgtgc

SEQ ID NO: 484 - DNA, 186 bp, Enterococcus faecalis
tcgatatgtttgtcgccgatttctaccccttgcatacggtaaacacagttgtacttcacagtaataggtagttttcaacagataaaacatcacgaaccttgtaataattgttttggatcaattgaaccttctgtcaacggtgcaccacggtggatgatgtcgccttcagcaactttcatacgtgca

SEQ ID NO: 485 - DNA, 81 bp, Enterococcus faecalis
cacgagttgctttcataatttgtccaacaaggaaaccaactgcacggtcttttccgtttttaaagtcatcaattgattgtt

SEQ ID NO: 486 - DNA, 204 bp, Enterococcus faecalis; identical to SEQ ID NO: 406

SEQ ID NO: 487 - DNA, 234 bp, Enterococcus faecalis
tcagtgatttcttcaccttcaagatatttcatcattaagtcttcgtcagtttcagcaacagccttcaacctaatttttcgcagccattcttgcgctttttctaaataatcttcaggaatatcagtttcttgaatatctgttcccaaatcatttgtgtagatttcagctttcattttaatcaagtcaatgattccagtgaagtcttcttcagctccgattggaatttgaattgga

SEQ ID NO: 488 - DNA, 158 bp, Enterococcus faecalis
ccgtaagcttccagtgcccaaacttccatttccccgaaacgttgtccaccgaattgagctttaccacccaacggttgttgcagtaacaagagagtaaggtccgattgaacgagcatgcaatttgtcatcaaccatgtgggctaatttaatcatataca

SEQ ID NO: 489 - DNA, 86 bp, Enterococcus faecalis
  misc_feature (11)..(11): n=g, a, t or c
tcacgtttcangatttctgcgatatcacgtttgatttttgaagcaggtaccttctaaagtttcatgtttaaccatgttcgcattac

SEQ ID NO: 490 - DNA, 219 bp, Enterococcus faecalis
taatttgtccaacaaggaaaccaacctgcacaggtcttttccgtttttaaagtcatcaattgattgttggttgttgtctaaaacttcgttaatcattggtaataattgcgcctggatcagataactgaacaaggccttttgcttcgacaacttctttagcgtctccaccgttttcaattaactctttgaacactttcttcgcaattttcgagctgattg

SEQ ID NO: 491 - DNA, 177 bp, Enterococcus faecalis
ctaacgtatccaaaattgattgattcttatcgtcccacaataaacagtcaattcacattcgcagacctttttatcttccacgtaagcagtcgcctttgccagatgccgacaaagtcacgtaatttgacgatttcaaaatgtaatttcaagacatcaccagggaccactttttgacgg

SEQ ID NO: 492 - DNA, 137 bp, Enterococcus faecalis
taagaattcagcatactctttttcagcataccatttcgcatcccagtcgcaggatgatgcctacacgcattccaattggatgtacctttttgacccacctgattgtccctcctcttaaatgtttaagctctgttttc

SEQ ID NO: 493 - DNA, 100 bp, Enterococcus faecalis
tgatgtgaactcgtttgccagttaatttgtttaattcttttcttaggttttcgacttcagatccgcctttaccgataaccatacctggtttagctgtgtg

SEQ ID NO: 494 - DNA, 187 bp, Enterococcus faecalis
ccacaaagcataataggacagtttcgtccctattctccctaccatttcgccggctctcggggcaacaagaaaactaacaaaagccaaaggaatggttgataagccagcttccaacgggctgaagcctctcatctcttgcaaatatagcgtgtttaaaaataaatagccgttatatatgataaagcca

SEQ ID NO: 495 - DNA, 69 bp, Enterococcus faecalis
cacgagcgacattttgtttgccacgtaattttccgttcaccttggaaaactacttccacttcatcttct

SEQ ID NO: 496 - DNA, 182 bp, Enterococcus faecalis
cacagataatgtttgcagtaagtcttcccagacattttttacattcattaaatgtgttctagtcgccttcgtttaagacttgatatacgcagttctgtgggtacgcaggaacgaactttttggcgcttgtggtcgtgcttgttgacgtggcgcatctgcttctttggcagctacaccgtgtt

SEQ ID NO: 497 - DNA, 212 bp, Enterococcus faecalis
aaccattgcaacgattggaatgtttaatttgtgtgcttcttgaacagcaatgcgttctttacgtgggtcaacgatgtacattacatctggaattcttggcatatcatgcagataccaccctaagaatttttctaaacagttcacagttctttgtttaagccagcaacttctttcttaggtaaaacttcgaaagtgccgtcttcttccattgc

SEQ ID NO: 498 - DNA, 338 bp, Enterococcus faecalis
agcagattcaccacttaaacctgaatgcgtgctcgtaccaaaaccaaattttttcaaatacctccatccatttttcatcacccattttttgttctagttttaccataccaatattactagaccaagaaatggcttgacgataattcaaatattctttgccgttcaaccgagtgtagtcatggtcattcacagttacatccccaacctgaattccaccaacacgattgaataattcattaggattaaactgtccttgttccatagaagcagcctgttgtaaataatttgattgttgagcctggttcataaggactttcaactaataggttctgccacgt

SEQ ID NO: 499 - DNA, 304 bp, Enterococcus faecalis
aagatcttcagtgattaattgatccgcaccaatgatgattgcaccagtttctggatgaacaactgatttaccgtgtataaccgacctaatagacgttcgtctaatggttcgataatttcgttaccttcacgaatggcttcgatttcaagaccacggtcagtgccacagtcgtcttcacgaatgattacgtcttgggcaacgtcaactaaacgacgtgttaagtaacctgaatcggctgtcttcaaggccgtatcggtcatccctttacgagccccgtgagttgagataaacatttctaagacag

SEQ ID NO: 500 - DNA, 174 bp, Enterococcus faecalis
gtgttcgctgttgtaacaattacgatgtccataccgcgtactttatctactaaatcataatcaaccttctgggaagattaattgttctttaatacctaaagtatagttaccacgaccatcgaaagcttttttgctgacaccgtggaagtcaccgtacacgaggtaaagaaactg

SEQ ID NO: 501 - DNA, 144 bp, Enterococcus faecalis
tgtaatagcaaggtttttagtgtattttaaccagttttttcaaaaaataatcattttttctcaaagttgataaatttatttgaatatctaaaaaaagtatggtagaatgcactattttcggcgtcgcggaatgattttaatcgg

SEQ ID NO: 502 - DNA, 218 bp, Enterococcus faecalis
ggaccatcgcccgtttccgtgccacatcttttggatcgactttgacattttcaataccaggcatgttacctcattccagggatcatttttaataagtcttcaatcggtcccatgcccataacttgatccaattgctcaatgaaatcgttaaagtcaaaactgttttctttcattttttgagcaagttcttctgcttttttttcatcgtaatcttgttg

SEQ ID NO: 503 - DNA, 250 bp, Enterococcus faecalis
tctttacctacttcatattctcctatctcaacattcttgaattctttaatgaagcgccttaagagccgtgtttgccttttgcaacatgacctttcgcaggtttgtttgataaaacttcacgtttgtcttggtaaccaacttggatagcttcgtatccgtcagtttcaacagtttttaccttgtaaaactacgtttggcgtagccttcaactacctgttacctggaattaattcaccagactcagtaaaga

SEQ ID NO: 504 - DNA, 104 bp, Enterococcus faecalis
aaacattttttcttgtaattctcgtgtatggatcccgtaatgagccgccacctaattcgtagccgtttaagacaacatcgtaagcttcagcatacacagaggct

SEQ ID NO: 505 - DNA, 197 bp, Enterococcus faecalis
ccgaccccgataagttcaagtgctttttggaaaccttcagaaacaccaacaaccatgttgttgaagtttgcacagagttgttccgtggattgttttcatttcttttgaatcgtttggacgagtgaatgtcaccttcgtttccttcgatgttcattttgatatcagaagaaaattcgcgtgttaattcacctttaggt

SEQ ID NO: 506 - DNA, 103 bp, Enterococcus faecalis
ggttttgccatcgcgcaacatgatttcttttgctgcttgttgtacatcttcgtcattgtacaagacattgtagattgtttctgtgattggcatttcaacttct

SEQ ID NO: 507 - DNA, 176 bp, Enterococcus faecalis
tcctttaactgtaatgttgtttccgtcttgcttgatttcaacaccagcaggaagaacaacaacctttattaccaataccggcctcaccttagagacacctccttgtgtattttttagaattaccatacgtaggcgattacttcgccgccgatatttttcgctctagcttctttgtc

SEQ ID NO: 508 - DNA, 164 bp, Enterococcus faecalis
gcctaattcaggaccatgcatttgtccagaaacagcaattcgaattggcataaacaagtttttgcctttaacgccggtttctttttggacggctttaatcgctgctttaatacttgggacatcgaaaacgtccaaggcttctaattgttctttaaacgcatgta

SEQ ID NO: 509 - DNA, 244 bp, Enterococcus faecalis
tgaaaactctttaaacatgcgtaaaacttcttcttcggattttgaaccgcgcaccatttcatctgtaatcccagttaaattgattgtcgtttgagataatggatggccaggatcaataaactgctcaaaagtctcaatgacatttcctttgtgcattttgactgcggccaattcaataatggtatcataaacagcggaaagccccgttgtttccacgtcaaagaccacataggtagcatctgtt

SEQ ID NO: 510 - DNA, 126 bp, Enterococcus faecalis
aacagctgtcattaattgacgaatttgttcatttggataaacaggtcacctttagccttctaacgatttaccgattaatttagaatgacgagccttcttccaacgcttttaagacattgtcacgga

SEQ ID NO: 511 - DNA, 180 bp, Enterococcus faecalis
gtgaatcatttggataactaattgttcacaaacattttgccaacctaacattggcagtccatttttggcagtgcctttcaaaattagcagccaaccgttccgcctgctcttccgttacttttttggcttgctgtgtcgcaacactttcttccaataattgacgataataaaccatgagca

SEQ ID NO: 512 - DNA, 93 bp, Enterococcus faecalis
gctacgtctttcactaatcctttgtcatacatttgtgctaacacctcgtggccccaagccatcaatgttcattgcgtttcgtgagacaaagtg

SEQ ID NO: 513 - DNA, 196 bp, Enterococcus faecalis
  misc_feature (26)..(26): n=g, a, t or c
tatttaagaaccccatatcaaaagangcgttgtgggccacctaaaatagttccttctgaaaactctttaaacatgcgtaaaacttcttcttcggattttgaaccgcgcaccatttcatctgtaatcccagttaaattgattgtcgtttgagataatggatggccaggatcaataaactgctcaaaagtctcaatga

SEQ ID NO: 514 - DNA, 189 bp, Enterococcus faecalis
gattgtagctggtttatctaatacttgtccacgttcgatatcttcacgtgctacaccacgtaataaagcaccgatgttgtcgcctgccttcagcagtagtctaataatttacggaacatttcaacacctgtaacagttgttttagatgtttcgtctttaataccaacgatttcaacttcgtcaccaacg

SEQ ID NO: 515 - DNA, 187 bp, Enterococcus faecalis
ccacaaagcataataggacgtttcgtccctattctccctaccatttcgccggctctcggggcaacaagaaaacctaacaaaagccaaaggaatggttgataagccagcttccaacgggctgaagcctctcatctcttgcaaatatagcgtgtttaaaaataaatagccgttatatatgataaagcca

SEQ ID NO: 516 - DNA, 101 bp, Enterococcus faecalis
atcaatttgaccagcgatataacttagtgtatcatccggaatttctaaacgctcggcatctgcttttttgcacaaaattgcaatccgtgtttctaaatcag

SEQ ID NO: 517 - DNA, 151 bp, Enterococcus faecalis
cgtacacgaacatcttcagatacgccaacgtttgctaaaacttttttagctgtagtgttaccaataccataaatgtaagtaagagaaactactacaccgtttgtcacgagggatgtctactcctgcaatacgagccattattcgttacacc

SEQ ID NO: 518 - DNA, 99 bp, Enterococcus faecalis
ttacctgttaattttactttatcagcgttaattacgattacgaaatctccagtatccacatgtggtgtgaatgttggtttatttttaccacgtagtaca

SEQ ID NO: 519 - DNA, 173 bp, Enterococcus faecalis
tacgcgggcaacctgcatttttacgacggcctgtgccgctatattgtacttgtgccaatgaatttccctccttaaattaagttcgtgatatctaatacttctggttgttgtgcagcatgtggatgctcagctccaccgtatacgttcaatttagtaaattgtttacgtcctaa

SEQ ID NO: 520 - DNA, 112 bp, Enterococcus faecalis
cataaggatacggccgccaccgaatacgccaattacttcgtgcgggatagtagaaccaaccataggcaccttcaacctaagtttttcttcgcagtcttcgattgctttacgg

SEQ ID NO: 521 - DNA, 220 bp, Enterococcus faecalis
caacttcatctaaaatatcttgacggaatttagagattgaagcaaaccattgtggcgttgcacaggtagataactggttttttggtacgccaatcatgtggataactatgcgtaaagaaatctaattttaataacgcgcctttttcttctaataactcagtaatcattggattcgctttgtcatagaaaattccttcaaaaccaggtgcttcatctgtaa

SEQ ID NO: 522 - DNA, 144 bp, Enterococcus faecalis
atggcatcctcgtagttgtaaccttcccatgtcatgaaggcaaccaagacgttttgccctaaagccatttcgccttcttccatagaaggtccatccgctaaagtatcgcctttttcaactttttcacctaagtgaacaattggg

SEQ ID NO: 523 - DNA, 148 bp, Enterococcus faecalis
cccccatcgagaagatagagaagttttgcatggcacctaccacctcaccatattcaacatattcaaaaagggtaagcctaccttaaatcagacaatccctttgcattcaccccgggcacagtaatgtgcgcacctaggcgaaatacaa

SEQ ID NO: 524 - DNA, 115 bp, Enterococcus faecalis
tcgtttccttcgatgttcattttgatatcagaagaaaattcgcagtgttaattcacctttaggtcctttaactgtaatgttgtttccgtcttgcttgatttcaacaccagcagga

SEQ ID NO: 525 - DNA, 220 bp, Enterococcus faecalis
tgtctctttaatgtctaacgctaatttcattaatgggtttgcaattgccgccattgcttctgaaggcgaacctgattttgcttgtctcagtgtaatatacaaaacatattcaggattatccgctgggaccatttccactacagaagacaagacttgacttgctccatcaacgtaccctttaccatctgaaatctgggcagttcctgttttggcagcaaca

SEQ ID NO: 526 - DNA, 221 bp, Enterococcus faecalis
tctaaaatagataaaatatcggctaagttctttttgattaactcttttcctgacgttggattataaatcacctctagccttttttcatggtttgcctgcctacctttcttatcgttttgaaagctcttcttgcaataacttgttaaccacacctgggtttgcttgtccacgagttgctttcataatttgtccaacaaggaaaccaactgcacggtcttttc

SEQ ID NO: 527 - DNA, 187 bp, Enterococcus faecalis
tgtagcactttcgctttgggacattttcttttgaatatacagttacttctgtttcaatttctaaacgtgggaaaataggtgttcctttaccttgttacctgttacgtctgttgggaactcaccaaaatgaatattttccatgttcattgtttctggatctaagcctaattgttcgaaaattttccct

SEQ ID NO: 528 - DNA, 134 bp, Enterococcus faecalis
tcgccatcactaaattgtgttacagagcacctttcctagctccacacccacagcatccagcaattttttctgctaagggacgattagagttcaaagaaaagattttcaatcttggatcaaaataatgtttcgac

SEQ ID NO: 529 - DNA, 252 bp, Enterococcus faecalis
tatcccaaacttcatcttcgccacgttcgattttacagtttcgcatttttaatgtttgtcagcaatttcacagttgtacctaattcacagcattacaaatggtttgaataattcaatcgccatttcttttggtaaaccacattggtacatttttaagaacggaccaacgacgattacggaacgaccagaatagtcaacacgtttacctagtaagttttgacggaaacgaccttgtttccctttcaacatgtg

SEQ ID NO: 530 - DNA, 142 bp, Enterococcus faecalis
tgtcgcggaagatcatgccttccccttcacggccttcttcttccattgttaggtagtagttacctaagaccatatcttgagatggtgtaacaacctggtttaccatctttcgggttcaagatattttgggcagcaagcatta

SEQ ID NO: 531 - DNA, 250 bp, Enterococcus faecalis
taacataatccgacgtttgacttcagtaccaaagccttcggaacgcgaattaacatagacagtcttctagattttggacattttcggaacggtaaccataaccgaatgccatcaaagcagttgtaagtttgaacttgcttctgaagaggcaataatatagtaagcggcaatcccatatttagaatgtggtaagctaacttcttccactgttgcgcctaaagctttgaacgtttctgctgcttttaatacc

SEQ ID NO: 532 - DNA, 142 bp, Enterococcus faecalis; identical to SEQ ID NO: 530

SEQ ID NO: 533 - DNA, 167 bp, Enterococcus faecalis
gatggcatcttcttcatttaaataatgaacatttccagtggcagacaaccagcttgccaagttcgtcaccagattttcacctagattactaataatttcttccaaatctgcttcatttttcaccaattcttgttcaattaatggcgcgtaaactggtttgggcataa

SEQ ID NO: 534 - DNA, 188 bp, Enterococcus faecalis
tgggtttgcatttttagccgcagcctttcaatgccatagaagcagcctacacaggaaggccgtttcatttgaatcagacatcgtggtatgaaccatcgtaaagttttgctttgatatcaactaatggataaccagcaagaacaccgttgttcatagagtcttctaaccctttttcaactgctgggatg

SEQ ID NO: 535 - DNA, 278 bp, Enterococcus faecalis
tatctacaaagtttgttcctggcaatttaccagcagattcaccaccttaaacctgaatgcgtgcctcgtaccaaaaccaaattttttcaaatacctccatccatttttcatcacccattttttgttctagttttaccataccaatattactagaccaagaaatggcttgacgataattcaaatattctttgccgttcaaccgagtgtagtcatggtcattcacagttacatccccaacctgaattccaccaacacgattgaataattcattaggatta

SEQ ID NO: 536 - DNA, 127 bp, Enterococcus faecalis
atgcgtaatcaatgtccgcacgtaatgtgtgaagtggtacagttccttcagagtatccttctgaacgagcgatatccgcaccgtttagacgacctgatacttgagttttgattcctttagcgccagc

SEQ ID NO: 537 - DNA, 182 bp, Enterococcus faecalis
tagtaaaccttcgcggtttggtagttttgccaacgcagtaatttgttccacctgaagaaacttttccttcgatgacgccacctttgatttctaatgcttttgcatctttagcaaattcgtcgatgattttagctggtgctactacatcgtcgttgctgaatgcgacagcagttgggcctgta

SEQ ID NO: 538 - DNA, 130 bp, Enterococcus faecalis
ggtccaaagactacgccacctccacgccattgtggtgaacaggattgaaccttgacgagcacgaccagttcctttttgacgccatggtttgcggccaccgccacgaacagcgctacggtttttaactgcg

SEQ ID NO: 539 - DNA, 184 bp, Enterococcus faecalis; identical to SEQ ID NO: 308

SEQ ID NO: 540 - DNA, 135 bp, Enterococcus faecalis
taagttcttaatacaaataagccaatggttaacaagacaaagccaaacattactattgtatctcgtaggtgccaatgaagaatgcaggtattttgtccgtccttcaccaccttgataacctcttgcttccatggc

SEQ ID NO: 541 - DNA, 146 bp, Enterococcus faecalis; identical to SEQ ID NO: 412

SEQ ID NO: 542 - DNA, 191 bp, Enterococcus faecalis
taagttttcttcaacaactgcttctggttcgaagaatttatcaatgtccgcaatatcaacttggactttttcttgcggttccatgccatagtccacagctaataattcaattgtatctttatctagggcttggttttggttaacaatgacacccatcataaataattttttgatgatttccgctggttcgc

SEQ ID NO: 543 - DNA, 128 bp, Enterococcus faecalis
acctttggctaagcgatcaatttcagcaccacagcaaatgtaaattatgatctctttcatatcctttaacaaagccatacgcctgttttgtcggcctacctgtaccaatggttcctgcccggtagaca

SEQ ID NO: 544 - DNA, 104 bp, Enterococcus faecalis
cttcttgcaataacttgttaaccacacctgggtttgcttgtccacgagttgctttcataatttgtccaacaaggaaaccaacctgcacaggtcttttccgtttt

SEQ ID NO: 545 - DNA, 202 bp, Enterococcus faecalis
aggaaacgctgctaagacaacgccttctttgtttttatctttaccagtgataaccttttactttatcagccttttttaacaaacattactgtttcgcacctcctttaacgtgggctcgagattataatacttctggtgctagagaaacgatcttcatgaagttgttttcacgtaattcacgtgcaactggtccgaagatacg

SEQ ID NO: 546 - DNA, 263 bp, Enterococcus faecalis
  misc_feature (2)..(2): n=g, a, t or c
angcggttcgtccgctagacgagccatttcattttcaggttcatgaatgattcaaactgccctgattttggttaataaaactttgtcttagttttggccagctttctctagtaatgcagaccatttctggtgtatagtccatcaaacggcttaaattattattgaaagctaactgcatctcttcatcgtctgttgcacgagcacaaacaatctcatagtcaaatgccaccacgatgcccttaggactcgctgcgacaggttca

SEQ ID NO: 547 - DNA, 131 bp, Enterococcus faecalis; identical to SEQ ID NO: 482

SEQ ID NO: 548 - DNA, 130 bp, Enterococcus faecalis
aatcactaattcgttaattcctaagccagcctttttcaacacatttacaggatgttatggatgattgtttttggtccagtatagacaacagccaaacatctccatgcgaacgccaagcattccacgtggg

SEQ ID NO: 549 - DNA, 159 bp, Enterococcus faecalis
cgctggatcatgataactgaacaaggccttttgcttcgacaaccttctttagcagtctccaccagttttcaattaacctctttgaacacctttcttcgcaattttcgagctgattgtgccatcgttaatcaaagtaatcatacccgctagattttctgg

SEQ ID NO: 550 - DNA, 205 bp, Enterococcus faecalis
ttttcaacagttccttcaacagttgcgcctgcaacagttggcagcaccaaccttttgtagattcgccacctacctaagataacttcgtcaaaaacaactttctcgccagcctcaacgtttaatttttcaacgtagattgcttgacctacttcaactttcacttgtttaccaccagttttgataattgcgtacatgctatacagca

SEQ ID NO: 551 - DNA, 222 bp, Enterococcus faecalis
tgtgtagatttcagctttcattttaatcaagtcaatgattccagtgaagtcttcttcagcctccgattggaatttgaattggatgagccgtttgcttgtaaacgatcatgtaatgattctactgaatagaagaagtccgcaccgattttatccattttgttacagaatacaatacgaggaactttatattcagtcgcttgacgccaaacagtttctgtttga

SEQ ID NO: 552 - DNA, 116 bp, Enterococcus faecalis
tctgtttgttcgtttgttaaatcacgtacacgaacatcttcagatacgccaacagtttgctaaaacttttttagcctgtagtgttaccaataccataaatgtaagtaagagaaact

SEQ ID NO: 553 - DNA, 81 bp, Enterococcus faecalis
ggtaaaacatcacgttttgcaacaggacctttacgaggcatccagtaactcctccttccgaaatatgatttttcaagttgt

SEQ ID NO: 554 - DNA, 270 bp, Enterococcus faecalis
cctgcttcttcatacaaatcaaccattttttcaatgatggtattttgaacttgagctggttttttcacatttcgcagtttcacttcttgtcgcaaggcttctgtaatttttaaggatgtatcaaagcctacgtctgcaccaattaacgtttcttctaattcttcaaagaaatcttcatcaacgctccggaaattagcaaacaattcgttcaaccgttgaccaaatgtcttacgtgttttttccaaacctttttcatatttttcttggact

SEQ ID NO: 555 - DNA, 173 bp, Enterococcus faecalis
tacgcgggcaactgcatttttacgacggcctgtgccgcctatattgtacttgtgccaatgaatttccctccttaaattaagttcgtgatatctaatacttctggttgttgtgcagcatgtggatgctcagctccaccgtatacgttcaatttagtaaattgtttacgtcctaa

SEQ ID NO: 556 - DNA, 227 bp, Enterococcus faecalis
cgctggtgacttgcttaagcgttgttcatcaaacaatttaatcaagtcttcttgtgagaagatttcttcttcgccaacaggagaccatcctagtaaagcaataaagttgaacatggcttctggtaagtaacctaattcacggtattgttcaataaattgtaaaattgtttcatcacgtttgctcaattttttgccagtttctgaattaatgattaaggtcatatggc

SEQ ID NO: 557 - DNA, 119 bp, Enterococcus faecalis
aacaccagtaacgtctgttgtacggaagtagaattgaggacggtagttagtgaagaatggagtgtgacgtccgccttcttcttttgataatacgtataccttcagcctttgaattttgt

SEQ ID NO: 558 - DNA, 139 bp, Enterococcus faecalis
tctttaccaagtacttgcgcgcttgttccagctgaacggattaattgtccacctttaccaggtttcatttcaatgttgtggataacctgtaccaactggaatgttttccaatggtaatgcgttacctactttaatatct

SEQ ID NO: 559 - DNA, 274 bp, Enterococcus faecalis
agatttgtaagttaagatttcttgtaatgtgtaagcagcaccgtaagcttccagtgcccaaacttccatttccccgaaaccgttgtccaccgaattgagctttaccacccaacggttgttgcgtaacaagagagtaaggtccgattgaacgagcatgcaatttgtcatcaaccatgtgggctaatttaatcatatacatgacaccaacggaaatacggttatcaaatggttcacctgtacgtccatcgtaaagaactgttttagcatcgctagc

SEQ ID NO: 560 - DNA, 179 bp, Enterococcus faecalis
gttccttcaacagttgcgcctgcaacagttggcgcaccaacttttgtagattcgccacctactaagataacttcgtcaaaaacaactttctcgccagcctcaacgtttaatttttcaacgtagattgcttgacctacttcaactttcacttgtttaccaccagttttgataattgcgta

SEQ ID NO: 561 - DNA, 156 bp, Enterococcus faecalis
tgccatattcaatcaccttatttcttaacgtttttagcttcatgatgttttttcataacgccttcttttgaaaggatgttacgaactgtatcagaaggttgcgcacctttagataaccaatctaaaactaaatcttcttttaaaactacttctgca

SEQ ID NO: 562 - DNA, 158 bp, Enterococcus faecalis
tatttaaatcgattgtaaattgactttctgctgccactttacgcgacagacagagaggatcttaccaacgataatgagcaaatgcgccggtttgcgtctgccattttgtgtgtgtcttcgcgttttttaacagaagcgccagtgttgttagcagcatc

SEQ ID NO: 563 - DNA, 189 bp, Enterococcus faecalis
taagcggattaatacgtatttgccttctttaccaagtacttgcgcgcttgttccagctgaacggattaattgtccacctttaccaggtttcatttcaatgttgtggataactgtaccaactggaatgttttccaatggtaatgcgttacctactttaatatctgcttctggaccagatactaggcgcat

SEQ ID NO: 564 - DNA, 230 bp, Enterococcus faecalis
ctggatcaactagcgtttcagctaaggttaagtttaagagacgtgtttttaagtctaattttttgttaactttgtagcgaccaacgtttgccaaatcataacgttttggatcaaagaaacgtgcagttaacaagctacgtgagctatctgctgtttttggttcgcctgggcgaagacgttcataaatgtctttcaagccttcttctgtacgagaatcacttgcgtttttg

SEQ ID NO: 565 - DNA, 203 bp, Enterococcus faecalis
tacgataattgcttgaattttttcaaataccatgtgtatattcctccaaaatagtcattttcttcatttatatgtgaacagttttttacagcgttaggagcagtgagccccatgttaagccgccgccaaatcctgttagcaccacgcgttgttgggaacctaaaattaaggtcccattttcaactgcttcatccaacaaaata

SEQ ID NO: 566 - DNA, 91 bp, Enterococcus faecalis
aaagtagttccgtaaccgcgttctaatggttcaacgacgaacttaccataatctctattttcatcaattttttcgattcttggtttttcaa

SEQ ID NO: 567 - DNA, 68 bp, Enterococcus faecalis
tcctaagacacggcctaatttaccaactgtagccatcatgtcaggagtcgcaacaactacgtcaaagt

SEQ ID NO: 568 - DNA, 306 bp, Enterococcus faecalis
cgcgattgccatcgattgtatgcatcaagccttgttctttatagaaagctaagattggtgcgctactttcaatgttgactgccaaacgatttttaaccgtttcgggcttatcatcttctctttggtagaattcatgtccgccacagcgatcacaagtgccttcaacttttggcgggttgaataatttatgatacgttgcgccacatgtgcgacagatgaatcgtccagctaaacgctcgattaatacatcttcttctacatggatgtcaatgacagcatcaatttttttgtttaattctttaagca

SEQ ID NO: 569 - DNA, 125 bp, Enterococcus faecalis
tagtaaagcagcacctgagtcatgggctgatttatattccatacctgtacctacccacggagagcgtggttgaattaacggcaccgcttgacgctgcatgttggcacccatcaaggcacggttgg

SEQ ID NO: 570 - DNA, 68 bp, Enterococcus faecalis; identical to SEQ ID NO: 567

SEQ ID NO: 571 - DNA, 188 bp, Enterococcus faecalis
gtgatacggattggacaaccaattaaatcagcatcagcaaattttacgcctgcgcgctcattgcggtcatcaactaatacttcgtagcccgcttcggtcatcattgcttcaacttcttgtgatagttttgtttggtactcatctttcacattcatttggaccacgtgtaaatcaaatggcgcaattcc

SEQ ID NO: 572 - DNA, 123 bp, Enterococcus faecalis
tgagataaacatttctaagacagaaagtccttcacggaagtttgagatgattggtaattccatgattcgtccattcggagcggccatcaaaccacgcataccagctaactgtgtaaagttgga

SEQ ID NO: 573 - DNA, 229 bp, Enterococcus faecalis
ttgatttctttacctacttcatattctcctagctcaacattcttgaattctttaatgaagcgcttaggagccgtgtttgcttttgcaacatgacctttcgcaggtttgtttgataaaacttcacgtttgtcttggtaaccaacttggatagcttcgtatccgtcagtttcaacagtttttacttgtaaaactacgtttggcgtagcttcaactactgttactggaatta

SEQ ID NO: 574 - DNA, 157 bp, Enterococcus faecalis
tatttaaatcgattgtaaattgactttctgctgccactttacgcgacagacagagaggatcttaccaacgataatgagcaaatgcgcggtttgcgtctgccattttgtgtgtgtcttcgcgttttttaacagaagcgccagtgttgttagcagcatc

SEQ ID NO: 575 - DNA, 157 bp, Enterococcus faecalis; identical to SEQ ID NO: 574

SEQ ID NO: 576 - DNA, 103 bp, Enterococcus faecalis
tactttaccgtagcgaaccacttcaatttgagcaacacgtggtgtgtgtaatgggaatgtacgttccacaccaacaccatttgaaactttacagtactgtgta

SEQ ID NO: 577 - DNA, 93 bp, Enterococcus faecalis
caacgcgaacttcaccacgttcaacacggcctgtagcaacagtaccacgtccagtgattgagaatacgtcttcgactggcatcatgaatggtt

SEQ ID NO: 578 - DNA, 71 bp, Enterococcus faecalis
ccttaaccgataatttcttctacagatttaccgcgaagtgctgccacttcttcggcacgttttaattgttt

SEQ ID NO: 579 - DNA, 139 bp, Enterococcus faecalis
tgtttacggtcgttaacaccggcagtatcaagcgcaccacgaacgatatggtaacgtacccctggtaagtcttttacacgtccaccaccgtaataataccaccgcctgtgttcttgtaagttgtgaccgatacctggga

SEQ ID NO: 580 - DNA, 129 bp, Enterococcus faecalis
ggtccaaagactacgccacctccacgccattgtggtgaacggattgaaccttgacgagcacgaccagttcctttttgacgccatggtttgcggccaccgccacgaacagcgctacggtttttaactgcg

SEQ ID NO: 581 - DNA, 70 bp, Enterococcus faecalis
taaggtccggtcataccgacatcacttaagaaggctgtccctttcggtaaaatccgagcgtcatttgttt

SEQ ID NO: 582 - DNA, 226 bp, Enterococcus faecalis
agcatcaacgtgggccatgataccaatgttacgagttttttcaagtgaaaattctcttgccattttgtatgtttactcctctctttatttaaatcgattgtaaattgactttctgctgccactttacgcgacagacagagaggatcttaccaacgataatgagcaaatgcgcggtttgcgtctgccattttgtgtgtgtcttcgcgttttttaacagaagcgccag

SEQ ID NO: 583 - DNA, 243 bp, Enterococcus faecalis
ccagtaacgtctgttgtacggaagtagaattgaggacggtagttagtgaagaatggagtgtgacgtccgccttcttcttttgataatacgtatacgttcagctttgaattttgtgtgtggagtgattgtagctggtttagctaatacttgtccacgttcgatatcttcacgtgctacaccacgtaataaagcaccgatgttgtcgcctgcttcagcgtagtctaataatttacggaacatttc

SEQ ID NO: 584 - DNA, 131 bp, Enterococcus faecalis
gcttcaggtacttcttgtgctttaccagtaccgaaaccaacgtgtccgtttttgtcaccgacaacaactaaagctgcgaaacgtaaacgacgtccacctttaacaacttttgttacacggttgatcgctac

SEQ ID NO: 585 - DNA, 202 bp, Enterococcus faecalis
ttttcaacagttccttcaacagttgcgcctgcaacagttggcgcaccaacttttgtagattcgccacctactaagataacttcgtcaaaaacaactttctcgccagcctcaacgtttaatttttcaacgtagattgcttgacctacttcaactttcacttgtttaccaccagttttgataattgcgtacatgctatacagca

SEQ ID NO: 586 - DNA, 85 bp, Enterococcus faecalis; identical to SEQ ID NO: 457

SEQ ID NO: 587 - DNA, 80 bp, Enterococcus faecalis
tttcattgccaacgcgctgaatatctccgtctaaagcatacacagtaccagttaagaaatcaacgatgcgtcgtgcttgg

SEQ ID NO: 588 - DNA, 231 bp, Enterococcus faecalis
tcaaaactaaatggacgagttactacaccaactgttaaagcgcctaattctttagcgatttttgcaactactggggcagcacctgtaccagttccgccacccataccagcagtaatgaaaatcatatccgcgccttgtaatgattctgaaatcacttgttcactttcttctgcagctttttggccaacttcaggttgtgaaccagcacctaaaccacgagtgtatttaggg

SEQ ID NO: 589 - DNA, 151 bp, Enterococcus faecalis
tcgaccttttgaaatcttaaagtttttggttgtagtattcaacgacaagtgcttcgtcgatttctgggtaaagttcatcacgttctggtaaacgagtgaagctaccttctaatttttcagtgtcaaagcttacgaatgctggacgtccaac

SEQ ID NO: 590 - DNA, 68 bp, Enterococcus faecalis; identical to SEQ ID NO: 567

SEQ ID NO: 591 - DNA, 218 bp, Enterococcus faecalis
tcctacgaataaagcaacgccgccttcttctgcaacgtttttcatgtaatcgtaagctgcatctactaatttcactgttttttgtaagtcaatgatgtagataccgtttctttctgtgaagatatatttcttcatttttgggttccagcgacgagtttggtgaccaaagtgtacgccggcttctagtaattgtttcatagaaattactgccatgttgt

SEQ ID NO: 592 - DNA, 161 bp, Enterococcus faecalis
tacagataatagcatagatagtaaaccttcgcggtttggtagttttgccaacgcagtaatttgttccactgaagaaacttttccttcgatgacgccacctttgatttctaatgcttttgcatctttagcaaattcgtcgatgattttagctggtgctacta

SEQ ID NO: 593 - DNA, 183 bp, Enterococcus faecalis
ggtgatacccagccttctggtgcccctttacctttacccatacgtacgccgatagctttacttgtgtaagacttgtgagggaaaattttaatccatactttcccgccacgtttcatgtaacgagtcattgcaatacgggctgcttcgatttgacggttagtaatccagtgagattcagttgct

SEQ ID NO: 594 - DNA, 218 bp, Enterococcus faecalis; identical to SEQ ID NO: 591

SEQ ID NO: 595 - DNA, 171 bp, Enterococcus faecalis
cagcagccatttgtgcttcaatgtctgaaatactataaacgttttcgctagctacgccaacttcttttggttccatgttacggtaacgagccataccagtaccagctgggatgattttaccaatgataacattttctttcaatccaagtaatggatcttttttgccacgga

SEQ ID NO: 596 - DNA, 117 bp, Enterococcus faecalis
acttctaatccttttggtgctaagatgtatgccttaaccccgtcttcgtaatgaactaacgcgatgttagcagaacggtttggatcgtactcgatcgttttaacaaccgctgcgacg

SEQ ID NO: 597 - DNA, 161 bp, Enterococcus faecalis
gcagtaagtcttcccagacattttttacattcattaaatgtgttctagtcgcttcgtttaggacttgatatacgctgttctgtgggtactgctggaacgaactttttggcgcttgtggtcgtgcttgttgacgtggcgcatctgcttctttggcagctaca

SEQ ID NO: 598 - DNA, 175 bp, Enterococcus faecalis
tgcaggaatgtctgtaccagcttctacgaagtatttatctggtgtttgaacagttaagttatagtctgttggttcgttcaagtaagggaactcaacaggcatgatttcgttaaagatgatcttaccaactgtggtgattaagattcgttctttttgccaatcagtaaatggtttg

SEQ ID NO: 599 - DNA, 147 bp, Enterococcus faecalis
ggtccgtgttgtcctggtttgtaagggcgacgagctagttctttaccagtacctgataaagagatacctagacgacgagatactttccatgatggtccagtataacgagacattaaaaattcctccaataaataaatgtttttttgg

SEQ ID NO: 600 - DNA, 60 bp, Enterococcus faecalis; identical to SEQ ID NO: 306

SEQ ID NO: 601 - DNA, 120 bp, Enterococcus faecalis
ttgaacgtctgtattggctgtgataaattccacacctttaacgttttcttcgatcatacggtttacagcgtttccgccgccgccacctacaccgataactttaatgactgcaccgttgtt

SEQ ID NO: 602 - DNA, 183 bp, Enterococcus faecalis; identical to SEQ ID NO: 593

SEQ ID NO: 603 - DNA, 102 bp, Enterococcus faecalis
acgaatgctggacgtccaacagttgcttcaaccgcttctttaattgttgagatgttttgagatttttcacgaacaccgatcacttgaccaacttcaacgtgg

SEQ ID NO: 604 - DNA, 151 bp, Enterococcus faecalis
taaacgttttcgctagctacgccaacttcttttggttccatgttacggtaacgagccataccagtaccagctgggatgattttaccaatgataacattttctttcaatccaagtaatggatcttttttgccacggatagcagcatctgtta

SEQ ID NO: 605 - DNA, 218 bp, Enterococcus faecalis
taattgaggtgatttaactaatgtagcaatctctttcaattgacgttcttcttcttgtaaaagttgatacgcttctttactcgtcactgcttcaatacggcgtactcctgcaccaattccagattcagaaacaattttgaaaatcccgatatcttctgtattagcaacgtgtgttccaccacataattcgatagagtaatccccaatattaactacac

SEQ ID NO: 606 - DNA, 239 bp, Enterococcus faecalis
agttttccgtaagtagtgtccgcttcttcccatgcgtaatcaatgtccgcacgtaatgtgtgaagtggtacagttccttcagagtatccttctgaacgagcgatatccgcaccgtttagacgacctgatacttgagttttgattcctttagcgccagcacgcattgcgcgttggatggcttgtttttgagcacgacggaaagcaacacggttttctaattgacgtgcaattccttcgcc

SEQ ID NO: 607 - DNA, 68 bp, Enterococcus faecalis; identical to SEQ ID NO: 567

SEQ ID NO: 608 - DNA, 127 bp, Enterococcus faecalis
ataaatttttaatttcactgacttctttttgaatcgctggatctttttccaataattgctgaatcttttcgtgcgcatgaatcaccgttgtatgatctttgccgccaaattcggcaccaatttttgg

SEQ ID NO: 609 - DNA, 235 bp, Enterococcus faecalis
tccctttgcattcaccccgggcacagtaatgtgcgcacctaggcgaaatacaaacaagattaaaactgtaaataagatttttgatctaatgtctttgactttaaaggcgttctttaatagcttgaacaattagatcacctcgattgaaccaccagcagcttcgatagcttcttgtgctgatttcgagaatttagctgctttcacagttaattttttcgttaactcaccatctgca

SEQ ID NO: 610 - DNA, 275 bp, Enterococcus faecalis; identical to SEQ ID NO: 441

SEQ ID NO: 611 - DNA, 237 bp, Enterococcus faecalis
gaacatttcaacacctgtaacagttgttttagatgtttcgtctttaataccaacgatttcaacttcgtcaccaacgcgaacttcaccacgttcaacacggcctgtagcaacagtaccacgtccagtgattgagaatacgtcttcgactggcatcatgaatggtttgtcagtatcacgttctggagttgggatatattcgtcaactgcagccattaattctaagattttttcttcata

SEQ ID NO: 612 - DNA, 246 bp, Enterococcus faecalis
aaccacacctgggtttgcttgtccacgagttgctttcataatttgtccaacaaggaaaccaactgcacggtcttttccgtttttaaagtcatcaattgattgttggttgttgtctaaaacttcgttaatcattggtaataattgcgctggatcagataactgaacaaggccttttgcttcgacaacttctttagcgtctccaccgttttcaattaactctttgaacactttcttcgcaattttcga

SEQ ID NO: 613 - DNA, 183 bp, Enterococcus faecalis; identical to SEQ ID NO: 593

SEQ ID NO: 614 - DNA, 70 bp, Enterococcus faecalis
gctgctccacctgctgctggtccagctactgctacaggagctgctgctgatacgtcaaatttttcttcga

SEQ ID NO: 615 - DNA, 80 bp, Enterococcus faecalis; identical to SEQ ID NO: 587

SEQ ID NO: 616 - DNA, 200 bp, Enterococcus faecalis
aggaaacgctgctaagacaacgccttctttgtttttatctttaccagtgataacttttactttatcgccttttttaacaaacattactgtttcgcacctcctttaacgtgggctcgagattataatacttctggtgctagagaaacgatcttcatgaagttgttttcacgtaattcacgtgcaactggtccgaagatacg

SEQ ID NO: 617 - DNA, 353 bp, Enterococcus faecalis
gcatgcccggttaattcgaatgaaacgattcggccggagcctgttcgtttaaaagaacctttaatcattgataggccttctttcctgtcaacaagagagattaagcgttgattgcttcgatcataacttttgtatacggttgacggtgaccttgtttacggtgagagtgttttttaggtttgtattggaaagtcacgactttcttttgtttgccgtgtttttcaacagttccttcaacagttgcgcctgcaacagttggcgcaccaacttttgtagattcgccacctactaagataacttcgtcaaaaacaactttctcgccagcctcaacgtttaatttttcaacgtagatt

SEQ ID NO: 618 - DNA, 145 bp, Enterococcus faecalis
ctgcatgttggcacccatcaaggcacggttggagtcatcgttttctaagaaaggaatacatgctgttgcgactgcgactacttgttttggtgaaacgtccatgtagtcaactttgtctacggcaacttctaagttttcactttgt

SEQ ID NO: 619 - DNA, 140 bp, Enterococcus faecalis
cgccgtagatagttgcgccacgtttctgtgcatgctcgagttcttctaaaaccagcattcctgcgccttcacccatcacaaaaccttttcgttctttatcaaaaggaatcgaagcccgagtcgcatcttctgttgtattt

SEQ ID NO: 620 - DNA, 130 bp, Enterococcus faecalis; identical to SEQ ID NO: 334

SEQ ID NO: 621 - DNA, 193 bp, Enterococcus faecalis
tttccgtgtaatgcgcgtaagtagtaaagttttgcacgacgtactttaccgtagcgaaccacttcaatttgagcaacacgtggtgtgtgtaatgggaatgtacgttccacaccaacaccatttgaaactttacgtactgtgtaagtttcgctgattccagcaccacggcgtttaattacaacaccttcgaata

SEQ ID NO: 622 - DNA, 128 bp, Enterococcus faecalis
gtaacaacgattgtcgcccctaccgcggatggaaataagtggcgcaattctaacaccgttccgacagttgtttccccaactgataattggtccttcacagcttctttggctgtttgttcaatcatggc

SEQ ID NO: 623 - DNA, 156 bp, Enterococcus faecalis
atcttttgctaaagctactgcttcttcaactgagtaagcttttgtagcatcaacttttttcaatgcttcttgcatttttttgctctttttagccattttgtttcctccttgattgtggttataacggttgtacctcccacgtctttcatatcttta

SEQ ID NO: 624 - DNA, 60 bp, Enterococcus faecalis
ccaatcgcattcgtcgcagaagcacaagcagtcacgatagtttgagaaggtccttttgca

SEQ ID NO: 625 - DNA, 130 bp, Enterococcus faecalis; identical to SEQ ID NO: 334

SEQ ID NO: 626 - DNA, 98 bp, Enterococcus faecalis
gaacctacagtacgtccgccttcacgaatagagaaacgagttccgtcttcgatagcgattgggtgaattaattcaacgtccatagcaacgttatcacc

SEQ ID NO: 627 - DNA, 218 bp, Enterococcus faecalis; identical to SEQ ID NO: 605

SEQ ID NO: 628 - DNA, 169 bp, Enterococcus faecalis
tcttcagcagccatttgtgcttcaatgtctgaaatactataaacgttttcgctagctacgccaacttcttttggttccatgttacggtaacgagccataccagtaccagctgggatgattttaccaatgataacattttctttcaatccaagtaatggatcttttttgc

SEQ ID NO: 629 - DNA, 177 bp, Enterococcus faecalis
tcttttgataatacgtatacttcagctttgaattttgtgtgtggagtgattgtagctggtttagctaatacttgtccacgttcgatatcttcacgtgctacaccacgtaataaagcaccgatgttgtcgcctgcttcagcgtagtctaataatttacggaacatttcaacacctgta

SEQ ID NO: 630 - DNA, 197 bp, Enterococcus faecalis
  misc_feature (195)..(195): n=g, a, t or c
ggtgtttcttcaacgaataactcttcagttgcttggtcttccccttggttaccttcgatgaaagcgtcagccattttagcagtgattaatttcacagcgccggattgcatcatcatttgaagggattacaacatcgatctcatcaggatcacagtttgtatcaaccattgcaacgattgggaatggttaatttgngt

SEQ ID NO: 631 - DNA, 278 bp, Enterococcus faecalis
tttgtagttaattgtacctcttcagcatcttttcctaattcttctacgataattgcttgaattttttcaaataccatgtgtatattcctccaaaatagtcattttcttcatttatatgtgaacagttttttacagcgttaggagcagtgagccccatgttaagccgccgccaaatcctgttagcaccacgcgttgttgggaacctaaaattaaggtcccattttcaactgcttcatccaacaaaataggaatactagcagctgaggtattgccatatt

SEQ ID NO: 632 - DNA, 69 bp, Enterococcus faecalis; identical to SEQ ID NO: 437

SEQ ID NO: 633 - DNA, 298 bp, Enterococcus faecalis
tacgtccgaataccccagttttttacgctggttaaagctatagttaaaaagttaattatttaacgatttcagtaacaacgcctgaacctacagtacgtccgccttcacgaatagagaaacgagttccgtcttcgatagcgattgggtgaattaattcaacgtccatagcaacgttatcaccaggcattaccatttcagtaccttctggcaattctacaacaccagtaacgtctgttgtacggaagtagaattgaggacggtagttagtgaagaatggagtgtgacgtccgccttcttc

SEQ ID NO: 634 - DNA, 77 bp, Enterococcus faecalis
aacacggcctgtagcaacagtaccacgtccagtgattgagaatacgtcttcgactggcatcatgaatggtttgtcag

SEQ ID NO: 635 - DNA, 262 bp, Enterococcus faecalis
aaattgcatcattaaaactgccccaattgcaaaatttggcgcaattaagccgccgatggctttttctcgagataggtttgtcaattcgttgatttgttcctccgtaaagcctgtcgtcccaacaactggcgccataccatgttccaacgcaaaacgtgtatttggataggcggcttcaggaaccgtaaaatcaatccaaacatctggtttgacagctaggacttcttctaagcgctgaaaaacgggaattgctgtttcatca

SEQ ID NO: 636 - DNA, 135 bp, Enterococcus faecalis
ccaagaattcttttgtaaacatttctgttggcattatgctttctctccttttgaacgttgttttttggcaaacgaaagcagaacttcttgtttattctctaagctaccttcaacaacgtgttgctcgatttcagc

SEQ ID NO: 637 - DNA, 129 bp, Enterococcus faecalis
acttgcgcgtagatgtttttgttagaacggaaaatgttcaagcagtgggcacctcagcagtaccagagattttgttacagtacacagacgatgtctcttttgacgtgttttgtttttatctggttttgt

SEQ ID NO: 638 - DNA, 253 bp, Enterococcus faecalis
gaaattttttctaataaaggatgaaattcagcgatagcggcctaaggttttttcttcaattttaaaatctaattggcctagcaaagcagtaagccccgcatcattcgcagagcatcttcatgaaaccgctcatggggattaccgacagcacgaatggtttgattagttaaatcttcgataccatcaaataaatcaatgatttcgcctgtgctgtcgagcgccaaggcattaatcgtaaaatctcgccgtttta

SEQ ID NO: 639 - DNA, 150 bp, Enterococcus faecalis
cacgtttgtcacgagggatgtctacctcctgcaatacgagccattattcgttacacctcctaattatccttgacgttgtttatgttttggatttgctgggcaaataaccataacacgtcctttacggcgaattactttacaatgttcaca

SEQ ID NO: 640 - DNA, 147 bp, Enterococcus faecalis
tcatggattggtttatttaataaagcatcacggacgctgcccccgacaaaatacgcttcaaagccctgtgcattgatttcacgaataaccgggagcggcttctttaaattcgtttggaatagttgtcaatttcatagcatctgttcc

SEQ ID NO: 641 - DNA, 180 bp, Enterococcus faecalis
ccagcagcttcagcttctttagctttttcgcctttagcgaatactaaaacagtttgtgttttaccagttccgtttggaagcacaacctgcctccacaggatttgttggtctgcttttttagggtcaacagttcaatttgtaagcaaccttcaactgttgcgtcaaatttcgcgatgtttg

SEQ ID NO: 642 - DNA, 206 bp, Enterococcus faecalis
ttttcaacagttccttcaacagttgcgcctgcaacagttggcagcaccaacttttgtagattcgccacctacctaagataaccttcgtcaaaaacaacctttctcgccagcctcaacgtttaatttttcaacgtagattgcttgacctacttcaactttcacttgtttaccaccagttttgataattgcgtacatgctatacagca

SEQ ID NO: 643 - DNA, 227 bp, Enterococcus faecalis
tcgaaaacgtccaaggcttctaattgttctttaaacgcatgtaacacagttggcacctgtttctccttgcaagaattctttcgcagcatcatctaaaactggatgttcattaaagaacaagtttgatagttccacaatttcagctgcataactcatttgtggttgatacaagcctaactaattgttttaaccattcgattttttcaggagatggattttcttcaaca

SEQ ID NO: 644 - DNA, 133 bp, Enterococcus faecalis
ggtaaacgagtgaagctaccttctaatttttcagtgtcaaagcttacgaatgctggacagtccaacagttgccttcaaccgcttctttaattgttgagatgttttgagatttttcacgaacaccgatcacctt

SEQ ID NO: 645 - DNA, 94 bp, Enterococcus faecalis
caacgcgaacttcaccacgttcaacacggcctgtagcaacagtaccacgtccagtgattgagaatacgtcttcgacctggcatcatgaatggtt

SEQ ID NO: 646 - DNA, 184 bp, Enterococcus faecalis; identical to SEQ ID NO: 308

SEQ ID NO: 647 - DNA, 190 bp, Enterococcus faecalis
gcatgaattaaataaaccatgatatcatcccgacaaccaattaccttcagcaagattggccttcgccacgacgaatcaattcttctgcattccctagccacacatcggttccgtgagacagtccagaaatttgaagtaattctgcaaaagttgatggatgggtctgttctaacatacctcgaacgaaacg

SEQ ID NO: 648 - DNA, 131 bp, Enterococcus faecalis
ggtaaacgagtgaagctaccttctaatttttcagtgtcaaagcttacgaatgctggacgtccaacagttgccttcaaccgcttctttaattgttgagatgttttgagatttttcacgaacaccgatcactt

SEQ ID NO: 649 - DNA, 126 bp, Enterococcus faecalis
acttgcgcgtagatgtttttgttagaacggaaaatgttcaagcgtgggcacctcagcagtaccagagattttgttacgtacacgacgatgtctcttttgacgtgttttgtttttatctggttttgt

SEQ ID NO: 650 - DNA, 229 bp, Enterococcus faecalis
ataggttggccaagggacataagttaaactttcctcgttacctaaaatttgccatagttcttcaccaatatgtggcgcgattggcgcaagtaattggacaaatccttccacatattcataaggtaaggcatccactttattggcttcattcacaaaaaccattaattgagaaatcgctgtattaaagtgcaagtttgccatatcttctgtcacttttttaaccgtttgg

SEQ ID NO: 651 - DNA, 184 bp, Enterococcus faecalis
ggaatgttttccaatggtaatgcgttacctactttaatatctgcttctggaccagatactaggcgcatgcctaccttctaatccttttggtgctaagatgtatgccttaaccccgtcttcgtaatgaactaacgcgatgttagcagaacggtttggatcgtactcgatcgttttaacaaccgct

SEQ ID NO: 652 - DNA, 226 bp, Enterococcus faecalis
tcgaaaacgtccaaggcttctaattgttctttaaacgcatgtaacacagttggcacctgtttctccttgcaagaattctttcgcagcatcatctaaaactggatgttcattaaagaacaagtttgatagttccacaatttcagctgcataactcatttgtggttgatacaagctaactaattgttttaaccattcgattttttcaggagatggattttcttcaaca

SEQ ID NO: 653 - DNA, 197 bp, Enterococcus faecalis
ttcaacgcggaatgatggatcttcttcagcaagtttttgtagagccacgcccattttatcttggtcagcttttgatttaggttcaacagcgacttggataactgggtcagggaattcaatagattcaagaataactggtgcatctaatgcacataatgtatcaccagttgttgtgtcttttagaccaacagcagcag

SEQ ID NO: 654 - DNA, 123 bp, Enterococcus faecalis
agacgtttgtgagtacgcatttcgaattgttcgcgagaatctttgtatttatgagtcgcacagaataactgtgtaaagtgagcgttctgttggtaatggaatcggacctgatacgtcagctcc

SEQ ID NO: 655 - DNA, 137 bp, Enterococcus faecalis
gaattgagttgataaattcattcgtaaacagtttcgcctactaacatatttgactttggcatctggttgattcactaacatttgatgaccaatagcatgcatcaaatgggttttccctaaccctacaccaccataga

SEQ ID NO: 656 - DNA, 85 bp, Enterococcus faecalis; identical to SEQ ID NO: 457

SEQ ID NO: 657 - DNA, 258 bp, Enterococcus faecalis
gaaataatcagcaaactattcccaccttgactcaagaacgggaaagtaattcctgttaatggaataatcccagtaatcccaccaacattaataaagacttgaattaataacattgtaccaattccaatacacattagtgaattaaaaggtttcttcgagcgtacaccgactaaaataattcgcgcaatcataaacatcaacaatcctaaaatcgctagaccgccgataatgcctaactcttctaaagtaatcgcaaag

SEQ ID NO: 658 - DNA, 147 bp, Enterococcus faecalis
cacttctaaacctgttgcttgtaatgaacgaattgctgcttcacagtccagaaccaggtcctttaacctgttacagtctacagttttaagtccatgttccattgccactttagttgcggcttctgcagccatttgagcggcaaaagg

SEQ ID NO: 659 - DNA, 219 bp, Enterococcus faecalis
tcctacgaataaagcaacgccgccttcttctgcaacgtttttcatgtaatcagtaagctgcatctactaatttcactgttttttgtaagtcaatgatgtagataccgtttctttctgtgaagatatatttcttcatttttgggttccagcgacgagtttggtgaccaaagtgtacgccggcttctagtaattgtttcatagaaattactgccatgttgt

SEQ ID NO: 660 - DNA, 151 bp, Enterococcus faecalis
aacaaccgctgcgacgttatctttattacgtttgaagtcaatcacacggtattgacgtttgtgaccgccaccttggtgacgaaccgtaatgcagaccgttgttgttacgaccggcattgttttttaatggctgtaacaatgatttttctgg

SEQ ID NO: 661 - DNA, 162 bp, Enterococcus faecalis
acaccaccgacaattgcgttttcaaactcgaagcctttaccttcttcatttggtgtaaattcaacccatacgtgaccagtattgtcctttaccaccagactgacgaacgaatttaccttctgctttagtcgcagcacggaatgtttcgcggtaagatacttg

SEQ ID NO: 662 - DNA, 311 bp, Enterococcus faecalis; identical to SEQ ID NO: 480

SEQ ID NO: 663 - DNA, 168 bp, Enterococcus faecalis
taatttgacgatttcaaaatgtaatttcaagacatcaccagggaccacctttttgacggaatttggcctttgttgataccgccaatataggctgtttcaccttcaaattgatccatttttaagattaaaatcgaacctacttgtgccaatgcttcaataatcaaaacg

SEQ ID NO: 664 - DNA, 277 bp, Enterococcus faecalis
tacgtccaattggtgttttaccttcaccaccaccgtgtgggtgatcgttagggttcattacgcctaccacgaacagttgggcgtttacgcatccaacgagagcggccagcctttaccaatgttgattaattcgtgttgttcgttaccaactgaaccgattgttgcacggcaagttgctaagatcatacgaacttcgccagagtttaagcggattaatacgtatttgccttctttaccaagtacttgcgcgcttgttccagctgaacggattaattgt

SEQ ID NO: 665 - DNA, 168 bp, Enterococcus faecalis
acgtaataataccacgcctgtgttcttgtaagttgtgaccgatacctgggatataagcctgtaacttcgattaagtttgacaaacgaacacgggcatatttacgtaaagctgagttcggttttttaggtgtcatcgtacccacacgtgtacaaactccacgtttttgc

SEQ ID NO: 666 - DNA, 148 bp, Enterococcus faecalis
ttgcatttttttgctctttttagccattttgtttcctccttgattgtggttataacaggttgtacctcccacagtctttcatatctttaaatatgaaacgaacctgagaagctacttctttgagtaagtgtggaataaaaattattct

SEQ ID NO: 667 - DNA, 182 bp, Enterococcus faecalis; identical to SEQ ID NO: 537

SEQ ID NO: 668 - DNA, 102 bp, Enterococcus faecalis
tactttaccgtagcgaaccacttcaatttgagcaacacgtggtgtgtgtaatgggaatgtacgttccacaccaacaccatttgaaactttacgtactgtgta

SEQ ID NO: 669 - DNA, 196 bp, Enterococcus faecalis
actgattctgcttctttttccagctgtttcgcctgattgttgttccgcaaatttggttagtgcagtcaacaggtgattaaatcatcatcgtcatcagtccatatcgcgtaactcaatctcagcttcctcaatgtccaagacacgcatgtctaaaccaagtgattgtaattctttcactaatactcggaatgattca

SEQ ID NO: 670 - DNA, 149 bp, Enterococcus faecalis
ttgcatttttttgctctttttagccattttgtttcctccttgattgtggttataacaggttgtacctcccacgtctttcatatctttaaatatgaaaccgaacctgagaagctaccttctttgagtaagtgtggaataaaaattattct

SEQ ID NO: 671 - DNA, 177 bp, Enterococcus faecalis
acttttttcatactagttttcctcccatttcttcaagcaaattacaccattatggccaccaaagccaaacagaattacctaattgtatagtccgctgtaatgtcacagtgcaccttctgtgacataatctaaatcacaatctggatcagcaacttggtagcctactgtcggatgagc

SEQ ID NO: 672 - DNA, 256 bp, Enterococcus faecalis; identical to SEQ ID NO: 481

SEQ ID NO: 673 - DNA, 69 bp, Enterococcus faecalis
tccatactttcccgccacagtttcatgtaacgagtcattgcaatacgggcctgcttcgatttgacggtt

SEQ ID NO: 674 - DNA, 128 bp, Enterococcus faecalis
tgtgttgctgaacgtaatgttgtagcataaccaaacatttcagcctaaaggtaccatcgcattaacgatttgagagttaccagtgtgccttccataccttcaacacgtccacgacgacttgttacgtg

SEQ ID NO: 675 - DNA, 172 bp, Enterococcus faecalis
aacgttttcgattaattctgctttatttgccatggatcatttcacctcctctataagagatacgatgtttttacacacctaaagttccgtctatttttgagtggtccaaaaacagacagcaaatattgatctggttcaatattctgttaacaagatagcataagaaagttgt

SEQ ID NO: 676 - DNA, 127 bp, Enterococcus faecalis; identical to SEQ ID NO: 536

SEQ ID NO: 677 - DNA, 127 bp, Enterococcus faecalis
tcgattgtaaattgactttctgctgccactttacgcgacagacagagaggatcttaccaacgataatgagcaaatgcgcaggtttgcagtctgccattttgtgtgtgtcttcgcgttttttaacaga

SEQ ID NO: 678 - DNA, 220 bp, Enterococcus faecalis
tcctacgaataaagcaacgccgccttcttctgcaacagtttttcatgtaatcgtaagcctgcatctactaatttcactgttttttgtaagtcaatgatgtagataccgtttctttctgtgaagatatatttcttcatttttgggttccagcgacgagtttggtgaccaaagtgtacgccggcttctagtaattgtttcatagaaattactgccatgttgt

SEQ ID NO: 679 - DNA, 133 bp, Enterococcus faecalis
ggtaaacgagtgaagctaccttctaatttttcagtgtcaaagcttacgaatgcctggacagtccaacagttgccttcaaccgcttctttaattgttgagatgttttgagatttttcacgaacaccgatcactt

SEQ ID NO: 680 - DNA, 119 bp, Enterococcus faecalis
tgttcttcgtaatattgtaccaagcgatccgcatatttactcatgcggaagaaataggattcttctttaacctaattcgacttcgtgaccacttggtgctttcccaccaatgacattgc

SEQ ID NO: 681 - DNA, 125 bp, Enterococcus faecalis
gtattgacgtttgtgaccgccaccttggtgacgaaccgtaatgcgaccgttgttgttacgaccggcattgttttttaatggctgtaacaatgatttttctggtgttgaagttgtgatttcagcga

SEQ ID NO: 682 - DNA, 184 bp, Enterococcus faecalis; identical to SEQ ID NO: 308

SEQ ID NO: 683 - DNA, 167 bp, Enterococcus faecalis
ttaccttcgatgaaagcgtcagccattttagcagtgattaatttcacagcgcaggattgcatcatcatttgaagggattacaacatcgatctcatcaggatcacagtttgtatcaaccattgcaacgattggaatgtttaatttgtgtgcttcttgaacagcaatgc

SEQ ID NO: 684 - DNA, 280 bp, Enterococcus faecalis
tcagcaatcagttcccctaaccatttgcctggtgtttcttctaagacggctaaaaggtcttttcctgttatggccaattcatgtctttgatggatgggtaatgccttaactaactcttttgttacttgtacttgactctcttgttggtaataatataaaagcctttcaacaagtacctgctgattcttcgcctaattcataaagcatcattggctgccagtcgttactcaagcgaaaacgcaaaccgcgtactaattgtgaaacgttttgaattaattga

SEQ ID NO: 685 - DNA, 219 bp, Enterococcus faecalis
agagcggccagcctttaccaatgttgattaattcgtgttgttcgttaccaactgaaccgattgttgcacaggcaagttgcctaagatcatacgaaccttcgccagagtttaagcaggattaatacgtatttgccttctttaccaagtacttgcgcgcttgttccagctgaacggattaattgtccacctttaccaggtttcatttcaatgttgtggata

SEQ ID NO: 686 - DNA, 219 bp, Enterococcus faecalis
agagcggccagctttaccaatgttgattaattcgtgttgttcgttaccaacctgaaccgattgttgcacaggcaagttgcctaagatcatacgaaccttcgccagagtttaagcaggattaatacgtatttgccttctttaccaagtacttgcgcgcttgttccagctgaacggattaattgtccacctttaccaggtttcatttcaatgttgtggata

SEQ ID NO: 687 - DNA, 124 bp, Enterococcus faecalis
tccacgattacaactgatgctgctgattcaaatttctcagcggcctgcttgaactagggtttcttttttagcagattgcctgcttcacctcatttatttcaccctcctgattttgatggtggag

SEQ ID NO: 688 - DNA, 191 bp, Enterococcus faecalis
cgcaccaacttttgtagattcgccacctactaagataaccttcgtcaaaaacaactttctcgccagcctcaacagtttaatttttcaacagtagattgccttgacctacttcaactttcacttgtttaccaccagttttgataattgcgtacatgctatacagcacctccttcttctagacttagactcgc

SEQ ID NO: 689 - DNA, 69 bp, Enterococcus faecalis
ccagaaccttctactgcaggtttcataaggatacggccgccaccgaatacgccaattacttcgtgcggg

SEQ ID NO: 690 - DNA, 403 bp, Enterococcus faecalis
taataggtagttttcaacagataaaacatcacgaacttgtaataattgttttggatcaattgaaccttctgtcaacggtgcaccacaggtggatgatgtcgccttcagcaactttcatacgtgcagtgtaagggacagtataggtacgtgtatctgtttttcctttgatggttacttctttttgacgtgtggcaggatcttcagaaatatcgataacttcaccggttacttctgtaatcactgcttgtcctttcggattacgtgcttcaaagatttcttggatacgaggtaaaccttgagtgatatcgtcaccggcaaccccaccggtatggaacgtacgcatggttaactgtgtaccaggttccccgatagattgagcggcgattgtaccaactgcttctcc

SEQ ID NO: 691 - DNA, 176 bp, Enterococcus faecalis
ccttgttgtgcttcgacctttttcatcaaatgatcatcgacgaaaggtcctttttttaaactacgacccatggtgaacctcctctcaaaatgtacgacacatggtcaaaaaaattatttagtacgacgacgaacgataagtttgtctgatttagcttttttattacgtgttttgta

SEQ ID NO: 692 - DNA, 141 bp, Enterococcus faecalis
cacccataccagagataacctgtttcaccagtttcaacgtttgtttcaacgcggaatgatggatcttcttcagcaagtttttgtagagccacagcccattttatcttggtcagcttttgatttaggttcaacagcgacttg

SEQ ID NO: 693 - DNA, 155 bp, Enterococcus faecalis
cctaattgaatcactgtttctgcttttgaatgttttaatgcttgaacagtctgtattggctgtgataaattccacacctttaacgttttcttcgatcatacggtttacagcgtttccgccgccgccacctacaccgataactttaatgactgcac

SEQ ID NO: 694 - DNA, 281 bp, Enterococcus faecalis
ggcgtttctacttcgacatagccattgccatctagataacgacggatttcgcctaataatttgactgcgtttcatgaaacagatcaaagcctttctttgttactgattaaatccaaatagcgttgacgatagcgttgctccacattcgttaatccatggtatttatctggcaatggacgcaaagctttagttaataacgtaattgtttgagctttaacagtaacttcccccgtattggttttcattacttgacctgtcacaccaaagaagtcgcctaagtc

SEQ ID NO: 695 - DNA, 182 bp, Enterococcus faecalis
gttccttcaacagttgcgcctgcaacagttggcagcaccaacttttgtagattcgccacctactaagataaccttcgtcaaaaacaacctttctcgccagcctcaacgtttaatttttcaacgtagattgcttgacctacttcaactttcacttgtttaccaccagttttgataattgcgta

SEQ ID NO: 696 - DNA, 127 bp, Enterococcus faecalis
ccagtttttgagaaattaaataaataaccgagaaaccattcccgttaatcgaattcagttccttttctaaccgtttttcgacaatttctggtaaaggatcgccatacaattcgcgcgcacgattgta

SEQ ID NO: 697 - DNA, 218 bp, Enterococcus faecalis
  misc_feature (130)..(130): n=g, a, t or c
tctaaaatagataaaatatcggctaagttctttttgattaactcttttcctgacgttggattataaatcactctagcttttttcatggtttgcctgctactttcttatcgttttgaaagctcttcttgcnaataacttgttaaccacacctgggtttgcttgtccacgagttgctttcataatttgtccaacaaggaaaccaactgcacggtcttttc

SEQ ID NO: 698 - DNA, 337 bp, Enterococcus faecalis
agcagattcaccacttaaacctgaatgcgtgctcgtaccaaaaccaaattttttcaaatacctccatccatttttcatcacccattttttgttctagttttaccataccaatattactagaccaagaaatggcttgacgataattcaaatattctttgccgttcaaccgagtgtagtcatggtcattcacagttacatccccaacctgaattccaccaacacgattgaataattcattaggattaaactgtccttgttccatagaagcagctgttgtaaataatttgattgttgagcctggttcataaggactttcaactaataggttctgccacgt

SEQ ID NO: 699 - DNA, 81 bp, Enterococcus faecalis
  misc_feature (6)..(6): n=g, a, t or c
cacganttgctttcataatttgtccaacaaggaaaccaactgcacggtcttttccgtttttaaagtcatcaattgattgtt

SEQ ID NO: 700 - DNA, 93 bp, Enterococcus faecalis; identical to SEQ ID NO: 577

SEQ ID NO: 701 - DNA, 179 bp, Enterococcus faecalis
  misc_feature (175)..(175): n=g, a, t or c
tccacgccattgtggtgaacggattgaaccttgacgagcacgaccagttcctttttgacgccatggtttgcggccaccgccacagaacatcgcctacggtttttaactgcgtgtgttccttgtcttaatgaagcacgttgcatgatgattgcatcatagacaacactttcattangttc

SEQ ID NO: 702 - DNA, 127 bp, Enterococcus faecalis
cagagtatccttctgaacgagcgatatccgcaccgtttagacgacctgatacttgagttttgattcctttagcgccagcaccgcattgcgcgttggatggccttgtttttgagcacgacggaaagca

SEQ ID NO: 703 - DNA, 158 bp, Enterococcus faecalis
gacgttactaaaaatcgtctgatcatcataagctattttacacgaaatcttgaaaaaaggatagttctaaaaacaaaccttttattctcaaggaaaattatgcgttgccgccgtttttcttgatgatttcttcttgaacagacttaggtacgtcttca

SEQ ID NO: 704 - DNA, 165 bp, Enterococcus faecalis
  misc_feature (12)..(12): n=g, a, t or c
ggttaattgtangcattccttgttctcctccttccttacttcgcttctagttccacacatccaggtggttcttttttcgcgataaaaaataatgcaatctctgcactctttatcaaatatgctttgatagacagtcagcacgtccctataaggaacctgtagata

SEQ ID NO: 705 - DNA, 419 bp, Enterococcus faecalis
tctattttagcaagaaaggcctgtctctagcaatgaaaactttttggttatgtataaaaaaagaagatagcctaggcctacctccttgttaatgccttatttaccatcaagaatatttaagcggacctttttcggaccatcgatacgtacactataaacaattgtccgaattgcttttgcaacacgcccttgtttaccaatgatacgtccaatatcttctttggccacagtcaaattatactcgaggaaatcagttgattcctcaatttctaatgagactgcttcaggttgactgactaacggacggacaatagttaaaattaactctttcacatctgccatattcaatcaccttatttcttaacgtttttagcttcatgatgttttttcataacgccttcttttgaaaggatgttacg

SEQ ID NO: 706 - DNA, 203 bp, Enterococcus faecalis
gcacggtagataactggttttttggtacgccaatcatgtggataacctatgcgtaaagaaatctaattttaataacgcgcctttttcttctaataacctcagtaatcattggattcgctttgtcatagaaaattccttcaaaaccaggtgcttcatctgtaaagaccccacgactgtcaacaggagaaataacaggtaaatca

SEQ ID NO: 707 - DNA, 199 bp, Enterococcus faecalis
tctttgtttgaattgagttgataaattcattcgtaaacagtttcgcctactaacatatttgactttggcatctggttgattcactaacatttgatgaccaatagcatgcatcaaatgggttttccctaaccctacaccaccatagaagaaaaggggattgtaaatcgaacctggatcctcggcaacaacaagcgctgca

SEQ ID NO: 708 - DNA, 125 bp, Enterococcus faecalis
tgcaacagttggcgcaccaacttttgtagattcgccacctactaagataacttcgtcaaaaacaacctttctcgccagcctcaacagtttaatttttcaacgtagattgcttgacctacttcaac

SEQ ID NO: 709 - DNA, 184 bp, Enterococcus faecalis; identical to SEQ ID NO: 308

SEQ ID NO: 710 - DNA, 207 bp, Enterococcus faecalis
tagtaaaggctaagacaccattgccatcaggagaaggatcgccttcttgaacaaagcgtaaatcttcgtaacctaattggttggaaatcacgatctggatttacatttgtcaaatgatagccatcttcgttagctccaacaatggcgttggctaaatcttgaacagctaaatctgcataaattttaacatcttcggaaacattgact

SEQ ID NO: 711 - DNA, 202 bp, Enterococcus faecalis
ctttttcagcggcacgttcagcaactagtttaccaacagcctgcagcctgtttctgtttttgttccacctgaaatttctttatccaaggcagaggcacttgctagcagtcacacccgctacgtcatcaatgacttgcgcgtagatgtttttgttagaacggaaaatgttcaagcgtgggcacctcagcagtaccagagattt

SEQ ID NO: 712 - DNA, 253 bp, Enterococcus faecalis
tacttgttctaatgaagattcatcaacttttggacgtgtattttgttctctgcgaatatcccaatcgccaaaagcacttgcttcttcttgtgattttggttgatccatttccacagattgagttgtttgttgcattggttgaaccgcttgtcttgtttgacggtgcggttttctatccttttttgattcatcaatacctgtagcgattactgttacacgaatttcgtcgcctaaatcttcattgattgatgta

SEQ ID NO: 713 - DNA, 317 bp, Enterococcus faecalis
cggcgggcgatcacttgttaaaacaatttgtttattttcattgtaaagatcgttgaaggtatggaaaaattcttccaatgttgcttctttttccgccaaaaattgaatatcatcgactaataataagtcaacattgcgatattctttccgaaattgttcggatgtctttgtttgaattgagttgataaattcattcgtaaacgtttcgctactaacatatttgactttggcatctggttgattcactaacatttgatgaccaatagcatgcatcaaatgggttttccctaaccctacaccaccatagaagaaaaggg

SEQ ID NO: 714 - DNA, 179 bp, Enterococcus faecalis
gtgatcatcgccacgtaaaacgtgagaaattttcattaagtgatcatctactgcaacaggcaaagttatacgttggcatcccatcgcgtttttggatgacaaaatcgccaccaatgttatctgactcaaaagtaatttcacctttcacgatgtcatcaaatttgtattctgtattacgt

SEQ ID NO: 715 - DNA, 234 bp, Enterococcus faecalis
agaagctgtttgtttccaatgacgctttggtaataccaagtaagactggacgactagtagcagggacgccaccagcaacctaatgtgtcgtagttacggtctttaaattctgcgatgtccattaatgttcctggaaggatttcagtgtcacctggatccattacgcggattttacgtaacatttgacgaaccattacttcgatatgtttgtcgccgatttctaccccttgcata

SEQ ID NO: 716 - DNA, 269 bp, Enterococcus faecalis
taaggcatcaatcccattgactgtgctaattgctaaggcagaaactgccgcgcaaaccacatcgcctgccataaggacctgcttcagcatgcccggttaattcgaatgaaacgattcggccggagcctgttcgtttaaaagaacctttaatcattgataggccttctttcctgtcaacaagagagattaagcgttgattgcttcgatcataacttttgtatacggttgacggtgaccttgtttacggtgagagtgttttttaggtttgt

SEQ ID NO: 717 - DNA, 116 bp, Enterococcus faecalis
tattcagcagccttcgaataattgaatttcttttgaatcttcagttaatgtaacgatcagcctttgcgacagtttttttgtataacctgcatatttacccatgcgtttgaattttg

SEQ ID NO: 718 - DNA, 184 bp, Enterococcus faecalis; identical to SEQ ID NO: 308

SEQ ID NO: 719 - DNA, 146 bp, Enterococcus faecalis
ggctaaccctttatgcaagacaaaaaaagctgaatccggagattcagctttttaatcgtattagttagcctacctggataaacctgatactttgttttttgtcgcggcctttacgttcgaaacgtaccacaccgtcaacttttgca

SEQ ID NO: 720 - DNA, 160 bp, Enterococcus faecalis
accgtgtgggtgatcgttagggttcattacgctaccacgaacagttgggcagtttacgcatccaacgagagcaggccagcctttaccaatgttgattaattcgtgttgttcgttaccaactgaaccgattgttgcacggcaagttgctaagatcatacga

SEQ ID NO: 721 - DNA, 97 bp, Enterococcus faecalis
cgtccatagctaacatggatttttcagtgatcactgggcagtttgattacgtctagtaattccattatgcaagcacctcctcaatttgagtaagagc

SEQ ID NO: 722 - DNA, 186 bp, Enterococcus faecalis
ggtgatacccagccttctggtgcccctttacctttacccatacgtacgccgatagcctttaccttgtgtaagacttgtgagggaaaattttaatccatactttcccgccacgtttcatgtaacgagtcattgcaatacagggctgcttcgatttgacggttagtaatccagtgagattcagttgct

SEQ ID NO: 723 - DNA, 184 bp, Enterococcus faecalis; identical to SEQ ID NO: 308

SEQ ID NO: 724 - DNA, 208 bp, Enterococcus faecalis; identical to SEQ ID NO: 353

SEQ ID NO: 725 - DNA, 173 bp, Enterococcus faecalis
aaaagaaacatctataaagtgatcggtttattaattatttaacaaattcgataacctaccattggtgcctgcatcgccgcgtcttggttctgtcttcaagatacgagtgtaaccaccttggcgttccgcgaaacgaggtcctaaatcgttaaatagcttttgtaaagctgatt

SEQ ID NO: 726 - DNA, 131 bp, Enterococcus faecalis
ttcattagagcgtcaactgtttttggtgttgggttcacaatgtcaattagacagtttgtgagtacgcatttcgaattgttcgcgagaatctttgtatttatgagtcgcacgaataactgtgtaaagtgagc

SEQ ID NO: 727 - DNA, 178 bp, Enterococcus faecalis
tcaatgctgcaaagcctgcaatcccaatttcacatactgtggcttctgtcccaccagttaccatcatgtccgctaaaccatatttaatcgtgcgaaaagcttcaccaatcgcattcgtcgcagaagcacaagcagtcacgatagtttgagaaggtccttttgcacctaaacgaatcga

SEQ ID NO: 728 - DNA, 144 bp, Enterococcus faecalis
gcttcatcaaagcggcgtgtttcttgttgaatttcgccaccagataataggactttggcctggcgtttttcttcataagctaaacctttttttacaaagttcatagagttcaagttctttaattccgctttagtaccaaattct

SEQ ID NO: 729 - DNA, 271 bp, Enterococcus faecalis
gccaaggcattaatcgtaaaatctcgccgttttaagtcttctttcaaggagcagaacaaaggtgaccttcatctggtcgacgaaagtcttgataagttgactcggtacgaaaggttgttacttcatactgttggtcttccatcaatacaaggactgtgccatgttcgatgcccacatcaacggttcgtttaaaaatttgcttaatctcttctggataggcacttgtcgcaatatcgacatcatggattggtttatttaataaagcatcacg

SEQ ID NO: 730 - DNA, 134 bp, Enterococcus faecalis
agctaaaatcatatgaatacctgctgcccgtgccatttgggctaaacggataatcgcatcttctacttcattacttgccaccatcattaaatcagcctaactcatccacaatgacaacaataaatggcagaatc

SEQ ID NO: 731 - DNA, 226 bp, Enterococcus faecalis; identical to SEQ ID NO: 582

SEQ ID NO: 732 - DNA, 91 bp, Enterococcus faecalis
ccacacgtgtacaaactccacgtttttgcggagagttaacagtttgtttgagttttcttaaaactgttatatcctttgtttaaggctggtg

SEQ ID NO: 733 - DNA, 127 bp, Enterococcus faecalis
tatggccttttcctaataaattacccgcacgccaatttcgagaatggacacttgtacaagtaacaattaaatccccaacaccacttaaaccaataaatgttaatgggtttgctcccatcgcaacccc

SEQ ID NO: 734 - DNA, 130 bp, Enterococcus faecalis
cgagactcttcgtcagtgttcgctgttgtaacaattacgatgtccataccagcgtacctttatctactaaatcataatcaaccttctgggaagattaattgttctttaatacctaaagtatagttaccac

SEQ ID NO: 735 - DNA, 204 bp, Enterococcus faecalis
tcgttgcttcaattacacagttcttcgccgctcgctacaccaattcccattaaagcctgttccttggttttccatcacctgttttcacagtcagcaaagtccaagtttacagtaacctggtgcagtgattaaatctgaaattccttgaacaccttgacgtaatacattatcagcttctctaaatgcttcaagcattggcgtttt

SEQ ID NO: 736 - DNA, 184 bp, Enterococcus faecalis
gctttttctttgcctaataattcgatggtttcgcctaattcaggaccatgcatttgtccagaaacagcaattcgaattggcataaacaagtttttgcctttaacgccggtttctttttggacggctttaatcgctgctttaatacttgggacatcgaaaacgtccaaggcttctaattgttctt

SEQ ID NO: 737 - DNA, 144 bp, Enterococcus faecalis
cgcaagttgctctttaaatttcgctaaattctcttctgcttcaggcatgtccattttattggcaacaataatttgaggtcgttccatcaaacgtaaattgtgtgaagccaattctttattgattgccaaataatcttcgtaagg

SEQ ID NO: 738 - DNA, 185 bp, Enterococcus faecalis
ggtgatacccagccttctggtgcccctttacctttacccatacgtacgccgatagcctttacttgtgtaagacttgtgagggaaaattttaatccatactttcccgccacgtttcatgtaacgagtcattgcaatacagggctgcttcgatttgacggttagtaatccagtgagattcagttgct

SEQ ID NO: 739 - DNA, 69 bp, Enterococcus faecalis; identical to SEQ ID NO: 437

SEQ ID NO: 740 - DNA, 175 bp, Enterococcus faecalis; identical to SEQ ID NO: 598

SEQ ID NO: 741 - DNA, 257 bp, Enterococcus faecalis
ggtaaatttctttacagttctgattgacgatatggaccatattctcccggatgagcaggtgattcatcccattccatccctaaccatgctaagttttccaactgacttttctcgccgtcttcgatgttccgtttttggtcggtatcctcgatacgaatgataaattctccgtcattgtggcgggcaaataagtagttaaataatgctgttcttgcattcccaatgtgcaagtgtccagttggacttggtgcgtaacg

SEQ ID NO: 742 - DNA, 117 bp, Enterococcus faecalis
tatttacccatgcgtttgaattttggacgcacagtttaagatgtttacagtttgctacctttaacatcgaatgcctgattcaacagccttgttttactaaagttttgtttgcgcgag

SEQ ID NO: 743 - DNA, 220 bp, Enterococcus faecalis
tcctacgaataaagcaacgccgccttcttctgcaacgtttttcatgtaatcgtaagcctgcatctactaatttcacctgttttttgtaagtcaatgatgtagataccgtttctttctgtgaagatatatttcttcatttttgggttccagcgacgagtttggtgaccaaagtgtacgccggcttctagtaattgtttcatagaaattactgccatgttgt

SEQ ID NO: 744 - DNA, 130 bp, Enterococcus faecalis
gaactttttcacctttagcaagagtttcttgaattgttgaaaagacagcgtctactgctgcagtagcatcttttttagttaaaccagttgaagatgcaacgttttcgattaattctgctttatttgccat

SEQ ID NO: 745 - DNA, 136 bp, Enterococcus faecalis
gaattgagttgataaattcattcgtaaacgtttcgctactaacatatttgactttggcatctggttgattcacctaacatttgatgaccaatagcatgcatcaaatgggttttccctaaccctacaccaccataga

SEQ ID NO: 746 - DNA, 204 bp, Enterococcus faecalis
ttttcaacagttccttcaacagttgcgcctgcaacagttggcgcaccaacttttgtagattcgccacctactaagataaccttcgtcaaaaacaacctttctcgccagcctcaacgtttaatttttcaacgtagattgcttgacctacttcaactttcacttgtttaccaccagttttgataattgcgtacatgctatacagca

SEQ ID NO: 747 - DNA, 580 bp, Enterococcus faecalis
gcagccattaattctaagattttttcttcataagactcgtcgccttctaaagctttcaaagcagaacctgcgataactggaacatcatcgcctgggaaatcgtattctgataataagtcacgaacttccatttctactaattctaataattcttcgtcatcaaccatatccattttgtttaagaatacaacgatgtatggtacaccaacgttaccgtgataataagatatgttcacgtgtttgaggcataggaccatcagcagcagaaactactaagatagctccgtccatttgagcagcaccagtgatcatgtttttaacgtagtccgcgtgtcctgggcagtcaacgtgtgcatagtgacgagtttcagtttcatattcgatatgagaagtgttgattgtgattccacgttctttttcttctggagcgttatcgatagaatcgtagctttgtgcttccccgccaccgtgttttgataatacagtagcaattgcagctgttaatgtagttttaccatggtcaacgtgtccgatagtaccaatgttaacatgggatttagaacggtcaaatttttctttt

SEQ ID NO: 748 - DNA, 289 bp, Enterococcus faecalis; identical to SEQ ID NO: 327

SEQ ID NO: 749 - DNA, 164 bp, Enterococcus faecalis
gagatgattgcaattcctagaccgtttaatacttttggtacttcgtcagccttttacagtatgcacagtaaacctggtttagaaatacagttttaagtttgtgataacacagctcttcgtttttaccatattttaggaaaacacggattacgccttgtttgtca

SEQ ID NO: 750 - DNA, 145 bp, Enterococcus faecalis
catcatgtcaggagtcgcaacaactacgtcaaagtcgaaccatccaccttggatttttgcaaccatgtcagtcgtcgcctacgaaatctgcaccagcagccttcagccttctttagctttttcgcctttagcgaatactaaaaca

SEQ ID NO: 751 - DNA, 109 bp, Enterococcus faecalis
gaatagcaatgacaataccacctttggctgttccgtctagtttggttaaaactaagccagtgacatcggttgtttctttgaactgtttggcttgtgtcatcgcattttg

SEQ ID NO: 752 - DNA, 222 bp, Enterococcus faecalis
tatcccgtagttcatcaggaatcttattccattgtcctttacagtaccagtttccataatcttaaaggccatcccacctgtccaaaccagcatgaattaaataaaccatgatatcatcccgacaaccaattacttcagcaagattggcttcgccacagacgaatcaattcttctgcattccctagccacacatcggttccgtgagacagtccagaaatttga

SEQ ID NO: 753 - DNA, 137 bp, Enterococcus faecalis
ccctacacttatttagctttcacagctgatttgattgtgattaaagattttttcgctccaggaatgtttcctttgattaagataacatttctttctacgtccacctttaacaacttcaaggttttgaattgttacag

SEQ ID NO: 754 - DNA, 148 bp, Enterococcus faecalis
cttcgccgccgatatttttcgctctagcttctttgtcagtaattacaccctctgatgtagagatgattgcaattcctagaccgtttaataccttttggtacttcgtcagcttttacgtatgcacagtaaacctggtttagaaatacgt

SEQ ID NO: 755 - DNA, 86 bp, Enterococcus faecalis
tcacgtttcaggatttctgcgatatcacgtttgatttttgaagcaggtacttctaaagtttcatgtttaaccatgttcgcattaca

SEQ ID NO: 756 - DNA, 183 bp, Enterococcus faecalis
taccgtttctttctgtgaagatatatttcttcatttttgggttccagcgacgagtttggtgaccaaagtgtacgccggcttctagtaattgtttcatagaaattactgccatgttgtgtttcctccagtttggtttttattttcctcttcttttcgtcaactccttgaagaactaccgtagta

SEQ ID NO: 757 - DNA, 207 bp, Enterococcus faecalis
aaccattgcaacgattggaatgtttaatttgtgtgcttcttgaacagcaatgcgttctttacgtgggtcaacgatgtacattacatctggaattcttggcatatcagcgataccacctaagaatttttctaaacgttcacgttctttgtttaagccagcaacttctttcttaggtaaaacttcgaaagtgccgtcttcttccattgc

SEQ ID NO: 758 - DNA, 165 bp, Enterococcus faecalis
gcctaattcaggaccatgcatttgtccagaaacagcaattcgaattggcataaacaagtttttgcctttaacgccggtttctttttggacaggctttaatcgctgctttaatacttgggacatcgaaaacgtccaaggcttctaattgttctttaaacgcatgta

SEQ ID NO: 759 - DNA, 162 bp, Enterococcus faecalis
aaagacacgtttgatggccgttgtttccgcagcgtcattcgcctggggttgacgtaccatgagcattgatatacccaatttgttccggcagtaatccctgcttccgcaatcgccatttccatcgcagccgccgcgccactaccgtcttttaaaggagcggtc

SEQ ID NO: 760 - DNA, 418 bp, Enterococcus faecalis
tctattttagcaagaaaggcctgtctctagcaatgaaaactttttggttatgtataaaaaaagaagatagcctaggcctacctccttgttaatgcttatttaccatcaagaatatttaagcggacctttttcggaccatcgatacgtacactataaacaattgtccgaattgcttttgcaacacgcccttgtttaccaatgatacgtccaatatcttctttggccacagtcaaattatactcgaggaaatcagttgattcctcaatttctaatgagactgcttcaggttgactgactaacggacggacaatagttaaaattaactctttcacatctgccatattcaatcaccttatttcttaacgtttttagcttcatgatgttttttcataacgccttcttttgaaaggatgttacg

SEQ ID NO: 761 - DNA, 257 bp, Enterococcus faecalis
ggtaaatttctttacgttctgattgacgatatggaccatattctcccggatgagcaggtgattcatcccattccatccctaaccatgctaagttttccaactgacttttctcgccgtcttcgatgttccgtttttggtcggtatcctcgatacgaatgataaattctccgtcattgtggcgggcaaataagtagttaaataatgctgttcttgcattcccaatgtgcaagtgtccagttggacttggtgcgtaacgc

SEQ ID NO: 762 - DNA, 152 bp, Enterococcus faecalis
taaactatggcgatttaacggattatgcgccgcccatagacccgactaaaattttccgatagatggcatcttcttcatttaaataatgaacatttccagtggcgacaaccagcttgccaagttcgtcaccgattttcactagattactaata

SEQ ID NO: 763 - DNA, 254 bp, Enterococcus faecalis
atagctaacatggatttttcagtgatcactgggcagtttgattacagtctagtaattccattatgcaagcacctcctcaatttgagtaagagcctgtttgtgttgccaagactttgttagctgacacaacatctaacacactaacgttatcagaagttactacagaaacgtttggtaagttacgagctgataaagctgcaaagtcgttaccattttctaaaacaactaatactttagtatcgatagacaagtta

SEQ ID NO: 764 - DNA, 180 bp, Enterococcus faecalis
tccacgccattgtggtgaacggattgaaccttgacgagcacgaccagttcctttttgacgccatggtttgcaggccaccgccacgaacagcgcctacggtttttaacctgcgtgtgttccttgtcttaatgaagcacgttgcatgatgattgcatcatagacaacactttcattaggttc

SEQ ID NO: 765 - DNA, 112 bp, Enterococcus faecalis
taaaactaaatcttcttttaaaactacttctgcagggtctttcagagggttgtaagtacctacagtttcgatgaaacgtccatcacgaggagaacgagaatcagctactaca

SEQ ID NO: 766 - DNA, 131 bp, Enterococcus faecalis; identical to SEQ ID NO: 482

SEQ ID NO: 767 - DNA, 154 bp, Enterococcus faecalis
tgagaagtgttgattgtgattccacgttctttttcttctggagcagttatcgatagaatcgtagctttgtgcttccccgccaccgtgttttgataatacagtagcaattgcagctgttaatgtagttttaccatggtcaacgtgtccgatagta

SEQ ID NO: 768 - DNA, 175 bp, Enterococcus faecalis
ctaacgtatccaaaattgattgattcttatcgtcccacaataaacgtcaattcacattcgcagacctttttatcttccacagtaagcagtcgctttgccgatgccgacaaagtcacgtaatttgacgatttcaaaatgtaatttcaagacatcaccagggaccactttttgacgg

SEQ ID NO: 769 - DNA, 158 bp, Enterococcus faecalis
aactaaacgacggcctcatgataatggcatcctcgtagttgtaaccttcccatgtcatgaaggcaaccaagacgttttgccctaaagccatttcgccttcttccatagaaggtccatccgctaaagtatcgcctttttcaactttttcacctaagtga

SEQ ID NO: 770 - DNA, 107 bp, Enterococcus faecalis
gccattttgtgtgtgtcttcgcgttttttaacagaagcagccagtgttgttagcagcatccatgatttctttcgctagacgttcttccattgtgtgttcaccacgta

SEQ ID NO: 771 - DNA, 175 bp, Enterococcus faecalis
tgagcagactctacttggcgagtaaacattttactttgaataacctgcatcttcttcttgcacattcattcgttctaagaatgttttaattcgttctgaaccaaagcgtttcattaagtcatcttctaaagataaataaaattgtgaaacccctggatccccttgacgtcctgca

SEQ ID NO: 772 - DNA, 171 bp, Enterococcus faecalis
taaactagcttcatcggcatggaaagaatagccatctttcatgataaattcacggcctcttaataagccagaacgagggcgtttttcatcacgatattttgtttgaatttggtataaattcaaaggtaatcgtttgtaagaattgatttcatcacgaattaattctgtgaa

SEQ ID NO: 773 - DNA, 131 bp, Enterococcus faecalis
gaactttttcacctttagcaagagtttcttgaattgttgaaaagacagcagtctactgctgcagtagcatcttttttagttaaaccagttgaagatgcaacgttttcgattaattctgctttatttgccat

SEQ ID NO: 774 - DNA, 211 bp, Enterococcus faecalis; identical to SEQ ID NO: 313

SEQ ID NO: 775 - DNA, 76 bp, Enterococcus faecalis
taaccgataatttcttctacagatttaccgcgaagtgctgccaccttcttcggcacagttttaattgttttagaca

SEQ ID NO: 776 - DNA, 94 bp, Enterococcus faecalis
cctgtttttgccatgaacggaattcctcctcctattaattccaatatctaagcaggacaaaggcagtccagtttaactatctcttttttagtat

SEQ ID NO: 777 - DNA, 185 bp, Enterococcus faecalis
tccacgccattgtggtgaacggattgaaccttgacgagcacgaccagttcctttttgacgccatggtttgcaggccaccagccacagaacagcagcctacaggtttttaacctgcgtgtgttccttgtcttaatgaagcacagttgcatgatgattgcatcatagacaacactttcattaggttc

SEQ ID NO: 778 - DNA, 77 bp, Enterococcus faecalis
ccattgtggtgaacggattgaaccttgacgagcacgaccagttcctttttgacgccatggtttgcaggccaccgcca

SEQ ID NO: 779 - DNA, 83 bp, Enterococcus faecalis
aaatcaatgatttcgcctgtgctgtcgagcgccaaggcattaatcgtaaaatctcgccgttttaagtcttctttcaaggagcg

SEQ ID NO: 780 - DNA, 174 bp, Enterococcus faecalis
ctaacgtatccaaaattgattgattcttatcgtcccacaataaacgtcaattcacattcgcagacctttttatcttccacgtaagcagtcgctttgccgatgccgacaaagtcacgtaatttgacgatttcaaaatgtaatttcaagacatcaccagggaccactttttgacgg

SEQ ID NO: 781 - DNA, 279 bp, Enterococcus faecalis
ggcgtttctacttcgacatagccattgccatctagataacgacggatttcgcctaataatttgactgcgtttcatgaaacgatcaaagctttctttgttactgattaaatccaaatagcgttgacgatagcgttgctccacattcgttaatccatggtatttatctggcaatggacgcaaagctttagttaataacgtaattgtttgagctttaacagtaacttcccccgtattggttttcattacttgacctgtcacaccaaagaagtcgcctaagtc

SEQ ID NO: 782 - DNA, 227 bp, Enterococcus faecalis
agcaattttcatgcctttgatgtcgccagttaaatctgccgtaaaatcaggaacagaaacgcctgcagaagtgccgtctttttcgtcataaccacctaattgcatttaaagctaaggcattgtctttaacatttcgtgtcaatggaccaatttggtctaaacttgaagcaaaagcaatcaaaccaaaacgagatacacgtccataagttggttttaggcccacaata

SEQ ID NO: 783 - DNA, 121 bp, Enterococcus faecalis
accttcacgatcatatgacggataatatcgtcattgatttttgctaaacgatcaaactcgttgattgcgccagcctgttgatggagaagtaacattaacgatatgatagatgccttcacgg

SEQ ID NO: 784 - DNA, 201 bp, Enterococcus faecalis
tcagctacatcgcctaattgatcttcaatacagtaataattggttgtatttagcaatacaggtcagtacggccttaatgaaccagttttgatttggccagcagtttgttgcaacagcgatatcagagattgttgaatcttctgtttcaccagaacggtgagatacaactgcagtgtagccagcttctttagccatttcgat

SEQ ID NO: 785 - DNA, 79 bp, Enterococcus faecalis
ttgtaaaccccattcaccaaatgctacttcttttccgcctttagcttcaccgcgcatttttccgcggaattcacgacgg

SEQ ID NO: 786 - DNA, 284 bp, Enterococcus faecalis
tccccaatttcagaaatcgccataaattctttagaatctttaccacccatggcaccaccagtccccaataatggcacaggaattctagtccacagcgttcaaaaatgcgtgagtaagctttttcgtaatcacggtatgattgatctaaactagcttcatcggcatggaaagaatagccatctttcatgataaattcacggcctcttaataagccagaacgagggcgtttttcatcacgatattttgtttgaatttggtataaattcaaaggtaatcgtttgtaa

SEQ ID NO: 787 - DNA, 188 bp, Enterococcus faecalis
cgcaccaacttttgtagattcgccacctactaagataaccttcgtcaaaaacaactttctcgccagcctcaacgtttaatttttcaacgtagattgcttgacctacttcaactttcacttgtttaccaccagttttgataattgcgtacatgctatacagcacctgcttcttctagacttagactcgc

SEQ ID NO: 788 - DNA, 360 bp, Enterococcus faecalis
ccttggttttccatcactgttttcacgtcagcaaagtccaagtttacgtaacctggtgcagtgattaaatctgaaattccttgaacaccttgacgtaatacattatcagcttctctaaatgcttcaagcattggcagttttcttgtcaacgacttctaataagcggttgtttgagataattagtagtgtatcaacgttttcttttaataaggcaattccttcagcggcaaaacgaccacgttttggaccttcaaaactaaatggacgagttactacaccaactgttaaagcgcctaattctttagcgatttttgcaactactggggcagcacctgtaccagttccgccacccataccagc

SEQ ID NO: 789 - DNA, 208 bp, Enterococcus faecalis; identical to SEQ ID NO: 353

SEQ ID NO: 790 - DNA, 138 bp, Enterococcus faecalis
gcttcaggtacttcttgtgctttaccagtaccgaaaccaacagtgtccagtttttgtcaccgacaacaacctaaagctgcgaaacagtaaacgacagtccacctttaacaacttttgttacacaggttgatcgctaca

SEQ ID NO: 791 - DNA, 133 bp, Enterococcus faecalis
ccgtagttcatcaggaatcttattccattgtcctttacgtaccgtttccataatcttaaaggccatcccactgtccaaaccagcatgaattaaataaaccatgatatcatcccgacaaccaattacttcagca

SEQ ID NO: 792 - DNA, 135 bp, Enterococcus faecalis
ggtaaacgagtgaagctaccttctaatttttcagtgtcaaagcttacgaatgcctggacagtccaacagttgccttcaaccagccttctttaattgttgagatgttttgagatttttcacgaacaccgatcactt

SEQ ID NO: 793 - DNA, 299 bp, Enterococcus faecalis
caaaatggggcatcacttctgcaccggtcaatttaaatccagtttcgacaatttttgccgaaagatttttttcccagtaatcacgatgaactgcagaagggacttctagccacaattgattgttgtctaatttcaaagggcgtgtggttttaatccaagcatcaaaacttggcgccgacaaaatcgcttgataggcttcttcaaggctatgccaaaaactttccacgtcgggcatacagtgacctcctatatgtttaaattttggttatctaaaaaatgtggataacttaaaagaatga

SEQ ID NO: 794 - DNA, 311 bp, Enterococcus faecalis; identical to SEQ ID NO: 480

SEQ ID NO: 795 - DNA, 92 bp, Enterococcus faecalis
attacgaaatctccagtatccacatgtggtgtgaatgttggtttatttttaccacgtagtacagaagcaacaacctgctgatagacgtccta

SEQ ID NO: 796 - DNA, 175 bp, Enterococcus faecalis
aactgtatcagaaggttgcagcacctttagataaccaatctaaaactaaatcttcttttaaaactacttctgcagggtctttcagagggttgtaagtacctacagtttcgatgaaacgtccatcacgaggagaacgagaatcagctactacaatacggtaaaaaggactcttttt

SEQ ID NO: 797 - DNA, 360 bp, Enterococcus faecalis
ccttggttttccatcactgttttcacgtcagcaaagtccaagtttacagtaacctggtgcagtgattaaatctgaaattccttgaacaccttgacgtaatacattatcagcttctctaaatgcttcaagcattggcgttttcttgtcaacgacttctaataagcggttgtttgagataattagtagtgtatcaacgttttcttttaataaggcaattccttcagcggcaaaacgaccacgttttggaccttcaaaactaaatggacgagttactacaccaactgttaaagcgcctaattctttagcgatttttgcaactactggggcagcacctgtaccagttccgccacccataccagc

SEQ ID NO: 798 - DNA, 247 bp, Enterococcus faecalis
tctttgattgcttcttgtgcttgttttttagttcctacgaataaagcaacagccgccttcttctgcaacagtttttcatgtaatcgtaagcctgcatctactaatttcacctgttttttgtaagtcaatgatgtagataccgtttctttctgtgaagatatatttcttcatttttgggttccagcgacgagtttggtgaccaaagtgtacgccggcttctagtaattgtttcatagaaattacctgc

SEQ ID NO: 799 - DNA, 92 bp, Enterococcus faecalis; identical to SEQ ID NO: 795

SEQ ID NO: 800 - DNA, 220 bp, Enterococcus faecalis
  misc_feature (12)..(12): n=g, a, t or c
taataccaagancttccagcccattgtggcatagtattcgtttcacagttttcccttcatgccagtttcagggtcgacgacattgacccattcatcaatgtttgctaatggcgattccccagttccacttgggcgaatatccgatgttactggtaaacgtagaggtaacctcagattcaggaaccgttgtggttgttccatcttcccaatggatcacagg

SEQ ID NO: 801 - DNA, 138 bp, Enterococcus faecalis
gggatgctgcccagtcgtccgtttaacccctgttgaacctttggctaagcgatcaatttcagcaccacgcaaatgtaaattatgatctctttcatatcctttaacaaagccatacgctgttttgtcggctactgtacc

SEQ ID NO: 802 - DNA, 249 bp, Enterococcus faecalis
tatcccaaacttcatcttcgccacgttcgattttacagtttcgcatttttaatgtttgtcgcaatttcacgttgtacctaattcacgcattacaaatggtttgaataattcaatcgccatttcttttggtaaaccacattggtacatttttaagaacggaccaacgacgattacggaacgaccagaatagtcaacacgtttacctagtaagttttgacggaaacgaccttgtttccctttcaacatgtg

SEQ ID NO: 803 - DNA, 112 bp, Enterococcus faecalis
tgccatatacgtgtgcgctattcccgtcggacaacctgtagcagcctattaattgataccgtagccatctgtttattcctcctcttgaatctttatttgttgctctaactcc

SEQ ID NO: 804 - DNA, 71 bp, Enterococcus faecalis
gctgctccacctgctgctggtccagctacctgctacaggagctgctgctgatacgtcaaatttttcttcga

SEQ ID NO: 805 - DNA, 127 bp, Enterococcus faecalis; identical to SEQ ID NO: 702

SEQ ID NO: 806 - DNA, 221 bp, Enterococcus faecalis
tcctacgaataaagcaacgccgccttcttctgcaacgtttttcatgtaatcgtaagcctgcatctacctaatttcacctgttttttgtaagtcaatgatgtagataccgtttctttctgtgaagatatatttcttcatttttgggttccagcgacgagtttggtgaccaaagtgtacgccggcttctagtaattgtttcatagaaattactgccatgttgt

SEQ ID NO: 807 - DNA, 116 bp, Enterococcus faecalis
tgaaacgaactgagaagctacttctttgagtaagtgtggaataaaaattattctacgatgatacccatgcttcgtgcagttcctgcaaccatgcgcattgctgcttcaacgtcagc

SEQ ID NO: 808 - DNA, 173 bp, Enterococcus faecalis
tgcatttgtccagaaacagcaattcgaattggcataaacaagtttttgcctttaacgccggtttctttttggacggctttaatcgctgctttaatacttgggacatcgaaaacgtccaaggcttctaattgttctttaaacgcatgtaacacagttggcactgtttctccttg

SEQ ID NO: 809 - DNA, 183 bp, Enterococcus faecalis
tccacgccattgtggtgaacggattgaaccttgacgagcacgaccagttcctttttgacgccatggtttgcaggccaccgccacagaacagcagcctacaggtttttaacctgcgtgtgttccttgtcttaatgaagcacgttgcatgatgattgcatcatagacaacactttcattaggttc

SEQ ID NO: 810 - DNA, 180 bp, Enterococcus faecalis; identical to SEQ ID NO: 764

SEQ ID NO: 811 - DNA, 181 bp, Enterococcus faecalis
taaattcacggcctcttaataagccagaacgagggcagtttttcatcacgatattttgtttgaatttggtataaattcaaaggtaatcgtttgtaagaattgatttcatcacgaattaattctgtgaaggtttcttcatgcgttgggcctaagatatagtcacggtcattgcgatctttta

SEQ ID NO: 812 - DNA, 131 bp, Enterococcus faecalis
aattgacgttcttcttcttgtaaaagttgatacagccttctttactcgtcactgcttcaatacaggcagtacctcctgcaccaattccagattcagaaacaattttgaaaatcccgatatcttctgtatta

SEQ ID NO: 813 - DNA, 279 bp, Enterococcus faecalis
tcattacttgttcttttgctgatttaaataaagtatgttttgatccgtagtagcctttcgctaacttaaggacttttttacgacgtttacagggttacctgttccacctttaacacgtgccatgttgaattcctcctaatatcttgtttctcttgacggtaatctaaaagtcaccgagttgttttatttcattcttgctaattgttggcggatacgtttgtaatcgccttttgcaaccatgcttgctttacgcaattgacggcgttgttttttagtttt

SEQ ID NO: 814 - DNA, 294 bp, Enterococcus faecalis
cagcagtaccagagattttgttacgtacacgacgatgtctcttttgacgtgttttgtttttatctggttttgtaatcacaattttcacctctttgatttaatgtttactactaatatttcaagcagtcagcagattacggaaaagagaagctggcagacaagacaaaagcattttattggaaaaatcccataaaatgacagttgcttgttgttgacttctgttttctacacagctgttattatttaccagttttaccttctttacggcgtacaaattcaccaacatagcgaatc

SEQ ID NO: 815 - DNA, 187 bp, Enterococcus faecalis
acacggtattgacgtttgtgaccgccaccttggtgacgaaccgtaatgcgaccagttgttgttacgaccggcattgttttttaatggcctgtaacaatgatttttctggtgttgaagttgtgatttcagcgaaatcagaacttgtcatgttacgacggccatttgtggtaggtttgtactttttaat

SEQ ID NO: 816 - DNA, 146 bp, Enterococcus faecalis
ccttcaaaaatacgcatcaccttctggatcgtctgttgggatggtttttggctcaatcccagataaatcttgtaacatccgaatcacggtcggatcatcatgtcctagaatatcaagttttaaaatattatcgtgaatggaatgga

SEQ ID NO: 817 - DNA, 135 bp, Enterococcus faecalis
tgtggttttacggagtacaattatttaaagcgataagtaatacggccacgcgttaaatcatacggtgataattcaacctgttactttgtcaccaggtaagatacggatgtagtgcatacggattttacctgaaac

SEQ ID NO: 818 - DNA, 166 bp, Enterococcus faecalis
tccagaaacagcaattcgaattggcataaacaagtttttgcctttaacgccggtttctttttggacggcctttaatcgctgctttaatacttgggacatcgaaaacgtccaaggcttctaattgttctttaaacgcatgtaacacagttggcactgtttctccttg

SEQ ID NO: 819 - DNA, 221 bp, Enterococcus faecalis
taattgaggtgatttaactaatgtagcaatctctttcaattgacagttcttcttcttgtaaaagttgatacgccttctttactcgtcactgcttcaatacaggcgtactcctgcaccaattccagattcagaaacaattttgaaaatcccgatatcttctgtattagcaacgtgtgttccaccacataattcgatagagtaatccccaatattaactacac

SEQ ID NO: 820 - DNA, 152 bp, Enterococcus faecalis; identical to SEQ ID NO: 762

SEQ ID NO: 821 - DNA, 234 bp, Enterococcus faecalis; identical to SEQ ID NO: 715

SEQ ID NO: 822 - DNA, 206 bp, Enterococcus faecalis; identical to SEQ ID NO: 642

SEQ ID NO: 823 - DNA, 221 bp, Enterococcus faecalis; identical to SEQ ID NO: 806

SEQ ID NO: 824 - DNA, 134 bp, Enterococcus faecalis
caactgttactttgtcaccaggtaagatacggatgtagtgcatacggattttacctgaaacagtagcaagaacttggtgtccattttctagttcgactttaaacattgcattcggcaaagtttctacgactgta

SEQ ID NO: 825 - DNA, 152 bp, Enterococcus faecalis
cacagataatgtttgcagtaagtcttcccagacattttttacattcattaaatgtgttctagtcgcttcgtttaggacttgatatacgcagttctgtgggtacgcggaacgaactttttggcgcttgtggtcgtgcttgttgacgtggcgca

SEQ ID NO: 826 - DNA, 228 bp, Enterococcus faecalis
tttagaacagtagctacctgcataaactaacgctaagcagtgcctctttttgagcatcttcatccaaaatccgaacatgggcataatatttattgaacgccttgtgctaaatgaatgctatgtttcgcaataacagatggttcatatttttcagcagcttgcatcacagtttcagggaatttttgtaacaacttcacgacttcccagctatccttgtcatttagtgca

SEQ ID NO: 827 - DNA, 262 bp, Enterococcus faecalis
cccaaaaggcaacctggttaataacgaatgaggtaggtgaaaaacctttcattacttgtaatgcggatgtggaacctatataccataatcaatcccacgataccttaaaattaaatatggaataaaaatactatagtctagcaaatgccgtttctttactttgtttggcaaagcttaaccctccttgccaatctcgtttttttcttgtgtttcttcataaacatctgtatataattgattcaattcgcgttctaaatcactt

SEQ ID NO: 828 - DNA, 113 bp, Enterococcus faecalis
tatgcaagacaaaaaaagctgaatccggagattcagctttttaatcgtattagttagcctacctggataaactgataccttgttttttgtcgcaggcctttacgttcgaaacg

SEQ ID NO: 829 - DNA, 116 bp, Enterococcus faecalis; identical to SEQ ID NO: 464

SEQ ID NO: 830 - DNA, 227 bp, Enterococcus faecalis; identical to SEQ ID NO: 556

SEQ ID NO: 831 - DNA, 362 bp, Enterococcus faecalis
ccttggttttccatcacctgttttcacagtcagcaaagtccaagtttacagtaacctggtgcagtgattaaatctgaaattccttgaacaccttgacgtaatacattatcagcttctctaaatgcttcaagcattggcgttttcttgtcaacgacttctaataagcggttgtttgagataattagtagtgtatcaacgttttcttttaataaggcaattccttcagcggcaaaacgaccacgttttggaccttcaaaactaaatggacgagttactacaccaactgttaaagcgcctaattctttagcgatttttgcaactactggggcagcacctgtaccagttccgccacccataccagc

SEQ ID NO: 832 - DNA, 194 bp, Enterococcus faecalis
taagcggattaatacgtatttgccttctttaccaagtaccttgcgcgccttgttccagcctgaacaggattaattgtccacctttaccaggtttcatttcaatgttgtggataacctgtaccaactggaatgttttccaatggtaatgcgttacctactttaatatctgcttctggaccagatactaggcgcat

SEQ ID NO: 833 - DNA, 148 bp, Enterococcus faecalis
tccaaggcagaggcaccttgctagcagtcacacccgctacgtcatcaatgacttgcagcagtagatgtttttgttagaacggaaaatgttcaagcagtgggcacctcagcagtaccagagattttgttacgtacacgacgatgtctct

SEQ ID NO: 834 - DNA, 137 bp, Enterococcus faecalis; identical to SEQ ID NO: 753

SEQ ID NO: 835 - DNA, 138 bp, Enterococcus faecalis
ccatcacggtcgcatcataaattgggtcaaaattgtgtaacatttttgagccagcctgttgttaaaatatcttttgtgacaatgttgtctttaatcccaattggaatcccagctaatggattactttcagtgatgcct

SEQ ID NO: 836 - DNA, 275 bp, Enterococcus faecalis; identical to SEQ ID NO: 441

SEQ ID NO: 837 - DNA, 91 bp, Enterococcus faecalis
gacaaaatacgcttcaaagccctgtgcattgatttcacgaataacagggagcaggccttctttaaattcgtttggaatagttgtcaatttc

SEQ ID NO: 838 - DNA, 166 bp, Enterococcus faecalis
gcactgatattcaggacaaaggccacagcaatcgaaataatcatgcaaactattcccaccttgactcaagaacgggaaagtaattcctgttaatggaataatcccagtaatcccaccaacattaataaagacttgaattaataacattgtaccaattccaatacac

SEQ ID NO: 839 - DNA, 155 bp, Enterococcus faecalis
gaaacaattagtaattgagcaatatctgcatcaacagcctgtcattaattgacgaatttgttcatttggataaacaggtcacctttagccttctaacgatttaccgattaatttagaatgacgagcttcttccaacgcttttaagacattgtcac

SEQ ID NO: 840 - DNA, 117 bp, Enterococcus faecalis
cagctccaccgtatacagttcaatttagtaaattgtttacagtcctaaagtgtttttaggtagcataccttttacagaagtttcgataagacggcgagagtttttgtcgcgtaattc

SEQ ID NO: 841 - DNA, 203 bp, Enterococcus faecalis; identical to SEQ ID NO: 565

SEQ ID NO: 842 - DNA, 141 bp, Enterococcus faecalis
tctttaccaagtacttgcgcgcttgttccagcctgaacggattaattgtccacctttaccaggtttcatttcaatgttgtggataacctgtaccaactggaatgttttccaatggtaatgcagttacctactttaatatct

SEQ ID NO: 843 - DNA, 571 bp, Enterococcus faecalis
tactgcgttaattttcctgttaaaacaacctgttttgtctttgaaaggtgactccaccttctgctaattgttctgtccggagacctttatatgtcaagttcaccttgggctttttccagttcagccattaattcatgaacttcctcattttcaaaatacgtcacaacgcctgtctgcgattgtttcgccaattgaatccaaagccacaatttcttccgcagttgcacgacttaaggttggtaaatcaccaaaatgctccgctaaaattttcgccgctttcgcacccacatggcgaatccctaagccaaaaatcaaacgttcgacagagttttctttactcccttgaatggcagtataaatgttgtttgctgatttttctttgattttatccaaagtcattaattgttcttctgttaagaaatacagatccgctacgtctttcactaatcctttgtcatacatttgtgctaacactcgtggccccaagccatcaatgttcattgcgtttcgtgagacaaagtgattcagcccttctttaatttgcgcagggcattttggattaatacaacgt

SEQ ID NO: 844 - DNA, 130 bp, Enterococcus faecalis
cgagactcttcgtcagtgttcgctgttgtaacaattacgatgtccataccagcgtactttatctacctaaatcataatcaaccttctgggaagattaattgttctttaatacctaaagtatagttaccac

SEQ ID NO: 845 - DNA, 200 bp, Enterococcus faecalis
tcgttgcttcaattacacagttcttcgccgctcgctacaccaattcccattaaagctgttccttggttttccatcactgttttcacgtcagcaaagtccaagtttacgtaacctggtgcagtgattaaatctgaaattccttgaacaccttgacgtaatacattatcagcttctctaaatgcttcaagcattggcgtttt

SEQ ID NO: 846 - DNA, 233 bp, Enterococcus faecalis
cccacatcaacggttcgtttaaaaatttgcttaatctcttctggataggcacttgtcgcaatatcgacatcatggattggtttatttaataaagcatcacaggacgcctgcccccgacaaaatacagccttcaaagccctgtgcattgatttcacgaataacgggagcaggcttctttaaattcgtttggaatagttgtcaatttcatagcatctgttccaatccgtaaagta

SEQ ID NO: 847 - DNA, 169 bp, Enterococcus faecalis
tgcttaaagcgtcttttgcttgttcagctaacgctgtaaatgctgctgcatcgttaacggctaagtcagctaacattttgcggttgatatcaatctctgccaatttcaaaccgtgcattaatttagaatagcttaagccattcatgcgagctgccgcgttgatacgtgc

SEQ ID NO: 848 - DNA, 120 bp, Enterococcus faecalis
tacttgtgccaatgcttcaataatcaaaacgcctggcattgttggatttccagggaaatgtccttggaaaaattcttcgttaattgttacattttttgttgcaataatcttttcatttgg

SEQ ID NO: 849 - DNA, 274 bp, Enterococcus faecalis
gatgcctttaacgataacttgtgtgttcgcaggtaccttcaaatgttacgccttctggtgctgtcatttcgacaggatgagaataaccaacgtttaaagttaatttgttgccttgtacttgggcacggtatccgaccccgataagttcaagtgctttttggaaaccttcagaaacaccaacaaccatgttgttgaagtttgcacgagttgttccgtggattgttttcatttcttttgaatcgtttggacgagtgaatgtcacttcgtttccttc

SEQ ID NO: 850 - DNA, 247 bp, Enterococcus faecalis
agtaaaggctaagacaccattgccatcaggagaaggatcgccttcttgaacaaagcgtaaatcttcgtaactaattggttggaaatcacgatctggatttacatttgtcaaatgatagccatcttcgttagctccaacaatggcgttggctaaatcttgaacagctaaatctgcataaattttaacatcttcggaaacattgactggaccaattgaaccaaagccagctcctaagacacggcgagca

SEQ ID NO: 851 - DNA, 180 bp, Enterococcus faecalis
gtctaagccaccagtaatgtttaataagacttgttccgcaccatcgattgatgtttctaacaatggtgaagaaatagccttttttcgttgcttcaattacacgttcttcgccgctcgctacaccaattcccattaaagctgttccttggttttccatcactgttttcacgtcagcaaagt

SEQ ID NO: 852 - DNA, 150 bp, Enterococcus faecalis
agcaggtaagctttagcaacagcaacgccatcacttgcggcaatcccttttagcatctcagacattattcagccaatccttctttttgtaatgtttcaacgattgctgccattccttcagcttcgtcagcaccatcaacagtgattgtta

SEQ ID NO: 853 - DNA, 254 bp, Enterococcus faecalis
taatatcttctccattaatagttgcaaaggcttgaacgcggaccaaagcaccctctaattcacggatgttggaatcaatttgaccagcgatataacttagtgtatcatccggaatttctaaacgctcggcatctgcttttttgcgcaaaattgcaatccgtgtttctaaatcaggcggggtgatatcgacagacaaaccccaagcaaagcgagaaactaatcgttcaggtaattttggaatatcattcggcggg

SEQ ID NO: 854 - DNA, 158 bp, Enterococcus faecalis
tacagttacgtccactgtccgcacatcaccaaaataatcataaccccaaacggtttgtaacaaatgttcacgagtcatcacttgtccgatatgttttgctaagtaataaagtaactcaaattcacggtgggttaattcaattttttcaccccgttttg

SEQ ID NO: 855 - DNA, 142 bp, Enterococcus faecalis
tacatacattcctgtttttgccatgaacggaattcctcctcctattaattccaatatctaagcggacaaaggcgtccgtttaactatctcttttttagtattattcacttcttccaattttaccataaaaatgggggtttta

SEQ ID NO: 856 - DNA, 121 bp, Enterococcus faecalis
aacaatatttactaatttatctggaacagcaatcactttgcgcactgtttttccttcaataaattctttaacagcttcatggttcattgcaatttgttctaattcttctttgcttaaccca

SEQ ID NO: 857 - DNA, 131 bp, Enterococcus faecalis
ttcaggtaagatagtattgcctaacgatttactcatcttacggccttcgccatcgagaaccatcccttgagaaatgattgatttataaggcgctaccccattgatagcaacacttgttgtaatacttgagt

SEQ ID NO: 858 - DNA, 150 bp, Enterococcus faecalis
tgcttccatcccaacatacatttcgcccgtttctttgtgataccaagcaggaatttggtggccccaccataattgtcgcgaaataacccagtcatgaatattttccatccaacgtaaaaatgtttgattgaagcgtggtggataaaattc

SEQ ID NO: 859 - DNA, 173 bp, Enterococcus faecalis
tacttgttctaatgaagattcatcaacttttggacgtgtattttgttctctgcgaatatcccaatcgccaaaagcacttgcttcttcttgtgattttggttgatccatttccacagattgagttgtttgttgcattggttgaaccgcttgtcttgtttgacggtgcggttttc

SEQ ID NO: 860 - DNA, 183 bp, Enterococcus faecalis
tcgatgattttagctggtgctactacatcgtcgttgctgaatgcgacagcagttgggcctgtaaagacttcgtctaagccgtctaaaccaacttttttagctgcacgagaaaggattgagtttttgatgactttcatttctacgcctgcatcacgtaattgtttacgtaagttagtgacttct

SEQ ID NO: 861 - DNA, 124 bp, Enterococcus faecalis
ctacgtggacttctaatccaatgacagtttcaaagttcattaatcgttcccccctaaaatgactggttttttcgtatggaaatctgtcgcttgttcaaaagcataggctgctttatacattgta

SEQ ID NO: 862 - DNA, 96 bp, Enterococcus faecalis
tgacggtgcggttttctatccttttttgattcatcaatacctgtagcgattactgttacacgaatttcgtcgcctaaatcttcattgattgatgta

SEQ ID NO: 863 - DNA, 214 bp, Enterococcus faecalis
accattacacggttgattaagcgagttactaattttgagttataaattggatctggtaaaacatcacgttttgcaacaggacctttacgaggcatccgtaactcctccttccgaaatatgatttttcaagttgttattgtcttattataattaagctttaggacgttttgtaccgtatttagagcggctttgtttacggtcgttaacaccggca

SEQ ID NO: 864 - DNA, 114 bp, Enterococcus faecalis
tagttgtaaccttcccatgtcatgaaggcaaccaagacgttttgccctaaagccatttcgccttcttccatagaaggtccatccgctaaagtatcgcctttttcaactttttca

SEQ ID NO: 865 - DNA, 257 bp, Enterococcus faecalis
aaagattttttcgctccaggaatgtttcctttgattaagataacatttctttctacgtccactttaacaacttcaaggttttgaattgttacgcggtcgccacccatacggccggctagtcgtttatttttaaatacacggttaggcgctactggacccattgacccaggacgacggtgataacgagaaccatgagacataggtccgcggctttggccgtgacgtttgattgccccttggaatcctttacctttcgt

SEQ ID NO: 866 - DNA, 124 bp, Enterococcus faecalis; identical to SEQ ID NO: 861

SEQ ID NO: 867 - DNA, 127 bp, Enterococcus faecalis
tgctgtcatttctttgaaccaacgaccgcttttcttaatggtccgtttcgcatcatcatctaaatccacagcgatgaagccataacagatttttataggcattgagccaagaccagttatccataca

SEQ ID NO: 868 - DNA, 171 bp, Enterococcus faecalis
ttcagctccgattggaatttgaattggatgagcgtttgcttgtaaacgatcatgtaatgattctactgaatagaagaagtccgcaccgattttatccattttgttacagaatacaatacgaggaactttatattcagtcgcttgacgccaaacagtttctgtttgaggttc

SEQ ID NO: 869 - DNA, 241 bp, Enterococcus faecalis
ggatgacgttctgtttgttcaaacaagaaaggctgtaaagcggtcgtcatggcttcgcctaattttgcttcggtacagtttttatctttcattgcttcacgtagagcattgaataaaagacgttggccttcatgaatcatatcaccagactcacgcatgtagacaaaaccacgggaaagaatgtctggaccagccataatttctttatttttaatatcaactgttgctaccgctaaaacta

SEQ ID NO: 870 - DNA, 99 bp, Enterococcus faecalis
tgctgtcgagcgccaaggcattaatcgtaaaatctcgccgttttaagtcttctttcaaggagcgaacaaaggtgacttcatctggtcgacgaaagtctt

SEQ ID NO: 871 - DNA, 267 bp, Enterococcus faecalis
gcctaattgaatcactgtttctgcttttgaatgttttaatgcttgaacgtctgtattggctgtgataaattccacacctttaacgttttcttcgatcatacggtttacagcgtttccgccgccgccacctacaccgataactttaatgactgcaccgttgttaatgttattgtctaatgaaaattccatgatatcgtatcctcctgtttgtgtgattagtcgaaaatgttcgagaagaagtctttgattttgcctgtcactttttca

SEQ ID NO: 872 - DNA, 228 bp, Enterococcus faecalis
attgttactccgctttaaagcctggtacaaaaatccaaagtgatttttgcaccaggctttacttttaatctgttttactttactcatcactcaactttttaaaaaaattattgttttgtttagctcgaaaaataacaataaccaaaaataagtttgttatctaaaattcactacactacttaatacagtccatctgcttcttcttttgtcacaatgtaaatatttttc

SEQ ID NO: 873 - DNA, 100 bp, Enterococcus faecalis
cttctttactcgtcactgcttcaatacggcgtactcctgcaccaattccagattcagaaacaattttgaaaatcccgatatcttctgtattagcaacgtg

SEQ ID NO: 874 - DNA, 254 bp, Enterococcus faecalis; identical to SEQ ID NO: 853

SEQ ID NO: 875 - DNA, 192 bp, Enterococcus faecalis
ccaaagacaggtggtgtccattcaaacgcttcgtaaatcattaattgttttggtgtgttcgcaatgtgatcatcgccacgtaaaacgtgagaaattttcattaagtgatcatctactgcaacggcaaagttatacgttggcatcccatcgcgtttttggatgacaaaatcgccaccaatgttatctgactca

SEQ ID NO: 876 - DNA, 111 bp, Enterococcus faecalis
tcaaaactaaatggacgagttactacaccaactgttaaagcgcctaattctttagcgatttttgcaactactggggcagcacctgtaccagttccgccacccataccagca

SEQ ID NO: 877 - DNA, 111 bp, Enterococcus faecalis
ccattcttgttccctcctatcaaattcgtttagaatggtaaatcatcatctgaaatgtcgatagatgaacctgagccaccaaatggatcagaatctttatcgaaatcaggc

SEQ ID NO: 878 - DNA, 230 bp, Enterococcus faecalis
tccctttcaacatgtgagaaagagatttcaatggacggttacctggtccagtaactggacggccacgacgaccattatcgattaaagcatcgaccgcttcttgtaacatccgtttttcgttttgaacaatgatgcttggcgcatttaagtctaataaacgttttagacggttgttacggttgataacacggcggtataagtcgtttaagtcacttgttgcaaaacgacca

SEQ ID NO: 879 - DNA, 164 bp, Enterococcus faecalis
atctatgcaacgtaggtgcccggttaagtaaaactgggtgttcttggataacttcttctaagatatcccaaacttcatcttcgccacgttcgattttacgtttcgcatttttaatgtttgtcgcaatttcacgttgtactaattcacgcattacaaatggtttg

SEQ ID NO: 880 - DNA, 271 bp, Enterococcus faecalis
gttcccacatacaagaattctgttgcaggtgcttcttttttgacgtgttcgacgaaggataacgcaggatagatatgcccacctgtgccaccaccagttactagtatcttcattttctcacatttcactttcttttaattgttgaacagcttgcataaaggcttccccgcgtacttcaaaattcgggtattggtcccaacttgcgcaagcaggtgatagtaaaatagtatcatctttttccgaataatcaaaggcaatggtaaccgccgtt

SEQ ID NO: 881 - DNA, 228 bp, Enterococcus faecalis; identical to SEQ ID NO: 872

SEQ ID NO: 882 - DNA, 176 bp, Enterococcus faecalis
aaggcatccgcaatccctgctggatttttcccaccagcttgagccatatcaggacgaccaccgccgccaccgccaacttttggcgcaattgctttgattaagtcaccggcttttaagccttttccgttcatgtcttttgtcatagccgctaacaagcttactttttcatcttgtgc

SEQ ID NO: 883 - DNA, 131 bp, Enterococcus faecalis
tgatacctgcttgacctaacgctggacctactggtggagctggtgttgctttccccgcaggaatttgtaatttaacgattttttctacttttttagccacgaaaatacctccttaagttctcgtgcgtggt

SEQ ID NO: 884 - DNA, 147 bp, Enterococcus faecalis
tacacggttgatcgctacaacgcggtcttctaattccaaatgttttggatcaatataaaccatgaatggtgttcctccttctcctaaaattctagtccattttcacgagcagcttcagctaaagcttgcacgcggccatggtaaagg

SEQ ID NO: 885 - DNA, 132 bp, Enterococcus faecalis
acaactaaagctgcgaaacgtaaacgacgtccacctttaacaacttttgttacacggttgatcgctacaacgcggtcttctaattccaaatgttttggatcaatataaaccatgaatggtgttcctccttct

SEQ ID NO: 886 - DNA, 126 bp, Enterococcus faecalis
taacatccgaatcacggtcggatcatcatgtcctagaatatcaagttttaaaatattatcgtgaatggaatggaaatcaaagtgcgtcgttttccattctgcctcttgatcatcagcagggtattg

SEQ ID NO: 887 - DNA, 212 bp, Enterococcus faecalis
tgctaagttttccaactgacttttctcgccgtcttcgatgttccgtttttggtcggtatcctcgatacgaatgataaattctccgtcattgtggcgggcaaataagtagttaaataatgctgttcttgcattcccaatgtgcaagtgtccagttggacttggtgcgtaacgcacacgaactttcgtcatgttcattcctctttccatttttt

SEQ ID NO: 888 - DNA, 290 bp, Enterococcus faecalis
cctttgcctttataaggttctggaggacgaacgccacggatgttagcagctaattcaccaacaacttctttgttgatgcctttaacgataacttgtgtgttcgcaggtacttcaaatgttacgccttctggtgctgtcatttcgacaggatgagaataaccaacgtttaaagttaatttgttgccttgtacttgggcacggtatccgaccccgataagttcaagtgctttttggaaaccttcagaaacaccaacaaccatgttgttgaagtttgcacgagttgttccgtg

SEQ ID NO: 889 - DNA, 168 bp, Enterococcus faecalis
tgccgtaaaatcaggaacagaaacgcctgcagaagtgccgtctttttcgtcataaccactaattgcatttaaagctaaggcattgtctttaacatttcgtgtcaatggaccaatttggtctaaatttgaagcaaaagcaatcaaaccaaaacgagatacacgtccata

SEQ ID NO: 890 - DNA, 101 bp, Enterococcus faecalis
gcttcgcgaattttttcaatcaattcttttttatcgcctgcaaagttaaaggctgcaggttttgataaaatgccacttgcttttacgcgttcttctttgta

SEQ ID NO: 891 - DNA, 197 bp, Enterococcus faecalis
cgcctactgaacggatacgacgattacctaagtggtcgatgtcatcgacattgccgatatcttccattaagttgaagaagtagctcattgaagcaacgatatctgctggacgaactgtttttacgctgtcgtctggatagccgttaccaatcacatttacgatacgttcaggatcttttggtgaaagaacttgaatc

SEQ ID NO: 892 - DNA, 236 bp, Enterococcus faecalis
tcctttggcaaagttactcatttcaaatacgcccattggtccattccaaacaactgttttcgcaccttgtaattcgttagcgaataattcaattgttttttcaccaatatccaagccttcttcatcatctgggatttcagttgaaggaaccgtgtggaaaggagcgtcattgctgaactctttagagacaactgtatcaaccggtaaaactaatttgtcgccagctttttccatta

SEQ ID NO: 893 - DNA, 178 bp, Enterococcus faecalis
tgtttaaatgatttagttctttttattaatgaaagcttccgcaagggcaaagtctcctgcgtaaggttcatctacgccgtttactttttgataaaggtcggcgcctttaccagctaagacaatcgcatcatcagccgttgtgcttaaagataatgcgtgagcaattgcttcgccacga

SEQ ID NO: 894 - DNA, 106 bp, Enterococcus faecalis
ttgtgtattttttagaattaccatacgtaggcgattacttcgccgccgatatttttcgctctagccttctttgtcagtaattacaccctctgatgtagagatgatt

SEQ ID NO: 895 - DNA, 292 bp, Enterococcus faecalis
caccacccatttcctcacgttttacgatcttagtttttaccggcaatttgtgagatgcaagacgaagagcttcacgagctacttcttcaggaacgcctgcgatttcaaacatgattttaccacgtttaactggtgatacccagccttctggtgcccctttacctttacccatacgtacgccgatagctttacttgtgtaagacttgtgagggaaaattttaatccatactttcccgccacgtttcatgtaacgagtcattgcaatacgggctgcttcgatttgacggttagt

SEQ ID NO: 896 - DNA, 255 bp, Enterococcus faecalis
taatatcttctccattaatagttgcaaaggcttgaacgcggaccaaagcaccctctaattcacggatgttggaatcaatttgaccagcgatataaccttagtgtatcatccggaatttctaaacgctcggcatctgcttttttgcgcaaaattgcaatccgtgtttctaaatcaggcggggtgatatcgacagacaaaccccaagcaaagcgagaaactaatcgttcaggtaattttggaatatcattcggcggg

SEQ ID NO: 897 - DNA, 135 bp, Enterococcus faecalis
tctactgcaacggcaaagttatacgttggcatcccatcgcgtttttggatgacaaaatcgccaccaatgttatctgactcaaaagtaatttcacctttcacgatgtcatcaaatttgtattctgtattacgtggc

SEQ ID NO: 898 - DNA, 246 bp, Enterococcus faecalis
caacgcggaatgatggatcttcttcagcaagtttttgtagagccacgcccattttatcttggtcagcttttgatttaggttcaacagcgacttggataactgggtcagggaattcaatagattcaagaataactggtgcatctaatgcacataatgtatcaccagttgttgtgtcttttagaccaacagcagcagcgatatcaccagagtacactttgtcaatttcttgacgagtgttggcgtgca

SEQ ID NO: 899 - DNA, 176 bp, Enterococcus faecalis
acgtactaattggttaattgtaggcattccttgttctcctccttccttacttcgcttctagttccacacatccaggtggttcttttttcgcgataaaaaataatgcaatctctgcactctttatcaaatatgctttgatagacagtcagcacgtccctataaggaacctgtagata

SEQ ID NO: 900 - DNA, 182 bp, Enterococcus faecalis
tgagaaaataagtccattcttttttgctctttgcgttctaaaacagcacttgggtcaaactctttcacttcaccagccaaagccaccccagtatcttcagaatcaaatttagtaattttgccaattcctagcttgccatccactagattatgccaaaattcttttacggtattgcctaatgg

SEQ ID NO: 901 - DNA, 163 bp, Enterococcus faecalis
cttcatagaactcagaatattgacactcaggacaataataatgtggcgctaaaggatttacttcagtaatccctgtcattgtcgcaacaaaactcgaaccgacagagccccgtgaaccaactaaatagccgtcttcattacttttatgcaccagtttttgaga

SEQ ID NO: 902 - DNA, 166 bp, Enterococcus faecalis
tgtttttttcatgtgtgtttaaatgatttagttctttttattaatgaaagcttccgcaagggcaaagtctcctgcgtaaggttcatctacgccgtttactttttgataaaggtcggcgcctttaccagctaagacaatcgcatcatcagccgttgtgcttaaagat

SEQ ID NO: 903 - DNA, 230 bp, Enterococcus faecalis; identical to SEQ ID NO: 878

SEQ ID NO: 904 - DNA, 166 bp, Enterococcus faecalis
cctcgtattttagcggcaagagcacagctcttgcggcgttctttctttaatgattgctttctggctcccaatttggtagaaatgtttcttgtaaaaagcttgtgtcatagtcacctgtcaaaacattgtcatgtgtaattaaatctaattggaattcggcattcgt

SEQ ID NO: 905 - DNA, 284 bp, Enterococcus faecalis
aaaccacggtagtccacgattacaactgatgctgctgattcaaatttctcagcggctgcttgaactagggtttcttttttagcgattgctgcttcacctcatttatttcacctcctgattttgatggtggagttggacttggtttacgttatgtaaagtagaagaatcaaatgaaacttcgctcacttcgttcgccaagtattgttttacatcggctttttttcaaaaagtcgtgtaaaacaacaaaactccatgccaccgtagacatagagggaccgaattgt

SEQ ID NO: 906 - DNA, 225 bp, Enterococcus faecalis
gttggaatccataacgaacggtttcttcctctaccacttcatcttcatataatgggaattcaggcgttacttccaacaagtcagctgttgcatttaataaaggttcaatacctttacgagtaaccccagaaattgggaaaataggtagctcatcggcatactcatcggtgcgttccttcgcaagttgctctttaaatttcgctaaattctcttctgcttcaggca

SEQ ID NO: 907 - DNA, 100 bp, Enterococcus faecalis
tagagatgattgcaattcctagaccgtttaatacttttggtacttcgtcagcttttacgtatgcacgtaaacctggtttagaaatacgttttaagtttgt

SEQ ID NO: 908 - DNA, 144 bp, Enterococcus faecalis
ccaacacgaaccccttctagtacgaccgcattcgctccaatgacaacctcgttttcaataaccacaggtgcggcacttggtggttcaatgacaccagctaaaaccgttcctgcgccaatatgacaatgcttccctacagttgca

SEQ ID NO: 909 - DNA, 171 bp, Enterococcus faecalis; identical to SEQ ID NO: 868

SEQ ID NO: 910 - DNA, 228 bp, Enterococcus faecalis
cgacaacggtcacacgtttcgccttctgctttttcaactaaaatagccatgtcttcaaattgaacagcttcactaggtgctacttcttttgatacttcaaagtcggaaacaattagtaattgagcaatatctgcatcaacagctgtcattaattgacgaatttgttcatttggataaacggtcactttagcttctaacgatttaccgattaatttagaatgacgagct

SEQ ID NO: 911 - DNA, 132 bp, Enterococcus faecalis
cataacgatgacggtgacgttcttggacaacatcttcatttccgtatgctgccgcagttttcgttccttttttcaatttacatggatataaacctaaacgtagtgtgccacctaaattctcgatgttttctt

SEQ ID NO: 912 - DNA, 166 bp, Enterococcus faecalis; identical to SEQ ID NO: 902

SEQ ID NO: 913 - DNA, 124 bp, Enterococcus faecalis; identical to SEQ ID NO: 861

SEQ ID NO: 914 - DNA, 152 bp, Enterococcus faecalis
aagtattcttttggtaaagcaattttcatgcctttgatgtcgccagttaaatctgccgtaaaatcaggaacagaaacgcctgcagaagtgccgtctttttcgtcataaccactaattgcatttaaagctaaggcattgtctttaacatttcg

SEQ ID NO: 915 - DNA, 224 bp, Enterococcus faecalis
gaccaaatgccgacattgctctatctacaaagtttgttcctggcaatttaccagcagattcaccacttaaacctgaatgctgtgctcgtaccaaaaccaaattttttcaaatactccatccatttttcatcacccattttttgttctagttttaccataccaatattactagaccaagaaatggcttgacgataattcaaatattctttgccgttcaaccgagt

SEQ ID NO: 916 - DNA, 230 bp, Enterococcus faecalis; identical to SEQ ID NO: 878

SEQ ID NO: 917 - DNA, 275 bp, Enterococcus faecalis
cccataccagagataactgtttcaccagtttcaacgtttgtttcaacgcggaatgatggatcttcttcagcaagtttttgtagagccacgcccattttatcttggtcagcttttgatttaggttcaacagcgacttggataactgggtcagggaattcaatagattcaagaataactggtgcatctaatgcacataatgtatcaccagttgttgtgtcttttagaccaacagcagcagcgatatcaccagagtacactttgtcaatttcttgacg

SEQ ID NO: 918 - DNA, 120 bp, Enterococcus faecalis
tacaccaattcccattaaagctgttccttggttttccatcactgttttcacgtcagcaaagtccaagtttactgtaaccttggtgcagtgattaaatctgaaattccttgaacaccttga

SEQ ID NO: 919 - DNA, 291 bp, Enterococcus faecalis
cctttgcctttataaggttctggaggacgaacgccacggatgttagcagctaattcaccaacaacttctttgttgatgcctttaactgataacttgtgtgttcgcaggtacttcaaatgttacgccttctggtgctgtcatttcgacaggatgagaataaccaacgtttaaagttaatttgttgccttgtacttgggcacggtatccgaccccgataagttcaagtgctttttggaaaccttcagaaacaccaacaaccatgttgttgaagtttgcacgagttgttccgtg

SEQ ID NO: 920 - DNA, 146 bp, Enterococcus faecalis
tgttgacgtggcgcatctgcttctttggcagctacaccgtgtttctttaattcagccagttctttcttcagttgcccgatttgattttgtaaatctgctaattctggatttccctctgcactaccatcttgattagctgtttctgg

SEQ ID NO: 921 - DNA, 116 bp, Enterococcus faecalis
cattttttcagttcgttgatctggttggcaccccattaaaataatcattgaacaaaataacccgacaactatctttttagttttcatttttcctccttttaaaactcattgaatta

SEQ ID NO: 922 - DNA, 261 bp, Enterococcus faecalis
tccgattggaatttgaattggatgagcgtttgcttgtaaacgatcatgtaatgattctactgaatagaagaagtccgcaccgattttatccattttgttacagaatacaatacgaggaactttatattcagtcgcttgacgccaaacagtttctgtttgaggttctacacctgattgagagtcaagaactgttaccgcaccatctaatacgcgtagagaacgttgtacttcaattgtgaagtccacgtgtcctggagtatc

SEQ ID NO: 923 - DNA, 175 bp, Enterococcus faecalis
ggttttcatctggcaagtcttttaagacaccattttcattcatgtattcaatcaatgttttagaaactttacctcgtgttgccaaatcttctttcgacaagaacggttgctcttctcgcgcagcgacaatggctttcgctacgttgaggcctaaacttggcactgctcggaaagg

SEQ ID NO: 924 - DNA, 107 bp, Enterococcus faecalis
cccatcgaaaacaggtgttgcgacgtgaatacctaattggcgagcagccatacctaagtgtaattcaagtacttgtccgatattcatacgagaaggtacccctaatg

SEQ ID NO: 925 - DNA, 219 bp, Enterococcus faecalis
taatcctaatcctagatcatgcaatttaagttttacttcttcaagagatttacgacctaaattacgtactttgatcatttctggttcagatttgtttgtaagttcttgtacagtattaatgcctgcacgttttaaacagttatatgaacgaactgataaatcaagttcttcaatcgtcatttctagcattttctctttttgagtttcttctttttccac

SEQ ID NO: 926 - DNA, 230 bp, Enterococcus faecalis; identical to SEQ ID NO: 878

SEQ ID NO: 927 - DNA, 227 bp, Enterococcus faecalis
gcgcaattctaacaccgttccgacagttgtttccccaactgataattggtccttcacagcttctttggctgtttgttcaatcatggcagctaaagcaggggttcctaaaacttctaagtcaccagaaccgagcattttagccgtttgtgattctttcaccaagaattcttttgtaaacatttctgttggcattatgctttctctccttttgaacgttgttttttggc

SEQ ID NO: 928 - DNA, 125 bp, Enterococcus faecalis
atacggattttacctgaaacagtagcaagaacttggtgtccattttctagttcgactttaaacattgcattcggcaaagtttcgacgactgtaccttcgacttcaatcatatcttcttttgccac

SEQ ID NO: 929 - DNA, 144 bp, Enterococcus faecalis
aactgtttcaccagtttcaacgtttgtttcaacgcggaatgatggatcttcttcagcaagtttttgtagagccacgcccattttatcttggtcagcttttgatttaggttcaacagcgacttggataactgggtcagggaattc

SEQ ID NO: 930 - DNA, 179 bp, Enterococcus faecalis
ggccgtgacgtttgattgccccttggaatcctttacctttcgtagtacctgtaacatcaacaacgtctcctgcttggaaaacatctactttgatttctttacctacttcatattctcctagctcaacattcttgaattctttaatgaagcgcttaggagccgtgtttgcttttgcaaca

SEQ ID NO: 931 - DNA, 183 bp, Enterococcus faecalis; identical to SEQ ID NO: 860

SEQ ID NO: 932 - DNA, 140 bp, Enterococcus faecalis
cataagactcgtcgccttctaaagctttcaaagcagaacctgcgataactggaacatcatcgcctgggaaatcgtattctgataataagtcacgaacttccatttctactaattctaataattcttcgtcatcaaccata

SEQ ID NO: 933 - DNA, 247 bp, Enterococcus faecalis; identical to SEQ ID NO: 850

SEQ ID NO: 934 - DNA, 204 bp, Enterococcus faecalis
ttctgtttcaataaacggagctaagccaccttgtcgattaacccctaaaagcatttttacaaattcaatcgtaatgcgttctactgaaattttttctaataaaggatgaaattcagcgatagcggctaaggttttttcttcaattttaaaatctaattggctagcaaagcgtaagccccgcatcattcgcagagcatcttcatg

SEQ ID NO: 935 - DNA, 132 bp, Enterococcus faecalis; identical to SEQ ID NO: 885

SEQ ID NO: 936 - DNA, 139 bp, Enterococcus faecalis
cgcagacctttttatcttccacgtaagcagtcgctttgccgatgccgacaaagtcacgtaatttgacgatttcaaaatgtaatttcaagacatcaccagggaccactttttgacggaatttggctttgttgataccgcc

SEQ ID NO: 937 - DNA, 145 bp, Enterococcus faecalis
tgcgataactggaacatcatcgcctgggaaatcgtattctgataataagtcacgaacttccatttctactaattctaataattcttcgtcatcaaccatatccattttgtttaagaatacaacgatgtatggtacaccaacgtta

SEQ ID NO: 938 - DNA, 324 bp, Enterococcus faecalis
aacctaattcacggtattgttcaataaattgtaaaattgtttcatcacgtttgctcaattttttgccagtttctgaattaatgattaaggtcatatggccaaagacaggtggtgtccattcaaacgcttcgtaaatcattaattgttttggtgtgttcgcaatgtgatcatcgccacgtaaaacgtgagaaattttcattaagtgatcatctactgcaacggcaaagttatacgttggcatcccatcgcgtttttggatgacaaaatcgccaccaatgttatctgactcaaaagtaatttcacctttcacgatgtcatcaaatt

SEQ ID NO: 939 - DNA, 114 bp, Enterococcus faecalis
gttcgattatagacgcgtttaacagctgtgagggtatcatcaatgatggataaatttcttaagcccaagaaatccattttcagaagaccaattttttcaacatcattcatagta

SEQ ID NO: 940 - DNA, 267 bp, Enterococcus faecalis
gaaccgacaacatctcctataaataatatacgcaaaaaggttcctcttctctttttaacatctcttgtttattatagttgttttcgctttgaaaagaaagttttggttttaaaagattaaaaaaagtgtctcaacgaacaatccttacaattgttcgttgagacactacacgcgatacttattcgctttttattttatttcgcatagtcaacggcacgtgtttcacggataaccgttactttgatatgtcctggataatccaagtca

SEQ ID NO: 941 - DNA, 141 bp, Enterococcus faecalis
cgagaatctttgtatttatgagtcgcacgaataactgtgtaaagtgagcgttctgttggtaatggaatcggacctgatacgtcagctccagttctttttgctgtttccacaattttatccgctgattgatctaaaatacgg

SEQ ID NO: 942 - DNA, 222 bp, Enterococcus faecalis
ggtgtgccactaaaccaggtaagcggacactatggattcgcagaccctcgaaatcagccccgcgtgcccctggtattgattctacctcttgcggattcccttgtttttttgctggccgaacttcttgaatcatttctgcagtttttatagccgttccgctcggtgcatccaatttgttatcatgatgtaattcaatgatttccacatccggaaaatactgtg

SEQ ID NO: 943 - DNA, 54 bp, Enterococcus faecalis
gcaggtttcataaggatacggccgccaccgaatacgccaattacttcgtgcggg

SEQ ID NO: 944 - DNA, 108 bp, Enterococcus faecalis
caccacgttcaacacggcctgtagcaacagtaccacgtccagtgattgagaatacgtcttcgactggcatcatgaatggtttgtcagtatcacgttctggagttggga

SEQ ID NO: 945 - DNA, 169 bp, Enterococcus faecalis; identical to SEQ ID NO: 847

SEQ ID NO: 946 - DNA, 185 bp, Enterococcus faecalis
gaagttccgttaattcatccatttgggctttaatttctgcatggtttcctttttctaaagcaaacgttgcttgcaagacaatacaatgtaattcttgaatttcactatgacgataacggaaattcaggtcttctttcgtcattgtttggatagttccatctgccaacagcacttctgcagattgg

SEQ ID NO: 947 - DNA, 118 bp, Enterococcus faecalis
tacaccaattcccattaaagctgttccttggttttccatcactgttttcacgtcagcaaagtccaagtttacgtaacctggtgcagtgattaaatctgaaattccttgaacaccttga

SEQ ID NO: 948 - DNA, 235 bp, Enterococcus faecalis
taagctacagtatgctcagctggattaaaatcactcgtattcgctaacaagaaacgcatagtattacggattttccggtacacttcagataccttggtttaagatatccattgagacacgcacatcggcttccgcgtcaacactacttacccacaagcgtaagatatctgcacccatttggttgataactttttcaggtaagatagtattgcctaacgatttactcatcttacgg

SEQ ID NO: 949 - DNA, 254 bp, Enterococcus faecalis; identical to SEQ ID NO: 853

SEQ ID NO: 950 - DNA, 141 bp, Enterococcus faecalis
cataagactcgtcgccttctaaagctttcaaagcagaacctgcgataactggaacatcatcgcctgggaaatcgtattctgataataagtcacgaactttccatttctactaattctaataattcttcgtcatcaaccata

SEQ ID NO: 951 - DNA, 268 bp, Enterococcus faecalis
gcctaattgaatcactgtttctgcttttgaatgttttaatgcttgaacgtctgtattggctgtgataaattccacacctttaacagttttcttcgatcatacggtttacagcgtttccgccgccgccacctacaccgataactttaatgactgcaccgttgttaatgttattgtctaatgaaaattccatgatatcgtatcctcctgtttgtgtgattagtcgaaaatgttcgagaagaagtctttgattttgcctgtcactttttca

SEQ ID NO: 952 - DNA, 388 bp, Enterococcus faecalis
taccttctacattcatgataacgaagcgacttgcattccagatcttattgataaagttccaagaagcatccattttttcataactaaaacgaacatcttgaccaggtgctgaaccatttgataagaaccaacgtaacgcatctgcgccatatttttcgatgacatccattggatcaatcccattccccaatgatttactcattttgcgtccttgctcatcacgaattaagccgtgaattaagacattttggaagggacgttcgcctgtaaactctaagctttggaaaatcatacgacttacccaaaaggcaataatatcatagccagtaactaatgtgcttgttgggaagtaacgttgataatcttcgcttgcttcgtccggccaacc

SEQ ID NO: 953 - DNA, 168 bp, Enterococcus faecalis
tgccgtaaaatcaggaacagaaacgcctgcagaagtgccgtctttttcgtcataaccactaattgcatttaaagctaaggcattgtctttaacatttcgtgtcaatggaccaatttggtctaaacttgaagcaaaagcaatcaaaccaaaacgagatacacgtccata

SEQ ID NO: 954 - DNA, 124 bp, Enterococcus faecalis; identical to SEQ ID NO: 861

SEQ ID NO: 955 - DNA, 147 bp, Enterococcus faecalis; identical to SEQ ID NO: 884

SEQ ID NO: 956 - DNA, 247 bp, Enterococcus faecalis; identical to SEQ ID NO: 850

SEQ ID NO: 957 - DNA, 108 bp, Enterococcus faecalis; identical to SEQ ID NO: 944

SEQ ID NO: 958 - DNA, 219 bp, Enterococcus faecalis
cgtgcgtagttaactacccaacgtaaacctaaagttgtacgacgttctggacgaacttcaactggtacttggtagttagaacccccaacacgacgtgctttaacttcaagaacaggcataacgtttttcattgcttgttcaaaaacttccaatggatcgttacctgtagattctttgatgatatcaaatgaattatagataatgttagcagcaatcccg

SEQ ID NO: 959 - DNA, 174 bp, Enterococcus faecalis
taatgaagcacgttgcatgatgattgcatcatagacaacacctttcattaggttcgattccgaagatttcttcatttaaagtgatttcaccgttttgagttccatcttgtttgaataatgctacattcggcattccttagttcctcctttccctacacttatttagctttcaca

SEQ ID NO: 960 - DNA, 132 bp, Enterococcus faecalis; identical to SEQ ID NO: 911

SEQ ID NO: 961 - DNA, 144 bp, Enterococcus faecalis
cctgtttttttagaaacgcggacttttttgccgtcgacttctttaaacgcaactttagtagcttctccgtttgaaggatcaatcaccattacattagaaacatgaattggcgcttccacttcaaggattccaccttgtggggct

SEQ ID NO: 962 - DNA, 282 bp, Enterococcus faecalis
tgaactaatgggaaggtccagcctttatcttcaataattcggataacgccataggtttgacgacgaagtgcataaggatcgttagaacctgttggaatcataccaactgagaagaatgaaaagacgctgtcaagcttatcggctaaggccaaaacagccccgattgctgtttctggcaattcaccttcactagaagttggtaaataatgttctcgaatcgccgttgctacggctggtttttcgccttgtaataaggcatatttttctcccataattccttgt

SEQ ID NO: 963 - DNA, 389 bp, Enterococcus faecalis
taccttctacattcatgataacgaagcgacttgcattccagatcttattgataaagttccaagaagcatccattttttcataactaaaacgaacatcttgaccaggtgcctgaaccatttgataagaaccaacgtaacgcatctgcgccatatttttcgatgacatccattggatcaatcccattccccaatgatttactcattttgcgtccttgctcatcacgaattaagccgtgaattaagacattttggaagggacgttcgcctgtaaactctaagctttggaaaatcatacgacttacccaaaaggcaataatatcatagccagtaactaatgtgcttgttgggaagtaacgttgataatcttcgcttgcttcgtccggccaacc

SEQ ID NO: 964 - DNA, 127 bp, Enterococcus faecalis
cctcgagctgctgcttcatcgttaaattcttcatgaacaactgggtactctgccacaaccaatgactcaccttgatgcggaattttttcccaaatttcttctgttacaaacggcataattggatgca

SEQ ID NO: 965 - DNA, 217 bp, Enterococcus faecalis
taaacggaattgcaataatttatctgctcctttgacttttttacagtcaataacttcggcaacttttaattccactttatcgaaatcatcgtacttaatttgtttttctttcgttgaaaccaacgttgtttcttctggattccatttaatatcctcttctgtagcactttcggctttggggacaattttcttttgaatatacgttacttctgtttca

SEQ ID NO: 966 - DNA, 135 bp, Enterococcus faecalis
catttaataaaggttcaatacctttacgagtaaccccagaaattgggaaaataggtagctcatcggcatactcatcggtgcgttccttcgcaagttgctctttaaatttcgctaaattctcttctgcttcaggca

SEQ ID NO: 967 - DNA, 276 bp, Enterococcus faecalis
tacctaattgtgccaacaattcgcgagactcttcgtcagtgttcgcctgttgtaacaattacgatgtccataccgcgtactttatctactaaatcataatcaacttctgggaagattaattgttctttaatacctaaagtatagttaccacgaccatcgaaagcttttttgctgacaccgtggaagtcaccgtacacgaggtaaagaaactgttactaatttatctaaaaattcgtacattctttcgccgcgtaacgttactttcgcaccgattgg

SEQ ID NO: 968 - DNA, 210 bp, Enterococcus faecalis
gtgcgtctgccagttccgccaccccggcgtaatgaattggctaagcggaaaacggggttcgaacccgcgacccccaccttggcaaggtggtgctctaccactgagctatttccgcaaaatggtgccggctaaaggacttgaaccctcgaccctctgattacaaatcagatgctctaccaactgagctaagccggctaaatatgcgggtga

SEQ ID NO: 969 - DNA, 272 bp, Enterococcus faecalis
ttcactggctgggtcatcggttgttaggactgcaacatcagccaattcagaaagaaccctaccaaagtctttgcggcgagaaatcgctttgtctcccgtactaccgacaagaacaattaagcggccgtcaggatgttcttcacggacaaaggttaaaagattcttcaaactgtcattaagttatgagcgtaatcaacatagacggttgcaccgttggtattcgttaaagattccatccggccagggacggtggttgctgcgatcccttgttg

SEQ ID NO: 970 - DNA, 125 bp, Enterococcus faecalis
taaaccagaaattaagttcatacgtaacacagaacgctcttcactcattggccattgcaaacgtgttgtttgactttctttcatcataaattgacgggatttttcttctgttgtcaacgcatagc

SEQ ID NO: 971 - DNA, 89 bp, Enterococcus faecalis
cacggagagcgtggttgaattaacggcaccgcttgacgctgcatgttggcacccatcaaggcacggttggagtcatcgttttctaagaa

SEQ ID NO: 972 - DNA, 169 bp, Enterococcus faecalis
gcccccgacaaaatacgcttcaaagccctgtgcattgatttcacgaataacgggagcggcttctttaaattcgtttggaatagttgtcaatttcatagcatctgttccaatccgtaaagtagttctgttctctgtaccacttgccgacaagctaacgctactcctgtca

SEQ ID NO: 973 - DNA, 255 bp, Enterococcus faecalis; identical to SEQ ID NO: 896

SEQ ID NO: 974 - DNA, 150 bp, Enterococcus faecalis; identical to SEQ ID NO: 858

SEQ ID NO: 975 - DNA, 184 bp, Enterococcus faecalis
aaatcacacagttgataaagtctgcttcacggtcaccattttgattcgtaaagttacggtttacagcaagtgtaaaggtcgcaacagctgaaccactagcggtgtaacgtaagtcaggatcttttgtcaatcttccgactaatacaacgttattaatcattcaaaacatctcctttcgtcaata

SEQ ID NO: 976 - DNA, 226 bp, Enterococcus faecalis
gcatggaaaggtcgagctcgtttgtatgagtctccttcgccaatatgacgattcaaatcatcatggaaatgcatatcatgattctctttcgcttcttttaagaaaatccagcacaaatgacctgttgattccgagtcataaatggcgcggtgatgttgttctaagttgacgccaaattttttcgataaggtatttagacgatggcttttgaaatgcggatacaaga

SEQ ID NO: 977 - DNA, 162 bp, Enterococcus faecalis
ccaacgtttggaatttcacgggtaatttcttcaggtcctaattttgtatcacgtgcttctgattcatattcttcaatatgcacagaagtgtagacatcgtctttaactaaacgacggctcatgataatggcatcctcgtagttgtaaccttcccatgtcatg

SEQ ID NO: 978 - DNA, 127 bp, Enterococcus faecalis
acggacttgaccagcctttttaaagtgcgcatcataataaccagcacttaaagagaatgttcctaacataatccgacgtttgacttcagtaccaaagccttcggaacgcgaattaacatagacgtct

SEQ ID NO: 979 - DNA, 81 bp, Enterococcus faecalis
taaccaaacatttcagctaaaggtaccatcgcattaacgatttgagagttaccgtgtgcttccataccttcaacacgtcca

SEQ ID NO: 980 - DNA, 207 bp, Enterococcus faecalis
caccgtaactggtttcccttgcaaagtagcaacaccaccgactacagctaaatcatcggcaaagtaacgatccccatgaaattctaaaaagtcctcaaaaatggcttctatatattctaaagttgtcaaacgatcttggtctcttgccaaggtaacaacatcattggctgttttcttttccatgttagcgccacccttccaaagaat

SEQ ID NO: 981 - DNA, 142 bp, Enterococcus faecalis
tccctgtaaagcctgctccgcagacaacaatttttaagaattcttcgttttgagttgctttgtattgacgcatttgttcttggatatgttcatacacgtttaaagccgttttcacatctaccatttgtagagcatgttcttg

SEQ ID NO: 982 - DNA, 155 bp, Enterococcus faecalis
ccatccatttttcatcacccattttttgttctagttttaccataccaatattactagaccaagaaatggcttgacgataattcaaatattctttgccgttcaaccgagtgtagtcatggtcattcacagttacatccccaacctgaattccacca

SEQ ID NO: 983 - DNA, 132 bp, Enterococcus faecalis; identical to SEQ ID NO: 885

SEQ ID NO: 984 - DNA, 222 bp, Enterococcus faecalis
gactaataataagtcaacattgcgatattctttccgaaattgttcggatgtctttgtttgaattgagttgataaattcattcgtaaacgtttcgcgtactaacatatttgactttggcatctggttgattcactaacatttgatgaccaatagcatgcatcaaatgggttttccctaaccctacaccaccatagaagaaaaggggattgtaaatcgaacctg

SEQ ID NO: 985 - DNA, 222 bp, Enterococcus faecalis; identical to SEQ ID NO: 942

SEQ ID NO: 986 - DNA, 149 bp, Enterococcus faecalis
agcagctgcctttaacatcactgggtaaccaatttcttcagcaatcgtcaacgcttcttcgacagaatcaatgacgccatcactcccaggaataacaggtaccttggctttttgcatcagttgacgtgcgtttattttattgcccattg

SEQ ID NO: 987 - DNA, 72 bp, Enterococcus faecalis
gctttgacagcgtaagccacgttgcggactggcgcttgtaatacagataatagcatagatagtaaaccttcg

SEQ ID NO: 988 - DNA, 204 bp, Enterococcus faecalis
cagctaaagcaggggttcctaaaacttctaagtcaccagaaccgagcattttagccgtttgtgattctttcaccaagaattcttttgtaaacatttctgttggcattatgctttctctccttttgaacgttgttttttggcaaacgaaagcagaacttcttgtttattctctaagctaccttcaacaacgtgttgctcgatttc

SEQ ID NO: 989 - DNA, 84 bp, Enterococcus faecalis
tgatttcgcctgtgctgtcgagcgccaaggcattaatcgtaaaatctcgccgttttaagtcttctttcaaggagcgaacaaagg

SEQ ID NO: 990 - DNA, 246 bp, Enterococcus faecalis
acaaatcggatagcgattaggaatcatttccataatttctgttgcagtcattacttttttcatactagttttcctcccatttcttcaagcaaattacaccattatggccaccaaagccaaacgaattactaattgtatagtccgctgtaatgtcacgtgcaccttctgtgacataatctaaatcacaatctggatcagcaacttggtagcctactgtcggatgagcttttccttcttgcaatgttt

SEQ ID NO: 991 - DNA, 143 bp, Enterococcus faecalis
aaggacttgaaccctcgaccctctgattacaaatcagatgctctaccaactgagctaagccggctaaatatgcgggtgaagggacttgaacccccacgccttgcggcgctagatcctaaatctagtgcgtctgccaattccgc

SEQ ID NO: 992 - DNA, 170 bp, Enterococcus faecalis
cgacctgatacttgagttttgattcctttagcgccagcacgcattgcgcgttggatggcttgtttttgagcacgacggaaagcaacacggttttctaattgacgtgcaattccttcgcctactaattttgcatctaaatctggttttttgatttcaacgatgttgatgtg

SEQ ID NO: 993 - DNA, 275 bp, Enterococcus faecalis
tacctaattgtgccaacaattcgcgagactcttcgtcagtgttcgctgttgtaacaattacgatgtccataccgcgtactttatctactaaatcataatcaaccttctgggaagattaattgttctttaatacctaaagtatagttaccacgaccatcgaaagcttttttgctgacaccgtggaagtcacgtacacgaggtaaagaaactgttactaatttatctaaaaattcgtacattctttcgccgcgtagcgttactttcgcaccgattgg

SEQ ID NO: 994 - DNA, 212 bp, Enterococcus faecalis
gaaaacccaccaatctcaatccaaccacgtgcgccgttaatttctttcccgataccaggaatccgaacggctaaaaccataaccgtaattactgcaatggcaaacataataaaacttcgattctggaaaacggatgttttcatcttataaataaaaaacattgcaactaaccctactacccaaaaggcaacctggttaataacgaatgaggt

SEQ ID NO: 995 - DNA, 169 bp, Enterococcus faecalis; identical to SEQ ID NO: 972

SEQ ID NO: 996 - DNA, 121 bp, Enterococcus faecalis
gtcaaaggttggatgttcaattggactgatatggtcgggggtaatgtttaaaaaaatgccgacatcaaaaaataacttgtagacacgattagttttgtaggcttgggaagaaacttccata

SEQ ID NO: 997 - DNA, 201 bp, Enterococcus faecalis
tgcttttgcaacacgcccttgtttaccaatgatacgtccaatatcttctttggccacagtcaaattatactcgaggaaatcagttgattcctcaatttctaatgagactgcttcaggttgactgactaacggacggacaatagttaaaattaactctttcacatctgccatattcaatcaccttatttcttaacgttttta

SEQ ID NO: 998 - DNA, 146 bp, Enterococcus faecalis
catttgcaatagctgagaaacctttcatcatttggaaattagtaaccgtaattgcttgaccaaatgccgacattgctctatctacaaagtttgttcctggcaatttaccagcagattcaccacttaaacctgaatgcgtgctcgta

SEQ ID NO: 999 - DNA, 173 bp, Enterococcus faecalis
accctcgaccctctgattacaaatcagatgctctaccaactgagctaagccggctaaatatgcgggtgaagggacttgaacccccacgccttgcggcgctagatcctaaatctagtgcgtctgccaattccgccacacccgcaaatgaaatatgaatatgagccgtacagggc

SEQ ID NO: 1000 - DNA, 197 bp, Enterococcus faecalis; identical to SEQ ID NO: 891

SEQ ID NO: 1001 - DNA, 182 bp, Enterococcus faecalis; identical to SEQ ID NO: 900

SEQ ID NO: 1002 - DNA, 225 bp, Enterococcus faecalis
gaattggcgtaaagtcataaacatccatgtaatcaggaattacaataataccgccgggatgctgcccagtcgtccgtttaacccctgttgaacctttggctaagcgatcaatttcagcaccacgcaaatgtaaattatgatctctttcatatcctttaacaaagccatacgctgttttgtcggctactgtaccaatggttcctgcccggtagacatattcttcac

SEQ ID NO: 1003 - DNA, 132 bp, Enterococcus faecalis; identical to SEQ ID NO: 885

SEQ ID NO: 1004 - DNA, 183 bp, Enterococcus faecalis
ccctcaccaatgatgactgaaatgattggcactttcaaatcagacatttctaacaagttttgcgcaatggcttccccttctccccgctcttcggcaccaatcccacaataggcaccagcagtgttcacaaaggtaatgactgggcggttaaatttttccgcttgtttcattaaacgtaacgct

SEQ ID NO: 1005 - DNA, 99 bp, Enterococcus faecalis; identical to SEQ ID NO: 870

SEQ ID NO: 1006 - DNA, 231 bp, Enterococcus faecalis
tccctttcaacatgtgagaaagagatttcaatggacggttacctggtccagtaactggacggccacgacgaccattatcgattaaagcatcgaccgcttcttgtaacatccgtttttcgttttgaacaatgatgcttggcgcatttaagtctaataaacgttttagacggttgttacggttgataacacggcggtataagtcgtttaagtcaccttgttgcaaaacgacca

SEQ ID NO: 1007 - DNA, 105 bp, Enterococcus faecalis
ttgtgtattttttagaattaccatacgtaggcgattacttcgccgccgatatttttcgctctagcttctttgtcagtaattacaccctctgatgtagagatgatt

SEQ ID NO: 1008 - DNA, 105 bp, Enterococcus faecalis; identical to SEQ ID NO: 1007

SEQ ID NO: 1009 - DNA, 150 bp, Enterococcus faecalis
gcttttgtagcatcaacttttttcaatgcttcttgcatttttttgctctttttagccattttgtttcctccttgattgtggttataacggttgtacctcccacgtctttcatatctttaaatatgaaacgaactgagaagctacttcttt

SEQ ID NO: 1010 - DNA, 258 bp, Enterococcus faecalis
aacttctggctgagccagattggaaaggaaagaaatttcctgagcatgatccatgcccatttctaaaatcagtttttctgtttcatcaggcatgtgtaaaatagtatagggtaagccaatttgattattgtaattgccttgcgttttgtaagtcacaaacttttcagataaaacagcagcaattaaatctttagtggtagtttttccattactgccagtcacagcgatgacattcggttgcattttatttaaataata

SEQ ID NO: 1011 - DNA, 165 bp, Enterococcus faecalis
tcattgcttcaacttcttgtgatagttttgtttggtactcatctttcacattcatttggaccacgtgtaaatcaaatggcgcaattcctgttggccaattaataccgcgctcgtctgcattttgttcaacgattgctgaaagtaaacgactaacgccgatgccat

SEQ ID NO: 1012 - DNA, 230 bp, Enterococcus faecalis; identical to SEQ ID NO: 878

SEQ ID NO: 1013 - DNA, 403 bp, Enterococcus faecalis
aatgctcgttcaacatcaccggcgacacaacactgaatataatgatccatcatttcataggttaggctgcctgtcacttgcattgcatcttccagtgttactttttcatcactaaaggaaatcgtttgatccaagatactcaaggcatctcgcatcccaccttccgcagcacgcccaatcacataaagggcttgttcctcataatcgagagccatttcctgcatgatatgggccatatgatcgacgatatcttgcgtactaattcgcttaaaatcaaagcgttgcgtccgtgagataatcgttaacggaatcttgtgtggttcagtcgttgctaagataaaaataacattttgtggcggttcttccaaagtttttaaaagtgcattgaacgcgcctgttgata

SEQ ID NO: 1014 - DNA, 117 bp, Enterococcus faecalis
cccatagcagctttgaaggcttggccatattgttcacgtttttcacgatattcgcgttccgttaacaattgttttttctctaatgttgtgtcacctggttcgatgacaacgtatgaa

SEQ ID NO: 1015 - DNA, 230 bp, Enterococcus faecalis; identical to SEQ ID NO: 878

SEQ ID NO: 1016 - DNA, 194 bp, Enterococcus faecalis
tgcctttaacgccggtttctttttggacggctttaatcgctgctttaatacttgggacatcgaaaacgtccaaggcttctaattgttctttaaacgcatgtaacacagttggcactgtttctccttgcaagaattctttcgcagcatcatctaaaactggatgttcattaaagaacaagtttgatagttccaca

SEQ ID NO: 1017 - DNA, 118 bp, Enterococcus faecalis; identical to SEQ ID NO: 947

SEQ ID NO: 1018 - DNA, 169 bp, Enterococcus faecalis
acttcggcaacttttaattccactttatcgaaatcatcgtacttaatttgtttttctttcgttgaaaccaacgttgtttcttctggattccatttaatatcctcttctgtagcactttcgctttgggacattttcttttgaatatacgttacttctgtttcaatttcta

SEQ ID NO: 1019 - DNA, 268 bp, Enterococcus faecalis
cgccacgtgctcgtaatgcctcatcgacacccataccacgtaattgacgtgcaaaacgcattactgtttcatcatgatcgaaattcgtcatttcaaataatttttctaatttttcaccagataaaacccatgaagcatctggttcacgatcaatcgtaaattctggaccttctggttggaatccataacgaacggtttcttcctctaccacttcatcttcatataatgggaattcaggcgttacttccaacaagtcagctgttgcatt

SEQ ID NO: 1020 - DNA, 74 bp, Enterococcus faecalis
caaaatggtgccggctaaaggacttgaaccctcgaccctctgattacaaatcagatgctctaccaactgagcta

SEQ ID NO: 1021 - DNA, 224 bp, Enterococcus faecalis
gctaactggcggtattcaccttggacaggaatgaaatattttggtttcattaagttcaacatcaattgcaagtcattcggattagcgtgaccagacacacgtaaattgtcggaaatttgcttcaccgtagcaccggcccgatagacaatatcctctgttttggcaaccgttgtttccatggccgttgtcggcgttgtcgtaatataaactaaatcgccttcttc

SEQ ID NO: 1022 - DNA, 275 bp, Enterococcus faecalis
tgaacaggcatgaaatatttaggcttcatcaaacgaagcattaatttttgctcttcttgtccaccgtgaccagaagtatggatattattgatttttccgtgaataacttctgcaccggcttcagataataagttgattaaacggttaacgcttgtcgtattcccaggaattggtgaacttgagaaaacaaccgtatcgcctggttgaatactaatttggcgatgtgtaccgttagcaatccgactaagcgcggccataggttctccttgagagcc

SEQ ID NO: 1023 - DNA, 228 bp, Enterococcus faecalis
tctaacggtttgatggtgttgaatcaattgttttcctaaggcggtgtcaaagaaggccacgatttgttccagattcattttttcagcaattgctggtaaaatcaatttattttccactaagcgttcttgaacagctcgcacttcctcgtaagaaggttgcttacttaaatcaattagttgtaataaataatgggttgctgtcccaatctcagctgctgagggcgcttg

SEQ ID NO: 1024 - DNA, 158 bp, Enterococcus faecalis; identical to SEQ ID NO: 854

SEQ ID NO: 1025 - DNA, 76 bp, Enterococcus faecalis
taaacggaatccagcgatagattttttagcttttgtgataagtggtttttgaccagtgattaatgctaattcttca

SEQ ID NO: 1026 - DNA, 474 bp, Enterococcus faecalis
atctcacgagacaatacagtgagttcttcttctccgttcaattcacggcccgctttaatctgatcattttgaatggcagtctttaacatacgaagtacggctaaagtttctttgtctttagctttcatcgctgttttaatgtcgtcattcaatgtggttagcaatgacataccaccaactccaattcattcaaaactagaattttttacgttttctagctgcttcagattttttcttacgctttacacttggtttttcgtagaattcacgtttacgtgattcttgtaaagtacccgcttttgaaacggaacgtttgaagcgacgaagagcatcatcaagagattcgtttttacgaacgactgtttttgacatgttattccctccctccgagcttaaaaagtaaccgtttttcttatttgtgggaaaaacccacaaattaaaatactgtccttgttatattatagctaaagcata

SEQ ID NO: 1027 - DNA, 99 bp, Enterococcus faecalis; identical to SEQ ID NO: 870

SEQ ID NO: 1028 - DNA, 118 bp, Enterococcus faecalis; identical to SEQ ID NO: 947

SEQ ID NO: 1029 - DNA, 99 bp, Enterococcus faecalis
caactaagccaacatctgctaaaacttttaattctaattcaattttacgttcttggcccggttcgccgttttcggcaatttctggtgcagggtttcttg

SEQ ID NO: 1030 - DNA, 234 bp, Enterococcus faecalis
tcgtttccttcgatgttcattttgatatcagaagaaaattcgcgtgttaattcacctttaggtcctttaactgtaatgttgtttccgtcttgcttgatttcaacaccagcaggaagaacaacaactttattaccaatacggctcacttagagacacctccttgtgtattttttagaattaccatacgtaggcgattacttcgccgccgatatttttcgctctagcttctttgtc

SEQ ID NO: 1031 - DNA, 191 bp, Enterococcus faecalis
catattagcaattaccatgggcacgaaaaatggtgttacgcgttttgcgccttttttatccattacccgtacttggtcttgtaaggtagtcattccgccaatcccactaccgacaatcacacctaaacgagtcgggtcaatcgttgcttctgttaaaccactcatttcccacgcttctaaagcagcgacca

SEQ ID NO: 1032 - DNA, 223 bp, Enterococcus faecalis
gaccaaatgccgacattgctctatctacaaagtttgttcctggcaatttaccagcagattcaccacttaaacctgaatgcgtgctcgtaccaaaaccaaattttttcaaatactccatccatttttcatcacccattttttgttctagttttaccataccaatattactagaccaagaaatggcttgacgataattcaaatattctttgccgttcaaccgagt

SEQ ID NO: 1033 - DNA, 194 bp, Enterococcus faecalis
agccagttctttcttcagttgcccgatttgattttgtaaatctgctaattctggatttccctctgcactaccatcttgattagctgtttctggcgtgttgtgtttattgggttgcaccgttttagctaatttgacagtggctacttccagatagatattcgcattgttggtaaagcggatctcattttgtgtgt

SEQ ID NO: 1034 - DNA, 118 bp, Enterococcus faecalis; identical to SEQ ID NO: 947

SEQ ID NO: 1035 - DNA, 225 bp, Enterococcus faecalis; identical to SEQ ID NO: 1002

SEQ ID NO: 1036 - DNA, 148 bp, Enterococcus faecalis
taagaaaattttgatgcctttggttttttcgacatgaagataggccaaaatgatcaaaatcgtacagaccagcgccattgctaataatgaatgtccgctgggaaagctagcagagcttcgatcagctagagcacctaggttcggtcga

SEQ ID NO: 1037 - DNA, 422 bp, Enterococcus faecalis
cacggcccgctttaatctgatcattttgaatggcagtctttaacatacgaagtacggctaaagtttctttgtctttagctttcatcgctgttttaatgtcgtcattcaatgtggttagcaatgacataccaccaactccaattcattcaaaactagaattttttacgttttctagctgcttcagattttttcttacgctttacacttggtttttcgtagaattcacgtttacgtgattcttgtaaagtacccgcttttgaaacggaacgtttgaagcgacgaagagcatcatcaagagattcgtttttacgaacgactgtttttgacatgttattccctccctccgagcttaaaaagtaaccgtttttcttatttgtgggaaaaacccacaaattaaaatactgtccttgttatattatagc

SEQ ID NO: 1038 - DNA, 226 bp, Enterococcus faecalis; identical to SEQ ID NO: 976

SEQ ID NO: 1039 - DNA, 150 bp, Enterococcus faecalis
tgtaacatcaacaacgtctcctgcttggaaaacatctactttgatttctttacctacttcatattctcctagctcaacattcttgaattctttaatgaagcgcttaggagccgtgtttgcttttgcaacatgacctttcgcaggtttgtt

SEQ ID NO: 1040 - DNA, 199 bp, Enterococcus faecalis
taatggaataatcccagtaatcccaccaacattaataaagacttgaattaataacattgtaccaattccaatacacattagtgaattaaaaggtttcttcgagcgtacaccgactaaaataattcgcgcaatcataaacatcaacaatcctaaaatcgctagaccgccgataatgcctaactcttctaaagtaatcgca

SEQ ID NO: 1041 - DNA, 194 bp, Enterococcus faecalis
agccagttctttcttcagttgcccgatttgattttgtaaatctgctaattctggatttccctctgcactaccatcttgattagctgtttctggcgtgttgtgtttattgggttgcaccgttttttttaatttgacagtggctacttccagatagatattcgcattgttggtaaagcggatctcattttgtgtgt

SEQ ID NO: 1042 - DNA, 140 bp, Enterococcus faecalis; identical to SEQ ID NO: 932

SEQ ID NO: 1043 - DNA, 177 bp, Enterococcus faecalis
cctccatgtggcgggaagccgtaatctaatgcatctagcaagaaaccaaattggtcttgtgcttcttcttttgtaaaacctaacgtttcaaacattttttcttgtaattctcgtgtatggatccgtaatgagccgccacctaattcgtagccgtttaagacaacatcgtaagcttca

SEQ ID NO: 1044 - DNA, 118 bp, Enterococcus faecalis; identical to SEQ ID NO: 947

SEQ ID NO: 1045 - DNA, 247 bp, Enterococcus faecalis; identical to SEQ ID NO: 850

SEQ ID NO: 1046 - DNA, 189 bp, Enterococcus faecalis
aatttgttccggcgtaatccctgcttccgcaatcgccatttccatcgcagccgccgcgccactaccgtcttttaaaggagcggtcatgtggctagcatcacagttgctgccatagccaacaatttcgccgtagatagttgcgccacgtttctgtgcatgctcgagttcttctaaaaccagcattcctgc

SEQ ID NO: 1047 - DNA, 199 bp, Enterococcus faecalis
cgttgagtgtttgtaacctaagtctttcatgcggtcaagcattttagaggtttccgtaatgtggaatctcttgaagacttcagcaatgatatttccaagatttttcttcttgaatggtaaaactaattcttgctctttaatgtgtgcaggaatgtctgtaccagcttctacgaagtatttatctggtgtttgaacagtt

SEQ ID NO: 1048 - DNA, 111 bp, Enterococcus faecalis; identical to SEQ ID NO: 876

SEQ ID NO: 1049 - DNA, 114 bp, Enterococcus faecalis
tgaattaattgatttgaaagtttccaagcctttaagaaggagcgaatttctgcttctggtaaattcaacgattgaataagtaacgtccacgcttctgcttctgtttcaatttga

SEQ ID NO: 1050 - DNA, 193 bp, Enterococcus faecalis
tcctaaaaatataaattttattgtttgttttatatgtgatagacgttactaaaaatcgtctgatcatcataagctattttacacgaaatcttgaaaaaaggatagttctaaaaacaaaccttttattctcaaggaaaattatgcgttgccgccgtttttcttgatgatttcttcttgaacagacttaggtacg

SEQ ID NO: 1051 - DNA, 145 bp, Enterococcus faecalis
gagctagactcggagtcgcctccaacatcataacactctaaaagaaacatctataaagtgatcggtttattaattatttaacaaattcgataactaccattggtgctgcatcgccgcgtcttggttctgtcttcaagatacgagt

SEQ ID NO: 1052 - DNA, 109 bp, Enterococcus faecalis
gtgtttgcttttgcaacatgacctttcgcaggtttgtttgataaaacttcacgtttgtcttggtaaccaacttggatagcttcgtatccgtcagtttcaacagttttta

SEQ ID NO: 1053 - DNA, 194 bp, Enterococcus faecalis
tggtgaaagaacttgaatcacttggattgtcattggttcagttactaccgcatcttcacttggatagtaagttacgctgtttaagccgttgtcaatgtattcgcctaatgtttccatgatttggtgtgttaaaaccgtgcctttttcgacaatgatttcaccagtttctggatcaactagcgtttcagctaagg

SEQ ID NO: 1054 - DNA, 195 bp, Enterococcus faecalis
tcgacattgccgatatcttccattaagttgaagaagtagctcattgaagcaacgatatctgctggacgaactgtttttacgctgtcgtctggatagccgttaccaatcacatttacgatacgttcaggatcttttggtgaaagaacttgaatcacttggattgtcattggttcagttactaccgcatcttcactt

SEQ ID NO: 1055 - DNA, 76 bp, Enterococcus faecalis
catccaacgagagcggccagctttaccaatgttgattaattcgtgttgttcgttaccaactgaaccgattgttgca

SEQ ID NO: 1056 - DNA, 111 bp, Enterococcus faecalis
aatatctgagttaaatttgcttgcagtttgtactaataaagtagctggacgtgcgtgaattcctgtttctgctacaatgtgaaattctttcttttccatataaatcggtct

SEQ ID NO: 1057 - DNA, 128 bp, Enterococcus faecalis
tgtacgagaatcacttgcgtttttgtgtaaatctttttcaattgtgttgcgtaagctttcgctgtcgccgaaaatttcgaagatggtatcatctgaaccgaaacctaaagcacgaactaacacagtta

SEQ ID NO: 1058 - DNA, 201 bp, Enterococcus faecalis
ggtaatgccttaactaactcttttgttacttgtacttgactctcttgttggtaataatataaaagcctttcaacaagtactgctgattcttcgcctaattcataaagcatcattggctgccagtcgttactcaagcgaaaacgcaaaccgcgtactaattgtgaaacgttttgaattaattgatttgaaagtttccaagcc

SEQ ID NO: 1059 - DNA, 343 bp, Enterococcus faecalis
aaataatctaaaatggagggcgcttctgcgacaatcaccttatcttttttatctttgctgtctaacacccgcaatggattttcgtgtaagcgacgttgtgaatcctcgcttaattctgtcatatggggctctaaataatcaattaatgcttgacggtacgtagcacgtgtttctttatcccctaaggaattaatgaccaatttgatttgttggatgcctaattgtttgaagaagtccaaagccatagccataatttcaacatccaatgctggattttcactaccaaatgcttccacaccaatttgatggaattgacgcaaacgaccagcttgtgggcgttcat

SEQ ID NO: 1060 - DNA, 180 bp, Enterococcus faecalis
ccaaagccaaacgaattactaattgtatagtccgctgtaatgtcacgtgcaccttctgtgacataatctaaatcacaatctggatcagcaacttggtagcctactgtcggatgagcttttccttcttgcaatgtttgtacacaagcaatcgcttcgataccgccagccgcgcccaataaa

SEQ ID NO: 1061 - DNA, 86 bp, Enterococcus faecalis
cgtcatcattgtgatttggttcttcacggtggaatgtgtcaaattcttttttgtctacttgttctaatgaagattcatcaactttt

SEQ ID NO: 1062 - DNA, 195 bp, Enterococcus faecalis
  misc_feature (159)..(159): n=g, a, t or c
aatgaagattcatcaacttttggacgtgtattttgttctctgcgaatatcccaatcgccaaaagcacttgcttcttcttgtgattttggttgatccatttccacagattgagttgttttttgcattggttgaaccgcttgtcttgtttgacggtgcggntttctatccttttttgattcatcaatacctgtagcg

SEQ ID NO: 1063 - DNA, 151 bp, Enterococcus faecalis
cattacgcggattttacgtaacatttgacgaaccattacttcgatatgtttgtcgccgatttctaccccttgcatacggtaaacacgttgtacttcacgtaataggtagttttcaacagataaaacatcacgaacttgtaataattgtttt

SEQ ID NO: 1064 - DNA, 80 bp, Enterococcus faecalis
gctggatctttttccaataattgctgaatcttttcgtgcgcatgaatcaccgttgtatgatctttgccgccaaattcggc

SEQ ID NO: 1065 - DNA, 150 bp, Enterococcus faecalis
ccgtttttgtcaccgacaacaactaaagctgcgaaacgtaaacgacgtccacctttaacaacttttgttacacggttgatcgctacaacgcggtcttctaattccaaatgttttggatcaatataaaccatgaatggtgttcctccttct

SEQ ID NO: 1066 - DNA, 144 bp, Enterococcus faecalis
cagttgtcgatagttcactatcaaatggggtaacttttgaagcataggctggtactttgccatcacaatatttattaatcatcgcaattgttcgattcaacaagtttcctaagtcattatctaaatcataatttaagcgagaaa

SEQ ID NO: 1067 - DNA, 164 bp, Enterococcus faecalis
tcgcggaagcaaatacggcaaagatgaaatttacgataaactgaatgtggacgtccacaacgttcacaacgagtataagcttgtgttgaatgtttagcaggacgtttgtttttagcaatcattgattttttagccacgtagttcgcctccttatattatttttg

SEQ ID NO: 1068 - DNA, 369 bp, Enterococcus faecalis
ccataccttcaacacgtccacgacgacttgttacgtgtcccatgatatcacctaagtaatcttcaggaacagtaattgtaactttcatcattggttctaaaataactgggtttgcatttttagccgcagctttcaatgccatagaagcagctacacggaaggccgtttcatttgaatcgacatcgtggtatgaaccatcgtaaagttttgctttgatatcaactaatggataaccagcaagaacaccgttgttcatagagtcttctaaccctttttcaactgctgggatgtattcacgaggaaccacaccaccgacaattgcgttttcaaactcgaagcctttaccttcttcatttggtgtaaattcaa

SEQ ID NO: 1069 - DNA, 72 bp, Enterococcus faecalis
tatacgactttttctagccatttttctccacctgctctttcaaacgatctgtaaagcaaactgcttcttctt

SEQ ID NO: 1070 - DNA, 158 bp, Enterococcus faecalis
cgtttgccgtctacagtgatgtggccatggttaactaattgacgtgcttgacgacgagtagttgcaagacctaaacggtaaacaacgttatctaagcgttgttctagtaaaaccatgaagttaacaccgtgtttaccttctttgattttgcttgcttt

SEQ ID NO: 1071 - DNA, 150 bp, Enterococcus faecalis
cctttcggattacgtgcttcaaagatttcttggatacgaggtaaaccttgagtgatatctgtcaccggcaaccccaccggtatggaacgtacgcatggttaactgtgtaccaggttctttttatagattgagcggcgattgtaccaactg

SEQ ID NO: 1072 - DNA, 168 bp, Enterococcus faecalis
gcttgacgctgcatgttggcacccatcaaggcacggttggagtcatcgttttctaagaaaggaatacatgctgttgcgactgcgactacttgttttggtgaaacgtccatgtagtcaactttgtctacggcaacttctaagttttcactttgtagacgcgccataaca

SEQ ID NO: 1073 - DNA, 322 bp, Enterococcus faecalis
tgtcatacgatctaatttttcaccagaaaattctcgcaagacttctacttcttcccaaccaatcgcttctttaactgttgttaataaatctttagcaattacaaatttacgaccgtctgccttcacttcaacgtacgtaaaatcaggattaacctgaaatacctaagttggctggtaatgtccaaggggttgtcgtccagatgacgaaggctgtctcgttatctaaaagacctttaccatcggccacattaaaagctacgtaaatagaaggtgattttacatctttgtattcaatttctgcttctgctaaagaagattcact

SEQ ID NO: 1074 - DNA, 109 bp, Enterococcus faecalis
cttcagaatcaaatttagtaattttgccaattcctagcttgccatccactagattatgccaaaattcttttacggtattgcctaatggtgttacggcacccatgccggt

SEQ ID NO: 1075 - DNA, 83 bp, Enterococcus faecalis
tccagttggtggatctaataaatctggaggtgaacctggaatcgcataaagtttgtcttctgttccttccatcgttggcattg

SEQ ID NO: 1076 - DNA, 98 bp, Enterococcus faecalis
cctccttaaccgataatttcttctacagatttaccgcgaagtgctgccacttcttcggcacgttttaattgttttagaccttcaacagttgcgcgaac

SEQ ID NO: 1077 - DNA, 99 bp, Enterococcus faecalis
cctccttaaccgataatttcttctacagatttaccgcgaagtgctgccacttcttcggcacagttttaattgttttagaccttcaacagttgcgcgaac

SEQ ID NO: 1078 - DNA, 348 bp, Enterococcus faecalis
tttcttcaaatacttcttgcgcacgtgccactaagtagtctttgatttcttcagctgatttattttctaaatcttttttagaaatcgtatcttcatggacaagtgttgaggcttgcaaaatcgacaatcccatctaaattccattcttctttttctaattgtgtatggctatccaccactcggccaatcgtccgttttaccatgcccatcaatacatcagacaagtcattttcttccataattacttcttgtcgttgcgcataaataacttcacgttgctcgcgcatcacgtcatcgtattgtaagacatttttacgtgtgtcatagttatttccttccacacgtttt

SEQ ID NO: 1079 - DNA, 250 bp, Enterococcus faecalis
taaatccatcacatcttgataatcagtataagcaggtataagcttctagcattgtaaattctgggttatgagtggtatcgattccttcattacggaagacacgaccaatttcatatacttttttccatgccaccgacaattaaacgttttaaatgtaactctagggcaatgcgtaagtataagtccatatctaatgcattatggtgtgtgataaatggacgagcagcagctcctcctgcttcgttatgca

SEQ ID NO: 1080 - DNA, 158 bp, Enterococcus faecalis
  misc_feature (122)..(123): n=g, a, t or c
tgtttgaccgccacccatatcaatgacaattgttccaaagtctttttcgccatctgttaaaattgtttctgttaaagcaagcggtgtaatcacctaattcgttaattcctaagccagctttnncaacacatttacggatgttatggatgattgttttt

SEQ ID NO: 1081 - DNA, 214 bp, Enterococcus faecalis
catcaaacaatttaatcaagtcttcttgtgagaagatttcttcttcgccaacaggagaccatcctagtaaagcaataaagttgaacatggcttctggtaagtaacctaattcacggtatttttcaataaattgtaaaattgtttcatcacgtttgctcaattttttgccagtttctgaattaatgattaaggtcatatggccaaagacaggtgg

SEQ ID NO: 1082 - DNA, 290 bp, Enterococcus faecalis
ttcgcagccacggttaaaacattcttgaatggcatctcgccaagtcacatatgttggcatgtagcgtttataacgatcatctaagccagcataaaggatttcaccttgttggaccaaatgtcacagccaaagcgccagcaaccgtgacgatttcaccagccttctgcgatattttcttctaattcttttagttcccgagtcaaggaagcatctaattcttctaaattatggcgctttttcacttgattttctttcaaattactcaagtctttttgatttttgtcatagcg

SEQ ID NO: 1083 - DNA, 145 bp, Enterococcus faecalis
acctacgaatgggtcagtcataactttaaatgctaatgaagcgaaaggtgcttcgtcatcagctggacgagttgtttcttcgtctgttttagtatcgatccctttgatagcatcgatatctaatggagatggtaagtaatcaaga

SEQ ID NO: 1084 - DNA, 231 bp, Enterococcus faecalis
tcagcaagattggcttcgccacgacgaatcaattcttctgcattccctagccacacatcggttccgtgagacagtccagaaatttgaagtaattctgcaaaagttgatggatgggtctgttctaacatacctcgaacgaaacgtgtcccaaattcaggaattcctaaagttcctgttttagaataaatttgctctgcatccacacctagaacatcaggtccttcaaaaata

SEQ ID NO: 1085 - DNA, 209 bp, Enterococcus faecalis
tgctttatccacacgataaaaacgctcgaagactttcccaagatcttttttagggatgcccaaaccttggtccgagatactaaagacgacattattatgtgtttcaactagtcggcaggtaatgacgccgccatctggcgaatacttaatcgcattgttcaaaatgttgtctaaaacctgaattactttgtctgtatctaactctaccc

SEQ ID NO: 1086 - DNA, 310 bp, Enterococcus faecalis
aatccgtaaagtagttctgttctctgtaccacttgccgacaagctaacgctactcctgtcatgaatgaacgccgatcataagaatcatgccgaatagtgagcccttcacctacactgccaaattggacttgttggtgtgccactaaaccaggtaagcggacactatggattcgcagaccctcgaaatcagccccgcgtgcccctggtattgattctacctcttgcggattcccttgtttttttgctggccgaacttcttgaatcatttctgcagtttttatagccgttccgctcggtgcatccaatttgt

SEQ ID NO: 1087 - DNA, 162 bp, Enterococcus faecalis
agactcttcgtcagtgttcgctgttgtaacaattacgatgtccataccgcgtactttatctactaaatcataatcaaccttctgggaagattaattgttctttaatacctaaagtatagttaccacgaccatcgaaagcttttttgctgacaccgtggaagt

SEQ ID NO: 1088 - DNA, 264 bp, Enterococcus faecalis
  misc_feature (325)..(325): n=g, a, t or c
aacagtaattgtaactttcatcattggttctaaaataactgggtttgcatttttagccgcagctttcaatgccatagaagcagcctacacggaaggccgtttcatttgaatcgacatcgtggtatgaaccatcgtaaagttttgctttgatatcaactaatggataaccagcaagaacaccgttgttcatagagtcttctaaccctttttcaactgctgggatgtattcacgaggaaccacaccaccgacaattgcgttttcaa

SEQ ID NO: 1089 - DNA, 186 bp, Enterococcus faecalis
  misc_feature (380)..(380): n=g, a, t or c
acccattttttgttctagttttaccataccaatattactagaccaagaaatggcttgacgataattcaaatattctttgccgttcaaccgagtgtagtcatggtcattcacagttacatccccaacctgaattccaccaacacgattgaataattcattaggattaaactgtccttgttccataga

SEQ ID NO: 1090 - DNA, 262 bp, Enterococcus faecalis
gaaattttttctaataaaggatgaaattcagcgatagcggctaaggttttttcttcaattttaaaatctaattggctagcaaagcgtaagccccgcatcattcgcagagcatcttcatgaaaccgctcatggggattaccgacagcacgaatggtttgattagttaaatcttcgataccatcaaataaatcaatgatttcgcctgtgctgtcgagcgccaaggcattaatcgtaaaatctcgccgttttaagtcttctttca

SEQ ID NO: 1091 - DNA, 83 bp, Enterococcus faecalis
aaacttggcgccgacaaaatcgcttgataggcttcttcaaggctatgccaaaaactttccacgtcgggcatacagtgacctcc

SEQ ID NO: 1092 - DNA, 472 bp, Enterococcus faecalis
tcacgaataccttcttctgcattcaagaccattaaaacaatgtctgagcgttcaatcgcccgcattgcgcgcatgacgctatatttttcagttgattcgtatactttcccacgtttacgcataccagccgtatcaatcattaagaacttttgaccttcttcagattcaaaatacgtatcgattgcatctcgcgttgttccttcaatatctgaaacaatcacacgatcttcaccaagaatagcattaatcaatgatgatttaccgacatttggacgcccgattaaactaaatttaattgtatcttcgtcctcttcttctgaagtgttaggaaaatgtttaactgcttcgtctaacacatcgccaatgcctaaaccatgactaccagaaactgggaaaggatcccctagtcctaaagcataaaattcataaatatcattacgcatttcaggattgtcaactttattaacagcta

SEQ ID NO: 1093 - DNA, 181 bp, Enterococcus faecalis
tgttctctgcgaatatcccaatcgccaaaagcacttgcttcttcttgtgattttggttgatccatttccacagattgagttgtttgttgcattggttgaaccgcttgtcttgtttgacggtgcggttttctatccttttttgattcatcaatacctgtagcgattactgttacacgaattt

SEQ ID NO: 1094 - DNA, 110 bp, Enterococcus faecalis
cttcagaatcaaatttagtaattttgccaattcctagcttgccatccactagattatgccaaaattcttttacggtattgcctaatggtgttacaggcacccatgccggt

SEQ ID NO: 1095 - DNA, 122 bp, Enterococcus faecalis
tccgaataccccagttttttacgctggttaaagctatagttaaaaagttaattatttaacagatttcagtaacaacgcctgaacctacagtacgtccgccttcacgaatagagaaacgagtt

SEQ ID NO: 1096 - DNA, 176 bp, Enterococcus faecalis
gctggttgaccccatggagatactggcgctttacgtccaattggtgttttaccttcaccaccaccgtgtgggtgatcgttagggttcattacgctaccacgaacagttgggcagtttacgcatccaacgagagcggccagcatttaccaatgttgattaattcgtgttgttcgtta

SEQ ID NO: 1097 - DNA, 248 bp, Enterococcus faecalis
gactttggaccaaagccatgcaacgaaagtaacgcttttcggcctcgtgcgtagagttcatccacactgtcgattttttcattcgttagcgcacgaacagctggcctttgataattgtgttaaaatttgttcaaacgttgtttctagcatgcctgtcggttcctccttagcggtcgaaaaacagcgctttttattttacaattaataaatctaagctagcaattgataacgccattttagcaatttgc

SEQ ID NO: 1098 - DNA, 154 bp, Enterococcus faecalis
tacagcagcatcagcaagttttgttgcgataaatttacggattcttaaatcttcgtgtaagaattcagcatactctttttcagcataccatttcgcatcccagtcgcggatgatgcctacacgcattccaattggatgtactttttgacccact

SEQ ID NO: 1099 - DNA, 66 bp, Enterococcus faecalis
aaatgaatgctatgtttcgcaataacagatggttcatatttttcagcagcttgcatcacagtttca

SEQ ID NO: 1100 - DNA, 114 bp, Enterococcus faecalis
tgcatcacgtaattgtttacgtaagttagtgacttcttcaactgttaaaccacggtagtccacgattacaactgatgctgctgattcaaatttctcagcggcctgcttgaacct

SEQ ID NO: 1101 - DNA, 220 bp, Enterococcus faecalis
tgttctgcaaataaattcgctacatgttcaattgtttctggcgtaatgatggcttccccgttttcagcatagaagatcggtaatggtacaccccacgctctttggcgagagattacccaatcaccacggtcacgaatcatattatataaacgtgtttttccccaaggaattagccagtcaactttctcaacttcatctaaaatatcttgacggaatttag

SEQ ID NO: 1102 - DNA, 246 bp, Enterococcus faecalis
tgttccaacatccaaacttcatctgcgactgctaaagccaaagcaccgccactaccgccctcaccaatgatgactgaaatgattggcactttcaaatcagacatttctaacaagttttgcgcaatggcttccccttctccccgctcttcggcaccaatcccacaataggcaccagcagtgttcacaaaggtaatgactgggcggttaaatttttccgcttgtttcattaaacgtaacgctttgcga

SEQ ID NO: 1103 - DNA, 246 bp, Enterococcus faecalis; identical to SEQ ID NO: 1102

SEQ ID NO: 1104 - DNA, 359 bp, Enterococcus faecalis
aaaggacttgaaccctcgaccctctgattacaaatcagatgctctaccaactgagctaagccggctaaatatgcgggtgaagggacttgaacccccacgccttgcggcgctagatcctaaatctagtgcgtctgccaattccgccacacccgcaaatgaaatatgaatatgagccgtacagggctcgaacctgtgaccctctgattaaaagtcagatgctctaccaactgagctaacggctcaaaaaatggaggttaacgggatcgaaccgctgaccccctgcttgtaaggcaggtgctctcccagctgagctaaacctccaaaaacaacaattcgcgtggcgacgtcctactctcaca

SEQ ID NO: 1105 - DNA, 246 bp, Enterococcus faecalis; identical to SEQ ID NO: 1102

SEQ ID NO: 1106 - DNA, 212 bp, Enterococcus faecalis
gataatgcgtgagcaattgcttcgccacgatctaaaatggtgtaaacaggcatttctttggtaatatgggctttgaatttcttggcaaatttttgctggatcttcactggctgggtcatcggttgttaggactgcaacatcagccaattcagaaagaaccctaccaaagtctttgcggcgagaaatcgctttgtctcccgtactaccgacaa

SEQ ID NO: 1107 - DNA, 275 bp, Enterococcus faecalis
gttcgttttctttttgtagatcacgtaattgttgttgcaattgctctgttttcgtaaccacttcttttaattgaggtgatttaactaatgtagcaatctctttcaattgacgttcttcttcttgtaaaagttgatacgcttctttactcgtcactgcttcaatacggcgtactcctgcaccaattccagattcagaaacaattttgaaaatcccgatatcttctgtattagcaacgtgtgttccaccacataattcgatagagtaatccccaata

SEQ ID NO: 1108 - DNA, 150 bp, Enterococcus faecalis
gctcattaggctgcttttgaaagccatgaaaatgagtgccatcataggcaatgattgctttatagcggggcataatttttcttcaccttttctaagttcttaatacaaataagccattttttttcaagacaaagccaaacattactattg

SEQ ID NO: 1109 - DNA, 203 bp, Enterococcus faecalis
tcttcttgaatttgtaagatggacaattgatttttactaccaactgattttagagatttcaaggcgtccgccgctaaactagtggtaatatcttctccattaatagttgcaaaggcttgaacgcggaccaaagcaccctctaattcacggatgttggaatcaatttgaccagcgatataacttagtgtatcatccggaatttc

SEQ ID NO: 1110 - DNA, 165 bp, Enterococcus faecalis
tcgcggaagcaaatactggcaaagatgaaatttacgataaactgaatgtggacgtccacaacgttcacaacgagtataagcttgtgttgaatgtttagcaggacgtttgtttttagcaatcattgattttttagccacgtagttcgcctccttatattatttttg

SEQ ID NO: 1111 - DNA, 254 bp, Enterococcus faecalis
caactacatctttcgctaattttaagttttcttcgaatggtaagtgagaaccatcaaacatgattgaagtatagccaacttcgatacattctaaagcagcttcgtagtcaccatggtctaagtgaattgctactggaactgtgatattcattgagtctactaaattagtaatcatgtctttagctactttgtagccgcccatgtatttagcagcgcccattgatgtttggattagaactggtgcttttttagct

SEQ ID NO: 1112 - DNA, 77 bp, Enterococcus faecalis
ttgcgccttttttatccattacccgtacttggtcttgtaaggtagtcattccgccaatcccactaccgacaatcaca

SEQ ID NO: 1113 - DNA, 145 bp, Enterococcus faecalis
tgcaggtaaaatattacgtaatacttggggaataacgactttacgcattgtttgtccatgggtcatcccaatcgcttgtgctgcctcgaattgtcctttatctactgcgaaaatacctccgcgaacaatttcagacatataggca

SEQ ID NO: 1114 - DNA, 361 bp, Enterococcus faecalis
ataacgacggacgttcaccgttgcgtcttccatttctttgtccccgaccactaattgataaggtactttttgtgtttgagaggcccgaattttgtagcccattttttcgttacgatcatcgacttcaacacgtaagccttgtgcttgtaaacgttctttgatttcataagcatactcagaatgcgcttctacagaaactgggataatagttgcttgaattggtgctaaccaagtagggaaagcgcctttgtaaacttctgttaagtaagccacaaatcgttccattgttgagacaataccacggtggataacaactgggcgatgtgtattttcaccatcttcgccaacataagttaagtca

SEQ ID NO: 1115 - DNA, 313 bp, Enterococcus faecalis
ccgactacagctaaatcatcggcaaagtaacgatccccatgaaattctaaaaagtcctcaaaaatggcttctatatattctaaagttgtcaaacgatcttggtctcttgccaaggtaacaacatcattggctgttttcttttccatgttagcgccacccttccaaagaatgtaaacgtaacaagtcgctcaatcgttgacgcaaaagatttcttggcacaatctgatctacaaaaccatgttctaaaagaaactcggccttttgaaaatcatctggcaactcttgacgaatcgtttgttcaattacacggcgg

SEQ ID NO: 1116 - DNA, 221 bp, Enterococcus faecalis
cgctcaatcgttgacgcaaaagatttcttggcacaatctgatctacaaaaccatgttctaaaagaaactcggccttttgaaaatcatctggcaactcttgacgaatcgtttgttcaattacacggcggccagcaaaaccgattaaactctgaggctctgccaaaataatatcgccatccatcgcaaaacttgctgtaacaccgccagtcgttggatcagtc

SEQ ID NO: 1117 - DNA, 224 bp, Enterococcus faecalis
tactcgtcactgcttcaatacggcgtactcctgcaccaattccagattcagaaacaattttgaaaatcccgatatcttctgtattagcaacgtgtgttccaccacataattcgatagagtaatccccaatattaactacacggacttctttgccatatttttcgccaaataacgccattgcgcccatgtttttcgctgtatcaatatctgtttcaattgtgaca

SEQ ID NO: 1118 - DNA, 261 bp, Enterococcus faecalis
accaagagcttccagcccattgtggcatagtattcgtttcacgttttcccttcatgccagtttcagggtcgacgacattgacccattcatcaatgtttgctaatggcgattccccagttccacttgggcgaatatccgatgttactggtaaacgtagaggtaactcagattcaggaaccgttgtggttgttccatcttcccaatggatcacaggaattggttcaccccagtagcgttgacgagagaataaccagtcacgta

SEQ ID NO: 1119 - DNA, 138 bp, Enterococcus faecalis
cctttaccaggtttcatttcaatgttgtggataactgtaccaactggaatgttttccaatggtaatgcgttacctactttaatatctgcttctggaccagatactaggcgcatgcctacttctaatccttttggtgct

SEQ ID NO: 1120 - DNA, 163 bp, Enterococcus faecalis
taatcacgttgtgcttgaattaaattcgctggtaagcgatctgaacgataagaatcgtaataagcaattgcagatgagaatgttggtacaggaacacctgcttgaacagcaatcgcaacaacttcacgaacggcttgttgatattttttcgtaatttctacga

SEQ ID NO: 1121 - DNA, 25 bp, Enterococcus faecalis
tgcgataactggaacatcatcgcct

SEQ ID NO: 1122 - DNA, 157 bp, Enterococcus faecalis
aatttcttccgctgtatgtggaataattggtgtcaatagttttgttaatgaaaccaatgtttggtagaaaacagtctgcatacaacgacgttgataatcgttttcagccttcaatataaaccgacatctttcgcaaagtctaaatagaaagaagata

SEQ ID NO: 1123 - DNA, 155 bp, Enterococcus faecalis
aatttcttccgctgtatgtggaataattggtgtcaatagttttgttaatgaaaccaatgtttggtagaaaacagtctgcatacaacgacgttgataatcgttttcagcttcaatataaacgacatctttcgcaaagtctaaatagaaagaagata

SEQ ID NO: 1124 - DNA, 378 bp, Enterococcus faecalis
tgaatcaagcagtaatcaatttatgcagcttcctttggggatcgctgtctgtttagatacttatgattcacggcttttcaaccgagcgtttgatgctcttagtttttcatttggctcattacttcatccgcaaagttatcttcacgtttttcgataccttcgccaacttcaaaacgtacgaatgatttcacttcgccgcctttagaagcaacaaatttttcgacagtcatatctggatctttaacaaatggttggtcaaccaaagcgatttctgctttgaatttttgtagacgaccaacaaccattttttcaacgatatttgctggtttaccttcgtttaatgcttgttcagttaacacagctttttcgtgttctaat

SEQ ID NO: 1125 - DNA, 215 bp, Enterococcus faecalis
tgttcgatatatagaatggatgttgatgctgtcatacgatctaatttttcaccagaaaattctcgcaagacttctacttcttcccaaccaatcgcttctttaactgttgttaataaatctttagcaattacaaatttacgaccgtctgccttcacttcaacgtacgtaaaatcaggattaactgaaatacctaagttggctggtaatgtccaagg

SEQ ID NO: 1126 - DNA, 224 bp, Enterococcus faecalis
tggttcatttaaataatctaaaatggagggcgcttctgcgacaatcaccttatcttttttatctttgctgtctaacacccgcaatggattttcgtgtaagcgacgttgtgaatcctcgcttaattctgccatatggggctctaaataatcaattaatgcttgacggtacgtagcacgtgtttctttatcccctaaggaattaatgaccaatttgatttgttgga

SEQ ID NO: 1127 - DNA, 217 bp, Enterococcus faecalis
tgtttcaggtgctgcctcttctgattccgcttgtagaaagacttttcttggtttgctaccttctgatggtccaataactccgtgtgcttccaattcatctactaagcgagccgcacgattatagccaattctaaaacgtctttgtagcaatgaaatactagctgtttgcatttcaaccaccaagtttttcgcttcttcaaacaactcatcttgagga

SEQ ID NO: 1128 - DNA, 130 bp, Enterococcus faecalis
taattgggcaatccgttctttgacagcctcttgtttttcaaggtagtccttttcttttgcacagttctgcttccacgacctcatctggtgcatttgacacaaaacagttcatttgaaagtttgccttgca

SEQ ID NO: 1129 - DNA, 77 bp, Enterococcus faecalis
caccacggtcgaagactacttttttgatgcctttttcagcggcacgttcagcaacctagtttaccaacagctgcagc

SEQ ID NO: 1130 - DNA, 89 bp, Enterococcus faecalis
taattctttcactaatactcggaatgattcaggcacacctggttttggaattggttcacctttaacgatggccttcgtatgttttcaca

SEQ ID NO: 1131 - DNA, 442 bp, Enterococcus faecalis
tcactagattactaataatttcttccaaatctgcttcatttttcaccaattcttgttcaattaatggcgcgtaaactggtttgggcataacttcaatataatcgtagaatttggcacgattttttgcttcttcgacacctttttgcatcattgcttcaaaaatttcgccgtttgaacatgcggaaccgattaaaagcccttctcttaacttcgataattgcgaacgaggaatccgtggtactcggaaaaaataatctacattggacatcgaaatcaatttaaaaagattttttaatcctgcttgagttgttgctaaaatcgttgcatggaaaggtcgagctcgtttgtatgagtctccttcgccaatatgacgattcaaatcatcatggaaatgcatatcatgattctctttcgcttcttttaagaaaatccagcacaaatg

SEQ ID NO: 1132 - DNA, 118 bp, Enterococcus faecalis
cacgtttgacttcttttgtccatttgtctaattctttttctaagcgagcaatttcttcctcgatattaatcaacccagctaatggtaagaatagttctgcgcctgttaatacagcgga

SEQ ID NO: 1133 - DNA, 119 bp, Enterococcus faecalis
cgccgccgccacctacaccgataactttaatgactgcaccgttgttaatgttattgtctaatgaaaattccatgatatcgtatcctcctgtttgtgtgattagtcgaaaatgttcgaga

SEQ ID NO: 1134 - DNA, 213 bp, Enterococcus faecalis
tgtctttagctttcatcgctgttttaatgtcgtcattcaatgtggttagcaatgacataccaccaactccaattcattcaaaactagaattttttacgttttctagctgcttcagattttttcttacgctttacacttggtttttcgtagaattcacgtttacgtgattcttgtaaagtacccgcttttgaaacggaacgtttgaagcgacga

SEQ ID NO: 1135 - DNA, 292 bp, Enterococcus faecalis
cgttagcgcacgaacagctggctttgataattgtgttaaaatttgttcaaacgttgtttctagcatgctgtcggttcctccttagcggtcgaaaaacagcgctttttattttacaattaataaatctaagctagcaattgataacgccattttagcaatttgcattaattgttttaatcggttttgtttgactttttcatcctcaaccataaccatcgtttcattgaagtacgcatcaattaacggacgtagatttactagtgcttcatagttttctgcaatcgtgcgtgta

SEQ ID NO: 1136 - DNA, 292 bp, Enterococcus faecalis; identical to SEQ ID NO: 1135

SEQ ID NO: 1137 - DNA, 184 bp, Enterococcus faecalis
caaaccaaacgtccatgatatctgtttctttggtaaactcgccatttggtgaacctggatgtgtaaagccggctggtagtaactcttttgcttcacgcataaaccagatatttgatccatgttctgcaaataaattcgctacatgttcaattgtttctggcgtaatgatggcttccccgttttc

SEQ ID NO: 1138 - DNA, 90 bp, Enterococcus faecalis
cacgtcttatttccctcctacgttgatattgttcaggactgcttattcagcagcttcgaataattgaatttcttttgaatcttcagttaa

SEQ ID NO: 1139 - DNA, 223 bp, Enterococcus faecalis
gcacgaataactgtgtaaagtgagcgttctgttggtaatggaatcggacctgatacgtcagctccagttctttttgctgtttccacaattttatccgctgattgatctaaaataccggtgttcatacgccttttaaacggatacgaattttttgttttgccatcttgttccctccttcgcctattttaaaagtagacatagctccacgaaaatttatccggca

SEQ ID NO: 1140 - DNA, 163 bp, Enterococcus faecalis; identical to SEQ ID NO: 1120

SEQ ID NO: 1141 - DNA, 267 bp, Enterococcus faecalis
tgcatatcatgattctctttcgcttcttttaagaaaatccagcacaaatgacctgttgattccgagtcataaatggcgcggtgatgttgttctaagttgacgccaaattttttcgataaggtatttagacgatggcttttgaaatgcggatacaagaacctagataattctaatgtatcaatgacgggattagccgcttcaggtattccatgtttgccatagcttgtatttaagaaccccatatcaaaagaagcgttgtgggccact

SEQ ID NO: 1142 - DNA, 277 bp, Enterococcus faecalis
aggcacggttggagtcatcgttttctaagaaaggaatacatgctgttgcgactgcgactacttgttttggtgaaacgtccatgtagtcaactttgtctacggcaacttctaagttttcactttgtagacgcgccataacaacatcattggcaaatgtgccatcttcatttaaaagtgagttcgcttgcgctacgatataatggtcttcgatgtctgctgttaagtaatctacttgatcagtaacacggcctgtcgcacgatcaacacggcgataagg

SEQ ID NO: 1143 - DNA, 176 bp, Enterococcus faecalis
aatatcgtttagttgcgctgaatattccacaatgctaatgacattagcaaagactgggttacgtaagcccatgtgatttggtacgtatagttttactgttggcttcaaaaatctcttgcgccaaatcgacaatacctggcatactagcggcgccaccagttaatacaacgcctcca

SEQ ID NO: 1144 - DNA, 87 bp, Enterococcus faecalis
gtcggctactgtaccaatggttcctgcccggtagacatattcttcaccaaaaagaactttcgtgtagttatgggcttcggcttgata

SEQ ID NO: 1145 - DNA, 160 bp, Enterococcus faecalis
tccaaaatagtcattttcttcatttatatgtgaacagttttttacagctgttaggagcagtgagccccatgttaagccgccgccaaatcctgttagcaccacgcgttgttgggaacctaaaattaaggtcccattttcaactgcttcatccaacaaaata

SEQ ID NO: 1146 - DNA, 242 bp, Enterococcus faecalis
tgtattagcaacgtgtgttccaccacataattcgatagagtaatccccaatattaactacacggacttctttgccatatttttcgccaaataacgccattgcgcccatgtttttcgctgtatcaatatctgtttcaattgtgacaacaggaatagcttcccagattttttcgttaacgatggcttccatccgcgctagttcttctgatgtaacttgcccaaaatgagtaaagtcaaaacgta

SEQ ID NO: 1147 - DNA, 113 bp, Enterococcus faecalis
tgacagtggctacttccagatagatattcgcattgttggtaaagcaggatctcattttgtgtgtcacttaaaatttggattagttggtagattttttcagcaggcgtttgtgt

SEQ ID NO: 1148 - DNA, 153 bp, Enterococcus faecalis
gcataaactaacgctaagcgtgcctctttttgagcatcttcatccaaaatccgaacatgggcataatatttattgaacgcttgtgctaaatgaatgctatgtttcgcaataacagatggttcatatttttcagcagcttgcatcacagtttca

SEQ ID NO: 1149 - DNA, 123 bp, Enterococcus faecalis
gcactgatattcaggacaaaggccacagcaatcgaaataatcagcaaactattcccaccttgactcaagaacgggaaagtaattcctgttaatggaataatcccagtaatcccaccaacatta

SEQ ID NO: 1150 - DNA, 132 bp, Enterococcus faecalis
tgcattcccaatgtgcaagtgtccagttggacttggtgcgtaacgcacacgaactttcgtcatgttcattcctctttccattttttaaaaacagacggtttaacgtcgttttcagttatttttccaataaag

SEQ ID NO: 1151 - DNA, 220 bp, Enterococcus faecalis
gccatcaggagaaggatcgccttcttgaacaaagcgtaaatcttcgtaactaattggttggaaatcacgatctggatttacatttgtcaaatgatagccatcttcgttagctccaacaatggcgttggctaaatcttgaacagctaaatctgcataaattttaacatcttcggaaacattgactggaccaattgaaccaaagccagctcctaagacacgg

SEQ ID NO: 1152 - DNA, 62 bp, Enterococcus faecalis
taaagcagcgaccaagccatattgagaaaataagtccattcttttttgctctttgcgttcta

SEQ ID NO: 1153 - DNA, 64 bp, Enterococcus faecalis
caacgacttctaataagcggttgtttgagataattagtagtgtatcaacgttttcttttaataa

SEQ ID NO: 1154 - DNA, 287 bp, Enterococcus faecalis
gacttcctaagtcaaccgcttgaccatcgtacgtgatatcagtagttcctaagactttttccgtagcattacgaataattccctctgttaaatccatcacatcttgataatcagtataagcggtataagcttctagcattgtaaattctgggttatgagtggtatcgattccttcattacggaagacacgaccaatttcatatactttttccatgccaccgacaattaaacgttttaaatgtaactctagggcaatgcgtaagtataagtccatatctaatgcatta

SEQ ID NO: 1155 - DNA, 203 bp, Enterococcus faecalis
ctttctaattcattgcgtttctcttcttctttagccaatacccaaggcgctgtttcatcaatatatttattggcacgagaaactagcgtccaaatttctgcaatggccgtattaaattccattttttccattgcttcatgatattttccaataacattagccgcagttgtcgatagttcactatcaaatggggtaacttttga

SEQ ID NO: 1156 - DNA, 169 bp, Enterococcus faecalis
gcttgacgctgcatgttggcacccatcaaggcacggttggagtcatcgttttctaagaaaggaatacatgctgttgcgactgcgactaccttgttttggtgaaacgtccatgtagtcaactttgtctacggcaacttctaagttttcactttgtagacgcgccataaca

SEQ ID NO: 1157 - DNA, 130 bp, Enterococcus faecalis
caccatcgattgatgtttctaacaatggtgaagaaatagcttttttcgttgcttcaattacacagttcttcgccgctcgctacaccaattcccattaaagctgttccttggttttccatcactgttttca

SEQ ID NO: 1158 - DNA, 185 bp, Enterococcus faecalis
cgcaatccctgctggatttttcccaccagcttgagccatatcaggacgaccaccgccgccaccgccaacttttggcgcaattgctttgattaagtcaccggcttttaagccttttccgttcatgtcttttgtcatagccgctaacaagcttactttttcatcttgtgcagttgctagaactagta

SEQ ID NO: 1159 - DNA, 165 bp, Enterococcus faecalis
tcgcggaagcaaatacggcaaagatgaaatttacgataaactgaatgtggacgtccacaacgttcacaacgagtataagccttgtgttgaatgtttagcaggacgtttgtttttagcaatcattgattttttagccacgtagttcgcctccttatattatttttg

SEQ ID NO: 1160 - DNA, 166 bp, Enterococcus faecalis
gcactaccatcttgattagctgtttctggcgtgttgtgtttattgggttgcaccgttttagctaatttgacagtggcctacttccagatagatattcgcattgttggtaaagcggatctcattttgtgtgtcacttaaaatttggattagttggtagattttttca

SEQ ID NO: 1161 - DNA, 269 bp, Enterococcus faecalis
tttcctaattcttctacgataattgcttgaattttttcaaataccatgtgtatattcctccaaaatagtcattttcttcatttatatgtgaacagttttttacagcgttaggagcagtgagccccatgttaagccgccgccaaatcctgttagcaccacgcgttgttgggaacctaaaattaaggtcccattttcaactgcttcatccaacaaaataggaatactagcagctgaggtattgccatatttatccatattcgttaaaaact

SEQ ID NO: 1162 - DNA, 109 bp, Enterococcus faecalis
taagatatttcgccttttgactcttatctaacatatttagtaaatccaccgcattatcggtatacatctcagctaacatatctgctgcataacttgggcgcatttcagc

SEQ ID NO: 1163 - DNA, 195 bp, Enterococcus faecalis
tcacgtcagcaaagtccaagtttacgtaacctggtgcagtgattaaatctgaaattccttgaacaccttgacgtaatacattatcagccttctctaaatgcttcaagcattggcgttttcttgtcaacgacttctaataagcggttgtttgagataattagtagtgtatcaacgttttcttttaataaggcaatt

SEQ ID NO: 1164 - DNA, 267 bp, Escherichia coli
attgagtagatattcttgttcagaatgtatcagccgatggttctacgattcttaagccacgaagagttcagatagtacaacggcatgtctcttttgactatctggcaaccggcagtgtgttctctcacgcatcacaaaagcagcaggcataaaaaaacccgcttgcgcgggctttttcacaaagcttcagcaaattggcgattaagccagtttgttgatctgtgcagtcaggttagccttatgacgtgcagctttgtttttgtggat

SEQ ID NO: 1165 - DNA, 373 bp, Escherichia coli
ttttgtcctttaaacataacagagtcctttaaggatatagaataggggtatagctacgccagaatatcgtatttgattattgctagtttttagttttgcttaaaaatattgttagttttattaaatgcaaaactaaattattggtatcatgaatttgttgtatgatgaataaaatataggggggtatagatagacgtcattttcatagggttataaatgcgactaccatgaagtttttaattgaaagtattgggttgctgataatttgagctgttctattctttttaaatatctatataggtctgttaatggattttatttttacaattttttgtgtttaggcatataaaaatcaacccgccatatgaacggc

SEQ ID NO: 1166 - DNA, 215 bp, Escherichia coli
cgctgggcatcaaattcagacatcaaggacatccttatagcaaaagggggaaaatgaataatgcaaaaattgccgctaaaagagaagtgtttaacagcaacggctaattatcatccaggaatacgatatataatgacgggatatagcgctaagtatatatattcatctacttatgcgcgcttcagatagcgtttataccagcgttcgaaggcgac

SEQ ID NO: 1167 - DNA, 170 bp, Escherichia coli
ttagcaaaaagtttcaacaatggagtaaatacatccaacatatcaataactctcaactgtaagggtattgaaatgttaacacaagctctcgctgtaggggtatagccgagaccaccgaagcccggaggtggtgaaataaaaccgggcacaacacgaaggcgcatttccga

SEQ ID NO: 1168 - DNA, 185 bp, Escherichia coli
taagtttcattcatcgatgcactttatagaatcatcaatggccataatagtactattaactctcaattttatatttttatcatcactacaaatattaactgaatttatatcaatgattttttttattcttatcttttattttatttactgtttcaatgcaatcagcggcaagttggagtggattt

SEQ ID NO: 1169 - DNA, 351 bp, Escherichia coli
atcgtctgcagatagaggagatattacaataaacaacgaatcagggcatttgatagtcaataccgcaattctatcaggagatatagtcactctaagaggaggagaaattaggttggtattatagcttgtgcgcgccatgattggcgcgcaatttaaacttagtgctttacatcgctattgtcttgatttctttgaattattttataaattaaaaaaacgactgttatgtataagcaaaggtcgaacgaaaaatacattccaaataaatgcttgcttaaatctctatatccttccccgaaaaatgacacataaaattgagatattccaaaaagagatactacaaataaagat

SEQ ID NO: 1170 - DNA, 247 bp, Escherichia coli
aaaacgtcaaaaagagtgttttatcaacagaagaatggaggtctgacagatagtagtaatgcaaaaaaatggagacttaagttgaatgaacgggagtaaagcgaaaagactatagagtgaaggagaaattttgagggtgcgtctcaccgataaagatgagacgcggaaagattagtaactggactgctgggatttttcagcctggatacgctggtagatctcttcacggtgaacagaaacttccttc

SEQ ID NO: 1171 - DNA, 413 bp, Escherichia coli
aacatcctcttgtgtgaataaaacaaccggaccccatcgaggaacggagtccggtgtcatattaaaagcccgaaaattttactcatttttgcgggaattgcaatcaacagttgctaactctgctgtaaaaggccgtcggcggtgcagccagtttggtgccggagtgcgcgcagtcaccggagcgtacacgcagtacgtgaggatgacgagcacatcccggtgccaaaatggcaaacaagccaggccgattagcgaccagggaagcctgggggcatcatacccttcatgcttctcatcatcttcgccattccgcccttcttcattttcttcatcatgcgctgcatgtcgtcgaactgtttcagaagacggttaacgtcctgcacctgcataccgcaaccggcagcaatacggcg

SEQ ID NO: 1172 - DNA, 681 bp, Escherichia coli
ccatctgtccattgagcggacagtttgtgcaacactattttgttgaccggaaaatggaacactttccgcaatgcctgttgctatcacgcttaaaccatttcattgcgatttacacagaacggacgtcctgtcgcagtatattaagtcgtcgatagaaacaagcattgaaaggcacagcagtagtcaaacagtgtgaaacgctactggcgccttacagcgcaaaaaggctggtgactaaaaagtcaccagccatcagcctgatttctcaggctgcaaccggaagggttggcttatttaacttcaacttcagcgccagcttcttccagagcttttttcagtgcttctgcgtcgtctttgctcacgccttctttcagagcagccggtgcagattctaccaggtctttagcttctttcagacccaggccagttgcgccacgtactgctttgataacagcaactttgttagcgccagcagctttcagaattacgtcgaattcagttttttcttcagcagcttcaaccgggccagcagctacagctacagcagcagcagcggaaacaccgaatttttcttccattgcagagatcagttctacaacgtccattacagacatagctgcaactgcttcaatgatttgatctttagtgataggacattttaaattggttcctgaatatcaa

SEQ ID NO: 1173 - DNA, 126 bp, Escherichia coli
agagcttttttcagtgcttctgcgtcgtctttgctcacgccttctttcagagcagccggtgcagattctaccaggtctttagcttctttcagacccaggccagttgcgccacgtactgctttgata

SEQ ID NO: 1174 - DNA, 421 bp, Escherichia coli
agtagtcaaacagtgtgaaacgctactggcgccttacagcgcaaaaaggctggtgactaaaaagtcaccagccatcagcctgatttctcaggctgcaaccggaagggttggcttatttaacttcaacttcagcgccagcttcttccagagcttttttcagtgcttctgcgtcgtctttgctcacgccttctttcagagcagccggtgcagattctaccaggtctttagcttctttcagacccaggccagttgcgccacgtactgctttgataacagcaactttgttagcgccagcagctttcagaattacgtcgaattcagttttttcttcagcagcttcaaccgggccagcagctacagctacagcagcagcagcggaaacaccgaatttttcttccattgcagagatcagttctacaac

SEQ ID NO: 1175 - DNA, 70 bp, Escherichia coli
cggcttagcgcgtcgttggcatcgagcatcgctcccatgccgtttgccagttgatagcgtccatcttgcc

SEQ ID NO: 1176 - DNA, 194 bp, Escherichia coli
tgtttttttccagcaacggagcaaaaggtttgcccttgtgcagctcagggttaaccactttaactacgtggcgacgacccggagatgtcggtttacatttaacaactgccattgtattactcctccgacttactcagcgccgccaacgaagtccagattctggccttctttcagggtgacgtaagcttttttcc

SEQ ID NO: 1177 - DNA, 159 bp, Escherichia coli
caggtggtatggaaacccaaaatggagacgggaagctgaaccagatagttactggaggtgatcaccagcagatgaaataacgataaccagaacaacgccttatagcgttgagtttgcgagaaaacgttcatattgtacctttttgattaaccattgggg

SEQ ID NO: 1178 - DNA, 431 bp, Escherichia coli
cctgtaaattatcgcccgtggcataaaaactgcgtccaaacgccgtctttgccagcagccaggccataaatgccaccagaattatcgtcaaccaaccaattgctgaaacgccaagcagcagcggggcggagagctgtttcagttcggcgggtaacccttcaatccatttgccgccagtccacagcaacatgatgcctctgtacaaccctaacgtgccaagggtggcaacaatggcagggatctttagccacgcgaccaggacaccgttgaaaaatcccgcgagcaaaccaagcagtaaagtcgcgacacaagcaacaggtagtgaatatcctgcgttcagtaacatccccaacagcaccgcgcacattccggtaatcgaacccactgaaacatcaatattgcgcgtaagcattaccagcgtcgcgcccatt

SEQ ID NO: 1179 - DNA, 202 bp, Escherichia coli
gcgcataccctgcagcatcggcccgatggagatcaggtcggcagaacgctgtaccgctttgtaggtggtgttaccggtgttcagatccgggaagatgaacacggtagcgcgacctgcaaccggagagttcggcgctttggatttcgcaacgtcagccattaccgcagcgtcgtactgcagcggaccgtcgatcatcaggtca

SEQ ID NO: 1180 - DNA, 259 bp, Escherichia coli
agcgcgaacgaagtcgatgtgctgcagcttcggtttgtacgggtgacgctgtacgtcctgagctttaactttgatttctttaccgtcaacaacgatggtcagaacttcgctgtagaattcagctttagcttgcatgttcatgactttgtcgtgatccagctcgatagccagcggcgcttctttgccaccgtagatgattgccgggaacttgttagcggcacgcaggcggcggctcgcacccttaccctgctctttacgt

SEQ ID NO: 1181 - DNA, 382 bp, Escherichia coli
gtgagaaatttttcagctgaagagtaatcatcttgatggggtttgtaatcaacattctgataaatatcattaatatattgtgcagcaatgtgtcggcatactatacggttttggggtcgccccggaaaataacattgaccattaagtttaattcttgggaattctttttcttttctatctgattttaggtttaattcttgtttatcaagagtgtctgagcgttgaggtaaaatttccattaggtatttttcaaatattggggcaatggtttgagtaagtgtcgtgttttcgtttttattaattatcgtaatttctttcttatcagcttgtaagacggacgtggaaaatttaatgacaaaatccttgttgctaaagatatgac

SEQ ID NO: 1182 - DNA, 309 bp, Escherichia coli
ggggatccggcagaattttacgctgaccaatgacgcgacgacgtggcatggaaatactccgttgttaattcaggattgtccaaaactctacgagtttagtttgacatttaagttaaaacgtttggccttacttaacggagaaccattaagccttaggacgcttcacgccatacttggaacgagcctgcttacggtctttaacgccggagcagtcaagcgcaccacgtacggtgtggtaacgaacacccgggaggtctttaacacgaccgccacggatcaggatcacggagtgctcctgcagccaagctt

SEQ ID NO: 1183 - DNA, 320 bp, Escherichia coli
aaattttcaggtaccttgtcaccatacttttttttctgagcattaatgatattttgagcttcttgaggatctttaactccccacatttggtggaaagtattcatattaaaaggaaggttgaataatttgtctttataaatcgccagtggagaattagtaaaacgattaaattctactaaatcattaacgtaatcccatatatatttatcattggtatgaaaaatatgtgcaccatatttatgaatctggataccctcacagtcctctgtgtacgcatttccaccgatatgatttcttttctcaatcactaaaactttttt

SEQ ID NO: 1184 - DNA, 174 bp, Escherichia coli
ttaattattaaaatagtgtaacgcgattatgtggttatgggggtaaacattaaataaaccagcggggaggggaggtaaagtgaaaaaataaaaagcggataatcttaataagcaggccggacagcatcgccatccggcactgatacgaggtttatttcagctcatcaaccatcg

SEQ ID NO: 1185 - DNA, 153 bp, Escherichia coli
cagagcttttttcagtgcttctgcgtcgtctttgctcacgccttctttcaagagcagcccggtgcagattctaccaggtctttagcttctttcagacccaggccagttgcgccacgtactgctttgataacagcaactttgttagcgccagca

SEQ ID NO: 1186 - DNA, 268 bp, Escherichia coli
ctttcttaaagccttctttaaaggcgatagaagcagccagtttaaacgccagttcagaggagtcaacgtcatggtaagaaccgaagtgcagacgaatacccatgtctactaccgggtagcctgccagcggacctgctttcagctgttcctggatacctttatcaacggccgggatgtattcgccagggattacaccacctttaatgtcgttgatgaactcgtagcctttcgggtttgaacccggctccagcgggtacatgtcgataac

SEQ ID NO: 1187 - DNA, 292 bp, Escherichia coli
cacatttgcgagcacgcatccagtaataacacaggaaactattttatctacgcgttagcgatagactgcttgcatggcgaaaggaggtaagccgacgatttcagcgggacgctgaaacgggaaagcccctcccgaggaaggggccataaataaggaaagggtcatgatgaagctactcatcatcgtggtgctcttagtcataagcttccccgcttactaagactaccagggcgggggaaaccccgctctaccctcactcctgaaagtatgccttcacgataagattgtcaat

SEQ ID NO: 1188 - DNA, 293 bp, Escherichia coli
  misc_feature (125)..(125): n=g, a, t or c
cggggtccggcgctcatcaacaatcggggggcagcaaggggctgaaacgggaaagcccctcccgaagaaggggccttgtataaggaaagggttatgatgaagctcgtcatcatactggttgtgtngttactgttaagtttcccgacttactaacaactcatcagaggggggagaaatcctcccttacccttgttcctttactctaggttgaaaaaacaacagcgtcaataggcctgccatgtacgaagcgagatctgtgaaccgctttccggttagccttttttatcctgttg

SEQ ID NO: 1189 - DNA, 439 bp, Escherichia coli
  misc_feature (380)..(380): n=g, a, t or c
agagggaataggcggtggagcctgttggcgtcgaaataattagtccatcagatcgctgagaaaacgcaaagatctcgtcgatatacacttcgaactcaatcatatgcgccactttgcctggatgaagcaccacttcatttatcgcggtgctgatgcgtttctggcaatcttgctgacagacttgcgcttccagcaaaaaacgtttctcgctgatgtagtggccttccagcacatcggctaactgttgctgggcgttatcggggtcaaggtcagtcaggaaacccaggttgccacggttgattccaataactttaatatcgtaacgggcgagtgtgcgtgccgagcccagcatattaccgtcgccaccaacgactaccganagatcaagctagttgcccaatctccgcgagcgtgccagttttcacattcttcagttgca

SEQ ID NO: 1190 - DNA, 735 bp, Escherichia coli
ctgctaatatctttctcattgagatgaaaattaaggtaagcgaggaaacacaccacaccataaacggaggcaaataatgctgggtaatatgaatgtttttatggccgtactgggaataattttattttctggttttctggccgcgtatttcagccacaaatgggatgactaatgaacggagataatccctcacctaaccggccccttgttacagttgtgtacaaggggcctgatttttatgacggcgaaaaaaaaccgccagtaaaccggcggtgaatgcttgcatggatagatttgtgttttgcttttacgctaacaggcattttcctgcactgataacgaatcgttgacacagtagcatcagttttctcaatgaatgttaaacggagcttaaactcggttaatcacattttgttcgtcaataaacatgcagcgatttcttccggtttgcttaccctcatacattgcccggtccgctcttccaatgaccacatccagaggctcttcaggaaatgcgcgactcacacctgctgtcacggtaatgttgatatgcccttcagaatgtgtgatggcatggttatcgactaactggcaaattctgacacctgcacgacatgcttcttcatcattagccgctttgacaataatgataaattcttcgcccccgtagcgataaaccgtttcgtaatcacgcgtccaactggctaagtaagttgccagggtgcgtaatactac

SEQ ID NO: 1191 - DNA, 234 bp, Escherichia coli
tgtttacttacaagagattcatctttgtataaataaagataagtaattacgcataaaacaacaatgattataatagcaaaaataaatattatcatctttgatagattacttgagatagccagcatcttgtaaagcctttatcgtttttttatgctctggattaatataatcactacatctatctgagcaatctgttgttgatggacatgtcaacccatggtcatttacagccaa

SEQ ID NO: 1192 - DNA, 234 bp, Escherichia coli
  misc_feature (7)..(7): n=g, a, t or c
tgtttanttacaagagattcatctttgtctaaataaagataagtaattacgcataaaacaacaatgattataatagcaaaaataaatattatcatctttgatagattacttgagatagccagcatcttgtaaagcctttatcgtttttttatgctctggattaatataatcactacatctatctgagcaatctgttgttgatggacatgtcaacccatggtcatttacagccaa

SEQ ID NO: 1193 - DNA, 379 bp, Escherichia coli
aatctgaatggctgcattccttgtttaaggaaaaacgaatgactgattgccgatacctgattaaacgggtcatcaaaatcatcattgctgttttacagctgatccttctgttcttataacacaaggaaacgtacttaaggtgcgtccggtgaaccagtcggacgcacctttaataactataaataagtgtctgggcagatactatataaattaacttagtgaatgattatgctaatgtcatcaattaaataaatataatggcgttaaggcttcccagtaatataattaatactctacttccagagtagaatattaaattttatccgcgtggtgcatcagcacaaatttatcccacaactgttcttctgtctcgacatgc

SEQ ID NO: 1194 - DNA, 330 bp, Escherichia coli
gaaagtatcttcgttattgacatcactggaaaatataacttgcttttcattattaaactcgaagcgcgtaccgtatctggacaaacatttatcgagcttaccaaattcctgaagaggtttaactacagataacatttgcgcgtcctttgcagtaatgcccgtcaaatccttgacgggcattatttagattaaattaccagtatttcttcggagtgaagaatattaccaggtatatttaacacccacgttcgcggaccagtcttgatctacgtcaccaccaccgaggtagttagcatcggtataggcgctgaagttcttggtgaagctaaa

SEQ ID NO: 1195 - DNA, 261 bp, Escherichia coli
caaagaaccttcaacatgaaaaatatccatttgtttgcaaaaaaagattattaggaaggaaattaatgcaattatcgaaaattcaaaaaatatccaaaaatagtatactttattccagaagagttcaatataatgtttgtcttcaatttttcttacttcagggtaatatagattgctcattacattgtgagcttcatctttatttaattttctgttgactccagctctccgtgataacggttttataattagatgcttatc

SEQ ID NO: 1196 - DNA, 341 bp, Escherichia coli
catcctcaataccgttaaatgcaacccgaacccccgttgtccctttgctgcattcacttaacgtaatctgaaaagggacggctggacttgtgctaccggtcgttggaaattgtctggcactgtttttttggagatctacggtaaaattaagcgaatccgatgagactgtgcagccataatcgaggacgcgcccgctaattttaataacgctatctgcggataaagcagaataggtggttaaccccagacataaaccgaggaaaataatgttattgtatttcataatctattgttccttagcgacagattgctgtctgctggttcagtaaggtaccaggaga

SEQ ID NO: 1197 - DNA, 631 bp, Escherichia coli
  misc_feature (614)..(614): n=g, a, t or c
tggtggcattggttgctggagagagaaaacccccgcacgttgcaggtatgcacctgacaacaccacgggggctaatcttgactctagaccactcaagaatagccgcgaaacgttgtcattacaacacaggcggctatatgacgttcgcagagctgggcatggccttctggcatgatttagcggctccggtcattgctggcattcttgccagtatgatcgtgaactggctgaacaagcggaagtaacgtgtcatgcgggcgtcaggctgccgtaatggcaatttgcgcccggaccaggccgcaggggggaaactctgcggcctttttcgttcttactgcgggtaaggcacccagtcgccgccgttcaggcgaacgtacggtttatcctggtattgaataactactgcatttgagttctcggagaccggtgctgtttgtggcaacccactggtgagttttttccagtcaacattgtcttcggtgaaaatcttgccatcgagaacgcgaaccaccagatcggagatagccaggaagctgctcggttgttcgatgacaatcggtgccccctgatgcggtgccttcatgccgaagaatttcaccccaacggggacgtcngtgatagaccgggctag

SEQ ID NO: 1198 - DNA, 631 bp, Escherichia coli
  misc_feature (324)..(324): n=g, a, t or c
  misc_feature (576)..(576): n=g, a, t or c
cggtgacgcagctcgcgcggaaggattgccagaattgctgggatcagcttctgaattttttctctttgcgttttcgtttcacctttcaaccaacggtgatagatattctgctgattgttccagtccttgcctggaaccaggggcaattcgccgcccccctggcgcagatattcttcagtaattgcattggctacccatgcctgccctttttcggctgctagggcaaacaacactgattcgatgtgctcatgcttgattttcatgaatcatttgcctcttgatgtttcaggtatgatcaaatgaggatttgttactgtcatttanttgcttcactgacatattctgcgaacaacatgccgaacgtcgtaaatatgaccagtcaatatcaggacgaagttcttcgcacagaacctcacctcttgttgcacgttcaattgctggacatctctcggcaggcaattgacgtacccctttgatccattgatttacgcttggaggtgatacacctaaaagcctagccattgctgattgcccaccgacaacagcacaagcttgcttgaatgaataagttctctnttttcatcgaatgaactccaaaaacacacagaaatattaggcgacgcctaacccg

SEQ ID NO: 1199 - DNA, 223 bp, Escherichia coli
ttctttttttcgtcaacggtgtccagaatcattttatttacctcgggtacttatgctgatttttattattatggggaaggtgttatttatgagtttcatttatgccgtaacgacaatgaactcgggaattagtataagcagcgcgagaataataatcattgtgcaaatgctaatttaattaatactatttaaatattattttgagcatatgcacataaggttg

SEQ ID NO: 1200 - DNA, 391 bp, Escherichia coli
acagaaaaaggaggcaatatcgggtaaaggcattagcccgacgaatacgtcgggctacaaatattattgtgctgcaggtgttttagcgggttgttgatccacaggttctaactggaagaccacatcgacctgatcatcaaactgaatagcggcctgctcgtaagtttcctgggcggacaccggcgcggcatcggctttcatcatccgcaccattgggctgggctgatagttggaaacatggtagcgcacgctatataccggccccagtttacgatgaaagccgttcgccagttcctgcgcctgatgaatcgcgttatcaatcgctgccttacgcgctttgtctttataggcatccggctgcgccacgcccagcgacacagaacgaattccc

SEQ ID NO: 1201 - DNA, 212 bp, Escherichia coli
ttaataacgctatctgcggataaagcagaataggtggttaaccccagacataaaccgaggaaaataatgttattgtatttcataatctattgttccttagcgacagattgctgtctgctggttcagtaaggtaccaggagaaacttcaggaagcttgtactcgacaatacagtttgagtttttatctttgccccatgaaacctgtaattccc

SEQ ID NO: 1202 - DNA, 223 bp, Escherichia coli; identical to SEQ ID NO: 1199

SEQ ID NO: 1203 - DNA, 391 bp, Escherichia coli; identical to SEQ ID NO: 1200

SEQ ID NO: 1204 - DNA, 1056 bp, Escherichia coli
cagcggtcgtatttttagcatggttttttattggcggctatgctgccccgggagcataaagatgaaaaaaacaacgattattatgatgggtgtggcgattattgtcgtactcggcactgagctgggatggtggtaacgtcacctctaaaaaatagcaaaggctgcctgtgtgcagcctttgtgcaatttaagcgttaacttttaatcttcctgtagataaatagcacgacaatcgcaccaataacggcaaccacgaagctgccaaaattgaagccatcgactttaccaaagccaaacagcgtgctgatccatccgccgactacggcaccgactatccccagcaggatagtcataaagaatccacctccatctttacctggcatgatccacttcgccagaataccggcaataagcccaaaaataatccatgacagaatgcccattgtttcctcacttatctgttttgcattagcgggttagtcgctgataaaaagcatagcacaacatcgggagggcaagatttgtgacgagcatcacggaggttttttttgcgatggcgcagaaattgcgccatcaacgatcagtgataattaccaaccacaaacatcatgttcgttttccgtgtcataagaacgtacggtattcaccagatcttttatcacttcagccgccacttctggcaccagcaaagtcatcggcgtctctgtttcataatcgacagaaacgccattgctgttattggtgacggtcacggtatacgttgctttgcccatgattcatttcccgttatgaatgactttccgttgttgcgcaccttccatcaggacttcaggagccacgaagaagtcaatgttgaaataagtatcgtcagtcatggcttcaatgttgtgccacttttctggagggaacaccgcaaactgccccgcttcgataaggatcacctgatcaggctctgcactgtgttcatcagcgtagccgagatatttgaccgccccatgcataacggaaaggcgtgggtaaacccccgggcgcgttcctttatcaagatgacgttcg

SEQ ID NO: 1205 - DNA, 451 bp, Escherichia coli
gcggccaatgttttttgtcctttaaacataacagagtcctttaaggatatagaataggggtatagctacgccagaatatcgtatttgattattgctagtttttagttttgcttaaaaatattgttagttttattaaatgcaaaactaaattattggtatcatgaatttgttgtatgatgaataaaatataggggggtatagatagacgtcattttcatagggttataaatgcgactaccatgaagtttttaattgaaagtattgggttgctgataatttgagctgttctattctttttaaatatctatataggtctgttaatggattttatttttacaattttttgtgtttaggcatataaaaatcaacccgccatatgaacggcgggttaaaatatttacaacttagcaatcaaccattaacgcttgatatcgcttttaaagtcgcgttt

SEQ ID NO: 1206 - DNA, 445 bp, Escherichia coli
aaagatgatgtgatgagaaagtcaatttgaataagacaatattaagagctaaaaaaatgtcaaaaaacactaaatcaaaaaataatggcattagaaaatataatgcgaaaacggaggtgaaattagtttatttcaaatgaggaaaatctcccggcgaaaaaaccgggagatgaaagtgtgatgggtatcaaataaacaacagaggagaaatttttaacgcagccattcaggcaaatcgtttaatcccattgcctggcggataagttgcggcttaacgccaggaagcgtgtcggccagtttcaaaccaatatcacgcagcagttttttcgccggattggtaccggaaaacagatcgcggaatccctgcataccagccagcatcaacgccgcactgtgcttgcggctacgctcatagcgacgcagataaatgtactgcccgatgtct

SEQ ID NO: 1207 - DNA, 223 bp, Escherichia coli; identical to SEQ ID NO: 1199

SEQ ID NO: 1208 - DNA, 223 bp, Escherichia coli; identical to SEQ ID NO: 1199

SEQ ID NO: 1209 - DNA, 637 bp, Escherichia coli
cagggggtttgttgtgggcaatgatgcatttaagttatcgtctgcagatagaggagatattacaataaacaacgaatcagggcatttgatagtcaataccgcaattctatcaggagatatagtcactctaagaggaggagaaattaggttggtattatagcttgtgcgcgccatgattggcgcgcaatttaaacttagtgctttacatcgctattgtcttgatttctttgaattattttataaattaaaaaaacgactgttatgtataagcaaaggtcgaacgaaaaatacattccaaataaatgcttgcttaaatctctatatccttccccgaaaaatgacacataaaattgagatattccaaaaagagatactacaaataaagatgcctttattttattatttctaataaaaatagaagcaataaaaaataataacaatgatataaatctaatgtttttaaatatattgtcttttatgttagtaatagtcgttagtatgtttgattctccatatattacgtgtagttttttatatacatggaaataattttctttatactgagacatcacaccatcatcaaatggaagtttgaagatggtgcttggtttgctaaccaataaaaagagtgcattcg

SEQ ID NO: 1210 - DNA, 351 bp, Escherichia coli
ctatccttgatgaaaccgcgagcaaagataggtgattacgtcatggttttacagaaaattacagaaaaaggaggcaatatcgggtaaaggcattagcccgacgaatacgtcgggctacaaatattattgtgctgcaggtgttttagcgggttgttgatccacaggttctaactggaagaccacatcgacctgatcatcaaactgaatagcggcctgctcgtaagtttcctgggcggacaccggcgcggcatcggctttcatcatccgcaccattgggctgggctgatagttggaaacatggtagcgcacgctatataccggccccagtttacgatgaaagccgttcgccag

SEQ ID NO: 1211 - DNA, 94 bp, Escherichia coli
ttggcatctcggtgttgccgatcttcatgatatccagcccgccggaaacttcttcccaaacggttttgctgttatccattgagtcacggaactg

SEQ ID NO: 1212 - DNA, 232 bp, Escherichia coli
cgtgccgagatgatcctgtaaccatcatcagttgtgaagtagtgattcacgacttcaaggcgcttttcaaaagggtattttggctttgacatattaggggctattccatttcatcgtccaacaaaatgggtgcagtacatactcgttggaaatcaacacaggaggctgggaatgccgcagaaatatagattactttctttaatagtgatttgtttcacgcttttatttttca

SEQ ID NO: 1213 - DNA, 359 bp, Escherichia coli
caacacaggaggctgggaatgccgcagaaatatagattactttctttaatagtgatttgtttcacgcttttatttttcacctggatgataagagattcactgtgtgaattgcatattaaacaggagagttatgagctggcggcgtttttagcctgcaaattgaaagagtaagagtcttcggcgggaaattattcccgccttacttacggcgttgcgcattctcattgcacccaaatttattcttcacaaaaataataatagattttattacgcgatcgattatttatttcctgaaaacaaataaaaaaatccccgccaaatggcagggatcttagattctgtgcttttaagcagagatt

SEQ ID NO: 1214 - DNA, 232 bp, Escherichia coli; identical to SEQ ID NO: 1212

SEQ ID NO: 1215 - DNA, 292 bp, Escherichia coli
tgaacagcagagatacggccagtgcggccaatgttttttgtcctttaaacataacagagtcctttaaggatatagaataggggtatagctacgccagaatatcgtatttgattattgctagtttttagttttgcttaaaaatattgttagttttattaaatgcaaaactaaattattggtatcatgaatttgttgtatgatgaataaaatataggggggtatagatagacgtcattttcatagggttataaatgcgactaccatgaagtttttaattgaaagtattgggttg

SEQ ID NO: 1216 - DNA, 404 bp, Escherichia coli
caacmctattttgktggaccggaaaakggaacactttccgcawkgcctgttgctatcacgcttaaaccatttcattgcgatttacacagaacggacgtcctgtcgcagtatattaagtcgtcgatagaaacaagcattgaaaggcacagcagtagtcaaacagtgtgaaacgctactggcgccttacagcgcaaaaaggctggtgactaaaaagtcaccagccatcagcctgatttctcaggctgcaaccggaagggttggcttatttaacttcaacttcagcgccagcttcttccagagcttttttcagtgcttctgcgtcgtctttgctcacgccttctttcagagcagccggtgcagattctaccaggtctttagcttctttcagacccaggccagttgcg

SEQ ID NO: 1217 - DNA, 700 bp, Escherichia coli
aaaccttttctcctgtttttcatagagggcaacccatgtcctgacctgggttcgggggacaccaaaacgtgccgagatgatcctgtaaccatcatcagttgtgaagtagtgattcacgacttcaaggcgcttttcaaaagggtattttggctttgacatattaggggctattccatttcatcgtccaacaaaatgggtgcagtacatactcgttggaaatcaacacaggaggctgggaatgccgcagaaatatagattactttctttaatagtgattgtttcacgcttttatttttcacctggatgataagagattcactgtgtgaattgcatattaaacaggagagttatgagctggcggcgtttttagcctgcaaattgaaagagtaagagtcttcggcgggaaattattcccgccttacttacggcgttgcgcattctcattgcacccaaatttattcttcacaaaaataataatagattttattacgcgatcgattatttatttcctgaaaacaaataaaaaaatccccgccaaatggcagggatcttagattctgtgcttttaagcagagattacaggctggttacgttaccagctgccgggcctttagcgccgctttcgatggtgaaggacactttctgaccttcgtccagagatttgtaaccatcgttctggatagcagagaagtgtacgaac

SEQ ID NO: 1218 - DNA, 464 bp, Escherichia coli
tcgcgtgtttaccttcaacatcggtaactttctggcggatagtttcacggtaagcaacctgcggtttacctacgttcgcttcaacgttgaattcacgcttcatacggtcaacgatgatgtcgaggtgcagttcgcccatacccgcgatgatggtctggttagattcttcgtcagtccatacacggaaagacgggtcttctttagccagacggcccagagccagacccattttttcctggtcagctttggttttcggttcaactgcgatggagattaccggctcagggaattccatacgttccagaatgatcggcgcatccgggtcacacagggtgtcaccagtggttacgtctttcagaccgatagcagcagcgatgtcgcccgcgcgaacttctttgatctcttcacgtttgttagcgtgcatctgaacgatacgaccgaaacgctcacgtgcagctttcacg

SEQ ID NO: 1219 - DNA, 98 bp, Escherichia coli
agatgattgccgggaacttgttagcggcacgcaggcggcggctcgcacccttaccctgctctttacgtacttctgcgttgatagtaaacatttctttc

SEQ ID NO: 1220 - DNA, 173 bp, Escherichia coli
acaaaggcgaacaaagcctgtgaagcccgaaggctccacagacagtgctacttgaaggccttactgtttcttcttaggagcgagcaccatgatcatctggcggccttcgatcttcgttgggaaggattcgaccactgccagttcttgcaaatcgtctttcacgcgattaagca

SEQ ID NO: 1221 - DNA, 157 bp, Escherichia coli
tgcaaggcaggcgctgaaagaggcgaatagtctacctggattatggtgaattgctccgccagatgttacagggtttattcactcatcgcatcgcgccagatcttgtcaacgatacgttgcgccagcacggcctgttcgccggcggtttgcggaactg

SEQ ID NO: 1222 - DNA, 161 bp, Escherichia coli
gcgctattcagcgtaattggcagcagctgcggatcgtcatcaatcttctctgacagcggctgatgtacttcaaccagacgcgcaccgtttggttcggcagagacttttatcggagtgttgatgatattcactttggtgcctggggtgacctggctaaagag

SEQ ID NO: 1223 - DNA, 259 bp, Escherichia coli
cgcaggcagctgatggtcaacaggatgagagaaacccagagacaggttaatcacattgcctttaaccgctgcacggtaacctacaccaaccagctgcagcttcttagtgaagccttcggtaacaccgataaccattgagttcagcagggcacgcgcggtaccagcctgtgcccaaccgtctgcgtaaccatcacgcggaccgaaggtcagggtattatctgcatgtttaacttcaacagcatcgttgagagtacgagtc

SEQ ID NO: 1224 - DNA, 175 bp, Escherichia coli
accatacagagaggagatcaaagatgtgccacttgaccggaacagcgtttacagcatgttggataaaagtatcaagtttactcattcgcttcagtctgttgttattgttgtgatttatgaatcatagcacaggtcgtatcgacttctggccctggcgctttaccccaccagggcc

SEQ ID NO: 1225 - DNA, 266 bp, Escherichia coli
tggagaaaacgggtgattgataaagcaatcatcgttctaggggcgttaattgcgctgctggaactgatccgctttctgcttcagcttctgaactgatagcggaaacgtaattaagggctaagagcacactactcttagccctttaacatttaacgcattgtcacgaactcttctgccgccgttgggtgaatggcgacggtattgtcgaagtcttttttggttgcccccatcttcagcgccaccgcgaagccctgcaacatttcgtc

SEQ ID NO: 1226 - DNA, 147 bp, Escherichia coli
gcagaacggctttttcgttatttatatcgggagaattaatatgaaactgcaataaattctttaatgtgatacaagcctgggcgttcttttttccttcaattgcgacaaatgtaatactttggttaatgattggttggtcgtttacat

SEQ ID NO: 1227 - DNA, 327 bp, Escherichia coli
  misc_feature (19)..(19): n=g, a, t or c
  misc_feature (118)..(118): n=g, a, t or c
  misc_feature (281)..(281): n=g, a, t or c
ggctggaggtgatgaccgncatttccctgatgccagcagcctgttcggcagataactgcaatgtacgatcaggttctgtggtttcggtggtagaaaagcgcaaaacatcgctgctttncgtcaaccgccagtatggattgtgcgatccgagaaagttgtacaacgttgtggactccctaacggttttcatgatgcatatcctccggttaacagcggagtccgcggttaaataaaaggaacaacatgacttacatgaaattaacggcggctaaacgcattgntttttttatatatttatttgtaatccagttttggaaaaacgccagt

SEQ ID NO: 1228 - DNA, 173 bp, Escherichia coli; identical to SEQ ID NO: 1220

SEQ ID NO: 1229 - DNA, 121 bp, Escherichia coli
aaataactttccgcatagcttaaaaaggagggtaaaatggcaagagatgaataacaaattccggccagacaccaggtatacctctgcggaatatccgtagtagtgggtattttcataatta

SEQ ID NO: 1230 - DNA, 118 bp, Escherichia coli
gtttcatccctggcaagcagaacggctttttcgttatttatatcgggagaattaatatgaaactgcaataaattctttaatgtgatacaagcctgggcgttcttttttccttcaattg

SEQ ID NO: 1231 - DNA, 188 bp, Escherichia coli
tccctttaactaccagggtgttaacgacttcgacttcgacttcaaacagtttctgcacagcagctttgatttctgctttggtcgcgtctttagcaactttgagtacgatggtgttggatttttccatcgcagtagacgctttttcagaaacgtgcggtgcacgcagcaccttcagcagacgttcttca

SEQ ID NO: 1232 - DNA, 149 bp, Escherichia coli
gatttttaccggattaattttaaacatggtctgatttcttttattgagctagtcaaaatgcggtgataagagcgggattgtcccaatccacgctcttttttatagagaagatgacgctaaattggccagatattgtcgatgataatttg

SEQ ID NO: 1233 - DNA, 250 bp, Escherichia coli
gaaactcagtggaatgggggagccgcaatagcgaacatgttccatgccgccaataatctgtgcgcggtgaatatgcccgagcgcgatgtagtcggctggtggaaagttttgtgccggaaacgcgtccagcgtgccaatataaatgtcacgcacggcgtcacttttactggcccccacggtcgttaaatgtcccgtggcgatgatgggcagaggctgatcgccgcgcagtttgcaggcatcggcatagtgt

SEQ ID NO: 1234 - DNA, 187 bp, Escherichia coli
ttctgattaacagcggacttaatcttgagcaaagtcaatgggcgacaatgcaaattataatgctattaattttatactgttcaagcatgttatgtctggctgaagccaatttagccacagtaaccgttaatgatggcgaaacttcatcaatattaattcgtaaagcatctatctctgtatcattaat

SEQ ID NO: 1235 - DNA, 276 bp, Escherichia coli
ggagagtttgcagtcatttaaaaggtaacatgacaatgcatgatgaatataacaacatatgatgttatgtaatgtggaggaagatcacaaaatttcgcacaggatcgcgctgtggctaatggatgtagttatcaaattgaatttaaagtgaaaatatttttacgggcgggggcaagaaggacatagaaacaaatacgccctcggaaaatccagagggcgtcgggcaattaaaccggtgttagccgatttctgtcagagacttactgtgcagtagga

SEQ ID NO: 1236 - DNA, 150 bp, Escherichia coli
ctcctgtatctatattctaattaaaaagttaaaaacgttaacggcttatgctacggcaggcacgcgattaccaggcccagatcgcctttggaaaccatggctttcggacgcaggtgacgtttacgtttggtcgcttttttggtcagaatg

SEQ ID NO: 1237 - DNA, 328 bp, Escherichia coli
cgcgtggagagtcatcagttgcacctgatccagctcttcttcactctcaccacgctccatcatgtcgcgcaaagtaaagcgcgtcaccacctgggtgagcgtcatcggctcatccagttcactgccttccagcatctccgtcatccagctaaacagttggttgacgttcttcatgcgcatttcggcggctttcgggctgggcgatgtttcgtacagccaggattcataatccatgccatggatcagatcacgcaccgcggcaatcggctcccgctccgccagacgctggatttctgccaaccagtgagtgaagcgggtcaatgcttca

SEQ ID NO: 1238 - DNA, 212 bp, Escherichia coli
aatagcgggtatgcacgcctttctttttttcgtcaacggtgtccagaatcattttatttacctcgggtacttatgctgatttttattattatggggaaggtgttatttatgagtttcatttatgccgtaacgacaatgaactcgggaattagtataagcagcgcgagaataataatcattgtgcaaatgctaatttaattaatactatttaa

SEQ ID NO: 1239 - DNA, 332 bp, Escherichia coli
cacgcaatgagttgaatatgacgcattttatttgtagtttattattttttttatttactattttctgtagcgaaactaatatccagtgtccgccagtatttatggggaataactggacttcattcggccatgatggatcgctcttaatattttcattgagagcgtcttccaggtgagttctggtggagtaggggacgtagagaccagtaggataattgacttgagtattttttgcattagcggcgatcttctgaagatagcaagctatttcatctgtggttaattgacgatttttatcccagaagtttgtaccatcactcagttcattattc

SEQ ID NO: 1240 - DNA, 157 bp, Escherichia coli
tgaaatcacgaccgaaggtagtttcggaaacagtcagcgcgctctgcgcgtctttcaatactaattccattgctatctccttacgccttcacagctggtttaacgatcaggtcgctaccggttgcacccgggacagcacctttaaccagcagcaggt

SEQ ID NO: 1241 - DNA, 178 bp, Escherichia coli
tgtttttttccagcaacggagcaaaaggtttgcccttgtgcagctcagggttaaccactttaactacgtggcgacgacccggagatgtcggtttacatttaacaactgccattgtattactcctccgacttactcagcgccgccaacgaagtccagattctggccttctttcagggtg

SEQ ID NO: 1242 - DNA, 224 bp, Escherichia coli
agttctaatctgattacgaaaaagatatgttgcgggaggcgttgcctccccaacatataagtggctccctcaagccacttcctttagaagcacaaccttgcttctaactatataaaccttctgttatatattaccctttatttttgggggcgtctcaacgccccatttttaataatttttagtaaacaattggcatattaattagagttattaacaacgatatc

SEQ ID NO: 1243 - DNA, 196 bp, Escherichia coli
cctctaccttagaactgaaggccagcttcacgggcagcatctgccagtgcctggacacgaccatgatattggaacccggaacggtcaaaggatacatctttgatgcctttttccagagcgcgttcagcgacagctttacccacagctgcagccgcgtctttgttaccggtgtacttcagttgttcagcgatagctt

SEQ ID NO: 1244 - DNA, 198 bp, Escherichia coli
gccataatcgaggacgcgcccgctaattttaataacgctatctgcggataaagcagaataggtggttaaccccagacataaaccgaggaaaataatgttattgtatttcataatctattgttccttagcgacagattgctgtctgctggttcagtaaggtaccaggagaaacttcaggaagcttgtactcgacaatac

SEQ ID NO: 1245 - DNA, 165 bp, Escherichia coli
cggcatttcacagcattacttggtgatacgagtctgcgcgtctttcagggcttcatcgacagtctgacgaccgctggcggcgttgatcaccgcagtacgcacggcataccagaaagcggacatctgcgggatgttcggcatgatttcacctttctgggcgttttc

SEQ ID NO: 1246 - DNA, 321 bp, Escherichia coli
cagttcgcccatacccgcgatgatggtctggttagattcttcgtcagtccatacacggaaagacgggtcttctttagccagacggcccagagccagacccattttttcctggtcagctttggttttcggttcaactgcgatggagattaccggctcagggaattccatacgttccagaatgatcggcgcatccgggtcacacagggtgtcaccagtggttacgtctttcagaccgatagcagcagcgatgtcgcccgcgcgaacttctttgatctcttcacgtttgttagcgtgcatctgaacgatacgaccgaaacgctc

SEQ ID NO: 1247 - DNA, 236 bp, Escherichia coli
cactccatcgcatggagaaaacgggtgattgataaagcaatcatcgttctaggggcgttaattgcgctgctggaactgatccgctttctgcttcagcttctgaactgatagcggaaacgtaattaagggctaagagcacactactcttagccctttaacatttaacgcattgtcacgaactcttctgccgccgttgggtgaatggcgacggtattgtcgaagtcttttttggttgc

SEQ ID NO: 1248 - DNA, 333 bp, Escherichia coli
cacacaaccacagtgatgtggctggtgcgcttcaggatgcgatctgcacgaccttttgcacgcggcataatgcgcttcatgctcgggccttcgtctacgaaaattttcgtaactttcagatcgtcaatgtcagcgccatcgttgtgttcagcgttagcaatggcagattccagaactttcttgaccagtacagccgctttcttgttggtgtaggtcaaaatatccagagcctgcgacactttcttaccgcgaatcaggtcagcaacaaggcgaaccttctgagcagaagaacgagcatggcgatgtttagcgatagtttccatctcttcctcc

SEQ ID NO: 1249 - DNA, 172 bp, Escherichia coli
gatagttaattggcatgccgacgctggagtaggcatccatcatctgttctgaggttatcacttcaatctggtgcgggtaggtatccagccggtagagtttcgccacccggtctatctctgccagataaacatccagcaggtcgaacgtccagtcgggtccatcgctcaaggg

SEQ ID NO: 1250 - DNA, 195 bp, Escherichia coli
tgcgggggaatttaaactgtgaaaagattcacaaatagctgcggttaggaatgtgatatccgcagcttatcaggtgaagtaataattattctcaataattaactggagaggggaatattaacgatagaaaataagataaacaatcatgccgatagataaaattccgaagccgatatatgccaccatataagcgaa

SEQ ID NO: 1251 - DNA, 167 bp, Escherichia coli
cgcgaactcgatctggataccgataatgttagcccgctttcagcgtgttcaggtctactacacccgccttctactttagccaggtcagacagacgaatttcggctgtaatcgctgctttacgagaagtgaagccgaatttcggcagacgacggtacagaggcatctg

SEQ ID NO: 1252 - DNA, 311 bp, Escherichia coli
aacataaggagtgcattatgcgcatagctaaaattggggtcatcgccctgttcctgtttatggcgttaggcggaattggtggcgtcatgctcgcaggttatacctttattttgcgtgctggctaagcgcctgcaccagcctttcaaacaggcggtctgcgatgatcgccgcagtgccaccagtaacgccccctggatcacatacgcggtattaaatccgctaagcccgatgatgatgggcgtacccagcgtgctggcccctaccgttgaggcgatcgtcgccgtaccaatgttgataatcaccgaagttcg

SEQ ID NO: 1253 - DNA, 218 bp, Escherichia coli
  misc_feature (29)..(29): n=g, a, t or c
  misc_feature (36)..(36): n=g, a, t or c
  misc_feature (52)..(52): n=g, a, t or c
  misc_feature (149)..(149): n=g, a, t or c
taatgaccgagttcacatttttaatttanatcaaangaggaaagaataagcngaaaaagcccgccataacagcgggcaggaggatttagaactgataaaccagacctaaagcgacaatatcatcggtagagatgccattggcagcgtanaagctgtcatcttcatccaacaggttgattttatagtcaacgtaggtggacatgtttttattgaaatag

SEQ ID NO: 1254 - DNA, 144 bp, Escherichia coli
tgctttgctcgcctcatgacgattatgatcgttttgttttaaaggaggaagtatcggcagtagacgaatgagtacgatgtaagcgcaaatctcaatagccacaaaaccaatagaaatcaacagttcttcccaggtcgggaagta

SEQ ID NO: 1255 - DNA, 338 bp, Escherichia coli
gtctggttctgaccgatagaacccggaacgcggtgagacaaggagttaccgtgagtagcgtcctgggtacggaagttccagcgcttaacggtacctgcgaaacctttacctttagaggtgccagttacgtcaacttttttaacgtcagcaaacagttcaacgctaatgctctgacctacagtgaactcttcgccttcagccaggcggaattcccacagaccacggccagcttctacgccagctttagcgaagtggccagcttcaggcttggtcacacggttagcttttttagcaccggtggtcacctgaatagcacggtagccatcgttagccaggtc

SEQ ID NO: 1256 - DNA, 262 bp, Escherichia coli
ctgcaaccggaagggttggcttatttaacttcaacttcagcgccagcttcttccagagcttttttcagtgcttctgcgtcgtctttgctcacgccttctttcagagcagccggtgcagattctaccaggtctttagcttctttcagacccaggccagttgcgccacgtactgctttgataacagcaactttgttagcgccagcagctttcagaattacgtcgaattcagttttttcttcagcagcttcaaccgggccagcag

SEQ ID NO: 1257 - DNA, 242 bp, Escherichia coli
taattttgttggaaagtaatcatatataaattttggaaccaaccctgcaatacctaaatttgtaaacattaatccaaagagacataatcctataagagaagagtttttcacagaaataaaaaaaagaggacaaaggaaaataaatgaagttattagaccgactacaaaggctttttttacaccaatcttatcaccaacaaaaccaaaaaatattgtacctgtcagtgttcctaaacctgcta

SEQ ID NO: 1258 - DNA, 311 bp, Escherichia coli
catatattttatcaagcttctggtatgtttttttatagaacgcaaaatcagtcttgagtagtacggaagggctattgttgtaattaataatatcatctggttttaggacaagtaaaaaacccgttaagtaatttgcattaatgttatacgtatttgttaaatccgatatttgctggtattcacacttcatcttcttatttttatcaagcctagatagaggtgcaacatgattttcaattttatattttttatcatttattattatatcgtatgtataatcatgtaaaataccattcgttgttattggcata

SEQ ID NO: 1259 - DNA, 269 bp, Escherichia coli
cgctttgtaggtggtgttaccggtgttcagatccgggaagatgaacacggtagcgcgacctgcaaccggagagttcggcgctttggatttcgcaacgtcagccattaccgcagcgtcgtactgcagcggaccgtcgatcatcaggtcaggacgtttttcctgcgccagacgagttgcttcgcgaactttttctacgtcgctacctgcaccagaagtaccggtggagtaggagagcatagcaacgcgcggttcgataccgaaggccgcag

SEQ ID NO: 1260 - DNA, 509 bp, Escherichia coli
cagcgacaacaacctggtagaacggacgctttttagcgccgtgacgtgctaaacgaatagttaccataacatcctcttgtgtgaataaaacaaccggaccccatcgaggaacggagtccggtgtcatattaaaagcccgaaaattttactcatttttgcgggaattgcaatcaacagttgctaactctgctgtaaaaggccgtcggcggtgcagccagtttggtgccggagtgcgcgcagtcaccggagcgtacacgcagtacgtgaggatgacgagcacatcccggtgccaaaatggcaaacaagccaggccgattagcgaccagggaagcctgggggcatcatacccttcatgcttctcatcatcttcgccattccgcccttcttcattttcttcatcatgcgctgcatgtcgtcgaactgtttcagaagacggttaacgtcctgcacctgcataccgcaaccggcagcaatacggcgtttacgcgaacctttgatgatttctggct

SEQ ID NO: 1261 - DNA, 288 bp, Escherichia coli
taatctagctatgaggaacaaataaaataaaaatattatttttaatactgaagcaacatctttggctgctttcttttttaatattgctggccgattcattttctgatatcggccatttttattgcgggtatcaggccagtttatggttagccattaattccagcgcctgcactaacgcagagtgatccaactggctgccaccgtttgccgcacaggtattaaataactcctggcaggtcgcagtgtttggcaggttcagcgcaagtgctttcgcactttgcagtgcca

SEQ ID NO: 1262 - DNA, 192 bp, Escherichia coli
ggcatcatgctgtgttgcgcggcaacgcgaaagacgtctggcgtcaggcatggcagggtgagtatgggcgtagcgctacgttgccatactggtatttgcgagagatctttattcagaaaccggaggtaatctttgatgatgtcgtgactaatatgagcaaccaaagtgttgttaagagaggagacgtcgata

SEQ ID NO: 1263 - DNA, 424 bp, Escherichia coli
cttagccatttagtaaccctaccttacttgcggaacgggaagtcaaaggcagccagcagagcgcggccttcttcgtcagatttcgcagtagtggtaatggtaatatccaaaccacgaacgcggtcgactttatcgtagtcgatttctgggaagatgatctgctcacggacacccatgctgtagttaccacgaccgtcgaaagacttagcggacaggccacggaagtcacggatacgaggtacagcaatagtgatcaggcgctcaaagaactcccacatgcgttcgccacgcagagttactttacagccgatcggatagccctgacggattttgaagcctgcaacagatttgcgtgctttggtgatcagcggtttttgaccggagattgctgccaggtctgctgctgcgttatccagcagttttt

SEQ ID NO: 1264 - DNA, 328 bp, Escherichia coli
cgttgtcgcctgcacggaagccacacttcagaatacgagtgtaaccaccggcacggctcgcgaaacgcgggcccagttcgttaaacagttttgccacgatctcgttatcacgagtacgggcgaatgccagacgacgattagcaacgctatcagtcttggcaagagtaatcagcggctcaactacgcggcgcagctctttcgctttaggcagagtcgtcttgatgatttcatgacgaaccagtgaacctgccatattgcggaacatagcctggcgatggctgctgttgcggttcagttgacgaccactcttacgatggcgcatgacctt

SEQ ID NO: 1265 - DNA, 458 bp, Escherichia coli
tgataataagatttcctgttttaaggaaatctttaaatacagcgatttctttctcagataaacgaagcaatactcgttgctctggtagtaatgaataatgcttttgaatatgtgctcgcaatcttgagaaggaaatggcgaccacgaaagaaaaggcaaaaacgataatctgaaagagccaaggtatttcagtataagcattgaatgcgacagtaaactctttcggtatcagccagagagtgagaccaaaaatgataatcgtatacataagtctttcgagtggctcgttagcaaaaagtttcaacaatggagtaaatacatccaacatatcaataactctcaactgtaagggtattgaaatgttaacacaagctctcgctgtaggggtatagccgagaccaccgaagcccggaggtggtgaaataaaaccgggcacaacacgaaggcgcatttccgat

SEQ ID NO: 1266 - DNA, 415 bp, Escherichia coli
cgggtataaaaaaacccgccggggcgggtttttttacgttgcttcagattactctgcagcagcttctgctttctctgaacgatcaaccagctcgatgtaagccatcggcgcgttgtcgcctgcacggaagccacacttcagaatacgagtgtaaccaccggcacggctcgcgaaacgcgggcccagttcgttaaacagttttgccacgatctcgttatcacgagtacgggcgaatgccagacgacgattagcaacgctatcagtcttggcaagagtaatcagcggctcaactacgcggcgcagctctttcgctttaggcagagtcgtcttgatgatttcatgacgaaccagtgaacctgccatattgcggaacatagcctggcgatggctgctgttgcggttcagttgacgacca

SEQ ID NO: 1267 - DNA, 145 bp, Escherichia coli
gcgcgtctttcaatactaattccattgctatctccttacgccttcacagctggtttaacgatcaggtcgctaccggttgcacccgggacagcacctttaaccagcagcaggttgcgctcagcgtcaacgcgtactacgtcaaggc

SEQ ID NO: 1268 - DNA, 215 bp, Escherichia coli
cttcgtcagtccatacacggaaagacgggtcttctttagccagacggcccagagccagacccattttttcctggtcagctttggttttcggttcaactgcgatggagattaccggctcagggaattccatacgttccagaatgatcggcgcatccgggtcacacagggtgtcaccagtggttacgtctttcagaccgatagcagcagcgatgtcg

SEQ ID NO: 1269 - DNA, 259 bp, Escherichia coli
ccgaaaatcttattcagcgccttcatctgctttggtcctttaatccatagagcaatccgttgagcaagggtggcgtaaccgatcatcacaataatatcgaccacaatagtggtgacgccgagcacgatatactgcatcagttgcggctgttgcggcatgatgaattgcggaaatagcgccgccagaaacacaatacttttgggattggtgagattcacaaaaactgcgcgctggaacaaatgtcgacgcgattgagtag

SEQ ID NO: 1270 - DNA, 143 bp, Escherichia coli
gaacagctccagcgccaacagcgctccaacgcccgccgagggcagggtggagagaatcgtcagcggatgtacgtaactctcgtaaaggatacccagcacgatatacaccgtggcgatggcggcgataatcaggatcacctgcg

SEQ ID NO: 1271 - DNA, 236 bp, Escherichia coli
aaaggttcggcaaaagccataaccttttcgtcagctttggccggataagggacacattgcgacgtttcgaccattttataacgggtaaaaccaccatcaacatgagggaaatacatggcactgccaaaaaaacgcatatctgtacactgattctcgttatgttcaatgcagtatttgcagtgaccgcacggtttagacggattaatggctaccgtttgcccttcatgtaattctga

SEQ ID NO: 1272 - DNA, 194 bp, Escherichia coli
cgcaagggtgagcatttgcagcgaatcagaaagggcgcagaacagtgaagacaacagaaaaacgaccagaccgcatttataaatacgtcgatagccaaacatatcgcccagaaacgaaaacgagagcagggagatgacaatggcgatttgataggcgttcactacccagatggaactggctggcgtggcatgaa

SEQ ID NO: 1273 - DNA, 177 bp, Escherichia coli
gacgcggcgaacgatttcggcttgttcttttactggaggtaataaaacaacttgggatttgatatcttttcctgaaatacctttttgaccagaagttgttttcacgcagttcatcattgcatttcgtgctgagggggatgaaaaaaatatttcgatatattctggtaaagcatcttt

SEQ ID NO: 1274 - DNA, 266 bp, Escherichia coli
gctttcttgttggtgtaggtcaaaatatccagagcctgcgacactttcttaccgcgaatcaggtcagcaacaaggcgaaccttctgagcagaagaacgagcatggcgatgtttagcgatagtttccatctcttcctcctaccttatttcttcttcgcttttttatcagcagcgtggccgcgataagtacgagtcggtgcgaattcacccagtttgtgaccaaccatttcgtcggttacaaataccggaacgtgctgacgaccatta

SEQ ID NO: 1275 - DNA, 128 bp, Escherichia coli
tcggtttcaattttcaggaacatccagcggggaggtaaacgatacgtggtaattttggtgattttcattgcactgcctctcgatacgccttaacaaatgctgctgcctgctgcgcggtgcgctctacg

SEQ ID NO: 1276 - DNA, 161 bp, Escherichia coli
gactgggagttaacaagcgtaactccctgggaaatgcgagcttaaccactcaggggttagctttattacttagaaacggtcagacgagcgcggcctttagcacgacgacgtgccagaacctgacgaccatttttagtagccatacgagcacggaagccgtg

SEQ ID NO: 1277 - DNA, 183 bp, Escherichia coli
gctgctcgtcggtcgcgtcgaggttaacgaacagatcgaatacctgatccacaacccaatcaggacgcgcgccagggcggtcaactttgttgataacaacaatcggcttcaggccgtaagcaaacgcttttttggttacgaagcgcgtttgcggcatcgggccgtcaaatgcgtcaaccacca

SEQ ID NO: 1278 - DNA, 200 bp, Escherichia coli
taccagatcaccgatatagtggatagcttctgctttaaggcagttagcagagcggacagtcaattccagatcgtcaacagggcgcagcaggatcggatcgaactctggtttctcttctttcacttcaggctgacgtacatcacgtaagtcaacgaaagcttccagttgttcagccagaatggttgccgcacgacgaatcg

SEQ ID NO: 1279 - DNA, 207 bp, Escherichia coli
gaattttcagacggctaacaatgagacaccagattaaatgatagtcggggagggagagaagaggagggcgcaatggctgcgcccgaaaaataaattagtcgcgcttcgcgccagtacgcagcaggccggatgcgccttcagaatagtcgcgaggcatctgcaccggtgcctgatcgttgctggcttcagactctgccagacgattac

SEQ ID NO: 1280 - DNA, 248 bp, Escherichia coli
cgcgaaatggcgcggcggtaagtatggcggggttattccttccccgttgaggacaccgggttgtcaggttgaccatacgcttaagtgacaaccccgctgcaacgccctctgttatcaattttctggtgacgtttggcggtatcagttttactccgtgactgctctgccgccctttttaaagtgaattttgtgatgtggtgaatgcggctgagcgcacgcggaacagttaaaaccaaaaacagtgttat

SEQ ID NO: 1281 - DNA, 151 bp, Escherichia coli
gcgtcaaagtcgctgctgtcgataaagcgcacgtcgttggtcgccacgacgggcaaaccgcgcgcttccgccagttccaccgccgcgtgcagatagctttcttcatccggcctgccggtgcggatcagctcgagaaaatagcgatccggga

SEQ ID NO: 1282 - DNA, 191 bp, Escherichia coli
aatgcctgctactgctgattttttccccgcgacatgccgtgtcgcggggatttttttatccgggctttacagcgtttgtgggctcacttgatgacggcggacatccaccggcatcccggaacggacatccatcacatgttgcatcacttcagcgtcagtttgtgctgcatctttaaatgattgcattgcgc

SEQ ID NO: 1283 - DNA, 275 bp, Escherichia coli
cgtcatgtacgtgcagtttggtcgtacgcttgatgaatttaccgtagatcgggtgtttcacaaaacgttcgatagcaacaacaatggatttctccattttgtcgctaacaacgcgaccttgcagagtacggattttatcggtcattacgcacccgccttctcgttcagtaaagtcttaacgcgtgcgacatcgcgacgcacttgcttcaacaggtgagactgttgcagctggccacttgcagcctgcatacgcaggttgaactgctcacgcagca

SEQ ID NO: 1284 - DNA, 341 bp, Escherichia coli
tgctatctccttacgccttcacagctggtttaacgatcaggtcgctaccggttgcacccgggacagcacctttaaccagcagcaggttgcgctcagcgtcaacgcgtactacgtcaaggctctgaacggttacacgttcgttacccatctgacctgccattttcttgcctttgaacactttgcccggagtctggttctgaccgatagaacccggaacgcggtgagacaaggagttaccgtgagtagcgtcctgggtacggaagttccagcgcttaacggtacctgcgaaacctttacctttagaggtgccagttacgtcaacttttttaacgtcagcaaac

SEQ ID NO: 1285 - DNA, 226 bp, Escherichia coli
cgcgatgatggtctggttagattcttcgtcagtccatacacggaaagacgggtcttctttagccagacggcccagagccagacccattttttcctggtcagctttggttttcggttcaactgcgatggagattaccggctcagggaattccatacgttccagaatgatcggcgcatccgggtcacacagggtgtcaccagtggttacgtctttcagaccgatagca

SEQ ID NO: 1286 - DNA, 236 bp, Escherichia coli
tgccagcccgttgtggctgctggaagacgaatgtgaattgactgggagttaacaagcgtaactccctgggaaatgcgagcttaaccactcaggggttagctttattacttagaaacggtcagacgagcgcggcctttagcacgacgacgtgccagaacctgacgaccatttttagtagccatacgagcacggaagccgtgagaacggttgcgcttcagtacagacggttgaaaagt

SEQ ID NO: 1287 - DNA, 127 bp, Escherichia coli
ggaagggttggcttatttaacttcaacttcagcgccagcttcttccagagcttttttcagtgcttctgcgtcgtctttgctcacgccttctttcagagcagccggtgcagattctaccaggtcttta

SEQ ID NO: 1288 - DNA, 181 bp, Escherichia coli
tggtatggaaacccaaaatggagacgggaagctgaaccagatagttactggaggtgatcaccagcagatgaaataacgataaccagaacaacgccttatagcgttgagtttgcgagaaaacgttcatattgtacctttttgattaaccattggggtgagggaacccaatacgtacgacacg

SEQ ID NO: 1289 - DNA, 137 bp, Escherichia coli
ctggttttagcttttgcttcgtaaacacgtaataaaacgtcctcacacaatatgaggacgccgaattttagggcgatgccgaaaaggtgtcaagaaatatacaacgatcccgccatcaccaggccatctggctgggg

SEQ ID NO: 1290 - DNA, 241 bp, Escherichia coli
tcataaaacctcctgttttagtatccgcataaagtgtaacgccagatgacactttttgtgtaatgacggagttcacatttttaatttagatcaaaggaggaagaataagcagaaaaagcccgccataacagcgggcaggaggatttagaactgataaaccagacctaaagcgacaatatcatcggtagagatgccattggcagcgtagaagctgtcatcttcatccaacaggttgatttta

SEQ ID NO: 1291 - DNA, 168 bp, Escherichia coli
gtgaaaagattcacaaatagctgcggttaggaatgtgatatccgcagcttatcaggtgaagtaataattattctcaataattaactggagaggggaatattaacgatagaaaataagataaacaatcatgccgatagataaaattccgaagccgatatatgccaccag

SEQ ID NO: 1292 - DNA, 136 bp, Escherichia coli
ccgttgaggacaccgggttgtcaggttgaccatacgcttaagtgacaaccccgctgcaacgccctctgttatcaattttctggtgacgtttggcggtatcagttttactccgtgactgctctgccgccctttttaa

SEQ ID NO: 1293 - DNA, 266 bp, Escherichia coli
cccatgagttcagaattaaaactattaatgacacgcttaagtgaattttctttatcatagcctagtgcacgcaatgagttgaatatgacgcattttatttgtagtttattattttttttatttactattttctgtagcgaaactaatatccagtgtccgccagtatttatggggaataactggacttcattcggccatgatggatcgctcttaatattttcattgagagcgtcttccaggtgagttctggtggagtaggggacgta

SEQ ID NO: 1294 - DNA, 257 bp, Escherichia coli
tgagggataatttccgtcaaattgaggcaattgccgagcgtttcatccctggcaagcagaacggctttttcgttatttatatcgggagaattaatatgaaactgcaataaattctttaatgtgatacaagcctgggcgttcttttttccttcaattgcgacaaatgtaatactttggttaatgattggttggtcgtttacataaacactgacgtcgtaaacacccggtatagcggggttaccttcactgtaccggct

SEQ ID NO: 1295 - DNA, 204 bp, Escherichia coli
cgaggtacagcaatagtgatcaggcgctcaaagaactcccacatgcgttcgccacgcagagttactttacagccgatcggatagccctgacggattttgaagcctgcaacagatttgcgtgctttggtgatcagcggtttttgaccggagattgctgccaggtctgctgctgcgttatccagcagttttttgtcagcgatcgct

SEQ ID NO: 1296 - DNA, 210 bp, Escherichia coli
gaggaaccgtgtgacacacaaagggtgattattttccattgcggcgtataatcctggctcaccatcatgtattttcatggctaaaatactcatcaccagttttttgtttaaaagctcttgtgctattggagtggttaatgcattcagaaagatatcgattatttcatcgaatccatacaacatggagatataaagtccaggtgtttcgtt

SEQ ID NO: 1297 - DNA, 239 bp, Escherichia coli
ggcccgatggagatcaggtcggcagaacgctgtaccgctttgtaggtggtgttaccggtgttcagatccgggaagatgaacacggtagcgcgacctgcaaccggagagttcggcgctttggatttcgcaacgtcagccattaccgcagcgtcgtactgcagcggaccgtcgatcatcaggtcaggacgtttttcctgcgccagacgagttgcttcgcgaactttttctacgtcgctacc

SEQ ID NO: 1298 - DNA, 118 bp, Escherichia coli
agagctgtgaaggagaaaatacgaccacctttaacggttttagatacgcggtttaccgcgatcagcttttcctgcagttcgccagcttgtttttcgatgtgagccatcttacacctct

SEQ ID NO: 1299 - DNA, 115 bp, Escherichia coli
taaccgctattgatcgcaggctgaccgcagcatccctgtttctccgggaaatttacgcgacagccgagtttttccagtagcagcacggagtctcgtgccattcttgatttcaggg

SEQ ID NO: 1300 - DNA, 131 bp, Escherichia coli
ccaataataataatgtcgcagtcgtcttccatgtcatgccccagatatccagaacacaacaccctaacatagcgttacttaagggaaattgaccgccgacacactcttatcattcgccgcgatagatacaa

SEQ ID NO: 1301 - DNA, 114 bp, Escherichia coli
cgtttcgcccgttcttcctcatgcggcgcgccccacggaagtttaatccgtattcctgaatcagccagtaaaccaatcaattctcgccagtgttcttccggccagtgtttatca

SEQ ID NO: 1302 - DNA, 247 bp, Escherichia coli
taacgctaatgcactcaacagctgggtttgttttttcattattcctgctctcgtacctgaatgataagaaaagagattcaaaacagtttgatgttattgaattttcagacggctaacaatgagacaccagattaaatgatagtcggggagggagagaagaggagggcgcaatggctgcgcccgaaaaataaattagtcgcgcttcgcgccagtacgcagcaggccggatgcgccttcagaatagtcg

SEQ ID NO: 1303 - DNA, 220 bp, Escherichia coli
taaaaatggttgacataaacttgccataagccgtgggaggcacagaaaaatcaatgatacggaatgtgttctcactatgaccactgaaatcaatattcggcgtcccggtttctagcaattcgataaattgcatatgtttactgccgatagattttaaaaaatgataaacctcaagagggtaatggacattaacgttattaatgacggttaacgtattaaa

SEQ ID NO: 1304 - DNA, 132 bp, Escherichia coli
ccgataattgtcattaatttcgaaggggagaatagttttttgaacaggagatcatctgaatcatgtgatttgaggggggagttggttgcgatatgtgccagattatataattttaaacaagcatttttgata

SEQ ID NO: 1305 - DNA, 151 bp, Escherichia coli
gcagaaaaacacgttttttaggtttatcagcatattgcgctttcaattgcgcgtactgatccagcagggattgcgcggcttgttcggccttgtctggttgcggactccagggggccagttgacgtaacgcattggcaatttgttcaatgct

SEQ ID NO: 1306 - DNA, 188 bp, Escherichia coli
ggcgccttacagcgcaaaaaggctggtgactaaaaagtcaccagccatcagcctgatttctcaggctgcaaccggaagggttggcttatttaacttcaacttcagcgccagcttcttccagagcttttttcagtgcttctgcgtcgtctttgctcacgccttctttcagagcagccggtgcagattct

SEQ ID NO: 1307 - DNA, 258 bp, Escherichia coli
ctaaaggattgagttatcgcattatgcccatgaagccatgtacgcccatatacacaccgactaagccaatcaacagactggaaaaatagggggcgcgtttagcgagagtgttaaatccgctccagcgttttgcgacctgctgaacgctgattgctgcgccaacgcctacggtgacaagcgttaacgccaggccaatgctgaaactgacgaccagtgttgcgcccagtgtcagggctttcaactgaatgcatatcaaca

SEQ ID NO: 1308 - DNA, 289 bp, Escherichia coli
cgggggacaccaaaacgtgccgagatgatcctgtaaccatcatcagttgtgaagtagtgattcacgacttcaaggcgcttttcaaaagggtattttggctttgacatattaggggctattccatttcatcgtccaacaaaatgggtgcagtacatactcgttggaaatcaacacaggaggctgggaatgccgcagaaatatagattactttctttaatagtgatttgtttcacgcttttatttttcacctggatgataagagattcactgtgtgaattgcatattaaac

SEQ ID NO: 1309 - DNA, 62 bp, Escherichia coli
tgtcgacattcagcacttccgggtattcgtcgcgcagggcaaatgtacaggttgaggaggtg

SEQ ID NO: 1310 - DNA, 92 bp, Escherichia coli
gaagagatgttcaggttttcgttatcggcaatggtatcgaacttgtatttctcatacttctcgtcaggcgtggagtacgccgcgccacggaa

SEQ ID NO: 1311 - DNA, 72 bp, Escherichia coli
acttatcaaaccatttttccgcttcaccggaggtctgcacctgagcgatggtgtcatccatcagctttttga

SEQ ID NO: 1312 - DNA, 66 bp, Escherichia coli
aaacgcatggcgcgtaaaggttcaatcagtccgatttcagcggtgtcgaactcgctaaattcttca

SEQ ID NO: 1313 - DNA, 187 bp, Escherichia coli
tggctgctggaagacgaatgtgaattgactgggagttaacaagcgtaactccctgggaaatgcgagcttaaccactcaggggttagctttattacttagaaacggtcagacgagcgcggcctttagcacgacgacgtgccagaacctgacgaccatttttagtagccatacgagcacggaagccgtg

SEQ ID NO: 1314 - DNA, 280 bp, Escherichia coli
tgatcgatcaggtaatttgccagcggtagataattagtgatgatttgcactggcttgccacacatttcccgcccaagcagaaacgcggtggagccgcagttgatgactacgctttcgcccggattaaccagctgcgaggccgctttagcgatacgtactttttcatcgtgattctgcgcctgatgcagattcatcggcgtccagcgcgggcgctgttgggtaatagcttctgcgccattgcgcacttttttcagtttgccgctttcgtcaagtttattga

SEQ ID NO: 1315 - DNA, 224 bp, Escherichia coli
caattgccgagcgtttcatccctggcaagcagaacggctttttcgttatttatatcgggagaattaatatgaaactgcaataaattctttaatgtgatacaagcctgggcgttcttttttccttcaattgcgacaaatgtaatactttggttaatgattggttggtcgtttacataaacactgacgtcgtaaacacccggtatagcggggttaccttcactgta

SEQ ID NO: 1316 - DNA, 208 bp, Escherichia coli
aatgacacgcttaagtgaattttctttatcatagcctagtgcacgcaatgagttgaatatgacgcattttatttgtagtttattattttttttatttactattttctgtagcgaaactaatatccagtgtccgccagtatttatggggaataactggacttcattcggccatgatggatcgctcttaatattttcattgagagcgtct

SEQ ID NO: 1317 - DNA, 246 bp, Escherichia coli
taatttcacgtatcgaataacgttgttttaatctagctatgaggaacaaataaaataaaaatattatttttaatactgaagcaacatctttggctgctttcttttttaatattgctggccgattcattttctgatatcggccatttttattgcgggtatcaggccagtttatggttagccattaattccagcgcctgcactaacgcagagtgatccaactggctgccaccgtttgccgcacaggta

SEQ ID NO: 1318 - DNA, 142 bp, Escherichia coli
cgctccttagagtacttctggtgccagagagataattttcatgaacttctcactacgaagctcacgagttaccggcccaaaaatacgcgtaccgataggctgctcgctgttgttgttcagaagaacacaagcattaccatcg

SEQ ID NO: 1319 - DNA, 186 bp, Escherichia coli
gcgaatcaggtcagcaacaaggcgaaccttctgagcagaagaacgagcatggcgatgtttagcgatagtttccatctcttcctcctaccttatttcttcttcgcttttttatcagcagcgtggccgcgataagtacgagtcggtgcgaattcacccagtttgtgaccaaccatttcgtcggttaca

SEQ ID NO: 1320 - DNA, 138 bp, Escherichia coli
gaagaacgagcatggcgatgtttagcgatagtttccatctcttcctcctaccttatttcttcttcgcttttttatcagcagcgtggccgcgataagtacgagtcggtgcgaattcacccagtttgtgaccaaccattt

SEQ ID NO: 1321 - DNA, 159 bp, Escherichia coli
aacagtttctgcacagcagctttgatttctgctttggtcgcgtctttagcaactttgagtacgatggtgttggatttttccatcgcagtagacgctttttcagaaacgtgcggtgcacgcagcaccttcagcagacgttcttcacgaatcatgccagca

SEQ ID NO: 1322 - DNA, 173 bp, Escherichia coli
tccataaatccctcttaatttcacgtatcgaataacgttgttttaatctagctatgaggaacaaataaaataaaaatattatttttaatactgaagcaacatctttggctgctttcttttttaatattgctggccgattcattttctgatatcggccatttttattgcgggta

SEQ ID NO: 1323 - DNA, 173 bp, Escherichia coli; identical to SEQ ID NO: 1322

SEQ ID NO: 1324 - DNA, 152 bp, Escherichia coli
aaccgtttcagtcagcctatccttgatgaaaccgcgagcaaagataggtgattacgtcatggttttacagaaaattacagaaaaaggaggcaatatcgggtaaaggcattagcccgacgaatacgtcgggctacaaatattattgtgctgca

SEQ ID NO: 1325 - DNA, 191 bp, Escherichia coli
tcgcaaggaaaggcgtcagcgcaaaaaccagctccggcttgtggttaggatctttatagttacgctcggcggcatccatcgggatacctgcggcattttctttggcaaaaccgatttcagaattgtgtttgtttggatgaacctgaatggagagtggctgtgctgcgcataatactttgaacaggaaaggc

SEQ ID NO: 1326 - DNA, 160 bp, Escherichia coli
acttcgtcatcacgacggattttcgctgccatgattcgctccttagagtacttctggtgccagagagataattttcatgaacttctcactacgaagctcacgagttaccggcccaaaaatacgcgtaccgataggctgctcgctgttgttgttcagaaga

SEQ ID NO: 1327 - DNA, 101 bp, Escherichia coli
agcgccggtaacgccgttaaatgttctcgttcggcttcccgatcgttattcaacaggctgcgtaccgtagcggcatatttcttccctgcttcatcgccatc

SEQ ID NO: 1328 - DNA, 235 bp, Escherichia coli
tcggaagcctgaatgcggatacgtagcgcagcttgcagcggttcgtccagcttattgacccacaaatgctgatcgcccagcgccagcgcggtcatcgcgtaatgcggatgatgctcaagcaccgtcactttcagaatgctactttgttgctctttcggcagccacggattcatcacgctactgccccacacttcctccagcgcgccaaaggctttcacctgaccgttttccagta

SEQ ID NO: 1329 - DNA, 143 bp, Escherichia coli
gccagatgacactttttgtgtaatgacggagttcacatttttaatttagatcaaaggaggaagaataagcagaaaaagcccgccataacagcgggcaggaggatttagaactgataaaccagacctaaagcgacaatatcatc

SEQ ID NO: 1330 - DNA, 193 bp, Escherichia coli
tgcggtattgcgcaggccaaagaaagcaagcgaaggtgtcaggtcgctcatttcgacttcgggccagcgtggcacaaagaccaatggtgaactgccatgacaggtattggccccagcagcggaactcacaaggcaccataacgtcccctccctgataacgctgatactgtggtcgcggttatgccagttggca

SEQ ID NO: 1331 - DNA, 207 bp, Escherichia coli
caacatctcatgtctggatttgtagatatacgtggaattccaattggtatcttttgtaggattcaacatatcatgtaagcgctgggagcttaccaccataactggcccatcatcgactgaggagaacaggataaagatattatcgtttcgtgttaattcattcgtgttaaaggttcttaaattatcttcagtttctataaatatagg

SEQ ID NO: 1332 - DNA, 135 bp, Escherichia coli
ggtcaaaatatccagagcctgcgacactttcttaccgcgaatcaggtcagcaacaaggcgaaccttctgagcagaagaacgagcatggcgatgtttagcgatagtttccatctcttcctcctaccttatttcttc

SEQ ID NO: 1333 - DNA, 254 bp, Escherichia coli
tgtcgagcatacgcggcagcgccgactcggaagatgaagtccccagtacaatcagcagttcttcacggatgtagcggataaatttgaagatactgaaaccagtcgctttagcgattgaacccaataccagcaccacaaacaggatacaggtaatgtagaaacagataatcagctgccccagttgcaccagtgtgccgacgccgtatttaccgatggtaaacgccattgccccgaacgcaccaataggtgccaga

SEQ ID NO: 1334 - DNA, 226 bp, Escherichia coli
ataatgtactgatattaaggctaagcgtgcgggggaatttaaactgtgaaaagattcacaaatagctgcggttaggaatgtgatatccgcagcttatcaggtgaagtaataattattctcaataattaactggagaggggaatattaacgatagaaaataagataaacaatcatgccgatagataaaattccgaagccgatatatgccaccatataagcgaaaaag

SEQ ID NO: 1335 - DNA, 199 bp, Escherichia coli
ataacattgaccattaagtttaattcttgggaattctttttcttttctatctgattttaggtttaattcttgtttatcaagagtgtctgagcgttgaggtaaaatttccattaggtatttttcaaatattggggcaatggtttgagtaagtgtcgtgttttcgtttttattaattatcgtaatttctttcttatcagct

SEQ ID NO: 1336 - DNA, 183 bp, Escherichia coli
tgtgttcagcgttagcaatggcagattccagaactttcttgaccagtacagccgctttcttgttggtgtaggtcaaaatatccagagcctgcgacactttcttaccgcgaatcaggtcagcaacaaggcgaaccttctgagcagaagaacgagcatggcgatgtttagcgatagtttccatct

SEQ ID NO: 1337 - DNA, 300 bp, Escherichia coli
agctgatcgatggtgtttgccaacgcacacgccaccgcggcggcggcaaacaccagcgtaccgccgagcaccaccggcttacgcccgaagctgtctgccatcggcccgtagattaactgccccaacgcaaagcccagaatataagtactgagggtcatctgcgtactgcccgccggtacgccaaactgcgctgaaattaccggtagcgcgggcagatacatatcaatcgacagcggcatcaacatggccagcaggccaaggataaaaacaatagcaaacgacgaatgctgtcgggtggtc

SEQ ID NO: 1338 - DNA, 278 bp, Escherichia coli
ccacgatctcgttatcacgagtacgggcgaatgccagacgacgattagcaacgctatcagtcttggcaagagtaatcagcggctcaactacgcggcgcagctctttcgctttaggcagagtcgtcttgatgatttcatgacgaaccagtgaacctgccatattgcggaacatagcctggcgatggctgctgttgcggttcagttgacgaccactcttacgatggcgcatgaccttatccttctcagtaaaaccttaacctgtgatccggttactcgtc

SEQ ID NO: 1339 - DNA, 197 bp, Escherichia coli
cagcaattaagcgcgaacgaagtcgatgtgctgcagcttcggtttgtacgggtgacgctgtacgtcctgagctttaactttgatttctttaccgtcaacaacgatggtcagaacttcgctgtagaattcagctttagcttgcatgttcatgactttgtcgtgatccagctcgatagccagcggcgcttctttgccac

SEQ ID NO: 1340 - DNA, 113 bp, Escherichia coli
gcccttgtgcagctcagggttaaccactttaactacgtggcgacgacccggagatgtcggtttacatttaacaactgccattgtattactcctccgacttactcagcgccgcc

SEQ ID NO: 1341 - DNA, 176 bp, Escherichia coli
aacaacaacctggtgaaccagcgcttcgttgaaatcacgaccgaaggtagtttcggaaacagtcagcgcgctctgcgcgtctttcaatactaattccattgctatctccttacgccttcacagctggtttaacgatcaggtcgctaccggttgcacccgggacagcacctttaacc

SEQ ID NO: 1342 - DNA, 200 bp, Escherichia coli
tgagaccaaaaatgataatcgtatacataagtctttcgagtggctcgttagcaaaaagtttcaacaatggagtaaatacatccaacatatcaataactctcaactgtaagggtattgaaatgttaacacaagctctcgctgtaggggtatagccgagaccaccgaagcccggaggtggtgaaataaaaccgggcacaaca

SEQ ID NO: 1343 - DNA, 237 bp, Escherichia coli
catcatcacagcggcagccatgtacagcagatccatattcaggttttccatgacagtctccagtttgtttcagttaaaacgtagtagtgttggtaaattaatgttcttcagacgccatcgacagatagacgatcgtcagaaccatgaagatgaaggcttgcagcgtaatgatcaggatgtggaaaatggcccacggcacattcaggatccactgtgaccaccacggcaacagaccag

SEQ ID NO: 1344 - DNA, 114 bp, Escherichia coli
cgatgttctgaatctgctcgcgcatctgctcaatcaacactttcagctcgatggcggagtttgtcacttcggcattgatagacttcgacgcaagagtgttcgactcgcggttga

SEQ ID NO: 1345 - DNA, 184 bp, Escherichia coli
caggcttgaggaacgtctatatccagacgttgatcgttaacgtcataacgaacagaagcctgagggataatttccgtcaaattgaggcaattgccgagcgtttcatccctggcaagcagaacggctttttcgttatttatatcgggagaattaatatgaaactgcaataaattctttaatgtga

SEQ ID NO: 1346 - DNA, 250 bp, Escherichia coli
cgctggaaaaaacctaaaatattcatcttattccccctacgagaaccctatttggctcgtttcaagccgtatttttattttgctgcaaattgtactgccgatgttctgtaatcagattgttagatcatctgctacagagtgtgtgaaaatttaattcgtatcgcaaattaaacgcgtgtcttttgtgagttttgtcaccaaatatcgttattatcactcccttttactggctaaaccagaaaacttattt

SEQ ID NO: 1347 - DNA, 169 bp, Escherichia coli
tcacggatacgaggtacagcaatagtgatcaggcgctcaaagaactcccacatgcgttcgccacgcagagttactttacagccgatcggatagccctgacggattttgaagcctgcaacagatttgcgtgctttggtgatcagcggtttttgaccggagattgctgcca

SEQ ID NO: 1348 - DNA, 291 bp, Escherichia coli
tacgggaagtaattgtaacttagtttgtaaaggtcatatgcttgttgatatttctttttgggctgacatactgatgcaaaatcttttagatactcatgattttcgaacgcataaatgcacaagaatttataataaatttctgcgtccgttatattacccttttcatggtagtcgaatgcatatgcatatattctatcaaggatatcaggagttaaaccatgtagtaatgccagattttctcctttcgataatgcgtgttttagttgatttgcccattcatcactattattg

SEQ ID NO: 1349 - DNA, 239 bp, Escherichia coli
tgtcggtaaacaatgacaatttgagacagagtgaaaggtcagatttgcggagtaatgcacataatggttatttaaataaaccacatgaatcattaatgggttattcattatttttgtgatttactcacaatgtatcagggaaatataacttaccgggagatgtaatatgtttaatttttcaaatcgaaatttaaaatattgtgccggaggcatctctggcacattgggcaattacggca

SEQ ID NO: 1350 - DNA, 250 bp, Escherichia coli
gacctgtttttctatggtgtcggcgtaggcgaagagttgctcgacgcggcgaacgatttcggcttgttcttttactggaggtaataaaacaacttgggatttgatatcttttcctgaaatacctttttgaccagaagttgttttcacgcagttcatcattgcatttcgtgctgagggggatgaaaaaaatatttcgatatattctggtaaagcatctttggttaatcgagctcgaataagtttatcagga

SEQ ID NO: 1351 - DNA, 245 bp, Escherichia coli
ccagtgcggccaatgttttttgtcctttaaacataacagagtcctttaaggatatagaataggggtatagctacgccagaatatcgtatttgattattgctagtttttagttttgcttaaaaatattgttagttttattaaatgcaaaactaaattattggtatcatgaatttgttgtatgatgaataaaatataggggggtatagatagacgtcattttcatagggttataaatgcgactacca

SEQ ID NO: 1352 - DNA, 175 bp, Escherichia coli
tgagcatttgcagcgaatcagaaagggcgcagaacagtgaagacaacagaaaaacgaccagaccgcatttataaatacgtcgatagccaaacatatcgcccagaaacgaaaacgagagcagggagatgacaatggcgatttgataggcgttcactacccagatggaactggctgg

SEQ ID NO: 1353 - DNA, 223 bp, Escherichia coli
caaagataggtgattacgtcatggttttacagaaaattacagaaaaaggaggcaatatcgggtaaaggcattagcccgacgaatacgtcgggctacaaatattattgtgctgcaggtgttttagcgggttgttgatccacaggttctaactggaagaccacatcgacctgatcatcaaactgaatagcggcctgctcgtaagtttcctgggcggacaccggcg

SEQ ID NO: 1354 - DNA, 320 bp, Escherichia coli
cgagcaaagataggtgattacgtcatggttttacagaaaattacagaaaaaggaggcaatatcgggtaaaggcattagcccgacgaatacgtcgggctacaaatattattgtgctgcaggtgttttagcgggttgttgatccacaggttctaactggaagaccacatcgacctgatcatcaaactgaatagcggcctgctcgtaagtttcctgggcggacaccggcgcggcatcggctttcatcatccgcaccattgggctgggctgatagttggaaacatggtagcgcacgctatataccggccccagtttacgatgaa

SEQ ID NO: 1355 - DNA, 322 bp, Escherichia coli
agttaaccacaccggagtaaacacggaagaaggtcaggttaccaacaaacgggtcggtagcgattttgaacgccagtgcagagaacggctcgtcatcacttgcgtgacgttcagccggagtgtctttaccgtcgtccaggataccgttgatcgcaggtacgtcaaccggggatggcaggtaatcaattaccgcatccagcatcgcctgaacacctttgttcttgaacgcagaaccacaggttaccaggatgatttcgttgttcagaacgcgctgacgcagagcacctttgatttctgcttcagtcagttcttcaccacccag

SEQ ID NO: 1356 - DNA, 269 bp, Escherichia coli
cacatttggtggaaagtattcatattaaaaggaaggttgaataatttgtctttataaatcgccagtggagaattagtaaaacgattaaattctactaaatcattaacgtaatcccatatatatttatcattggtatgaaaaatatgtgcaccatatttatgaatctggataccctcacagtcctctgtgtacgcatttccaccgatatgatttcttttctcaatcactaaaacttttttgtttagcttttttaactcattcgcacaaac

SEQ ID NO: 1357 - DNA, 153 bp, Escherichia coli
cacgacggattttcgctgccatgattcgctccttagagtacttctggtgccagagagataattttcatgaacttctcactacgaagctcacgagttaccggcccaaaaatacgcgtaccgataggctgctcgctgttgttgttcagaagaaca

SEQ ID NO: 1358 - DNA, 287 bp, Escherichia coli
ccagctggttaactgttgccattaaatagctcctggttttagcttttgcttcgtaaacacgtaataaaacgtcctcacacaatatgaggacgccgaattttagggcgatgccgaaaaggtgtcaagaaatatacaacgatcccgccatcaccaggccatctggctggggtgcttaaccgtaagtctgacgaaatcagtatagtcaatgagaatgatgtcgttcgaaatttgaccagtcaaaccgcgggcaataaggtcttcgttcagggcatagaccttaatggggg

SEQ ID NO: 1359 - DNA, 287 bp, Escherichia coli
aaattaagcgaatccgatgagactgtgcagccataatcgaggacgcgcccgctaattttaataacgctatctgcggataaagcagaataggtggttaaccccagacataaaccgaggaaaataatgttattgtatttcataatctattgttccttagcgacagattgctgtctgctggttcagtaaggtaccaggagaaacttcaggaagcttgtactcgacaatacagtttgagtttttatctttgccccatgaaacctgtaattgccctgactgtggaagtccag

SEQ ID NO: 1360 - DNA, 565 bp, Escherichia coli
ttaccgctgtagctctgaatcgggaatacggaacggaaagcagcttccagaccatactgcccttcaggatcttgctcgataaatttctgaaacgagtcaagctggatagaaaggagataaggtacatccagaacttgtggacgtttaccaaaatccttacgaatacgttttttctcggtataggagtaaaccatagggttcctcagctcgctgacaagtcgacccatctgtccattgagcggacagtttgtgcaacactattttgttgaccggaaaatggaacactttccgcaatgcctgttgctatcacgcttaaaccatttcattgcgatttacacagaacggacgtcctgtcgcagtatattaagtcgtcgatagaaacaagcattgaaaggcacagcagtagtcaaacagtgtgaaacgctactggcgccttacagcgcaaaaaggctggtgactaaaaagtcaccagccatcagcctgatttctcaggctgcaaccggaagggttggcttatttaacttcaacttcagcgccagcttcttccagagcttttttcagtgct

SEQ ID NO: 1361 - DNA, 535 bp, Escherichia coli
gcataagcaacaacaacctggtgaaccagcgcttcgttgaaatcacgaccgaaggtagtttcggaaacagtcagcgcgctctgcgcgtctttcaatactaattccattgctatctccttacgccttcacagctggtttaacgatcaggtcgctaccggttgcacccgggacagcacctttaaccagcagcaggttgcgctcagcgtcaacgcgtactacgtcaaggctctgaacggttacacgttcgttacccatctgacctgccattttcttgcctttgaacactttgcccggagtctggttctgaccgatagaacccggaacgcggtgagacaaggagttaccgtgagtagcgtcctgggtacggaagttccagcgcttaacggtacctgcgaaacctttacctttagaggtgccagttacgtcaacttttttaacgtcagcaaacagttcaacgctaatgctctgacctacagtgaactcttcgccttcagccaggcggaattcccacagaccacggccagcttctacgcca

SEQ ID NO: 1362 - DNA, 322 bp, Escherichia coli; identical to SEQ ID NO: 1355

SEQ ID NO: 1363 - DNA, 239 bp, Escherichia coli
agtcagaaatgagaatgattggccttctttatgattttaaggattatgcttctaaaatggcggagaacatggcgaggcttgctgccttacttcattacttcagcggtgatggaggcgatatatctgttaccgggtaatgactccaacttattgatagtgttttatgttcagataatgcccgatgactttgtcatgctgctccaccgattttgagaacgacagcgacttccgtcccagcc

SEQ ID NO: 1364 - DNA, 694 bp, Escherichia coli
cgatcagttatccctgtgtctgcaacatttccacgagaagctatcattgttatatctaatgctagtcccggattattcaatattagagagtcaaatattctttgtgatgctgtatcgttccaccattttgtcaatgcttttgcagcattatcatctgcttgctgctgtgcagggcttttgggccatggaattggcaaggggaatggtctaggaaaaacttctaaccccagaggatctgtattcgtaactggattcaacggatactgataaaaattccatccccccttcagcccaatcggatcctgagtgatataccgcccctgcagcgggtcataatagcggtggcggttgtaatacaggccggactcctcatcatactgctgccccggcaggcggataagctgctgcagctgatgcgggttctcttcattcagcaggttgccccattcatcgtattctgcgcaccattctgttgtcccttccttgctgataagggccagcggcaggccgcgatggtcgcagtggtacaggtggatttttcgcgccggcgtgtacaccgggtccatctggttttgcatctgctccacggtcaggccgcacgatgccagccagcggcggctttcctcactcacccggtcagccaggatttcactttccagccggtcgagcatctgcaccagcaccggcgggaaca

SEQ ID NO: 1365 - DNA, 389 bp, Escherichia coli
aggatatagaataggggtatagctacgccagaatatcgtatttgattattgctagtttttagttttgcttaaaaatattgttagttttattaaatgcaaaactaaattattggtatcatgaatttgttgtatgatgaataaaatataggggggtatagatagacgtcattttcatagggttataaatgcgactaccatgaagtttttaattgaaagtattgggttgctgataatttgagctgttctattctttttaaatatctatataggtctgttaatggattttatttttacaattttttgtgtttaggcatataaaaatcaacccgccatatgaacggcgggttaaaatatttacaacttagcaatcaaccattaacgcttgatat

SEQ ID NO: 1366 - DNA, 469 bp, Escherichia coli
aatgagaatgattggccttctttatgattttaaggattatgcttctaaaatggcggagaacatggcgaggcttgctgccttacttcattacttcagcggtgatggaggcgatatatctgttaccgggtaatgactccaacttattgatagtgttttatgttcagataatgcccgatgactttgtcatgctgctccaccgattttgagaacgacagcgacttccgtcccagccgtgccaggtgctgcctcagattcaggttatgccgctcaattcgctgcgtatatcgcttgctgattacgtgcagctttcccttcaggcgggattcatacagcggccagccatccgtcatccatatcaccacgtcaaagggtgacagcaggctcataagacgccccagcgtcgccatagtgcgttcaccgaatacgtgcgcaacaaccgtcttccggagcctgtcatacgcgtaaaaca

SEQ ID NO: 1367 - DNA, 267 bp, Escherichia coli
ccattttttcaatgaaaattaaaaaggggatttttgagaagggtagaatgtcgtttgtttttttctttattatgtctggtgacgcggggggatagaacgtctgtgcatatagtagtgaatttattcaggtctacattattctctattttggtcagttttatgagttcatttacagccatactcattaaatcatctgttatcgaaaatttatatatgctcatagcagataatattgcttgctgaattatctcttcagaaatatccgct

SEQ ID NO: 1368 - DNA, 535 bp, Escherichia coli
cagtatcaatcagcgactggcgctgtgcttctgctgcatctactgcgacgctatgctgtgcctcggtatccgtcacccatttctcaccatcccatttatcgtatggcgttaatggggcgatagtcgcgggacgcatacaaacataacccctggatgttatgtgtctatcgagaatcaaagtggaagtccttatgttaagtataagacaggaatcacttataacgataatcagttagtatatgtatctatcactgttgatgataatatcagcacttggttctggagggggtttgttgtgggcaatgatgcatttaagttatcgtctgcagatagaggagatattacaataaacaacgaatcagggcatttgatagtcaataccgcaattctatcaggagatatagtcactctaagaggaggagaaattaggttggtattatagcttgtgcgcgccatgattggcgcgcaatttaaacttagtgctttacatcgctattgtcttgatttctttgaattattttataaattaaaaaaa

SEQ ID NO: 1369 - DNA, 266 bp, Escherichia coli
gcttcgttgaaatcacgaccgaaggtagtttcggaaacagtcagcgcgctctgcgcgtctttcaatactaattccattgctatctccttacgccttcacagctggtttaacgatcaggtcgctaccggttgcacccgggacagcacctttaaccagcagcaggttgcgctcagcgtcaacgcgtactacgtcaaggctctgaacggttacacgttcgttacccatctgacctgccattttcttgcctttgaacactttgcccggag

SEQ ID NO: 1370 - DNA, 396 bp, Escherichia coli
atccgcgatcgcggataaaaaggaggatttaaataaggcgttgatgcgccgtttgaagtcggcaatattaagccgcatgccatctcgacatgcggcttatacggtttaccagctatatttcactcccagcatgccctgagtatcgctatagcctttatcacctagttgcacaccgacattcccccacaggctaaggttgttatttactttcgcctcaaccccggtacgtacttcaccgagattacgcgcaccttcacggcctacggtttgaccattcatcttcacggcgtagactttgctattgttgatccagttcgcttcaatgtaaggctggaactcacgctgtttaccatcgtcacgctggtgatggctgttcaggtaggttttcaccccaag

SEQ ID NO: 1371 - DNA, 255 bp, Escherichia coli
ctctttttcttcgagatggacgcagtgagcaaagacacagtttttaccggtcaggccgtactgatggtaaacatccagataaccatcatggtcaggataaagcgatttcacccaggcaatttcatctttgttttcacagagatgggtatgtacccacgtatccggatattcttctttcaggcgttgcgccatcgccatctgttcaggagatgaggtcggggcgaagcgtggcgtaatcgcatatagcagacgacc

SEQ ID NO: 1372 - DNA, 249 bp, Escherichia coli
tgccaggaacccatatagaatagcgacgagatgacgtaggagattaataacgcagggatcattaccgcgaagataatgcgtcgggccagcggtgcgccaaaaatacgcacggtcaggtcggtagcaagaaaaataaacggaaagctaaacgcgccccaggtggtatggaaacccaaaatggagacgggaagctgaaccagatagttactggaggtgatcaccagcagatgaaataacgataaccagaac

SEQ ID NO: 1373 - DNA, 223 bp, Escherichia coli
ttcaacgctaatgctctgacctacagtgaactcttcgccttcagccaggcggaattcccacagaccacggccagcttctacgccagctttagcgaagtggccagcttcaggcttggtcacacggttagcttttttagcaccggtggtcacctgaatagcacggtagccatcgttagccaggtctttaacctgagtaacgcggtttgcttcaacttcgattacg

SEQ ID NO: 1374 - DNA, 353 bp, Escherichia coli
tttgcgggcatgcttccagcgcaggcacgttgcttttcgcaactttgcgagcacgtggtttgcgtaccagctggttaactgttgccattaaatagctcctggttttagcttttgcttcgtaaacacgtaataaaacgtcctcacacaatatgaggacgccgaattttagggcgatgccgaaaaggtgtcaagaaatatacaacgatcccgccatcaccaggccatctggctggggtgcttaaccgtaagtctgacgaaatcagtatagtcaatgagaatgatgtcgttcgaaatttgaccagtcaaaccgcgggcaataaggtcttcgttcagggcatagaccttaatggggg

SEQ ID NO: 1375 - DNA, 400 bp, Escherichia coli
cataaacaggtgcagtgaacagcagagatacggccagtgcggccaatgttttttgtcctttaaacataacagagtcctttaaggatatagaataggggtatagctacgccagaatatcgtatttgattattgctagtttttagttttgcttaaaaatattgttagttttattaaatgcaaaactaaattattggtatcatgaatttgttgtatgatgaataaaatataggggggtatagatagacgtcattttcatagggttataaatgcgactaccatgaagtttttaattgaaagtattgggttgctgataatttgagctgttctattctttttaaatatctatataggtctgttaatggattttatttttacaattttttgtgtttaggcatataaa

SEQ ID NO: 1376 - DNA, 237 bp, Escherichia coli
gtattacaacaagaatacagtgctaaaaaaagaatgtacctgaagatagtcttcatttttactccaatgtttctttattgttatggtttgcgctgtttttgtttgttattcgtagtaaatatccactaacacatggctcataagttgaccagatgtaacactcaatgcaggatcgattttttgcattcgggtgctaaatttccaggatgaaccattcatgtcatccgacattactgg

SEQ ID NO: 1377 - DNA, 324 bp, Escherichia coli
cgcgaaacgcgggcccagttcgttaaacagttttgccacgatctcgttatcacgagtacgggcgaatgccagacgacgattagcaacgctatcagtcttggcaagagtaatcagcggctcaactacgcggcgcagctctttcgctttaggcagagtcgtcttgatgatttcatgacgaaccagtgaacctgccatattgcggaacatagcctggcgatggctgctgttgcggttcagttgacgaccactcttacgatggcgcatgaccttatccttctcagtaaaaccttaacctgtgatccggttactcgtcagcgatgcttg

SEQ ID NO: 1378 - DNA, 506 bp, Escherichia coli
tgaggcaattgccgagcgtttcatccctggcaagcagaacggctttttcgttatttatatcgggagaattaatatgaaactgcaataaattctttaatgtgatacaagcctgggcgttcttttttccttcaattgcgacaaatgtaatactttggttaatgattggttggtcgtttacataaacactgacgtcgtaaacacccggtatagcggggttaccttcactgtaccggctgagatcaatattagatgcattctgccccatcaggaaggtatggtcatattcaacgagttcagcactgaaagcagtattgcaatacagcagcgcgcaaaacgtggcgatacgggtcagatgatgataatttttagtatattctatagtcacgctatgcttcctgcggaattatatccttgcctgattacagcctggcattaccttcaattgcgccaccaaagtcattaatggcgtaaaaatgcacttttgcagaattcgctttgccattaag

SEQ ID NO: 1379 - DNA, 225 bp, Escherichia coli
cgctctgcgcgtctttcaatactaattccattgctatctccttacgccttcacagctggtttaacgatcaggtcgctaccggttgcacccgggacagcacctttaaccagcagcaggttgcgctcagcgtcaacgcgtactacgtcaaggctctgaacggttacacgttcgttacccatctgacctgccattttcttgcctttgaacactttgcccggagtctgg

SEQ ID NO: 1380 - DNA, 237 bp, Escherichia coli
ccagccatcagcctgatttctcaggctgcaaccggaagggttggcttatttaacttcaacttcagcgccagcttcttccagagcttttttcagtgcttctgcgtcgtctttgctcacgccttctttcagagcagccggtgcagattctaccaggtctttagcttctttcagacccaggccagttgcgccacgtactgctttgataacagcaactttgttagcgccagcagctttcag

SEQ ID NO: 1381 - DNA, 294 bp, Escherichia coli
cgataatcagttagtatatgtatctatcactgttgatgataatatcagcacttggttctggagggggtttgttgtgggcaatgatgcatttaagttatcgtctgcagatagaggagatattacaataaacaacgaatcagggcatttgatagtcaataccgcaattctatcaggagatatagtcactctaagaggaggagaaattaggttggtattatagcttgtgcgcgccatgattggcgcgcaatttaaacttagtgctttacatcgctattgtcttgatttctttgaatt

SEQ ID NO: 1382 - DNA, 579 bp, Escherichia coli
ccaggatcttacggtcgatttcaacagaggcttttttcaggccattgatgaatttgctgtaagaaataccgttctgacgtgctgctgcgttgatacgcgcaatccacagttgacggaactgacgcttacgttgacgacggtcacggtaagcatactgaccagctttgataacagcctggaaggcaacgcggtatacgcgagaacgcgcaccgtagtagcctttagcttgtttcaaaattttcttgtgacgtgcacgtgcaataacaccacgttttacgcgagccatatgtgctctcctgtatctatattctaattaaaaagttaaaaacgttaacggcttatgcgtacggcaggcacgcgattaccaggcccagatcgcctttggaaaccatggctttcggacgcaggtgacgtttacgtttggtcgcttttttggtcagaatgtgacgcaggttagcgtgcttgtgcttaaaaccacctttaccggtttttttgaagcgcttagcagcaccgcgtacggtcttaatttttggcattttaataacttccacttcgcattgttaataaacgaaacaaagg

SEQ ID NO: 1383 - DNA, 105 bp, Escherichia coli
ggttttacagaaaattacagaaaaaggaggcaatatcgggtaaaggcattagcccgacgaatacgtcgggctacaaatattattgtgctgcaggtgttttagcgg

SEQ ID NO: 1384 - DNA, 642 bp, Escherichia coli
ctgtcagcatggttttttaataacgtatagggggcgctgtcagaattgctttccctttgttcaatcacttcctgggctgccatgcacacaaatgcaccgcaactttggcttaagtattgctgaagatcggcatgtaaaaatattatctctggttcatttaaatgaacttttatattattattcgacatttctcccatgagttcagaattaaaactattaatgacacgcttaagtgaattttctttatcatagcctagtgcacgcaatgagttgaatatgacgcattttatttgtagtttattattttttttatttactattttctgtagcgaaactaatatccagtgtccgccagtatttatggggaataactggacttcattcggccatgatggatcgctcttaatattttcattgagagcgtcttccaggtgagttctggtggagtaggggacgtagagaccagtaggataattgacttgagtattttttgcattagcggcgatcttctgaagatagcaagctatttcatctgtggttaattgacgatttttatcccagaagtttgtaccatcactcagttcattattctcatcatttaaaagcacctttgaaagcgactgtttttcagatataagagga

SEQ ID NO: 1385 - DNA, 279 bp, Escherichia coli
tgcgtgacgttcagccggagtgtctttaccgtcgtccaggataccgttgatcgcaggtacgtcaaccggggatggcaggtaatcaattaccgcatccagcatcgcctgaacacctttgttcttgaacgcagaaccacaggttaccaggatgatttcgttgttcagaacgcgctgacgcagagcacctttgatttctgcttcagtcagttcttcaccacccaggtatttttccatcagctcttcagaagcttcagctgcggattcgatcaggttctggtg

SEQ ID NO: 1386 - DNA, 167 bp, Escherichia coli
aaaactcaccttttttgttgttatccctcaattaccacaagtaaaaggagataaaccgacaatgacctagacgtaattatgtaaaaatactgatgttcgtcactgactatttccgatattcagctgttgaaaaatcaaaaaactggaaaaataattttaaatatcat

SEQ ID NO: 1387 - DNA, 201 bp, Escherichia coli
ttttttctttattatgtctggtgacgcggggggatagaacgtctgtgcatatagtagtgaatttattcaggtctacattattctctattttggtcagttttatgagttcatttacagccatactcattaaatcatctgttatcgaaaatttatatatgctcatagcagataatattgcttgctgaattatctcttcagaaa

SEQ ID NO: 1388 - DNA, 169 bp, Escherichia coli
accactcactgagaatgataaaattacaaaaaagaataaagacagcaaagaaccttcaacatgaaaaatatccatttgtttgcaaaaaaagattattaggaaggaaattaatgcaattatcgaaaattcaaaaaatatccaaaaatagtatactttattccagaagagt

SEQ ID NO: 1389 - DNA, 345 bp, Escherichia coli
ttgtaatcttcattacagcggtcgtatttttagcatggttttttattggcggctatgctgccccgggagcataaagatgaaaaaaacaacgattattatgatgggtgtggcgattattgtcgtactcggcactgagctgggatggtggtaacgtcacctctaaaaaatagcaaaggctgcctgtgtgcagcctttgtgcaatttaagcgttaacttttaatcttcctgtagataaatagcacgacaatcgcaccaataacggcaaccacgaagctgccaaaattgaagccatcgactttaccaaagccaaacagcgtgctgatccatccgccgactacggcaccg

SEQ ID NO: 1390 - DNA, 741 bp, Escherichia coli
ctttttacggacaaacaatcatgcaaccagaagttgaagtattaaccgatcataatgagctaatttgttcgagctttattgaacacattgccaacacattaaatttaggagtggtgtacaactaaacctgcagccaaggatgtatagtgagcgaagccctatcaggcctttttggtcagtagataagattgatcttcgttgatagaatttacttacaccagctgttacattaagataattttttggtgggagaatgataagatcttacgtaacaatttgattttaatggtgccgataataggagtcgaacctacgaccttcgcattacgaatgcgctgctctaccaactgagctatatcggccctgaaaggacatgttcacgaacgtgaatcacggtggacaaggttaaaactaaccgggcgatgcgtcaatggccttgtgaatcaaatggctacttttgcatcacccggttttatttacgcacgaatggtgtaatcaccaatgccgatccacttgtaagtggtcagtgcttccagccccattgggccacgcgcgtggagtttttgtgtgcttaccgccacttccgcacccagaccaaactggccgccgtcggtaaaacgcgtagaggcgttaacgtaaacagcggacgaatccacttcgttaacaaaacgctgggcgttgcgcatatcgcgggtcaggatcgcatcggagtgttgtgtgccgggttgacgaatatgggcg

SEQ ID NO: 1391 - DNA, 296 bp, Escherichia coli
taaaaaatgcaaaaatcgcgacagaataaaaaaccaaaaaatacaccagtttctatacaaagatgatgtgatgagaaagtcaatttgaataagacaatattaagagctaaaaaaatgtcaaaaaacactaaatcaaaaaataatggcattagaaaatataatgcgaaaacggaggtgaaattagtttatttcaaatgaggaaaatctcccggcgaaaaaaccgggagatgaaagtgtgatgggtatcaaataaacaacagaggagaaatttttaacgcagccattcaggcaaatcg

SEQ ID NO: 1392 - DNA, 275 bp, Escherichia coli
tgtaatgtttacttacaagagattcatctttgtataaataaagataagtaattacgcataaaacaacaatgattataatagcaaaaataaatattatcatctttgatagattacttgagatagccagcatcttgtaaagcctttatcgtttttttatgctctggattaatataatcactacatctatctgagcaatctgttgttgatggacatgtcaacccatggtcatttacagccaagtcttttttattatcttcaatcatttcagaatggga

SEQ ID NO: 1393 - DNA, 272 bp, Escherichia coli
cgattatagggctgaccaaatacatggatagataatatgccatccccccaggcagtccacgtaaaaagagcatatacaaggagaatagaacacctacagctgtaataagataaacataatgttttactctattaacacctacgatgaatgcataagagatgataaccataaagacaatttgcttaccagtattcagtataattgcaaagatgaatacaataaaaacaagtaaagtaaatgttttacttacctttgtattagtaaatttttta

SEQ ID NO: 1394 - DNA, 425 bp, Escherichia coli
aggttactggcgaggttatcgagaaacgccagactgatacccataaaaaagagaataaggtaaaccatccagcttaatagctgattaataacttttaacgcagcttgttggcgaagcggaatgaggtaacccacaatcaggggaaccagaatgattaacagcccagaaaacatgaaaacccagtccttgcaaagatgaagtcgaaatgcgcgatgacacactactgaaagcggaaggacgagtaaagttgcaattaaaaggaaatgttatgcataaggagcagtagagtattcgttttcatttaaagatattcttgcgctttaattacaaactgcaccgatgttggtggcgtcaaaatcgccgaggcgttccctgaaggccggggcagcccacatggatgtgggctgagggcgcgttttacaggg

SEQ ID NO: 1395 - DNA, 371 bp, Escherichia coli
tccagacgctctttcttggcgtcgtagtcaaagataccccctaagaacgtcggagcgttccgtgaggtcctgaatgcgattatttaccggattaatttcaaacatggtctgatttcttttattgagctagtcaaaatgcggtgataagagcgggattgtacccaatccacgctcttttttatagagaagatgacgctaaattggccagatattgtcgatgataatttgcaggctgcggttgccgcgaaactcgttgatatcgagcttataagccagttgcacttcgcgcacgccgttatccggccagagggcggtatcgacattaaaagcaataccatccagcagtggaccgccgccgaccggttcgacca

SEQ ID NO: 1396 - DNA, 310 bp, Escherichia coli
cttcatacggtcaacgatgatgtcgaggtgcagttcgcccatacccgcgatgatggtctggttagattcttcgtcagtccatacacggaaagacgggtcttctttagccagacggcccagagccagacccattttttcctggtcagctttggttttcggttcaactgcgatggagattaccggctcagggaattccatacgttccagaatgatcggcgcatccgggtcacacagggtgtcaccagtggttacgtctttcagaccgatagcagcagcgatgtcgcccgcgcgaacttctttgatctcttca

SEQ ID NO: 1397 - DNA, 241 bp, Escherichia coli
tcgttgaaatcacgaccgaaggtagtttcggaaacagtcagcgcgctctgcgcgtctttcaatactaattccattgctatctccttacgccttcacagctggtttaacgatcaggtcgctaccggttgcacccgggacagcacctttaaccagcagcaggttgcgctcagcgtcaacgcgtactacgtcaaggctctgaacggttacacgttcgttacccatctgacctgccattttcttg

SEQ ID NO: 1398 - DNA, 557 bp, Escherichia coli
actattttatctacgcgttagcgatagactgcttgcatggcgaaaggaggtaagccgacgatttcagcgggacgctgaaacgggaaagcccctcccgaggaaggggccataaataaggaaagggtcatgatgaagctactcatcatcgtggtgctcttagtcataagcttccccgcttactaagactaccagggcgggggaaaccccgctctaccctcactcctgaaagtatgccttcacgataagattgtcaatccgcaggctttgtagtctgcgatcctgccagcaaatattctttgcgagtcgttacgcaataatcacagaggaaactattttattcacgcgttagcgatagactgcattcagggcgaaaggaggtaagcccgatgatttcagcgggacgctgaaacgggaaagcctctcccggagaagagggcttttaataaggaaagggttatgatgaagcacgtcatcatactggtgatactcttagtgattagcttccaggcttactaagaacaccagggggagggggaaacctctccctaaccctcact

SEQ ID NO: 1399 - DNA, 304 bp, Escherichia coli
agccattgtccggagaattttcgtctttctcgagggtattatctgaaagtaactcttctgagctagagtcttctatgtttaaatccatagtataattaatttgggggacgaccagataagcattttctttggtattttcataatcttcaatgattatatcgatgtaatcatatattttttctgatgagaattctttcatctctgttaatttaattctgttcaagcaattgatgattttcgatgagcttttatatatttcttttgttaattcattttctaatttatctgtaagagttgcccttgg

SEQ ID NO: 1400 - DNA, 247 bp, Escherichia coli
ccttaatgtgtatgacctggattcatagtatcaattgccattttttcaatgaaaattaaaaaggggatttttgagaagggtagaatgtcgtttgtttttttctttattatgtctggtgacgcggggggatagaacgtctgtgcatatagtagtgaatttattcaggtctacattattctctattttggtcagttttatgagttcatttacagccatactcattaaatcatctgttatcgaaaattta

SEQ ID NO: 1401 - DNA, 155 bp, Escherichia coli
agtttcaacaatggagtaaatacatccaacatatcaataactctcaactgtaagggtattgaaatgttaacacaagctctcgctgtaggggtatagccgagaccaccgaagcccggaggtggtgaaataaaaccgggcacaacacgaaggcgcat

SEQ ID NO: 1402 - DNA, 457 bp, Escherichia coli
accccctaagaacgtcggagcgttccgtgaggtcctgaatgcgattatttaccggattaatttcaaacatggtctgatttcttttattgagctagtcaaaatgcggtgataagagcgggattgtacccaatccacgctcttttttatagagaagatgacgctaaattggccagatattgtcgatgataatttgcaggctgcggttgccgcgaaactcgttgatatcgagcttataagccagttgcacttcgcgcacgccgttatccggccagagggcggtatcgacattaaaagcaataccatccagcagtggaccgccgccgaccggttcgaccatcaccttcaaatgacgttcgcccaccagccgctgttgcagcagacggaaatgaccgtcaaacagcggctccgggaacatctgcccccacgggccagcatcgcgcagcagctgcgccacttc

SEQ ID NO: 1403 - DNA, 148 bp, Escherichia coli
cgcataaagtgtaacgccagatgacactttttgtgtaatgacggagttcacatttttaatttagatcaaaggaggaagaataagcagaaaaagcccgccataacagcgggcaggaggatttagaactgataaaccagacctaaagcga

SEQ ID NO: 1404 - DNA, 274 bp, Escherichia coli
aatgttatacgtatttgttaaatccgatatttgctggtattcacacttcatcttcttatttttatcaagcctagatagaggtgcaacatgattttcaattttatattttttatcatttattattatatcgtatgtataatcatgtaaaataccattcgttgttattggcataaatgcgaaagcaaccatcaattgtgcattgtttgatttaaattttatttgagagtcagtaacacttgaggctagcataaatttatcatcttgcttgctcaaa

SEQ ID NO: 1405 - DNA, 821 bp, Escherichia coli
tgcagtgaacagcagagatacggccagtgcggccaatgttttttgtcctttaaacataacagagtcctttaaggatatagaataggggtatagctacgccagaatatcgtatttgattattgctagtttttagttttgcttaaaaatattgttagttttattaaatgcaaaactaaattattggtatcatgaatttgttgtatgatgaataaaatataggggggtatagatagacgtcattttcatagggttataaatgcgactaccatgaagtttttaattgaaagtattgggttgctgataatttgagctgttctattctttttaaatatctatataggtctgttaatggattttatttttacaattttttgtgttaaggcatataaaaatcaacccgccatatgaacggcgggttaaaatatttacaacttagcaatcaaccattaacgcttgatatcgcttttaaagtcgcgtttttcatatcctgtatacagctgacgcggacgggcaatcttcataccgtcactgtgcatttcgctccagtgggcgatccagccaacggtacgtgccattgcgaaaatgacggtgaacatggaagacggaatacccatcgctttcaggatgataccagagtagaaatcgacgttcgggtacagtttcttctcgataaagtacgggtcgttcagcgcgatgttttccagctccatagccacttccagcaggtcatccttcgtgcccagctctttcagcacttcatggcaggtttcacgcattacggtggcgcgcgggtcgtaatttttgtacacgcggtgaccgaa

SEQ ID NO: 1406 - DNA, 245 bp, Escherichia coli
ccttgtataaggaaagggttatgatgaagctcgtcatcatactggttgtgttgttactgttaagtttcccgacttactaacaactcatcagaggggggagaaatcctcccttacccttgttcctttactctaggttgaaaaaacaacagcgtcaataggcctgccatgtacgaagcgagatctgtgaaccgctttccggttagccttttttatcctgttggatcttcttgatgatgttggtcgtc

SEQ ID NO: 1407 - DNA, 389 bp, Escherichia coli
accctcattaatgcctgctactgctgattttttccccgcgacatgccgtgtcgcggggatttttttatccgggctttacagcgtttgtgggctcacttgatgacggcggacatccaccggcatcccggaacggacatccatcacatgttgcatcacttcagcgtcagtttgtgctgcatctttaaatgattgcattgcgctattcagcgtaattggcagcagctgcggatcgtcatcaatcttctctgacagcggctgatgtacttcaaccagacgcgcaccgtttggttcggcagagacttttatcggagtgttgatgatattcactttggtgcctggggtgacctggctaaagagtgttttgatatcgtcatcccgcagacgaatac

SEQ ID NO: 1408 - DNA, 185 bp, Escherichia coli
cgatcaggttctggtgccattcgttagccagttcaaccatgtctgccgggatatcttcgtattcgaaggttacgccctggtcagcgtcgttccagttgatagctttcattttcaccaggtcaacaacaccggtgaaatgttcttcagcaccaatcgccagctgcagcggaaccgggttcgcgccc

SEQ ID NO: 1409 - DNA, 237 bp, Escherichia coli
gatgttccataaatccctcttaatttcacgtatcgaataaccgttgttttaatctagctatgaggaacaaataaaataaaaatattatttttaatactgaagcaacatctttggctgctttcttttttaatattgctggccgattcattttctgatatcggccatttttattgcgggtatcaggccagtttatggttagccattaattccagcgcctgcactaacgcagagtgatcc

SEQ ID NO: 1410 - DNA, 130 bp, Escherichia coli
agaggaatttcatcaccgataattgtcattaatttcgaaggggagaatagttttttgaacaggagatcatctgaatcatgtgatttgaggggggagttggttgcgatatgtgccagattatataatttta

SEQ ID NO: 1411 - DNA, 153 bp, Escherichia coli
gctccttagagtacttctggtgccagagagataattttcatgaacttctcactacgaagctcacgagttaccggcccaaaaatacgcgtaccgataggctgctcgctgttgttgttcagaagaacacaagcattaccatcgaagcgaatgaca

SEQ ID NO: 1412 - DNA, 140 bp, Escherichia coli
tacttctggtgccagagagataattttcatgaacttctcactacgaagctcacgagttaccggcccaaaaatacgcgtaccgataggctgctcgctgttgttgttcagaagaacacaagcattaccatcgaagcgaatga

SEQ ID NO: 1413 - DNA, 125 bp, Escherichia coli
caactgtaagggtattgaaatgttaacacaagctctcgctgtaggggtatagccgagaccaccgaagcccggaggtggtgaaataaaaccgggcacaacacgaaggcgcatttccgatatccata

SEQ ID NO: 1414 - DNA, 153 bp, Escherichia coli; identical to SEQ ID NO: 1411

SEQ ID NO: 1415 - DNA, 167 bp, Escherichia coli
ttctgagcagaagaacgagcatggcgatgtttagcgatagtttccatctcttcctcctaccttatttcttcttcgcttttttatcagcagcgtggccgcgataagtacgagtcggtgcgaattcacccagtttgtgaccaaccatttcgtcggttacaaataccgga

SEQ ID NO: 1416 - DNA, 291 bp, Escherichia coli
gcgaattcaggcggccgagaatggtaatttgcggcgtgccagcccgttgtggctgctggaagacgaatgtgaattgactgggagttaacaagcgtaactccctgggaaatgcgagcttaaccactcaggggttagctttattacttagaaacggtcagacgagcgcggcctttagcacgacgacgtgccagaacctgacgaccatttttagtagccatacgagcacggaagccgtgagaacggttgcgcttcagtacagacggttgaaaagtgcgtttcatggcgatttct

SEQ ID NO: 1417 - DNA, 141 bp, Escherichia coli
ggttcgatgatatgcagacgaaagccggtattagcgcaaagacggatgatgttgccagtatttggcggaatttctggttcgtaaagtacgatgtttagcatactgcccccttagtgcgggggcaggatagcagaaaattgg

SEQ ID NO: 1418 - DNA, 177 bp, Escherichia coli
cgctccttagagtacttctggtgccagagagataattttcatgaacttctcactacgaagctcacgagttaccggcccaaaaatacgcgtaccgataggctgctcgctgttgttgttcagaagaacacaagcattaccatcgaagcgaatgacagaaccgtccgggcgacgaacacc

SEQ ID NO: 1419 - DNA, 101 bp, Escherichia coli
gccaggcgggaacgacatgttcccactctacgcggctggcgcggttttcatttttgcgcacctgatagccgcacgattgcagatcaacaacgccttttttg

SEQ ID NO: 1420 - DNA, 158 bp, Escherichia coli
ccggcttgtggttaggatctttatagttacgctcggcggcatccatcgggatacctgcggcattttctttggcaaaaccgatttcagaattgtgtttgtttggatgaacctgaatggagagtggctgtgctgcgcataatactttgaacagaaaaggc

SEQ ID NO: 1421 - DNA, 286 bp, Escherichia coli
caccgaagcgagggcttgaaggagaagggttatgatgcgacttgtcatcatactgattgtactgttactcataagtttcagcgcttattaacagtcagtctcaggggaggagcaatcctcccttacccttactcactaaattaggtcaaagaatcaacgatgtcaatcagggcgatgcgggtgtatcgcccttaccactcccagactttcgacggtgtaaccaccgcaggaagagggatatcccactcttcaacggggagtttttccaccaactgacaatcatgcg

SEQ ID NO: 1422 - DNA, 83 bp, Escherichia coli
gccacgcccagcataaacagcgggatcgagccttcaatcggtacgcccagtacacctttcaccatcagcaccagcgataatcc

SEQ ID NO: 1423 - DNA, 191 bp, Escherichia coli
tccttagtcaggtactgacgtactttaaaatcgctgtccaggttgtcagcgaattctttggtgttcgcaaaccaggtagagttccatggttttacaatacccaggcgaataccattaggatgtactttctgacccattgctagtctccagagtctcagcgatcggacacaaccacagtgatgtggctggtg

SEQ ID NO: 1424 - DNA, 154 bp, Escherichia coli
aaatagaccggcatactttcgtgcggcagcataatcaacagtacgagcgcagcggtactaatgataaaggtgtagcatagatatttacttggcgatttcaggatcttatctgaaatcatgccaccaatcggtccaccaatcattttcagacagt

SEQ ID NO: 1425 - DNA, 225 bp, Escherichia coli
tgtataaataaagataagtaattacgcataaaacaacaatgattataatagcaaaaataaatattatcatctttgatagattacttgagatagccagcatcttgtaaagcctttatcgtttttttatgctctggattaatataatcactacatctatctgagcaatctgttgttgatggacatgtcaacccatggtcatttacagccaagtcttttttattatct

SEQ ID NO: 1426 - DNA, 190 bp, Escherichia coli
gctggtgcccgttttccatgccagtggggcgacgcgcggcaaggcactatccggcaagggttgcgcttcatcagccataatccggcgaatgatccacgccgcccccgacgacattaaaggccgttcaagcagcggatcgtcaggctgtaagcgcaatttgcctgccttgccgtggcgagcaaacgcggta

SEQ ID NO: 1427 - DNA, 154 bp, Escherichia coli
ggagaatagttttttgaacaggagatcatctgaatcatgtgatttgaggggggagttggttgcgatatgtgccagattatataattttaaacaagcatttttgataagtcggataatcgatagggtctcatttgttggggttctaacaatatgg

SEQ ID NO: 1428 - DNA, 163 bp, Escherichia coli
tagttattggctgttttgagaatgtaatcttccaactgcttataactcttcagatgcaataatccgagaatcacatgcaatttattcataaattcgtgggatcgttcacgaagtgcgtcagcatagttgaccagaccgtcgagtcgctgcatcagtttacgta

SEQ ID NO: 1429 - DNA, 109 bp, Escherichia coli
gcatcggcccgatggagatcaggtcggcagaacgctgtaccgctttgtaggtggtgttaccggtgttcagatccgggaagatgaacacggtagcgcgacctgcaaccgg

SEQ ID NO: 1430 - DNA, 156 bp, Escherichia coli
tcgaaagacttagcggacaggccacggaagtcacggatacgaggtacagcaatagtgatcaggcgctcaaagaactcccacatgcgttcgccacgcagagttactttacagccgatcggatagccctgacggattttgaagcctgcaacagatttg

SEQ ID NO: 1431 - DNA, 122 bp, Escherichia coli
gtagaagttcaaattacgaacctgaattttactcggggcagtttcaaccatactcattgcaatcttttcctcatcgtgcctgatgcacttcgctaatcaggcttaccgtaggccggatcagg

SEQ ID NO: 1432 - DNA, 158 bp, Escherichia coli
tcagcgccagcttcttccagagcttttttcagtgcttctgcgtcgtctttgctcacgccttctttcagagcagccggtgcagattctaccaggtctttagcttctttcagacccaggccagttgcgccacgtactgctttgataacagcaactttgtt

SEQ ID NO: 1433 - DNA, 178 bp, Escherichia coli
gtggttaggatctttatagttacgctcggcggcatccatcgggatacctgcggcattttctttggcaaaaccgatttcagaattgtgtttgtttggatgaacctgaatggagagtggctgtgctgcgcataatactttgaacaggaaaggcagttcgccaaagcgtttggcaacggcc

SEQ ID NO: 1434 - DNA, 163 bp, Escherichia coli
taaattccgcgtatagcgtgggcgctttggctccggtcgcttcgacgaggtccgcaagagaagtcgcttcataaccgtgttgccagaacaatttcatggccttatcaagcgcggcatccctgtcgaacacttttgggcggccacggcttttttttacacattg

SEQ ID NO: 1435 - DNA, 180 bp, Escherichia coli
ccggggctgacgtgggcgataatcgggtcgccaggaatagggcggcagcatttcgcaaaggtgatcagcacgccatcggcacctttaatgggcagatgtccgtggctttgggttgccggtggaatggaggcgtccccatgttgcagatttttcgcgaccaccacgctcattgcgttacca

SEQ ID NO: 1436 - DNA, 106 bp, Escherichia coli
aaaaccatgaggttattatggccgatttgaggagggaaagagtaagagcagtttgttaaatgtacaacgacgattctcccaccgggcgcgttttaaagcgacggtg

SEQ ID NO: 1437 - DNA, 184 bp, Escherichia coli
tcgaagaatttaacggagggtaaaaaaaccgacgcacactggcgtcggctctggcaggatgtttcgtaattagatagccaccggcgctttaatgcccggatgcggatcgtagccttcaatctcaaagtcttcgaaacggtagtcgaagatggattcgggtttacgtttgataatcaacttcggc

SEQ ID NO: 1438 - DNA, 281 bp, Escherichia coli
caaaatcagtcttgagtagtacggaagggctattgttgtaattaataatatcatctggttttaggacaagtaaaaaacccgttaagtaatttgcattaatgttatacgtatttgttaaatccgatatttgctggtattcacacttcatcttcttatttttatcaagcctagatagaggtgcaacatgattttcaattttatattttttatcatttattattatatcgtatgtataatcatgtaaaataccattcgttgttattggcataaatgcgaaagca

SEQ ID NO: 1439 - DNA, 125 bp, Escherichia coli
tccgcataaagtgtaacgccagatgacactttttgtgtaatgacggagttcacatttttaatttagatcaaaggaggaagaataagcagaaaaagcccgccataacagcgggcaggaggatttag

SEQ ID NO: 1440 - DNA, 184 bp, Escherichia coli
aaattctactaaatcattaacgtaatcccatatatatttatcattggtatgaaaaatatgtgcaccatatttatgaatctggataccctcacagtcctctgtgtacgcatttccaccgatatgatttcttttctcaatcactaaaacttttttgtttagcttttttaactcattcgcacaaacg

SEQ ID NO: 1441 - DNA, 278 bp, Escherichia coli
agcaacgctatcagtcttggcaagagtaatcagcggctcaactacgcggcgcagctctttcgctttaggcagagtcgtcttgatgatttcatgacgaaccagtgaacctgccatattgcggaacatagcctggcgatggctgctgttgcggttcagttgacgaccactcttacgatggcgcatgaccttatccttctcagtaaaaccttaacctgtgatccggttactcgtcagcgatgcttgccggtggccagttttccaggcgcatgcccagagac

SEQ ID NO: 1442 - DNA, 341 bp, Escherichia coli
tgtcctgacctgggttcgggggacaccaaaacgtgccgagatgatcctgtaaccatcatcagttgtgaagtagtgattcacgacttcaaggcgcttttcaaaagggtattttggctttgacatattaggggctattccatttcatcgtccaacaaaatgggtgcagtacatactcgttggaaatcaacacaggaggctgggaatgccgcagaaatatagattactttctttaatagtgatttgtttcacgcttttatttttcacctggatgataagagattcactgtgtgaattgcatattaaacaggagagttatgagctggcggcgtttttagcctgca

SEQ ID NO: 1443 - DNA, 161 bp, Escherichia coli
gcaaatgttttcgtaattcaggagaaatggcaaataaagcattaaaaatttgaatgctttgtgtaataaaaaagcagacaggcgacggagtgaccactccgtcgctttacaaagagaggaaaatcataggttgccggtgtagtgccagcgtaaataacgca

SEQ ID NO: 1444 - DNA, 177 bp, Escherichia coli
agggcatttgatagtcaataccgcaattctatcaggagatatagtcactctaagaggaggagaaattaggttggtattatagcttgtgcgcgccatgattggcgcgcaatttaaacttagtgctttacatcgctattgtcttgatttctttgaattattttataaattaaaaaaacg

SEQ ID NO: 1445 - DNA, 251 bp, Escherichia coli
ggctgtaacggtaaagccctcaccgaagcgagggcttgaaggagaagggttatgatgcgacttgtcatcatactgattgtactgttactcataagtttcagcgcttattaacagtcagtctcaggggaggagcaatcctcccttacccttactcactaaattaggtcaaagaatcaacgatgtcaatcagggcgatgcgggtgtatcgcccttaccactcccagactttcgacggtgtaaccaccgcagga

SEQ ID NO: 1446 - DNA, 139 bp, Escherichia coli
cccgcgacgttatccgcgtgtaggcatcgtcatgacgtaaacggcgatcggcggtataacggttgatcatcgaatccatgttgccagcagtaacaccgaaaaacagattcggtttacccagacgcataaagtcgtcttt

SEQ ID NO: 1447 - DNA, 114 bp, Escherichia coli
tatcaataactctcaactgtaagggtattgaaatgttaacacaagctctcgctgtaggggtatagccgagaccaccgaagcccggaggtggtgaaataaaaccgggcacaacac

SEQ ID NO: 1448 - DNA, 238 bp, Escherichia coli
tgaatgataagaaaagagattcaaaacagtttgatgttattgaattttcagacggctaacaatgagacaccagattaaatgatagtcggggagggagagaagaggagggcgcaatggctgcgcccgaaaaataaattagtcgcgcttcgcgccagtacgcagcaggccggatgcgccttcagaatagtcgcgaggcatctgcaccggtgcctgatcgttgctggcttcagactctgcc

SEQ ID NO: 1449 - DNA, 192 bp, Escherichia coli
ctgagcaaagtacaatgggcgacaatgcaaattataatgctattaattttatactgttcaagcatgttatgtctggctgaagccaatttagccacagtaaccgttaatgatggcgaaacttcatcaatattaattcgtaaagcatctatctctgtatcattaataatgcttctgtaaatgccagctgcgctg

SEQ ID NO: 1450 - DNA, 108 bp, Escherichia coli
tgttcgatctcgaaacttacacctttctcagccagcacaatgcggacctgatggctatagatgtcagtaggaccggaaaacagcgtcattacccgaacgtttgttggc

SEQ ID NO: 1451 - DNA, 117 bp, Escherichia coli
tgccatgacaggtattggccccagcagcggaactcacaaggcaccataacgtcccctccctgataacgctgatactgtggtcgcggttatgccagttggcatcttcacgtaaataga

SEQ ID NO: 1452 - DNA, 128 bp, Escherichia coli
ccagatttcaccaccacgatgggaaagcgaatcaccatacagagaggagatcaaagatgtgccactgaccggaacagcgtttacagcatgttggataaaagtatcaagtttactcattcgcttcagtc

SEQ ID NO: 1453 - DNA, 152 bp, Escherichia coli
acacaatatcaatacgttcggcaacgcgctgggcatcaaattcagacatcaaggacatccttatagcaaaagggggaaaatgaataatgcaaaaattgccgctaaaagagaagtgtttaacagcaacggctaattatcatccaggaatacga

SEQ ID NO: 1454 - DNA, 318 bp, Escherichia coli
ctggagattgagtagatattcttgttcagaatgtatcagccgatggttctacgattcttaagccacgaagagttcagatagtacaacggcatgtctcttttgactatctggcaaccggcagtgtgttctctcacgcatcacaaaagcagcaggcataaaaaaacccgcttgcgcgggctttttcacaaagcttcagcaaattggcgattaagccagtttgttgatctgtgcagtcaggttagccttatgacgtgcagctttgtttttgtggatcagacctttagcagcctgacggtccacgatcggttgcatttcgtt

SEQ ID NO: 1455 - DNA, 184 bp, Escherichia coli
ccccctaagaacgtcggagcgttccgtgaggtcctgaatgcgattatttaccggattaatttcaaacatggtctgatttcttttattgagctagtcaaaatgcggtgataagagcgggattgtacccaatccacgctcttttttatagagaagatgacgctaaattggccagatattgtcgatg

SEQ ID NO: 1456 - DNA, 211 bp, Escherichia coli
ggagagcgaagggctatccggccagggtgaaattatcgccgcgaacgcacaatttgatatcgacgagtaaagtactcaaacggcgcgctccacacatgcaccagtcgggtgaacgggaagagcaggaagatggtcattcccaacaccagatgcaggcggaagacgaacgctacgccgttgagcatctctgacgatccaccacggaaagtga

SEQ ID NO: 1457 - DNA, 287 bp, Escherichia coli
tgcactcaacagctgggtttgttttttcattattcctgctctcgtacctgaatgataagaaaagagattcaaaacagtttgatgttattgaattttcagacggctaacaatgagacaccagattaaatgatagtcggggagggagagaagaggagggcgcaatggctgcgcccgaaaaataaattagtcgcgcttcgcgccagtacgcagcaggccggatgcgccttcagaatagtcgcgaggcatctgcaccggtgcctgatcgttgctggcttcagactctgcca

SEQ ID NO: 1458 - DNA, 182 bp, Escherichia coli
tgaaatgttaacacaagctctcgctgtaggggtatagccgagaccaccgaagcccggaggtggtgaaataaaaccgggcacaacacgaaggcgcatttccgatatccataaagagtcggtcttgtctgttaaatttaaatggtgggagtgcgcctccggttgtaaataacgacattgctgtg

SEQ ID NO: 1459 - DNA, 145 bp, Escherichia coli
aaattaaaaaggggatttttgagaagggtagaatgtcgtttgtttttttctttattatgtctggtgacgcggggggatagaacgtctgtgcatatagtagtgaatttattcaggtctacattattctctattttggtcagtttta

SEQ ID NO: 1460 - DNA, 248 bp, Escherichia coli
ccgtgacaggcagtggatgagtaagcggatgcattctcactccatcgcatggagaaaacgggtgattgataaagcaatcatcgttctaggggcgttaattgcgctgctggaactgatccgctttctgcttcagcttctgaactgatagcggaaacgtaattaagggctaagagcacactactcttagccctttaacatttaacgcattgtcacgaactcttctgccgccgttgggtgaatggcgacgg

SEQ ID NO: 1461 - DNA, 272 bp, Escherichia coli
aaaccatttcattgcgatttacacagaacggacgtcctgtcgcagtatattaagtcgtcgatagaaacaagcattgaaaggcacagcagtagtcaaacagtgtgaaacgctactggcgccttacagcgcaaaaaggctggtgactaaaaagtcaccagccatcagcctgatttctcaggctgcaaccggaagggttggcttatttaacttcaacttcagcgccagcttcttccagagcttttttcagtgcttctgcgtcgtctttgctcacg

SEQ ID NO: 1462 - DNA, 121 bp, Escherichia coli
tagcttcttccacattgtcgaactgaacgtccagacggtgtttagaaacgttgatgctcgggattttttccgcacccaggcaaacgcgcgccatggctgcaacggtttctgacggatactg

SEQ ID NO: 1463 - DNA, 222 bp, Escherichia coli
agcgcaacagcggaaaccagggtagccagttttttcatgttcatattcaagatgtcctgtagtcgttattactgctttttgttgtctaccagcaccgccagcaaaatcaccaccgctttgacgatcatctggtaataggaggaaacacctaacaaattcaatccattattaaggaagccaagaattaatgcgccgatcaacgtcccaacaatgcgacctttt

SEQ ID NO: 1464 - DNA, 213 bp, Escherichia coli
ttctgtaatcagaaaaagaagaactggaattttaataaatattatttctctgggaacgggggggtataatcaatatgacgagttgaatattatattttttataagaattatatgagattaaagaaatctgccgtaaagacagatttctttaaaagataattagagatttgcgacgttatgataaactttttgtacatcgtcgtcatcttcaag

SEQ ID NO: 1465 - DNA, 339 bp, Escherichia coli
ctttttttcgtcaacggtgtccagaatcattttatttacctcgggtacttatgctgatttttattattatggggaaggtgttatttatgagtttcatttatgccgtaacgacaatgaactcgggaattagtataagcagcgcgagaataataatcattgtgcaaatgctaatttaattaatactatttaaatattattttgagcatatgcacataaggttgcgcgctaaagcacagatttgcgctttaccttaccgggcggcactgcaatccctgaaatgattgacattgatcacatttctgcgtttaaactcctgacattcttatttcacccaatgaa

SEQ ID NO: 1466 - DNA, 568 bp, Escherichia coli
gttctggatgagtgtgctctcattggattttttatccgtcttgttctgccgcaggatgagactatacatcgtcgagatcgcaatgatgatatgagttgttcctcctgcgacggctctaatcaaaaaagagcaggagtgcttttccatctattgcgatgatggctttattatctgaaggatgacagtcacatttaaaaaatatttaatctatagatcacaatgtagggtcatggaatatatgtatacaactattttcttcttcacttttaattatcgtattcattataaaactaagttaaaaaaactcctggagagtgagttattaatatatttttaaataaaattaagttatcattcatcgatgcactttatagaatcatcaatggccataatagtactattaactctcaattttatatttttatcatcactacaaatattaactgaatttatatcaatgattttttttattcttatcttttattttatttactggttcaatgcaatcagcggcaagttggagtggatttagatttttcagatatggtcttatgatctttcccttact

SEQ ID NO: 1467 - DNA, 342 bp, Escherichia coli
tgcccaagaggttttagttctctcggtaatgcgctaacctcaacaggctctcggctatcgttataattcagcgcttccgttacaccactcaactttttgatctctcgtaatcccgttctgattaacagcggacttaatactgagcaaagtacaatggcgacaatgcaaattataatgctattaattttatactgttcaagcatgttatgtctggctgaagccaatttagccacagtaaccgttaatgatggcgaaacttcatcaatattaattcgtaaagcatctatctctgtatcattaataatgcttctgtaaatgccagctgcgctgattgtctcacta

SEQ ID NO: 1468 - DNA, 402 bp, Escherichia coli
aaaaaatgaaattcctctttgacgggccaatagcgatattggccatttttttagcgcaacatttgcggcaaattcccttctccatacaggtgtagtgcaccgaccgcgaccacatatcgccccggcggcatggcgcgtaatttatcccgccaggcgagatttcgctgatgcatcagcacatcgtacagcgactgactgaacgtattgggcagcgttatatcattattttgcggcggtgcattcagccaccagctcatcatttgttgcagcaaccgtgcgttggtatgccagtgggtcagcgtatcgtccagcagcgccagtcctttgtcagggagctggagcaacatggcaatctggttttcagccccttccagttcaatcacgggtttatgttgttgcttc

SEQ ID NO: 1469 - DNA, 389 bp, Escherichia coli
aacgtaaaactttacgtaaattaacatggttaacatttatgccactattgtttgtaaattcatatttcgtaatgcttctgaatttttcgtgtgatggttttaaatactatggtgtttactcttgaggggacggcctatttataaaatacggacatttcaataaatgcccgtataaacagagtatgattctggctggtcgttgagtatcaatgttggaccgaatgtgaacgaataaataattcgtttattttaccacccattctcttttcgattcgttgcttgtacgcgtagatgctacggatatccatatccagaacttcagcaatctgatatggattataaccagaaaccatataccccattatggtgaattccatctgagttaatgt

SEQ ID NO: 1470 - DNA, 143 bp, Escherichia coli
ggacacccatgctgtagttaccacgaccgtcgaaagacttagcggacaggccacggaagtcacggatacgaggtacagcaatagtgatcaggcgctcaaagaactcccacatgcgttcgccacgcagagttactttacagccg

SEQ ID NO: 1471 - DNA, 525 bp, Escherichia coli
taatttcacgtatcgaataacgttgttttaatctagctatgaggaacaaataaaataaaaatattatttttaatactgaagcaacatctttggctgctttcttttttaatattgctggccgattcattttctgatatcggccatttttattgcgggtatcaggccagtttatggttagccattaattccagcgcctgcactaacgcagagtgatccaactggctgccaccgtttgccgcacaggtattaaataactcctggcaggtcgcagtgtttggcaggttcagcgcaagtgctttcgcactttgcagtgccaggttgagatctttctggtgcagagcgattttgaagcccggattaaaggtgcgtttaatcatacgctcgccatgaacttccagaatacgtgaggaagcaaagccgcccatcagcgcctggcgcacacgtaccgggtccgcaccggcttttgaagcaaatagcagggcttcagaaaccgcttcaatattgagcgccacgataatctgattt

SEQ ID NO: 1472 - DNA, 255 bp, Escherichia coli
tgcgattacggcatgcttatgatcaggaatgttaatgcctgctatacgggccactatgcactcctactatttaatatgtacgttccatgctgaaaagcccgttttcaggatactcaaatggaaacgcacagacatacaaaagattggctggctaatctagccagctcaacccaactttgcaagaaaaatatgcgaaaaaatcagccttggcgctgtttatgcttcggctcggcactgcaaatcacacggatgaca

SEQ ID NO: 1473 - DNA, 395 bp, Escherichia coli
cagccagtttaaacgccagttcagaggagtcaacgtcatggtaagaaccgaagtgcagacgaatacccatgtctactaccgggtagcctgccagcggacctgctttcagctgttcctggatacctttatcaacggccgggatgtattcgccagggattacaccacctttaatgtcgttgatgaactcgtagcctttcgggtttgaacccggctccagcgggtacatgtcgataacaacatgaccatactgaccacgaccaccagactgtttcgcgtgtttaccttcaacatcggtaactttctggcggatagtttcacggtaagcaacctgcggtttacctacgttcgcttcaacgttgaattcacgcttcatacggtcaacgatgatgtcgagg

SEQ ID NO: 1474 - DNA, 272 bp, Escherichia coli
ccttgtataaggaaagggttatgatgaagctcgtcatcatactggttgtgttgttactgttaagtttcccgacttactaacaactcatcagaggggggagaaatcctcccttacccttgttcctttactctaggttgaaaaaacaacagcgtcaataggcctgccatgtacgaagcgagatctgtgaaccgctttccggttagccttttttatcctgttggatcttcttgatgatgttggtcgtcgagcaaccgtcttcaaagttgagcacc

SEQ ID NO: 1475 - DNA, 402 bp, Escherichia coli
aacaataaatatataacagcggttatgagtatggctattattattgcggaaactaatggaatcattgccgataaaatcattggaatatgttttatcttattaaggtggaaaaggagggaatttgataaacacataaacagtgacaataaaatcgccccaaaaagattatatagtatatttaacaaaatattattcatggctatattgtctaaggcgtgtattaacgccacatctgttattgttagtacaatccatgtaatagctaataatgttaaataagctttaattctatgctgtataaaaacagatgcaataaatactgcaacagcagatatgaggtaccatgcggtttccagtgaaaaataaaattgttttatgtaatcaagtttcattgagcattca

SEQ ID NO: 1476 - DNA, 159 bp, Escherichia coli
ggatacgaggtacagcaatagtgatcaggcgctcaaagaactcccacatgcgttcgccacgcagagttactttacagccgatcggatagccctgacggattttgaagcctgcaacagatttgcgtgctttggtgatcagcggtttttgaccggagattg

SEQ ID NO: 1477 - DNA, 472 bp, Escherichia coli
attacctgtgcgtaaatgtgacgcggggtacgatgtaccaccaggcgagttgcgcccagctcctggagcttgcggcgtgcgcgggtcgcacgacggatacgagcagatttcttatccatagtgttaccttacttcttcttagcctctttggtacgcacgacttcgtcggcgtaacgaacacccttgcctttataaggctcaggacgacggtaggcgcgcagatccgctgcaacctggccgatcacctgcttatcagcgcctttcagcacgatttcagtctgagtcggacattcagcagtgatacccgcaggcagctgatggtcaacaggatgagagaaacccagagacaggttaatcacattgcctttaaccgctgcacggtaacctacaccaaccagctgcagcttcttagtgaagccttcggtaacaccgataaccattgagttcagcagggcacgcgcggtaccagcct

SEQ ID NO: 1478 - DNA, 401 bp, Escherichia coli
tgatgttccataaatccctcttaatttcacgtatcgaataacgttgttttaatctagctatgaggaacaaataaaataaaaatattatttttaatactgaagcaacatctttggctgctttcttttttaatattgctggccgattcattttctgatatcggccatttttattgcgggtatcaggccagtttatggttagccattaattccagcgcctgcactaacgcagagtgatccaactggctgccaccgtttgccgcacaggtattaaataactcctggcaggtcgcagtgtttggcaggttcagcgcaagtgctttcgcactttgcagtgccaggttgagatctttctggtgcagagcgattttgaagcccggattaaaggtgcgtttaatcatacg

SEQ ID NO: 1479 - DNA, 373 bp, Escherichia coli
cgcgtgtttaccttcaacatcggtaactttctggcggatagtttcacggtaagcaacctgcggtttacctacgttcgcttcaacgttgaattcacgcttcatacggtcaacgatgatgtcgaggtgcagttcgcccatacccgcgatgatggtctggttagattcttcgtcagtccatacacggaaagacgggtcttctttagccagacggcccagagccagacccattttttcctggtcagctttggttttcggttcaactgcgatggagattaccggctcagggaattccatacgttccagaatgatcggcgcatccgggtcacacagggtgtcaccagtggttacgtctttcagaccgatagcagcagcg

SEQ ID NO: 1480 - DNA, 347 bp, Escherichia coli
gcagttcaccggcacgcgctttcttatataagcctttgggatcgcgggcttcgcaaatcgccagcggcgtatcgacaaacacttcgataaagcgcccttctcctacgcgttcgcgaaccatctggcgttcggcgcggtgtggcgagataaatgcggtcagcaccaccagtccggcttcaaccatcaaattcgccacttcaccgacgcgacggatattctctttacgatcggcatcgctaaaaccgagatcgctgcataatccgtggcgaacattgtcgccatccagcagatacgtactgacgccgagtttatgtaacgcctcctccagcgccccggcgaccgttgat

SEQ ID NO: 1481 - DNA, 244 bp, Escherichia coli
aatgaccttgccggaagacaggacattcttaactttaccgcgtttacctttatctttaccggttaacacgataacttcgtcatcacgacggattttcgctgccatgattcgctccttagagtacttctggtgccagagagataattttcatgaacttctcactacgaagctcacgagttaccggcccaaaaatacgcgtaccgataggctgctcgctgttgttgttcagaagaacacaagcatt

SEQ ID NO: 1482 - DNA, 480 bp, Escherichia coli
tttttcattaaaccatcagccagccccataatataaggagcctgggtaataccgataagtacgttttcttctctacgcagagagataactccctctaaaataacgaaagtatcttcgttattgacatcactggaaaatataacttgcttttcattattaaactcgaagcgcgtaccgtatctggacaaacatttatcgagcttaccaaattcctgaagaggtttaactacagataacatttgcgcgtcctttgcagtaatgcccgtcaaatccttgacgggcattatttagattaaattaccagtatttcttcggagtgaagaatattaccaggtatatttaacacccacgttcgcggaccagtcttgatctacgtcaccaccaccgaggtagttagcatcggtataggcgctgaagttcttggtgaagctaaactgagtacccagaccaacacgtaccgcagacccttcagtaccgtta

SEQ ID NO: 1483 - DNA, 197 bp, Escherichia coli
atgagagaaacccagagacaggttaatcacattgcctttaaccgctgcacggtaacctacaccaaccagctgcagcttcttagtgaagccttcggtaacaccgataaccattgagttcagcagggcacgcgcggtaccagcctgtgcccaaccgtctgcgtaaccatcacgcggaccgaaggtcagggtattatctg

SEQ ID NO: 1484 - DNA, 197 bp, Escherichia coli; identical to SEQ ID NO: 1483

SEQ ID NO: 1485 - DNA, 607 bp, Escherichia coli
ggccacaattaatcagagcaacggtaaaacaatgaaagtgtaaaaaacacttttgcgccaattatggagaaaaaaagaaaatttgatggagagtgatgagagaatattacaacacgatgattttgcagagattatgaagaactataccggatgactggtgataaataaagcaaataaccaggattaatctgtattaatttataagaaagcaacttaatacccgcagaatgatttctgcgggtaagtattagcttattttttcgagcattaatcccgcgcgtaatcccaacgctaccaacggattagggaataacacatactctacatcatgggttacggtaaaacgttcctctccgtcctgcgccagcaatgttcctttctcaaacggcataaaattcagcgtgtcacttgccatatgcatttcgaaggacggcgagtggcgagtaatttgcgaaaccacccgataacggagcggcggtgttctcacgataccgacactctcaccagatagcagcgcagcaattgcgctggcagttactgcaaactggcgaagatcgttttgcccaaagggcaacgctttgccaagttccagcgtacagggtgggcc

SEQ ID NO: 1486 - DNA, 141 bp, Escherichia coli
catccaacatatcaataactctcaactgtaagggtattgaaatgttaacacaagctctcgctgtaggggtatagccgagaccaccgaagcccggaggtggtgaaataaaaccgggcacaacacgaaggcgcatttccgata

SEQ ID NO: 1487 - DNA, 239 bp, Escherichia coli
gattaacagcggacttaatactgagcaaagtacaatggcgacaatgcaaattataatgctattaattttatactgttcaagcatgttatgtctggctgaagccaatttagccacagtaaccgttaatgatggcgaaacttcatcaatattaattcgtaaagcatctatctctgtatcattaataatgcttctgtaaatgccagctgcgctgattgtctcactagcaggtatgttattta

SEQ ID NO: 1488 - DNA, 239 bp, Escherichia coli; identical to SEQ ID NO: 1487

SEQ ID NO: 1489 - DNA, 220 bp, Escherichia coli
gacgcgggctaaggcgttgttgacctgtttttctatggtgtcggcgtaggcgaagagttgctcgacgcggcgaacgatttcggcttgttcttttactggaggtaataaaacaacttgggatttgatatcttttcctgaaatacctttttgaccagaagttgttttcacgcagttcatcattgcatttcgtgctgagggggatgaaaaaaatatttcgata

SEQ ID NO: 1490 - DNA, 133 bp, Escherichia coli
gcgcgggtcgcacgacggatacgagcagatttcttatccatagtgttaccttacttcttcttagcctctttggtacgcacgacttcgtcggcgtaacgaacacccttgcctttataaggctcaggacgacggt

SEQ ID NO: 1491 - DNA, 241 bp, Escherichia coli
tgtgacagagtggttatcgttaatcaggcaaagagggaaaaacatattatttaaaccattatagcgcataaaatatccttataattaacaagaaagaaaaggcatattctctgcattatcattttctacgactgtcaaaaatcgctcattttttaatgagtttatttgtttaatattatgggaaaaggtgatgcatttgggagaggaagagtattccccggtcagacgaccggggaagggg

SEQ ID NO: 1492 - DNA, 227 bp, Escherichia coli
tcgttaaacagttttgccacgatctcgttatcacgagtacgggcgaatgccagacgacgattagcaacgctatcagtcttggcaagagtaatcagcggctcaactacgcggcgcagctctttcgctttaggcagagtcgtcttgatgatttcatgacgaaccagtgaacctgccatattgcggaacatagcctggcgatggctgctgttgcggttcagttgacgacc

SEQ ID NO: 1493 - DNA, 141 bp, Escherichia coli
tgaattttcagacggctaacaatgagacaccagattaaatgatagtcggggagggagagaagaggagggcgcaatggctgcgcccgaaaaataaattagtcgcgcttcgcgccagtacgcagcaggccggatgcgccttca

SEQ ID NO: 1494 - DNA, 188 bp, Escherichia coli
caagggtgagcatttgcagcgaatcagaaagggcgcagaacagtgaagacaacagaaaaacgaccagaccgcatttataaatacgtcgatagccaaacatatcgcccagaaacgaaaacgagagcagggagatgacaatggcgatttgataggcgttcactacccagatggaactggctggcgtggca

SEQ ID NO: 1495 - DNA, 394 bp, Escherichia coli
ggccacaaaagagaataaggtaaaccatccagcttaatagctgattaataacttttaacgcagcttgttggcgaagcggaatgaggtaacccacaatcaggggaaccagaatgattaacagcccagaaaacatgaaaacccagtccttgcaaagatgaagtcgaaatgcgcgatgacacactactgaaagcggaaggacgagtaaagttgcaattaaaaggaaatgttatgcataaggagcagtagagtattcgttttcatttaaagatattcttgcgctttaattacaaactgcaccgatgttggtggcgtcaaaatcgccgaggcgttccctgaaggccggggcagcccacatggatgtgggctgagggcgcgttttacagggatgtgggcc

SEQ ID NO: 1496 - DNA, 66 bp, Escherichia coli
ccctgacgatcagtgatagtcacgatggtgttgttgaaagaagcatggatatgagccacgccgtca

SEQ ID NO: 1497 - DNA, 176 bp, Escherichia coli
agcaaagcgagccgaacatggtggcgaggctgccgtaaagtaaaaactgggtcgccaactccgggtgatccatcacgtatttcacgaagtagagcgtcgccccgccgcgcaccacgttggagcaggtcgccatcatcttgaacgcgcacatgatgcgccactggctgttgcccagc

SEQ ID NO: 1498 - DNA, 211 bp, Escherichia coli
agtgcgtaaataccagtggcgaaacgtttgtaaccttctgctatcccgctgaccaccgcttgatagtcagttttcatttcatacggcgggtcgataaggattaaaccacggcgggaaaccggcggcagtttggccttaagctgctggaaaccgtcggcctttttcgacacgcgcacggctatctttctgaaattcagaacgcatcaacggg

SEQ ID NO: 1499 - DNA, 96 bp, Escherichia coli
gccatgccagcaccaacaggggcagcagaatcagcaaaaatgccagcattaccagttgtcgtaatgagcggggaaaaacgggccagcgtttcaagg

SEQ ID NO: 1500 - DNA, 265 bp, Escherichia coli
ccatagtgattaatgtagcaccgcctaattgcggtgcttttttttaccttgcgatcgcgaattactgatccagttcgaccatctctttcacgtcagtacggttgatctgctgtttgttgccattagcagtctttatacgaaatcataccggtatcgttatcagtctgtggtttgccgtcagagacgatggtacgtccgtcattggtgtgcatcacatagttcgaaccggaacaggcgctcagggcaaaagtcagcatacaggcag

SEQ ID NO: 1501 - DNA, 82 bp, Escherichia coli
atttggcccctcattcgctcatgctgaggggctttttttgcgacttatttcaccagttcgggccataaacgcaaagtcgttc

SEQ ID NO: 1502 - DNA, 128 bp, Escherichia coli
agagtcgtcttgatgatttcatgacgaaccagtgaacctgccatattgcaggatcatatcctggcagatggctgctgttgcaggttcatgttgacgaccacctcttacgatggcgcatgaccttatcc

SEQ ID NO: 1503 - DNA, 129 bp, Escherichia coli
tgacggcatattaataaaaaaatgaaattcctctttgacgggccaatagcagatattggccatttttttagcgcatcatttgcggcaaattcccttctccatacaggtgtagtgcaccgaccgcgacca

SEQ ID NO: 1504 - DNA, 197 bp, Escherichia coli
ttcagtctgagtcggacattcagcagtgatacccgcaggcagctgatggtcaacaggatgagagaaacccagagacaggttaatcacattgcctttaaccgctgcacggtaacctacaccaaccagctgcagccttcttattgaagccttcggtaacaccgataaccattgagttcagcagggcacgcgcggtacca

SEQ ID NO: 1505 - DNA, 189 bp, Escherichia coli
ggacgagcagcaaaggtcacagccaccagaacgccagatcgggctcttgatagaaccagaacgcgcacggccggtgcctttctggcgccacggttttttaccggaaccagttacttcagcacagagtcttctgagcacagagtaccctgacgagcaccagcctgcataagcaacaacaacctggtgaac

SEQ ID NO: 1506 - DNA, 258 bp, Escherichia coli
ttcttgacggaagcacgaactttcatttttactctccgtaacttctcgggcgaccaattatcggccgtagcctttcaggttcgccttcttcaatgcagactcatactgactggacatcatcagagtttgcaccttgagccataaagtccataatcacgacaacaacgataagcagtgaggtcccaccgaagtagaacggtactttcattgcatcacgcatgaactccgggatcaggcagataaaggtaatatacagcg

SEQ ID NO: 1507 - DNA, 252 bp, Escherichia coli
tattgtgttctgcaactaacaaattcatactttcagcgcgtgactctgctgatctaaatgaaaaaggtgactttatgaatatatttaaaccaatttcgtacattgccagtcttgcacctagggaagtaacactattagcattggtataacctgtttaagtcatttaatgccttcattatagcgattctgtattggtttattaaatataataacaatgctagctaatatagcaattagtagaacaatagagga

SEQ ID NO: 1508 - DNA, 75 bp, Escherichia coli
agccgtatcgccagcgaaatgccatgccgttgcgcagaatgcgctgccacgcaatcgctggttttccgccagcga

SEQ ID NO: 1509 - DNA, 90 bp, Escherichia coli
cggcgcagtgcctccggacgggcatcatcctccgtcatggcaccgagaaaatcattcagcagtaccgggttgagaatcttcatacacagg

SEQ ID NO: 1510 - DNA, 23 bp, Escherichia coli
aacctttatccattaacgtcaga

SEQ ID NO: 1511 - DNA, 85 bp, Escherichia coli
cacttgcgataaggataaaagaccgcgattatcttttccttcattgagatgcagggtaattctcattaatcaacagttcaataaa

SEQ ID NO: 1512 - DNA, 221 bp, Escherichia coli
gagctgcaaacggagtggatttgcgagaaccacggaaaccggaaccaccggctgttgcccaacccaacgcgttaccctgacgatcagtgatagtcacagatggtgttgttgaaagaagcatggatatgagccacagccgtcagagacttgttttcttacacagtttacagtgcacgaattggtgcctttgccattattcaatcaccccgattatttcttga

SEQ ID NO: 1513 - DNA, 240 bp, Escherichia coli
ttcgcatggccaatatgcagatagccattcggctccggcgggaaacgggtgtgtactgtggtgtgcttaccactggccagatcttcatcgatgatctgacggataaagttagtcgggcgggccttctgcctcactcatcgtggattcctcaaagcagtaaacaacagtataacaggcagtatgatcttataagcagggacaggctgacaacctgttagttttttaaaattgataatctaa

SEQ ID NO: 1514 - DNA, 154 bp, Escherichia coli
tgccgcattgaagattgctacgttggaaacctgaatagcggcttctttttcaacgatgccacccggttggttcaaggccggaaccggcttctgatgtttcttaaccaggttgataccttcaacaatgaccttgccggaagacaggacattctta

SEQ ID NO: 1515 - DNA, 656 bp, Escherichia coli
gccggtattagcgcaaagacggatgatgttgccagtatttggcggaatttctggttcgtaaagtacagatgtttatcatactgcccccttagtgcgggggcaggatagcagaaaattggtgagcagtgcaggccttttcccctcaccccggccctctccccggaggggcgagggagaaaaaaagagtgcggtgtcagtttcagagtgagggagtacatacagcgccgaacggtcccctctccctgagggagagggttagggtgagggggcgcaaacgactatgccgcattccctttcgccatgggagccagtgccgcaggcaactctttacccagcccctgcaccagcgaatcttgcgtaatttcgctgatcgatttcgcgccagtcagcgtcatcgccactttcatctctttttcgatcagatttagcaggttagctacacccgcctggcccgctgttgccagcgcatacaagaaagcacgacccagcagtacggtgtcggcaccgagcgcaatcatacgcacgacatcaagcccgttacgaattccgctatccgccagaatggctatatcacctttcaccgcatctgcaatagcaggcagtgcacgggcggaagagagtacaccgtccagctggcggccaccgtggttagaaat

SEQ ID NO: 1516 - DNA, 212 bp, Escherichia coli
tgcggagttcggtgagaatacgctctgaatcaacaaggtttttcggacagccaagggaaacaaagccgattttcggctggggagttactttgctcatagcttaaaaaatattcagttacaggaaaggtcagggcagggattctacagagttctggataaaatttgtatcgcaatctcattcgctggcggaggcgaaggaaatgtaaattttg

SEQ ID NO: 1517 - DNA, 370 bp, Escherichia coli
agcaatactcgttgctctggtagtaatgaataatgcttttgaatatgtgctcgcaatcttgagaaggaaatggcgaccacgaaagaaaaggcaaaaacgataatctgaaagagccaaggtatttcagtataagcattgaatgcgacagtaaactctttcggtatcagccagagagtgagaccaaaaatgataatcgtatacataagtctttcgagtggctcgttagcaaaaagtttcaacaatggagtaaatacatccaacatatcaataactctcaactgtaagggtattgaaatgttaacacaagctctcgctgtaggggtatagccgagaccaccgaagcccggaggtggtgaaataaaaccgggca

SEQ ID NO: 1518 - DNA, 463 bp, Escherichia coli
gcatcgcctgaacacctttgttcttgaacgcagaaccacaggttaccaggatgatttcgttgttcagaacgcgctgacgcagagcacctttgatttctgcttcagtcagttcttcaccacccaggtatttttccatcagctcttcagaagcttcagcctgcggattcgatcaggttctggtgccattcgttagccagttcaaccatgtctgccgggatatcttcgtattcgaaggttacgccctggtcagcgtcgttccagttgatagctttcattttcaccaggtcaacaacaccggtgaaatgttcttcagcaccaatcgccagctgcagcggaaccgggttcgcgcccagacgggttttgatctggttaacaactttcaggaagttcgcacccatgcggtccattttgttaacgaacgcaatgcgcggaactttatatttgtttgcctgacgccatacgg

SEQ ID NO: 1519 - DNA, 267 bp, Escherichia coli
gttacagggtgatcagtgagataagtctgttaattataaagtaaacactgtaaagcagagtgttttatttttcattcgcgctgtgaataaatagatgaaagttatagtagcctgtctgtagttatatatcaaaaactctcatttagacggtcaataaatcgggagaacaccaaattatttaaagaagatttattataggaaatgtaaagctttattgaaggtaacggatgttctagttttatctcttttaagttaagaaagtcacgg

SEQ ID NO: 1520 - DNA, 453 bp, Escherichia coli
caattaccgcatccagcatcgcctgaacacctttgttcttgaacgcagaaccacaggttaccaggatgatttcgttgttcagaacgcgcctgacgcagagcacctttgatttctgcttcagtcagttcttcaccacccaggtatttttccatcagcctcttcagaagccttcagcctgcggattcgatcaggttctggtgccattcgttagccagttcaaccatgtctgccgggatatcttcgtattcgaaggttacgccctggtcagcgtcgttccagttgatagctttcattttcaccaggtcaacaacaccggtgaaatgttcttcagcaccaatcgccagctgcagcggaaccgggttcgcgcccagacgggttttgatctggttaacaactttcaggaagttcgcacccatgcggtccattttgttaacgaacgcaatgcgcggaact

SEQ ID NO: 1521 - DNA, 570 bp, Escherichia coli
atcaggctggaggtgatgaccgtcatttccctgatgcgagcagcctgttcggcagataactgcaatgtacgatcaggttctgtggtttcggtggtagaaaagcgcaaaacatcgctgctttccgtcaaccgccagtatggattgtgcgatccgagaaagttgtacaacgttgtggactccctaacggttttcatgatgcatatcctccggttaacagcggagtccgcggttaaataaaaggaacaacatgacttacatgaaattaacggcggctaaacgcattgttttttttatatatttatttgtaatccagttttggaaaaacgccagttttcaaacgaaagtcagttaaaaaatctgcctggatataacgaaggtagagcggggaaataaacggcccatccatgaggaatgggccgtgaaaggagattacgcgaccgggcgcgcaataatgctgcgggtttccatgcggacttcggcaatagtgacgtcaataacgtcagtcactttgtaaaccgtttcacctttaatttgtacagtgccgttttcctggctgcaaaccagttcatc

SEQ ID NO: 1522 - DNA, 292 bp, Escherichia coli
cccgtcgattgcgcgggtcagcgcttcagcagaaatgtcatacagtaaaacctggtgtccatgatggcagcaacttcagcaatgcctgcccccatggtgccgctcccaatcactgccacagtttgcacatttatcatcatgctatttccccgtgaacctgcggtgagcagtttagccaggaacgcacctgacaccttcacgataatctgcgctccgtccggcaagtcgctgatagtcacgttccagatccagttgcgtatcgagcgtattggtttcagcgctatttatcgct

SEQ ID NO: 1523 - DNA, 279 bp, Escherichia coli
ttaatttacgtgtaaactcactgtcgactattgggtgatgaaggaagtgagcatctgtaataatttgactctgaagggcattgcttaatggcatagacataatagttaccttttatgagtatttcacctgatgtttagaaaaatagataaatttttctgtagtaaaaagagaagtaaacaaatgacatgcatgtttctgttgtagtgatatcaactctacacggtgatattaaagggtaggaaacactctaaagtatcaaaaaacgctcatttaaaatt

SEQ ID NO: 1524 - DNA, 266 bp, Escherichia coli
ctgactgatttgccccatttcaccgggcaattgtggtaatcgagtgggaatattttgtgccagagtcgagaggccatcggtgatgatatcaatattggcgctcaggcgacgggagaaaaggacaatcaacagcaggcttatcagcaaaccagcggtgagcacaatgataatcctcacatccattttccaggcctggcggcgaatatcttcggttaattcattggcccagatatagccgaggatttcaccattacgctcaatgggga

SEQ ID NO: 1525 - DNA, 374 bp, Escherichia coli
gtcgatctcttgaacgccttccgcggtgaaacggcagaacttgcgacgacggaaataacgtgccatatggctagtctccagaatctatcaattcaatctgctcggcatgcaaaaccattttgctcagtccgttctttgccttgtggcatgaaatgaacccctgaacggttatgcgactgccgaccgttatactgtgagtaatggcctggttttcgtgtccgctaacaataacgggcatttgacaccacgcctgccggtgaaagccggcttcctcctgcacagaacgatgctcaagcacgaactggcagtgaggaattcctgatggactgacctttcgaaggggagccctgcacacggtgccggacaacaccaga

SEQ ID NO: 1526 - DNA, 296 bp, Escherichia coli
gacttccagaacggcgcgcattgcaccaccggcgatgataccggtaccttcggaagccggctgcatgaatacgcgagaacccgtgtgaacacctttaacagggtgttgcagagtgccgttattcagcagcagacgttaatcatattgcagacagggcctttttccatcgctttctggatcgcctgctggaacttcacgcgcctttaccgtaaccaaaaccaacgcgaccgttaccatcgccaactacagtcagagctgtgaaggagaaaataccgaccacctttaacggttttaga

SEQ ID NO: 1527 - DNA, 399 bp, Escherichia coli
tccctttgctgcattcacttaacgtaatctgaaaagggacggctggacttgtgctaccggtcgttggaaattgtctggcactgtttttttggagatctacggtaaaattaagcgaatccgatgagactgtgcagccataatcgaggacgcgcccgctaattttaataacgctatctgcggataaagcagaataggtggttaaccccagacataaaccgaggaaaataatgttattgtatttcataatctattgttccttagcgacagattgctgtctgctggttcagtaaggtaccaggagaaacttcaggaagcttgtactcgacaatacagtttgagtttttatctttgccccatgaaacctgtaattgccctgactgtggaagtccagtcagataa

SEQ ID NO: 1528 - DNA, 102 bp, Escherichia coli
agcgttgcccagttcacgggcatcctgggtacctttaaccgtaatacctgttttatctgacaagcattgattggttgaacggtcgcaacgttcagcatgacg

SEQ ID NO: 1529 - DNA, 313 bp, Escherichia coli
aactgtaggccggatgtggcagttttcgccgcatccggcaacgtacttactctaccgttaaaatacgcgtggtattagtagaacccacggtactcatcacgtcgccctgggtgacaactcaccaggtcaccagacatcaagtaacctttatcgcagcagcagattaaccaccttcgcctggcagcctgcctacgccgtcattagcgctatcaaagtgcaccggcgtaacgccacgatagagagcagtcaggttcagcgtacagttcatggcgcgacatggcgaaaattggcagaccagagctgatacgggagg

SEQ ID NO: 1530 - DNA, 286 bp, Escherichia coli
gcttcatcggcaataatgacttttgggcgcaatatcagcgcgcgcgccagacccagacgctgtttttgtccgggtgccaacatatgcaggatagtaacctgacgtgatccggtagcagcccaaccatacgcatcgtttcaataatctgtttgcagacgcctgttccaggttccaggtcggtgttcaggcgcagtggaaaatccagaatttgcgagatacgttgacggggattcaacgaggtcgaaggatcctgaaaaatcatgcgaatacgctgactgcggaagga

SEQ ID NO: 1531 - DNA, 130 bp, Escherichia coli
gttcaaacttttctttagacatcgattgtccctctaagacacggataaatcggtgatatcaccacatcaaccaggcaacatgcccgacttgttgaatgcaataaacagaaggaaaaaacagggaggagaa

SEQ ID NO: 1532 - DNA, 344 bp, Escherichia coli
tgactgggagttaacaagcgtaactccctgggaaatgcgagcttaaccactcaggggttagctttattacttataaacggtcagacgagcgcggcctttatcacagacgacgtgccagaacctgacgaccatttttagtagccatacgagcacggaagccgtgagaacggttgcgccttcagtacagacggttgaaaagtgcgtttcatggcgatttctacctaaacttgaataaattcaatggctttattggatatccgccgaaaaatgaaacgatggacaccgaagccatgggtgattaaagaggccggattgtaataattgtacactccggagtcaattct

SEQ ID NO: 1533 - DNA, 261 bp, Escherichia coli
cgcagagccatggatttatcaccgcgtttacgagcagcttcaacgatccaacgcattgccagagcattacagacgaaccggacggacttcaactggtacctgataagtagaaccaccaacgcggcgagacttaaccttctacagtcgggcagcacagttttcgagagcctaccttcgaatgcttccagttcagatttaccagagcgctgagccagggtctccagcgcgctgtatacgatagattcagcagtagatttttta

SEQ ID NO: 1534 - DNA, 490 bp, Escherichia coli
tcttacggtcgatttcaacagaggcttttttcaggccattgatgaatttgctgtaagaaataccagttctgacgtgctgctgcgttgatacgcgcaatccacagttgacggaactgacgcttacgttgacgacggtcacaggtaagcatacctgaccagcctttgataacagcctggaaggcaacgcggtatacgcgagaacgcgcaccgtagtagcctttagcttgtttcaaaattttcttgtgacgtgcacgtgcaataacaccacgttttacgcgagccatatgtgctctcctgtatctatattctaattaaaaagttaaaaacgttaacggcttatgcgtacggcaggcacgcgattaccaggcccagatcgcctttggaaaccatggctttcggacgcaggtgacgtttacgtttggtcgcttttttggtcagaatgtgacgcaggttagcgtgcttgtgcttaaaaccacctttaccggttttt

SEQ ID NO: 1535 - DNA, 276 bp, Escherichia coli
ctctcccttgagggagagggttagggtgagggtgaacgtgcagcgctgatgccctcaccccggccctctcccacagggagagggagaaaaccaaccttacgaatactttttcgtccgtcgcagtcggtgcagtatttgccgggtcgtccggccagacatgtttgggataacagccctttcatctctttttgcacctcacggtactcctcctttccagaagtcgcctcaaatctcgtgtgatttgtaatggcctttgggcaggtgaaagcaactcca

SEQ ID NO: 1536 - DNA, 245 bp, Escherichia coli
tacggcggtcagtgcattcatcagaagcgatcctcttatgagatgtagggtgacatggcgatgctcatttcgtagccataatctaaaaatatctacatttctgaaaaatgcgcacaaaagcagacatattgttttcttattgtgatcaaaagcaacaaattagtaacatttaacagtagggtattaaggcaaagtgagacaggaaatgaataactaaagcaacaggttagggggagttaacatta

SEQ ID NO: 1537 - DNA, 231 bp, Escherichia coli
tgagtatgttcagcagtgaataaccagccgtctttcgatgcgccatcaaccagacgatagttatcacagcaagttggcacagaccgtagtcgacacccagttctaatgtgccgcccgggttgatttccatctgcgctaaacgcacatcgaaaacgtcgttcgcaggtttcagttggtatagtcataaatattgttgctggcgaaagaggaagaaccaccagcttcagagga

SEQ ID NO: 1538 - DNA, 110 bp, Escherichia coli
gcgcgaggccgaaaatctctcgaccatgttcgagaaattcacgggtcggcgttttccagccatcagcgaacagcaacggcgggataaacaagactaaaaagagttcagga

SEQ ID NO: 1539 - DNA, 189 bp, Escherichia coli
ttcatacggtcaacgatgatgtcgaggtgcagttcgcccatacccgcgatgatggtctggttagattcttcgtcagtccatacacggaaagacgggtcttctttagccagacggcccagagccagacccattttttcctggtcagcctttggttttcggttcaacctgcgatggagattaccggcctca

SEQ ID NO: 1540 - DNA, 155 bp, Escherichia coli
ctcgcatggttgttacctcgttacctttggtcgaaaaaaaaagcccgcactgtcaggtgcgggccttttttctgtgtttcctgtacgcagtcagcccgcaccagttacctgtggtaatggtgatggtggtggtaatggtggtgctaatgcagttt

SEQ ID NO: 1541 - DNA, 228 bp, Escherichia coli
accctgacgaacttgcataatagtcacgtgcggtggacaaatagactgcacttcatcaagcagttgacgttttacacgtttttccagcattgcttccagttcaaaactggtatcaaagtggttttcaatagagtttttagatgagtgtgtaaccagcacaatttcagtaatgccagccgcaatacattcattcacgacgtattgaattaatggcttatcgacaagtgg

SEQ ID NO: 1542 - DNA, 326 bp, Escherichia coli
gaaatggtcaaattgacgaagaaacagatcgctgatgtgactggcttccagactgtcatcactaccaccgctggtgataggagtgttggtgcgaaagcgcagcctgccagaaagtgaggtcgcagaaacctgccagcagcatatgtaacaggcctctgccagacatccagcagccagagtaacgcgtttaaccgaaaattcgccgccatcttttagttctgcacggatgtcgtgtgcttcaagcgtcgggccaaaattctgccagctggctgagagctgactggcttctaccggcatgccagtcgcggattctattttgttgagga

SEQ ID NO: 1543 - DNA, 195 bp, Escherichia coli
gatagctttttctacagtagaagcagctaccagaacttcagaaccgttcggtgcaattacctgtgcagtaaatgtgacgcaggggtacgatgtaccaccaggcagagttgcgcccagcctcctggagcttgcggcgtgcgcgggtcgcacgacggatacgagcagatttcttatccatagtgttaccttaccttc

SEQ ID NO: 1544 - DNA, 543 bp, Escherichia coli
  misc_feature (291)..(291): n=g, a, t or c
caagctggtaatgggttttgtccgttttcacccggatatccagctggggaacggcaactttgatcccggcgttctgaaaactgtactgaccgttacgggtatacagcaccgaaaaagtgatgttaggcgcaaaggaattgctcacctggaacccgggccttcatactgggtatcgtttaaacgttgtagcgttagccagtttgccggatgcgaaagcagcgactgctgttccacgcgatcgcgttccagcgtcaataatgcttcatcaattggctccggaaaggtaatcancatcttcgcggtttcgcctggctggtacagcgttttatccgccacgatatctaccgtaccagtatgcgccgtgctgcccttaccgctgacggcatgacttaacccagcgagaattaagccgtctttatcgcgtaatgtcagattgtagttgccaggtttagcgaaattgacggtaaaggatttgccgcctgacggtagctctccgctatggctcgtgcggtcttcgaaacgcaaccattcatacgtaacagg

SEQ ID NO: 1545 - DNA, 217 bp, Escherichia coli
gccgactcggaagatgaagtccccagtacaatcagcagttcttcacggatgtagcaggataaatttgaagatactgaaaccagtcgctttagcagattgaacccaataccagcaccacaaacaggatacaggtaatgtagaaacagataatcagctgccccagttgcaccagtgtgccgacgccgtatttaccgatggtaaacgccattgccccgaa

SEQ ID NO: 1546 - DNA, 59 bp, Escherichia coli
acagaccacggccagcttctacgccagctttagcgaagtggccagcttcaggcttggtc

SEQ ID NO: 1547 - DNA, 263 bp, Escherichia coli
aaaatagccctcttcccacgaagagggccgctaaccttagtaccccgccgttaaatcatccaccgagcgcgggtcggatgcgccgtacaactcaccgtccggcccaaccataatgctttgtgtactgcccatcgcctctttcagcagccacctttctgaccttttgcttccagcagccttgagcgtatccgggctaaaccctttttcgacacgcagctcgtccggcaaccacctgatggtggaaacgcggcgcattggtcgct

SEQ ID NO: 1548 - DNA, 454 bp, Escherichia coli
atacgagatacggacgctttagccagttccttagtcaggtactgacgtactttaaaatcgctgtccaggttgtcagcgaattctttggtgttcgcaaaccaggtagagttccatggttttacaatacccaggcgaataccattaggatgtacctttctgacccattgctagtctccagagtctcagcgatcggacacaaccacagtgatgtggctggtgcgccttcaggatgcgatctgcacgaccttttgcacgcggcataatgcgcttcatgctcgggccttcgtctacgaaaattttcgtaactttcagatcgtcaatgtcagcgccatcgttgtgttcagcgttagcaatggcagattccagaactttcttgaccagtacagccgctttcttgttggtgtaggtcaaaatatccagagcctgcgacactttcttaccgcgaatcaggtca

SEQ ID NO: 1549 - DNA, 212 bp, Escherichia coli
gtggagaaaagggaaagtgggagctatgacacagagagaaaagaagaagagaaaagaaaacgcccctgccagcaactgacaggggcagtacagtacccgagaggaattaacgcagacccagcctggaaaatcatgcatttcagccttcgcaggcaaaagtgaaatcgatatccaggcgcacaccgtcagactcttcagtgaaagtcggggtg

SEQ ID NO: 1550 - DNA, 327 bp, Escherichia coli
aacttttgtaccaggactgtaggccttaaacgaataaaggtaatttgatgaactggataactggacttgctgattaagtgtaggatcgaaattagtatctgtataaaattcaacagttatgttgtgtactataccaccaatagcccaaaacttatcgtagtcgtctgctttgttgcaacccttagtttgtagatcgctgtctgtgacggaaaagaaaaattcttggttggaaggatctccgatatagattcctggcgattgaatgtcagttattgtatcgtatgcagaccagacccttgatattaacatggtgtaatacagaccagg

SEQ ID NO: 1551 - DNA, 418 bp, Escherichia coli
agaggaagaatgctagcaaaaagagcaccagcatgacccactccgggacaaaatgagaatattctgccagcacgccaatggaagcgagcagtgctgcggcaagggtaatcatgcacaaacgcctgacgggaagtaaacccggcacagcatgatcaaatggtgaatatgcctgacaggtcaggagagaatgggctcatgcctttacgcaggcgacggtacataatcgccaccatatccattagcggaatggcgattatccacaaagcggtaaccgggctgatgggatgggttttgccctgggtcgtttcgagcaggatccagataacggtaaaaccaatcagcgtactgcccgcatcacccataaagactttgtagcggcgacccaggataccaaggttaagcatgatgtatggcagga

SEQ ID NO: 1552 - DNA, 64 bp, Escherichia coli
aggcaatgcactaacggcgattaaccagagaataaagttcagaccaacaacttcttttgacagg

SEQ ID NO: 1553 - DNA, 254 bp, Escherichia coli
tcgtcgctgcgtggggtttcgtcgacctctggtgctgcacattcaaaagagatttgcagtttttccagaagagcgcgacgccatggcgaggtggaggctaaaataagtttaggcatatttttttccatcagatatagcgtattgatgatagccattttaaactatgcgcttcgttttgcaggttgatgtttgttatcagcactgaacgaaaataaagcagtaacccgcaatgtgtgcgaattattggcaaaagg

SEQ ID NO: 1554 - DNA, 142 bp, Escherichia coli
aaaaccatattgcgggaaaacaatatccagcgccgccatttcggcgtcacgcgtcactttcgccaggatagacgcggcactgatttccggtacgcggctatcgcctttcaccacagccatcgcaggcatcggtaatttcggg

SEQ ID NO: 1555 - DNA, 424 bp, Escherichia coli
tgtggacgctgtcggtgccagccaccagcggcgactctgacgcaggcggttaaaaacgtgcacgtcgaggatttgccccagcgcgtaggccatgaaactggcggtggcgatacgggcgacaaacaggttgaagtgggcgagtgcgccgaatccctgccaggaacccatatagaatagcgacgagatgacgtaggagattaataacgcagggatcattaccgcgaagataatgcgtcgggccagcggtgcgccaaaaatacgcacggtcaggtcggtagcaagaaaaataaacggaaagctaaacgcgccccaggtggtatggaaacccaaaatggagacgggaagctgaaccagatagttactggaggtgatcaccagcagatgaaataacgataaccagaacaacgccttatagcgttgagtt

SEQ ID NO: 1556 - DNA, 721 bp, Escherichia coli
  misc_feature (661)..(661): n=g, a, t or c
  misc_feature (706)..(706): n=g, a, t or c
gttttacagaaaattacagaaaaaggaggcaatatcgggtaaaggcattagcccgacgaatacgtcgggctacaaatattattgtgctgcaggtgttttagcgggttgttgatccacaggttctaactggaagaccacatcgacctgatcatcaaactgaatagcggcctgctcgtaagtttcctgggcggacaccggcgcggcatcggctttcatcatccgcaccattgggctgggctgatagttggaaacatggtagcgcacgctatataccggccccagtttacgatgaaagccgttcgccagttcctgcgcctgatgaatcgcgttatcaatcgctgccttacgcgctttgtctttataggcatccggctgcgccacgcccagcgacacagaacgaatttcgttaagacccgccttcagcgcgccatccagcaaggaattcagtttgtctaactgacggagcgtgacttccaccgttctcacagcgcggtagcctttaaggatacttttaccatcctgataatcataatctggctgggtgcgtaagttcgctgagctgatatcttttttcgcgatctgattgagttcaaggaaggaaatgtattgtgcgacgcgctcatctgcctgtttcttggcagtagcgggcatccttcgcggncacgttaacttcaatcgcaagagtggcaatgtctggcaccgcatncacgcttgccgtacc

SEQ ID NO: 1557 - DNA, 161 bp, Escherichia coli
tggtgttggttaattcaccttccatccgctgcatatgataaatgtcatactgaattttcaaattgcagcaaccaacatcatcaatcaatttcagcgcctgccgagttccggtgagatggaaaccaggaatatcaaaatggttaataggttcaatcagtaat

SEQ ID NO: 1558 - DNA, 240 bp, Escherichia coli
acctggtagaacggacgctttttagcgccgtgacgtgctaaacgaatagttaccataacatcctcttgtgtgaataaaacaaccggaccccatcgaggaacggagtccggtgtcatattaaaagcccgaaaattttactcatttttgcgggaattgcaatcaacagttgctaactctgctgtaaaaggccgtcggcggtgcagccagtttggtgccggagtgcgcgcagtcaccggagcg

SEQ ID NO: 1559 - DNA, 291 bp, Escherichia coli
tagtggaatccaacatttgcataaatgtcgctaatgacaatgcaatagtgacgcaccataacgtcccaccggttaatggtgccggagttgatttagtgattgccattaaagttgtccattatgcgaaataatgttgctaatttctttttctatcggactggtatcgataactaaagccttactggtataagccggcatggaggtcacggttgaagccagctcaggcatctcggcaatgtcttcgttcttcgtatcaatagttgctgtcatcgataaaccaatacgcaaggg

SEQ ID NO: 1560 - DNA, 102 bp, Escherichia coli
atcggtttgaaactgactgagttggttttccgcgtcgctgatgggcgggttgcgcagtaaaagctgcggatagtgagttttaatcgcccgatagatgacagg

SEQ ID NO: 1561 - DNA, 306 bp, Escherichia coli
aactgattattccagtaattttacaggtaaatgtatttatatttgttagtataaatgaatttacactttcgcgttttttgaacatggcaagtaaggatatacatagtctttcttttaaccaaagggagtgtgagtctgctattttaatcccttcaaacagagaaaaaacaagcgataatggaggttcctcttcagcaatatagccattcttatcaagagtaaatttgccaggcagctcattattcacgtcgataaaaaaggataaacatgttttcttatctatatcaacaattcttagtttagagg

SEQ ID NO: 1562 - DNA, 215 bp, Escherichia coli
acagaccacggccagcttctacgccagctttagcgaagtggccagcttcaggcttggtcacacggttagcttttttagcaccggtggtcacctgaatagcacggtagccatcgttagccaggtctttaacctgagtaacgcggtttgcttcaacttcgattacggttactgggatagaaacgccgtcttctgtgaagatacgggtcatacccact

SEQ ID NO: 1563 - DNA, 175 bp, Escherichia coli
tgtccttcaagagatacgccatgattagcggcaacatctgccgctgtcgcatctgcagggtgttttaccagaccatgaacacctgccgatttgacttttacgcccggcagacgtttacgcagcaagcgctcgccaatgggcgaacggcaaatgttgccggtacaaaccaccagga

SEQ ID NO: 1564 - DNA, 168 bp, Escherichia coli
acgcagtccacgggctaaatacccggctacgggtaacaagcgattctttgagggttaaattcatatgccactatcgtaacaaacgccatgtgcttaccctggcgtcaagggtcaatacctgcaagagtgcgtgaagagtggaaaggggtccgcatccgcgagccgcaa

SEQ ID NO: 1565 - DNA, 252 bp, Escherichia coli
tactcataatatcttcaagcacaccacttcccattcccggaagatttagtggattaaaaagaagattgatattaagcattgatattatcgaaggaaactttaggagactctcatttttttgaatcgcagcaaaaatgctcccgacaggatgtatataattttgttcatagtatatagtccttaaatagtgaataaccaacctgttttttatactgatcaaattggtcattttttctgggcgaaatacagaag

SEQ ID NO: 1566 - DNA, 116 bp, Escherichia coli
ccgtgtctgcggcatgggataacaatgccatcaagtgaatttatatgcaataaacatgattaaataatttaaatgaaataaaaaagacggacaacttagtgggttgtccgtcttca

SEQ ID NO: 1567 - DNA, 501 bp, Escherichia coli
ggctttatccctggtggcattggttgctggagagagaaaacccccgcacgttgcaggtatgcacctgacaacaccacgggggctaatcttgactctagaccactcaagaatagccgcgaaacgttgtcattacaacacaggcggctatatgacgttcgcagagctgggcatggccttctggcatgatttagcggctccggtcattgctggcattcttgccagtatgatcgtgaactggctgaacaagcggaagtaacgtgtcatgcgggcgtcaggctgccgtaatggcaatttgcgcccggaccaggccgcaggggggaaactctgcggcctttttcgttcttactgcgggtaaggcacccagtcgccgccgttcaggcgaacgtacggtttatcctggtattgaataactactgcatttgagttctcggagaccggtgctgtttgtggcaacccactggtgagttttttccagtcaacattgtcttcggtgaaaatctt

SEQ ID NO: 1568 - DNA, 366 bp, Escherichia coli
gtcgtttttgatcgactcaacatactcgatatcttcttttaccgggttagtgtcgtcgaaacgcaggttgcactggcctttatagtcctgggcgatcccgaagttcaggcagatagatttcgcatggccaatatgcagatagccattcggctccggcgggaaacgggtgtgtactgtggtgtgcttaccactggccagatcttcatcgatgatctgacggataaagttagtcgggcgggcttctgcctcactcatcgtggattcctcaaagcgtaaacaacgtataacggcgtatgatcttataagcgggacaggctgacaactgttagttttttaaaattgataatctaacaaggattatgggga

SEQ ID NO: 1569 - DNA, 159 bp, Escherichia coli
tcaaattcgcgctgcgacacgctaatgatattggcatcgtgatccattacgaccgcgcgggagctggtggtgccctggtcgagcgcaacgatatattttttttcagtcatgtttaattgtcccgtagtcatattacagcgaagctttttgttctgaagg

SEQ ID NO: 1570 - DNA, 207 bp, Escherichia coli
ccagggtatgtgcttgaatatctttttagtatccatagtaaaacctggcatgtattgattaatagttggccgaagccgttctaggtttgcgttgcgtttgaggaggtaaattgaccgctatcctgtagtgatgttgccagagttacgcgcgcgtaaagtaaggtaaataactgagtggttattttagggatgtaagcggtcagtttt

SEQ ID NO: 1571 - DNA, 140 bp, Escherichia coli
taatggcaggtgcttcgacaatacgtttcggttccggcgaggcgaccacgcggcgatagccccgcccggcatcttcaacaaaacaccagtcagggtttgccttttgtaattcgtcacgctggctgtcactaaagaatgcg

SEQ ID NO: 1572 - DNA, 559 bp, Escherichia coli
tgcagtgaacagcagagatacggccagtgcggccaatgttttttgtcctttaaacataacagagtcctttaaggatatagaataggggtatagctacgccagaatatcgtatttgattattgctagtttttagttttgcttaaaaatattgttagttttattaaatgcaaaactaaattattggtatcatgaatttgttgtatgatgaataaaatataggggggtatagatagacgtcattttcatagggttataaatgcgactaccatgaagtttttaattgaaagtattgggttgctgataatttgagctgttctattctttttaaatatctatataggtctgttaatggattttatttttacaattttttgtgtttaggcatataaaaatcaacccgccatatgaacggcgggttaaaatatttacaacttagcaatcaaccattaacgcttgatatcgcttttaaagtcgcgtttttcatatcctgtatacagctgacgcggacgggcaatcttcataccgtcactgtgcatttcgctccagtgggcgatccagc

SEQ ID NO: 1573 - DNA, 95 bp, Escherichia coli
gtttattgacggtataaaccagaatccgcagtccggcgtctttcaactgcatcactcgcgctttattgagtaacttatgattgagatgaatagag

SEQ ID NO: 1574 - DNA, 492 bp, Escherichia coli
aattttcttgtgacgtgcacgtgcaataacaccacgttttacgcgagccatatgtgctctcctgtatctatattctaattaaaaagttaaaaacgttaacggcttatgcgtacggcaggcacgcgattaccaggcccagatcgcctttggaaaccatggctttcggacgcaggtgacgtttacgtttggtcgcttttttggtcagaatgtgacgcaggttagcgtgcttgtgcttaaaaccacctttaccggtttttttgaagcgcttagcagcaccgcgtacggtcttaatttttggcattttaataacttccacttcgcattgttaataaacgaaacaaaggcgaacaaagcctgtgaagcccgaaggctccacagacagtgctacttgaaggccttactgtttcttcttaggagcgagcaccatgatcatctggcggccttcgatcttcgttgggaaggattcgaccactgccagttcttgcaaatcgt

SEQ ID NO: 1575 - DNA, 116 bp, Escherichia coli
gcgcaaatcagattgccacaggaccacgttcccggttccgtgtctggatgagtcggaccatcatttccagttctgcatcggccggtttaccgtgattcatcagccagttaaacagg

SEQ ID NO: 1576 - DNA, 538 bp, Escherichia coli
agacccatcatcacagcggcagccatgtacagcagatccatattcaggttttccatgacagtctccagtttgtttcagttaaaacgtagtagtgttggtaaattaatgttcttcagacgccatcgacagatagacgatcgtcagaaccatgaagatgaaggcttgcagcgtaatgatcaggatgtggaaaatggcccacggcacattcaggatccactgtgaccaccacggcaacagaccagcaatcagaatgaaaatcagctcaccggcatacatgttaccgaacagtcgcaaaccgagtgaaactggtttggacagcaggcttaccccttcaaggattaagttgacaggaatgaacgcccagtgattgaacggctgcagcgtcaactctttcgtgaagccgccgatgcctttcattttgatgctgtagaacagaatcaggataaatacgcccagtgccatagacagcgttacgttcacgtccgcagacggaaccacacgcagtgcaggcagacccagtacatgttcagcaatgtac

SEQ ID NO: 1577 - DNA, 236 bp, Escherichia coli
acagaccacggccagcttctacgccagctttagcgaagtggccagcttcaggcttggtcacacggttagcttttttagcaccggtggtcacctgaatagcacggtagccatcgttagccaggtctttaacctgagtaacgcggtttgcttcaacttcgattacggttactgggatagaaacgccgtcttctgtgaagatacgggtcatacccacttttttaccgactaaaccaatc

SEQ ID NO: 1578 - DNA, 199 bp, Escherichia coli
aattattgtgtctgatcctgggtaacatatgacaaccttattttatttggttactttatgtcgccattaaatatctcactatagaagtaaactatcaaaaaacgctcattattaaaatgtaacttattagcaattgaatttttgcactttaaatacaatctctttttatttataactttttaggttgggagaaatcagg

SEQ ID NO: 1579 - DNA, 384 bp, Escherichia coli
tgcttttgcaggtcgggaaatgaggtcgtgctactaccgagcaaaatggcctctgcgccccactgtttacactggtcgatttgtgcttgctgggtagccaactggctgtagccgcctgcctccagcacttttaaatccacaccgtagcggcgagcagcctcctgcataccatagttcaacgataaccaatatgaatctttcaggctgggataaagcgcgcacagtttccatgcgcgtttggctttaagcggcgtagaggcttgcaccgtgaaatgctgcgcatcatgccagcgcaacaggttatcagccgaaaatgccggcaacatgaaaagggaaagaagtaaaaatagcagtacgcgcatgatagcctcatcaataataagg

SEQ ID NO: 1580 - DNA, 174 bp, Escherichia coli
tacggtgcataaagctgtagtagctttccggatgctctttcggcagaccgacatattcgtccatgttgaaggtgacaacgtgcttaaagctgacctggcctgctttatgcatttcgactaacgctttataggtggtcatcggcgtgccgcccagtcggcaggcccagtacaaac

SEQ ID NO: 1581 - DNA, 237 bp, Escherichia coli
atttagatcaaaggaggaagaataagcagaaaaagcccgccataacagcgggcaggaggatttagaactgataaaccagacctaaagcgacaatatcatcggtagagatgccattggcagcgtagaagctgtcatcttcatccaacaggttgattttatagtcaacgtaggtggacatgtttttattgaaatagtaagtcgcgccaatatcggcgtatttaaccagatctttatcat

SEQ ID NO: 1582 - DNA, 170 bp, Escherichia coli
aaatagtgcgcatggcgcagtttcagacctttttgttgcaggcccgccgccaggatatcggtcagacggtgaatgcggttagcgatacgtttcaggccaaccgggccgtgataaacggcatacaggctggcgatgtttgccagcagtacctgggaagtacaaatgttgga

SEQ ID NO: 1583 - DNA, 78 bp, Escherichia coli
tcagcactttaacagtgatttcgtcgcccacgttgacgatttcgctcggatgcttaacgcgtttccaggccatgtcag

SEQ ID NO: 1584 - DNA, 261 bp, Escherichia coli
ggtgaggggaacgtacgggatgtaaaattcaacgcgccagcatcgccggatgcgatgctggcgcatcttatccggcctacggttaatgtcttttattatcaatagttaaggtgatgcgattggcgcggcagaagagttcggagacgtgcaccggtttgtcattctgatcaaaggcgattttgctgatgcgaaacaacggttcgcccagttcgcatttcagccattttgcctgcgggcgggtggcggcaaagatatcgatgg

SEQ ID NO: 1585 - DNA, 639 bp, Escherichia coli
tgtaataacaatgtgacgcagagcacaaattatatttcgaatgaaagtaaggatgaaattgatgatgtgaatgatttagcccggcgacgacgccgccgggccgaggagattacagcatatgttcagtacgggcgatgatatcgtcctgagcgtctggagagagcgcggtgaagaacgcggaatagcccgcgacacgcactaccagatcgcgatactgatcgggatgttttttcgcatccagcagcgtttcgcgggaaacgatgttgtactgaatatgccagcctttatgcacttcaaagaaggtacgcagcaggatcatcagtttctgcttgtcagattcgttctccagcgttgccggattcagtttctggttgagcaacacgccgccgagaatcgctgccgtaggcagtttacccactgagccaatgaccgcagtagggccaagatggtcagtaccggaggccgggcttgcgccttctgccagcggggtgtgggctttacgcccgtccggtgttgccatagtctgcgcgccaaacggtacgttagcggagattgatgacgtacccgcgtaatagttgccgccaaccggaccacgaccgtagcgcggattatggtactgtttcagttcgtcgatatagg

SEQ ID NO: 1586 - DNA, 291 bp, Escherichia coli
aagcatggatatgagccacgccgtcagagacttgttttcttacacgtttacgtgcacgaattggtgcctttgccattattcaatcaccccgattatttcttgatcggtttgcgcggacccttacgggtacgtgcgttggtcttggtacgctgaccgcgaaccgggagaccacgacgatgacgcaaaccgcgatagcaaccaagatccatcaggcgcttgatgctcatgctgatttcacggcgcagatcaccttcaacgacaaatttggcaacttcgtcacgcagcgtgtcg

SEQ ID NO: 1587 - DNA, 475 bp, Escherichia coli
cacttaaggacggcgggaccaccgtattcactgtctgctgcgcgccaggcaatggatcacgatgaaccagacgggaaggtaaatggcgaatgagccgggtaaaaatttctttaaacataaggagtccctccgcactgtctgaaacagtacagaaatgtcttcaggcgtggcgaagccttacctgaaggtaataaagctgagcagggacgttaaaacgtcacggccttacgcatccggtaacgccgtgaaaagacgggcttaccggaaaagttttaatctccgtcgagggagaggcgtgggatcaggttccatataacctccggtaagtgaaaaaagcgccgcaaataataaggagaatccaataatattcgtagcatctatggcgatataatacctgctgacaactaaaccaacgataaaccagactttacccattgctgaatgcacgggtaacgttaggctcaaataattaaac

SEQ ID NO: 1588 - DNA, 188 bp, Escherichia coli
acatgaacacgcaacctttctgccagagtaagcagcgttgccagctctttgctttgcgcggcagtcacgttataggcgggactgagtgagtcttcgctgtaatcgaagcgcagggagtccggatccatatccagctcgcgggccatcgtccctgacagccaggccgtttgctcccgctcaccaaggga

SEQ ID NO: 1589 - DNA, 134 bp, Escherichia coli
tgcgtaccagctggttaactgttgccattaaatagctcctggttttagcttttgcttcgtaaacacgtaataaaacgtcctcacacaatatgaggacgccgaattttagggcgatgccgaaaaggtgtcaagaa

SEQ ID NO: 1590 - DNA, 152 bp, Escherichia coli
gtttaaataacggataccagccttcaatttcgttatatccatgttttagttcatcttctcgctgaaagttgtaggtattggttaacataatacccgcgcccatatcgaagttataacccacacgtagcataacctcgccctgatcggaggca

SEQ ID NO: 1591 - DNA, 464 bp, Escherichia coli
attgcttccttcatccagtttcaacaaagtattattttctgcatcctcaataccgttaaatgcaacccgaacccccgttgtccctttgctgcattcacttaacgtaatctgaaaagggacggctggacttgtgctaccggtcgttggaaattgtctggcactgtttttttggagatctacggtaaaattaagcgaatccgatgagactgtgcagccataatcgaggacgcgcccgctaattttaataacgctatctgcggataaagcagaataggtggttaaccccagacataaaccgaggaaaataatgttattgtatttcataatctattgttccttagcgacagattgctgtctgctggttcagtaaggtaccaggagaaacttcaggaagcttgtactcgacaatacagtttgagtttttatctttgccccatgaaacctgtaattgccctgactgtgga

SEQ ID NO: 1592 - DNA, 136 bp, Escherichia coli
ggcgctgaggatagttttgctttcgccgtcacgctcacgcaattgctggttcagttgctcggcaagcgttgccaggctgtgctccagccgggtggaatcttgcgcactggcggggattgcccgataactgtcgagg

SEQ ID NO: 1593 - DNA, 152 bp, Escherichia coli
cgtagcgttttcagtttgttgaaggcacgggcgacggcaggagccagctcactcgctgcgaagtaattcgtgatgggcaaggcttcttgtggatagcgtgcaagtgagtttactaacccaggtaaccctttgagtccaaaatgtaacatgga

SEQ ID NO: 1594 - DNA, 156 bp, Escherichia coli
ctaccggtgaagaaaaaacctaccattataggacgggctttcagttcatctgcgaggaatatacttagggtaggagtctgaagagcgcccgcaatacccgtcagaaaggcgacaagtaaaaatgccgcggcagtgagatcaagtatttttgatgga

SEQ ID NO: 1595 - DNA, 477 bp, Escherichia coli
atatttgttagtataaatgaatttacactttcgcgttttttgaacatggcaagtaaggatatacatagtctttcttttaaccaaagggagtgtgagtctgctattttaatcccttcaaacagagaaaaaacaagcgataatggaggttcctcttcagcaatatagccattcttatcaagagtaaatttgccaggcagctcattattcacgtcgataaaaaaggataaacatgttttcttatctatatcaacaattcttagtttagaggggcatactggtaactcccttctaattttgtcgcttacaataaacaatgaattttttttgaacgagataactctcctgtttataattaaatcaaatgattgacagatgaaaactacggagcaaacataatccatcttgcacctatcataaaattaaaacaagttgatagtagtcaaataacaaccaattaaatacacaatcataatcagg

SEQ ID NO: 1596 - DNA, 293 bp, Escherichia coli
aaatgaaaggaggagcctcggaaaatacttttaattaatgtgcgttagacgcggtgtggttatccattgagtggctctggcgctcgtgcattttgcgagcgtagaacatcaggataatcaggctgacgatgaaggtacctgccagctcgaaggagcttgcgcccatcagcgcgatgaagcagaacacgcaacccagtacagagcagatcaggctgacaaagttgcggatgttaacgccttcaaaacgaatcaggtcaacgcaagagtagaaatacggcagcatagtcagcagt

SEQ ID NO: 1597 - DNA, 334 bp, Escherichia coli
tacaacttttgtaccaggactgtaggccttaaacgaataaaggtaatttgatgaactggataactggacttgctgattaagtgtaggatcgaaattagtatctgtataaaattcaacagttatgttgtgtactataccaccaatagcccaaaacttatcgtagtcgtctgctttgttgcaacccttagtttgtagatcgctgtctgtgacggaaaagaaaaattcttggttggaaggatctccgatatagattcctggcgattgaatgtcagttattgtatcgtatgcagaccagacccttgatattaacatggtgtaatacagaccaggaaca

SEQ ID NO: 1598 - DNA, 231 bp, Escherichia coli
tggccagcttcaggcttggtcacacggttagcttttttagcaccggtggtcacctgaatagcacggtagccatcgttagccaggtctttaacctgagtaacgcggtttgcttcaacttcgattacggttactgggatagaaacgccgtcttctgtgaagatacgggtcatacccacttttttaccgactaaaccaatcattgtttcaacctctcaatcgctcaatgacctg

SEQ ID NO: 1599 - DNA, 235 bp, Escherichia coli
catcggcaacctgcaaacggttttgcaaaatcgccagcccggcggcgctatcgcccggtgtaccggtcacatagatccagtcacccggtttcgccccagagcgcgttaaggctcgtcccatcggaacaaagccgtggatacccaacgtcattgataatggcccacgcgtggtatcgccgccaatgagttgcatatcgtaataattgagaagatcaaacaaactgtcgctgaagga

SEQ ID NO: 1600 - DNA, 459 bp, Escherichia coli
ctgtgggatgagttttacatttgtgttttcgttatataaggtagtaatgcaaaataaaattaacgtcagcaataaactgaaaataaaaaagctttgagcttttaatttttgtgtacccatagaaaccataaaaaggagagcaatgtgagtgctggattttattgatggcagagatatatagttttgaccaggatcaattttcgttaacgataaaaaatatttaaagaataaccccatggaaatacgtgttgactgaatcatttttccgaatgattgttttctggaactaaattatgtaaaggttatgctgtcatatttaaagcgattgtaagctaatgtatgtaataaatgagataatttacagtaagctaaaaatcagccaggcgataatgacctggctgatagttttagcctttagctgttgcattttgtttatgaaacagttcacggaacaccgga

SEQ ID NO: 1601 - DNA, 168 bp, Escherichia coli
ttatctgagcgaaatttgagtcatcgagaatacaattatcaaaaagtattttttccattatggcgaaattaaaattcgttttatacatattacagtcctgaaaaatagcgttttgtagtctgcaacctgcaaaattcgaattggataaatcttcatctttaatcacga

SEQ ID NO: 1602 - DNA, 481 bp, Escherichia coli
  misc_feature (336)..(336): n=g, a, t or c
atgaagtcgaaatgcgcgatgacacactactgaaagcggaaggacgagtaaagttgcaattaaaaggaaatgttatgcataaggagcagtagagtattcgttttcatttaaagatattcttgcgctttaattacaaactgcaccgatgttggtggcagtcaaaatcgccgaggcgttccctgaaggccggggcagcccacatggatgtgggctgagggcgcgttttacagggatgttacctcgcgcccgacccggtagccgtaagggataagtcgagggcaccgcgcagcggcgattttgttcgccagagcccgggggtgcaggggggcggcggcnattggccgccccctgcgcgctccttgcgccagtggcaatatgttgcttagctcatgaaaggagcgcaacaagatgatgaatcaacatataacaacatcttaaaaaaaggcctgacattacgccaggccttctgcgttaattaatc

SEQ ID NO: 1603 - DNA, 164 bp, Escherichia coli
aatggtaatttgcggcgtgccagcccgttgtggctgctggaagacgaatgtgaattgactgggagttaacaagcgtaactccctgggaaatgcgagcttaaccactcaggggttagctttattacttagaaacggtcagacgagcgcggcctttagcacgacga

SEQ ID NO: 1604 - DNA, 226 bp, Escherichia coli
agacggcgttccggtggtcgtatcagtctcagtaggttttggcttgctgctacaggcggcaagcaacacaaaaaggggaagcaatgttacataacgacgcttgaacatgaggggtccatttaacagattcaaccaggggcaagtatggtaaagcatcacgccccgcacaaggaagcggtagtcactgcccgatacggactttacataactcaactcattcccctcg

SEQ ID NO: 1605 - DNA, 269 bp, Escherichia coli
gctgtttttgttccttaacaggtttgtcattttcatctctcagttctaccgtcacctcgataggattgccggagagataacggtccttatcaatcttaattgacgagtgagttcgggatgacgaaacagaaatgatattcaccacggcgggggctttagccgcatccacaccattcagctgtggcatcagcgtcagcgtgccagacatcgctcctgtggtcaggatctgggtatagcttccgtcaccattatctttccagtcagaaagg

SEQ ID NO: 1606 - DNA, 180 bp, Escherichia coli
gatagacccagaaatagacgccgccaacaatccacataatggacataaaaaacggccagaagaaaacgaacctcatcatcagttcaccagagtgaaagtacgctacgcataggggtatgcataacaccagacataatataaaaaacgatacgatgcgattaatcatttttcggataccag

SEQ ID NO: 1607 - DNA, 239 bp, Escherichia coli
tttccctgaaaagtcagaccataacgcgaaagcgcatggcgaggtagctggttcatagatagcctgtcgttaaattttcgtcgaccgtgcgcttccggttgtggcaacccgcgaaatggcgcggcggtaagtatggcggggttattccttccccgttgaggacaccgggttgtcaggttgaccatacgcttaagtgacaaccccgctgcaacgccctctgttatcaattttctggtgac

SEQ ID NO: 1608 - DNA, 225 bp, Escherichia coli
gcattgcttcttcgtaggtcggcagagttgccaggcggtcgatctgagacgccgggatcagctcaccttcaaaggcagcggctttgacctcaaattttgcattcgctttcgcgaactctttgaacagacgagcagcagcgcccgggtgttccatagagtatgcaatcagggtcggaccaacaaacgcgtctttcaggcactcgaacggagtaccttcaacagcac

SEQ ID NO: 1609 - DNA, 478 bp, Escherichia coli
ttaataatatcatctggttttaggacaagtaaaaaacccgttaagtaatttgcattaatgttatacgtatttgttaaatccgatatttgctggtattcacacttcatcttcttatttttatcaagcctagatagaggtgcaacatgattttcaattttatattttttatcatttattattatatcgtatgtataatcatgtaaaataccattcgttgttattggcataaatgcgaaagcaaccatcaattgtgcattgtttgatttaaattttatttgagagtcagtaacacttgaggctagcataaatttatcatcttgcttgctcaaacttaacctggatgctgctttaggcatcacatcagcggattcaccttgtatgaaccccatcattggaagtttctgtgtgatttctagcttttttacattcagaaaagattttttagcatcaagcggtacattgcgaagtaaatctggaa

SEQ ID NO: 1610 - DNA, 463 bp, Escherichia coli
taatagacgaaggttttaccgtcaaaagagataaaccctgtatttttgacatgtcgatacttcacaacctgcataatatctgcacaataatttttctcgaactcctttacctgaatacattcgtcactggaaatcagataaggaccgacatcgtacaaataagagggggaaaccgagtcggcgtaagctgtgcgcaaaccaaccaacagctgttcctccgtgggatttagcgtgttgataagatcaattgccacgctacgccgatattcagcaatatttgccaccgcaaaagcagtatcaataacggactgtttcaggctatacacccgttcctttaccatttgagtgtagatcccgcaggcaactgctgaaatcatgataaaaatcagcagactgactgtaagtacgaacttattgattctggacatacgtaaactactcttttactaattttccactttta

SEQ ID NO: 1611 - DNA, 69 bp, Escherichia coli
gcagcgcctaagtcagctgcatcgtttttcggcaggtcggtaaccatgcattcggtggtgatcatcagg

SEQ ID NO: 1612 - DNA, 180 bp, Escherichia coli
agtacgttaattttggctttaatgagttgtaattcctctggggcaactgttcctttcttcgttgctcctcttgcccgccaggcgatactttttacctgatcagctaacgctacgccatcacgttcctgaccggataaaacaacttcgaacggatatccttttgattgcgttgtacaagga

SEQ ID NO: 1613 - DNA, 164 bp, Escherichia coli
atcgtcgtgagtatgacgacgcaggaaaccttcggtatagccacgatgcgccagaccttccagagtttccagcaggctggtatcgaacggttttcccgcagcggcgtcatcgatagctttgcggtaaacctgtgcggtgcgtgcacaatagtagaaagatttgg

SEQ ID NO: 1614 - DNA, 301 bp, Escherichia coli
gatgaaatgatcttaaaacggttaatgatgtgaatacaatgcatttgtgatctggatcgcgttttccgtttctctgacgctgattctttcacgcgtcagagagtcggtaacatcacggtttaatgactgttcagggaggtctggcgttttggctggttgctgggtataggtggtctgacaggggagcgaggcctgtttttcaccaggtcttcgtgagtaacttttggcggtgtttcattttttacaaacagtttgagggtcctgcgcgccatatgtttgataattttatcatcacttaatg

SEQ ID NO: 1615 - DNA, 405 bp, Escherichia coli
ttgtgttttcgttatataaggtagtaatgcaaaataaaattaacgtcagcaataaactgaaaataaaaaagctttgagcttttaatttttgtgtacccatagaaaccataaaaaggagagcaatgtgagtgctggattttattgatggcagagatatatagttttgaccaggatcaattttcgttaacgataaaaaatatttaaagaataaccccatggaaatacgtgttgactgaatcatttttccgaatgattgttttctggaactaaattatgtaaaggttatgcttgtcatatttaaagcgattgtaagctaatgtatgtaataaatgagataatttacagtaagctaaaaatcagccaggcgataatgacctggctgatagttttagcctttagctgttg

SEQ ID NO: 1616 - DNA, 240 bp, Escherichia coli
aacaatgagacaccagattaaatgatagtcggggagggagagaagaggagggcgcaatggctgcgcccgaaaaataaattagtcgcgcttcgcgccagtacgcagcaggccggatgcgccttcagaatagtcgcgaggcatctgcaccggtgcctgatcgttgctggcttcagactctgccagacgattacggaacgggtttgcttcagcagacagttccggcagcaggctgctggagct

SEQ ID NO: 1617 - DNA, 163 bp, Escherichia coli
agcgcaacgctctgctgcaacctgagctgcaaacggagtggatttgcgagaaccacggaaaccggaaccaccggctgttgcccaacccaacgcgttaccctgacgatcagtgatagtcacgatggtgttgttgaaagaagcatggatatgagccacgccgtca

SEQ ID NO: 1618 - DNA, 120 bp, Escherichia coli
aattttacataccacgaaatagacaattaacgcatacagataccacaagctggtgctggcggtgatcatcccgtgcaggaactcaccggtggaatcggcataagcggcattggaggcatt

SEQ ID NO: 1619 - DNA, 142 bp, Escherichia coli
gttgctcgacacgctgcggtttacgccaggcatcgatggaatcaaataatttgacgatggtttttgggttcagcattgggaaggtgtggatgagatcgtgaaactcagccaccagtctggctaaatcgcgaatttcatttgg

SEQ ID NO: 1620 - DNA, 196 bp, Escherichia coli
tgatattgcgccataaaacgtggttggttgtacgttttggcgtcgttaagaaaagtaccgtccatgtctgtgacgataacttttacgctcataggtgtgctcctggctcgaaaatgaaaccgtaacagtgtaataacaatgtgacgcagagcacaaattatatttcgaatgaaagtaaggatgaaattgatgatgt

SEQ ID NO: 1621 - DNA, 213 bp, Escherichia coli
ctgaccaattgccattagcaaattcatcgttgcaggtgataatggaggggttatttcatccacagatccttttaacatcaatagctgttctttcggaagtgctggaattattgcaacagattgattaataacatgatcatttgaccatttcaggaggctataatctacattcataaaatccatcagagaatagtgtttaatattctctttgct

SEQ ID NO: 1622 - DNA, 254 bp, Escherichia coli
tggcaccccgacagatggtccatatgccagaaccatcgcggtatgccattgtgtggttaccttctttttcgtccagaaactggtcaagtatctgaggagcagatgcgccagcaccaatcagcgccagaacggcagccgacaggccgtatctgatttttgtgttcatagatatttatgatgaggacgctcgtgcttattggcaggattttcaatcttaaaggagtactgatgctgcagataagactcaacttttt

SEQ ID NO: 1623 - DNA, 200 bp, Escherichia coli
cactccagtgaacgtcagttttttcaggcattgcgctggtttggttgattttttgcatttcagaattaccgtgcattttcaaatgtagagattattttatcgatatatcatggggttatgttattcagcatcactattcaggaggctcaatagcggggtactataccataacaacaggaagcgcctgtctcattgcaaaa

SEQ ID NO: 1624 - DNA, 204 bp, Escherichia coli
gtagtgtgctttgtgcagtttgttgatcgggtaagccagctgacggcggccccagtcttccagacggtggatcttgccttctgcaccagtgatggcagcagtgtagcgctcgatcatgcccggaacctgttcgctctggtcaggatggaccataaaaacgatttcgtaatgacgcatcgaattgctccttacggattattcagc

SEQ ID NO: 1625 - DNA, 439 bp, Escherichia coli
aacagtgtggacgctgtcggtgccagccaccagcggcgactctgacgcaggcggttaaaaacgtgcacgtcgaggatttgccccagcgcgtaggccatgaaactggcggtggcgatacgggcgacaaacaggttgaagtgggcgagtgcgccgaatccctgccaggaacccatatagaatagcgacgagatgacgtaggagattaataacgcagggatcattaccgcgaagataatgcgtcgggccagcggtgcgccaaaaatacgcacggtcaggtcggtagcaagaaaaataaacggaaagctaaacgcgccccaggtggtatggaaacccaaaatggagacgggaagctgaaccagatagttactggaggtgatcaccagcagatgaaataacgataaccagaacaacgccttatagcgttgagtttgcgagaaaa

SEQ ID NO: 1626 - DNA, 100 bp, Escherichia coli
atttcaaatgaggaaaatctcccggcgaaaaaaccgggagatgaaagtgtgatgggtatcaaataaacaacagaggagaaatttttaacgcagccattca

SEQ ID NO: 1627 - DNA, 175 bp, Escherichia coli; identical to SEQ ID NO: 1563

SEQ ID NO: 1628 - DNA, 83 bp, Escherichia coli
taaacccagttgccgcgccgagatctcgccaagtgctaacatattcatcggcctggactgacaacagatccacaacaacacgg

SEQ ID NO: 1629 - DNA, 115 bp, Escherichia coli
ctcatactcttcacgcttagaaaccacgaaggaagagacgattggcgagaagttaaaggagaaaaccatgatggaaatccccagccagacagtgatcaggataccgtcatgaccg

SEQ ID NO: 1630 - DNA, 411 bp, Escherichia coli
agcattgaaaggcacagcagtagtcaaacagtgtgaaacgctactggcgccttacagcgcaaaaaggctggtgactaaaaagtcaccagccatcagcctgatttctcaggctgcaaccggaagggttggcttatttaacttcaacttcagcgccagcttcttccagagcttttttcagtgcttctgcgtcgtctttgctcacgccttctttcagagcagccggtgcagattctaccaggtctttagcttctttcagacccaggccagttgcgccacgtactgctttgataacagcaactttgttagcgccagcagctttcagaattacgtcgaattcagttttttcttcagcagcttcaaccgggccagcagctacagctacagcagcagcagcggaaacaccgaattttt

SEQ ID NO: 1631 - DNA, 152 bp, Escherichia coli
ggcaggtggcttaagcgggagaaataaaattcagcggcgtcctgacgccagagtaaagtaatcacagcgggagataacgtcttcatcagtcctgactctactggctatgtgccgggtagcatgaaataattagcgccaacaatttagcagga

SEQ ID NO: 1632 - DNA, 75 bp, Escherichia coli
atgatcgtcgctgcgggcaaactgactgcaaaatggtctctctccggggtctgtggccagtttttgcatagagga

SEQ ID NO: 1633 - DNA, 88 bp, Escherichia coli
acgcccttcaatcttgaaggagcgtacaccagcatcaatcagcgcgccgaggttggcagtctgatcgttatctttcatcgacagcaga

SEQ ID NO: 1634 - DNA, 526 bp, Escherichia coli
cggagggttggcttatttaacttcaacttcagcgccagcttcttccagagcttttttcagtgcttctgcgtcgtctttgctcacgccttctttcagagcagccggtgcagattctaccaggtctttagcttctttcagacccaggccagttgcgccacgtacttgctttgataacagcaactttgttagcgccagcagctttcagaattacgtcgaattcagttttttcttcagcagcttcaaccgggccagcagctacagctacagcagcagcagcggaaacaccgaatttttcttccattgcagagatcagttctacaacgtccattacagacatagctgcaactgcttcaatgatttgatctttagtgatagacatttaaattgttcctgaatatcagaataagtttatacgtaagcgaatgcgttaaaaagataactgcgattaagcagcttctttcgcatcgcgtacagcagccagagtacgaaccagtttgccagccgaagcttctttcatggttgccat

SEQ ID NO: 1635 - DNA, 80 bp, Escherichia coli
gtgtggcatcgtccgtcgaaagcccatcatccgcgcaatatgcggtgccattaaaccaacaaaactcaacggtccaatag

SEQ ID NO: 1636 - DNA, 303 bp, Escherichia coli
acatcggagagttttggttggcggattttgctgtaggccatgagttcctgtcttaagccacttgccgaagtcaattggtcttaccaatttcatgtctgtgacgctaaagtaacaaagtattcaccttatgtccatacaggttttgattgaaatcatgaaactgtgcacattttaacaacttgacatatataacgtttcaaagttgtaactatgcacaaatgtagactttacgtaggaaaggagttttttaacgattattaaactataaaaatccgaattgaaccgattcacttaccaattttg

SEQ ID NO: 1637 - DNA, 218 bp, Escherichia coli
aggggagaatagttttttgaacaggagatcatctgaatcatgtgatttgaggggggagttggttgcgatatgtgccagattatataattttaaacaagcatttttgataagtcggataatcgatagggtctcatttgttggggttctaacaatatggtaaagaatatcttcagcttctttcccaaatttatcataacctaacgcaatattatgcagta

SEQ ID NO: 1638 - DNA, 76 bp, Escherichia coli
ttgcccagtgcggttctggttttaccgcatgaacaaaatcggggaatttatgcgcatcctggataaagaagattgg

SEQ ID NO: 1639 - DNA, 151 bp, Escherichia coli
gtaaagtgaccatttcaatagaggtctgttttagtttttctatacctggtgctagtgcttcgaggttatttcctgttgggctttcaggaaggtcattcatttttcgacggactaaatcactactaatatcattaccaattgatgaaacagg

SEQ ID NO: 1640 - DNA, 47 bp, Escherichia coli
gacgggcatggcgtaactggcgcagcgtggtggagtaaatgccggtg

SEQ ID NO: 1641 - DNA, 155 bp, Escherichia coli
cgttggttgattacgattttaccgttgcccggtttgatgaaaacgcgagctgcggaacttttgcggcgaccagtgccgtagtattgattttcagccattgcctataatcccgattagattcaagaacttgcggttgctgtgccgcgtggttgtgc

SEQ ID NO: 1642 - DNA, 40 bp, Escherichia coli
acgggcggcgcgttcagccacgatgtcatcagttaaggga

SEQ ID NO: 1643 - DNA, 247 bp, Escherichia coli
tttcgtaattcaggagaaatggcaaataaagcattaaaaatttgaatgctttgtgtaataaaaaagcagacaggcgacggagtgaccactccgtcgctttacaaagagaggaaaatcataggttgccggtgtagtgccagcgtaaataaccgcagcaaacgaagctgacgctttaatgcggctcggctgcgaaagcaggcggtagagccactccagccccagcgtttgccagattttcggtgcgcgt

SEQ ID NO: 1644 - DNA, 658 bp, Escherichia coli
agagcattacgacgaaccggacggacttcaactggtacctgataagtagaaccaccaacgcggcgagacttaacttctacagtcgggcgcacgttttcgagagctacttcgaatgcttccagttcagatttaccagagcgctgagccagggtctccagcgcgctgtatacgatagattcagcagtagattttttaccatctaccatcaggatatttacaaatttagccagcagttctgatccgaacttcggatccggcagaattttacgctgaccaatgacgcgacgacgtggcatggaaatactccgttgttaattcaggattgtccaaaactctacgagtttagtttgacatttaagttaaaacgtttggccttacttaacggagaaccattaagccttaggacgcttcacgccatacttggaacgagcctgcttacggtctttaacgccggagcagtcaagcgcaccacgtacggtgtggtaacgaacacccgggaggtctttaacacgaccgccacggatcaggatcacggagtgctcctgcaggttgtgaccttcaccaccgatgtaggaagtcacttcgaaaccgttagtcagacgaacacggcatactttacgcagcgcggagttcggttttttaggagtggtagtatata

SEQ ID NO: 1645 - DNA, 340 bp, Escherichia coli
taatattcaccttattagttatcttaattacgacattacataaatgccttaatgtgtatgacctggattcatagtatcaattgccattttttcaatgaaaattaaaaaggggatttttgagaagggtagaatgtcgtttgtttttttctttattatgtctggtgacgcggggggatagaacgtctgtgcatattgtagtgaatttattcaggtctacattattctctattttggtcagttttatgagttcatttacagccatactcattaaatcatctgttatcgaaaatttatatatgctcatagcagataatattgcttgctgaattatctcttcaga

SEQ ID NO: 1646 - DNA, 346 bp, Escherichia coli
atataatgaaattatttgtttttaaatatcgagataacgatcacaaaaacgacaatatgaaaattattcgaggagtgaaaggcaaaaaaacggcctcccgatagggaagccgtagcaaagtgcgcgtgtttttatgccggatgcggtgtaaacatacgtggcagtgctatgtaggcatgataagacgcttcagcgtcgcatcaggcataggttgccggatgcagcgtaaacgccttatccgtcctacggggtggtgttgttcgtataaggcgtatcaggcgatagtaattttgctatcgagataaacgtcctgcacggcgttaatcagtttcacgccgtcagccat

SEQ ID NO: 1647 - DNA, 555 bp, Escherichia coli
acgtctggcgtcaggcatggcagggtgagtatgggcgtatcgctacgttgccatactggtatttgcgagagatctttattcagaaaccggaggtaatctttgatgatgtcgtgactaatatgagcaaccaaagtgttgttaagagaggagacgtcgataatattattttcacaatttaataacgccatatggttagctttaaggctaataggttctttcccattcacccttatccagacatctttttcagtcaataaaacaatacaaggttggtcgctgcaaatcctcatacatgtactcctgagtgcgaataaaagaccagttctcgctaaagcaaagcgataccgggaaatggttatataattgtatgatgaatataaacatgcataaaaataacgagttttactaatagtacaaatttttatagtaatttctcatgtacatatttttttacaggataaataacaggcaaaaaaaagcgcggggtggggccgcgcaaaaagtatgacatttttgtttgcagcaatttttatgaaaacgttgccatactcaaaa

SEQ ID NO: 1648 - DNA, 300 bp, Escherichia coli
gttctttgctgacatcaggatggtatttgcgggcaagtcgacgataggcggtcttgattgtcttgagatcgtccgtcggtttcacgcccatgatggcgtaataatcctttaattccatagcgttatctcgcgtaaatcaacacaaattgaaggaacccctgtaaggtaactcctataagtgtagggtaatcctcaaaatttcatatgccaacacagaatatgttattgaaatcatcgcggagaggaggtcgccatcaagatgggttgctgaacatattttaaacaggtgaaaaagggtga

SEQ ID NO: 1649 - DNA, 300 bp, Escherichia coli; identical to SEQ ID NO: 1648

SEQ ID NO: 1650 - DNA, 346 bp, Escherichia coli; identical to SEQ ID NO: 1646

SEQ ID NO: 1651 - DNA, 183 bp, Escherichia coli
tgctggttcaaactgtggcggcggtggtaacgccgccacgcagtgcagttcaccaaagggtccaaggatttcgtcgtcggtaaaggcgtactcgttgccgtcgtgatttagctcttcacgcaatgccatcagcagttccgcatcttcgtattcctggcggttaatgacgcccaacccgtaaat

SEQ ID NO: 1652 - DNA, 63 bp, Escherichia coli
aacggtgagttgctgaatcaaaaactcaatgcgcagccatgtacgcattttttcatttagtgg

SEQ ID NO: 1653 - DNA, 89 bp, Escherichia coli
gttttatcaggcttgaaatggcgtccagccccgacaggtgaatcgtcggggctgattttttcttattattgcagcagaaacttctcgag

SEQ ID NO: 1654 - DNA, 76 bp, Escherichia coli
tgtcgaggtcgatggtcttgatatgaaacgacaggcctttttcctgcaacgccacccaggcggataacacataagg

SEQ ID NO: 1655 - DNA, 143 bp, Escherichia coli
ttggatattaaacgccagccaacgcgtatcctgggctgattcgttcttttgctcatctttgatgatgtattttttatcgaaatttttaccggtataacgcgtggcccagtttttggcgtcgttttccatacgcaaatcaaagg

SEQ ID NO: 1656 - DNA, 190 bp, Escherichia coli
atcaggatcaataaaactgctgcagaaatgatttcattcataactcaaattccctgataattgccgcggactttctgcgtgctaacaaagcaggataagtcgcattactgatggcttcgctatcattgattaatttcacttgcgactttggctgctttttgtatggtgaaagatgtgccaagaggagacc

SEQ ID NO: 1657 - DNA, 379 bp, Escherichia coli
ataccagttgcatcgcgtacgtcaaccttgtgcaggttgcgcgcagccaggaacaggttttcgtccagctcaccggtgatgatcagcacatcttccagagccatgtctttcagtttctgtgccagcagcttagttttcggcgcttctacagagaacttctcgacaacgatcagacgatcctgacgtaccagttcggacaggatgcttttcagcgcgccgcggtacatcttcttgttaactttttgactgtggtcctgcggacgagcagcaaaggtcacgccaccagaacgccagatcgggctcttgatagaaccagaacgcgcacggccggtgcctttctggcgccacggttttttaccggaaccagttacttcagcac

SEQ ID NO: 1658 - DNA, 311 bp, Escherichia coli
tcatagagctctctcttagtttaatttccgccaggtaatcagatgacacgactgtgcttcacgccatctattaacatgtacgtcagtatatggggatgtttcccccacattcaacgccgagaatagaggaaaaattaaaggggagataaaatcccccctttttggttaactaattgtatgggaatggttaattattcaccagatgcctgttgcgcttccggcttgccataaatcagcaacggtttgctttgaccatcaattaccgactcgtcgataaccactttttcgacgtcttccatggacggcagatc

SEQ ID NO: 1659 - DNA, 109 bp, Escherichia coli
tcagttcagcgcgtttcgcgaagtatttatcagctaaagctacgcgttttacttcgcgtgctttcattgattgcttagccatttagtaaccctaccttacttgcggaac

SEQ ID NO: 1660 - DNA, 336 bp, Escherichia coli
tggattgtgcgatccgagaaagttgtacaacgttgtggactccctaacggttttcatgatgcatatcctccggttaacagcggagtccgcggttaaataaaaggaacaacatgacttacatgaaattaacggcggctaaacgcattgttttttttatatatttatttgtaatccagttttggaaaaacgccagttttcaaacgaaagtcagttaaaaaatctgcctggatataacgaaggtagagcggggaaataaacggcccatccatgaggaatgggccgtgaaaggagattacgcgaccgggcgcgcaataatgctgcgggtttccatgcgga

SEQ ID NO: 1661 - DNA, 168 bp, Escherichia coli
cggagtaaacacggaagaaggtcaggttaccaacaaacgggtcggtagcgattttgaacgccagtgcagagaacggctcgtcatcacttgcgtgacgttcagccggagtgtctttaccgtcgtccaggataccgttgatcgcaggtacgtcaaccggggatggcaggt

SEQ ID NO: 1662 - DNA, 328 bp, Escherichia coli
tagcagctgccagaacttcagccagtttagcttccagttcagcgcgacgagcttcgaagaattcaatgtttttcttggtagctggaacagctttaccctgcggtaccaggaagttacgagcatagcccgctttaacgtttacctgatcacccaggctacccaggtttgctactttatcaagcagaataacttgcattaccttatcctctcaaagtcgtattaatggaccgtgaccgattactgatggcgatcagtgtacggcagcagggacaggtagcgagcgcgtttgatagcgcgagccagctgacgctggtattttgcacgggta

SEQ ID NO: 1663 - DNA, 251 bp, Escherichia coli
tcaaaggcagccagcagagcgcggccttcttcgtcagatttcgcagtagtggtaatggtaatatccaaaccacgaacgcggtcgactttatcgtagtcgatttctgggaagatgatctgctcacggacacccatgctgtagttaccacgaccgtcgaaagacttagcggacaggccacggaagtcacggatacgaggtacagcaatagtgatcaggcgctcaaagaactcccacatgcgttcgccacgcag

SEQ ID NO: 1664 - DNA, 348 bp, Escherichia coli
attgggtaacccggcttgttgcgccagttccgtgagtgccacactgccattggattcggcaatccactccagtaatttcaggccacgcgttaaagactgaacctgtccagtcgctggtgcggtggcaacggcgggttttctgccgcgtttcgcgggaatgggtgcgaccatgacagtctcttttttctgtatcgtggaaatcattttcatttttattgttagctaatgcaatagttactgaactgatccgatgagttaatgttgaacaaatctcatgttgcgtggtggtcgcttttaccacagatgcgtttatgccagtatggtttgttgaatttttattaaatctgg

SEQ ID NO: 1665 - DNA, 232 bp, Escherichia coli
acgtgcagcaggtttaatcgccggcacgacaccaacaaccgggaagtcgaacttttcgcgtaatgcaggaagtgaaacggtactggcagtgttgcaagcgaccacagccagcgcaaggggataacgttcttgcaccgcggtgacaattgccaccactcgctcaacaataaacgcttcgcttttttcgccatacgggaaagcgacgttatcgaaagcataaatgtaatggaga

SEQ ID NO: 1666 - DNA, 303 bp, Escherichia coli
agttcatcacgggtcatcgggccggtggtgtcctgggaacctacagaagtcattttcggttcacagtacgcgcccggacgaatgcctttcacgccacaggcacggcctaccattttttgcgccagcgagaagccgcgatcgctctcagcgacatctttcgcctgacggaacacatcactgtgcggcagaccaagtgcttcacgcgctttggtggtcaggccacgcccgataatcagcggaatacggccaccagcacgcacttcatcaatcagcacgtcggttttcagttcgaaggtcgccagc

SEQ ID NO: 1667 - DNA, 116 bp, Escherichia coli; identical to SEQ ID NO: 1575

SEQ ID NO: 1668 - DNA, 234 bp, Escherichia coli
tgacgtaccagttcggacaggatgcttttcagcgcgccgcggtacatcttcttgttaactttttgactgtggtcctgcggacgagcagcaaaggtcacgccaccagaacgccagatcgggctcttgatagaaccagaacgcgcacggccggtgcctttctggcgccacggttttttaccggaaccagttacttcagcacgagtcttctgagcacgagtaccctgacgagcacca

SEQ ID NO: 1669 - DNA, 178 bp, Escherichia coli
ctttaccgaaagtggttaaagtgcaaatcggctcggcgaccacaatatcaaagcggctatacggatgatcggcatagccggagtgtaaaagcatcgcccacggcaggtggcttaagcgggagaaataaaattcagcggcgtcctgacgccagagtaaagtaatcacagcgggagataa

SEQ ID NO: 1670 - DNA, 225 bp, Escherichia coli
cacgacaggggcagtgattgttgacgtcttcgccagggccaggcgcgggtgttgctgtaaaccttgcgttttatgcacgtccgaacaggcagcgagacaggtattacatcctgtacaccacagtggttcggccaccacaaagcggttcatgtcggctccttgaaaatgatatgaaacattgcatttcatattgcataaaggatgccattctgattaactcaatat

SEQ ID NO: 1671 - DNA, 121 bp, Escherichia coli
gccagtgcccttcactttcgcaaggttaacaccaaactcgcgtgccagacggcggatcagcggagtcgcgtgaacataagcgtcgttttcagcaaattcagatttgccttccgctttcgca

SEQ ID NO: 1672 - DNA, 348 bp, Escherichia coli
cattggagccagactggggagaggggcctgatcggcaacctggcctggaatcgacgcgacggcctgaaatgacgccgagagagttaacccgacacttaacgctaatgcactcaacagctgggtttgttttttcattattcctgctctcgtacctgaatgataagaaaagagattcaaaacagtttgatgttattgaattttcagacggctaacaatgagacaccagattaaatgatagtcggggagggagagaagaggagggcgcaatggctgcgcccgaaaaataaattagtcgcgcttcgcgccagtacgcagcaggccggatgcgccttcagaatagtcgcgagg

SEQ ID NO: 1673 - DNA, 485 bp, Escherichia coli
cgggatacagcgcgacgggcgcgacccattgatctatttgtgcagtgctgaatgcggatttgacgacggcgggtgttacgggaggtgcggaaaccgttgcaggaaacgtaaccgcggcagcgtcagacacagccagttgtgtcgattgcggttccacaggcgcttccactgtgcggctttttatatatagcccggtagaggcggcacaaagcccggcactgcaaattagcgccagcacatggggtttaaacggcaaagtcattttcataattcggatctcaaggaaatcgcaatggtcggcgaactgccacccgcaggtgctgtgaatccgagtataaagaggcggtagtttaaattttgactaatcttgggattcgttgagaaaggtgattatcaccatgcgaattaacgaagtttttacggagggaaacaatctctagaccatccttaacgattcagccacttttttatgttgcttttttgta

SEQ ID NO: 1674 - DNA, 262 bp, Escherichia coli
atcaaattcagacatcaaggacatccttatagcaaaagggggaaaatgaataatgcaaaaattgccgctaaaagagaagtgtttaacagcaacggctaattatcatccaggaatacgatatataatgacgggatatagcgctaagtatatatattcatctacttatgcgcgcttcagatagcgtttataccagcgttcgaaggcgacggcgggcatcggtttggcaaacaaaaatccttgccgctcattgatcccgttcttg

SEQ ID NO: 1675 - DNA, 102 bp, Escherichia coli
gtttggccttacttaacggagaaccattaagccttaggacgcttcacgccatacttggaacgagcctgcttacggtctttaacgccggagcagtcaagcgca

SEQ ID NO: 1676 - DNA, 253 bp, Escherichia coli
ctacaaccaggtcgagtcagaaatgagaatgattggccttctttatgattttaaggattatgcttctaaaatggcggagaacatggcgaggcttgctgccttacttcattacttcagcggtgatggaggcgatatatctgttaccgggtaatgactccaacttattgatagtgttttatgttcagataatgcccgatgactttgtcatgctgctccaccgattttgagaacgacagcgacttccgtcccagcc

SEQ ID NO: 1677 - DNA, 323 bp, Escherichia coli
atccagtcagtggtttgcccttcttttatttctgaaggaatattcaggctctgactggcgctacgggcggctttgaaataaaccgatgcaccgcttaactgtaaatcgccatggtcggcagagagttgtatgcgtttcacaatgcgacaaacaggaagtttcagcgccagatcgttggtttcgttacgcggcattgcaatggcgccgaggagtttatggtcgtttgcctgcgccgtgcagcacagcatcaggctaatcgccaggctggcggaaatcgtaaaaacggatttcataaggattctcttagtgggaagaggtagggg

SEQ ID NO: 1678 - DNA, 168 bp, Escherichia coli; identical to SEQ ID NO: 1564

SEQ ID NO: 1679 - DNA, 98 bp, Escherichia coli
gaggtggccagggggatcacctggcagcatgctgccaggcgctgggccgaagaggttacttagtgcagttcgcgcactgtttgttgacgatttgctgg

SEQ ID NO: 1680 - DNA, 159 bp, Escherichia coli
catactgatcaaggcggcagtccacgttgtttttaaagccggagagatcaatatgcagatgctcatgggcgagggtgtaacccgtcggatcaaaactcatagggtgtctcctgcaaaccggagggaggaaagaaaagagcgaccattttgtggcggtgg

SEQ ID NO: 1681 - DNA, 427 bp, Escherichia coli
gaaaaagacgggatgtcggatgttgttggtgaatacgcatggcttcaccacgggtgataattttcataatgggatacctctgaagacagaagataaaagtgaaaacaggtgtgatgtggttgtgaagggttaaagcagaccatgttcggcaaaggagaaaacctggttgccaccgactatcagatggtccggcacccggatatccaccaggcccagtgcctgtaccagacgttcggtgataagccggtctgccttactgggtgtgacttcaccggacgggtgattgtgtgccagtaccacggcagcggcattgtggtacagggcgcgtttaatcacttcccggggatggacttccgtgcggttgatggtgccggtgaagagggtttcaccggcaatcagctgattctggttgttcagatacagcacc

SEQ ID NO: 1682 - DNA, 383 bp, Escherichia coli
tgtcctttgggatctaacagcgcagaattacagccactgagcaatacagtgcctgcaaataatgacaaccatcccaaacttttattgtatttcctgagtctcatttaacgacctcaattccacgggatctggtggcgtttaaagtgtgtgggcattttacgggaaggttacattactgtaaacatgattaaattcctgttacttggatttggctgccaggtcacatatgttgcaaaacatatcaggttgattttaagaagctgttgcaaaagggcgttataacaaaaggggagtgctgaaggagtctgggcgggcaattggtataaccaatgtgaaataaaacaattatttaacaaataattatcattagagtgacaactggg

SEQ ID NO: 1683 - DNA, 129 bp, Escherichia coli
gtaagccagcactgccggaacgataccgcaggcaccgttggttggcgcagttaccacacgaccaccggcggcgttttcttcgttaactgccagcgcaaacatgtttacccagtcaatgacattcatcgg

SEQ ID NO: 1684 - DNA, 49 bp, Escherichia coli
gtcggcagcgccataaataatgcgccgactttttgtagataatgttccg

SEQ ID NO: 1685 - DNA, 186 bp, Escherichia coli
atgcaattacaacatcagggtaactcatagaaatggtgctattaagcatattttttacacgaatcagatccacggagggatcatcagcagattgttctttattcattttgtcgctccatgcgcttgctcttcatctagctggttaaaatattactttcaaatctttctgtatgaaggtttgagcac

SEQ ID NO: 1686 - DNA, 127 bp, Escherichia coli
cccgacagcaaaagtaggccggggattttttctccatccttttaacaaaattaaactgtaagttatctggcaatgctaaaaataacacacgtattagatcatcgtcattctcgaatttttggtataa

SEQ ID NO: 1687 - DNA, 232 bp, Escherichia coli
cacttcccattcccggaagatttagtggattaaaaagaagattgatattaagcattgatattatcgaaggaaactttaggagactctcatttttttgaatcgcagcaaaaatgctcccgacaggatgtatataattttgttcatagtatatagtccttaaatagtgaataaccaacctgttttttatactgatcaaattggtcattttttctgggcgaaatacagaagtgac

SEQ ID NO: 1688 - DNA, 200 bp, Escherichia coli
cgtaaacgcagcggtgtagagcaaactgaaggggtaacctaagccgaggttaattaatagcgactgtaaaaagtagaacgcagtccacgggctaaatacccggctacgggtaacaagcgattctttgagggttaaattcatatgccactatcgtaacaaacgccatgtgcttaccctggcgtcaagggtcaatacctgca

SEQ ID NO: 1689 - DNA, 133 bp, Escherichia coli
gtaagatccctgttacgtcagactgcatgttcctgcgatttgctatcgaaaccatttcttcgatttttttgacaggttcgtcgtcacgtatatggctacgataaataagggtggtaagcattaacaatccagg

SEQ ID NO: 1690 - DNA, 107 bp, Escherichia coli
ctggctgatggtcagggtgtactgctcggtttccggattgtagtcgtctttgacggtcacaatcggtgtaccggactggctgtaccaacggcggaaatgggagagat

SEQ ID NO: 1691 - DNA, 66 bp, Escherichia coli
ggtcgcgtagcgcatgaagcatcgcaatacgcttttcgtccgggtagtaactgttcttgccgatgg

SEQ ID NO: 1692 - DNA, 161 bp, Escherichia coli
caggttgtcagcgaattctttggtgttcgcaaaccaggtagagttccatggttttacaatacccaggcgaataccattaggatgtactttctgacccattgctagtctccagagtctcagcgatcggacacaaccacagtgatgtggctggtgcgcttcag

SEQ ID NO: 1693 - DNA, 359 bp, Escherichia coli
tcatgacacaaataggagaaacaaatgttagatattaatgagcaatgatatttgttacccaaatttacaaccattgttcattaggtcgcctattgtgcactttagaagcttttgaacaaattaaatttacttaattcaaaattaagtaaaaataagttcacaagtgcaattggttagggtatggagatgggattgatatttatttataggaagttatattatttccgcaaagagatgtttaaactaaaatcgtaattaaggaaagagatgagatatgattttcagaaaatatttatattcgcaatataaataaattaccatttgtttaatttgtcaaatgctcttgtatgtaagatttg

SEQ ID NO: 1694 - DNA, 134 bp, Escherichia coli
agatcagaataaaggagggcaggaggaaaaacctggcatgtttcgtcattactattcctcaaaaaaccaaaagcgcgttatttacccaaaaaggcaacgcgttaactcgcagaaagaaaaatacagttcgctat

SEQ ID NO: 1695 - DNA, 191 bp, Escherichia coli
accgaagccgtcttctactgcgtccagagcaacgtcaacttcgtcacctacctggatttccagctcgccctgggcgtttttgaactgctcagccgggatggcggactcagatttcagaccagcgtcaaccagtactacgtctttgtcgatagcaacaacaacgccacgaacgatagaacccgggcgggttt

SEQ ID NO: 1696 - DNA, 367 bp, Escherichia coli
acaaagaggaaaggggggggggctaatcggcagggaaggccgccccggatagcgggcggcagaaggaatcagaatttccaggtcagacgggctgcaagttgcagaccgttaaaatcatcggttggggtgtcgtaccacactttacctgccgtcagcccgagattaagttgctcagtcagcggttgaatacgttgcagactgacgctcttcatgctgccgtagcgtgtttctggcgtccagtcataggtgtaagcacctgttccgcggcttagccatagttgcgtataaccagtgccgcgcgggtcattcagacgcacggaaatcatattgctataactaccacctgcatcgctggagtcataatggg

SEQ ID NO: 1697 - DNA, 286 bp, Escherichia coli
tgttccagcgaaacgtgtttggtttccggtaccagccacaatgtcagcaggataaacagtacgttcagagccgcatacacccagaaggtgttggcgttacccagcgtgttgagcatggtcaggaacgttgcgccaacgatcatgttggcaatccagttggtggcagtggagcaggtgatgccaaaatcgcggcctttcagcggctgaatttcggagcacagtacccaaatcagcggaccggcactcatggcaaaaccgacaataaacatcagcagcatggcgatgg

SEQ ID NO: 1698 - DNA, 174 bp, Escherichia coli
gggtcatacccacttttttaccgactaaaccaatcattgtttcaacctctcaatcgctcaatgacctgattaacccaggctgatctgcacgtctacaccggcagccagatccagacgcatcagagcatcaacggttttctcggttggctcaacgatgtcaaccagacgcaagtg

SEQ ID NO: 1699 - DNA, 223 bp, Escherichia coli
agttgttggcaactgtcggcagatacagtccaggcgtggtagcttcttcagggtgagatccgcgccataatcccgcagtttgccaggcggcataagccaactgaaccacgacaccaaaactgaacaggcacaccgccagtgggctgaaaccactggaacaaaaccaatcgccaccagcatcgtcgttgccggaaacaaactcacaaaactgctcagcactgga

SEQ ID NO: 1700 - DNA, 387 bp, Escherichia coli
gactattcatgacacaaataggagaaacaaatgttagatattaatgagcaatgatatttgttacccaaatttacaaccattgttcattaggtcgcctattgtgcactttagaagcttttgaacaaattaaatttacttaattcaaaattaagtaaaaataagttcacaagtgcaattggttagggtatggagatgggattgatatttatttataggaagttatattatttccgcaaagagatgtttaaactaaaatcgtaattaaggaaagagatgagatatgattttcagaaaatatttatattcgcaatataaataaattaccatttgtttaatttgtcaaatgctcttgtatgtaagatttgacgcaacatctccccatcagga

SEQ ID NO: 1701 - DNA, 261 bp, Escherichia coli
gtgaaggagaaaatacgaccacctttaacggttttagatacgcggtttaccgcgatcagcttttcctgcagttcgccagcttgtttttcgatgtgagccatcttacacctctaccttagaactgaaggccagcttcacgggcagcatctgccagtgcctggacactgaccatgatattggaacccggaacggtcaaaggatacatctttgatgcctttttccagagcgcgttcagcgacagctttacccacagctgcagcc

SEQ ID NO: 1702 - DNA, 220 bp, Escherichia coli
tgtcgctgacgttaccgaacagtgtggacgctgtcggtgccagccaccagcggcgactctgacgcaggcggttaaaaacgtgcacgtcgaggatttgccccagcgcgtaggccatgaaactggcggtggcgatactgggcgacaaacaggttgaagtgggctgagtgcgccgaatccctgccaggaacccatatagaatagcgacgagatgacgtaggag

SEQ ID NO: 1703 - DNA, 147 bp, Escherichia coli
atgcccaatgaactgattttattttgagctatgatacccatctgacctccttgtagcggatggcaaaagcatatcaggaaacgggcggacgaaattcttaaaaaaaccgctaaaggtagagcgttagtgaaattgcaaaggagcaac

SEQ ID NO: 1704 - DNA, 385 bp, Escherichia coli
aactcttgtactaatccattaacttcatcattgttattttcattgatggattctgggtaagctgcgctggtattgttgattgaaatagatggtagcatgattttattccattttgattgatttgttacaaatatatattacctaatgaaatagactatcaaaaaacgctcatttatttagaacctatctttaatttgagtgtatgagcgcacaatagccagggggggggagtatcctggaaatgcagaaaagtaaactctttgagaaggacgagcagaacgcctgaaaatatgcctttcccttcaggtttgtctgtggataccgcttattgatttgaaagggcaagctgccaacaggctgtttgcaaaactcaggaggtaagcaa

SEQ ID NO: 1705 - DNA, 226 bp, Escherichia coli
agtcattcaggcgtaacagtaattacgcggagagatgtaaagtgaaatatttctttatgggcatttcttttatggtcatcgtttgggccggtacttttgccctgatgatctaaaagcaaactgtgcaatgaaaaacaggagccatcaggctcctgtttgcatttctgacgacggtgtttattccgcgttttcgtgaatatgtttgctgctggcgggtagtaaaccg

SEQ ID NO: 1706 - DNA, 248 bp, Escherichia coli
ttatcattctgaatcgcagaaaaatgcacaaacacatctttactaccatcaacaggagaaataaagccgaaacctttatcagcgttaaaccattttactaaaccagtcattttatttgacattctacattccttaacttgagcctttcggcataaatggtttgcataacagaaacgacttcgtacttaattggagagactcaaagaaggaataagtgaataacacctgaaatgagaactgctttagta

SEQ ID NO: 1707 - DNA, 279 bp, Escherichia coli
agaagatgttccagatccgtttatcgagacaatttccccacggtacgctgtcgatatagcggcgaatcaaatagccggatataaagaaaaaaaccggcatacgaaagggggcaaggtaaagattgaaatagatccagcatttgctcaggacttccgataacggatgctgaaaagtggtcagatgcggataaaaggtaatgaccgagtgataaatcaccaccagacaaatacataaccctttgatctggttaatccatagctctttttgtttcatcagga

SEQ ID NO: 1708 - DNA, 260 bp, Escherichia coli
gtgaaggagaaaatacgaccacctttaacggttttagatacgcggtttaccgcgatcagcttttcctgcagttcgccagcttgtttttcgatgtgagccatcttacacctctaccttagaactgaaggccagcttcacgggcagcatctgccagtgcctggacacgaccatgatattggaacccggaacggtcaaaggatacatctttgatgcctttttccagagcgcgttcagcgacagctttacccacagctgcagcc

SEQ ID NO: 1709 - DNA, 174 bp, Escherichia coli; identical to SEQ ID NO: 1698

SEQ ID NO: 1710 - DNA, 221 bp, Escherichia coli
agttgttggcaactgtcggcagatacagtccaggcgtggtagcttcttcagggtgagatccgcgccataatcccgcagtttgccaggcggcataagccaactgaaccacgacaccaaaactgaacaggcacaccgccagtgggcgaaaccacggaacaaaaccaatcgccaccagcatcgtcgttgccggaaacaaactcacaaaactgctcagcactgga

SEQ ID NO: 1711 - DNA, 387 bp, Escherichia coli; identical to SEQ ID NO: 1700

SEQ ID NO: 1712 - DNA, 399 bp, Escherichia coli
ttcttcggcgcatcttccggactatttacgccgttgcaggacgttgcaaaatttcgggaaggcgtctcgaagaatttaacggagggtaaaaaaaccgacgcacactggcgtcggctctggcaggatgtttcgtaattagatagccaccggcgctttaatgcccggatgcggatcgtagccttcaatctcaaagtcttcgaaacggtagtcgaagatggattcgggtttacgtttgataatcaacttcggcagcggacgcggttcgcggcttaattgcagatgagtttgatccatatggttgctgtacagatgcgtgtcgccaccggtccagacaaaatcacccacttccagatcgcactgctgcgccatcatatgcaccaataacgcgtagctggcaat

SEQ ID NO: 1713 - DNA, 94 bp, Escherichia coli
taactcgacatgcaacttattgttttcccacttcgcaagggtatagaacagattgctctcgccacgtaacagccgaaacgtagttttatcgaaa

SEQ ID NO: 1714 - DNA, 102 bp, Escherichia coli
aggtcaggaaactcaccatcaccgccagacaagcacgcccctgcgcttgcttagcaaggccaatgggtaaaccgacagcaaaaatcagcggcatattacgga

SEQ ID NO: 1715 - DNA, 367 bp, Escherichia coli
ataaacgctgcgatatccgcgatcgcggataaaaaggaggatttaaataaggcgttgatgcgccgtttgaagtcggcaatattaagccgcatgccatctcgacatgcggcttatacggtttaccagctatatttcactcccagcatgccctgagtatcgctatagcctttatcacctagttgcacaccgacattcccccacaggctaaggttgttatttactttcgcctcaaccccggtacgtacttcaccgagattacgcgcaccttcacggcctacggtttgaccattcatcttcacggcgtagactttgctattgttgatccagttcgcttcaatgtaaggctggaactcacgctgtttaccat

SEQ ID NO: 1716 - DNA, 280 bp, Escherichia coli
cgttattcacctgggttttaccctgacggaatgccataccaccgacgttaacagaggtgattttcacgccgccttcaacgagacgctctacatctgttgggttggtaaataacagcattacgcgttcgccagcatatttcgggttgttgtagacgcgaatcattttggcaacatcaactacgtgtgctgttacgcccggaggtgcaacctgggtgagcagtgtcttacgaacggtatccgcagccacttcatcactaacaacaataatacgggagacatt

SEQ ID NO: 1717 - DNA, 264 bp, Escherichia coli
atgtgatatccgcagcttatcaggtgaagtaataattattctcaataattaactggagaggggaatattaacgatagaaaataagataaacaatcatgccgatagataaaattccgaagccgatatatgccaccatataagcgaaaaagagtccgggattttttgctcgccagacatacaccggttccggtgcatttttaacccgtttatcaatcgcgcctgcgcgccagcctttccatgcttcgcggaaacaaaatatcggga

SEQ ID NO: 1718 - DNA, 92 bp, Escherichia coli
  misc_feature (11)..(11): n=g, a, t or c
ggacacacggntccagatcttaccttgacgcttaactgcacgggtcatagcacgacgtgctgcttcgatctgacgggcagtcagacgaccac

SEQ ID NO: 1719 - DNA, 75 bp, Escherichia coli
ttcgccaagcagacggatgtattccggaatatcttgcttgatagcgcaggcagtaacacagggggcaacgtagca

SEQ ID NO: 1720 - DNA, 47 bp, Escherichia coli
gttaccgctgacattggcggtaaattcacgcattccggctttaaagg

SEQ ID NO: 1721 - DNA, 313 bp, Escherichia coli
gtgttgtagtcgatgtcagcacgcagagtgtgcagcggtacgcgaccttcgcggtaccattcggtacgtgcgatttccgcgccgcccagacggccgctaacttcaactttaatacctttagcgcccagacgcattgcgttctgtacagcacgcttcatagcacgacggaacataacgcgacgttccagctgagaagtgatgctgtcagcaaccagttttgcgtccagttcaggcttacgaacttcggcgatgttgatctgtgcaggaacgccagcgatgtccgctacgaccttacgcagtttttctacgtctt

SEQ ID NO: 1722 - DNA, 86 bp, Escherichia coli
atagtgatcatcaactgatacatcgagatcatactgccacgaattttttccggcgcaatttcagagaggtacagcggtgcggtata

SEQ ID NO: 1723 - DNA, 188 bp, Escherichia coli
gttcttcagtttcgggaggagatagcagtgggcgaggttgggacatgtcatgataccttgattaaaaaacaaacagcaattatgtgccgaatattcgcagtgtaactttttccacatgcgttgttcaattctctgatttatattgctttttaggttgccggtaatcgagttgcgcaacactgcaacgg

SEQ ID NO: 1724 - DNA, 88 bp, Escherichia coli
ggttattgatgatgtcaatacaccatgattttgtaattttgccgggaaaaattgcgattaatctgtatttgctataattctgagtaag

SEQ ID NO: 1725 - DNA, 358 bp, Escherichia coli
tctgacacaaataggagaaacaaatgttagatattaatgagcaatgatatttgttacccaaatttacaaccattgttcattaggtcgcctattgtgcactttagaagcttttgaacaaattaaatttacttaattcaaaattaagtaaaaataagttcacaagtgcaattggttagggtatggagatgggattgatatttatttataggaagttatattatttccgcaaagagatgtttaaactaaaatcgtaattaaggaaagagatgagatatgattttcagaaaatatttatattcgcaatataaataaattaccatttgtttaatttgtcaaatgctcttgtatgtaagatttg

SEQ ID NO: 1726 - DNA, 74 bp, Escherichia coli
ttcgggcgctcacaaagtggggctaaatattcatataacgttgctgacgaaaaggagacatcgccacaggcaca

SEQ ID NO: 1727 - DNA, 525 bp, Escherichia coli
tgcactaccattgagatttactgttgggtgtatagtttttttctctatggatttttttagacagtttcatacaatggttacgatcttcagcagttaactgttcctgttcaatataatccagtatgcttcgcaaatggttagctttaataggcgtggtttccagtaataaggaaatgatttcttttttatagtgtaatgtaatgagtatattttctgtatggatgggtgaagtggcaaagttaatggtaaaaagggcagtggaataacaattttgtgatatttttcgacagtttgcggtaaattcctgagtaacacagtatgacagcatcgaacttaagtcagaggtatcaagtagggtgatgagctggcgcgcaaattgattaataggctctgatgaaggtgttggtatgtcgctatcgatgtgcaatctatgaggagacttataatgagttctgataatgatatcgttttgactcataatctgttcgccttatatatatctggaggttttgaggatgatgatta

SEQ ID NO: 1728 - DNA, 126 bp, Escherichia coli
tcttttcattcttcatgagttaattccactgtgaaaacgaatatttattttgcgttcccgtttgttttatttttgttaacatttaatataattattattaacctcgtggacgctgttaatggctaa

SEQ ID NO: 1729 - DNA, 165 bp, Escherichia coli
gtttgaacgggcgttatgcaccaggaacgcatcgcgctgattgagtagggtgatgtcatctttcgacaagtacagcccatgagcgaccagcgttttgctgtcgatgagatcgaattgcgccagtcgtgccagcaggtctttgccgtaccagtggtgactgtagga

SEQ ID NO: 1730 - DNA, 157 bp, Escherichia coli
tagttactggaggtgatcaccagcagatgaaataacgataaccagaacaacgccttatagcgttgagtttgcgagaaaacgttcatattgtacctttttgattaaccattggggtgagggaacccaatacgtacgacacgtctgttaccttaacata

SEQ ID NO: 1731 - DNA, 221 bp, Escherichia coli
cggcgtttttacgtctcgttgaataacgaattattcagctactacgtttacgatcactttcgcgaatacttcgctgtgaacctggaagctcacttcgtgttcgccagtggtacgcagaacgccgttcggcagacgaacttcgctcttagccacttcaacgccagctgcagttacagcgtcagcgatgtcgcgagtaccgatggaaccgaacagtttacctt

SEQ ID NO: 1732 - DNA, 363 bp, Escherichia coli
tgtttgcaaggtcgagtataaggaaagttacagcttcgggaagcgaaaaatgctggattttaaagagaggtcatattttgaaacttaatggttacatttctttgacataaaaataaagccaacgtgcggcttccagactgatgacaacatcaaaaaaggactcggtcagtcccctcgccccgtttggggagagggttagggtgaggggaacaggccagcatcggtgcgaaaaattaccctcaccccgaccctctccctggaagggagagggagaaaacggtgctcatgttaatgacagggtacacggcttaggcagattaaaaattatccaccccgctgcttatcatgccgataattcaccca

SEQ ID NO: 1733 - DNA, 543 bp, Escherichia coli
gattttttaccatctaccatcaggatatttacaaatttagccagcagttctgatccgaacttcggatccggcagaattttacgctgaccaatgacgcgacgacgtggcatggaaatactccgttgttaattcaggattgtccaaaactctacgagtttagtttgacatttaagttaaaacgtttggccttacttaacggagaaccattaagccttaggacgcttcacgccatacttggaacgagcctgcttacggtctttaacgccggagcagtcaagcgcaccacgtacggtgtggtaacgaacacccgggaggtctttaacacgaccgccacggatcaggatcacggagtgctcctgcaggttgtgaccttcaccaccgatgtaggaagtcacttcgaaaccgttagtcagacgaacacggcatactttacgcagcgcggagttcggttttttaggagtggtagtatatacacgagtacatacgccacgtttttgcgggcatgcttccagcgcaggcacgttgcttttcgcaactttgcga

SEQ ID NO: 1734 - DNA, 98 bp, Escherichia coli
atgtcgcttaagcgaaatcttagttaagacgctctttgatacgagcagccttaccagtacgctcacgcaggtagtacagtttagctttacgaacagca

SEQ ID NO: 1735 - DNA, 290 bp, Escherichia coli
acattaaccaaccaccaaagatgtcaccattggcattggtatcggcgggcatggctaaagtacgtaaaacaagatcgccctgagggacgttatgtgttgtagacatggtaaaaccgacttaaaaggaaaatcacaggcgcgatgctactatgattttcctgaggagaacagaggagatacagcgccagccccgaaggactggcagtctggttaggatttatcttcctgcggcatgtggcggtagatatagataccgcttaacaatgtgaagattaaggtaagggcggtca

SEQ ID NO: 1736 - DNA, 177 bp, Escherichia coli
tttggttctgcatgagaccagagctccaattattttataaacgaaaatgattactcctcagacccattacgattgatgggagagtgtaaccgttcttacgtagctccccgattgggagcattgttaggtagccaaattcggctaactgaggttcagattgaacctgctgtcaactac

SEQ ID NO: 1737 - DNA, 123 bp, Escherichia coli
tgcttgacgcgtcttatccggcctactaattcatcccgaatcgtaggccggataaggcggtcacgccgcatccggcagtcagtgttatcaaatcaccatattcagcagcagacagcctaccag

SEQ ID NO: 1738 - DNA, 184 bp, Escherichia coli
atgcaattacaacatcagggtaactcatagaaatggtgctattaagcatattttttacacgaatcagatccacggagggatcatcagcagattgttctttattcattttgtcgctccatgcgcttgctcttcatctagcggttaaaatattacttcaaatctttctgtatgaaggtttgagcac

SEQ ID NO: 1739 - DNA, 221 bp, Escherichia coli; identical to SEQ ID NO: 1710

SEQ ID NO: 1740 - DNA, 98 bp, Escherichia coli; identical to SEQ ID NO: 1734

SEQ ID NO: 1741 - DNA, 348 bp, Escherichia coli
ttgaaacgaaaagagggagactagctccctctttcaactggcttatgccagagctgctttcgctttttcaaccagagcggtgaacgctactttgtcgaatactgcgatatcagccaggatcttacggtcgatttcaacagaggcttttttcaggccattgatgaatttgctgtaagaaataccgttctgacgtgctgctgcgttgatacgcgcaatccacagttgacggaactgacgcttacgttgacgacggtcacggtaagcatactgaccagctttgataacagcctggaaggcaacgcggtatacgcgagaacgcgcaccgtagtagcctttagcttgtttcaa

SEQ ID NO: 1742 - DNA, 183 bp, Escherichia coli
aatgattgttttctggaactaaattatgtaaaggttatgctgtcatatttaaagcgattgtaagctaatgtatgtaataaatgagataatttacagtaagctaaaaatcagccaggcgataatgacctggctgatagttttagcctttagctgttgcattttgtttatgaaacagttcacgga

SEQ ID NO: 1743 - DNA, 196 bp, Escherichia coli; identical to SEQ ID NO: 1620

SEQ ID NO: 1744 - DNA, 481 bp, Escherichia coli
tgttggaaagtaatcatatataaattttggaaccaaccctgcaatacctaaatttgtaaacattaatccaaagagacataatcctataagagaagagtttttcacagaaataaaaaaaagaggacaaaggaaaataaatgaagttattagaccgactacaaaggctttttttacaccaatcttatcaccaacaaaaccaaaaaatattggacctgtcagtgttcctaaacctgctattgtcatcagagttgaaatgaccactgtattaactccattatctgccaggtaggaaggaagtagtccgtttatcggccagtttgcaccaaatagacaaaaacagacgaggaaaacgatcatagagattgaaagatgtggttttctgaagacagacaaaaatgttgatttatccttatatttatcttcaatccactcctgactttctggagcactttttctgatccaaagaactagtaaaactggt

SEQ ID NO: 1745 - DNA, 177 bp, Escherichia coli
gatgaacagaaccgcagttccactggcgcgggctttatgtttaagcaaacgcagtacctgcaactgcaccgtgacgtccagcgccgtagtcggttcgtcggcaataatcaattgcggctcgcaggagaatgccagcgcaatcattacccgctggcgcataccacctgaaagctcaaa

SEQ ID NO: 1746 - DNA, 147 bp, Escherichia coli
aacaagtttagttcatctgacggagggggaagggatgggagagaaaggaggcactaacggttaaatagcccgatgaaaggaatatcatcgggcataaggcgattatgcgagaaccaaatccccctgcggatggcaggagcaggccag

SEQ ID NO: 1747 - DNA, 316 bp, Escherichia coli
cgatatggttaaaaagtatgtaatagatggtgaggaactcataattaaatattaaatgtaattaattaggcgcaattgtgtcactggaatagaggtttcttgtggcgcatgtggaaggggccgtctatggacaaggcgtttcctgctggtgataaataaaggcgcagcaccgtcgaatgcaagaatgtgctgcgtctggctcatggcaattcattattttcgcatagcgtcaatgataaaaatcgactgtgtggatcaagtcgataatcagcaaacggttcgcaatcagcgaaaccatgcttcaaataaagttgat

SEQ ID NO: 1748 - DNA, 316 bp, Escherichia coli
cacgttttacgcgagccatatgtgctctcctgtatctatattctaattaaaaagttaaaaacgttaacggcttatgcgtacggcaggcacgcgattaccaggcccagatcgcctttggaaaccatggctttcggacgcaggtgacgtttacgtttggtcgcttttttggtcagaatgtgacgcaggttagcgtgcttgtgcttaaaaccacctttaccggtttttttgaagcgcttagcagcaccgcgtacggtcttaatttttggcattttaataacttccacttcgcattgttaataaacgaaacaaaggcgaa

SEQ ID NO: 1749 - DNA, 368 bp, Escherichia coli
gattcaattggtgacaattaccagctagcctttttcagacccgggatttcaccgcgcatagcggcttcacggaccttaatacggctcaacccgaacttccgcaggaaaccatgcggacgacctgtttgacggcagcggttacgctgacgagacgggctggaatcacgcggcagagtctgcagcttgagaacagcgttccaacgatcttcgtcggaagcgttcacatcagagatgatcgctttcagttcagcgcgtttcgcgaagtatttatcagctaaagctacgcgttttacttcgcgtgctttcattgattgcttagccatttagtaaccctaccttacttgcggaacgggaagtcaaaggcagcc

SEQ ID NO: 1750 - DNA, 481 bp, Escherichia coli
atgaagtcgaaatgcgcgatgacacactactgaaagcggaaggacgagtaaagttgcaattaaaaggaaatgttatgcataaggagcagtagagtattcgttttcatttaaagatattcttgcgctttaattacaaactgcaccgatgttggtggcgtcaaaatcgccgaggctgttccctgaaggccggggcagcccacatggatgtgggctgagggcgcgttttacagggatgttacctcgcgcccgacccggtagccgtaagggataagtcgagggcaccgcgcagcggcgattttgttcgccagagcccgggggtgcaggggggcggcggcgattggccgccccctgcgcgctccttgcgccagtggcaatatgttgcttagctcatgaaaggagcgcaacaagatgatgaatcaacatataacaacatcttaaaaaaaggcctgacattacgccaggccttctgcgttaattaatc

SEQ ID NO: 1751 - DNA, 111 bp, Escherichia coli
accgcgtacatataaaactccgcttccgcgcacaccttttcaatgattcagagtgcgctataaatattcacaatagggcgcgaatattacgcaaaacgcacgcctttgaca

SEQ ID NO: 1752 - DNA, 327 bp, Escherichia coli
agcagggcacgcgcggtaccagcctgtgcccaaccgtctgcgtaaccatcacgcggaccgaaggtcagggtattatctgcatgtttaacttcaacagcatcgttgagagtacgagtcagctcgccgtttttacctttgatcgtaataacctgaccgttgatttttacgtcaacgccggcaggaacaacgaccggtgctttagcaacacgagacattttttcctccgattaggctacgtagcagataatttcgccaccaagaccagcctggcgcgctgcacgatcagtcataacacctttagaggtagaaacaactgcgatacccaga

SEQ ID NO: 1753 - DNA, 101 bp, Escherichia coli
gatatcagccaggatcttacggtcgatttcaacagaggcttttttcaggccattgatgaatttgctgtaagaaataccgttctgacgtgctgctgcgttga

SEQ ID NO: 1754 - DNA, 324 bp, Escherichia coli
tttcgggtttgaacccggctccagcgggtacatgtcgataacaacatgaccatactgaccacgaccaccagactgtttcgcgtgtttaccttcaacatcggtaactttctggcggatagtttcacggtaagcaacctgcggtttacctacgttcgcttcaacgttgaattcacgcttcatacggtcaacgatgatgtcgaggtgcagttcgcccatacccgcgatgatggtctggttagattcttcgtcagtccatacacggaaagacgggtcttctttagccagacggcccagagccagacccattttttcctggtcagcttt

SEQ ID NO: 1755 - DNA, 449 bp, Escherichia coli
agcacgcatagagtaacacataaagcggttgcccaggctgcaaatacagcgaaattgttgtcagccagttccaaccagtaccgcccccgaaccatgacgcgatggtcgccgggaacagaataatactggaagcgaagattgccgggattacccccgccatattcactttcagcggtaaatgtgtgctctgtgcagcatagacacgacgaccttgctgacgtttcgcgtagtttaccacaatgcggcgttgaccacgctcaacaaatacaacaaagaacgtcactgcaaatactaatactgcaaccaacagcaacacgaggaagtgcaggtcgccttgacgcgcttgctcgatagtatgggcaatggctggcgggagtcccgcgacaataccggcgaagataatgattgaaataccgttgccgatacctcgttcagtaatctgttcgccc

SEQ ID NO: 1756 - DNA, 509 bp, Escherichia coli
atgcttttgaatatgtgctcgcaatcttgagaaggaaatggcgaccacgaaagaaaaggcaaaaacgataatctgaaagagccaaggtatttcagtataagcattgaatgcgacagtaaactctttcggtatcagccagagagtgagaccaaaaatgataatcgtatacataagtctttcgagtggctcgttagcaaaaagtttcaacaatggagtaaatacatccaacatatcaataactctcaactgtaagggtattgaaatgttaacacaagctctcgctgtaggggtatagccgagaccaccgaagcccggaggtggtgaaataaaaccgggcacaacacgaaggcgcatttccgatatccataaagagtcggtcttgtctgttaaatttaaatggtgggagtgcgcctccggttgtaaataacgacattgctgtgtgtagtcctggcggcatcagtttttttcttgaagttcggctgatgtccgccctttttaaagtgaatttt

SEQ ID NO: 1757 - DNA, 273 bp, Escherichia coli
gacgtgcacgtgcaataacaccacgttttacgcgagccatatgtgctctcctgtatctatattctaattaaaaagttaaaaacgttaacggcttatgcgtacggcaggcacgcgattaccaggcccagatcgcctttggaaaccatggctttcggacgcaggtgacgtttacgtttggtcgcttttttggtcagaatgtgacgcaggttagcgtgcttgtgcttaaaaccacctttaccggtttttttgaagcgcttagcagcaccgcgtacg

SEQ ID NO: 1758 - DNA, 182 bp, Escherichia coli
cgcggtttttacgatcaacgccggtgaatttagcttcaacttcgtcgccaacgctcagaaccagggtagcgtcttcaacgcggtcacgggatgcttcagaagcacgcaggtaaccttcaacgccgtcagccagttctacggttgcgcctttagcgtcaactgcagttactttaccggttacg

SEQ ID NO: 1759 - DNA, 116 bp, Escherichia coli
gaacggtgttccggcgcgacgaccgtccggcgtattaccggttttctggccgtacaccacgttagaagtgatagtcagaatcgactgggtagggacggcgttgcgataggttggca

SEQ ID NO: 1760 - DNA, 394 bp, Escherichia coli
cggtatgggcatgctgcaaaaaagcctggtcataaactaaccgtacaatacctgttgccgcgtcaacttcgctcacatgggcttggcgagtaaccgtacaccccgccagcgttattaatgaaagagtcagaatcagaagtctcatggtccagccagaagagtaagagaaagcactattttacgcgttacagtgctgcgacaatggccggaaaagacgcctggcaggcgctatttcttgccatctgtaggtgtcagaaataggggggctgttttttgattatcatttttataacattaaaggggtatttatgtgatttgtatcacataaagattgatttttgtgatggttgtcatattataagcgcaaagacaataacacctgtataacaaatgg

SEQ ID NO: 1761 - DNA, 441 bp, Escherichia coli
taatagctgattaataacttttaacgcagcttgttggcgaagcggaatgaggtaacccacaatcaggggaaccagaatgattaacagcccagaaaacatgaaaacccagtccttgcaaagatgaagtcgaaatgcgcgatgacacactactgaaagcggaaggacgagtaaagttgcaattaaaaggaaatgttatgcataaggagcagtagagtattcgttttcatttaaagatattcttgcgctttaattacaaactgcaccgatgttggtggcgtcaaaatcgccgaggcgttccctgaaggccggggcagcccacatggatgtgggctgagggcgcgttttacagggatgttacctcgcgcccgacccggtagccgtaagggataagtcgagggcaccgcgcagcggcgattttgttcgccagagcccgggggtgca

SEQ ID NO: 1762 - DNA, 277 bp, Escherichia coli
tgcagagtatgagtgttagtagtcaagatactcttcctgtcaaaatataagaaacgacaataataacacggcctgccgcaatcgtaagaatgagacaggccgtaaagtttggcagaacaaaagatggaacgttagtcttgttgattaaccttgcgctcaagcgatttcagacgccttgctcatgtcatcaatgttcatcaccagtgcagcggttttgcgccagactttgttgggttgcagcggaatgcctgaggaatagacgcctggttcagtgatg

SEQ ID NO: 1763 - DNA, 524 bp, Escherichia coli
agctacagcagcagcagcggaaacaccgaatttttcttccattgcagagatcagttctacaacgtccattacagacatagctgcaactgcttcaatgatttgatctttagtgatagacatttaaattgttcctgaatatcagaataagtttatacgtaagcgaatgcgttaaaaagataactgcgattaagcagcttctttcgcatcgcgtacagcagccagagtacgaaccagtttgccagccgaagcttctttcatggttgccatcaggcgtgcaattgcttcttcgtaggtcggcagagttgccaggcggtcgatctgagacgccgggatcagctcaccttcaaaggcagcggctttgacctcaaattttgcattcgctttcgcgaactctttgaacagacgagcagcagcgcccgggtgttccatagagtatgcaatcagggtcggaccaacaaacgcgtctttcaggcactcgaacggagtaccttcaacagcacggcgcagcagggtgttacgaacaa

SEQ ID NO: 1764 - DNA, 111 bp, Escherichia coli
ccttccgcaaacaggcgcagaacttcactctcttttggcgagagacgcttgtcaccgtaaccaccagcactgattttttccaacaggcgagaaacgctttccggggtaaat

SEQ ID NO: 1765 - DNA, 248 bp, Escherichia coli
ggacggaaggaaggtacgtcctgcttcatctgctcttgttcaagttgcttaataatgttgctcataatttaatctcttatcctgggtaaactgatatctcgggggcttacgccatcccatcatgtttatgttgctgttgtgcgtgttccgttttgaactccgccagcaaccttgcttgctcttcagtcagagccaggttttccagaagttcaggtcttctaagccaggtacggcccagcgactgtttc

SEQ ID NO: 1766 - DNA, 190 bp, Escherichia coli
gctcgatgaagcgaccgttgcgtgcattacggctgtcagcgacaacaacctggtagaacggacgctttttagcgccgtgacgtgctaaacgaatagttaccataacatcctcttgtgtgaataaaacaaccggaccccatcgaggaacggagtccggtgtcatattaaaagcccgaaaattttactcatt

SEQ ID NO: 1767 - DNA, 225 bp, Escherichia coli
attgcaataacaatatcttcaggagatattttttgactttctttaacaagatttttaggaacaaaaaccaagtccgtagtatcaaacttgccattctgaatattgttcgcacggataagaggcaaataatcatcttttagataatttattgcctgctcttttttatacgttactcctcggattagagttgtgaccgtagatactggggcgataacccacccctcc

SEQ ID NO: 1768 - DNA, 405 bp, Escherichia coli
taccacgcggaattgcttctttgatggtgatcttgatgatgtcgcctacgcctgcgtagcgacggtgcgagccacccagaaccttgatacacattacgcgacgtgcaccggagttgtcggcgacgttcagcatagtctgttcttggatcattttagtgctccgctaatgtcaactactactgagacccgaaaatcaggtcgttaaaaatccccatatcgagggcgcggcattataacaccgcttcaaggatatgggtagaaaaaataaacggctcatttctgagccgtttattcgtattgagagagtgtactgtattacagaaccgctttctctacaacgcgaaccagcgtccaggatttagtcttggacagcggacggcattcgcggatttcaaccacgtcacc

SEQ ID NO: 1769 - DNA, 194 bp, Escherichia coli
tggaatcacgcggcagagtctgcagcttgagaacagcgttccaacgatcttcgtcggaagcgttcacatcagagatgatcgctttcagttcagcgcgtttcgcgaagtatttatcagctaaagctacgcgttttacttcgcgtgcttttcattgattgcttagccatttagtaaccctaccttacttgcggaac

SEQ ID NO: 1770 - DNA, 281 bp, Escherichia coli
ttcgggttccagtaacgggtctggtgaccgaagtgaacaccagccttgagcatgtcgcgcatggaaacagttgccatgattaaaacctctatataaaagttggggttatgcctccacgtatcccatattaccgaccccaaagggcaccccggaatatgtgccgatacgtgtgtgttgttacacaaagtgagattgtcgcttccgtccagtctgtgtatacgaaatggatcggaagtccggcgcgctttataccacaaatacgtcgtggacaccaataattg

SEQ ID NO: 1771 - DNA, 307 bp, Escherichia coli
agtctggtggtgttcagcaaatttaatacggtacagcaccggatcgcgcatcacgataaacggtgaagccatgtcgattttcgcacgcaggcaggctttaccttcttcaaaaccaccggcacgcattttttcgaacagcgccaggttctcttcaacgctgcggtcgcggtaccgggctgtttttacccggttgcgtcagggtgccgcggtattcgcggatctgttccggcgtcagttcatcaacgtacgccaggcctttattgatcagttcgatcgcataggcgtggagctgatcaaaataatcgga

SEQ ID NO: 1772 - DNA, 68 bp, Escherichia coli
aaggatgagtaacggcagaccggttaccatccagtgcgccatcaccttcgccagcacaacggcgggca

SEQ ID NO: 1773 - DNA, 459 bp, Escherichia coli
cgcatacgatcctggtggtacgcgtaaccggtacctgccgggatcagacgacccacgataacgttctctttcaggccgcgcagttcgtcgcgtttgcccgcaacggctgcttcggtcagcacgcgagtggtctcctggaacgatgccgcggagatgaaggactcggttgccagagacgctttggtgatacccagcagatcgcgggagtaagttgcacccactttgccgttcgcttccagttcgcggtttgcgatcttgacgcgagagtattcaacctgttcgccttccaggaagtcggagctacccgcgttaacgatggtagctttacgcagcatctgacgaacgataacttcgatgtgtttatcgttaatcttaacgccctgcagacggtatacgtcctgtacttcgttaacgatgtaacgagtaacagcatgaacaccacgcagacgcagaatgtcg

SEQ ID NO: 1774 - DNA, 530 bp, Escherichia coli
gggatcatgtggacaaaggcaaatgtgagaagggtaataccgataaacgtggggatgacgagtcccaaacgtcggagaataaactgcaacataacccggattctctatagtgacccgcagcctggaactgcgtgtctgtattgctcacaaatcaattcccgcccttatcggacagggaatgaagtattgctgccggatggcgctgcacgcagaggcacagcgccaccgggtatacagattgttgacaaagtgcgctttgtttatgccggatgcggcgttaacgccttatccggcctacaaaatcgtgcaaattcaatacattgcagaattttcgtaggcctgataagcggagcgcatcaggcatttttgcctttgccatcagtcttgtatggcttttaattattcgatagagacgttttcgaagtgatgtttgcctaatggatcaaccacatagcctttaacttctttacgtaccggttcaaacacggtggagtgagcgatgatcagtgccggagcctgatcgtgcatca

SEQ ID NO: 1775 - DNA, 87 bp, Escherichia coli
ggaaacctgcggcgttcagagcacgaatagtagattcgcggcctggacccggacctttaaccataacttccagattcttgacgccgt

SEQ ID NO: 1776 - DNA, 207 bp, Escherichia coli
tcatccccacgccgttatcggagatggtcagcgtacgcttgtctttatcgaaagagacacgaacgcgtagttcgccatcaccttcgtacaggtccgggttagagagcgcacggaaacgcagcttgtccgccgcatcggaggcgttagagataagctcacgcaggaagatttctttattggaatagagagaatggatcatcaggtgca

SEQ ID NO: 1777 - DNA, 222 bp, Escherichia coli
caactaccaggatcgcgccgtccatctgcgcagcaccggtgatcatgtttttaacatagtcggcgtgccccgggcagtctacgtgtgcgtagtgacgggtcggggtgtcgtattcaacgtgagaagtgttgatggtgataccacgagctttttcttccggcgcgttatcgatctggtcgaatgcgcgagcagcaccgccgtaggttttagccagtacggtag

SEQ ID NO: 1778 - DNA, 178 bp, Escherichia coli
cgtcgtctttcagacggaaagtacctaaaccaaatgcagggatagccataatatgcctcttttaatgctattttcgttaactgaggtgattatgggcttcagactgttgaggaaaaagagcgtaaaatgcagaggatttttgcgattctggcaataatagatatacagacgaaaaaaa

SEQ ID NO: 1779 - DNA, 231 bp, Escherichia coli
atattttcgccgagagtgatcagctcagaaaccggcgtattctttaattcggtaagattcatagtggtgtgagttcttaaacttggggtaaatctcgaacttaatgttgtgaatggtatggcaggatcatccatgcctgtttacggtcatcgactcatgtcttttcgctgcctggtcacaggagagtacgcagaactgaaacgacaagacggattgagtgacgagccagaa

SEQ ID NO: 1780 - DNA, 114 bp, Escherichia coli
tagtgctctccccttcaggagagagcacgggactttggtattaacccttaggcttatttaccacgggcttcaattacggcctgagcaacgttactcggcgcttcatcatacttc

SEQ ID NO: 1781 - DNA, 323 bp, Escherichia coli
ctgctgcttacgatagtgtttacgacgacgaaacttaacgattttaactttctcgccacgaccgtgagcaacaacttcagctttgattactgccgccatcaacgaaaggaacgccgattttgacttcttcaccgtttgcgatcatcagcacttcagcgaactcaacagtttcgccagttgcgatgtccagcttttccaggcgaacggtctgaccttcgcttactcggtgttgtttaccaccactttggaaaaccgcgtacatataaaactccgcttccgcgcacaccttttcaatgattcagagtgcgctataaatattcaca

SEQ ID NO: 1782 - DNA, 142 bp, Escherichia coli
tgctgctgcgttgatacgcgcaatccacagttgacggaactgacgcttacgttgacgacggtcacggtaagcatactgaccagctttgataacagcctggaaggcaacgctggtatactgctgagaacgcgcaccgtagtag

SEQ ID NO: 1783 - DNA, 110 bp, Escherichia coli
aaatgcggtaaatccgcctgacgtcgaattgtgcgggtagcgatgccataagccagcgagacaacaaagaaaaaaagaatgatcagtggcacgatacctttaataaaggg

SEQ ID NO: 1784 - DNA, 233 bp, Escherichia coli
agttgcatcgcgtacgtcaaccttgtgcaggttgcgcgcagccaggaacaggttttcgtccagctcaccggtgatgatcagcacatcttccagagccatgtctttcagtttctgtgccagcagcttagttttcggcgcttctacagagaacttctcgacaacgatcagacgatcctgacgtaccagttcggacaggatgcttttcagcgcgccgcggtacatcttcttgttaa

SEQ ID NO: 1785 - DNA, 75 bp, Escherichia coli
atcgggaaaccggtcgctttcgacgccagcgccgaagaacgggacacgcgtgggttcatttcgataacaatcaga

SEQ ID NO: 1786 - DNA, 117 bp, Escherichia coli
cgcaggcggtagttcactttacgctcgccaacgcccatcgcagtcagtttatcggcgatggcgttgaaggccgcttcatggtcaagaccgttgaactcgccagagttgaacagcacg

SEQ ID NO: 1787 - DNA, 357 bp, Escherichia coli
tagaatagcgacgagatgacgtaggagattaataacgcagggatcattaccgcgaagataatgcgtcgggccagcggtgcgccaaaaatacgcacggtcaggtcggtagcaagaaaaataaacggaaagctaaacgcgccccaggtggtatggaaacccaaaatggagacgggaagctgaaccagatagttactggaggtgatcaccagcagatgaaataacgataaccagaacaacgccttatagcgttgagtttgcgagaaaacgttcatattgtacctttttgattaaccattggggtgagggaacccaatacgtacgacacgtctgttaccttaacataataacgtgcttacc

SEQ ID NO: 1788 - DNA, 186 bp, Escherichia coli
tcttcaaaggtcgcttgtttgataccaccgatgtggccggtgtggtgatagtacactttgtcagtacgcttgttgccggttacagcaactttgtcagcgttcagaacgatgatgtaatcaccggtatctacgtgcggagtgtattccgctttgtgcttaccgcgcaggcgacgagccagttcagta

SEQ ID NO: 1789 - DNA, 275 bp, Escherichia coli
tcagtcgcagcaactaccaggatcgcgccgtccatctgagcagcaccggtgatcatgtttttaacatagtcggcgtgccccgggcagtctacgtgtgcgtagtgacgggtcggggtgtcgtattcaacgtgagaagtgttgatggtgataccacgagctttttcttccggcgcgttatcgatctggtcgaatgcacgagcagcaccgccgtaggttttagccagtacggtggtgattgcagcggtcagagtagttttaccgtggtcaacgtggcc

SEQ ID NO: 1790 - DNA, 239 bp, Escherichia coli
ctctttcttggcgtcgtagtcaaagataccccctaagaacgtcggagcgttccgtgaggtcctgaatgcgattatttaccggattaatttcaaacatggtctgatttcttttattgagctagtcaaaatgcggtgataagagcgggattgtacccaatccacgctcttttttatagagaagatgacgctaaattggccagatattgtcgatgataatttgcaggctgcggttgccgcga

SEQ ID NO: 1791 - DNA, 162 bp, Escherichia coli
ttcgataacttttgctacgtgcagcagtgctttagaagggatacagccgacgttcaggcaaacaccgccaagggtgttgtaacgttctacgattacggtttccagacctaaatcagcgcaacggaaggcagcggagtaacctgcggggcctgccccaagtac

SEQ ID NO: 1792 - DNA, 329 bp, Escherichia coli
ggatagaaacgccgtcttctgtgaagatacgggtcatacccacttttttaccgactaaaccaatcattgtttcaacctctcaatcgctcaatgacctgattaacccaggctgatctgcacgtctacaccggcagccagatccagacgcatcagagcatcaacggttttctcggttggctcaacgatgtcaaccagacgcaagtgagtacggatttcgtactgatcgcgcgcgtctttgttgacgtgcggggagatcagaacagtgaagcgctctttgcgtgtcggcagcgggatcggaccacggacctgcgcaccagtgcgcttggcag

SEQ ID NO: 1793 - DNA, 210 bp, Escherichia coli
gatttattgctcagatcggttgcgccagtgactttcgctaccgcctggatcagcgtgcggaacaggtcgatgtcatagttagagttaacgtgttgcagcaccgcagcaatacgctccagacccataccggtatctacagacggcttcggcagcggttccatcgtgccatcggcctggcggttgaactgcatgaagacgatgttccagatc

SEQ ID NO: 1794 - DNA, 459 bp, Escherichia coli; identical to SEQ ID NO: 1773

SEQ ID NO: 1795 - DNA, 178 bp, Escherichia coli
gtggttaacgtcagcgccaatctgttcagcaatccagccagccagcgcctggatgcggtcagttttgtcgcgcagcgtccccaactgttgctggaacaacacggtttgcaggcgcggcaggttatcttcaagacgttttttacggtcggtgttgaagaagaactcggcatccgccaga

SEQ ID NO: 1796 - DNA, 276 bp, Escherichia coli
agccttgagcatgtcgcgcatggaaacagttgccatgattaaaacctctatataaaagttggggttatgcctccacgtatcccatattaccgaccccaaagggcaccccggaatatgtgccgatacgtgtgtgttgttacacaaagtgagattgtcgcttccgtccagtctgtgtatacgaaatggatcggaagtccggcgcgctttataccacaaatacgtcgtggacaccaataattgttggcgctgtgtacagcatcagacgtcgaattttct

SEQ ID NO: 1797 - DNA, 91 bp, Escherichia coli
tttcatgaacttctcactacgaagctcacgagttaccggcccaaaaatacgcgtaccgataggctgctcgctgttgttgttcagaagaaca

SEQ ID NO: 1798 - DNA, 454 bp, Escherichia coli
aatcctaaaaaaatctcataaaattaatatatgagataatctttattcagcagaagattattaaaggttgctgtattatttagcgataaaaaaagcctgccagatggcaggctatttaataacggcgttattattgcaacagcgaaatatccgcaacgcgcaggaacagttcgcgcagtttctccagcatggtcagacggttgatacgcaattctttgtcatcaaccatgaccatcactttatcgaagaaagcatcaaccggttcacgcagctcagccagttcgaccagcgcatcctggtaacgaccttccgtaaagtacggctccagcttgtcacgtagcaccacaacctgcatcgccagtttaatttcttccggctctttcagggtagaggcattcacgcggtcgctcagcacttcgtcagatttcgccagaatgttagatacacgtttgtt

SEQ ID NO: 1799 - DNA, 204 bp, Escherichia coli
cataagtctttcgagtggctcgttagcaaaaagtttcaacaatggagtaaatacatccaacatatcaataactctcaactgtaagggtattgaaatgttaacacaagctctcgctgtaggggtatagccgagaccaccgaagcccggaggtggtgaaataaaaccgggcacaacacgaaggcgcatttccgatatccataaaga

SEQ ID NO: 1800 - DNA, 123 bp, Escherichia coli
atagtttgctggcaacaccggttaccagaatgcgcttaccggaaagaaaacccatagctttaatccttattgttgatgcttgttgtgcctgaaaatcaggcgattcgtcgttttagtaaacag

SEQ ID NO: 1801 - DNA, 86 bp, Escherichia coli
tatagtcgatctcttgaacgccttccgcggtgaaacggcagaacttgcgacgacggaaataacgtgccatatggctagtctccaga

SEQ ID NO: 1802 - DNA, 56 bp, Escherichia coli
gttggtaaacaacaaagttgggtcgttatggggtaccagggagctgctggcaacta

SEQ ID NO: 1803 - DNA, 116 bp, Escherichia coli
gttccggaatataagaatccaggaagccagccagttccaggattttcgcttcccactctgcgtcgccttccagcgctttcagagcagaaccacgaacgatcggagtgtcgtcgccc

SEQ ID NO: 1804 - DNA, 188 bp, Escherichia coli
gccgcccatctttaccaacagaacgattatttcagttcgagttcgttcattgcagcaatgctgaaaccgccgtcaacgtggaccacttcaccggagataccggcagagagatcggagcacaggaatgccgcagagttacccacatcttcaatagtaacggtacggcgaatcggggtaacggcttcgca

SEQ ID NO: 1805 - DNA, 344 bp, Escherichia coli
gcatacctttagcagatacgcgcagggtgacaaaacgcttctcgctctcaacccagaaacggtgagagtgcaggttcggcaggaaacggcgtttagtcgcgttcagtgcgtgggaacggttgttaccggtcaccggacgcttgccagtaacttggcagactcgggacatgtctattctccaaaaatcaaattagctcgagcttcgtatggggtattggcgcctcgtcaggctttacagcccggtcatcgcagttctatgtgaactctcgattgccaggcccaaatgccaaacccgagattctcaaaggtggcgtagtatacgctgactcatcgatgtgctcaag

SEQ ID NO: 1806 - DNA, 450 bp, Escherichia coli
aggttcaacttacgcttggacatcacggtgtattccagattcaggcgcgagaactcatactggcgcgggtgaacaggaatcgtgatgttgtccagtacccagtcgtacagacgacggttgtcctggaactcaagcgtacacagagagtgcgtaataccttccagggcatcgctgatgcagtgggtgaagtcgtacatcgggtagatgcaccacttgttgccagtctggtggtgttcagcaaatttaatacggtacagcaccggatcgcgcatcacgataaacggtgaagccatgtcgattttcgcacgcaggcaggctttaccttcttcaaaaccaccggcacgcattttttcgaacagcgccaggttctcttcaacgctgcggtcgcggtacgggctgtttttacccggttgcgtcagggtgccgcggtattcgcggatctgttccggc

SEQ ID NO: 1807 - DNA, 289 bp, Escherichia coli
ttttcttgcctttgaacactttgcccggagtctggttctgaccgatagaacccggaacgcggtgagacaaggagttaccgtgagtagcagtcctgggtacggaagttccagcgcttaacggtacctgcgaaacctttacctttagaggtgccagttacagtcaacttttttaacgtcagcaaacagttcaacgctaatgctctgacctacagtgaactcttcgccttcagccaggcggaattcccacagaccacggccagcttctacgccagctttagcgaagtggcca

SEQ ID NO: 1808 - DNA, 625 bp, Escherichia coli
gagtcacatcagtaatgttagtgatgcggaaacctgcggcgttcagagcacgaatagtagattcgcggcctggacccggacctttaaccataacttccagattcttgatgccgtattctttcacggcgtcagcggcaacgctctgctgcaacctgagcctgcaaacggagtggatttgcgagaaccacggaaaccggaaccaccggctgttgcccaacccaacgcgttaccctgacgatcagtgatagtcacgatggtgttgttgaaagaagcatggatatgagccacgccgtcagagacttgttttcttacacgtttacgtgcacgaattggtgcctttgccattattcaatcaccccgattatttcttgatcggtttgcgcggacccttacgggtacgtgcgttggtcttggtacgctgaccgcgaaccgggagaccacgacgatgacgcaaaccgcgatagcaaccaagatccatcaggcgcttgatgctcatgctgatttcacggcgcagatcaccttcaacgacaaatttggcaacttcgtcacgcagcgtgtcgatttgtccttcagacagctcactgatcttaacatcttcagcgatacccgctgcagccaggatggc

SEQ ID NO: 1809 - DNA, 64 bp, Escherichia coli
gcgcataaacctgcttgttttgtactgcaggcaggtgcgcgagcagcggattagcataaatagc

SEQ ID NO: 1810 - DNA, 277 bp, Escherichia coli
ataagataaacataatgttttactctattaacacctacgatgaatgcataagagatgataaccataaagacaatttgcttaccagtattcagtataattgcaaagatgaatacaataaaaacaagtaaagtaaatgttttacttacctttgtattagtaaattttttagaccaaataaataaagcaaaagtagttagaatgattggctgcatgtatgctgagaaatttcttgatgtgtcttcaacatcagcatctcttatcaaattcatatagctaa

SEQ ID NO: 1811 - DNA, 248 bp, Escherichia coli
agagaggcgctgttcgtcgatatcaaccgcaacaacctgcgcttctggtgccacctcaaggatatgcgttgttttaccgccgggggcaggcacaaagatccaaaatgtgttcaccgttttgtggcgcaagccaggtcatgcaaccttgtgctgatgcatcctgaacggtaacccatccgtcttcaaaaccaggtagcgcatgaacaggtgcaggtgtttccagacgtacagcatcagggtaatccgca

SEQ ID NO: 1812 - DNA, 325 bp, Escherichia coli
gaatttgctgtaagaaataccgttctgacgtgctgctgcgttgatacgcgcaatccacagttgacggaactgacgcttacgttgacgacggtcacggtaagcatactgaccagctttgataacagcctggaaggcaacgcggtatacgcgagaacgcgcaccgtagtagcctttagcttgtttcaaaattttcttgtgacgtgcacgtgcaataacaccacgttttacgcgagccatatgtgctctcctgtatctatattctaattaaaaagttaaaaacgttaacggcttatgcgtacggcaggcacgcgattaccaggcccag

SEQ ID NO: 1813 - DNA, 141 bp, Escherichia coli
gatcaccagcacgcagtttaacgcgcagcggtgcggaataggtcacgccacggatttgacattcctggacgtcaaacaccggttcgccaaggcggtagctgacgtattgcagctcggaattacctgctgtagctctgaatc

SEQ ID NO: 1814 - DNA, 360 bp, Escherichia coli
agtaagaacgggaaacggtgcggcagaagttctaaaatctcttcaatctgcagagtatgagtgttagtagtcaagatactcttcctgtcaaaatataagaaacgacaataataacacggcctgccgcaatcgtaagaatgagacaggccgtaaagtttggcgaacaaaagatggaacgttagtcttgttgattaaccttgcgctcaagcgatttcagacgcttgctcatgtcatcaatgttcatcaccagtgcagcggttttgcgccagactttgttgggttgcagcggaatgcctgaggaatagacgcctggttcagtgatgggacgcatcaccatacccatgcccgtaaccgtcactt

SEQ ID NO: 1815 - DNA, 90 bp, Escherichia coli
gccttctgcaccagtgatggcagcagtgtagcgctcgatcatgcccggaacctgttcgctctggtcaggatggaccataaaaacgatttc

SEQ ID NO: 1816 - DNA, 281 bp, Escherichia coli
gcttacgcaggaatgctgggatatccagataatccggctctttcgcagtttgcggcgcattgtcattcacgactttagcaaccggcttctgctcctgggtcagcggagccatcccatgctgctggtagcgatccatcactggctgctgaacctgcttattggtcaccagagtgatttcaggacgtttgtccatgccgatacctgtcgcaacaacggttacgcgcagctcgtcattcatatccgggtcaagagaagtaccgataaccacagtcgcgttgtcg

SEQ ID NO: 1817 - DNA, 190 bp, Escherichia coli
agtttttcacagaaataaaaaaaagaggacaaaggaaaataaatgaagttattagaccgactacaaaggctttttttacaccaatcttatcaccaacaaaaccaaaaaatattgtacctgtcagtgttcctaaacctgctattgtcatcagagttgaaatgaccactgtattaactccattatctgccag

SEQ ID NO: 1818 - DNA, 322 bp, Escherichia coli
gggatcatgatgcagaaactttcctggctttcatcgccattaggcttaaagtagccctgcttttcccagtgctcgtaaagcggctgttcgatatcttgtgggttatatgtcttttccattatttccaggttgccgtattcaggttgaaaccagccacgcggtaggctttatagcgttcgcgcgccagttgtttcagagaatcttcataaggaacgaagtctaccacttctgtgaaagcggtggcaaaatctgcaaagcttgttcgcagactaatcaatatatcgcgccggctgctgctacgcttttgcggccaggcgatctc

SEQ ID NO: 1819 - DNA, 229 bp, Escherichia coli
gaaacgcaggttgcactggcctttatagtcctgggcgatcccgaagttcaggcagatagatttcgcatggccaatatgcagatagccattcggctccggcgggaaacgggtgtgtactgtggtgtgcttaccactggccagatcttcatcgatgatctgacggataaagttagtcgggcgggcttctgcctcactcatcgtggattcctcaaagcgtaaacaacgtata

SEQ ID NO: 1820 - DNA, 435 bp, Escherichia coli
agggtgacaaaacgcttctcgctctcaacccagaaacggtgagagtgcaggttcggcaggaaacggcgtttagtcgcgttcagtgcgtgggaacggttgttaccggtcaccggacgcttgccagtaacttggcagactcgggacatgtctattctccaaaaatcaaattagctcgagcttcgtatggggtattggcgcctcgtcaggctttacagcccggtcatcgcagttctatgtgaactctcgattgccaggcccaaatgccaaacccgagattctcaaaggtggcgtagtatacgctgactcagcgatgtgctcaagtcccgaacagacaaagatcccgaaggatcgcgcatagcgggttaaatccagccgcgttcggcaaaagaaacatactctccacgcccaatcacgatatggtcgagcacgcgtaaa

SEQ ID NO: 1821 - DNA, 492 bp, Escherichia coli
ttgttgataattgtagcggaaaagtgaggaagaagaactaattgctgtgagaggtcaaatcagaaaaaggaatagcgcagattgaggtttttgtaaaaggccgaatgaatatccggcctgagattgctgataagtttgcttgtgcgggcctgttcccctcaccctaaccctctccccgagggggcgaggggactgtccgtgcgcgctttcgaattagccgaggattttttccagatcagcgcgaacttcagcaaccggcttggtgccgtcaactttcgcgtatttggtattacccgcttctgcttctttggagtagtagccgatcagcggtgctgtcatctgatggtattcaaccagacgtttacgtacggtctcttcctgatcatctttacgggtagtcagttcttcaccggtaacgtcgtctttgccttctactttcggcggattgaatttaacgtgataaacacgaccagacggcgcatgaacgcggcg

SEQ ID NO: 1822 - DNA, 336 bp, Escherichia coli
agaccggtcagttcgtcggtctgacgcgtaatggtctggccgtcgatcatgtcagtaaagcgtacaaaaccgcttacttcggtgataaccggcatggtgtgcgggtcccagtttgcaacggtttcgccgccagcaacctgttcgccatcgcctttcgccagtaccgcaccgtaaggtactttgtagctttctttagtacgaccgaattcgtcgatcagtttcagttcagtattacgggaagtgataaccagtttaccgctggagttcacaaccgacttcacgttgctgagcttgatgctacctttgtttttcacttggatgctggattcagcagcc

SEQ ID NO: 1823 - DNA, 181 bp, Escherichia coli
cagcaaattggcgattaagccagtttgttgatctgtgcagtcaggttagccttatgacgtgcagctttgtttttgtggatcagacctttagcagcctgacggtccacgatcggttgcatttcgttaaatgctttctgtgcagcagctttgtcgccagcttcgatagctgcgtatactttct

SEQ ID NO: 1824 - DNA, 194 bp, Escherichia coli
atttaactcgtgcttgtagcaaatattggtaatacgtgcgatcagacctttttggtccggacaaatagtacgcagaactttacgttggagtgaatgcattgctggaaaaaccttgttgagagtgtttgctaaaccgtaccgtcaaccattattggccgcagcactttttaaattttttacctgaaccacaaggg

SEQ ID NO: 1825 - DNA, 225 bp, Escherichia coli
gcttgttgcgacatcgccgggtcagagaagatctccgctttcggttcgtccgccagaccagtgacgcgaactccggcgattacgtcgtcttctgtagcatccgggttacgaatagcttcaatattaagatacggttgatctggcggaccagagaacagtaactcacctttacgcacaatcagatcctgaccataggcatggaagcgcccttcagggatgttgatc

SEQ ID NO: 1826 - DNA, 151 bp, Escherichia coli
gctcgcgcaccatgtgttcaacagcattaccgccgccgccgccgacgccgatgactttaatcaccgcgtcattggtaagttacattggttcaaacatagtctctctccgatcagtgcctgtcgcctgaggccgtaatcatcgtcggcctca

SEQ ID NO: 1827 - DNA, 142 bp, Escherichia coli
cagtacgctcacgcagctcttttaccagggatgcggtaatttcagccattctaaaatcctcggagatgtgatctgcccggcattaaaccgcacagatataaaagtgaaaaagggggccatatgcaggccccctaaccaaacg

SEQ ID NO: 1828 - DNA, 295 bp, Escherichia coli
aaatgtgtcgaattttttgaaaaagcgataaacgataccaccaacaggcgattgcctcaagaaaggcacctggggctgaaacggttaatggcgagataatttgcggaaagtgcagatgatgaaaagaaaaatgccggatgacacgaaggtcatccggcattacatcaggaaaccagcagctggttcatacgacgaataaacaggttcggatcttccagcgtgccgcgttctgccagcagcgcctgatccagcagcagttctacccactcgctgaacttcgcttcatcttcagtat

SEQ ID NO: 1829 - DNA, 159 bp, Escherichia coli
taaaacgcaaaacgattgatgcggatgatgtcaggacacggggcttgtagtgaaagcgcattacggtaacgtcgttctacttcaggatcgagagtgtcaccttctaccgccgccatcatcaccagcggcggtgcataactgtccagttcaaataacggg

SEQ ID NO: 1830 - DNA, 400 bp, Escherichia coli
cgacgttccagctgagaagtgatgctgtcagcaaccagttttgcgtccagttcaggcttacgaacttcggcgatgttgatctgtgcaggaacgccagcgatgtccgctacgaccttacgcagtttttctacgtcttcaccttttttaccgataacgatacccgggcgagcagtgtgaatggttacacggatgctcttagccggacgctcgataacgatacgagatacggacgctttagccagttccttagtcaggtactgacgtactttaaaatcgctgtccaggttgtcagcgaattctttggtgttcgcaaaccaggtagagttccatggttttacaatacccaggcgaataccattaggatgtactttctgacccattgctagtctccagagtctca

SEQ ID NO: 1831 - DNA, 245 bp, Escherichia coli
tgcagaacaactgcagcgatttcgtcgccttttttgtattcacgaactgcttcttcgcctgcaacgttccaggagatgtcagacaggtgaaccaggccgtcgatgccgccgtccaagccgatgaagataccgaagtcagtgatagacttgattttaccttcaacacggtcgcccttgttgtgggtttccgcgaactgctgccacgggttagctttgcactgtttcagacccagggagatacgacg

SEQ ID NO: 1832 - DNA, 247 bp, Escherichia coli
caacacggtcgcccttgttgtgggtttccgcgaactgctgccacgggttagctttgcactgtttcagacccagggagatacgacgacgttcttcgtcgatatccagaaccataacttccactacatcgccaacgttaacaactttggacgggtggatgtttttgttggtccagtccatttcggaaacgtgtaccaggccttcaacgccttcttcgatttcaacgaagcagccgtagtcggtcaggtt

SEQ ID NO: 1833 - DNA, 224 bp, Escherichia coli
ccctaagaacgtcggagcgttccgtgaggtcctgaatgcgattatttaccggattaatttcaaacatggtctgatttcttttattgagctagtcaaaatgcggtgataagagcgggattgtacccaatccacgctcttttttatagagaagatgacgctaaattggccagatattgtcgatgataatttgcaggctgcggttgccgcgaaactcgttgatatcg

SEQ ID NO: 1834 - DNA, 360 bp, Escherichia coli
gagctttttcttccggcgcgttatcgatctggtcgaatgcgcgagcagcaccgccgtaggttttagccagtacggtagtgattgcagcggtcagcgttgttttaccatggtcaacgtggccgatagtaccgacgttaacgtgcggttttgtacgttcaaacttttctttagacatcgattgtccctctaagacacggataaatcggtgatatcaccacatcaaccaggcaacatgcccgacttgttgaatgcaataaacagaaggaaaaaacagggaggagaaaagaagtggtgctgataggcagattcgaactgccgacctcacccttaccaagggtgcgctctaccaactgagctata

SEQ ID NO: 1835 - DNA, 228 bp, Escherichia coli
aatcagttcagcgataccttgcacagcgcctttcagtacatcgttcgctgcgccaaacgcatccagcagggagataccgcggcccagaactttcagcagtttgtcgttcgggatagtgatcagagagtccacatgcttggacagttcagtgatcccctgctccgcgaatgccatacgcttcttgccttcaaagttgaaaggcttagtgacgacagcaacggtcaggat

SEQ ID NO: 1836 - DNA, 430 bp, Escherichia coli
gacggttgatatctttaacctgctcgatggtcaggccggtttcttcttcaatctgctgcagtttttgcagggcgcgatgcacttcttcagagacatcgtgcagtttttccgaccacggcttgttcatcgcaattgccgcgttgaaccaggtatcgctggtttcgttgccggtaaacagggtaatgaagtttttcttcggcattttgcactgctcaacgcagagcttcatgatcagacgttcttgcgtacgaacgcggtccatcatgacgcgcatgctgttgaccaggtagtcaaactgcttcggcaccaggcggaactgtttgaatacttcagacagtttcaggatctcttcctgagcggtagcgtgactgcgacctttcgctttgatggtgtcacgcgttacaacgtactgagcgcgtagttccgcaaa

SEQ ID NO: 1837 - DNA, 146 bp, Escherichia coli
tcttaacatcttcagcgatacccgctgcagccaggatggctttagaacgggtcttgccgacgccataaatcgaagttaatgcgattacggcatgcttatgatcaggaatgttaatgcctgctatacgggccactatgcactcctac

SEQ ID NO: 1838 - DNA, 125 bp, Escherichia coli
tagattcttcgtcagtccatacacggaaagacgggtcttctttagccagacggcccagagccagacccattttttcctggtcagctttggttttcggttcaactgcgatggagattaccggctca

SEQ ID NO: 1839 - DNA, 215 bp, Escherichia coli
aatttcacgtatcgaataacgttgttttaatctagctatgaggaacaaataaaataaaaatattatttttaatactgaagcaacatctttggctgctttcttttttaatattgctggccgattcattttctgatatcggccatttttattgcgggtatcaggccagtttatggttagccattaattccagcgcctgcactaacgcagagtgatcc

SEQ ID NO: 1840 - DNA, 420 bp, Escherichia coli
gaacgcagaaccacaggttaccaggatgatttcgttgttcagaacgcgctgacgcagagcacctttgatttctgcttcagtcagttcttcaccacccaggtatttttccatcagctcttcagaagcttcagctgcggattcgatcaggttctggtgccattcgttagccagttcaaccatgtctgccgggatatcttcgtattcgaaggttacgccctggtcagcgtcgttccagttgatagctttcattttcaccaggtcaacaacaccggtgaaatgttcttcagcaccaatcgccagctgcagcggaaccgggttcgcgcccagacgggttttgatctggttaacaactttcaggaagttcgcacccatgcggtccattttgttaacgaacgcaatgcgcggaactttatatttgtt

SEQ ID NO: 1841 - DNA, 256 bp, Escherichia coli
ggtaaatccacgcacgcgcatcaggccatgcagcgaacctgacggctcgttacggtggcagctaccaaactcggccatacgcagcggcagatcgcgataagacttcagcccctggttgaaaatttgtacgtgacccgggcagttcatcggcttaatgcagtattcacggttctcagaagatgtggtgaacattgcatctttgtagttgtcccagtgaccggttttttcccacaggacacggtccatcatgaacgga

SEQ ID NO: 1842 - DNA, 247 bp, Escherichia coli
ttcatgtttgtgcaaaaaatagacaaaatgagcgggtttatagaaatagatgcacgtagcgggggaagagaggaaaaggccggacgacgatagtgccgtccggcatgagcaattaatgagaggtcagggtgttatgctgacggtgacggctgacgaaacctaacaggaagcacatcacaaagacgacagcgtacagaccgtttgctgtaagcagtgccgcctgcggaccgctatgttcaacgatcgg

SEQ ID NO: 1843 - DNA, 123 bp, Escherichia coli; identical to SEQ ID NO: 1800

SEQ ID NO: 1844 - DNA, 240 bp, Escherichia coli
tctcgttaccggagataatctgctgcggatctttcgattcgatgttggcaacgaagataaagttcggcagcagtttgccgtcgttcgcatacaccgggaagtatttctggtcacctttcatggtgtaaaccagcgcttcagccggcaccgcgaggaatttctcttcgaattttgcggtcagaacgaccggccactccaccagcgaagccacttcttccagcaggctttcgcttaagtcag

SEQ ID NO: 1845 - DNA, 131 bp, Escherichia coli
acctcatccccaatcatgagggtctcaccaactcgacgagtcagaatcagcattctttgctccttgaaagattaaaagagtcgggtctctctgtatcccggcattatccatcatataacgccaaaaagtaa

SEQ ID NO: 1846 - DNA, 173 bp, Escherichia coli
tgggcctccgctcaaaacgtgtcgcgcgcaggtcaatgcgtttgagaatgtactgactgagcagggtgatcaccaggtaaatcgccgccgccacaatgtaccaggtaaatggttcctgggtacgagtagcgatgctttttgtttgcagcattaaatcattcacactaatcaaa

SEQ ID NO: 1847 - DNA, 199 bp, Escherichia coli
tttcagtgatcggtttgtccgggaacacacggatccagatcttaccttgacgcttaactgcacgggtcatagcacgacgtgctgcttcgatctgacgggcagtcagacgaccacggccaacagctttcagaccgaagctgccgaagctaacatccgtaccctgcgccagaccgcggttacggcctttgtgcattttacg

SEQ ID NO: 1848 - DNA, 448 bp, Escherichia coli
tttcccaaaacgatgggatcaacaggtgcttgcgcggtgagttgtttgctcatcatgaccaccgtgacagattaagctgctttgtttacttctttgatcagcgcagcaacgcgatcagaaatagttgcgccctggccaacccagtgagcgatgcgatccagatccaggcgagtgccttcttctttttcgctagcgattgggttgaagaaaccaacgcgctcgatgaagcgaccgttgcgtgcattacggctgtcagcgacaacaacctggtagaacggacgctttttagcgccgtgacgtgctaaacgaatagttaccataacatcctcttgtgtgaataaaacaaccggaccccatcgaggaacggagtccggtgtcatattaaaagcccgaaaattttactcatttttgcgggaattgcaatcaacagttgctaactctgctgtaa

SEQ ID NO: 1849 - DNA, 420 bp, Escherichia coli
ggtaagcatactgaccagctttgataacagcctggaaggcaacgcggtatacgcgagaacgcgcaccgtagtagcctttagcttgtttcaaaattttcttgtgacgtgcacgtgcaataacaccacgttttacgcgagccatatgtgctctcctgtatctatattctaattaaaaagttaaaaacgttaacggcttatgcgtacggcaggcacgcgattaccaggcccagatcgcctttggaaaccatggctttcggacgcaggtgacgtttacgtttggtcgcttttttggtcagaatgtgacgcaggttagcgtgcttgtgcttaaaaccacctttaccggtttttttgaagcgcttagcagcaccgcgtacggtcttaatttttggcattttaataacttccacttcgcattgttaa

SEQ ID NO: 1850 - DNA, 91 bp, Escherichia coli
ataaaactatctggtgacaaccaactaccgtctgtctgcggccagcgcgccagtgcctcagcaccgacaattttgccattggctaaggaga

SEQ ID NO: 1851 - DNA, 411 bp, Escherichia coli
ggcgcgcagatccgctgcaacctggccgatcacctgcttatcagcgcctttcagcacgatttcagtctgagtcggacattcagcagtgatacccgcaggcagctgatggtcaacaggatgagagaaacccagagacaggttaatcacattgcctttaaccgctgcacggtaacctacaccaaccagctgcagcttcttagtgaagccttcggtaacaccgataaccattgagttcagcagggcacgcgcggtaccagcctgtgcccaaccgtctgcgtaaccatcacgcggaccgaaggtcagggtattatctgcatgtttaacttcaacagcatcgttgagagtacgagtcagctcgccgtttttacctttgatcgtaataacctgaccgttgatttttacgtcaacgcc

SEQ ID NO: 1852 - DNA, 361 bp, Escherichia coli
gacgttccagctgagaagtgatgctgtcagcaaccagttttgcgtccagttcaggcttacgaacttcggcgatgttgatctgtgcaggaacgccagcgatgtccgctacgaccttacgcagtttttctacgtcttcaccttttttaccgataacgatacccgggcgagcagtgtgaatggttacacggatgctcttagccggacgctcgataacgatacgagatacggacgctttagccagttccttagtcaggtactgacgtactttaaaatcgctgtccaggttgtcagcgaattctttggtgttcgcaaaccaggtagagttccatggttttacaatacccaggcgaataccattagg

SEQ ID NO: 1853 - DNA, 435 bp, Escherichia coli
agcttcgatagcagcacgagcgcctttagtaacacgcaggccacgaacagttaccggagtcgttacttcgccagccaggatcactttcgcgaactcgatctggataccgataatgttagccgctttcagcgtgttcaggtctactacaccgccttctactttagccaggtcagacagacgaatttcggctgtaatcgctgctttacgagaagtgaagccgaatttcggcagacgacggtacagaggcatctgaccaccctcgaaaccgcgacgtacgccaccgccagaacgagacttctgacctttgtgaccacgaccaccggttttaccgaggccagaaccgataccacgacccaggcgtttacccgcctttttggagccttcggccggagacagagtatttaaacgcatctcttactcctcaactttaaccat

SEQ ID NO: 1854 - DNA, 473 bp, Escherichia coli
gtgctgacagtaaaaagcaatcgtagaatcagcggcaagccggaaaggttccggtgaggcgcaatgttgcgggggctttatccctggtggcattggttgctggagagagaaaacccccgcacgttgcaggtatgcacctgacaacaccacgggggctaatcttgactctagaccactcaagaatagccgcgaaacgttgtcattacaacacaggcggctatatgacgttcgcagagctgggcatggccttctggcatgatttagcggctccggtcattgctggcattcttgccagtatgatcgtgaactggctgaacaagcggaagtaacgtgtcatgcgggcgtcaggctgccgtaatggcaatttgcgcccggaccaggccgcaggggggaaactctgcggcctttttcgttcttactgcgggtaaggcacccagtcgccgccgttcaggcgaacgtacggtttatcctgg

SEQ ID NO: 1855 - DNA, 279 bp, Escherichia coli
ttcacggaagttcgcggtgattggcgtttcgatgatggagccatccggcttcgccatcagaccacgcataccagcaagctgacgaatctgtgccgcagaaccacgcgcaccggagtcggccatcatgtagatgctgttgaaggaaacctgcttctcttcctgaccgtcacggttaatcacggtttcagtttgcaggttatccatcatcgctttggatacacgatcgttcgccgcagcccagatatcgataactttgttgtagcgttcgcccgcagttac

SEQ ID NO: 1856 - DNA, 209 bp, Escherichia coli
tcacctgcttatcagcgcctttcagcacgatttcagtctgagtcggacattcagcagtgatacccgcaggcagctgatggtcaacaggatgagagaaacccagagacaggttaatcacattgcctttaaccgctgcacggtaacctacaccaaccagctgcagcttcttagtgaagccttcggtaacaccgataaccattgagttcagc

SEQ ID NO: 1857 - DNA, 87 bp, Escherichia coli
tgctcataattatcctgaaatcaagctaacgaaatatcgccaccagctccagctgtgtcttaaccgccgggctggtaactgaaaagt

SEQ ID NO: 1858 - DNA, 202 bp, Escherichia coli
aggctggcagatgcgtcttctgcagtcacctgcggtgcagccggagcttcacccgcagcacggcgacgcatacgatcctggtggtacgcgtaaccggtacctgccgggatcagacgacccacgataacgttctctttcaggccgcgcagttcgtcgcgtttgcccgcaacggctgcttcggtcagcacgcgagtggtctcct

SEQ ID NO: 1859 - DNA, 386 bp, Escherichia coli
ggagcggcaagcttttgccattgcaacgaagctgtaggagctgatgtcgtgggcaattttgaagccttcacgggtaacggcgttaacatagtcaccatccagctgatcgccaggtgcaaaaccaatagagtgtacgaaaccgtcaaatttcggccaaactttccccagttcagcgaacatggtgtcgatgctggcatcttctgcaacatcgcactgcagaacgatgtcagaacccaattgagcggcaaattcttctacgcggcctttcagtttgtcgttctggtaggtgaatgccagttcagctccttcgcggtgcatcgcctgagcgataccgtaggcgatggatagtttgctggcaacaccggttaccagaatgcgcttaccgg

SEQ ID NO: 1860 - DNA, 212 bp, Escherichia coli
ccactgttaactttttcatatccgctccgtcgttatggttataaaaacgtgacgaatatacctacattggagtaacaaatgatcctacatagatcacattacatatgataattcaccctttattgatctggattaatttttaagttgcattgagaatcctggttaatgtgatttaaatcaatttttaaatattttcgctacgcaaatattaa

SEQ ID NO: 1861 - DNA, 256 bp, Escherichia coli
gtcatcagcgtcagcggtaaacgggcagaagccgtaggctgacggggaggaaaaggtgtaaaagccataatagagtcctgagttgcttaacggcgtattaatgactaatggtaaaagagctatgaggcaatgcaagtgctttcactacgcgatctgtgccttctgcgaggcgacttccaaaaaaatgaagccattgaattgttgtgaattaatttcgcgatcgcgatggtgtttactgatattcccgtaaaagaag

SEQ ID NO: 1862 - DNA, 437 bp, Escherichia coli
aatggcaggatgtgcgctttagccatcaacgcaatgccgcttaacagtaacagcgtatcgacaaccggcggcacaatgcgcgtccagcgagcaaatgcctgtggatgcttctgataacgtagccagaaacgtaaggttaatagcccaacagaaagcgcgatactaataagatgaacactaagcagtgtagaaaaacttgtcattgataatagcggccgagcgttacgcgctcgttatcaccatagtcacggcaggtttcgacgtcatgataccccgcgaggataaatgcttgtcgcaccgcttcgccctgctgccagccatgttccagaagcagaaagccgccggataccagcgcgttacgcgactgttcgatgatatgcacgatgtctgccattccactgtctgccgcaaccagcgcagtgagcggctcaaagcgg

SEQ ID NO: 1863 - DNA, 366 bp, Escherichia coli
tcagcgatacccgctgcagccaggatggctttagaacgggtcttgccgacgccataaatcgaagttaatgcgattacggcatgcttatgatcaggaatgttaatgcctgctatacgggccactatgcactcctactatttaatatgtacgttccatgctgaaaagcccgttttcaggatactcaaatggaaacgcacagacatacaaaagattggctggctaatctagccagctcaacccaactttgcaagaaaaatatgcgaaaaaatcagccttggcgctgtttatgcttcggctcggcactgcaaatcacacggatgacaccatcacgcttaacgattttgcagttacggcataatttcttga

SEQ ID NO: 1864 - DNA, 338 bp, Escherichia coli
aagaactcccacatgcgttcgccacgcagagttactttacagccgatcggatagccctgacggattttgaagcctgcaacagatttgcgtgctttggtgatcagcggtttttgaccggagattgctgccaggtctgctgctgcgttatccagcagttttttgtcagcgatcgcttcaccaacacccatgttcagggtgatcttctcgacccgagggacttgcatgacagaattgtagttaaactcagtcatgagttttttaactacttcgtctttgtagtaatcatgcagtttcgccatcgtactactccaaattacttgatagtttcgctgttagac

SEQ ID NO: 1865 - DNA, 257 bp, Escherichia coli
cagttgcaccacgtacgttctggtcagatttacgagcgtcgatgccgaggttaacagctacgtccacgctttctacgaatttagcagtcgccagctctttcagcagtgcgatagcttcgttgatgtcgtactgtttggttgcatcaactttctcgcggataacacgcatgcgcttggtcagtttagccatttcttagtcctccactaccaggcccatggaacgtgcagtaccttcgatggagcgagtcatcgcttca

SEQ ID NO: 1866 - DNA, 185 bp, Escherichia coli
atttgttcaggaacacgatgatgtacggaacgcctacctgacgacccagcaggatgtgctcacgagtctgcggcatcgggccgtcagtcgcagcaactaccaggatcgcgccgtccatctgagcagcaccggtgatcatgtttttaacatagtcggcgtgccccgggcagtctacgtgtgcgtag

SEQ ID NO: 1867 - DNA, 159 bp, Escherichia coli
ttaaaactattaatgacacgcttaagtgaattttctttatcatagcctagtgcacgcaatgagttgaatatgacgcattttatttgtagtttattattttttttatttactattttctgtagcgaaactaatatccagtgtccgccagtatttatgggg

SEQ ID NO: 1868 - DNA, 659 bp, Escherichia coli
  misc_feature (527)..(527): n=g, a, t or c
  misc_feature (634)..(634): n=g, a, t or c
agagcattacgacgaaccggacggacttcaactggtacctgataagtagaaccaccaacgcggcgagacttaacttctacagtcgggcgcacgttttcgagagctacttcgaatgcttccagttcagatttaccagagcgctgagccagggtctccagcgcgctgtatacgatagattcagcagtagattttttaccatctaccatcaggatatttacaaatttagccagcagttctgatccgaacttcggatccggcagaattttacgctgaccaatgacgcgacgacgtggcatggaaatactccgttgttaattcaggattgtccaaaactctacgagtttagtttgacatttaagttaaaacgtttggccttacttaacggagaaccattaagccttaggacgcttcacgccatacttggaacgagcctgcttacggtctttaacgccggagcagtcaagcgcaccacgtacggtgtggtaacgaacacccgggaggtctttaacacgaccgccacggatcangatcacggagtgctcctgcaggttgtgaccttcaccaccgatgtaggaagtcacttcgaaaccgttagtcagacgaacacggcatactttacgcagcgcggagttcnggttttttaggagtggtagtatata

SEQ ID NO: 1869 - DNA, 167 bp, Escherichia coli
tgcaggcgattacgcgctgtcatacgcatgtgatggtcacacttcggacagacctcaagattacgttccagctcagcgcggtataaaacctgaccgcagctatcacacttagtccacaccccttcaggaatgctcgccttgcgggtgggagtaatgttgcttttaat

SEQ ID NO: 1870 - DNA, 221 bp, Escherichia coli; identical to SEQ ID NO: 1731

SEQ ID NO: 1871 - DNA, 322 bp, Escherichia coli
gtatcaccagagttaaccacaccggagtaaacacggaagaaggtcaggttaccaacaaacgggtcggtagcgattttgaacgccagtgcagagaacggctcgtcatcacttgcgtgacgttcagccggagtgtctttaccgtcgtccaggataccgttgatcgcaggtacgtcaaccggggatggcaggtaatcaattaccgcatccagcatcgcctgaacacctttgttcttgaacgcagaaccacaggttaccaggatgatttcgttgttcagaacgcgctgacgcagagcacctttgatttctgcttcagtcagttctt

SEQ ID NO: 1872 - DNA, 184 bp, Escherichia coli
gcacgttttcgagagctacttcgaatgcttccagttcagatttaccagagcgctgagccagggtctccagcgcgctgtatacgatagattcagcagtagattttttaccatctaccatcaggatatttacaaatttagccagcagttctgatccgaacttcggatccggcagaattttacgctg

SEQ ID NO: 1873 - DNA, 174 bp, Escherichia coli
gactgaaaggaagctgtaagtggcccacggcagaggtccccagtggaacaagctgtaagccagccccaactctttcgcccctgtcgagttcggttctaagccaaacggcggggtggagatgtagtagtagatctcaatcgatccccagaacagtacggcagcagacgtacagga

SEQ ID NO: 1874 - DNA, 383 bp, Escherichia coli
tcttagcctctttggtacgcacgacttcgtcggcgtaacgaacacccttgcctttataaggctcaggacgacggtaggcgcgcagatccgctgcaacctggccgatcacctgcttatcagcgcctttcagcacgatttcagtctgagtcggacattcagcagtgatacccgcaggcagctgatggtcaacaggatgagagaaacccagagacaggttaatcacattgcctttaaccgctgcacggtaacctacaccaaccagctgcagcttcttagtgaagccttcggtaacaccgataaccattgagttcagcagggcacgcgcggtaccagcctgtgcccaaccgtctgcgtaaccatcacgcggaccgaaggtcagggta

SEQ ID NO: 1875 - DNA, 405 bp, Escherichia coli; identical to SEQ ID NO: 1768

SEQ ID NO: 1876 - DNA, 137 bp, Escherichia coli
ttgcgctgtcagttgtacactgttcatcgttttgagttcagatttattaatgtttccaattttgtactgtggatagacaaaatggtcgcattcgtaaatgtctccattactttcaacaaccagattatccttgcagg

SEQ ID NO: 1877 - DNA, 205 bp, Escherichia coli
gcaaatcttcgttatgcgttgggcgaatgtctgcgcgatccagcacctgctggagcacctgtagcgggtcatcagtggtcgttgtgcgtttttcgctttcactaacaacggtttctttaccgaaagtggttaaagtgcaaatcggctcggcgaccacaatatcaaagcggctatacggatgatcggcatagccggagtgtaaaag

SEQ ID NO: 1878 - DNA, 138 bp, Escherichia coli
ctgcacgtcaagctgcgtgaaattatcctgctggcggacggtaaattctgtccctaaagcagtgagctggccctgacgggtcaggacacggaaggggcgttgcagggcatctttcgcggtagtaatggcgatttcacc

SEQ ID NO: 1879 - DNA, 368 bp, Escherichia coli
tcagacgtttgatggactgacgaacggttttccagttagtcagcataccgcccagccagcgatggttcacgaagaactggtcgcagctcagagcagcgtctttcaccgcttcgcttgcagcgcgtttagtaccaacgaaaaggattttacctttgcgagaagcaatcttgttcagttcagccagagcttcgttgaacatcggtacagttttctcaaggttgatgatgtgaactttgttacgcgcaccgaagatgaacggcttcattttcgggttccagtaacgggtctggtgaccgaagtgaacaccagccttgagcatgtcgcgcatggaaacagttgccatgattaaaacctctatataaaagttg

SEQ ID NO: 1880 - DNA, 138 bp, Escherichia coli; identical to SEQ ID NO: 1878

SEQ ID NO: 1881 - DNA, 351 bp, Escherichia coli
ttgtcagcgaattctttggtgttcgcaaaccaggtagagttccatggttttacaatacccaggcgaataccattaggatgtactttctgacccattgctagtctccagagtctcagcgatcggacacaaccacagtgatgtggctggtgcgcttcaggatgcgatctgcacgaccttttgcacgcggcataatgcgcttcatgctcgggccttcgtctacgaaaattttcgtaactttcagatcgtcaatgtcagcgccatcgttgtgttcagcgttagcaatggcagattccagaactttcttgaccagtacagccgctttcttgttggtgtaggtcaaaatatccagag

SEQ ID NO: 1882 - DNA, 702 bp, Escherichia coli
tattaataaaacgtgtcattctgattaagaccttttatcttacccttaagatttcaggaattttggctcatggaagagtcctttttatttaaattttacattccgcgatgtaaatgttccgatttaatattaccctacatttgatgctttttatctcttaaagattcatagatctgttgacaagtcactcctgcgatgtagcgttcgtcagcaatttcagcataaagctgagcttctgctgcaatatctccgagcatgttggtgagcattccttcggcggttttggttgttttgcctctgacggcagcggcaagatctgcggtatgcttcgctgcgtcaaggcgtatggcatatttttttgcttcggcacgcaactggttaacactatcagacagataagcagccctggcagaaatttcagcagatttctgttgcgcatctttaacagcctcatcacgggctatagttcgcccctgttcaattattcgagcagcaaattgagcatttacctcttgtgataatgcggcagcatcacgttccgcccattttttttgccatcctcggtcgctccagacatttccgacgataaatcctgacaacacgagaaaaatcaccatgaatatctgattcactgttctatcccccagcagttaatgcgctctcctggtcacgacgaataacctgaccgtaacagtatttgaa

SEQ ID NO: 1883 - DNA, 229 bp, Escherichia coli
tttattgagctagtcaaaatgcggtgataagagcgggattgtacccaatccacgctcttttttatagagaagatgacgctaaattggccagatattgtcgatgataatttgcaggctgcggttgccgcgaaactcgttgatatcgagcttataagccagttgcacttcgcgcacgccgttatccggccagagggcggtatcgacattaaaagcaataccatccagcagt

SEQ ID NO: 1884 - DNA, 197 bp, Escherichia coli
ggtatttccctggtgtttttgcagctgctcaaggtgagtgagcaacgtttcgtggagttgcggattatggtgtttgatctcttccgcgataatggccgcctcgacctgcatttcatttgtgacgacgcccagcacctgcataaaagaaggtacaccctgggttaatgccatatcgatacgcgttgtacttttgggga

SEQ ID NO: 1885 - DNA, 277 bp, Escherichia coli
gtttagtcgcgttcagtgcgtgggaacggttgttaccggtcaccggacgcttgccagtaacttggcagactcgggacatgtctattctccaaaaatcaaattagctcgagcttcgtatggggtattggcgcctcgtcaggctttacagcccggtcatcgcagttctatgtgaactctcgattgccaggcccaaatgccaaacccgagattctcaaaggtggcgtagtatacgctgactcagcgatgtgctcaagtcccgaacagacaaagatcccga

SEQ ID NO: 1886 - DNA, 221 bp, Escherichia coli
ggccatatcaatgattttctggtgcgtaccgggttgagaagcggtgtaagtgaactgcagttgccatgttttacggcagtgagagcagagatagcgctgatgtccggcggtgcttttgccgttacgcaccaccccgtcagtagctgaacaggagggacagctgatagaaacagaagccactggagcacctcaaaaacaccatcatacactaaatcagtaag

SEQ ID NO: 1887 - DNA, 199 bp, Escherichia coli
cccggacctgttcgctctggtcaggatggaccataaaaacgatttcgtaatgacgcatcgaattgctccttacggattattcagcctcctgtctgggtcagccgaatcccggggaggcaaggaacgtgttaaaggtcggctgaaaaatgacgcgttatagtacttgtatgcctcgctaaactcaagggcagagccgaaa

SEQ ID NO: 1888 - DNA, 364 bp, Escherichia coli
taccttcgtcgccagctttagacgcgatggtaacagtttccagtgcattgattttctcagcgcgagcattagcagctgccagaacttcagccagtttagcttccagttcagcgcgacgagcttcgaagaattcaatgtttttcttggtagctggaacagctttaccctgcggtaccaggaagttacgagcatagcccgctttaacgtttacctgatcacccaggctacccaggtttgctactttatcaagcagaataacttgcattaccttatcctctcaaagtcgtattaatggaccgtgaccgattactgatggcgatcagtgtacggcagcagggacaggtagcgagcgcgtttgatagcg

SEQ ID NO: 1889 - DNA, 269 bp, Escherichia coli
ttagcaaattcatcgttgcaggtgataatggaggggttatttcatccacagatccttttaacatcaatagctgttctttcggaagtgctggaattattgcaacagattgattaataacatgatcatttgaccatttcaggaggctataatctacattcataaaatccatcagagaatagtgtttaatattctctttgctttcgctcataattcttattttatcgttagttacattaggatcataaaccgaaaccacgtaatgggtacat

SEQ ID NO: 1890 - DNA, 161 bp, Escherichia coli; identical to SEQ ID NO: 1692

SEQ ID NO: 1891 - DNA, 213 bp, Escherichia coli
catcgaattgctccttacggattattcagcctcctgtctgggtcagccgaatcccggggaggcaaggaacgtgttaaaggtcggctgaaaaatgacgcgttatagtacttgtatgcctcgctaaactcaagggcagagccgaaataaatctcccctttcgcaattaacctctaacacgctgatttgaagttcatcacacttcatcatggtgtt

SEQ ID NO: 1892 - DNA, 147 bp, Escherichia coli
gatctggcgttacagacgccagggcagacaaactggtagcgctaagcagtaacgccagcgtcatagcacccaatttggcagagcaaagtaaatcagacatggatcattccttaatcacgttattggttagctgaaacagaaacaggg

SEQ ID NO: 1893 - DNA, 128 bp, Escherichia coli
ggttagattcttcgtcagtccatacacggaaagacgggtcttctttagccagacggcccagagccagacccattttttcctggtcagctttggttttcggttcaactgcgatggagattaccggctca

SEQ ID NO: 1894 - DNA, 243 bp, Escherichia coli
tggttgccctttacccctaaaactgtcacggtgacctcatccccaatcatgagggtctcaccaactcgacgagtcagaatcagcattctttgctccttgaaagattaaaagagtcgggtctctctgtatcccggcattatccatcatataacgccaaaaagtaagcaatgacaaacacattacatctaagcagtcatggcattacattctgttaaacctaagtttagccgatatacacaactt

SEQ ID NO: 1895 - DNA, 320 bp, Escherichia coli
tcggacaggatgcttttcagcgcgccgcggtacatcttcttgttaactttttgactgtggtcctgcggacgagcagcaaaggtcacgccaccagaacgccagatcgggctcttgatagaaccagaacgcgcacggccggtgcctttctggcgccacggttttttaccggaaccagttacttcagcacgagtcttctgagcacgagtaccctgacgagcaccagctgcataagcaacaacaacctggtgaaccagcgcttcgttgaaatcacgaccgaaggtagtttcggaaacagtcagcgcgctctgcgcgtctttcaa

SEQ ID NO: 1896 - DNA, 342 bp, Escherichia coli
ttttaggatgctgcaataaaatatcttccacttcacggctgctaatattttcgccgccgcggacaataatatcttttttgcgtccggtaatttttatatagccagcctcatccatacggcagagatcgccgctgtaataccagccttcttcatccagggcacgggcggttaattcaggttcatcaaaataccccataaacacattggggccacgcgaggcttcttcaccttcgcaacctggcggtaaggtcttgcgtgcgtcatcgaccactttaatctctacacctgcggcagcgtaaccatcggtgtgcataaagcgcgacaaaggatcatcgagattca

SEQ ID NO: 1897 - DNA, 173 bp, Escherichia coli
gcagaataacttgcattaccttatcctctcaaagtcgtattaatggaccgtgaccgattactgatggcgatcagtgtacggcagcagggacaggtagcgagcgcgtttgatagcgcgagccagctgacgctggtattttgcacgggtaccaggtgatacggcttgggacaatc

SEQ ID NO: 1898 - DNA, 172 bp, Escherichia coli
gcagaataacttgcattaccttatcctctcaaagtcgtattaatggaccgtgaccgattactgatggcgatcagtgtacggcagcagggacaggtagcgagcgcgtttgatagcgcgagccagctgacgctggtattttgcacgggtaccggtgatacggcttgggacaatc

SEQ ID NO: 1899 - DNA, 344 bp, Escherichia coli
tggagtgtattgcataggtgcctacttgtttctcattaactggataactacctcatggggcgtttgacagcgacatgagaccagatgatttgccaacaaaggagagattaaataatcaacaacacaatgataatgagaatggtttctatcagcaatacttaaaatgtgtgcgaatgttggtttgaataataatctgactcaatgttgatgtggctcaaggttatatcgcagcgaaaatataattcgaatagtgaattacccggactggctaatgtttaattaaggtttcagttgttaatgaaatgataaatattgccggaatatattatgagtttggctgtgga

SEQ ID NO: 1900 - DNA, 227 bp, Escherichia coli
acagaccacggccagcttctacgccagctttagcgaagtggccagcttcaggcttggtcacacggttagcttttttagcaccggtggtcacctgaatagcacggtagccatcgttagccaggtctttaacctgagtaacgcggtttgcttcaacttcgattacggttactgggatagaaacgccgtcttctgtgaagatacgggtcatacccacttttttaccgact

SEQ ID NO: 1901 - DNA, 342 bp, Escherichia coli
aaccagacgcaagtgagtacggatttcgtactgatcgcgcgcgtctttgttgacgtgcggggagatcagaacagtgaagcgctctttgcgtgtcggcagcgggatcggaccacggacctgcgcaccagtgcgcttggcagtctcgacgatttccgcggttgcttgatcgatcagacgatgatcaaacgctttcaggcggatacggattctttggttctgcatgagaccagagctccaattattttataaacgaaaatgattactcctcagacccattacgattgatgggagagtgtaaccgttcttacgtagctccccgattgggagcattgttaggtagcc

SEQ ID NO: 1902 - DNA, 215 bp, Escherichia coli
ttcggcggacgacaaccgttatgagggatcggagtcacatcagtaatgttagtgatgcggaaacctgcggcgttcagagcacgaatagtagattcgcggcctggacccggacctttaaccataacttccagattcttgatgccgtattctttcacggcgtcagcgcaacgctctgctgcaacctgagctgcaaacggagtggatttgcgagaacc

SEQ ID NO: 1903 - DNA, 440 bp, Escherichia coli
cgccgagtgtagcgtcatcaactgcaccgcatcctgccaggtatccgcctgcccttcacctgcttccagtgccgcatgggagaggaacgcctgcagcggcattaaatcttcgtcttcttcgttgtagctgaactggcgcgttgccgtcaccagttcctctaagttttcgatacgcgtctgacctttttcgcccttctcctgctcatacatggtacgcaggccggagtctttaattacccggtcagtctgtacatgcagcggcatatcggcagtttcctgcgctaaggcgtcgattaattccataaatcgctgcaaggcgctggcagctcgcccggcgagggctttttcctgcaacagctcacgacatgcctgccagagtgttaactggcgatcgcgcgatgtctgacgtaccacgtccagcgtccggtcaccaatacccc

SEQ ID NO: 1904 - DNA, 342 bp, Escherichia coli
aatgggaatggttatcattagcgaaaattgattgtgccatccaatgattatctatggcaatgatttactgatgaaatttatttaagtatcatttaacaatatgaaatataaaggaatatttcattttcagtggttatggttatgctattgataatcaaggatattgctaatgccctgatgcataccacgtaagccaggattttcgcaagggaagatgatgatgacgaaacacccgacaggaatttatgtcgggtgccttgttaaggtcataagaaggaggctaagaatggagttaaaagagagcgttattaattattctccatttgttttgcaacatccata

SEQ ID NO: 1905 - DNA, 116 bp, Escherichia coli
aacgcgcaggcggttgcaagtggcgcagaagtctttttcatacggcatgataaggccaatctctccggcgtaatctggatggcaaaagacttgcgcgggaccgtcgctgcgttgac

SEQ ID NO: 1906 - DNA, 267 bp, Escherichia coli
ccataactttcggcagctcatctttacgtttatagatgcgcagacctgggcggctgacacgctgaatgctttctacaacagctttgccctggaaatacttcagagtaagttccagttcaggcttggtgtcgccttcaactttaaaatcttcaataaaaccttcttccttcagcacgttggcgattgccactttcagcttggaggaaggcatggtgaccgcagctttgttcgcggcctgaccgttacggatacgggtcagcatatccg

SEQ ID NO: 1907 - DNA, 214 bp, Escherichia coli
tgtgtatagtctaaagcgacagacaaaaataagatgaatgagttttctataaacttatacttaataattagaagttacatatcatcagctgtgtatcgcaacacgatttccagtgtttttctaatcacatcagctttgagaatatcacttgttgtttccaaggagtgtatcagacttaagataatatttttattattaacattatcgcctgaaa

SEQ ID NO: 1908 - DNA, 239 bp, Escherichia coli
aacggttttctcggttggctcaacgatgtcaaccagacgcaagtgagtacggatttcgtactgatcgcgcgcgtctttgttgacgtgcggggagatcagaacagtgaagcgctctttgcgtgtcggcagcgggatcggaccacggacctgcgcaccagtgcgcttggcagtctcgacgatttccgcggttgcttgatcgatcagacgatgatcaaacgctttcaggcggatacggattc

SEQ ID NO: 1909 - DNA, 322 bp, Escherichia coli
ttcttaaccaggttgataccttcaacaatgaccttgccggaagacaggacattcttaactttaccgcgtttacctttatctttaccggttaacacagataacttcagtcatcacagacgggattttcgctgccatgattctgcttccttatagtacttctggtgccagagagataattttcatgaacttctcactacgaagctcacgagttaccggcccaaaaatacgcgtaccgataggctgctcgctgttgttgttcagaagaacacaagcattaccatcgaagcgaatgacagaaccgtccgggcgacgaacacccttc

SEQ ID NO: 1910 - DNA, 199 bp, Escherichia coli
acggtttcagtttgcaggttatccatcatcgctttggatacacgatcgttcgccgcagcccagatatcgataactttgttgtagcgttcgcccgcagttaccagaccagactggaactgctcctgaatttcagcaacttctgcttctgcctcggagatgatttctgtgtttcttctccgggatgaccatgtcatcgata

SEQ ID NO: 1911 - DNA, 133 bp, Escherichia coli
cggcagcgatttcaggaaccagatgtgcgcagtcggggaagccagttcgatgtggcccatacgctcacggcgtactttagtctgggtcacttcaacgccgcacttctcacagatgacgccacggtgtttcagg

SEQ ID NO: 1912 - DNA, 160 bp, Escherichia coli
atagttaaatctccagtttttgacaagggcacgaagtctactcgcaacgcgacggcgagacaaattttacgcaggaatcaaacagcggtgggcagtgactaaaaaaagcacagatctgatggtttagtaattaaattaatcatcttcagtgataatttag

SEQ ID NO: 1913 - DNA, 296 bp, Escherichia coli
gccagctttagcgaagtggccagcttcaggcttggtcacacggttagcttttttagcaccggtggtcacctgaatagcacggtagccatcgttagccaggtctttaacctgagtaacgcggtttgcttaaacgttctgattactggttacctgggatagaaacgccgtcttctgtgaagataccgggtcatacccacttttttaccgactaaaccaatcattgtttcaacctctcaatcgctcaatgacctgattaacccaggctgatctgcacgtctacaccggcagccagatcc

SEQ ID NO: 1914 - DNA, 102 bp, Escherichia coli
gatggcggactcagatttcagaccagcgtcaaccagtactacgtctttgtcgatagcaacaacaacgccacgaacgatagaacccgggcgggtttcgatttc

SEQ ID NO: 1915 - DNA, 69 bp, Escherichia coli
ccaacgatttcaacttcttcaccaactttgatgataccgcgttctacacgaccggtaacaacggtacca

SEQ ID NO: 1916 - DNA, 313 bp, Escherichia coli
ataaattcatcatccactttcgcttcaatatcgaccagcgtttgatcgatacccactacccaggcagctgctggtttcgttttctggctggaattgctgaagcagcaggatcgcgtgcgtttacggggaagtaatgtttggatttactgtttaccgggaaatttcatggttgtttttacgggtggttaacctgagcggccgaatgttaacacaatctgacgggagcgcgcgagacgcagccagtttcaatatcagcaggcagggatcgcattttcatggcagtggttgcttacaatgacgtaatttgaaagga

SEQ ID NO: 1917 - DNA, 433 bp, Escherichia coli
gcagcatagggatgttgaagccaggcagatagttggtgaatgcgcgaattttcagcggctttgtccagcttgcgtgccttcaacaatccacgcggtaggatcggcaatcgccacaatcagctgaagtttgacatccggcaacgccttagcgaaaagggccgtcatccatatcttctgtgctggcacttgtcgatggtgacaaaatccagcgcggtcagatcttcacgaaccagaccttcatctagcatttcggtagcgacgccgtctggtgcttctttttccagattatggcgtgcaagggtaacccaccacggtacaaagtgatcgtcaccaaaagtgatgtattgtgtcagttctgcatagaaagaacgatcgcctttcagcggatgacggcgcatttcggcaaccgcccagtcgccttctttaaactcgt

SEQ ID NO: 1918 - DNA, 275 bp, Escherichia coli
agcgatagtttccaggcagccaaagttgccgcagtggcagcagttcacccagcggttcgacctgaatatggccaatttcaccgacgttgccgttgcaggccaataaaaatgcagcccgttagagataatcccggccccggttccgcagatggacacgcaccagaatggagtcttcgcaatcctgacttgcaccgaagtagtgctccgccagcgccagactacggatatcgtgaccaacgaaacaggtcactttaaaacgttcttccagagcttct

SEQ ID NO: 1919 - DNA, 268 bp, Escherichia coli
ccgataacgatacccgggctgagcagtgtgaatggttacactggatgctcttatccggacgctcgataacgatacgagatacggacgctttagccagttccttagtcaggtactgacgtactttaaaatcgctgtccaggttgtcagctgaattctttggtgttcgcaaaccaggtagagttccatggttttacaatacccaggcgaataccattaggatgtactttctgacccattgctagtctccagagtctcagcgatcggacac

SEQ ID NO: 1920 - DNA, 219 bp, Escherichia coli
ttcttgcggtttcgtaggccggataaggcggtcacgccgcatccggcatgaacaacgcgcactttgttagcaatctcggggcaactaaatgttgccccctttcgtttttaccctaccgctggcgtcgggtcatcgcctttgtagtcgcggttttacttccgtcacctcatcgcccttctcgttgtgcagatgcaccttcaagctggttaaaggcaatgt

SEQ ID NO: 1921 - DNA, 247 bp, Escherichia coli
ctgaacaagcggaagtaacgtgtcatgcgggcgtcaggctgccgtaatggcaatttgcgcccggaccaggccgcaggggggaaactctgcggcctttttcgttcttactgcgggtgaggcacccagtcaccgccgttcaggcgaacgtactggtttatcctggtattgaataactacttgcatttgagttctcggagaccggtgctgtttgtggcaacccactggtgagttttttccagtcaacatt

SEQ ID NO: 1922 - DNA, 153 bp, Escherichia coli
ggcaggtggcttaagcgggagaaataaaattcagcaggcgtcctgacgccagagtaaagtaatcacagcgggagataacgtcttcatcagtcctgactctactggctatgtgccgggtagcatgaaataattagcgccaacaatttagcagga

SEQ ID NO: 1923 - DNA, 343 bp, Escherichia coli
taaggtacatccagtaacttgtggacgtttaccaaaatccttacgaatacggttttttctcggcataggagtaaaccatagggttcctcagctcgctgacaagtcgacccatctgtccattgagcggacagtttgtgcaacactattttgttgacctggaaaatggaacactttccgcaatgcctgttgctatcacgcttaaaccatttcattgcgatttacacagaacggacgtcctgtcgcagtatattaagtcgtcgatagaaacaagcattgaaaggcacagcagtagtcaaacagtgtgaaacgctactggcgccttacagcgcaaaaaggctggtga

SEQ ID NO: 1924 - DNA, 341 bp, Escherichia coli
taaggtacatccagaacttgtggacgtttaccaaaatccttacgaatacggttttttctcggcataggagtaaaccatagggttcctcagctcgctgacaagtcgacccatctgtccattgagcggacagtttgtgcaacactattttgttgaccggaaaatggaacactttccgcaatgcctgttgctatcacgcttaaaccatttcattgcgatttacacagaacggacgtcctgtctcagtatattaagtcgtcgatagaaacaagcattgaaaggcacagcagtagtcaaacagtgtgaaacgctactggcgccttacagcgcaaaaaggctggtga

SEQ ID NO: 1925 - DNA, 201 bp, Escherichia coli
tttcttcgcacggcgggctttcgcttcaccgatggacatacgacggttgatatctttaacctgctcgatggtcaggccggtttcttcttcaatctgctgcagtttttgcagggcgccgatgcacgttcttcagagacatctgtgcagtttttccgaccaccggcttgttcatcgcaattgccgcgttgaaccaggtatcgc

SEQ ID NO: 1926 - DNA, 416 bp, Escherichia coli
cgataatgccaatcaccgccattagcaccagcaacatttttccgccgacgttcttcacctgaatcagcggtgaaaccagataaatcaccgcaatcacgaagaaaaaccacaagtggtaaaacacgtggcttttgcagcaggtttttcagcgctaactccatattgatggaggtaaacagcgcaatgtagagcagtgcgattgcgctataaaaaatcagacataagccgatacgcaagaaatggcgcggctgggcgctgcgttcgccaaaaaagagatagccggaaatcatgaaaaatatcggcacgctgacacgagaggcagaattcagaacattggcgatatcccatgtgacggggctaacactatgagcattggtcacataccaggtagtggtgtgaatcatcaccaccattaa

SEQ ID NO: 1927 - DNA, 136 bp, Escherichia coli
tcggtttgcacagcttcacgccacggaacggattacgcggtgcatcaggcacagcgtttttcggcggtgtagaagtatcaacctgcggttcattcagcaagctgctggctttcaccagcgtaatgtctggcggcag

SEQ ID NO: 1928 - DNA, 104 bp, Escherichia coli
ttttaagggttaattgttacattgaaatggctagttattccccggggcgattttcacctcggggaaattttagttggcgttcttaaaatgtgtacttaagacca

SEQ ID NO: 1929 - DNA, 101 bp, Escherichia coli
gctatcagccaggatcttacggtcgatttcaacagaggcttttttcaggccattgatgaatttgctgtaagaaataccgttctgacgtgctgctgcgttga

SEQ ID NO: 1930 - DNA, 340 bp, Escherichia coli
ggtttgccagatacgtcatagatctaaatgccactgaataacagtttagttgccgttcttcccgcctgtcaggggcgggtttttttatatctcagataaatgcaaacgcatcgccaaacaggcgatcttcccgcgcattacgctcactgcaaaacagatcgcgggcaattttcgccatctcaaaacgtccggcaatatagatatcatgctctgccagcgtaccgtgatcctgcaataccgccgttaacacggtgccagtacgcccacgccagcccgcttccggttgttcaaccaccggcaccacttgcagaccaggatgcttcaacgaaagcgcctcaag

SEQ ID NO: 1931 - DNA, 64 bp, Escherichia coli
gctttaccgtaaccaaaaccaacgcgaccgttaccatcgccaactacagtcagagctgtgaagg

SEQ ID NO: 1932 - DNA, 278 bp, Escherichia coli
ggcgacgagccagttcagtagccagacggcccagagttttaccggtcgcgtcaacaacataccagtcgcgttttacggtttctggtttagctgtaaaagttttcattaaaagcttacccaataaatagttacacgttggtgaacacccaaaccgtcttcaattgttgaggttcacacgacaaagtccggcaaacctaccccttcgaatagcctatgccagcacacaaaaagttttgggaaaaaaactttcttgtaacgtggggtcgcaggattataga

SEQ ID NO: 1933 - DNA, 343 bp, Escherichia coli
cgaacgatcggagtgtcgtcgcccgggaagtcgtactgagacagaagttcacgaacttccatttcaaccagttccagcagctcttcgtcatcaaccatgtcgcatttgttcaggaacacgatgatgtacaggaaccgcctacctgacgacccagcaggatgtgctcacgagtctgcggcatcgggccgtcagtcgcagcaactaccaggatcgcgccgtccatctgagcagcaccggtgatcatgtttttaacatagtcggcgtgccccgggcagtctacgtgtgcgtagtgacgggtcggggtgtcgtattcaacgtgagaagtgttgatggtgataccacg

SEQ ID NO: 1934 - DNA, 122 bp, Escherichia coli
tggccaggagcttgttcaattttacacttggtatcgatcgcgcgaacgccagacttaaggaataagtcggtgccctcacgacggctcagcttgagcttaggacccaaatatcttgccatttt

SEQ ID NO: 1935 - DNA, 92 bp, Escherichia coli
cggtacagccacggcacgccgcatttccgggcaatcacatctccggcgcggccatacgcctcaccaaagttgcgattaccagaagcaataac

SEQ ID NO: 1936 - DNA, 218 bp, Escherichia coli
caacagatgcaccagaacgcgctgcataggcgaagccggtgtacatgatctggtccgcaaaaataacggtcggtttcagaccgagaatgcggtagcaggtgttcagcattttggagattgcttttttacccagcgcctggttgacgatggagtaaggcagacctttcggtacaatcatccacagaatggcacggccaacagtcgtgtctttcaggctg

SEQ ID NO: 1937 - DNA, 234 bp, Escherichia coli
atggttttttattggcggctatgctgccccgggagcataaagatgaaaaaaacaacgattattatgatgggtgtggcgattattgtcgtactcggcactgagctgggatggtggtaacgtcacctctaaaaaatagcaaaggctgcctgtgtgcagcctttgtgcaatttaagcgttaacttttaatcttcctgtagataaatagcacgacaatcgcaccaataacggcaacca

SEQ ID NO: 1938 - DNA, 160 bp, Escherichia coli
taaaacgcaaaacgattgatgcggatgatgtcaggacacggggcttgtagtgaaagcgcattacggtaacgtcgttctacttcaggatcgagagtgtcaccttctaccgccgccatcatcaccagcggcaggtgcataactgtccagttcaaataacggg

SEQ ID NO: 1939 - DNA, 239 bp, Escherichia coli
cttttattgagctagtcaaaatgcggtgataagagcgggattgtacccaatccacgctcttttttatagagaagatgacgctaaattggccagatattgtcgatgataatttgcaggctgcggttgccgcgaaactcgttgatatcgagcttataagccagttgcacttcgcgcacgccgttatccggccagagggcggtatcgacattaaaagcaataccatccagcagtggaccgcc

SEQ ID NO: 1940 - DNA, 327 bp, Escherichia coli
ctttgtgcattttacggaattttgtacgctttggttgtaacatcagcgacgctccttatttacggcctttacgctgctgctttttaggctgagcagccggtttttccggttgttcaacagcagccataccacccaggatctcgcctttgaagatccacactttaacgccgattacaccgtaagtggtgtgcgcttcagaggtgttgtagtcgatgtcagcacgcagagtgtgcagcggtacgcgaccttcgcggtaccattcggtacgtgcgatttccgcgccgcccagacggccgctaacttcaactttaatacctttagcgccca

SEQ ID NO: 1941 - DNA, 206 bp, Escherichia coli
cccgttgtggctgctggaagacgaatgtgaattgactgggagttaacaagcgtaactccctgggaaatgcgagcttaaccactcaggggttagctttattacttagaaacggtcagacgagcgcggcctttagcactgacgacgtgccagaacctgacgaccatttttagtagccatacgagcacggaagccgtgagaacggttgc

SEQ ID NO: 1942 - DNA, 262 bp, Escherichia coli
tggcatgtagcgtacttccgggtcctgacccagattaccaacgagaataaccttgtttacgcctctgctggccatgttcgtgtctcctgaaaaaaatcgttctgaataagtgtaaacgcgcgattgtaccattaccaatagcgcttttactatgttgtgacctcggttccgggaaacaaacctggccagacattgttacacaacactccgggtaatgcattccaatactgtatattcattcaggtcaatttgtgtcataatt

SEQ ID NO: 1943 - DNA, 495 bp, Escherichia coli
tgaggccttactgtttcttcttaggagcgagcaccatgatcatctggcggccttcgatcttcgttgggaaggattcgaccactgccagttcttgcaaatcgtctttcacgcgattaagcacttccataccgatttgctggtgcgccatctcacgaccgcggaaacgcagcgtgattttggctttatcaccctcttcgagaaagcgaatcaggctgcggagttttacctgatagtcgccttcatctgtaccaggacggaatttaatttccttaacctggataactttttgctttttcttctgttccttagaagacttgctcttttcatagaggaatttgccgtaatccattatacgacaaaccggcggctcggcgttagggctgatctcgactaagtctactccggcttcttctgctttctccagagcttctctcagactcacaataccaagctgctcgccttccagacctgttaagcgaacttcctgggcgcgaa

SEQ ID NO: 1944 - DNA, 246 bp, Escherichia coli
acttcagccagtttagcttccagttcagcgcgacgagcttcgaagaattcaatgtttttcttggtagctggaacagctttaccctgcggtaccaggaagttacgagcatagcccgctttaacgtttacctgatcacccaggctacccaggtttgctactttatcaagcagaataacttgcattaccttatcctctcaaagtcgtattaatggaccgtgaccgattactgatggcgatcagtgtacg

SEQ ID NO: 1945 - DNA, 299 bp, Escherichia coli
ggtacagcaccggatcgcgcatcacgataaacggtgaagccatgtcgattttcgcacgcaggcaggctttaccttcttcaaaaccaccggcacgcattttttcgaacagcgccaggttctcttcaacgctgcggtcgcaggtacgggctgtttttacccggttgcagtcagggtgccgcggtattcgcggatctgttccggcgtcagttcatcaacgtacgccaggcctttattgatcagttcgatcgcataggcgtggagctgatcaaaataatcggaggagtaacggacgttaccag

SEQ ID NO: 1946 - DNA, 479 bp, Escherichia coli
gatcctcatcagccgcattgcggccaacttctggattagcgccagcgcccagtcctttggtgataccgctaccgatttgaatcgtctgtccaaccgctgttttacgcagcgcttgtgcatcggtatttaccgcgaagaattcaacaccttcaatgcgctcgcgcaccatgtgttcaacagcattaccgccgccgccgccgacgccgatgactttaatcaccgcgtcattggtaagttccattggttcaaacatagtttctctccgatttgtgcctgtcgcctgaggccgtaatcatcgtcggcctcataaaaattaaaactcttttcgcagccaactattgagtcgcttgatccacgagccaactgatgctgtaacacgtttttctacttcagcttcaccgttaagatgtgactctttcccatagtgaagcaatcccaccgccgtcgaataatacggctcctgagcataatccgttaaa

SEQ ID NO: 1947 - DNA, 312 bp, Escherichia coli
ctggtcagatttacgagcgtcgatgccgaggttaacagctacgtccacgctttctacgaatttagcagtcgccagctctttcagcagtgcgatagcttcgttgatgtcgtactgtttggttgcatcaactttctcgcggataacacgcatgcgcttggtcagtttagccatttcttagtcctccactaccaggcccatggaacgtgcagtaccttcgatggagcgagtcatcgcttcaatgtcggcaccagtcatgtcggcagctttggtctgcgcgatttcctgcagctgagcgcgggaaattttacccac

SEQ ID NO: 1948 - DNA, 312 bp, Escherichia coli
taattgtaacttagtttgtaaaggtcatatgcttgttgatatttctttttgggctgacatactgatgcaaaatcttttagatactcatgattttcgaacgcataaatgcacaagaatttataataaatttctgcgtccgttatattacccttttcatggtagtcgaatgcatatgcatatattctatcaaggatatcaggagttaaaccatgtagtaatgccagattttctcctttcgataatgcgtgttttagttgatttgcccattcatcactattattgaatatttcaattgtttctgtgctcataata

SEQ ID NO: 1949 - DNA, 135 bp, Escherichia coli
ataaagaccatgtctgcaccttccagcgccgcacgcaatgcatcgcgatcctcatcagccgcattgcggccaacttctggattagcgccagcgcccagtcctttggtgataccgctaccgatttgaatcgtctgt

SEQ ID NO: 1950 - DNA, 115 bp, Escherichia coli
gttttgtgccgggaagccgaagcgttgcagatattctgcagcgtagtcgacgcccatcgcccgcattgcgcgtaccatcaccacgtttttcgactgacccagcccctgacgtaag

SEQ ID NO: 1951 - DNA, 666 bp, Escherichia coli
ctgctatacgggccactatgcactcctactatttaatatgtacgttccatgctgaaaagcccgttttcaggatactcaaatggaaacgcacagacatacaaaagattggctggctaatctagccagctcaacccaactttgcaagaaaaatatgcgaaaaaatcagccttggcgctgtttatgcttcggctcggcactgcaaatcacacggatgacaccatcacgcttaacgattttgcagttacggcataatttcttgacggaagcacgaactttcatttttactctccgtaacttctcgggcgaccaattatcggccgtagcctttcaggttcgccttcttcaatgcagactcatactgactggacatcatcagagtttgcacttgagccataaagtccataatcacgacaacaacgataagcagtgaggtcccaccgaagtagaacggtactttcattgcatcacgcatgaactccgggatcaggcagataaaggtaatatacagcgcaccaaccagggtcaggcgggtcattactttatcgatatacttcgccgtttgctctcccggacgaattcctggtacaaatgcaccggacttcttcaggttatctgctgtttcacgcgggttgaaaaccaacgccgtgtagaagaaacagaagaaga

SEQ ID NO: 1952 - DNA, 275 bp, Escherichia coli; identical to SEQ ID NO: 1789

SEQ ID NO: 1953 - DNA, 290 bp, Escherichia coli
gcttcacgccatacttggaacgagcctgcttacggtctttaacgccggagcagtcaagcgcaccacgtacggtgtggtaacgaacacccgggaggtctttaacacgaccgccacggatcaggatcacggagtgctcctgcaggttgtgaccttcaccaccgatgtaggaagtcacttcgaaaccgttagtcagacgaacacggcatactttacgcagcgcggagttcggttttttaggagtggtagtatatacacgagtacatacgccacgtttttgcgggcatgcttcc

SEQ ID NO: 1954 - DNA, 176 bp, Escherichia coli
cgcagaaaacgaccttcttcaaaatccagcacgcgatccaccagtaagaacgggaaacggtgcggcagaagttctaaaatctcttcaatctgcagagtatgagtgttagtagtcaagatactcttcctgtcaaaatataagaaacgacaataataacacggcctgccgcaatcgta

SEQ ID NO: 1955 - DNA, 191 bp, Escherichia coli
tctcacgggacagcagagtttcaccgaagccgtcttctactgcgtccagagcaacgtcaacttcgtcacctacctggatttccagctcgccctgggcgtttttgaactgctcagccgggatggcggactcagatttcagaccagcgtcaaccagtactacgtctttgtcgatagcaacaacaacgccacga

SEQ ID NO: 1956 - DNA, 359 bp, Escherichia coli
gccttcggtaacaccgataaccattgagttcagcagggcacgcgcggtaccagcctgtgcccaaccgtctgcgtaaccatcacgcggaccgaaggtcagggtattatctgcatgtttaacttcaacagcatcgttgagagtacgagtcagctcgccgtttttacctttgatcgtaataacctgaccgttgatttttacgtcaacgccggcaggaacaacgaccggtgctttagcaacacgagacattttttcctccgattaggctacgtagcagataatttcgccaccaagaccagcctggcgcgctgcacgatcagtcataacacctttagaggtagaaacaactgcgatacccagac

SEQ ID NO: 1957 - DNA, 198 bp, Escherichia coli
gtgcaacgcttcttcatactcttcgcgccatgcgggcatctcttgtagtgaacgacggtaaacgatcgttgctttttctacgcctggaacgcgtaacgccgcacgagcgcagtccattgcggtgttaccctgccccgacaacgaccacatgtttgcccagcttgagcgctgtacccttgttgtattcacgcaggaagg

SEQ ID NO: 1958 - DNA, 125 bp, Escherichia coli; identical to SEQ ID NO: 1838

SEQ ID NO: 1959 - DNA, 275 bp, Escherichia coli
tttttacaactgtttgagaagagaaaagaaaaccgccgatcctgtccaccgcattactgcaaggtagtggacaagaccggcggtcttaagttttttggctgaaagattattcagcagttgcaggcattttaccttttgccgctggacgttctgtcagacgcttctcaaaattagcattaaattgctttttctgttccggcgtcaggatgttgtaaattttgttctgggtttccatgtgcgccagcatgttagctttgcgctgttcttccattttt

SEQ ID NO: 1960 - DNA, 64 bp, Escherichia coli
agcattatcggaatcaacaacagcaatactgcaccaaacaggctagtcattttccagaacaggg

SEQ ID NO: 1961 - DNA, 70 bp, Escherichia coli
gggccgtcagtcgcagcaactaccaggatcgcgccgtccatctgcgcagcaccggtgatcatgtttttaa

SEQ ID NO: 1962 - DNA, 360 bp, Escherichia coli
gttacgaccacggccacggccgccttcgacttcacgatcgctttcgtcttctgcctggcgagcatgttgagaagtagtgacgtgataatcgctggaatcttcagtcggttccgcgttatcagtccatttgttttcttccgccatacgacgtgcttcttcagcaacgcgacgtgcttcttcttcgagtttacgacgcgcttcttcttcagctttacgcttgagctctgcagcttcctgctcacggcgggctttttcagcctgggcgtttttagtcatatcgtcttgttgattgctcactttgtctttttccgcagcttcacgtttcgcttgttcagcagcttcacgcttagcttgttctgc

SEQ ID NO: 1963 - DNA, 209 bp, Escherichia coli
gagtctggttctgaccgatagaacccggaacgcggtgagacaaggagttaccgtgagtagcgtcctgggtacggaagttccagcgcttaacggtacctgcgaaacctttacctttagaggtgccagttacgtcaacttttttaacgtcagcaaacagttcaacgctaatgctctgacctacagtgaactcttcgccttcagccaggcgg

SEQ ID NO: 1964 - DNA, 219 bp, Escherichia coli
cgcaaaaaggctggtgactaaaaagtcaccagccatcagcctgatttctcaggctgcaaccggaagggttggcttatttaacttcaacttcagcgccagcttcttccagagcttttttcagtgcttctgcgtcgtctttgctcacgccttctttcagagcagccggtgcagattctaccaggtctttagcttctttcagacccaggccagttgcgccac

SEQ ID NO: 1965 - DNA, 82 bp, Escherichia coli
gatagcaacaacaacgccacgaacgatagaacccgggcgggtttcgatttcttttaaggactcttcaaagagttgagcaaaa

SEQ ID NO: 1966 - DNA, 142 bp, Escherichia coli
tttgtgcttaccgcgcaggcgacgagccagttcagtagccagacggcccagagttttaccggtcgcgtcaacaacataccagtcgcgttttacggtttctggtttagctgtaaaagttttcattaaaagcttacccaataaa

SEQ ID NO: 1967 - DNA, 111 bp, Escherichia coli
aaacaggcggcagtacgcctttggtttatccattttatacaatccatgtaaaaaaagggccctgaaattcaggaccctttctggcatcagcctttaatctgtttcaccaga

SEQ ID NO: 1968 - DNA, 702 bp, Escherichia coli
tcagaattacgtcgaattcagttttttcttcagcagcttcaaccgggccagcagctacagctacagcagcagcagcggaaacaccgaatttttcttccattgcagagatcagttctacaacgtccattacagacatagctgcaacatgcttcaatgatttgatctttagtgatagacatttaaattgttcctgaatatcagaataagtttatacgtaagcgaatgcgttaaaaagataactgcgattaagcagcttctttcgcatcgcgtacagcagccagagtacgaaccagtttgccagccgaagcttctttcatggttgccatcaggcgtgcaattgcttcttcgtaggtcggcagagttgccaggcggtcgatctgagacgccgggatcagctcaccttcaaaggcagcggctttgacctcaaattttgcattcgctttcgcgaactctttgaacagacgagcagcagcgcccgggtgttccatagagtatgcaatcagggtcggaccaacaaacgcgtctttcaggcactcgaacggagtaccttcaacagcacggcgcagcagggtgttacgaacaacacgcatgtatacgccagcttcgcgacctgctttacgcagttcaagtcattttatctacagttacgccacgggaatccgcaactactgcagacagcgcgcctttggctacttcgctgac

SEQ ID NO: 1969 - DNA, 151 bp, Escherichia coli
gagtaccgatggaaccgaacagtttaccttcgtcgccagctttagacgcgatggtaacagtttccagtgcattgattttctcagcgcgagcattagcagctgccagaacttcagccagtttagcttccagttcagcgcgacgagcgttcga

SEQ ID NO: 1970 - DNA, 335 bp, Escherichia coli
tgaaatgttaacacaagctctcgctgtaggggtatagccgagaccaccgaagcccggaggtggtgaaataaaaccgggcacaacacgaaggcgcatttccgatatccataaagagtcggtcttgtctgttaaatttaaatggtgggagtgcgcctccggttgtaaataacgacattgctgtgtgtagtcctggcggcatcagtttttttcttgaagttcggctgatgtccgccctttttaaagtgaattttgtgatgcggtgaatgcggctaagcgcacgtggcacagttaaaagtcatgttagtccttattggtttgggtgggaaagccgactg

SEQ ID NO: 1971 - DNA, 181 bp, Escherichia coli
ttatacgtgggggtaagattgtagacaaaatcaccgcccacgtaaaggcattagtttacagaagcgctcaggccagcctggtcaactgcaacacctgcacccatggtggtggagatgctaactttcttgatgtacacgcctttcgcctgagtcggttttgcttttttcagcgcaaccagca

SEQ ID NO: 1972 - DNA, 181 bp, Escherichia coli; identical to SEQ ID NO: 1971

SEQ ID NO: 1973 - DNA, 191 bp, Escherichia coli; identical to SEQ ID NO: 1955

SEQ ID NO: 1974 - DNA, 75 bp, Escherichia coli
ataaataaggaaagggtcatgatgaagctactcatcatcgtggtgctcttagtcataagcttccccgcttactaa

SEQ ID NO: 1975 - DNA, 78 bp, Escherichia coli
catgacgctgacgcccatgtttcccagaccaccattcagacccagcgcgccaccctgcttctgtttcggaaagaagaa

SEQ ID NO: 1976 - DNA, 229 bp, Escherichia coli
ggcgatcagtgtacggcagcagggacaggtagcgagcgcgtttgatagcgcgagccagctgacgctggtattttgcacgggtaccggtgatacggcttgggacaatcttaccgctttcggtgatgtagtttttcagcgtagcgatatctttatagtcgatctcttgaacgccttccgcggtgaaacggcagaacttgcgacgacggaaataacgtgccatatggctagt

SEQ ID NO: 1977 - DNA, 410 bp, Escherichia coli
tcgtatacataagtctttcgagtggctcgttagcaaaaagtttcaacaatggagtaaatacatccaacatatcaataactctcaactgtaagggtattgaaatgttaacacaagctctcgctgtaggggtatagccgagaccaccgaagcccggaggtggtgaaataaaaccgggcacaacacgaaggcgcatttccgatatccataaagagtcggtcttgtctgttaaatttaaatggtgggagtgcgcctccggttgtaaataacgacattgctgtgtgtagtcctggcggcatcagtttttttcttgaagttcggctgatgtccgccctttttaaagtgaattttgtgatgcggtgaatgcggctaagcgcacgtggcacagttaaaagtcatgttagtccttattg

SEQ ID NO: 1978 - DNA, 284 bp, Escherichia coli
agctggacttgctgccactgacccgccttctggataaaccagggctgatagtcaaaaatgctttcggcgtcttcggtggaagaaaacactctgagccacccacggaatacctgtaagacgaacccatttttcccaaaacgatgggatcaacaggtgcgttgcgcggtgagttgtttgctcatcatgaccaccgtgacagattaagctgctttgtttacttctttgatcagcgcagcaacgctgatcagaaatagttgcgccctggccaacccagtgagcgatgc

SEQ ID NO: 1979 - DNA, 101 bp, Escherichia coli; identical to SEQ ID NO: 1753

SEQ ID NO: 1980 - DNA, 221 bp, Escherichia coli
ctttgtcgaaggcgatcaggctaaccgggtcgataccagttgcatcgcgtacgtcaaccttgtgcaggttgcgcgcagccaggaacaggttttcgtccagctcaccggtgatgatcagcacatcttccagagccatgtctttcagtttctgtgccagcagcttagttttcggcgcttctacagagaacttctcgacaacgatcagacgatcctgacgtacc

SEQ ID NO: 1981 - DNA, 565 bp, Escherichia coli
ggttatgacgccactcgccgcggcgttggcaaatttgcgctagcaaacggacttgttcggcaattgcttcactttcaggctgccagtcaccggtattttccagccagtcagaaacctggtcatacaccagctttgctttggattcgatggtggcaggcaaagaattcgatattatcttcaatggtgccatcagcggagagcgtcatgcggcatgccagtaccgggcggacttcattggcgcgcagtgagcagagatcgtcagaaagctcgcgaggcagcatagggatgttgaagccaggcagatagttggtgaatgcgcgaattttcgcggctttgtccagcttgctgccttcagcaatccacgcggttggatcggcaatcgccacaatcagctgaagtttgtcatccggcaacgccttagcgaaaagggcgtcatccatatcttctgtgctggcactgtcgatggtgacaaaatccagcgcggtcagatcttcacgaaccagaccttcatcgagcatttcggtagcgacgccgtctggtgcttctttttccagattatggcgtg

SEQ ID NO: 1982 - DNA, 176 bp, Escherichia coli
tgcgtttatagacgggttttgcattggtagccatgtttctttcctgagactgtcaacgattgaaatgaattaatactagcgacattgtacgtcgcttttcagcgcagccccacaagggttagcctgaatttacaagatgggcacaaaaagaagccgccctcaggcggctccttttt

SEQ ID NO: 1983 - DNA, 44 bp, Escherichia coli
cggactccttcattggtgccagtggcataatggcgtattctccg

SEQ ID NO: 1984 - DNA, 383 bp, Escherichia coli
ggcatggaaatactccgttgttaattcaggattgtccaaaactctacgagtttagtttgacatttaagttaaaacgtttggccttacttaacggagaaccattaagccttaggacgcttcacgccatacttggaacgagcctgcttacggtctttaacgccggagcagtcaagcgcaccacgtacggtgtggtaacgaacacccgggaggtctttaacacgaccgccacggatcaggatcacggagtgctcctgcaggttgtgaccttcaccaccgatgtaggaagtcacttcgaaaccgttagtcagacgaacacggcatactttacgcagcgcggagttcggttttttaggagtggtagtatatacacgagtacatacgcc

SEQ ID NO: 1985 - DNA, 183 bp, Escherichia coli
ccagtcgctttagcgattgaacccaataccagcaccacaaacaggatacaggtaatgtagaaacagataatcagctgccccagttgcaccagtgtgccgacgccgtatttaccagatggtaaacgccattgccccgaacgcaccaataggtgccagacgcatgatcatattgatgatgccgaa

SEQ ID NO: 1986 - DNA, 145 bp, Escherichia coli
acccgcgatgatggtctggttagattcttcgtcagtccatacacggaaagacgggtcttctttagccagacggcccagagccagacccattttttcctggtcagctttggttttcggttcaactgcgatggagattaccggctca

SEQ ID NO: 1987 - DNA, 376 bp, Escherichia coli
aggcgtttacgctacgtccagcacaagtatttccctgtctgtttgccgacagacgcatatgctctaaccctcattgatcctatgttacccttgtttgcccgtccgccactggacgggcttttttttagctggctaactgctgacagaaagcctgcaacgtctcttccggcataccaatctgccgcgctgcatcacaaatggcctgccagcttcccgcatccagtggaatcccctgcttctgccgttcgcgacgcgtgttcacttcccactcgcccggtagcaaaatcggcttatcatcatcatgcggcgaggctttcacccactcggcaaaggcttcggtctgcgcgttacaatccggcgcgccgaagagttccgg

SEQ ID NO: 1988 - DNA, 288 bp, Escherichia coli
agtgtgaaacgctactggcgccttacagcgcaaaaaggctggtgactaaaaagtcaccagccatcagcctgatttctcaggctgcaaccggaagggttggcttatttaacttcaacttcagcgccagcttcttccagagcttttttcagtgcttctgcgtcgtctttgctcacgccttctttcagagcagccggtgcagattctaccaggtctttagcttctttcagacccaggccagttgcgccacgtactgctttgataacagcaactttgttagcgccagcagct

SEQ ID NO: 1989 - DNA, 90 bp, Escherichia coli
gggtttgagtaattttaatagtctttgccatggtttatttccccagaatttcttcaacggatttaccacgcttggcagcgaccatttctg

SEQ ID NO: 1990 - DNA, 200 bp, Escherichia coli
cccggaacctgttcgctctggtcaggatggaccataaaaacgatttcgtaatgacgcatcgaattgctccttacggattattcagcctcctgtctgggtcagccgaatcccggggaggcaaggaacgtgttaaaggtcggctgaaaaatgacgcgttatagtacttgtatgcctcgctaaactcaagggcagagccgaaa

SEQ ID NO: 1991 - DNA, 159 bp, Escherichia coli; identical to SEQ ID NO: 1829

SEQ ID NO: 1992 - DNA, 283 bp, Escherichia coli
ggttgaaaagtgcgtttcatggcgatttctacctaaacttgaataaattcaatggctttattggatatccgccgaaaaatgaaacgatggacaccgaagccatgggtgattaaagaggccggattgtaataattgtacactccggagtcaattctctttccttatttaccgcgccttttccgcaccttttcgcagggaaaatgtacgacctcacaccagtggaaaccagcatggcgcgccgggtggaggattatacgggctgatgggtaaagcgcaaggatcg

SEQ ID NO: 1993 - DNA, 117 bp, Escherichia coli
acggaagtccagcgtaaccaccagatccagcttgccttccagaccattgtcctgccagtccacttcttccggcttcacgccgccctgttgccccagatctttaccctggatacctgt

SEQ ID NO: 1994 - DNA, 321 bp, Escherichia coli
caaaaccaacgcgaccgttaccatcgccaactacagtcagagctgtgaaggagaaaatacgaccacctttaacggttttagatacgcggtttaccgcgatcagcttttcctgcagttcgccagcttgtttttcgatgtgagccatcttacacctctaccttagaactgaaggccagcttcacgggcagcatctgccagtgcctggacacgaccatgatattggaacccggaacggtcaaaggatacatctttgatgcctttttccagagcgcgttcagcgacagctttacccacagctgcagccgcgtctttgttaccggt

SEQ ID NO: 1995 - DNA, 359 bp, Escherichia coli; identical to SEQ ID NO: 1956

SEQ ID NO: 1996 - DNA, 122 bp, Escherichia coli
catcatgaccaccgtgacagattaagctgctttgtttacttctttgatcagcgcagcaacgcgatcagaaatagttgcgccctggccaacccagtgagcgatgcgatccagatccaggcgag

SEQ ID NO: 1997 - DNA, 260 bp, Escherichia coli
atagtgagcgcaattgtcatcgcataaccgattagatcgacactcaggctgtactggcgactcaagtaaatggtcataaatggcagcgtagcgccgcgtccgatggttaataacaacgacgaggcaagaagggcgctggtagagcgtcgtagggataagttcatttgtctgtccggcagtgcgtttcgttatgttttgttttagagatgtaaagaaatagcatggcaaaaatccgaagtatagcgacttatttgcgcatt

SEQ ID NO: 1998 - DNA, 385 bp, Escherichia coli
ggcagcagcgaaagcctgcgggccaactggcgcgatgagagcatatttatgggattatcgccgagaaatacggtgccagactgcggcattaaaagccgcgaaaaacagtttaacatgcgtcgatttcccgcaaccgttaggaccagatcagggcggtgatcttccccgttggcagtgagagtgaaacgtcgttaagtaccttgtctgtcccgtaactgaccgtcagattttcagttcgtaaagtcatttatcgcattctcacaagcaaccagacaaaccacggcgcaccgataatggcggtcagcacgccaaccgggagctccagtgggggatgaataattctcgccagcagatcggcaaccaccaacagcaacgcacctgtcag

SEQ ID NO: 1999 - DNA, 212 bp, Escherichia coli
aaacgatcgcgcgcatcggggatggcttccgccgcttcggcaatggcctgatccagccccagttcccgcaaactgtcgcgcagcatacgcagtcaggctgccgatgcgcgcaatgatatcgccagctgaatgctcgtcagcaggtttgattgatggttgcatcatagtcgcatcctcacatgcccagtttctcaaagattttgttgagtttt

SEQ ID NO: 2000 - DNA, 418 bp, Escherichia coli
ttgctgcattcacttaacgtaatctgaaaagggacggctggacttgtgctaccggtcgttggaaattgtctggcactgtttttttggagatctacggtaaaattaagcgaatccgatgagactgtgcagccataatcgaggacgctgcccgctaattttaataactgcgtatctgctggataaagcagaataggtggttaaccccagacataaaccgaggaaaataatgttattgtatttcataatctattgttccttagcgacagattgctgtctgctggttcagtaaggtaccaggagaaacttcaggaagcttgtactcgacaatacagtttgagtttttatctttgccccatgaaacctgtaattgccctgactgtggaagtccagtcagataaacctgaccattttccgcgac

SEQ ID NO: 2001 - DNA, 202 bp, Escherichia coli
aatacatcgaccacggtacattttctgcgccccacaatgtatccagataagtggacatccgctgagtcatctcaagcgttgagttgtcgtgagagccaaagattaaccgcttccgttttgctggcgtggtttctccagatagtagacatcctgtttcaggcgcgtctcttgtaaaccttcgccgtaggagggggaggtcgtc

SEQ ID NO: 2002 - DNA, 444 bp, Escherichia coli
tctcgatgacgctgtaaagttcaaaatcgttgcctggccatgcacaagaaaccaggcgagcgagggcatcgtcatcaattttcagccgcgtagagaagcgtttttcaagactgcgtaatttgttattcaccagcgccggaatgctgccacgccgcatacgcagaggcgggatggtaatttcaaatgcatgcagcgcgtaatacagctggcgactaaaacgattttgttccaccagcattgcgaggtccgcggtcgttgttgcaatcactttgacatcaattggtattaaacgccgcgcatccagtcgcgtgataaccccctgcttgataacctgaagcaaagcagactgtaactccaccgccagatattcaatcttttcaagaaacagcgtgccgccgtgtgccagttccagccgactcagacggccattttcattgtccgtgc

SEQ ID NO: 2003 - DNA, 133 bp, Escherichia coli
  misc_feature (55)..(55): n=g, a, t or c
  misc_feature (65)..(65): n=g, a, t or c
cctttcggctgctgaccgataccgaagatacccgccagggtatccatcttgtcancaatcgccancgcacaagctactgggttggacggcaggtcatcaccagcaaaacgcggctgatactgctcattcagcg

SEQ ID NO: 2004 - DNA, 48 bp, Escherichia coli
agcgatgcccagttatcaaacaacggcagaaacgcacgcggtccgtcc

SEQ ID NO: 2005 - DNA, 211 bp, Escherichia coli
gttcgcttcaacgttgaattcacgcttcatacggtcaacgatgatgtcgaggtgcagttcgcccatacccgcgatgatggtctggttagattcttcgtcagtccatacacggaaagacgggtcttctttagccagacggcccagagccagacccattttttcctggtcagctttggttttcggttcaactgcgatggagattaccggctca

SEQ ID NO: 2006 - DNA, 191 bp, Escherichia coli
cattcggcgggccagtttagcacaaagagcctcgaaacccaaattccagtcaattcttaatcagcttgcttacgcaggaatgctgggatatccagataatccggctctttcgcagtttgcggcgcattgtcattcacgactttagcaaccggcttctgctcctgggtcagcggagccatcccatgctgctg

SEQ ID NO: 2007 - DNA, 313 bp, Escherichia coli
tgctgtagttaccacgaccgtcgaaagacttagcggacaggccacggaagtcacggatacgaggtacagcaatagtgatcaggcgctcaaagaactcccacatgcgttcgccacgcagagttactttacagccgatcggatagccctgacggattttgaagcctgcaacagatttgcgtgctttggtgatcagcggtttttgaccggagattgctgccaggtctgctgctgcgttatccagcagttttttgtcagcgatcgcttcaccaacacccatgttcagggtgatcttctcgacccgagggacttgcat

SEQ ID NO: 2008 - DNA, 367 bp, Escherichia coli
ttgattgcaacaccggtagccatcttcaccgcgttacgaatagcagcggcaacaggaattattggtggctcacccagtgacttatgtccgtatgcggattgcggctcattgatttcgacgaacgcgctttccagttgtggcagatccggcatggtcggcattttgtaatccagcagattggggttacggaccacgccgcttttagcatcgatgatcatctcttcaaatagcgcccagccaatgcccattcccattccgccgtgtacctgaccttctgccagcagtggattaagaatatgccctgaatcatgaacgttgaggatgcggttgatggtgactttgcacagcgcaatatcgaccgtcagat

SEQ ID NO: 2009 - DNA, 463 bp, Escherichia coli
agatcacataaccattttgcctgatagtcacgattgcactactgtttgcgataccgcgtaccgttggggcaaatccgcgctggctgtttggcaacatattatcgtcggaagcgagttgcacgccagtaaaggtgtagctggaaaaaatactgccgctggtggcgctttctcccagaagcaactgagacttcaacgccttgatatcacgttgtaaataactactgatggtattccagcttgatgtctgatcgttgcgtgtccatgtggaatagttgcgtaatcgccaggggccaaaattagcaccattttgcatattcaggtactgtcgttggctacgattgccctggcggtaacggttatcagaacctgtaaacgagtagttggtaaacagcgttggtataccatcgtcccaacgagaaggggagacgtaacctcttgcatcacggtacagtgcaatttgggg

SEQ ID NO: 2010 - DNA, 303 bp, Escherichia coli
tatagttctcgccaccggcgttatcgccaaaccagccggtagagtactgctgaccaacgttaccatccatcatcacaacggcatcaacccgtttgccgttttcgttgtagacacgttgttttaactgcaaatcaaaccagccggagtattcgttaccaaagcggcccagagaaccaatcgcccatgatttaggtgaaccatgagaggcggtcccccaaccagaacggtaatagccgttgtaactaaagccaatttcatctttcacaaatttactgaaatctttcagagtcatggaagaataaa

SEQ ID NO: 2011 - DNA, 353 bp, Escherichia coli
taccagttctgcgcctgcagctttagcagcttcagcgtttgcaccttgggtaaatacggctacgcgaacggaacggccagtaccgtgcggcagtacagttgcaccacgtactgttctggtcagatttacgagcgtcgatgccgaggttaacagctactgtccacgctttctactgaatttagcagtcgccagctctttcagcagtgcgatagcttcgttgatgtcgtactgtttggttgcatcaactttctcgcggataacacgcatgcgcttggtcagtttagccatttcttagtcctccactaccaggcccatggaacgtgcagtaccttcgatggagcgagtcatcgctt

SEQ ID NO: 2012 - DNA, 123 bp, Escherichia coli
aatccagctcatcaacgtggtgaagcgttgtcggattcgcgtgctcatcgacggcataaacctggtttgccggaagctggaacagatattcatcaacagatgttaagttgcaggttaaataag

SEQ ID NO: 2013 - DNA, 461 bp, Escherichia coli
aacgtttgctcgatgatcgcctgctcatcggggattaagcgggtttccagttcaaacggcgtggttagcgccgatgtcagccattcttccagcgcagggatgcctttatcctgataaacgccgctggatgcgctgatcagagatggaaactaagccaatactgtaaagtattcatcaagatttttccgtttaaacagtctcgttaaacagaatgatacactgcgaagggagtgacagacaggcttcagaagaggtagctgtgaccgacttcccggtcacgctaagaatgattacagcagatcgccgatcattttttccagtttttcctggtcaatagcaaacttacggataccttccgccagtttatctactgccattggatcctggttgtgctgccacaggaactcggactcagtgatacgcgccggacgcgctttcacttcgccggtgtaagacagttt

SEQ ID NO: 2014 - DNA, 107 bp, Escherichia coli
agaaattcaaggtagcgggcgttgttgacgtgctggtaaacgtcgagatgatatccacgaactttgatttgtgtttgcatagcgcaataaccttacgttgttgttat

SEQ ID NO: 2015 - DNA, 176 bp, Escherichia coli
aagtttcacccgtgatgtaagctgcttcgtcggatgccaggaatgcaaccgcgttggcgatttcctgtgcgccgccgaggcgacccgcaggaacctgcgccaggatacccgcacgctggtcatcgctcagcgcacgtgtcatgtccgtttcaataaagcccggagcaacaacgttt

SEQ ID NO: 2016 - DNA, 360 bp, Escherichia coli
cggggagaacagaccgctgtcttccgggtaaaattcagaaattaaacgaatcgtttgccacggttcaccctgctggctatcgagggccgattttaaaatcgccagcgcgcgggatttttcttcaccctgcatattcaacaggctggcgaacagttcgcttaaacgttcggcatcaggctgttgtaaaaagtgagcaatcgccggatgtgcacctgcgaccggctggagtagggagacaatctcggaaaattcacgaaacgcgttcatcgcaaggaaaggcgtcagcgcaaaaaccagctccggcttgtggttaggatctttatagttacgctcggcggcatccatcgggatacctgcggc

SEQ ID NO: 2017 - DNA, 238 bp, Escherichia coli
gcacgacgaatcgcctcttcaggatcgattgtgccgttggtttccatttcgatgaccagcttgtccaggtcggtacgctgttctacacgcgctgcttcaacattgtaggcaatacgctccacagggctgtagcatgcgtcgaccagcagacggccgattgggcgctcatcttcttccgaatgaattcgggtagaagccggcacataaccacgaccgcgctgaactttgatacgcatgc

SEQ ID NO: 2018 - DNA, 212 bp, Escherichia coli
tcagcgaacatggtgtcgatgctggcatcttctgcaacatcgcactgcagaacgatgtcagaacccaattgagcggcaaattcttctacgcggcctttcagtttgtcgttctggtaggtgaatgccagttcagctccttcgcggtgcatcgcctgagcgataccgtaggcgatggatagtttgctggcaacaccggttaccagaatgcgctt

SEQ ID NO: 2019 - DNA, 282 bp, Escherichia coli
aaatatcttaaacagtcgaaatttaacgcattgttgagtaagtaagacaaaaaaagccccaccagaatggcggggcaaagagaatagctagttagctatttaacgcgggacgttcgctgatagcgatacgctgcgctgcgatgggttcaggctcattacgaattaaatcaatatgcagtaaaccgtttacgaaggttgcgccagagacttccatattttcagccagcgtaaagctcaggctaaatggctgattcataagcccttgatgcagccattttttct

SEQ ID NO: 2020 - DNA, 192 bp, Escherichia coli
gtgatcagcccctgcgcagcggtacgcatatgcacgggggcttttttatcgacatagatgtaagcggtaacgtagtaaaaatcgtaacttacgccgtgaagcaaaataccgaggaacagtaacgcgtaggtgaaatattcatccgcactaccgtaaataaagaagccatagcggatcgcagcggtgaccaga

SEQ ID NO: 2021 - DNA, 368 bp, Escherichia coli
aaaagatgactgcaagaggtggcttcctccgcgatgggaggaagcttggggagattaatcgtgagcgcctatttcgcgcagtttacgacctttcatcagattacgttcaatatgttccagcgaaacgtgtttggtttccggtaccagccacaatgtcagcaggataaacagtacgttcagagccgcatacacccagaaggtgttggcgttacccagcgtgttgagcatggtcaggaacgttgcgccaacgatcatgttggcaatccagttggtggcagtggagcaggtgatgccaaaatcgcggcctttcagcggctgaatttcggagcacagtacccaaatcagcggaccggcactcatggcaaaac

SEQ ID NO: 2022 - DNA, 121 bp, Escherichia coli
ctgctccagcaggtggcggaaattcatgatggtggtgcggtccggcaaggcgctatccagggataaccgggcaaacagacgcatggaggcgatttcgtacagagcatcttccatcgcgcca

SEQ ID NO: 2023 - DNA, 139 bp, Escherichia coli
tgctgctgcgttgatacgcgcaatccacagttgacggaactgacgcttacgttgacgacggtcacggtaagcatactgaccagctttgataacagcctggaaggcaacgcggtatacgcgagaacgcgcaccgtagtag

SEQ ID NO: 2024 - DNA, 447 bp, Escherichia coli
tggtaactctcccaggtgtttacccctaacagggcttcgtgcttttgtgcaaacaggtgagtgtcggtaatttgtaaaatcctgactctggcctcaccagccagaggaagggttaacaggctttccaaatggtgtccttaggtttcacgacgctaataaaccggaatcgccatcgctccatgtgctaaacagtatcgcaaccagtccgctaaaaactgattaatttgatgcttttcgtcgcgttgatgcaactttttattaggataatcataccgcgctttgaagcgaaaaatctgctggcttgaacacacttcagccaccatcgcgtcatgatacagacgcaccgtcattgacggaaggctccagtaactgatcgcgggcgcagtctgttctattgtcaccagggtagtgtatcgggtcgattccacaatcgtcagccgatattgt

SEQ ID NO: 2025 - DNA, 138 bp, Escherichia coli
aaaatcagttgcatcagagataagcatctgcttttgaaagttcgcatctgcgacttcatcatcatgagtacggataacctctttaatagaaggaggaaaaacagaaaaatcgatcacgcctccttcagcttgagattt

SEQ ID NO: 2026 - DNA, 465 bp, Escherichia coli
gttcgtaggccagataaggcgttcacgccgcatctggcatttggctctcgatgcctgatgcgacgctggcgcgtcttatcatgcctacatatttttcatattttacatccggcaaccaccgtttaccccgtcaccacctcacccgccggtggcgtttccagcagttccagcatggtacgggcgatttcacgctcgcccatcactacctgattcgcaccacgttcggtgatatacgccacttcatcgtcataatgggcgcgggcaataatctcaatatccggatttttcgcgcgggcagatgccacaatctcacccgcttcataaccgttgggaatcgtcaggatcagccattttgcacattccagatgcgccagttgcataatttcttcgttcgccgcattgcccaatactgcgcggaccccgcgctctcgcagcttatcaacacgggttcgtgacgtctcaatc

SEQ ID NO: 2027 - DNA, 95 bp, Escherichia coli
gtaagtcactgtgtggattatcataacggtagcgggtgatatcgccgtcaggggcagtttcctgaatcagacggccccattcatcatattcccgg

SEQ ID NO: 2028 - DNA, 138 bp, Escherichia coli
ctaccggcactaagagcaaagagagaaacagctaaagcgatgcggtatttcattcttgaaccttccattgtgattcggacctattacaaaggaacgattgtccagacaacgaagctggtagtgttaaccaccgcctca

SEQ ID NO: 2029 - DNA, 82 bp, Escherichia coli
accggcatgtgcctctcacctttgattaattcggtttgccgctggcatcaacgccagcttatttcaaaatggtgcggaattt

SEQ ID NO: 2030 - DNA, 238 bp, Escherichia coli
aacctgacgagcgtcacgagtaacgaagccagctttacgcagttcagaacgcagggactcgtcgtattccatcagagcgcgggtgataccgtgacggatcgcaccagcctgaccagagataccaccaccttttaacggtgatgtacaggtccagtttctcaaccatgtcgaccagttccagcggctgacgaactaccatgcgggcagtttcacgaccgaagtactgttccagagaacg

SEQ ID NO: 2031 - DNA, 248 bp, Escherichia coli
ttaaacttggggtaaatctcgaacttaatgttgtgaatggtatggcaggatcatccatgcctgtttacggtcatcgactcatgtcttttcgctgcctggtcacaggagagtacgcagaactgaaacgacaagacggattgagtgacgagccagaaatctgttcacttcgcatttaagataaaacgggaagcgttggaaattacaagattcaaacttaataaggtatgtttaatacgaagtcaacacta

SEQ ID NO: 2032 - DNA, 504 bp, Escherichia coli
caggctgaaacgcgcttcaaagcgatcggaggtattgcgcacaaaacgtggccacaactcactacctgggatcagttcacgcagattagacatcatctggcaaccgttacatacccccagcgccagcgtttgcggacggtggaagaaggttgcaaactcatcgcgtacacggtcattgaacaggattgacttcgcccaaccttcaccggcacccagcacatcaccgtaggagaaaccaccgcacgcgaccagggcgtggaaatcttccaggcccgtgcgtccggtcagcaggtcactcatatgcacgtcgatagcatcaaagcctgcacggtggaaagctgccgccatttcaacatgcgagttcacgccctgctcacgcagtacggcaactttcggacgtgcgccagtggcaatatacggtgctgccacatcttcgttgatatcgaacgacagttttacattcaggcccggatcggcgtcgttagatttcgcctgatgctcctg

SEQ ID NO: 2033 - DNA, 744 bp, Escherichia coli
agggctgtcggtttcgacatggttggccatcgtatgatggccttttttgtgcttatcgcgatgattttcgctgcgctatcagggtaaatttatagtcatcggtattaaaagcgttgcggctatattcaaacacccgaccatcaactaaatatccacgcgatactttttcaagaatcggctttgtctggctgatattaagcagacggctcatctcttcggttggcatcagaggaatgatttcctgttcgctacgatcgataaccattttcttcacttcttcgataaagtgatatttcgaattttccatgacctgccaggtgagatccgggaacaacgcaagcggcatccaggtttcttccagcgccattggcttttgcttgcgatagcgcacgcgcttcacatgccacacacgatcctgcggggtgatttgtagctgttgctgaagaaaatcgtcagccggaatcacttcgaatatcagaacttcactgtgtgtatcgacgtgacggtccgacagtttttcatcaaaactggttaactgaaaaatatcgtaattgacccgctcttctttgacgtaagtcccgctgccctgaatgctttcgaggatctgctgctcgactagctggcgcaaagcctgacgcaccgtaacccggctgacgccaaactctgtttgtagcgctgattcagtgggtaacgcatcgccaggtttaagctcgccacgcgcaatttgttcacgaatgcgatcgg

SEQ ID NO: 2034 - DNA, 131 bp, Escherichia coli
atggatatcgtctgacgtgctcatcaatgtgctcccctctacagtgttaccgttacgatacacagcgttagagagaagttataattgaattaatccacggatgcgatagttgagatcttacatattgttgg

SEQ ID NO: 2035 - DNA, 358 bp, Escherichia coli
gattaacagcaccaccggtgccatcaccagcataaagcgaatcagcagcatactgacgcggctgatcccttgctgaaaggcattcggctcgctttcctgctcactaacacgccccgccagttgaccaaaccaggtattggcacctgtagcaatcaccattgcttgtgccgtgccgctcaccacggtggtgcccataaaacacagcgtgtcgcactccagcggattgctgtgctccggctggcgagtggtagcggctttttctacgggcagagactcaccggttaacgacgcctgagcgacgaacagatcccgcgcctgcaagatacgtaaatctgccgggatcatatctcccgccgcc

SEQ ID NO: 2036 - DNA, 413 bp, Escherichia coli
ttgtgtgccagaaggggaaaaactaaaaaagggatcagcgccagcaacaggattcccgtttttttcttattgttgtcaaggatgttgtcttttccataacaaaagagcgccagcgaggttaaacaaataaaactgagttggcggaaaatatagaaaatagaaacatcattcgactttgtctggatcagtgtactgccgttaattggtttatggataattacaatggtttcaactaaatagataaggccacttaaaaatgcaaggcttaaaatgagtgttggtaaaatttgtttgttagtgaaatatttcattaacatgaaaagaaaaatgacggcgttaaggaaaaacaaagccacaacaaccatcaggtaattcatctgtgggatgagttttacatttgtgttttcgttata

SEQ ID NO: 2037 - DNA, 369 bp, Escherichia coli
tccatcgccgcttccagacaacggatagatttttcccgcccgacaaataaggggatgaccatgtgcggataaaccaccacatcgcgcagcggcaatacggggatttcaatgcgttcagaacgctcaggattcatagagctctctcttagtttaatttccgccaggtaatcagatgacacgactgtgcttcacgccatctattaacatgtacgtcagtatatggggatgtttcccccacattcaacgccgagaatagaggaaaaattaaaggggagataaaatcccccctttttggttaactaattgtatgggaatggttaattattcaccagatgcctgttgcgcttccggcttgccataaatcagcaa

SEQ ID NO: 2038 - DNA, 731 bp, Escherichia coli
aaggccgaaacgctggtgtatttacccggatttttcagcgccataatcagcgcaccgtgaccacccattgagtgaccgctaatggcgcagctggtctgctgacattaaattgcgactgaaccagcgccggtaattcatcgcgcagataatcatacatccggtaatgcgtcgcccacggcggttgcgtggcattaagataaaagcctgcgccctggcctaaatcgtagccatcgtcgttggcaaccttttcgccgcgcgggctggtgtctggcatcaccagtacaatccccagttccgccgctacccgctgggcacccgccttggtggtgaagttctcgtcattgcaggttaatccggaaagccagtacagcactggtggcggagtgtgatcacgaggtggagggagaaagatactgaacgtcatcgggcagtttaaggtactggagtcgtgtcgccagcgttgctgccagccttcaaaacagcggtgctcttcgagcatttccatgcgtggctccttgttgtgttgtttgcaatttcttcatcataccgtttattcaatgtgctgtgagtaactttcacttccgtatttgcataacgatgttttaacatctgctgatgaaaggcagcggcaattacaataattatcgctgtgaatactggattatgtgcgccgcctcacgcacaataatcaggctgtaaataagcttaataactttgccccacgcaaggcg

SEQ ID NO: 2039 - DNA, 123 bp, Escherichia coli
acgggcatccgtcagtcctttctctatccccaatccagcccttgtggcgaacttgaaaatcccgcctcacgcagcagcgtaaacatcggcgtttgccggaccggtagatcattcacttctgtt

SEQ ID NO: 2040 - DNA, 217 bp, Escherichia coli
gctccaatttccgtaaggcaaaaaaaaagaaaggtaacttcccccgcgagagggaagttacctttctcattatctctggtaactggagataatttttagcataagggcataacctgctaatgtgatcgtaatcacagtgtgatattcgtattgtcaaataattttaaaaagcagaagcgtgattactctcacacaacacctctgctttccatgttat

SEQ ID NO: 2041 - DNA, 250 bp, Escherichia coli
tgattaacccaggctgatctgcacgtctacaccggcagccagatccagacgcatcagagcatcaacggttttctcggttggctcaacgatgtcaaccagacgcaagtgagtaccggatttcgtactgatcgcgcgcgtctttgttgacgtgcggggagatcagaacagtgaagcgctctttgcgtgtcggcagcgggatcggaccacggacctgcgcaccagtgcgcttggcagtctcgacgatttccgc

SEQ ID NO: 2042 - DNA, 245 bp, Escherichia coli
ctgaagggcgctgtgaatcacaagctatggcaaggtcatcaacggtttcaatgtcgttgatttctctttttttaacccctctactcaacagatacccggttaaacctagtcgggtgtaactacataaatccataataatcgttgacatggcataccctcactcaatgcgtaacgataattccccttacctgaatatttcatcatgactaaacggaacaacatgggtcacctaatgcgccactctc

SEQ ID NO: 2043 - DNA, 464 bp, Escherichia coli
caggcggtaatagtgtgcggtcatcgcgtcacattctgtacggcaggcatggtggctatacgcaatcaggcagacagcaatacctgctgcttctgcactcatttgggcatcgttaccgttcaggcagttaaacagacgccatgtctcatcgttgtcaggctcgggggacataaatgcgccgccattgctgagggtgtagaacgaccagataccaccgctgtagccctcacagaagcggtccatccaggcgaagatatgcggctccaggagtagccactgcgggatagcgccaaagtactgtggccagaaatcgatacgctgttcatcggggaccggcgtgacggtcagttcaaattcgggttggttagcgggtgcgaggtcgtgctgcgtctgtgttgtcatgggtatgtctccgtcaataaaaacgccagcggcgatggctggcgtatggggatataaagtgt

SEQ ID NO: 2044 - DNA, 344 bp, Escherichia coli
aatatgacttttttccgggaacaggttcgcaaaatggcttgttgaacgcctgtttttctatatacatcttcaaaaacaggcaaggtttgacgcaaactatgcctgattagcccctgcctcgcgtacgccgctgataattgcacctgtggctaaacagaatatctgcggcgttaccaatacagagacaatatttaccaataaaaaagtgtgagactaataacaatggtttttagcatatgcctttgccattaaattgcataacgatttaaatagtcgagttgcgcattcatttccttattgtttaacttgtaagcctgagcaaaaagttcaggagggaggtaaac

SEQ ID NO: 2045 - DNA, 183 bp, Escherichia coli
gccttaccaatcaccagcatatcttttggtacggcggcgtgcgcaaccgggaaatttgtggcaaggacgagcgcgagcaatgtgggacgaaacgatatcgatctcttcatgacagtttcctgattaactgacgtgctgtgtgccaggggatataaaacaagagaattgatcagcgagcagagg

SEQ ID NO: 2046 - DNA, 186 bp, Escherichia coli
gctttcatcgccattaggcttaaagtagccctgcttttcccagtgctcgtaaagcggctgttcgatatcttgtgggttatatgtcttttccattatttccaggttgccgtattcaggttgaaaccagccacgcggtaggctttatagcgttcgcgcgccagttgtttcagagaatcttcataagga

SEQ ID NO: 2047 - DNA, 185 bp, Escherichia coli
cgcggcagttttccgtggtcgcgtagccaggcggcagttttctcgataccttcatccagggtgatgaccggctgataacctaactcttcctgcgcacgcgtaatatccagcgtaaagtcaaaattcaacttggagacgccgtagtgggtcagcggcggctcttttgctgacttgcggcctaaacg

SEQ ID NO: 2048 - DNA, 113 bp, Escherichia coli
ccgtattcagccacggtgtggttggtacgggatagtcatacactgacatataatccctgcgcacactctcaccagtgacaataacaatcgtatcatataacggtgctcccggc

SEQ ID NO: 2049 - DNA, 162 bp, Escherichia coli
ttacgcagcatttcttctgcggcctgcgtactgaatgatgaaacaacaagcaatgaacctaacagtaatgaaccacgcaggcgcgatgaaaacagatgacgtaaatgcatgacgactccctttgatgaaccgatatttttgctgcttcacaatgcttcgcta

SEQ ID NO: 2050 - DNA, 95 bp, Escherichia coli
cgccacggatttgacattcctggacgtcaaacaccggttcgccaaggcggtagctgacgtattgcagctcggaattaccgctgtagctctgaatc

SEQ ID NO: 2051 - DNA, 581 bp, Escherichia coli
taatggcgatatcagtgtggtggcctttaccggtcagagagagcgagccgtacacgtcaaccaccacgcgggtcacgtctttaagcaggttacgggcaatcagatcgtcggtaaattgtttacccgctttcattggtccaacggtatgagaactggaagggccaatgccgattttgaaaatatcgaatacgctaatcataggaaatacatcgcgttaaaacggaggaagcgccgcccgaaagcggcgcgaaaggacttagctgaacagagagtagaagattgcggagattgcaatcagacccatcacgacaacgaatacgttgctgatgtgaccgctgtacttacgcattgccggtactttctgaattgcgtacatcggcatcaggaacaggatcatcgcgatgattggaccgcccagggtttcaatcatacccaggatgctcgggttcagggtggcaacactccaggtcgttaccagcatgaacagcgcagtgatacggttcagcttgttgatttccgatagacttacctttaccacgcagagatttaatcaccataccgatgaagcctttacgtgcgcc

SEQ ID NO: 2052 - DNA, 145 bp, Escherichia coli
ttcagctgaagagtaatcatcttgatggggtttgtaatcaacattctgataaatatcattaatatattgtgcagcaatgtgtcggcatactatacggttttggggtcgccccggaaaataacattgaccattaagtttaattctt

SEQ ID NO: 2053 - DNA, 581 bp, Escherichia coli
taatggcgatatcagtgtggtggcctttaccggtcagagagagcgagccgtacacgtcaaccaccacgcgggtcacgtctttaagcaggttacgggcaatcagatcgtcggtaaattgtttacccgctttcattggtccaacggtatgagaacctggaagggccaatgccgattttgaaaatatcgaatacgctaatcataggaaatacatcgcgttaaaacggaggaagcgccgcccgaaagcggcgcgaaaggacttagctgaacagagagtagaagattgcggagattgcaatcagacccatcacgacaacgaatacgttgctgatgtgaccgctgtacttacgcattgccggtactttctgaattgcgtacatcggcatcaggaacaggatcatcgcgatgattggaccgcccagggtttcaatcatacccaggatgctcgggttcagggtggcaacaatccaggtcgttaccagcatgaacagcgcagtgatacggttcagcttgttgatttcgatagacttacctttaccacgcagagatttaatcaccataccgttgaagccttcacgtgcgcc

SEQ ID NO: 2054 - DNA, 145 bp, Escherichia coli; identical to SEQ ID NO: 2052

SEQ ID NO: 2055 - DNA, 310 bp, Escherichia coli
  misc_feature (57)..(57): n=g, a, t or c
caggtcaaaggtgagcgccgagatgcgccccaaaggccggtaaaaacgcattatttnccccgtttggcgcgtggatgcgccgcatcgtacaccgaggcaaggtgttgaaaatcaatgatgagtatagatttgcgtggtggagaggttggcatgacccagcagctcctgcacaccacgaagatcgccgctcgactccagcatatgcgtggcgaacgagtgacgtaatttatgcggatgaacgtgattattcagcccttgttttatgccccattcggcaaagcgtttctgcacattacgcgcggagatacgc

SEQ ID NO: 2056 - DNA, 357 bp, Escherichia coli
acagtgtaatgagcagttgatctttgctttgtttaacaaatgggggcaccggcaggtgccatgcatttaacatcataattcccctgtgatgaaaatctgatcaccttgccatagcctaatgcaggatcactcatcatctgaaggatatttgggggaggaggacgggggcggataactttcggaatagccggatcaggatttcctcctgaaccggcttacagaacgcaaggattactggttttcagccagctgacgatcgtggcggcgtttaaacatccagccaatcaacagcacaacaatccacgcgaaaccgacatacagcgagatacgcgtatccgggtgataaccaatcaaccc

SEQ ID NO: 2057 - DNA, 234 bp, Escherichia coli
gagcatcgggtacgagtcgagtctttttcgaagatgatcgcgatgtttttaccagtgagtttggcttcttctttaccgcttttcttatcggctttcagcttcgcggctaactgcagcaggctgttgagttcagcctggcgtgaaatcgagtaatttcaggaaatgcttatgataaaacccggacatagatccctcctgtggctaacgcctcaatgaattaaaattcaatttata

SEQ ID NO: 2058 - DNA, 171 bp, Escherichia coli
actgctcacgcagcaggttcagcagctcggtgttcagctcttcaacgctcttctcacgcagctcttttgctttcattacatcaccgtcttagttacaaaggtggttttaatcggcagtttcgctgctgccagcttgaatgcttcacgggccagctcttccggaacaccgtc

SEQ ID NO: 2059 - DNA, 89 bp, Escherichia coli
ggatttgacattcctggacgtcaaacaccggttcgccaaggcggtagctgacgtattgcagctcggaattaccgctgtagctctgaatc

SEQ ID NO: 2060 - DNA, 335 bp, Escherichia coli; identical to SEQ ID NO: 1970

SEQ ID NO: 2061 - DNA, 277 bp, Escherichia coli
gcaagaattagcgacgcagacccaggcgctcgatgagctgggtgtaacgtgctacgtctttacgtttcaggtagtcgagcagtttacgacgctgagaaaccatgcgcagcagaccacgacggctgtggtgatcttttttgtgctctgcaaagtggccctgcaggtggttgatctgtgcagtcagcagtgctacctgaacttcggtagaaccggtgtcgtttgcgtcacgaccaaactcagaaacgattttagctgttgcttcagtacttagagacat

SEQ ID NO: 2062 - DNA, 142 bp, Escherichia coli; identical to SEQ ID NO: 1827

SEQ ID NO: 2063 - DNA, 571 bp, Escherichia coli
cgcgcagacgctcggcgcggcggttgtataaattcttgagccgagggaacaataacggcggaatcatatccgccgtacgtttctcgcttgaacccagctcatcttgcgggattatgcgaatactcattcagctttcttttccgttgtcttgcggacctcacggtaccagcgcgggtgatgtttcttcgcccaggcgctggtaacccatccttccaccatggcggtaatcgtgcctttcacccaaagggcggcgtagatatgcaccatgataaccacaattaacgccactgcggcaaatgaatgcagcattaacgcgaatcggatcaccgggattgagaaagcaggcgcaaaataaggacgccagataatcacgccgctcaccagcagcagaaccaggaaaataatcgccgcccagaaaacgcatttctgaccgaagttataacgcccggtgtcacctacttcctcgttgacgacgatcttacgaatattcttcgcccaaaagatatcatcccgattgattaggttgtgatgccagtaacggaaaaacatgatgatgaacgaggcaaacata

SEQ ID NO: 2064 - DNA, 152 bp, Escherichia coli
atactggtatttgcgagagatctttattcagaaaccggaggtaatctttgatgatgtcgtgactaatatgagcaaccaaagtgttgttaagagaggagacgtcgataatattattttcacaatttaataacgccatatggttagctttaagg

SEQ ID NO: 2065 - DNA, 154 bp, Escherichia coli
tacatgtttaaggttaagacgcttaacgcggggataaaagggatttttcatgcaactttaagggagattgatttagcgcaattttggcggcagggatctaccgccagagaggtattacgcagagaaaaaggcgatgaggatcggcactaacagg

SEQ ID NO: 2066 - DNA, 150 bp, Escherichia coli
ggtcggtgacgctgactctggcagatctgacccgtttttacataatcgagaaatgcgcgcaagccgcaggacatatactggcggtttggataatagatctggaagcctggacgctctgtgctccagtcttccagtacacattctaaacga

SEQ ID NO: 2067 - DNA, 103 bp, Escherichia coli
tgaatgaacgggagtaaagcgaaaagactatagagtgaaggagaaattttgagggtgcgtctcaccgataaagatgagacgcggaaagattagtaacttggac

SEQ ID NO: 2068 - DNA, 200 bp, Escherichia coli
acggtttcagtttgcaggttatccatcatcgctttggatacactgatcgttcgccgcagcccagatatcgataactttgttgtagctgttcgcccgcagttaccagaccagactggaactgctcctgaatttcagcaacttctgcttctgcctcggagatgatttcgtgtttcttctccgggatgaccatgtcatcgata

SEQ ID NO: 2069 - DNA, 147 bp, Escherichia coli
gttacgaaacagcgtaagcagggtacgctgtgcgggcgctgggtagctgggctggccatgaatatccgaagccagccggttttcgatcaaactggcgagcaccgtccagccaaccgccgagaagaaaagaatgagtgcgatactgga

SEQ ID NO: 2070 - DNA, 143 bp, Escherichia coli
gttacgaaacagcgtaagcagggtacgcgtgcgggcgctgggtagcgggcggccatgaatatccgaagccagccggttttcgatcaaactggcgagcaccgtccagccaaccgccgagaagaaaagaatgagtgcgatacgga

SEQ ID NO: 2071 - DNA, 303 bp, Escherichia coli; identical to SEQ ID NO: 1666

SEQ ID NO: 2072 - DNA, 271 bp, Escherichia coli
gttgtgttcagcgttagcaatggcagattccagaactttcttgaccagtacagccgctttcttgttggtgtaggtcaaaatatccagagcctgcgacactttcttaccgcgaatcaggtcagcaacaaggcgaaccttctgagcagaagaacgagcatggcgatgtttagcgatagtttccatctcttcctcctaccttatttcttcttcgcttttttatcagcagcgtggccgcgataagtacgagtcggtgcgaattcacccagtttgt

SEQ ID NO: 2073 - DNA, 118 bp, Escherichia coli
gatagtcaataccgcaattctatcaggagatatagtcactctaagaggaggagaaattaggttggtattatagcttgtgcgcgccatgattggcgcgcaatttaaacttagtgcttta

SEQ ID NO: 2074 - DNA, 176 bp, Escherichia coli
gagcgttacgcgctcgttatcaccatagtcacggcaggtttcgacgtcatgataccccgcgaggataaatgcttgtcgcaccgcttcgccctgctgccagccatgttccagaagcagaaagccgccggataccagcgcgttacgcgactgttcgatgatatgcacgatgtctgcca

SEQ ID NO: 2075 - DNA, 222 bp, Escherichia coli
gccgttggaaattttacgaacagtgaatgcagagtgcagaccgcggttacgaatagctgataaccacgccctcgaatgcctgcagacgttttttggaaccttcaacaacccatactttcacttccacggtatcacccggacggaaggaaggtacgtcctgcttcatctgctcttgttcaagttgcttaataatgttgctcataatttaatctcttatcctgg

SEQ ID NO: 2076 - DNA, 267 bp, Escherichia coli
atttcaatcacactgctcaggacggcgagcaatcatctcttcaaaggtcgcttgtttgataccaccgatgtggccggtgtggtgatagtacactttgtcagtacgcttgttgccggttacagcaactttgtcagcgttcagaacgatgatgtaatcaccggtatctacgtgcggagtgtattccgctttgtgcttaccgcgcaggcgacgagccagttcagtagccagacggcccagagttttaccggtcgcgtcaacaacatacca

SEQ ID NO: 2077 - DNA, 189 bp, Escherichia coli
acgacccaggcgtttacccgcctttttggagccttcggccggagacagagtatttaaacgcatctcttactcctcaactttaaccatgaaggaaaccgcgttgatcataccgcgaatagcaggagtatcctcgcgctctacggtgtgaccaatacgacgcagacccaggccaagcagcgttgccttgtg

SEQ ID NO: 2078 - DNA, 489 bp, Escherichia coli
tcgatctggttcatcattttcatggcttcaacgatgcacagggtatcgcccacgttgactttctgacccacttcgatgaacgcttttgcgtccgggcttggggtgcggtagaaagtaccaaccatcggggaacgtacgatgtgaccactgatttccgctgctgctggcgcttccatggaaggaacggtcgccggagcggctgcgttagattgagctggctgctgcatcattggtgcagcgtaagcttgttgcatcacagggaaacttgcggcaggagctgcacggctaatgcgtactgactcttcgccttcagaaatttccagttcggagatgcctgattcttcaaccagctcgatcagttttttaatcttacgaatatccatgagtgggttccgtactctttgtttagtgtgattgtgacaggcgtttcaccgccgtctgtaaagcgtatgccccgacagctgtatgcatagcgataaattccagcag

SEQ ID NO: 2079 - DNA, 439 bp, Escherichia coli
cggagtgctcctgcaggttgtgaccttcaccaccgatgtaggaagtcacttcgaaaccgttagtcagacgaacacggcatactttacgcagcgcggagttcggttttttaggagtggtagtatatacacgagtacatacgccacgtttttgcgggcatgcttccagcgcaggcacgttgcttttcgcaactttgcgagcacgtggtttgcgtaccagctggttaactgttgccattaaatagctcctggttttagcttttgcttcgtaaacacgtaataaaacgtcctcacacaatatgaggacgccgaattttagggcgatgccgaaaaggtgtcaagaaatatacaacgatcccgccatcaccaggccatctggctggggtgcttaaccgtaagtctgacgaaatcagtatagtcaatgagaatgatgtcgttcgaa

SEQ ID NO: 2080 - DNA, 490 bp, Escherichia coli
ctgcagttacagcgtcagcgatgtcgcgagtaccgatggaaccgaacagtttaccttcgtcgccagctttagacgcgatggtaacagtttccagtgcattgattttctcagcgcgagcattagcagctgccagaacttcagccagtttagcttccagttcagcgcgacgagcttcgaagaattcaatgtttttcttggtagctggaacagctttaccctgcggtaccaggaagttacgagcatagcccgctttaacgtttacctgatcacccaggctacccaggtttgctactttatcaagcagaataacttgcattaccttatcctctcaaagtcgtattaatggaccgtgaccgattactgatggcgatcagtgtacggcagcagggacaggtagcgagcgcgtttgatagcgcgagccagctgacgctggtattttgcacgggtaccggtgatacggcttgggacaatcttaccgctttcggtgatg

SEQ ID NO: 2081 - DNA, 271 bp, Escherichia coli; identical to SEQ ID NO: 2072

SEQ ID NO: 2082 - DNA, 377 bp, Escherichia coli
acggaagttcgcggtgattggcgtttcgatgatggagccatccggcttcgccatcagaccacgcataccagcaagctgacgaatctgtgccgcagaaccacgcgcaccggagtcggccatcatgtagatgctgttgaaggaaacctgcttctcttcctgaccgtcacggttaatcacggtttcagtttgcaggttatccatcatcgctttggatacacgatcgttcgccgcagcccagatatcgataactttgttgtagcgttcgcccgcagttaccagaccagactggaactgctcctgaatttcagcaacttctgcttctgcctcggagatgatttcgtgtttcttctccgggatgaccatgtcatcgataccaa

SEQ ID NO: 2083 - DNA, 316 bp, Escherichia coli
ccagttacttcagcacgagtcttctgagcacgagtaccctgacgagcaccagctgcataagcaacaacaacctggtgaaccagcgcttcgttgaaatcacgaccgaaggtagtttcggaaacagtcagcgcgctctgcgcgtctttcaatactaattccattgctatctccttacgccttcacagctggtttaacgatcaggtcgctaccggttgcacccgggacagcacctttaaccagcagcaggttgcgctcagcgtcaacgcgtactacgtcaaggctctgaacggttacacgttcgttacccatctgacct

SEQ ID NO: 2084 - DNA, 139 bp, Escherichia coli
aaactcttttcgcagccaactattgagtcgcttgatccacgagccaactgatgctgtaacacgtttttctacttcagcttcaccgttaagatgtgactctttcccatagtgaagcaatcccaccgccgtcgaataatac

SEQ ID NO: 2085 - DNA, 382 bp, Escherichia coli
tttgtgcaacactattttgttgaccggaaaatggaacactttccgcaatgcctgttgctatcacgcttaaaccatttcattgcgatttacacagaacggacgtcctgtcgcagtatattaagtcgtcgatagaaacaagcattgaaaggcacagcagtagtcaaacagtgtgaaacgctactggcgccttacagcgcaaaaaggctggtgactaaaaagtcaccagccatcagcctgatttctcaggctgcaaccggaagggttggcttatttaacttcaacttcagcgccagcttcttccagagcttttttcagtgcttctgcgtcgtctttgctcacgccttctttcagagcagccggtgcagattctaccaggtcttta

SEQ ID NO: 2086 - DNA, 917 bp, Escherichia coli
ctgcggtgcagccggagcttcacccgcagcacggcgacgcatacgatcctggtggtacgcgtaaccggtacctgccgggatcagacgacccacgataacgttctctttcaggccgcgcagttcgtcgcgtttgcccgcaacggctgcttcggtcagcacgcgagtggtctcctggaacgatgccgcggagatgaaggactcggttgccagagacgctttggtgatacccagcagatcgcgggagtaagttgcacccactttgccgttcgcttccagttcgcggtttgcgatcttgacgcgagagtattcaacctgttcgccttccaggaagtcggagctacccgcgttaacgatggtagctttacgcagcatctgacgaacgataacttcgatgtgtttatcgttaatcttaacgccctgcagacggtatacgtcctgtacttcgttaacgatgtaacgagtaacagcatgaacaccacgcagacgcagaatgtcgtgcggcgcttccggaccgtcggaaattacgtcaccacgttctacacgttcaccttcgaacacgttgagctgacgccatttcggaatcatctcttcgtacggatcgctaccgtctaccggggtgataaccagacgacgtttacctttggtttctttaccgaaggaaacgataccgctgatttcagccaggattgccggctctttcggacgacgtgcttcgaacaggtccgcaacgcgcggcagaccaccggtgatgtccttggtaccgccggattcctgcggaatacgcgccagggtgtcaccagagctgatctgtacgccatcttccagctgaacaatcgctttacccggcaggaagtactgcgctggcatatcggtacctgggatcagaacgtcgttaccctgagcatcaacgattttca

SEQ ID NO: 2087 - DNA, 235 bp, Escherichia coli
gacgtgcaccggagttgtcggcgacgttcagcatagtctgttcttggatcattttagtgctccgctaatgtcaactactactgagacccgaaaatcaggtcgttaaaaatccccatatcgagggcgcggcattataacaccgcttcaaggatatgggtagaaaaaataaacggctcatttctgagccgtttattcgtattgagagagtgtactgtattacagaaccgctttctct

SEQ ID NO: 2088 - DNA, 348 bp, Escherichia coli
tctttcattgggcgaatggcagcaatattgcccggcgtacggcccagcatctgcttcgcgtcatgacctactgcagctacgcttttcggtgaaccggcacgatcctgacgaatggccaccacggaaggctcattcaatacgatgccttgtccttttacataaatgagggtattcgcagtacccaggtcaatggacaagtcattggaaaacatgccacgaaattttttcaacatactaagggataatcctgaaagctggggcggaaaagaaaatccgcttactttaccaaccacacgcagcagcgacaaggcgcaaaaatcatctgctacggtgaaaattagtgcagtt

SEQ ID NO: 2089 - DNA, 101 bp, Escherichia coli
ctgcgctctttacgcagatcggcatcatccggcaaaggttgcccggtaaaggcatgcagaaacgcttcgcacagcagctcgctgttggtagcgtgacgcag

SEQ ID NO: 2090 - DNA, 360 bp, Escherichia coli; identical to SEQ ID NO: 1834

SEQ ID NO: 2091 - DNA, 429 bp, Escherichia coli
gtcattgctggcattcttgccagtatgatcgtgaactggctgaacaagcggaagtaacgtgtcatgcgggcgtcaggctgccgtaatggcaatttgcgcccggaccaggccgcaggggggaaactctgcggcctttttcgttcttactgcgggtaaggcacccagtcgccgccgttcaggcgaacgtacggtttatcctggtattgaataactactgcatttgagttctcggagaccggtgctgtttgtggcaacccactggtgagttttttccagtcaacattgtcttcggtgaaaatcttgccatcgagaacgcgaaccaccagatcggagatagccaggaagctgctcggttgttcgatgacaatcggtgccccctgatgcggtgccttcatgccgaagaatttcaccccaacggggacgtcggtg

SEQ ID NO: 2092 - DNA, 64 bp, Escherichia coli; identical to SEQ ID NO: 1931

SEQ ID NO: 2093 - DNA, 89 bp, Escherichia coli
ggttgccatcagtttcaaacccgcgtcagtgagtttttgcttttggtgcacagggtaagatgaataaatatctacggtattaataatag

SEQ ID NO: 2094 - DNA, 241 bp, Escherichia coli
gtcatgttcaagcagctctgaataaagctgatgaacctctggagaataacgtttatccatattcttccagtctggttcatcttccggcagtcatcactgggttgaaattacgccgatataaatcgagttccgtcacctgtattttccgctccattgcccgctgatggatcgcatcagcaatatgtgcggtcaatgaatcatgacgaggatgggcccataccaaataaatacgttcagactg

SEQ ID NO: 2095 - DNA, 146 bp, Escherichia coli
ttcgtcgccttttttgtattcacgaactgcttcttcgcctgcaacgttccaggagatgtcagacaggtgaaccaggccgtcgatgccgccgtccaagccgatgaagataccgaagtcagtgatagacttgattttaccttcaacac

SEQ ID NO: 2096 - DNA, 145 bp, Escherichia coli
tggcagggtgagtatgggcgtagcgctacgttgccatactggtatttgcgagagatctttattcagaaaccggaggtaatctttgatgatgtcgtgactaatatgagcaaccaaagtgttgttaagagaggagacgtcgataata

SEQ ID NO: 2097 - DNA, 94 bp, Escherichia coli
agtagatagacgcagagcgttaagtgaactgtgtacgactatcgccaaaatactctaaacataactgcctgaattttgcccgccattcatcgat

SEQ ID NO: 2098 - DNA, 156 bp, Escherichia coli
cgataacttttacgctcataggtgtgctcctggctcgaaaatgaaaccgtaacagtgtaataacaatgtgacgcagagcacaaattatatttcgaatgaaagtaaggatgaaattgatgatgtgaatgatttagcccggcgacgacgccgccgggc

SEQ ID NO: 2099 - DNA, 194 bp, Escherichia coli
tgttcagcattttggagattgcttttttacccagcgcctggttgacgatggagtaaggcagacctttcggtacaatcatccacagaatggcacggccaacagtcgtgtctttcaggctggttttcgctactaattcaccgttagcatctttttcatactcggtgatacgcactttaacgcgcgcatgcagagaa

SEQ ID NO: 2100 - DNA, 200 bp, Escherichia coli
tttcagtgatcggtttgtccgggaacacacggatccagatcttaccttgacgcttaactgcacgggtcatagcacgacgtgctgcttcgatctgacgggcagtcagacgaccacggccaacagctttcagaccgaagcttgccgaagctaacatccgtaccctgcgccagaccgcggttacggcctttgtgcattttacg

SEQ ID NO: 2101 - DNA, 194 bp, Escherichia coli; identical to SEQ ID NO: 2099

SEQ ID NO: 2102 - DNA, 240 bp, Escherichia coli; identical to SEQ ID NO: 1844

SEQ ID NO: 2103 - DNA, 171 bp, Escherichia coli
cttgtggacgtttaccaaaatccttacgaatacgttttttctcggtataggagtaaaccatagggttcctcagctcgctgacaagtcgacccatctgtccattgagcggacagtttgtgcaacactattttgttgaccggaaaatggaacactttccgcaatgcctgttgc

SEQ ID NO: 2104 - DNA, 153 bp, Escherichia coli
tgctgtgccgcgtggttgtgctcgttacccgcgtaaactttcagtttacggaacatagcacgacccagcgggccttttggcaacatgcctttaaccgcgatttcaatcacacgctcaggacggcgagcaatcatctcttcaaaggtcgcttgt

SEQ ID NO: 2105 - DNA, 142 bp, Escherichia coli
cctcttcccgcgctttttctagtcggtgaggtgtgggggcttctgttttgtcgtcgctctcgtcagacacgtcgccaatcctggaaagagtattaagcgtgaatgatgccagagcgcaaagcgttcaatggtttgagtaagg

SEQ ID NO: 2106 - DNA, 211 bp, Escherichia coli
tcagacatagccgcctcttacttatctttgttgcacatcgggaagccgagggcttcacgggaagcgtagtatgcttctgccactgctttggtcagggtgcgaatgcgcagaatgtagcgctgacgctcggtgacggagatggctttacgcgcatccagcaggttgaagctgtgggcggctttcagaatacgctcgtaggctggcagcggca

SEQ ID NO: 2107 - DNA, 389 bp, Escherichia coli
acgttccaggagatgtcagacaggtgaaccaggccgtcgatgccgccgtccaagccgatgaagataccgaagtcagtgatagacttgattttaccttcaacacggtcgcccttgttgtgggtttccgcgaactgctgccacgggttagctttgcactgtttcagacccagggagatacgacgacgttcttcgtcgatatccagaaccataacttccactacatcgccaacgttaacaactttggacgggtggatgtttttgttggtccagtccatttcggaaacgtgtaccaggccttcaacgccttcttcgatttcaacgaagcagccgtagtcggtcaggttggtcacgcgaccagtcagtttggtaccttccggataacgtttagc

SEQ ID NO: 2108 - DNA, 309 bp, Escherichia coli
ccattttgaacagcagcgcacgacctaacggccccgccagaatacgctcgcgtacaggtagagggcgggaagatgggcgctccttctttgccagctcaacagcggcttccagcagaatggagtgcggaacaacgtcatccaccagccccagctttaatgcctgtttcgcccgaagttgttttccggtgaggatcatctctaatgctgtgctgacgcctatcagacgcggtaaacgctgggtgccgcctgaaccgggtaacaatccaagttgtacttcaggcaaaccgagcaccgttttaggatcgtcag

SEQ ID NO: 2109 - DNA, 485 bp, Escherichia coli
gcgtagcgacggtgcgagccacccagaaccttgatacacattacgcgacgtgcaccggagttgtcggcgacgttcagcatagtctgttcttggatcattttagtgctccgctaatgtcaactactactgagacccgaaaatcaggtcgttaaaaatccccatatcgagggcgcggcattataacaccgcttcaaggatatgggtagaaaaaataaacggctcatttctgagccgtttattcgtattgagagagtgtactgtattacagaaccgctttctctacaacgcgaaccagcgtccaggatttagtcttggacagcggacggcattcgcggatttcaaccacgtcaccgataccgcattcgttgttctcgtcatgtacgtgcagtttggtcgtacgcttgatgaatttaccgtagatcgggtgtttcacaaaacgttcgatagcaacaacaatggatttctccattttgtcgctaacaacc

SEQ ID NO: 2110 - DNA, 228 bp, Escherichia coli
tcgtctgtccaaccgctgttttacgcagcgcttgtgcatcggtatttaccgcgaagaattcaacaccttcaatgcgctcgcgcaccatgtgttcaacagcattaccgccgccgccgccgacgccgatgactttaatcaccgcgtcattggtaagttccattggttcaaacatagtttctctccgatttgtgcctgtcgcctgaggccgtaatcatcgtcggcctcata

SEQ ID NO: 2111 - DNA, 142 bp, Escherichia coli
tagccgaggaacgggttctcttcctggggaatattcagataaggaatgcttttatcgccgccgatgtccatcgtgcggaagataatcggcttgtcgcccgccgccagtagcacctgctggtaggcttcaaattgctcctgct

SEQ ID NO: 2112 - DNA, 555 bp, Escherichia coli
gatcatgtttttaacatagtcggcgtgccccgggcagtctacgtgtgcgtagtgacgggtcggggtgtcgtattcaacgtgagaagtgttgatggtgataccacgagctttttcttccggcgcgttatcgatctggtcgaatgcgcgagcagcaccgccgtaggttttagccagtacggtagtgattgcagcggtcagcgttgttttaccatggtcaacgtggccgatagtaccgacgttaacgtgcggttttgtacgttcaaacttttctttagacatcgattgtccctctaagacacggataaatcggtgatatcaccacatcaaccaggcaacatgcccgacttgttgaatgcaataaacagaaggaaaaaacagggaggagaaaagaagtggtgctgataggcagattcgaactgccgacctcacccttaccaagggtgcgctctaccaactgagctatatcagcacatcttggagcgggcagcgggaatcgaacccgcatcatcagcttggaaggctgaggtaatagccattatacgatgcccgcatcct

SEQ ID NO: 2113 - DNA, 248 bp, Escherichia coli
ttcatgtttgtgcaaaaaatagacaaaatgagcgggtttatagaaatagatgcacgtagcgggggaagagaggaaaaggccggacgacgatagtgccgtccggcatgagcaattaatgagaggtcagggtgttatgcttgacggtgacggctgacgaaacctaacaggaagcacatcacaaagacgacagcgtacagaccgtttgctgtaagcagtgccgcctgcggaccgctatgttcaacgatcgg

SEQ ID NO: 2114 - DNA, 276 bp, Escherichia coli
gcagcaacgcgatcagaaatagttgcgccctggccaacccagtgagcgatgcgatccagatccaggcgagtgccttcttctttttcgctagcgattgggttgaagaaaccaacgcgctcgatgaagcgaccgttgcgtgcattacggctgtcagcgacaacaacctggtagaacggacgctttttagcgccgtgacgtgctaaacgaatagttaccataacatcctcttgtgtgaataaaacaaccggaccccatcgaggaacggagtccggtgtc

SEQ ID NO: 2115 - DNA, 247 bp, Escherichia coli
tgatgccgccgcagccagcgccgtctgacgcagttccgggtttttcgttttccacgccactgccagtgatgaaccgcccagcgacaggttagcgccgatctctgacggcatgaccatcccttctttgccggtttcggcaatggtctgaatgatggttggcgtaaagacgcggtgcatcccggtcattaccagcagaggccacagcgcgcccataatggcgactgaaagccagcccagataaccatga

SEQ ID NO: 2116 - DNA, 173 bp, Escherichia coli
tatcaacacacgctttagcgcaacgttcgccgatgtagcgacgcagttccggggtaatgcccggtgctggcgcttcttcgaccactttctggtggcggcgttgcatggagcagtcacgttccgccagatagatagcgttgccctgaccgtcagccagtacctgaatctcgacg

SEQ ID NO: 2117 - DNA, 323 bp, Escherichia coli
tggacggcaggtcatcaccagcaaaacgcggctgatactgctcattcagcgccaccgcgacatcttccgcttcgccatcgtgacgcgcatagtgcatccccataacgccctgggtgtcggtgaactcgaagaccatgttggtcatcaggtcgcacttagacagcagacccgcacgggtagcgtggttaacgtcagcgccaatctgttcagcaatccagccagccagcgcctggatgcggtcagttttgtcgcgcagcgtccccaactgttgctggaacaacacggtttgcaggcgcggcaggttatcttcaagacgtttttta

SEQ ID NO: 2118 - DNA, 239 bp, Escherichia coli
gagccattttccagctcgccatcagcagcgggaagttccacgggataatctgccccaccacgcctaacggttcatggaaatgataggccacggtttcgctatcaacttcactgatcccaccttcctgcgcccgaatacacgaggcgaaatagcggaaatggtcaatcgccagcggtacatccgcagcactggtttcgcgaatgggtttgccgttatcccaggtttcagctgtcgctaac

SEQ ID NO: 2119 - DNA, 250 bp, Escherichia coli
atggggatttacgatggcagggcagcatggggctgtaacggtaaagccctcaccgaagcgagggcttgaaggagaagggttatgatgcgacttgtcatcatactgattgtactgttactcataagtttcagcgcttattaacagtcagtctcaggggaggagcaatcctcccttacccttactcactaaattaggtcaaagaatcaacgatgtcaatcagggcgatgcgggtgtatcgcccttaccactc

SEQ ID NO: 2120 - DNA, 523 bp, Escherichia coli
gatgccttgtccttttacataaatgagggtattcgcagtacccaggtcaatggacaagtcattggaaaacatgccacgaaattttttcaacatactaagggataatcctgaaagctggggcggaaaagaaaatccgcttactttaccaaccacacgcagcagcgacaaggcgcaaaaatcatctgctacggtgaaaattagtgcagttcgtttcctttgttacaaatctctgcctgagtccagaaaggcttaatgcatcagcagcattcctcgcctgtttgcaaccgcgtaaggtcattcatctgcatatgtgctgcaacaatctggcgagcagacaagcacactcccatgagacgcagcgcgcattattctacgtgaaaacggattaaacggcaggttaaaccgagtatctttgtgaatattttttcacgttagtatcaagtggctgtgaggacgcgaaaaaatccccttgcccgcctgtaacaccgcgctgaatcagggtctgccactcgcttcgcgaacg

SEQ ID NO: 2121 - DNA, 404 bp, Escherichia coli
tcttctgagcacgagtaccctgacgagcaccagctgcataagcaacaacaacctggtgaaccagcgcttcgttgaaatcacgaccgaaggtagtttcggaaacagtcagcgcgctctgcgcgtctttcaatactaattccattgctatctccttacgccttcacagctggtttaacgatcaggtcgctaccggttgcacccgggacagcacctttaaccagcagcaggttgcgctcagcgtcaacgcgtactacgtcaaggctctgaacggttacacgttcgttacccatctgacctgccattttcttgcctttgaacactttgcccggagtctggttctgaccgatagaacccggaacgcggtgagacaaggagttaccgtgagtagcgtcctgggtacggaa

SEQ ID NO: 2122 - DNA, 197 bp, Escherichia coli; identical to SEQ ID NO: 1884

SEQ ID NO: 2123 - DNA, 283 bp, Escherichia coli
cgcaggcagctgatggtcaacaggatgagagaaacccagagacaggttaatcacattgcctttaaccgctgcacggtaacctacaccaaccagctgcagcttcttagtgaagccttcggtaacaccgataaccattgagttcagcagggcacgcgcggtaccagcctgtgcccaaccgtctgcgtaaccatcacgcggaccgaaggtcagggtattatctgcatgtttaacttcaacagcatcgttgagagtacgagtcagctcgccgtttttacctttgatc

SEQ ID NO: 2124 - DNA, 159 bp, Escherichia coli; identical to SEQ ID NO: 1867

SEQ ID NO: 2125 - DNA, 448 bp, Escherichia coli
aagcattgcgcggggtccggcgctcatcaacaatcggggggcagcaaggggctgaaacgggaaagcccctcccgaagaaggggccttgtataaggaaagggttatgatgaagctcgtcatcatactggttgtgttgttacctgttaagtttcccgacttactaacaactcatcagaggggggagaaatcctcccttacccttgttcctttactctaggttgaaaaaacaacagcgtcaataggcctgccatgtacgaagcgagatctgtgaaccgctttccggttagccttttttatcctgttggatcttcttgatgatgttggtcgtcgagcaaccgtcttcaaagttgagcaccaacacttcgccaccgttggcccagacttctttactcccggcaatctcttctggtttatagtcgccgcctttcaccagcagatctggcaagat

SEQ ID NO: 2126 - DNA, 142 bp, Escherichia coli
aatgcgatgggtggtgtagatagcaatggtgttggagccaatcacattcagcaggctggtggagcgcataccgaatcgttgctcgtattgataaaacagcttcatgatcaccacaatcgataccagcgacaacagcagcgag

SEQ ID NO: 2127 - DNA, 172 bp, Escherichia coli
agtgcgtggcaaaagtaatgaaatctgtttagaagactcctgccagtaaagcgaacaggggcgtgaggcatcgagtaacgtaatatcgccagcgccaatctgcacctgacgctcatcctgctccattattgcctgaccactaagctgaaaaacggtgtaaaaccaggcatcg

SEQ ID NO: 2128 - DNA, 142 bp, Escherichia coli; identical to SEQ ID NO: 1966

SEQ ID NO: 2129 - DNA, 46 bp, Escherichia coli
ttcagcagggtaattaatattcacgttgtcattccattgaaataga

SEQ ID NO: 2130 - DNA, 438 bp, Escherichia coli
agttttgccacgatctcgttatcacgagtacgggcgaatgccagacgacgattagcaacgctatcagtcttggcaagagtaatcagccggctcaactacgcggcgcagctctttcgctttaggcagagtcgtcttgatgatttcatgacgaaccagtgaacctgccatattgcggaacatagcctggcgatggctgctgttgcggttcagttgacgaccactcttacgatggcgcatgaccttatccttctcagtaaaaccttaacctgtgatccggttactcgtcagcgatgcttgccggtggccagttttccaggcgcatgcccagagacagtccacgggaagccagcacgtctttaatctcagtaagagattttttaccaaggttaggcgttttaaggagctcaacctcggtacgctgtaccagatcaccgatat

SEQ ID NO: 2131 - DNA, 221 bp, Escherichia coli
aacaagcgtaactccctgggaaatgcgagcttaaccactcaggggttagctttattacttagaaacggtcagacgagcgcggcctttagcacgacgacgtgccagaacctgacgaccatttttagtagccatacgagcacggaagccgtgagaacggttgcgcttcagtacagacggttgaaaagtgcgtttcatggcgatttctacctaaacttgaataa

SEQ ID NO: 2132 - DNA, 224 bp, Escherichia coli
ctttaccgcgtttacctttatctttaccggttaacacgataacttcgtcatcacgacggattttcgctgccatgattcgctccttagagtacttctggtgccagagagataattttcatgaacttctcactacgaagctcacgagttaccggcccaaaaatacgcgtaccgataggctgctcgctgttgttgttcagaagaacacaagcattaccatcgaagcg

SEQ ID NO: 2133 - DNA, 308 bp, Escherichia coli
cccagatatcgataactttgttgtagcgttcgcccgcagttaccagaccagactggaactgctcctgaatttcagcaacttctgcttctgcctcggagatgatttcgtgtttcttctccgggatgaccatgtcatcgataccaacagatgcaccagaacgcgctgcataggcgaagccggtgtacatgatctggtccgcaaaaataacggtcggtttcagaccgagaatgcggtagcaggtgttcagcattttggagattgcttttttacccagcgcctggttgacgatggagtaaggcagacctttc

SEQ ID NO: 2134 - DNA, 258 bp, Escherichia coli
tatcaacggccgggatgtattcgccagggattacaccacctttaatgtcgttgatgaactcgtagcctttcgggtttgaacccggctccagcgggtacatgtcgataacaacatgaccatactgaccacgaccaccagactgtttcgcgtgtttaccttcaacatcggtaactttctggcggatagtttcacggtaagcaacctgcggtttacctacgttcgcttcaacgttgaattcacgcttcatacggtcaacga

SEQ ID NO: 2135 - DNA, 329 bp, Escherichia coli
aaggacgggattaacgcatccagcggattttcgacaaacgtacattgcgtattgatgcgtttgcataattcctttgccagatcgatatcgaagccaaccagttcgccttgtgaattttttgattcaaatggcgcataggtcgggtcggtaccgatgcggatgttttgcggaatcgcagcaaacgccgcagttgcgctggagaaggccagaaccagagagagcgatagcaccagttttttcataatgtcctcaactgacagtctttttatagggaatatttacaggtttgttacacttatcgtgccataaaattgaccatcaaggcaaaa

SEQ ID NO: 2136 - DNA, 452 bp, Escherichia coli
gcccactggtcaagtaaccacataaatactccaggggatgaacaaaaagagtacagctattgtagataagtggggatactacgggtataaaaaaacccgccggggcgggtttttttacgttgcttcagattactctgcagcagcttctgctttctctgaacgatcaaccagctcgatgtaagccatcggcgcgttgtcgcctgcacggaagccacacttcagaatacgagtgtaaccaccggcacggctcgcgaaacgcgggcccagttcgttaaacagttttgccacgatctcgttatcacgagtacgggcgaatgccagacgacgattagcaacgctatcagtcttggcaagagtaatcagcggctcaactacgcggcgcagctctttcgctttaggcagagtcgtcttgatgatttcatgacgaaccagtgaacctgccatattgcgga

SEQ ID NO: 2137 - DNA, 387 bp, Escherichia coli
tgactgtgcatacgacgataatcgagtgcaataaaacccaaaacgatataaatgataactccaaacagcttttcagtcagccactgtgcctgcccggaaaatggcaggatgtgcgctttagccatcaacgcaatgccgcttaacagtaacagcgtatcgacaaccggcggcacaatgcgcgtccagcgagcaaatgcctgtggatgcttctgataacgtagccagaaacgtaaggttaatagcccaacagaaagcgcgatactaataagatgaacactaagcagtgtagaaaaacttgtcattgataatagcggccgagcgttacgcgctcgttatcaccatagtcacggcaggtttcgacgtcatgataccccgcgaggataaatg

SEQ ID NO: 2138 - DNA, 452 bp, Escherichia coli; identical to SEQ ID NO: 2136

SEQ ID NO: 2139 - DNA, 185 bp, Escherichia coli; identical to SEQ ID NO: 1866

SEQ ID NO: 2140 - DNA, 359 bp, Escherichia coli
tggcgtagcaacaccgagacgatcggacgccagcgcctgctgaacatgttcagccaggaatgccggatcaaggaaaatgttgataaagcctggaccggcgatctcaactttgctggcgataccgttaagatccagatgagtcagcacctgctctgctaattgtcgcggtgccatacccagttttttagcaactgccatcatgccgttagcctgatagtcgccgaactgaacttttgctgactgacgaacctgcggttcgcaatccgcaggcgcgcctgccgcaatcatggcctgacggactttttctgagagaagagcctgaatattcaccggaataccttacattgatgaagcgagca

SEQ ID NO: 2141 - DNA, 564 bp, Escherichia coli
attcgaagatgttgttgatctgcgtgccgtaaccgcgcgaacgcgtcaccacaccctcttcttccagcgcctgcatcgccttgcgcaccgtaatgcgcgaaacgccggttaactgacttaaatcacgctcaccgggcaaaatattgccatgctccagcaccccgctgcgcacggcattttttaccgtttcggcaaacttaatataaagcggcgtgttatccgccgctaaaatacgctcgttcagttgggcaatcagctgggtatgcgcttgttccatttgtctttttcctgccggggagtctggtgggagtatatcactgcttcttatttaaggcgtttctttaatcccatcaacgaatgcctgcaactcctccaccgtgccattaaatacattaaaatccaccggaccattgatgccatctacctgtccacggtcggaatgctgccagaagcgccaggccattccgtcattgtccggacgacgttgatagtagtgagccacccaccacggatattcattgaaatagcccgccagattggtgtgataaaaaacggctcctgagt

SEQ ID NO: 2142 - DNA, 268 bp, Escherichia coli
aactttgttacgcgcaccgaagatgaacggcttcattttcgggttccagtaacgggtctggtgaccgaagtgaacaccagccttgagcatgtcgcgcatggaaacagttgccatgattaaaacctctatataaaagttggggttatgcctccacgtatcccatattaccgaccccaaagggcaccccggaatatgtgccgatacgtgtgtgttgttacacaaagtgagattgtcgcttccgtccagtctgtgtatacgaaatggatcg

SEQ ID NO: 2143 - DNA, 282 bp, Escherichia coli
ggataaatttgaagatactgaaaccagtcgctttagcgattgaacccaataccagcaccacaaacaggatacaggtaatgtagaaacagataatcagctgccccagttgcaccagtgtgccgacgccgtatttaccgatggtaaacgccattgccccgaacgcaccaataggtgccagacgcatgatcatattgatgatgccgaagatgacctgcgagaaactttcgatgacgttaaaaatcagttggcctttgctgcccagacggtggagcgcaaaaccaa

SEQ ID NO: 2144 - DNA, 188 bp, Escherichia coli
aagtttgcgtacaaacgggctggtgtagctaccgacgagtttcatgccgagtcctttgtgcgaggaaaaatatcagtatggcctggtgatgggaaaaagggcagaaaatgttgatggtttgttacttccaaataaatcacatatttatcatggtgatataaatattttcctaattatttcactctgat

SEQ ID NO: 2145 - DNA, 62 bp, Escherichia coli
atgcagtctctgcaaaggatcttgttgataaaattggcagaaacgttgccacaatgaaggga

SEQ ID NO: 2146 - DNA, 332 bp, Escherichia coli
tataagaatccaggaagccagccagttccaggattttcgcttcccactctgcgtcgccttccagcgctttcagagcagaaccacgaacgatcggagtgtcgtcgcccgggaagtcgtactgagacagaagttcacgaacttccatttcaaccagttccagcagctcttcgtcatcaaccatgtcgcatttgttcaggaacacgatgatgtacggaacgcctacctgacgacccagcaggatgtgctcacgagtctgcggcatcgggccgtcagtcgcagcaactaccaggatcgcgccgtccatctgagcagcaccggtgatcatgttttta

SEQ ID NO: 2147 - DNA, 87 bp, Escherichia coli
cttgaaacgatgtataccgaaactggtattactccagagaaaactcattaccagactatataaagtaccattaaaaataccaatgga

SEQ ID NO: 2148 - DNA, 113 bp, Escherichia coli
atttaaacgcatctcttactcctcaactttaaccatgaaggaaaccgcgttgatcataccgcgaatagcaggagtatcctcgcgctctacggtgtgaccaatacgacgcagac

SEQ ID NO: 2149 - DNA, 107 bp, Escherichia coli
cagcggaagtgatggtaataccacgttcctgctcctgctccatccagtccatggttgcagcgccgtcatgaacttcaccgattttatggtttacaccggtgtagaac

SEQ ID NO: 2150 - DNA, 511 bp, Escherichia coli
ccaggtatataacccggaggccagcttgcggatcatcccggcgcgcagcatcagctgatggctgatcacctcggcgtcggcaggtgtctccttgagagtggagagcaggtattggctagtacgcatgttgttacggttccagttggaaggtagaacaggctcaaggcgagcctgggacaaaaaaaagtgatttagtttaccagtgcaaaagaaatgtcaaaagagaagggcgtgaatttaacgcggttccagcgcaaagacttcaaaacctgcgtcggtgacgcgccagcgaacgttaaaatcatgtagccagacggcataggttttgcccgtttcctcacctttacgataggccgggcgcgggtcctgcgccagtacttcgcggataaacagcgttaactgcggataacgcttctccagcgtcaaaagctgcttttcgacctctgcggtaaaactcaccgccatctctgcagctggcgcactttgcgcatagctggcactggcatcggga

SEQ ID NO: 2151 - DNA, 541 bp, Escherichia coli
ctgctgactgtgcatacgacgataatcgagtgcaataaaacccaaaacgatataaatgataactccaaacagcttttcagtcagccactgtgcctgcccggaaaatggcaggatgtgcgctttagccatcaacgcaatgccgcttaacagtaacagcgtatcgacaaccggcggcacaatgcgcgtccagcgagcaaatgcctgtggatgcttctgataacgtagccagaaacgtaaggttaatagcccaacagaaagcgcgatactaataagatgaacactaagcagtgtagaaaaacttgtcattgataatagcggccgagcgttacgcgctcgttatcaccatagtcacggcaggtttcgacgtcatgataccccgcgaggataaatgcttgtcgcaccgcttcgccctgctgccagccatgttccagaagcagaaagccgccggataccagcgcgttacgcgactgttcgatgatatgcacgatgtctgccattccactgtctgccgcaaccagcgcagtgagcggctcaaagcgga

SEQ ID NO: 2152 - DNA, 321 bp, Escherichia coli
gtttatagatgcgcagacctgggcggctgacacgctgaatgctttctacaacagctttgccctggaaatacttcagagtaagttccagttcaggcttggtgtcgccttcaactttaaaatcttcaataaaaccttcttccttcagcacgttggcgattgccactttcagcttggaggaaggcatggtgaccgcagctttgttcgcggcctgaccgttacggatacgggtcagcatatccgcgatcggatcttgcatgctcatctgtctttactcccgtgattcaattggtgacaattaccagctagcctttttcagacccg

SEQ ID NO: 2153 - DNA, 373 bp, Escherichia coli
gacgaccacggccaacagctttcagaccgaagctgccgaagctaacatccgtaccctgcgccagaccgcggttacggcctttgtgcattttacggaattttgtacgctttggttgtaacatcagcgacgctccttatttacggcctttacgctgctgctttttaggctgagcagccggtttttccggttgttcaacagcagccataccacccaggatctcgcctttgaagatccacactttaacgccgattacaccgtaagtggtgtgcgcttcagaggtgttgtagtcgatgtcagcacgcagagtgtgcagcggtacgcgaccttcgcggtaccattcggtacgtgcgatttccgcgccgcccagacggcc

SEQ ID NO: 2154 - DNA, 153 bp, Escherichia coli
taaaatagcgcgcgttgcgcacgttatcataaccgatcagcgaaacatcctgcgggacgcgcaggcccatttcatcagcagcacaaagtgcgcccattgccatgatatcgccaccacagaagacggcagtagggcgatgcggctgcgacagga

SEQ ID NO: 2155 - DNA, 386 bp, Escherichia coli
gcgagcagtgtgaatggttacacggatgctcttagccggacgctcgataacgatacgagatacggacgctttagccagttccttagtcaggtactgacgtactttaaaatcgctgtccaggttgtcagcgaattctttggtgttcgcaaaccaggtagagttccatggttttacaatacccaggcgaataccattaggatgtactttctgacccattgctagtctccagagtctcagcgatcggacacaaccacagtgatgtggctggtgcgcttcaggatgcgatctgcacgaccttttgcacgcggcataatgcgcttcatgctcgggccttcgtctacgaaaattttcgtaactttcagatcgtcaatgtcagcgccatcgtt

SEQ ID NO: 2156 - DNA, 320 bp, Escherichia coli
ggatgaacacgcgacgaccagacggtgaatttctgattgccaacatagctgaaggcacccggccacggatcggcaacggcacgtaccatgttgtgcagtacggatgccggtttatgccattcaaggaaactgtcatccggcgttctgcgaccaaaacaggtggcttcgttttcgcgctgggcgatttccagaatattaccgtgtttaatggcgggtaatgtctgttccagtagctggcgcgcggcatggcacaatttatgatgcagcgtaatagcgatatcgtctggcgcaatggcaatgcgcagttgcgccacaatggc

SEQ ID NO: 2157 - DNA, 269 bp, Escherichia coli
tcgaaggcgatcaggctaaccgggtcgataccagttgcatcgcgtacgtcaaccttgtgcaggttgcgcgcagccaggaacaggttttcgtccagctcaccggtgatgatcagcacatcttccagagccatgtctttcagtttctgtgccagcagcttagttttcggcgcttctacagagaacttctcgacaacgatcagacgatcctgacgtaccagttcggacaggatgcttttcagcgcgccgcggtacatcttcttgttaacttt

SEQ ID NO: 2158 - DNA, 205 bp, Escherichia coli
cataagtctttcgagtggctcgttagcaaaaagtttcaacaatggagtaaatacatccaacatatcaataacctctcaactgtaagggtattgaaatgttaacacaagctctcgctgtaggggtatagccgagaccaccgaagcccggaggtggtgaaataaaaccgggcacaacacgaaggcgcatttccgatatccataaaga

SEQ ID NO: 2159 - DNA, 195 bp, Escherichia coli
ggtgcggcagaagttctaaaatctcttcaatctgcagagtatgagtgttagtagtcaagatactcttcctgtcaaaatataagaaacgacaataataacacggcctgccgcaatcgtaagaatgagacaggccgtaaagtttggcgaacaaaagatggaacgttagtcttgttgattaaccttgcgctcaagcga

SEQ ID NO: 2160 - DNA, 218 bp, Escherichia coli
cgacgacggaaataacgtgccatatggctagtctccagaatctatcaattcaatctgctcggcatgcaaaaccattttgctcagtccgttctttgccttgtggcatgaaatgaacccctgaacggttatgcgactgccgaccgttatactgtgagtaatggcctggttttcgtgtccgctaacaataacgggcatttgacaccacgcctgccggtgaa

SEQ ID NO: 2161 - DNA, 200 bp, Escherichia coli
acttaagttgaatgaacgggagtaaagcgaaaagactatagagtgaaggagaaattttgagggtgctgtctcaccgataaagatgagacgctggaaagattagtaactggactgctgggatttttcagcctggatacgctggtagatctcttcacggtgaacagaaacttccttcggggcatttacgccaatacgtacct

SEQ ID NO: 2162 - DNA, 424 bp, Escherichia coli
gagtcaaagaagacgcccggactacggtgcagctgggaaacgataacacgctcagtaccgttgataacaaaggtaccgttgtctgtcatgagcggaatttcgcccatgtagacttcttgttctttaatgtcttttacggtgccttccggcgcttcgcgctcatagatcaccagacgcagtttaacgcgcagcggtgcggaataggtcacgccacggatttgacattcctggacgtcaaacaccggttcgccaaggcggtagctgacgtattgcagctcggaattaccgctgtagctctgaatcgggaatacggaacggaaagcagcttccagaccatactgcccttcaggatcttgctcgataaatttctgaaacgagtcaagctggatagaaaggagataaggtacatccagaacttgtggac

SEQ ID NO: 2163 - DNA, 410 bp, Escherichia coli
atttcttgacggaagcacgaactttcatttttactctccgtaacttctcgggcgaccaattatcggccgtagcctttcaggttcgccttcttcaatgcagactcatactgactggacatcatcagagtttgcacttgagccataaagtccataatcacgacaacaacgataagcagtgaggtcccaccgaagtagaacggtactttcattgcatcacgcatgaactccgggatcaggcagataaaggtaatatacagcgcaccaaccagggtcaggcgggtcattactttatcgatatacttcgccgtttgctctcccggacgaattcctggtacaaatgcaccggacttcttcaggttatctgctgtttcacgcgggttgaaaaccaacgccgtgtagaagaaacagaa

SEQ ID NO: 2164 - DNA, 103 bp, Escherichia coli
agcagtgtagcgctcgatcatgcccggaacctgttcgctctggtcaggatggaccataaaaacgatttcgtaatgacgcatcgaattgctccttacggattat

SEQ ID NO: 2165 - DNA, 349 bp, Escherichia coli
ctcatgtacggcttgtcgggatggttggtcttcatatgctcgacgtagttgtcgtagtctggaatgccaatcaacatcttcgccgcctggccgagatatttttttgcctgtcctaagttaccaaacatagttcactctgataagaacaaagccccgccgaagcggggctaaacacggttagtggtgcgaagagatcttcacgccgccttccgggattggaacgtacggtgtttctttgtcagtacgtttgtcgctgttacgcaccgcaagccaggttttgaaaccgtagaagatgatgctgtacaccacaatcaggaacagaatactcagacctgcgttggtgtagttg

SEQ ID NO: 2166 - DNA, 405 bp, Escherichia coli
ccggctgttccagctcggcgtttacttcttccagacgctctttcttggcgtcgtagtcaaagataccccctaagaacgtcggagcgttccgtgaggtcctgaatgcgattatttaccggattaatttcaaacatggtctgatttcttttattgagctagtcaaaatgcggtgataagagcgggattgtacccaatccacgctcttttttatagagaagatgacgctaaattggccagatattgtcgatgataatttgcaggctgcggttgccgcgaaactcgttgatatcgagcttataagccagttgcacttcgcgcacgccgttatccggccagagggcggtatcgacattaaaagcaataccatccagcagtggaccgccgccgaccggttcgaccatcacc

SEQ ID NO: 2167 - DNA, 91 bp, Escherichia coli
cgtattctttaattcggtaagattcatagtggtgtgagttcttaaacttggggtaaatctcgaacttaatgttgtgaatggtatggcagga

SEQ ID NO: 2168 - DNA, 214 bp, Escherichia coli; identical to SEQ ID NO: 1907

SEQ ID NO: 2169 - DNA, 473 bp, Escherichia coli
gcgctcaaccattttcttcgcagctttaatggtggtagcaagaccacgcagttccagcttgccgtagatgaacggtttgaacagctccagtgccattttcttcggcagaccgcactgatgcagacgcaggtatggacctacggtgattacagaacgaccggagtagtcaacacgcttaccgagcaggttctgacggaaacgaccctgtttacctttgatcatgtcggccaaagatttcagaggacgcttgttagaaccggtgatcgcacgaccgcgacgaccgttatccagcagggcgtctaccgcttcctgcagcatacgtttttcgttacgtacgatgatgtccggcgcagccagatccagcagacgtttcagacggttgttacggttaatgacgcgacgatacagatcgttcaggtcagaagtcgcgaaacgaccaccatccagcggaaccagcggacgcagatctggcg

SEQ ID NO: 2170 - DNA, 354 bp, Escherichia coli
ggtcagttcgtcggtctgacgcgtaatggtctggccgtcgatcatgtcagtaaagcgtacaaaaccgcttacttcggtgataaccggcatggtgtgcgggtcccagtttgcaacggtttcgccgccagcaacctgttcgccatcgcctttcgccagtaccgcaccgtaaggtactttgtagctttctttagtacgaccgaattcgtcgatcagtttcagttcagtattacgggaagtgataaccagtttaccgctggagttcacaaccgacttcacgttgctgagcttgatgctacctttgtttttcacttggatgctggattcagcagccgcacgagatgccgcaccaccgat

SEQ ID NO: 2171 - DNA, 68 bp, Escherichia coli
cccgacacactgcatgctgtatttgatcagtgagacaaacggtgtttcgagggcgtaaatagcgggca

SEQ ID NO: 2172 - DNA, 335 bp, Escherichia coli
aaggaagccgtattcgttagtctgtgcgtacacggacagagagttgatcagaccgatgttcggaccttcaggggtttcgattggacatacgcgaccgtagtgagtcgggtgtacgtctcgaacttcgaagcctgcacgttcacgggtcagaccgcctgggccgagtgcggagatacgacgtttgtgcgtaatctcagacagcgggttgttctggtccataaactgagacagctggctggaaccgaagaactctttcactgctgcggaaatcggcttggcgttgatcatatcctgtggcatcagggtatccagatcgcccagagacagacgctctt

SEQ ID NO: 2173 - DNA, 321 bp, Escherichia coli; identical to SEQ ID NO: 1994

SEQ ID NO: 2174 - DNA, 541 bp, Escherichia coli
ggtgcagccggagcttcacccgcagcacggcgacgcatacgatcctggtggtacgcgtaaccggtacctgccgggatcagacgacccacgataacgttctctttcaggccgcgcagttcgtcgcgtttgcccgcaacggctgcttcggtcagcacgcgagtggtctcctggaacgatgccgcggagatgaaggactcggttgccagagacgctttggtgatacccagcagatcgcgggagtaagttgcacccactttgccgttcgcttccagttcgcggtttgcgatcttgacgcgagagtattcaacctgttcgccttccaggaagtcggagctacccgcgttaacgatggtagctttcgcagcatctgacgaacgataacttcgatgtgtttatcgttaatcttaacgccctgcagacggtatacgtcctgtacttcgttaacgatgtaacgagtaacagcatgaacaccacgcagacgcagaatgtcgtgcggcgcttccggaccgtcggaaattacgtcaccacgttctacacgttc

SEQ ID NO: 2175 - DNA, 92 bp, Escherichia coli
gtaaatgcggaaagcgagcgcaaaatttcagcaaaaaaccacgtccggtgccttcgtagccctgcaccgtagtggttaacaacgttcgagga

SEQ ID NO: 2176 - DNA, 164 bp, Escherichia coli
aggacctttcttgagagaacgtggcatggcttatcctctaaaattatttgctacggcgacgtacgatgaatttatcagtacgcttgttgctgcgggtcttcttacctttggtctgaacgccccacggagttaccgggtgcttaccaaagttacgaccttcacca

SEQ ID NO: 2177 - DNA, 476 bp, Escherichia coli
ttagtgaagccttcggtaacaccgataaccattgagttcagcagggcacgcgcggtaccagcctgtgcccaaccgtctgcgtaaccatcacgcggaccgaaggtcagggtattatctgcatgtttaacttcaacagcatcgttgagagtacgagtcagctcgccgtttttacctttgatcgtaataacctgaccgttgatttttacgtcaacgccggcaggaacaacgaccggtgctttagcaacacgagacattttttcctccgattaggctacgtagcagataatttcgccaccaagaccagcctggcgcgctgcacgatcagtcataacacctttagaggtagaaacaactgcgatacccagacccgccataactttcggcagctcatctttacgtttatagatgcgcagacctgggcggctgacacgctgaatgctttctacaacagctttgccctggaaatacttcagagt

SEQ ID NO: 2178 - DNA, 226 bp, Escherichia coli
ggcgtggcacccattgcgcgggaagcttcaattaacccggttgggatctccagcagagcgttctcgaccatacgggcaataaacggtgctgcaccaacggttaacggaacaatcgctgcctgcaaaccaatcgatgtaccgacaataacgcgggtaaacggaatcatccatacaagcaagataatgaacgggatggaacggaaaatgttcacaatcgcagaaacgg

SEQ ID NO: 2179 - DNA, 300 bp, Escherichia coli
tggaagaatggctcattgacagagacattttttactgcgcgcagaaaacgaccttcttcaaaatccagcacgcgatccaccagtaagaacgggaaacggtgcggcagaagttctaaaatctcttcaatctgcagagtatgagtgttagtagtcaagatactcttcctgtcaaaatataagaaacgacaataataacacggcctgccgcaatcgtaagaatgagacaggccgtaaagtttggcgaacaaaagatggaacgttagtcttgttgattaaccttgcgctcaagcgatttcagac

SEQ ID NO: 2180 - DNA, 195 bp, Escherichia coli
cagaacgccagatcgggctcttgatagaaccagaacgcgcacggccggtgcctttctggcgccacggttttttaccggaaccagttacttcagcacgagtcttctgagcacgagtaccctgacgagcaccagctgcataagcaacaacaacctggtgaaccagcgcttcgttgaaatcacgaccgaaggtagttt

SEQ ID NO: 2181 - DNA, 327 bp, Escherichia coli
ttgcgtttcatgataccagtggcttttgccggtgatgtggcgttgttccatgggcgctccttggtcgtaaaggaaatcgttatcctgacgcaaggcgggaaggggagaaagacggatcggcgataacaaatatcagaaaggtataacagagataacgggcggcagaacgccgcccatctttaccaacagaacgattatttcagttcgagttcgttcattgcagcaatgctgaaaccgccgtcaacgtggaccacttcaccggagataccggcagagagatcggagcacaggaatgccgcagagttacccacatcttcaatagtaacg

SEQ ID NO: 2182 - DNA, 85 bp, Escherichia coli
taccgcggcccagaactttcagcagtttgtcgttcgggatagtgatcagagagtccacatgcttggacagttcagtgatcccctg

SEQ ID NO: 2183 - DNA, 497 bp, Escherichia coli
gcttttgccggtgatgtggcgttgttccatgggcgctccttggtcgtaaaggaaatcgttatcctgacgcaaggcgggaaggggagaaagacggatcggcgataacaaatatcagaaaggtataacagagataacgggcggcagaacgccgcccatctttaccaacagaacgattatttcagttcgagttcgttcattgcagcaatgctgaaaccgccgtcaacgtggaccacttcaccggagataccggcagagagatcggagcacaggaatgccgcagagttacccacatcttcaatagtaacggtacggcgaatcggggtaacggcttcgcaatgagccagcattttgcggaagtctttgataccggaggccgccagagtacggatcggaccagcagagatggcgttaacacgcacaccttccggacccatcgcgttcgccatatagcgcacgttcgcttccagagacgcttttgccagacccataacgttgta

SEQ ID NO: 2184 - DNA, 334 bp, Escherichia coli
tcggcaaccccttttttcgccaccaccacgaaatccatagccgggagttcatgttggcgcagacggaagctttcacgcgtcagacgtttaatccgattgcgttcatgggcgcgtcgaacgtttttcttggcgactgtaagaccgatacggggatgccccagcgaattcaggcggccgagaatggtaatttgcggcgtgccagcccgttgtggctgctggaagacgaatgtgaattgactgggagttaacaagcgtaactccctgggaaatgcgagcttaaccactcaggggttagctttattacttagaaacggtcagacgagcgcggccttta

SEQ ID NO: 2185 - DNA, 237 bp, Escherichia coli
gttgccggttacagcaactttgtcagcgttcagaacgatgatgtaatcaccggtatctacgtgcggagtgtattccgctttgtgcttaccgcgcaggcgacgagccagttcagtagccagacggcccagagttttaccggtcgcgtcaacaacataccagtcgcgttttacggtttctggtttagctgtaaaagttttcattaaaagcttacccaataaatagttacacgttggtga

SEQ ID NO: 2186 - DNA, 266 bp, Escherichia coli
ctggatttccagctcgccctgggcgtttttgaactgctcagccgggatggcggactcagatttcagaccagcgtcaaccagtactacgtctttgtcgatagcaacaacaacgccacgaacgatagaacccgggcgggtttcgatttcttttaaggactcttcaaagagttgagcaaaagattcagtcatgtttaatcttcaggtttatatttaacgtccacctggctccatgccggatggggttgtttaacatacccgctgtcatt

SEQ ID NO: 2187 - DNA, 340 bp, Escherichia coli
taaggtacatccagaacttgtggacgtttaccaaaatccttacgaatacgttttttctcggtataggagtaaaccatagggttcctcagctcgctgacaagtcgacccatctgtccattgagcggacagtttgtgcaacactattttgttgaccggaaaatggaacactttccgcaatgcctgttgctatcacgcttaaaccatttcattgcgatttacacagaacggacgtcctgtcgcagtatattaagtcgtcgatagaaacaagcattgaaaggcacagcagtagtcaaacagtgtgaaacgctactggcgccttacagcgcaaaaaggctggtga

SEQ ID NO: 2188 - DNA, 462 bp, Escherichia coli
cacccatgcggtccattttgttaacgaacgcaatgcgcggaactttatatttgtttgcctgacgccatacggtttcagactgcggctgaacaccaccaactgcgcagtaaaccattaccgcaccatcgagaacacgcatggaacgttctacttcgattgtgaagtcaacgtgccccggggtgtcgatgatgttgatgcgatgcggctcatactgcttagccataccagaccagaatgcagtagtcgcagcggaagtgatggtaataccacgttcctgctcctgctccatccagtccatggttgcagcgccgtcatgaacttcaccgattttatggtttacaccggtgtagaacagaatacgttcggtagtagtggttttaccggcgtcgatgtgcgcactgataccgatgttacggtagcgtgcgatgggtgttgtacgagccatttgtttcctcgtttatc

SEQ ID NO: 2189 - DNA, 164 bp, Escherichia coli; identical to SEQ ID NO: 1603

SEQ ID NO: 2190 - DNA, 446 bp, Escherichia coli
ccctggtcagcgtcgttccagttgatagctttcattttcaccaggtcaacaacaccggtgaaatgttcttcagcaccaatcgccagctgcagcggaaccgggttcgcgcccagacgggttttgatctggttaacaactttcaggaagttcgcacccatgcggtccattttgttaacgaacgcaatgcgcggaactttatatttgtttgcctgacgccatacggtttcagactgcggctgaacaccaccaactgcgcagtaaaccattaccgcaccatcgagaacacgcatggaacgttctacttcgattgtgaagtcaacgtgccccggggtgtcgatgatgttgatgcgatgcggctcatactgcttagccataccagaccagaatgcagtagtcgcagcggaagtgatggtaataccacgttcctgctcctgctccatccagtc

SEQ ID NO: 2191 - DNA, 146 bp, Escherichia coli
cgtacatgccgccaaactcaccaaaataggggttaagtaatgttgtcattgttcctttccttaatatgcgcgcagcgtctggaaaaccgaggccaaaagacgtgcgtctttgatgcccggttgcgactctacagcagaattaaaat

SEQ ID NO: 2192 - DNA, 100 bp, Escherichia coli
accgatgtaggaagtcacttcgaaaccgttagtcagacgaacacggcatactttacgcagcgcggagttcggttttttaggagtggtagtatatacacga

SEQ ID NO: 2193 - DNA, 153 bp, Escherichia coli
cgggcttcaattacggcctgagcaacgttactcggcgcttcatcatacttcaggaattccatagtgtatgatgcacgacctttggtcagagaacgcagctgagttgcgtatccgaacatttcagacagcggtacttcagcgtggatcttaacg

SEQ ID NO: 2194 - DNA, 166 bp, Escherichia coli
gaatcggtgaagcagatttgccttatagcgcacattatcacgggaaagaacgtgccgaaatatcttaaacagtcgaaatttaacgcattgttgagtaagtaagacaaaaaaagccccaccagaatggcggggcaaagagaatagctagttagctatttaacgcggg

SEQ ID NO: 2195 - DNA, 404 bp, Escherichia coli
aatacccatgtctactaccgggtagcctgccagcggacctgctttcagctgttcctggatacctttatcaacggccgggatgtattcgccagggattacaccacctttaatgtcgttgatgaactcgtagcctttcgggtttgaacccggctccagcgggtacatgtcgataacaacatgaccatactgaccacgaccaccagactgtttcgcgtgtttaccttcaacatcggtaactttctggcggatagtttcacggtaagcaacctgcggtttacctacgttcgcttcaacgttgaattcacgcttcatacggtcaacgatgatgtcgaggtgcagttcgcccatacccgcgatgatggtctggttagattcttcgtcagtccatacacggaaagacgggt

SEQ ID NO: 2196 - DNA, 416 bp, Escherichia coli
ttccctgtctgtttgccgacagacgcatatgctctaaccctcattgatcctatgttacccttgtttgcccgtccgccactggacgggcttttttttagctggctaactgctgacagaaagcctgcaacgtctcttccggcataccaatctgccgcgctgcatcacaaatggcctgccagcttcccgcatccagtggaatcccctgcttctgccgttcgcgacgcgtgttcacttcccactcgcccggtagcaaaatcggcttatcatcatcatgcggcgaggctttcacccactcggcaaaggcttcggtctgcgcgttacaatccggcgcgccgaagagttccgggttgatgatgatagtggtcatgcagttaagaatggcatcgggactggtttgtaacgtttcctgatgcgtc

SEQ ID NO: 2197 - DNA, 368 bp, Escherichia coli
cacgaccgccacggatcaggatcacggagtgctcctgcaggttgtgaccttcaccaccgatgtaggaagtcacttcgaaaccgttagtcagacgaacacggcatactttacgcagcgcggagttcggttttttaggagtggtagtatatacacgagtacatacgccacgtttttgcgggcatgcttccagcgcaggcacgttgcttttcgcaactttgcgagcacgtggtttgcgtaccagctggttaactgttgccattaaatagctcctggttttagcttttgcttcgtaaacacgtaataaaacgtcctcacacaatatgaggacgccgaattttagggcgatgccgaaaaggtgtcaagaaata

SEQ ID NO: 2198 - DNA, 132 bp, Escherichia coli
gtcgcgcatatcgatgaagatcaggctaccaagatcacgacgacggttgacccaaccacacgagtcacctgctgccccacgtgggacaaacggagctgtccacaatattctgtacgcatgagatatccctta

SEQ ID NO: 2199 - DNA, 123 bp, Escherichia coli
cgccggtgagcgtcgtgcctgtcgcagtggcttttgttttgacgatctcccgtccgcccatattgacctgtgttttgtcagaagaggtgtctgactccacggttaacacgccgccatttgcca

SEQ ID NO: 2200 - DNA, 472 bp, Escherichia coli
atctgttcagcaatccagccagccagcgcctggatgcggtcagttttgtcgcgcagcgtccccaactgttgctggaacaacacggtttgcaggcgcggcaggttatcttcaagacgttttttacggtcggtgttgaagaagaactcggcatccgccagacgcggacgaacgactttctcgttaccggagataatctgctgcggatctttcgattcgatgttggcaacgaagataaagttcggcagcagtttgccgtcgttcgcatacaccgggaagtatttctggtcacctttcatggtgtaaaccagcgcttcagccggcaccgcgaggaatttctcttcgaattttgcggtcagaacgaccggccactccaccagcgaagccacttcttccagcaggctttcgcttaagtcagcgttaccgccaatcttacgcgctgcttcttcggcatcggctttaatcttcgccttac

SEQ ID NO: 2201 - DNA, 472 bp, Escherichia coli
tacggaagggctattgttgtaattaataatatcatctggttttaggacaagtaaaaaacccgttaagtaatttgcattaatgttatacgtatttgttaaatccgatatttgctggtattcacacttcatcttcttatttttatcaagcctagatagaggtgcaacatgattttcaattttatattttttatcatttattattatatcgtatgtataatcatgtaaaataccattcgttgttattggcataaatgcgaaagcaaccatcaattgtgcattgtttgatttaaattttatttgagagtcagtaacacttgaggctagcataaatttatcatcttgcttgctcaaacttaacctggatgctgctttaggcatcacatcagcggattcaccttgtatgaaccccatcattggaagtttctgtgtgatttctagcttttttacattcagaaaagattttttagcatca

SEQ ID NO: 2202 - DNA, 138 bp, Escherichia coli
agatgattgccgggaacttgttagcggcacgcaggcggcggctcgcacccttaccctgctctttacgtacttctgcgttgatagtaaacatttctttctctcttaaattaatcctgctacaggcgacccagcaacagg

SEQ ID NO: 2203 - DNA, 349 bp, Escherichia coli
aggatcgctacttcgccctgcttctccattaccatcagccctagtgaggtaataatgttaaacgccgcaacggcgacaatcaggctcagcagtaaacccatcatatttttttccatgcgtacggcctggaacaactcgcctttacgatcacgccagtcctgccatttgctgccttcaggcagtttttgctgacttaatgagtcgactttcagcggctcatccagccacaaacgccagccggtaatattgcctgccggataacgcatcagacgcgaggcatcctcaatattcaccagcatttcatagccatcgacttcactgttggcggcgaaagtgccaatcacattga

SEQ ID NO: 2204 - DNA, 117 bp, Escherichia coli
ttgttttctgcagcatcagaaagttcgttcgccaggcgcagagccatggatttatcaccgcgtttacgagcagcttcaacgatccaacgcattgccagagcattacgacgaaccgga

SEQ ID NO: 2205 - DNA, 450 bp, Escherichia coli; identical to SEQ ID NO: 1806

SEQ ID NO: 2206 - DNA, 121 bp, Escherichia coli
ggcaatttgaatattcactttatcggcatccggtataccggttttgttcagatgctcctgcaccttcttcgcctgatcgtctttatcgtgctgacctgtaaccgcgtcccagagtttttct

SEQ ID NO: 2207 - DNA, 434 bp, Escherichia coli
taatcccgttctgattaacagcggacttaatactgagcaaagtacaatggcgacaatgcaaattataatgctattaattttatactgttcaagcatgttatgtctggctgaagccaatttagccacagtaaccgttaatgatggcgaaacttcatcaatattaattcgtaaagcatctatctctgtatcattaataatgcttctgtaaatgccagctgcgctgattgtctcactagcaggtatgttatttaacatgccatcactgacatttgtccggttaacaattttattgatgctatcaccatgaataatcaagatatcctgactaacatccatcatccggttaaagtacacaggtaacgtatctggatttaccccatcaattaacaactgcttgatctgcgctgtccggttaatgagtgttgtatcatcgc

SEQ ID NO: 2208 - DNA, 92 bp, Escherichia coli
gatacgggtcatacccacttttttaccgactaaaccaatcattgtttcaacctctcaatcgctcaatgacctgattaacccaggctgatctg

SEQ ID NO: 2209 - DNA, 68 bp, Escherichia coli
gcagtgctgccatcagtcaacgtaccgtcccaggtgaaactgtgaactccggcggtcagttcaccaat

SEQ ID NO: 2210 - DNA, 259 bp, Escherichia coli
ccataatgccgatcactggctcgtagttagttaactggttaatttgctgcagaagccgctctgatacccattgcggcagatcagcaagcgattgctgaaacgactttcaaaccttcagaattattcatcactactcctcgaaaaaataataaaaaacggtagaatcgtgagattccgccgttaattgcgtatgttcagagtgatgatatatatctgaagattttttcaatcctctgcgcttgaggcagctgcgcgactg

SEQ ID NO: 2211 - DNA, 149 bp, Escherichia coli
ggaaatggctaataacagatcgtcaggggacgacgcctgtactgttgcgagtagcgcatgcatatcgcgcactgcggcagcattgaagccaatcttcatcagcttccaggcaaagttttgcgccaccagacccgaagcgccaataccgg

SEQ ID NO: 2212 - DNA, 544 bp, Escherichia coli
ttctttgcctgcgacaaaaaatgccagctgcgcctgcgtccagtcgaattcagcggcatcctgcacggtgattgtcttaccaccaaagcgcagttgttcgcctgcgctttcgttacgtgccagtgcataaatttccccaaccgggaactgacgttcagccagcgtttcaagcagggcttcgcccacagcgccagttgcgcccaggacggcaatgttccagccttcagacatggtggtttactccagaaatagcaaagctccctgccaatgttacagcagagagcatgaagaagagattaacgtgccggatgatgaacggcgttaaaacccagtttacacagcaatgatgccgcactggcgtcatcacaaattacatacagagatgaccattcacggcgctcaagatagtttttgcgcagtttatcgaactcacccggtatcccggcgactttacgcagcggtgcgtcatcgcggcgcacatcatacaccaaatgcaccagccttttcagcgtcggttgatcgagcgggccatgcagcgtaatgc

SEQ ID NO: 2213 - DNA, 278 bp, Escherichia coli
aacagcctggaaggcaacgcggtatacgcgagaacgcgcaccgtagtagcctttagcttgtttcaaaattttcttgtgacgtgcacgtgcaataacaccacgttttacgcgagccatatgtgctctcctgtatctatattctaattaaaaagttaaaaacgttaacggcttatgcgtacggcaggcacgcgattaccaggcccagatcgcctttggaaaccatggctttcggacgcaggtgacgtttacgtttggtcgcttttttggtcagaatgtga

SEQ ID NO: 2214 - DNA, 265 bp, Escherichia coli
gtgttacctgccagcaatgccggaacgatatgtccgttcggcaaatgaccagggaaattatacggcccaaacaccgccagcacgccgtgctgggcgatgtcgcaggctcgccgcgccgtccggcatttcactacgctgctcgccggtacgaacgtgatacgccttaattgatatcgcgattttattgatcatcgccgtcacttcggttgccgcttcccagcgcggcttacccgtttctctggcaataatcgcggttaattcggct

SEQ ID NO: 2215 - DNA, 453 bp, Escherichia coli
taattgtagcggaaaagtgaggaagaagaactaattgctgtgagaggtcaaatcagaaaaaggaatagcgcagattgaggtttttgtaaaaggccgaatgaatatccggcctgagattgctgataagtttgcttgtgcgggcctgttcccctcaccctaaccctctccccgagggggcgaggggactgtccgtgcgcgctttcgaattagccgaggattttttccagatcagcgcgaacttcagcaaccggcttggtgccgtcaactttcgcgtatttggtattacccgcttctgcttctttggagtagtagccgatcagcggtgctgtcatctgatggtattcaaccagacgtttacgtacggtctcttcctgatcatctttacgggtagtcagttcttcaccggtaacgtcgtctttgccttctactttcggcggattgaatttaacgtga

SEQ ID NO: 2216 - DNA, 354 bp, Escherichia coli
attcttcataatcagtacggggttgctacaacatgtattactttttcaccacaattaacggttcaatatcactctcttttttgatgaccagtgattcatcaccgcgcaaacacgtcccaccgtagttgccgccaacggtgaaggtacatacctgaatgtatttaccgtccactttcggcaaacaccacagttgctgatagatgtttttctgctcggcaaatttaccgctggttttgtccagcacctcttcatgatggctgacgaggtcgatattgctgccacagcgaccggcgatcggtttcactgcgtaacctgttttcaccagttcatcattaacagtgaaatcggtatcca

SEQ ID NO: 2217 - DNA, 123 bp, Escherichia coli
cttaagtacgcgccgcaaacggaaacgatcaaaccggcagcgatgatgatttcgccccatggtcccatcatttccaccatcagaccggccattgacgggttacgaatttcagccagttcagga

SEQ ID NO: 2218 - DNA, 278 bp, Escherichia coli
ggctcttcgggcactgcgctgcccatctctttaatatgtttggcatagttactgccaacacagactactttactcaccggataatccagcagcgcaccttgccagttgtgatgttgatacataacgttcccctcaccttatcgtggatatgaaaacccgcgccgacaaagataatgccaccgccggatatcggttatttgttagtgtcgtctgttttctgccccatgacggaaagatgttgcttcagcaaatcttcgggtggtggcggtaactgcaaa

SEQ ID NO: 2219 - DNA, 124 bp, Escherichia coli
tttgacttctttggcgtgtgcagcaacgttggtaagcaggagtgaggtgcaaagggtgagtagaatgttctttattttcatggtgtagggccttctgtagttagaggacagttttaataagtaa

SEQ ID NO: 2220 - DNA, 166 bp, Escherichia coli
attgcgttcacgtttacacacattcgggcggggattgtactgactttcgcccttgttgcaaacttttactatcaatccaggtgatgtaagcagagtaacaaaatgacggggaaagatgttgcgggacgcacaaaatcgtcccgaaatacgtttactgcataacagg

SEQ ID NO: 2221 - DNA, 418 bp, Escherichia coli
atgatgtcgcctacgcctgcgtagcgacggtgcgagccacccagaaccttgatacacattacgcgacgtgcaccggagttgtcggcgacgttcagcatagtctgttcttggatcattttagtgctccgctaatgtcaactactactgagacccgaaaatcaggtcgttaaaaatccccatatcgagggcgcggcattataacaccgcttcaaggatatgggtagaaaaaataaacggctcatttctgaggcctgtttattcggtattgagagagtgtactgtattacagaaccgctttctctacaactgcgaaccagcgtccaggatttagtcttggacagcggacggcattcgcggatttcaaccacgtcaccgataccgcattcgttgttctcgtcatgtacgtgcagtttggtcg

SEQ ID NO: 2222 - DNA, 482 bp, Escherichia coli
gatgagactgtgcagccataatcgaggacgcgcccgctaattttaataacgctatctgcggataaagcagaataggtggttaaccccagacataaaccgaggaaaataatgttattgtatttcataatctattgttccttagcgacagattgctgtctgctggttcagtaaggtaccaggagaaacttcaggaagcttgtactcgacaatacagtttgagtttttatctttgccccatgaaacctgtaattgccctgactgtggaagtccagtcagataaacctgaccattttccgcgacaatgctgccatttttattctctccgtgtgtgacaattgcaccgaatggaacgctcttattaccgtacttcaacgtcattaatactttcccgccgatttgtgcattaaatgttgctctggcaatagcaccgtgagttgggatgacagtgaccacggtttcatccagttcaacattatctgcaa

SEQ ID NO: 2223 - DNA, 252 bp, Escherichia coli
aaccatgtcgaccagttccagcggctgacgaactaccatgcgggcagtttcacgaccgaagtactgttccagagaacgttggttgattacgattttaccgttgcccggtttgatgaaaacgcgagctgcggaacttttgcggcgaccagtgccgtagtattgattttcagccattgcctataatcccgattagatgtcaagaacttgcggttgctgtgccgcgtggttgtgctcgttacccgcgtaaacttt

SEQ ID NO: 2224 - DNA, 420 bp, Escherichia coli
gcatatttgcgtccaatatttctatacccaaaccggaggccgtattgcttccttcatccagtttcaacaaagtattattttctgcatcctcaataccgttaaatgcaacccgaacccccgttgtccctttgctgcattcacttaacgtaatctgaaaagggacggctggacttgtgctaccggtcgttggaaattgtctggcactgtttttttggagatctacggttaaattaagcgaatccgatgagactgtgcagccataatcgaggacgcgcccgctaattttaataacgctatctgcggataaagcagaataggtggttaaccccagacataaaccgaggaaaataatgttattgtatttcataatctattgttccttagcgacagattgctgtctgctggttcagtaaggtacca

SEQ ID NO: 2225 - DNA, 289 bp, Escherichia coli
atgcgggcagtttcacgaccgaagtactgttccagagaacgttggttgattacgattttaccgttgcccggtttgatgaaaacgcgagctgcggaacttttgcggcgaccagtgccgtagtattgattttcagccattgcctataatcccgattagatgtcaagaacttgcggttgctgtgccgcgtggttgtgctcgttacccgcgtaaactttcagtttacggaacatagcacgacccagcgggccttttggcaacatgcctttaaccgcgatttcaatcacacgct

SEQ ID NO: 2226 - DNA, 110 bp, Escherichia coli
gggccgctattttctgctgcaccagcatgaccacgccttgtagtagatcaaggggttcgaatccagcaaccaccagcggacgatgaaaatcgctggcgataaaattatag

SEQ ID NO: 2227 - DNA, 226 bp, Escherichia coli; identical to SEQ ID NO: 1705

SEQ ID NO: 2228 - DNA, 47 bp, Escherichia coli
taaaggctcaagggtcaccttggcgtgcgtcgaactcacttgctcga

SEQ ID NO: 2229 - DNA, 269 bp, Escherichia coli
gggatattttgcttaatcgcgccttcctgtaacagagcagcgaaacgttctgcgcgttctgaacgctcaccgatgacaatacgtgaaggatggagattatcgtaaagggctttaccctcacggagaaattccggggagaatataatattttcagtgcgatatttcttatgcatcgctgcggtaaaaccaacgggaaccgttgatttgatgaccataaccgcataaggatttatctcaactacgtctttaattactgattctacactgga

SEQ ID NO: 2230 - DNA, 91 bp, Escherichia coli; identical to SEQ ID NO: 2167

SEQ ID NO: 2231 - DNA, 163 bp, Escherichia coli
gaactttgttacgcgcaccgaagatgaacggcttcattttcgggttccagtaacgggtctggtgaccgaagtgaacaccagccttgagcatgtcgcgcatggaaacagttgccatgattaaaacctctatataaaagttggggttatgcctccacgtatccca

SEQ ID NO: 2232 - DNA, 373 bp, Escherichia coli
aacatgaaaacccagtccttgcaaagatgaagtcgaaatgcgcgatgacacactactgaaagcggaaggacgagtaaagttgcaattaaaaggaaatgttatgcataaggagcagtagagtattcgttttcatttaaagatattcttgcgctttaattacaaactgcaccgatgttggtggcgtcaaaatcgccgaggcgttccctgaaggccggggcagcccacatggatgtgggctgagggcgcgttttacagggatgttacctcgcgcccgacccggtagccgtaagggataagtcgagggcaccgcgcagcggcgattttgttcgccagagcccgggggtgcagggggcggcggcgattggccgccccc

SEQ ID NO: 2233 - DNA, 120 bp, Escherichia coli
tacgaatacgttttttctcggtataggagtaaaccatagggttcctcagctcgctgacaagtcgacccatctgtccattgagcggacagtttgtgcaacactattttgttgaccggaaaa

SEQ ID NO: 2234 - DNA, 228 bp, Escherichia coli
gcacttgtttgatgaagtgctggagcattttttcagtcacgaagaagtcggcgataacgccgtctttcattgggcgaatggcagcaatattgcccggcgtacggcccagcatctgcttcgcgtcatgacctactgcagctacgcttttcggtgaaccggcacgatcctgacgaatggccaccacggaaggctcattcaatacgatgccttgtccttttacataaatga

SEQ ID NO: 2235 - DNA, 47 bp, Escherichia coli; identical to SEQ ID NO: 1720

SEQ ID NO: 2236 - DNA, 286 bp, Escherichia coli
aacgcaaaatcagtcttgagtagtacggaagggctattgttgtaattaataatatcatctggttttaggacaagtaaaaaacccgttaagtaatttgcattaatgttatacgtatttgttaaatccgatatttgctggtattcacacttcatcttcttatttttatcaagcctagatagaggtgcaacatgattttcaattttatattttttatcatttattattatatcgtatgtataatcatgtaaaataccattcgttgttattggcataaatgcgaaagcaa

SEQ ID NO: 2237 - DNA, 90 bp, Escherichia coli
tgcgcgatatccgcatcagtaccagactcaaaggtcagggtgatctgcacggtacccgtggagtcactgttagaggacatgtacatcagg

SEQ ID NO: 2238 - DNA, 164 bp, Escherichia coli
gagtgtcgtctgattcatcatcagggggtgtcggtgggagtggagaattgttgcgatgatgatgatcatcatcgtcgtttagttccacctacggctaaggccgtgattaacgcagcagccgcctgtggaaagccatggcatcaggttttgttcgactaaaggag

SEQ ID NO: 2239 - DNA, 161 bp, Escherichia coli
caggcggatacggattctttggttctgcatgagaccagagctccaattattttataaacgaaaatgattactcctcagacccattacgattgatgggagagtgtaaccgttcttacgtagctccccgattgggagcattgttaggtagccaaattcggcta

SEQ ID NO: 2240 - DNA, 191 bp, Escherichia coli
ttgcccaggctgcaaatacagcgaaattgttgtcagccagttccaaccagtaccgcccccgaaccatgacgcgatggtcgccgggaacagaataatactggaagcgaagattgccgggattacccccgccatattcactttcagcggtaaatgtgtgctctgtgcagcatagacaccgacgaccttgctga

SEQ ID NO: 2241 - DNA, 155 bp, Escherichia coli
ccttcacgggtaacggcgttaacatagtcaccatccagctgatcgccaggtgcaaaaccaatagagtgtacgaaaccgtcaaatttcggccaaactttccccagttcagcgaacatggtgtcgatgctggcatcttctgcaacatcgcactgcag

SEQ ID NO: 2242 - DNA, 39 bp, Escherichia coli
ccgcctggagatgttcacttacgcctggtggccgttgat

SEQ ID NO: 2243 - DNA, 270 bp, Escherichia coli
aaaggaagggggccagcgtttctttttcaaggatcacgtcgagtagaaagggatcgctgacctttgcggcttccgggaccagaggcagaacgtcatactccgtagtactggattgcgtttcatgataccagtggcttttgccggtgatgtggcgttgttccatgggcgctccttggtcgtaaaggaaatcgttatcctgacgcaaggcgggaaggggagaaagacggatcggcgataacaaatatcagaaaggtataacagagataacgg

SEQ ID NO: 2244 - DNA, 447 bp, Escherichia coli
cgaaaaggattttacctttgcgagaagcaatcttgttcagttcagccagagcttcgttgaacatcggtacagttttctcaaggttgatgatgtgaactttgttacgcgcaccgaagatgaacggcttcattttcgggttccagtaacgggtctggtgaccgaagtgaacaccagccttgagcatgtcgcgcatggaaacagttgccatgattaaaacctctatataaaagttggggttatgcctccacgtatcccatattaccgaccccaaagggcaccccggaatatgtgccgatacgtgtgtgttgttacacaaagtgagattgtcgcttccgtccagtctgtgtatacgaaatggatcggaagtccggcgcgctttataccacaaatacgtcgtggacaccaataattgttggcgctgtgtacagcatcagacgtcgaattttc

SEQ ID NO: 2245 - DNA, 148 bp, Escherichia coli
ttgatgtaatcaatggcagcctgaacggtggtgattttctcagcttcttcgtccggaatctcagtatcaaactcttcttccagagccattaccagctcaacggtgtcaagagaatccgcgcccaggtcttcaacgaaagaagcattgt

SEQ ID NO: 2246 - DNA, 183 bp, Escherichia coli
tgttcgttttgacatagttatttttcaacctgatacaacgagaaagaggaaggaaaagggctgttatctgacaggtcagataacgccctaacgtattaacggtaatccagcgttacgttaacgatagcgtctgcttcccctggggtgatttctgatggaactacggttgatacgtagtaagcg

SEQ ID NO: 2247 - DNA, 90 bp, Escherichia coli
tgtcgctaaggtgatggttgtagccgacatggttgttcatgtttgaacgggcgttatgcaccaggaacgcatcgcgctgattgagtaggg

SEQ ID NO: 2248 - DNA, 327 bp, Escherichia coli
cggaaagcagcttccagaccatactgcccttcaggatcttgctcgataaatttctgaaacgagtcaagctggatagaaaggagataaggtacatccagaacttgtggacgtttaccaaaatccttacgaatacgttttttctcggtataggagtaaaccatagggttcctcagctcgctgacaagtcgacccatctgtccattgagcggacagtttgtgcaacactattttgttgaccggaaaatggaacactttccgcaatgcctgttgctatcacgcttaaaccatttcattgcgatttacacagaacggacgtcctgtcgcagt

SEQ ID NO: 2249 - DNA, 315 bp, Escherichia coli
aatctcttcaatctgcagagtatgagtgttagtagtcaagatactcttcctgtcaaaatataagaaacgacaataataacacggcctgccgcaatcgtaagaatgagacaggccgtaaagtttggcgaacaaaagatggaacgttagtcttgttgattaaccttgcgctcaagcgatttcagacgcttgctcatgtcatcaatgttcatcaccagtgcagcggttttgcgccagactttgttgggttgcagcggaatgcctgaggaatagacgcctggttcagtgatgggacgcatcaccatacccatgcccgta

SEQ ID NO: 2250 - DNA, 188 bp, Escherichia coli; identical to SEQ ID NO: 2144

SEQ ID NO: 2251 - DNA, 115 bp, Escherichia coli
ttatttaacttcaacttcagcgccagcttcttccagagcttttttcagtgcttctgcgtcgtctttgctcacgccttctttcagagcagccggtgcagattctaccaggtcttta

SEQ ID NO: 2252 - DNA, 369 bp, Escherichia coli
ccaggatcgcgccgtccatctgcgcagcaccggtgatcatgtttttaacatagtcggcgtgccccgggcagtctacgtgtgcgtagtgacgggtcggggtgtcgtattcaacgtgagaagtgttgatggtgataccacgagctttttcttccggcgcgttatcgatctggtcgaatgcgcgagcagcaccgccgtaggttttagccagtacggtagtgattgcagcggtcagcgttgttttaccatggtcaacgtggccgatagtaccgacgttaacgtgcggttttgtacgttcaaacttttctttagacatcgattgtccctctaagacacggataaatcggtgatatcaccacatcaaccaggcaa

SEQ ID NO: 2253 - DNA, 383 bp, Escherichia coli
ggcaattagctcagaacttttgctacaacgcccgcgccaacggtacggccgccttcacggattgcgaaacgcagaccgtcgtccatcgcgatcgggtggatcagggtaacaaccattttgatgttgtcgcccggcattaccatctctacgccttccggcagttcgatggtaccagtcacgtcagtagtacggaagtagaactgcggacggtagcctttgaagaacggagtatgacggccgccttcatctttggacagaatgtacacttcagattcgaacttggtgtgcggcttgatggtgcccggcttagccagtacctgaccacgttcgatttcttcacgtttgataccacgcagcagaacacctacgttctcaccagcacg

SEQ ID NO: 2254 - DNA, 197 bp, Escherichia coli
agccggcacataaccacgaccgcgctgaactttgatacgcatgctaatagacgcgttctcatcggtcaggtggcagatcacgtgctgcggcttgacgatttcgacatcaccgtcgtgggtgatatcggctgcagtcacagggccaatgccagatttattcaaggtaagaataacttcatctttgccctgaactctca

SEQ ID NO: 2255 - DNA, 298 bp, Escherichia coli
ccttttatttcattgtattacgcgtaaaaaataagcccgtgtaagggagattacacaggctaaggaggtggttcctggtacagctagcattttatgggttatgtttttcagcgaaacggatgataaccttaataaatgcagctgtatgtgatcggtttctaagaattttccatccgggaaaaataatcgaaattaatcacttaccgtggggattacgcgtggtttccccggagaaattacgcatcagcagcgcgtaattgagctcaagatcctgcgggaccgggagccacacagtata

SEQ ID NO: 2256 - DNA, 304 bp, Escherichia coli
ggaaccagttacttcagcacgagtcttctgagcacgagtaccctgacgagcaccagctgcataagcaacaacaacctggtgaaccagcgcttcgttgaaatcacgaccgaaggtagtttcggaaacagtcagcgcgctctgcgcgtctttcaatactaattccattgctatctccttacgccttcacagctggtttaacgatcaggtcgctaccggttgcacccgggacagcacctttaaccagcagcaggttgcgctcagcgtcaacgcgtactacgtcaaggctctgaacggttacacgttc

SEQ ID NO: 2257 - DNA, 153 bp, Escherichia coli; identical to SEQ ID NO: 2154

SEQ ID NO: 2258 - DNA, 396 bp, Escherichia coli
tgcttatgatcaggaatgttaatgcctgctatacgggccactatgcactcctactatttaatatgtacgttccatgctgaaaagcccgttttcaggatactcaaatggaaacgcacagacatacaaaagattggctggctaatctagccagctcaacccaactttgcaagaaaaatatgcgaaaaaatcagccttggcgctgtttatgcttcggctcggcactgcaaatcacacggatgacaccatcacgcttaacgattttgcagttacggcataatttcttgacggaagcacgaactttcatttttactctccgtaacttctcgggcgaccaattatcggccgtagcctttcaggttcgccttcttcaatgcagactcatactgactggacatc

SEQ ID NO: 2259 - DNA, 225 bp, Escherichia coli
ctttaccgcgtttacctttatctttaccggttaacacgataacttcgtcatcacgacggattttcgctgccatgattcgcctccttagagtacttctggtgccagagagataattttcatgaacttctcactacgaagctcacgagttaccggcccaaaaatacgcgtaccgataggctgctcgctgttgttgttcagaagaacacaagcattaccatcgaagcg

SEQ ID NO: 2260 - DNA, 466 bp, Escherichia coli
gcacttgtttgatgaagtgctggagcattttttcagtcacgaagaagtcggcgataacgccgtctttcattgggcgaatggcagcaatattgcccggcgtacggcccagcatctgcttcgcgtcatgacctactgcagctacgcttttcggtgaaccggcacgatcctgacgaatggccaccacggaaggctcattcaatacgatgccttgtccttttacataaatgagggtattcgcagtacccaggtcaatggacaagtcattggaaaacatgccacgaaattttttcaacatactaagggataatcctgaaagctggggcggaaaagaaaatccgcttactttaccaaccacacgcagcagcgacaaggcgcaaaaatcatctgctacggtgaaaattagtgcagttcgtttcctttgttacaaatctctgcctgagtccagaaaggcttaatgcatcagcag

SEQ ID NO: 2261 - DNA, 140 bp, Escherichia coli
cagctcctggagcttgcggcgtgcgcgggtcgcacgacggatacgagcagatttcttatccatagtgttaccttacttcttcttagcctctttggtacgcacgacttcgtcggcgtaacgaacacccttgcctttataag

SEQ ID NO: 2262 - DNA, 256 bp, Escherichia coli
aacttcagctttgattacgccgccatcaacgaaaggaacgccgattttgacttcttcaccgtttgcgatcatcagcacttcagcgaactcaacagtttcgccagttgcgatgtccagcttttccaggcgaacggtctgaccttcgcttactcggtgttgtttaccaccactttggaaaaccgcgtacatataaaactccgcttccgcgcacaccttttcaatgattcagagtgcgctataaatattcacaataggg

SEQ ID NO: 2263 - DNA, 328 bp, Escherichia coli
cgtttgcagatcaaggttgaggttcttctcaacgataattcgcagcacgccaagcgcggcacgacgcagcgcaaacgggtctttgtcgcctttcggatgctgaccgataccgaagatacccgccagggtatccatcttgtcagcaatcgccagcgcacaagctactgggttggacggcaggtcatcaccagcaaaacgcggctgatactgctcattcagcgccaccgcgacatcttccgcttcgccatcgtgacgcgcatagtgcatccccataacgccctgggtgtcggtgaactcgaagaccatgttggtcatcaggtcgcactta

SEQ ID NO: 2264 - DNA, 381 bp, Escherichia coli
atacgcgccagggtgtcaccagagctgatctgtacgccatcttccagctgaacaatcgctttacccggcaggaagtactgcgctggcatatcggtacctgggatcagaacgtcgttaccctgagcatcaacgattttcagtgccggacgcagatctttaccacctgcggtacgttctgcggaatccagaaccaccagcgaagacagaccggtcagttcgtcggtctgacgcgtaatggtctggccgtcgatcatgtcagtaaagcgtacaaaaccgcttacttcggtgataaccggcatggtgtgcgggtcccagtttgcaacggtttcgccgccagcaacctgttcgccatcgcctttcgccagtaccgcaccgtaaggt

SEQ ID NO: 2265 - DNA, 314 bp, Escherichia coli
gaaaacccagtccttgcaaagatgaagtcgaaatgcgcgatgacacactactgaaagcggaaggacgagtaaagttgcaattaaaaggaaatgttatgcataaggagcagtagagtattcgttttcatttaaagatattcttgcgctttaattacaaactgcaccgatgttggtggcgtcaaaatcgccgaggcgttccctgaaggccggggcagcccacatggatgtgggctgagggcgcgttttacagggatgttacctcgcgcccgacccggtagccgtaagggataagtcgagggcaccgcgcagcggcg

SEQ ID NO: 2266 - DNA, 280 bp, Escherichia coli
tggcgttttgccatttcagcagcgtggatgcgagcaccgagaacagaaagtgctttagctttgtttttatgttgtgaacgttcgtcctgacattcaacaacaatcccggtcggcaagtgagtaatacgaattgccgaatcggtggtgttaacgtgctgaccacccgcccctgacgagcggaaagtatcaatgcgtaaatctgctgggttgatgtccggcagttctgcgtcaggcagttctggcattaccgcaacggtacaagcagaagtatgaatacgac

SEQ ID NO: 2267 - DNA, 146 bp, Escherichia coli
ggagtgcacagcgacagtcttgatgcccagttctttacaggcacgaagaatacgcaatgcaatctcgccgcggttggcaataacaattttatccagcatgttcgcctcgttactcgatgacgaccagcggctcgtcaaattctacc

SEQ ID NO: 2268 - DNA, 119 bp, Escherichia coli
aaggctgagtatgccttcttttatatgcgtaatcaggggtcaattacaaatcatcaaggaaagttttatccagttgtttgaaggcgcgcttaagcgtgtcagctaatgcctggtaatca

SEQ ID NO: 2269 - DNA, 318 bp, Escherichia coli
accgggtcagactctttcggccccaaatggctgtatgggtcgttaaacaaccccatatcatatttaacgttcagtacatggcagggcagcatcgtccagctctgccatcgtcacgtttgccggatttaatcaacccaggcagatacttcgagtagtactcgtcgctcatgctcatgttgattccggatttcagcgccacgcgcaccgcatcttccgggtctgccgccgtgccatgtttaatcagctctttgattgcaccgtgatcggaaacggtgatgcctttaaagccccactggtcgcgcagaacatctttcagca

SEQ ID NO: 2270 - DNA, 520 bp, Escherichia coli
aaaaacacttttgcgccaattatggagaaaaaaagaaaatttgatggagagtgatgagagaatattacaacacgatgattttgcagagattatgaagaactataccggatgactggtgataaataaagcaaataaccaggattaatctgtattaatttataagaaagcaacttaatacccgcagaatgatttctgcgggtaagtattagcttattttttcgagcattaatcccgcgcgtaatcccaacgctaccaacggattagggaataacacatactctacatcatgggttacggtaaaacgttcctctccgtcctgcgccagcaatgttcctttctcaaacggcataaaattcagcgtgtcacttgccatatgcatttcgaaggacggcgagtggcgagtaatttgcgaaaccacccgataacggagcggcggtgttctcacgataccgacactctcaccagatagcagcgcagcaattgcgctggcagttactgcaaactggcgaagatcgttttg

SEQ ID NO: 2271 - DNA, 66 bp, Escherichia coli
agttctttttcgttcccgcctgacaactgccagcggcgggtattatcaggtaagttatcaccacgg

SEQ ID NO: 2272 - DNA, 275 bp, Escherichia coli
agattactctgcagcagcttctgctttctctgaacgatcaaccagctcgatgtaagccatcggcgcgttgtcgcctgcacggaagccacacttcagaatacgagtgtaaccaccggcacggctcgcgaaacgcgggcccagttcgttaaacagttttgccacgatctcgttatcacgagtacgggcgaatgccagacgacgattagcaacgctatcagtcttggcaagagtaatcagcggctcaactacgcggcgcagctctttcgctttaggca

SEQ ID NO: 2273 - DNA, 221 bp, Escherichia coli; identical to SEQ ID NO: 1731

SEQ ID NO: 2274 - DNA, 95 bp, Escherichia coli; identical to SEQ ID NO: 1573

SEQ ID NO: 2275 - DNA, 552 bp, Escherichia coli
tgcgaaacctttacctttagaggtgccagttacgtcaacttttttaacgtcagcaaacagttcaacgcctaatgctctgacctacagtgaactcttcgccttcagccaggcggaattcccacagaccacggccagcttctacgccagctttagcgaagtggccagcttcaggcttggtcacacggttagcttttttagcaccggtggtcacctgaatagcacggtagccatcgttagccaggtctttaacctgagtaacgcggtttgcttcaacttcgattacggttactgggatagaaacgccgtcttctgtgaagatacgggtcatacccacttttttaccgactaaaccaatcattgtttcaacctctcaatcgctcaatgacctgattaacccaggctgatctgcacgtctacaccggcagccagatccagacgcatcagagcatcaacggttttctcggttggctcaacgatgtcaaccagacgcaagtgagtacggatttcgtactgatcgcgcgcgtctttgttgacgtgcggggagatcagaac

SEQ ID NO: 2276 - DNA, 100 bp, Escherichia coli
ttaatcatattgcgacgggctttttccatcgctttctggatcgctgctggaacttcacgcgctttaccgtaaccaaaaccaacgcgaccgttaccatcgc

SEQ ID NO: 2277 - DNA, 114 bp, Escherichia coli; identical to SEQ ID NO: 1780

SEQ ID NO: 2278 - DNA, 527 bp, Escherichia coli
aatagagtgtacgaaaccgtcaaatttcggccaaactttccccagttcagcgaacatggtgtcgatgcctggcatcttctgcaacatcgcactgcagaacgatgtcagaacccaattgagcggcaaattcttctacgcggcctttcagtttgtcgttctggtaggtgaatgccagttcagctccttcgcggtgcatcgcctgagcgataccgtaggcgatggatagtttgctggcaacaccggttaccagaatgcgcttaccggaaagaaaacccatagctttaatccttattgttgatgcttgttgtgcctgaaaatcaggcgattcgtcgttttagtaaacagtacgaacagataaacggttattataatcaacctggctgtgagtagctatagttgccaggtccgaccggagcaggctgcggcagggggggcgcttttcccctcaccctaaccctctccccagaggggcgaggggacccgtattgtgcaaatattgttacccccagcaacaaacaggctcatac

SEQ ID NO: 2279 - DNA, 23 bp, Escherichia coli
cttccggttggtccgtcggcggc

SEQ ID NO: 2280 - DNA, 99 bp, Escherichia coli
tgataaacgctggcgtgttcgcaatccgtgttacctgatcgtagccacggatctcctgcactttcaggatatcaataccgtactcttcatcaccaaggg

SEQ ID NO: 2281 - DNA, 269 bp, Escherichia coli
ttcgctttctcacgaatgcttacaacgtcattcggactaacctgataagaagcgatgttaacaacacgaccgtttaccataattgctttatggctaaccagctgacgtgcttctgcacgagtggcaccgaagcccatacggtatacaacgttgtccagacgaccttccagcagagccaacaggttttcaccggtgttgcctttcagacgtgctgcttctttgtagtagttacggaactgacgctccagcacaccatagatacggcgaac

SEQ ID NO: 2282 - DNA, 571 bp, Escherichia coli
  misc_feature (509)..(509): n=g, a, t or c
agagcgctgagccagggtctccagcgcgctgtatacgatagattcagcagtagattttttaccatctaccatcaggatatttacaaatttagccagcagttctgatccgaacttcggatccggcagaattttacgctgaccaatgacgcgacgacgtggcatggaaatactccgttgttaattcaggattgtccaaaactctacgagtttagtttgacatttaagttaaaacgtttggccttacttaacggagaaccattaagccttaggacgcttcacgccatacttggaacgagcctgcttacggtctttaacgccggagcagtcaagcgcaccacgtacggtgtggtaacgaacacccgggaggtctttaacacgaccgccacggatcaggatcacggagtgctcctgcaggttgtgaccttcaccaccgatgtaggaagtcacttcgaaaccgttagtcagacgaacacggcatactttacgcagcgcggagttcggttttttangagtggtagtatatacacgagtacatacgccacgtttttgcgggcatgctttcagcgcaggc

SEQ ID NO: 2283 - DNA, 53 bp, Escherichia coli
tttcaccaggggatattttttcagcggggaaaactggttgttctgtacataac

SEQ ID NO: 2284 - DNA, 140 bp, Escherichia coli
gatggagtttaccaatggaggaaacgcgcaggcggttgcaagtggcgcagaagtctttttcatacggcatgataaggccaatctctccggcgtaatctggatggcaaaagacttgcgcgggaccgtcgctgcgttgacgt

SEQ ID NO: 2285 - DNA, 381 bp, Escherichia coli
gacgcgcatagtgcatccccataacgccctgggtgtcggtgaactcgaagaccatgttggtcatcaggtcgcacttagacagcagacccgcacgggtagcgtggttaacgtcagcgccaatctgttcagcaatccagccagccagcgcctggatgcggtcagttttgtcgcgcagcgtccccaactgttgctggaacaacacggtttgcaggcgcggcaggttatcttcaagacgttttttacggtcggtgttgaagaagaactcggcatccgccagacgcggacgaacgactttctcgttaccggagataatctgctgcggatctttcgattcgatgttggcaacgaagataaagttcggcagcagtttgccgtcgttcg

SEQ ID NO: 2286 - DNA, 39 bp, Escherichia coli
cgggggagtgatacaccgttttaccctgactatctgcca

SEQ ID NO: 2287 - DNA, 166 bp, Escherichia coli; identical to SEQ ID NO: 2220

SEQ ID NO: 2288 - DNA, 170 bp, Escherichia coli
gcaattaatcttgatggaattctgatgagagcgaaagaggtaagccaggtcgtacccgacttacctggaggagatttaatactcgagaatgccgtgcgcgacgggcaaatagcgcagagagaaatagagagtgtctttaccgcaagaggaacgtttcgctaacagcgagg

SEQ ID NO: 2289 - DNA, 251 bp, Escherichia coli
gatgtgagccatcttacacctctaccttagaactgaaggccagcttcacgggcagcatctgccagtgcctggacacgaccatgatattggaacccggaacggtcaaaggatacatctttgatgcctttttccagagcgcgttcagcgacagctttacccacagctgcagccgcgtctttgttaccggtgtacttcagttgttcagcgatagctttttctacagtagaagcagctaccagaacttcagaacc

SEQ ID NO: 2290 - DNA, 237 bp, Escherichia coli
atggtcactaacgttgagagggtgctcatcacgaacttatacatacggaaggaatccgcctgtagtaccagataggcaattggctgcgggtttgccggacgttcgagcgagtaaacgcccagcgagatttgaaccggtagctcaaacaggcgagtaaccattaccggcaccgggcgctctggaataaaacttttacgcagcgcctggaactggttaggcagcactacatcggcacgg

SEQ ID NO: 2291 - DNA, 459 bp, Escherichia coli
cggtgatctcttccggacccagcttggtgtcacgggacacacacgccagttcctgaatgtggatggtggtgaaacggtcttcctgaacaacacgctcggatacgaggatggagtcttcgaagttgtaaccattccacggcatgaacgctacgcgcatgttctgaccaagcgccagttcaccgaggtcggtggacggaccgtctgccagcacgtcgccacgttcaaccggttcacccagagacacacacggcatctggttgatacaggtgttctggttagaacgggtgtatttggtcaggttgtagatgtcgatacctgcttcacccggatacatctcgtcttcgttaactttgataacgatacgggaagcatccacgtactgaacgacaccaccacgtttagctaccgcagttacaccggagtcaacggcaacagcacgttccataccagtaccaacca

SEQ ID NO: 2292 - DNA, 239 bp, Escherichia coli
tctttgctcacgccttctttcagagcagccggtgcagattctaccaggtctttagcttctttcagacccaggccagttgcgccacgtactgctttgataacagcaacttttgttagccgccagcagcctttcagaattacgtcgaattcagttttttcttcagcagcttcaaccgggccagcagcctacagctacagcagcagcagcggaaacaccgaatttttcttccattgcagaga

SEQ ID NO: 2293 - DNA, 267 bp, Escherichia coli
ctccatgccggatggggttgtttaacatacccgctgtcattccattgcaacgggggtactgcaaattcggtcgcttatgcgagagccaatttctggcgcgcgtattgtagcgctttttcaatcacttgctcaatgcttaaggtggtggaatccaacactaaagcatcggctgccggaaccagtggcgctaccgctcggttacgatcgcggtcgtcgcgttctttgatctcggccaaaaggcgctcaaagttaacactaaagcccttc

SEQ ID NO: 2294 - DNA, 457 bp, Escherichia coli
gatcgctgacctttgcggcttccgggaccagaggcagaacgtcatactccgtagtactggattgcgtttcatgataccagtggcttttgccggtgatgtggcgttgttccatgggcgctccttggtcgtaaaggaaatcgttatcctgacgcaaggcgggaaggggagaaagacggatcggcgataacaaatatcagaaaggtataacagagataacgggcggcagaacgccgcccatctttaccaacagaacgattatttcagttcgagttcgttcattgcagcaatgctgaaaccgccgtcaacgtggaccacttcaccggagataccggcagagagatcggagcacaggaatgccgcagagttacccacatcttcaatagtaacggtacggcgaatcggggtaacggcttcgcaatgagccagcattttgcggaagtctttgataccggaggcc

SEQ ID NO: 2295 - DNA, 108 bp, Escherichia coli
acgccttccgcggtgaaacggcagaacttgcgacgacggaaataacgtgccatatggctagtctccagaatctatcaattcaatctgctcggcatgcaaaaccatttt

SEQ ID NO: 2296 - DNA, 554 bp, Escherichia coli
gatcatgtttttaacatagtcggcgtgccccgggcagtctacgtgtgcgtagtgacgggtcggggtgtcgtattcaacgtgagaagtgttgatggtgataccacgagctttttcttccggcgcgttatcgatctggtcgaatgcgcgagcagcaccgccgtaggttttagccagtacggtagtgattgcagcggtcagcgttgttttaccatggtcaacgtggccgatagtaccgacgttaacgtgcggttttgtacgttcaaacttttctttagacatcgattgtccctctaagacacggataaatcggtgatatcaccacatcaaccaggcaacatgcccgacttgttgaatgcaataaacagaaggaaaaaacagggaggagaaaagaagtggtgctgataggcagattcgaactgccgacctcacccttaccaagggtgcgctctaccaactgagctatatcagcacatcttggagcgggcagcgggaatcgaacccgcatcatcagcttggaagctgaggtaatagccattataccatgcccgcatcct

SEQ ID NO: 2297 - DNA, 185 bp, Escherichia coli
ctcaacccgaacttccgcaggaaaccatgcggacgacctgtttgacggcagcggttacgctgacgagacgggctggaatcacgcggcagagtctgcagcttgagaacagcgttccaacgatcttcgtcggaagcgttcacatcagagatgatcgctttcagttcagcgcgtttcgcgaagtattt

SEQ ID NO: 2298 - DNA, 259 bp, Escherichia coli
atcacctgcgcggccagcgccagtgctgagatattttgttcaaaggcagaaacggcttcttcgtggctaattgagaaggtaaacgaaaaggcaaaaaacaggatcaccgcgatgagcgtgatataactaattcggtgggtacgcagcgcgagccgggttgccagtactttatccgcttcccgtttacgataggcaatattcattgggttaagtacctgaataaatactgcagaaaagaagcaaaatggaatggtaagca

SEQ ID NO: 2299 - DNA, 170 bp, Escherichia coli
tcatggcgttcatgcagggcttccagtttggcaacgatagaaggcttcataggcgtaaatgcaccctgtaaaaaaagaaaatgatgtactgctactccagcccgaggctgtcgcgcagaatattcaggcgttcgttatccccgtcacgggcggcctgttgaagtgatttc

SEQ ID NO: 2300 - DNA, 346 bp, Escherichia coli
gctggcattcttgccagtatgatcgtgaactggctgaacaagcggaagtaacgtgtcatgcgggcgtcaggctgccgtaatggcaatttgcgcccggaccaggccgcaggggggaaactctgcggcctttttcgttcttactgcgggtaaggcacccagtcgccgccgttcaggcgaacgtacggtttatcctggtattgaataactactgcatttgagttctcggagaccggtgctgtttgtggcaacccactggtgagttttttccagtcaacattgtcttcggtgaaaatcttgccatcgagaacgcgaaccaccagatcggagatagccaggaagctgctcg

SEQ ID NO: 2301 - DNA, 479 bp, Escherichia coli
cggtacgcggttcgtcaccttccggcagtacgatacgtttgcccgctttgcgcgcaagttcagtcagctgataacggaacgcaggcggagacagacgacggctgcgcctcagaagtggcagtcagagattcgatccagtcagcgttgatgtagttagcaacgtattcctgaactttctcgatacgttcgtgatcgtcaaccggaacttccaggttgaagctctgcaggctcagagaggtctgccaggtgttggtgttcaccataaataccggcaggccggtagcgaaagcacgttcgcacagtttagaaatgcgcgcgtccatttcgtaaccgccagtcagcagcagggcaccgatttctacgccgttcatggctgccaggcaagcggccaccagcacgtcaggacggtctgcggaagtcaccagcagagaaccggcacggaagtgctccagcatgtgcggaatgctgcgtgcgcagaa

SEQ ID NO: 2302 - DNA, 89 bp, Escherichia coli
ccgcgaattgcaggtgcataatcatgaatccatgtggcaaccagcactgcgccgacgctttgcgcgatcactaccacctcttccagtcc

SEQ ID NO: 2303 - DNA, 353 bp, Escherichia coli
cccagtcggcggcgaaggaatcgtaggtataaacagtcagaacgggtttagcgaaaacgggcgctgtgcacagcaacagcaggggcagacatttttttaacactttgcacctcaaaaaagagtggcaaaggacttgagaaggagcctcaaatcccttcgccggcgttatccggatcaggttcgacgggtattttctcagcgcacgcgtacgcgtggcaccccgttgagaacggcgttagtgtagtgattttgttatcaaccagcaatcatggatccggtggcgcaaaccacgctgatttaaaatcgaaccagccgagggtattcatgcgcaggccgcgcatactgcgttgccc

SEQ ID NO: 2304 - DNA, 495 bp, Escherichia coli
ctcttcagcagagcctggattgcttccgcccccatcttcgcgtcgaattcgtcaccgaactcttccagcgcgtccagatactgctcttcagtcaggatctgctgacgttccaggttggtcataccgccttcgataaccacataggattcaaagtacagtacgcgttcgatatagcgcagcggcatatcgagcagcagaccgatacgggacggcagcgatttcaggaaccagatgtgcgcagtcggggaagccagttcgatgtggcccatacgctcacggcgtactttagtctgggtcacttcaacgccgcacttctcacagatgacgccacggagtttcaggcgcttgtacttaccgcacaggcactcgtaatcttttaccggcccaaagatacgggcgcagaaaaggccgtcacgttctggtttgaacgtacggtagttgatggtttccggctttttaacttcaccgaaaagaccatgaacggatcatgtctgg

SEQ ID NO: 2305 - DNA, 293 bp, Escherichia coli
tgacacgctgaatgctttctacaacagctttgccctggaaatacttcagagtaagttccagttcaggcttggtgtcgccttcaactttaaaatcttcaataaaaccttcttccttcagcacgttggcgattgccactttcagcttggaggaaggcatggtgaccgcagctttgttcgcggcctgaccgttacggatacgggtcagcatatccgcgatcggatcttgcatgctcatctgtctttactcccgtgattcaattggtgacaattaccagctagcctttttcagaccc

SEQ ID NO: 2306 - DNA, 240 bp, Escherichia coli
gaacagatctaatgtcgtacggtccgtttgttctttggccatgatcttggtgacttcgggggaaacaatcagccaggcctctgcccggatggatagcgcgccataatacatcagcgcgatgagtcacgccaacgcccacgcgcggaaagcgacgcggacgctgggtttttaatcagttgcgttaatcattgagatagcgacggatagcgcgtaataccgcatccggtttttcagcatgga

SEQ ID NO: 2307 - DNA, 88 bp, Escherichia coli
tgcgccagccagtttcaggccaaatgacatgttttctgctactgacaggtggggatagagcgcgtaagactgaaacaccataccaacg

SEQ ID NO: 2308 - DNA, 182 bp, Escherichia coli
tgttcgttttgacatagttatttttcaacctgatacaacgagaaagaggaaggaaaagggcgttatctgacaggtcagataacgccctaacgtattaacggtaatccagcgttacgttaacgatagcgtctgcttcccctggggtgatttctgatggaactacggttgatacgtagtaagcg

SEQ ID NO: 2309 - DNA, 100 bp, Escherichia coli
aacggtaatactgacggcagaataatgcagaatcgccaacaggttactggcgaggttatcgagaaacgccagactgatacccataaaaaagagaataagg

SEQ ID NO: 2310 - DNA, 206 bp, Escherichia coli
atagggcccattgcggtcctggcggcgttcggcgtataccgcgaggactccggcgatatccggaacgtccctgccggtgtaatgacagacgctaccgtgccactggtatttgccggtgcagtagcgaaagattcgggactcaggatgctggcggtatatcgtcattgccctgcgtttactgataattttcatgtaatacctcaaag

SEQ ID NO: 2311 - DNA, 153 bp, Escherichia coli
gtatacctgaagcagggtagggatgttttacgaaagttgtcgcgatgttgacaagaagagaatggaagagaggccaggacatctttttaatagaaacagcaataattttatattcactgaaaatatttttaatctttatttatagctgttggt

SEQ ID NO: 2312 - DNA, 224 bp, Escherichia coli
gtggttgtcatcaatgtgacccagggaggtcgtaatttttactgccccctcggtggtaaatttgagagcattactcagtaaatttgataagacctgcttaaacgcctgagggtcgatcttaaccaggtaatgttcaggaaacgtactgctgcaacttaatgcgatcgatttgcttgcagcaatcgcaccgaaagagtgacaagtgttctggactaaagtaggga

SEQ ID NO: 2313 - DNA, 595 bp, Escherichia coli
acaagaacgaatgtggtcagcgattacgcgcagcgatttattgctcagatcggttgcgccagtgactttcgctaccgcctggatcagcgtgcaggaacaggtcgatgtcatagttagagttaacgtgttgcagcaccgcagcaatacgctccagacccataccggtatctacagacggcttcggcagcggttccatcgtgccatcggcctggcggttgaactgcatgaagacgatgttccagatctcaatgtagcggtcgccgtcttcttccgggcttcccggagggcccccccaaatgtggtcgccgtgatcgtagaagatttcggtgcacgggccgcacggaccagtgtcacccatctgccagaagttgtcagatgcgtatggcgcacctttgttatcgccgatgcgaataatacgttcgcgcgggatccctacttctttttcccagatttcgtagcttcgtcgtcgctttcatagacggtaacccacagacgctctttcgcagggcaaaccatttttcgctggtcagcagttcccatgccaaactgaatggcatcgtgtttgaaatagtccccgaagctgaagttgccccag

SEQ ID NO: 2314 - DNA, 200 bp, Escherichia coli
agaagtgatgctgtcagcaaccagttttgcgtccagttcaggcttacgaacttcggcgatgttgatctgtgcaggaacgccagcgatgtccgctacgaccttacgcagtttttctacgtcttcaccttttttaccgataacgatacccgggcgagcagtgtgaatggttacacggatgctcttagccggacgctcgataa

SEQ ID NO: 2315 - DNA, 261 bp, Escherichia coli
acggcataatttcttgacggaagcacgaactttcatttttactctccgtaacttctcgggcgaccaattatcggccgtagcctttcaggttcgccttcttcaatgcagactcatactgactggacatcatcagagtttgcacttgagccataaagtccataatcacgacaacaacgataagcagtgaggtcccaccgaagtagaacggtactttcattgcatcacgcatgaactccgggatcaggcagataaaggtaatat

SEQ ID NO: 2316 - DNA, 235 bp, Escherichia coli
cagtgctgaagctgtataatgtaacggtttcatcgtttatctctcttgttgtaccgaatgcgcgaattcacgcgttttatgctcgcggggtaacatgacatgctcgaattacagaaaaataacttttttgttacatttgtaagatagtaaggtgtcagaaagatgacaaggcggtgacggcgtgggtgagggaaaatgggagatggggcacggataagcgggaaaatatagaagg

SEQ ID NO: 2317 - DNA, 182 bp, Escherichia coli
accgatacgggacggcagcgatttcaggaaccagatgtgcgcagtcggggaagccagttcgatgtggcccatacgctcacggcgtactttagtctgggtcacttcaacgccgcacttctcacagatgacgccacggtgtttcaggcgcttgtacttaccgcacaggcactcgtaatctttta

SEQ ID NO: 2318 - DNA, 256 bp, Escherichia coli
tagttaagacgctctttgatacgagcagccttaccagtacgctcacgcaggtagtacagtttagctttacgaacagcaccacgacgtttgacagaaatgctgtcaactaccggagagtgagtctggaagacacgctcaacgccttcgccgttggaaattttacgaacagtgaatgcagagtgcagaccgcggttacgaatagcgataaccacgccctcgaatgcctgcagacgttttttggaaccttcaacaaccc

SEQ ID NO: 2319 - DNA, 286 bp, Escherichia coli
cgaggtacagctcctgaatattgtccggcgatggcttaatgaccacctggaactgatagtagtgctgtaaacggttggggttttcgccgtagcgaccatcggtcgggcgacgagaaggctgaacataagcagccgccatcggttctggccccagctcgcgcagacaggtcattgggtgagaggttcccgcgccgacttccatgtccaatggttgaacaatggtgcagccctggcgagcccagtaatcctgtaaggtcaggatcaagccctggaaggtcctggtatc

SEQ ID NO: 2320 - DNA, 255 bp, Escherichia coli
aacggtttgatgactgtttcagacaggcgcagcagatcgttacgcttaatcatttcacacatcatcgccggaccaataccgccaggtgccaggctgataatgccgttcatattggtgatggcggtgatgattttttcattggcgatgataatgccgcagcgggagccaggtagacccagcttggaaagactcatgcacagcacgatattcggattccatagcgggcgcgcttcactgaagatgatacccgggaac

SEQ ID NO: 2321 - DNA, 137 bp, Escherichia coli
acgcgagaacgcgcaccgtagtagcctttagcttgtttcaaaattttcttgtgacgtgcacgtgcaataacaccacgttttacgcgagccatatgtgctctcctgtatctatattctaattaaaaagttaaaaacgt

SEQ ID NO: 2322 - DNA, 442 bp, Escherichia coli
cagaggagtcaacgtcatggtaagaaccgaagtgcagacgaatacccatgtctactaccgggtagcctgccagcggacctgctttcagctgttcctggatacctttatcaacggccgggatgtattcgccagggattacaccacctttaatgtcgttgatgaactcgtagcctttcgggtttgaacccggctccagcgggtacatgtcgataacaacatgaccatactgaccacgaccaccagactgtttcgcgtgtttaccttcaacatcggtaactttctggcggatagtttcacggtaagcaacctgcggtttacctacgttcgcttcaacgttgaattcacgcttcatacggtcaacgatgatgtcgaggtgcagttcgcccatacccgcgatgatggtctggttagattcttcgtcagtccatacacggaaagacgg

SEQ ID NO: 2323 - DNA, 480 bp, Escherichia coli
catgcgcttggtcagtttagccatttcttagtcctccactaccaggcccatggaacgtgcagtaccttcgatggagcgagtcatcgcttcaatgtcggcaccagtcatgtcggcagctttggtctgcgcgatttcctgcagctgagcgcgggaaattttacccactttgtctttgttcggcttaccggaaccagacttgataccagccgcttttttcagcagaactgctgccggcggggtcttggtaacgaaagtgaaagaacggtcagcgtaaacggtgattactaccggaatcggcagacctttttcgatggaatcagtttttgcgttgaacgctttgcagaattccatgatgtttacgccctgctgacccagagccggacctactggcggactcgggttagccataccagctgcaacctgcagcttgacatagcttgtactttcttagccattataaattcctcaagttgggtaata

SEQ ID NO: 2324 - DNA, 160 bp, Escherichia coli
cagcttcggtttgtacgggtgacgctgtacgtcctgagctttaactttgatttctttaccgtcaacaacgatggtcagaacttcgctgtagaattcagctttagcttgcatgttcatgactttgtcgtgatccagctcgatagccagcggcgcttctttg

SEQ ID NO: 2325 - DNA, 121 bp, Escherichia coli
ataatatgcagcgaaggagactggttataaggcagatcaaacagttcaagttgcgaaaatagccatcccgtcaccccactcacttcaggacggataaaactaaacttcagcggatagagca

SEQ ID NO: 2326 - DNA, 561 bp, Escherichia coli
catacttcaggaattccatagtgtatgatgcacgacctttggtcagagaacgcagctgagttgcgtatccgaacatttcagacagcggtacttcagcgtggatcttaacgccagtaacttcagattcctgacctttgagcataccacgacgacggctcaagtcaccgataacgtcaccggtgttctcttccggagtttctacttcaaccttcatgatcggctcaagcagaactggtttcgctttcttaaagccttctttaaaggcgatagaagcagccagtttaaacgccagttcagaggagtcaacgtcatggtaagaaccgaagtgcagacgaatacccatgtctactaccgggtagcctgccagcggacctgctttcagctgttcctggatacctttatcaacggccgggatgtattcgccagggattacaccacctttaatgtcgttgatgaactcgtagcctttcgggtttgaacccggctccagcgggtacatgtcgataacaacatgaccatactgaccacgaccaccagactgtttcgcgtgtttaccttcac

SEQ ID NO: 2327 - DNA, 344 bp, Escherichia coli; identical to SEQ ID NO: 1899

SEQ ID NO: 2328 - DNA, 177 bp, Escherichia coli
ttaagctgctttgtttacttctttgatcagcgcagcaacgcgatcagaaatagttgcgccctggccaacccagtgagcgatgcgatccagatccaggcgagtgccttcttctttttcgctagcgattgggttgaagaaaccaacgcgctcgatgaagcgaccgttgcgtgcattacg

SEQ ID NO: 2329 - DNA, 234 bp, Escherichia coli
taacaagccgaggccaaaagccgccgttttgccgctgccggttttcgcctgcacgcgaacatcttttccggcaaggatcgccggaagcgcggcggcctgcaccggcgtcatggttaaataacccaactcattaaggttcgtgagttgggcgggaggcaaaacattcagggtagaaaaagcggtcacaatctattctcgtggtcatcgacgcaaagttagcaggcgcgtatcctc

SEQ ID NO: 2330 - DNA, 152 bp, Escherichia coli
tgtgcgtagtgacgggtcggggtgtcgtattcaacgtgagaagtgttgatggtgataccacgagctttttcttccggcgcgttatcgatctggtcgaatgcacgagcagcaccgccgtaggttttagccagtacggtggtgattgcagcggt

SEQ ID NO: 2331 - DNA, 212 bp, Escherichia coli
gtgactaaaaagtcaccagccatcagcctgatttctcaggctgcaaccggaagggttggcttatttaacttcaacttcagcgccagcttcttccagagcttttttcagtgcttctgcgtcgtctttgctcacgccttctttcagagcagccggtgcagattctaccaggtctttagcttctttcagacccaggccagttgcgccacgtactg

SEQ ID NO: 2332 - DNA, 189 bp, Escherichia coli
accggttatcgttatgggtacatcgagtgttgcaaatgttttcgtaattcaggagaaatggcaaataaagcattaaaaatttgaatgctttgtgtaataaaaaagcagacaggcgacggagtgaccactccgtcgctttacaaagagaggaaaatcataggttgccggtgtagtgccagcgtaaataac

SEQ ID NO: 2333 - DNA, 115 bp, Escherichia coli
tataaaagacaacaacagaaatgaggatcagtaccagaccgataccgaggaatatacgaaagaaaactttactgtcctgactcattagccacatccttgctaactaaaaaacggg

SEQ ID NO: 2334 - DNA, 540 bp, Escherichia coli
ttcgccgcccccctggcgcagatattcttcagtaattgcattggctacccatgcctgccctttttcggctgctagggcaaacaacactgattcgatgtgctcatgcttgattttcatgaatcatttgcctcttgatgtttcaggtatgatcaaatgaggatttgttactgtcatttagttgcttcactgacatattctgcgaacaacatgccgaacgtcgtaaatatgaccagtcaatatcaggacgaagttcttcgcacagaacctcacctcttgttgcacgttcaattgctggacatctctcggcaggcaattgacgtacccctttgatccattgatttacgcttggaggtgatacacctaaaagcctagccattgctgattgcccaccgacaacagcacaagcttgcttgaatgaatagttctcttttttcatcgaatgaactccaaaaacacacagaaatattaggcgacgcctaacgcaattgtcaataggctgtgcctaatgcagtaagggtagggattgcctaatgtaatgcg

SEQ ID NO: 2335 - DNA, 412 bp, Escherichia coli
gggtgctgacctcatcgtttgccgatctggcaacgtctggtttatctgcaaacacaaaagcagacgtcaaactaattgcacccaacactacagcaatggttgtacgcatatcacactctggtgggtaattatgattattaaaagcaaaccctcataaatactatagacgggacgggatgaaagtgggagtaaaatcagataactacaatcaggaaagataaaaacgggcggtaatcagtgcgcataaaataaggatgatcagaatgaactcaaagcgataacggcccaccatactaccctccgctaaaggcggtgctaaacgttacccgcttagcaccgtaattttcaggcgcgagggggcgcgccagcattactgttgaaaacttacgctgcgggttgtgcagcaggtttt

SEQ ID NO: 2336 - DNA, 218 bp, Escherichia coli
tcaacgatccaacgcattgccagagcattacgacgaaccggacggacttcaactggtacctgataagtagaaccaccaacgcggcgagacttaacttctacagtcgggcgcacgttttcgagagctacttcgaatgcttccagttcagatttaccagagcgctgagccagggtctccagcgcgctgtatacgatagattcagcagtagattttttacc

SEQ ID NO: 2337 - DNA, 492 bp, Escherichia coli
tctgttcagcgtgcagatccactgtcagcacacggtcaacaccgacgctggagaggaagtctgcaaccactttcgcagtgattggtacacgagcggaacggacgcgacggtcctggcgcgcatagccaaagtaggggataacagcggtgatacgacctgcggaagcacgacgcagggcatcaaccataacgactaattccatcaggttgtcgttagtaggggcacaagtggactggatgatgaaaatatcaccaccgcgtacattttcattaatttgtacgctgacttcgccatcgctaaagcgacctacagcggcgtcgccgagtgaagtgtacaggcggttggcaatacgttgtgctagttccggggtggcgttaccagcaaaaagcttcatatcaggcacgagaagaacctcaggcatgcgtccattggtggaaagaatctgccgaaaactgtgcgggccaggcatgatcctttccaggcggtgtatta

SEQ ID NO: 2338 - DNA, 325 bp, Escherichia coli
acctttgttcttgaacgcagaaccacaggttaccaggatgatttcgttgttcagaacgcgctgacgcagagcacctttgatttctgcttcagtcagttcttcaccacccaggtatttttccatcagctcttcagaagcttcagctgcggattcgatcaggttctggtgccattcgttagccagttcaaccatgtctgccgggatatcttcgtattcgaaggttacgccctggtcagcgtcgttccagttgatagctttcattttcaccaggtcaacaacaccggtgaaatgttcttcagcaccaatcgccagctgcagcggaacc

SEQ ID NO: 2339 - DNA, 85 bp, Escherichia coli
ctatcagtcttggcaagagtaatcagcggctcaactacgcggcgcagctctttcgctttaggcagagtcgtcttgatgatttcat

SEQ ID NO: 2340 - DNA, 264 bp, Escherichia coli
gtttccagtgaattgctgccgtcagcttgaaaaaaggggccactcaggcccccttttctgaaactcgcaagaattagcgacgcagacccaggcgctcgatgagctgggtgtaacgtgctacgtctttacgtttcaggtagtcgagcagtttacgacgctgagaaaccatgcgcagcagaccacgacggctgtggtgatcttttttgtgctctgcaaagtggccctgcaggtggttgatctgtgcagtcagcagtgctacctgaa

SEQ ID NO: 2341 - DNA, 236 bp, Escherichia coli
cagtgctgaagctgtataatgtaacggtttcatcgtttatctctcttgttgtaccgaatgcgcgaattcacgccgttttatgctcgcggggtaacatgacatgctcgaattacagaaaaataacttttttgttacatttgtaagatagtaaggtgtcagaaagatgacaaggcggtgacggcgtgggtgagggaaaatgggagatggggcacggataagcgggaaaatatagaagg

SEQ ID NO: 2342 - DNA, 110 bp, Escherichia coli
gtagtgtgcgaacgccttgttggcttcggccatacggtgaacgtcttcacgtttcttaactgcagtacctttgttttctgcagcatcagaaagttcgttcgccaggcgca

SEQ ID NO: 2343 - DNA, 177 bp, Escherichia coli
tggtcaagtttgatggcatcgatcggaaagcgcgccagttgcgaaagtgaagagtagccggtaccaaaatcatccagatgcacttgcgcacctagttggctaaattgttgaataacagacagtgccagttcatcattctcaatcagacaactctctgtcagttcaacatctataggg

SEQ ID NO: 2344 - DNA, 400 bp, Escherichia coli
ttgctgcagcgaagaacctttacgttttccgcctttaccgccacgtactgctgcgcgtgcttcttcacgatcagcttttgattcagcgtgtttgttgcctttcttcggacgcgctgctttcgcgttacgaccacggccacggccgccttcgacttcacgatcgctttcgtcttctgcctggcgagcatgttgagaagtagtgacgtgataatcgctggaatcttcagtcggttccgcgttatcagtccatttgttttcttccgccatacgacgtgcttcttcagcaacgcgacgtgcttcttcttcgagtttacgacgcgcttcttcttcagctttacgcttgagctctgcagcttcctgctcacggcgggctttttcagcctgggcgtttttagtcata

SEQ ID NO: 2345 - DNA, 119 bp, Escherichia coli
gcggcagagaagatctccaccgcttgtcattgttggatgcgacgctcaagcgtcgcatcaggcataaagcagattactttttgatttcatacagcggtgtttgacccgccacaatatgg

SEQ ID NO: 2346 - DNA, 215 bp, Escherichia coli; identical to SEQ ID NO: 1562

SEQ ID NO: 2347 - DNA, 53 bp, Escherichia coli
actcggcgatgttgctctccaataactgccgcgcctgtaacagctcaaaagga

SEQ ID NO: 2348 - DNA, 170 bp, Escherichia coli; identical to SEQ ID NO: 2299

SEQ ID NO: 2349 - DNA, 188 bp, Escherichia coli; identical to SEQ ID NO: 2144

SEQ ID NO: 2350 - DNA, 438 bp, Escherichia coli
ttcggcggacgacaaccgttatgagggatcggagtcacatcagtaatgttagtgatgcggaaacctgcggcgttcagagcacgaatagtagattcgcggcctggacccggacctttaaccataacttccagattcttgatgccgtattctttcacggcgtcagcgcaacgctctgctgcaacctgagctgcaaacggagtggatttgcgagaaccacggaaaccggaaccaccggctgttgcccaacccaacgcgttaccctgacgatcagtgatagtcacgatggtgttgttgaaagaagcatggatatgagccacgccgtcagagacttgttttcttacacgtttacgtgcacgaattggtgcctttgccattattcaatcaccccgattatttcttgatcggtttgcgcggacccttacgggtacgtgcgttggt

SEQ ID NO: 2351 - DNA, 313 bp, Escherichia coli; identical to SEQ ID NO: 2007

SEQ ID NO: 2352 - DNA, 234 bp, Escherichia coli; identical to SEQ ID NO: 1937

SEQ ID NO: 2353 - DNA, 114 bp, Escherichia coli
taccagggatgcggtaatttcagccattctaaaatcctcggagatgtgatctgcccggcattaaaccgcacagatataaaagtgaaaaagggggccatatgcaggccccctaac

SEQ ID NO: 2354 - DNA, 153 bp, Escherichia coli
tgcttcttcgtaggtcggcagagttgccaggcggtcgatctgagacgccgggatcagctcaccttcaaaggcagcggctttgacctcaaattttgcattcgctttcgcgaactctttgaacagacgagcagcagcgcccgggtgttccataga

SEQ ID NO: 2355 - DNA, 456 bp, Escherichia coli
cagtgcagagaacggctcgtcatcacttgcgtgacgttcagccggagtgtctttaccgtcgtccaggataccgttgatcgcaggtacgtcaaccggggatggcaggtaatcaattaccgcatccagcatcgcctgaacacctttgttcttgaacgcagaaccacaggttaccaggatgatttcgttgttcagaacgcgctgacgcagagcacctttgatttctgcttcagtcagttcttcaccacccaggtatttttccatcagctcttcagaagcttcagctgcggattcgatcaggttctggtgccattcgttagccagttcaaccatgtctgccgggatatcttcgtattcgaaggttacgccctggtcagcgtcgttccagttgatagctttcattttcaccaggtcaacaacaccggtgaaatgttcttcagcaccaatcgccagctgcag

SEQ ID NO: 2356 - DNA, 280 bp, Escherichia coli; identical to SEQ ID NO: 2266

SEQ ID NO: 2357 - DNA, 272 bp, Escherichia coli
tttaccttcaacacggtcgcccttgttgtgggtttccgcgaactgctgccacgggttagctttgcactgtttcagacccagggagatacgacgacgttcttcgtcgatatccagaaccataacttccactacatcgccaacgttaacaactttggacgggtggatgtttttgttggtccagtccatttcggaaacgtgtaccaggccttcaacgccttcttcgatttcaacgaagcagccgtagtcggtcaggttggtcacgcgaccagtca

SEQ ID NO: 2358 - DNA, 325 bp, Escherichia coli
cagtgaggtcccaccgaagtagaacggtactttcattgcatcacgcatgaactccgggatcaggcagataaaggtaatatacagcgcaccaaccagggtcaggcgggtcattactttatcgatatacttcgccgtttgctctcccggacgaattcctggtacaaatgcaccggacttcttcaggttatctgctgtttcacgcgggttgaaaaccaacgccgtgtagaagaaacagaagaagatgattgcagacgcatagagtaacacataaagcggttgcccaggctgcaaatacagcgaaattgttgtcagccagttccaacca

SEQ ID NO: 2359 - DNA, 91 bp, Escherichia coli
gattgaccttgcatgtcgtttaacgtcacgacgccatccttcaacgtcaaatcggtggtaaagcggtcaagccgcgtcactgttatcaaag

SEQ ID NO: 2360 - DNA, 87 bp, Escherichia coli
cgacgcagacgcaacgcttcgacgatgtaaccaatcgcggacttcggcgcagtcgggttttccagatcgtgcttgatcagcgggtta

SEQ ID NO: 2361 - DNA, 261 bp, Escherichia coli
ggaaatacttcagagtaagttccagttcaggcttggtgtcgccttcaactttaaaatcttcaataaaaccttcttccttcagcacgttggcgattgccactttcagcttggaggaaggcatggtgaccgcagctttgttcgcggcctgaccgttacggatacgggtcagcatatccgcgatcggatcttgcatgctcatctgtctttactcccgtgattcaattggtgacaattaccagctagcctttttcagacccggga

SEQ ID NO: 2362 - DNA, 161 bp, Escherichia coli
agcctgactgttattgtcctgctgcgcaatgatgtagccatggggcaatgttctgtcgaggaccgcttttgcggcggcgcatctggtcgctggagtcaaatgtaattaacagagtgtcgtttttgggggtgatacttttgaaaggaatgccatgagcgtca

SEQ ID NO: 2363 - DNA, 237 bp, Escherichia coli
gatcagagttggtatcaacgatagcaaataccggaatacccaggttgtttgcttctttgatagcaatgtgttcgtggtcagcatcgattacaaacagagcgtccggcagaccgcccatgtctttgataccgcccaggctgttttccagtttctccagctcacgagtgcgcatcagcgcttctttcttggtcagcttgtcgaaagtaccgtcctgagactgagtttccaggtctttca

SEQ ID NO: 2364 - DNA, 202 bp, Escherichia coli
gcttctacagagaacttctcgacaacgatcagacgatcctgacgtaccagttcggacaggatgcttttcagcgcgccgcggtacatcttcttgttaactttttgactgtggtcctgcggacgagcagcaaaggtcacgccaccagaacgccagatcgggctcttgatagaaccagaacgcgcacggccggtgcctttctggc

SEQ ID NO: 2365 - DNA, 434 bp, Escherichia coli
gcataggcgtggagctgatcaaaataatcggaggagtaacggacgttaccagaccagtgaaaacctaaccactctacgtcgtttttgatcgactcaacatactcgatatcttcttttaccgggttagtgtcgtcgaaacgcaggttgcactggcctttatagtcctgggcgatcccgaagttcaggcagatagatttcgcatggccaatatgcagatagccattcggctccggcgggaaacgggtgtgtactgtggtgtgcttaccactggccagatcttcatcgatgatctgacggataaagttagtcgggcgggcttctgcctcactcatcgtggattcctcaaagcgtaaacaacgtataacggcgtatgatcttataagcgggacaggctgacaactgttagttttttaaaattgataatctaacaagga

SEQ ID NO: 2366 - DNA, 184 bp, Escherichia coli
ttaaaacgagaaatttgccagccgcctaaggccagttgcgcacaccaggcgataacggcgacggtgatgagtgcggataccataacttttccttaatgtagtggcggaagtcctgtatgcctgatgagcgtagcgcatcaggcattctatagtctcacggagatccttaatggatctccgctgt

SEQ ID NO: 2367 - DNA, 228 bp, Escherichia coli; identical to SEQ ID NO: 2234

SEQ ID NO: 2368 - DNA, 152 bp, Escherichia coli
cttctcaacgataattcgcagcacgccaagcgcggcacgacgcagcgcaaacgggtctttgtcgcctttcggatgctgaccgataccgaagatacccgccagggtatccatcttgtcagcaatcgccagcgcacaagctactgggttggacg

SEQ ID NO: 2369 - DNA, 146 bp, Escherichia coli
aacgacaaatttggcaacttcgtcacgcagcgtgtcgatttgtccttcagacagctcactgatcttaacatcttcagcgatacccgctgcagccaggatggctttagaacgggtcttgccgacgccataaatcgaagttaatgcga

SEQ ID NO: 2370 - DNA, 456 bp, Escherichia coli
cgcgggttgaaaaccaacgccgtgtagaagaaacagaagaagatgattgcagacgcatagagtaacacataaagcggttgcccaggctgcaaatacagcgaaattgttgtcagccagttccaaccagtaccgcccccgaaccatgacgcgatggtcgccgggaacagaataatactggaagcgaagattgccgggattacccccgccatattcactttcagcggtaaatgtgtgctctgtgcagcatagacacgacgaccttgctgacgtttcgcgtagtttaccacaatgcggcgttgaccacgctcaacaaatacaacaaagaacgtcactgcaaatactaatactgcaaccaacagcaacacgaggaagtgcaggtcgccttgacgcgcttgctcgatagtatgggcaatggctggcgggagtcccgcgacaataccggcgaagataatgatt

SEQ ID NO: 2371 - DNA, 250 bp, Escherichia coli
cgtcgcgtttgcccgcaacggctgcttcggtcagcacgcgagtggtctcctggaacgatgccgcggagatgaaggactcggttgccagagacgctttggtgatacccagcagatcgcgggagtaagttgcacccactttgccgttcgcttccagttcgcggtttgcgatcttgacgcgagagtattcaacctgttcgccttccaggaagtcggagctacccgcgttaacgatggtagctttacgcagcat

SEQ ID NO: 2372 - DNA, 199 bp, Escherichia coli
tagcctagtgcacgcaatgagttgaatatgacgcattttatttgtagtttattattttttttatttactattttctgtagcgaaactaatatccagtgtccgccagtatttatggggaataacctggacttcattcggccatgatggatcgctcttaatattttcattgagagcgtcttccaggtgagttctggtggag

SEQ ID NO: 2373 - DNA, 196 bp, Escherichia coli
aggttgtcatcgattaacaaaatactgttaatcagcgagttgaggatctgcccagcatcgggctgcgtgcctgttgccataaagcagtctcctgaacaggttgcaccattttagtgcattatagctttttacggataaaaagcgcgaagcatcagagaattgacggagaaaaaagcccatgcagagatgggctaca

SEQ ID NO: 2374 - DNA, 92 bp, Escherichia coli
atattctctccattgctagcgggttaaacgcgctaacctgttttcgattttttccagcgcatggcggcagcgtgccaggcgcgcttcatagg

SEQ ID NO: 2375 - DNA, 383 bp, Escherichia coli
gcgcacaccgccctgagagcaggatttcaccgctgtctggaaatgtttgtagaacggaatgcagccggtatggaacgcttcaccaccgcgaatcgggctacccagcgcacgaatacgcccggcgttgatgccgatcccggcacgctgggaaacgtatttaacaatcgcgctggaggtggcgttgatggaatccaggctgtcaccgcactcgatcagtacgcaggagctgaactgacgagtcggggtacgcacgccggacatgattggcgtcggcagcgaaattttaaatgtggaaaccgcgtcgtaaaaacgcttcacatattgcaggcgcgtttcacgcgggtagttcgagaacaagcacgcggcaactagaatataaagga

SEQ ID NO: 2376 - DNA, 111 bp, Escherichia coli
aggatcgcgccgtccatctgcgcagcaccggtgatcatgtttttaacatagtcggcgtgccccgggcagtctacgtgtgcgtagtgacgggtcggggtgtcgtattcaacg

SEQ ID NO: 2377 - DNA, 386 bp, Escherichia coli
tgaatcgtggtatgcgttacaccttgagtgcccgccgggccgacaacaaagtcaggttgccgcaggcagggtaatcggggaaggattccacgctgcagcacctggtgtcagggatgcaaaatagtgttgagcatcgaaattctgcgcttcttttgccgacagaatcgggcgagaagaggtaccaggcgcggtttgatcagaaggacgttgatcgggcggggttgagctacaggcggtcagcgtcacgccaaaagccaatgccagcgccagacgggaaactgaaaatgtgttcacaggttgctccgggctatgaaatagaaaaatgaatccgttgaagcctgcttttttatactaacttgagcgaaacgggaaggtaaaaagacaaa

SEQ ID NO: 2378 - DNA, 101 bp, Escherichia coli
cggtgaatttagcttcaacttcgtcgccaacgctcagaaccagggtagcgtcttcaacgcggtcacgggatgcttcagaagcacgcaggtaaccttcaacg

SEQ ID NO: 2379 - DNA, 404 bp, Escherichia coli; identical to SEQ ID NO: 2195

SEQ ID NO: 2380 - DNA, 94 bp, Escherichia coli
gaacaggtcgaggatctgctctgtggtgtagttcagggcgcgcagaatgatggtcgcaggcagtttacggcgacggtcgatacgtacgaacagg

SEQ ID NO: 2381 - DNA, 95 bp, Escherichia coli
caacttcgtcacgcagcgtgtcgatttgtccttcagacagctcactgatcttaacatcttcagcgatacccgctgcagccaggatggctttagaa

SEQ ID NO: 2382 - DNA, 139 bp, Escherichia coli
cagccttgagcatgtcgcgcatggaaacagttgccatgattaaaacctctatataaaagttggggttatgcctccacgtatcccatattaccgaccccaaagggcaccccggaatatgtgccgatacgtgtgtgttgtt

SEQ ID NO: 2383 - DNA, 336 bp, Escherichia coli
cagcaacggagcaaaaggtttgcccttgtgcagctcagggttaaccactttaactacgtggcgacgacccggagatgtcggtttacatttaacaacttgccattgtattactcctccgacttactcagcgccgccaacgaagtccagattctggccttctttcagggtgacgtaagcttttttccagtcgctacgacgaccgatacgctgtccgtgacgtttaactttccctttaactaccagggtgttaacgacttcgacttcgacttcaaacagtttctgcacagcagctttgatttctgctttggtcgcgtctttagcaactttgagtacgat

SEQ ID NO: 2384 - DNA, 479 bp, Escherichia coli
cgggatgaccatgtcatcgataccaacagatgcaccagaacgcgctgcataggcgaagccggtgtacatgatctggtccgcaaaaataacggtcggtttcagaccgagaatgcggtagcaggtgttcagcattttggagattgcttttttacccagcgcctggttgacgatggagtaaggcagacctttcggtacaatcatccacagaatggcacggccaacagtcgtgtctttcaggctggttttcgctactaattcaccgttagcatctttttcatactcggtgatacgcactttaacgcgcgcatgcagagaagccagaccagagcgatacagacgttctgcttctttcgggccagtcagcaccatgccttcgcctttggcgttaacacagtcacgggtcatgtagtacagacccagtacaacgtcctgagacggaacgatgattggttcgccgttcgccggggacaggatgttgt

SEQ ID NO: 2385 - DNA, 251 bp, Escherichia coli
actttgtcgaaggcgatcaggctaaccgggtcgataccagttgcatcgcgtacgtcaaccttgtgcaggttgcgcgcagccaggaacaggttttcgtccagctcaccggtgatgatcagcacatcttccagagccatgtctttcagtttctgtgccagcagcttagttttcggcgcttctacagagaacttctcgacaacgatcagacgatcctgacgtaccagttcggacaggatgcttttcagcgcgcc

SEQ ID NO: 2386 - DNA, 317 bp, Escherichia coli
gatcgcaggtacgtcaaccggggatggcaggtaatcaattaccgcatccagcatcgcctgaacacctttgttcttgaacgcagaaccacaggttaccaggatgatttcgttgttcagaacgcgctgacgcagagcacctttgatttctgcttcagtcagttcttcaccacccaggtatttttccatcagctcttcagaagcttcagctgcggattcgatcaggttctggtgccattcgttagccagttcaaccatgtctgccgggatatcttcgtattcgaaggttacgccctggtcagcgtcgttccagttgatag

SEQ ID NO: 2387 - DNA, 98 bp, Escherichia coli
aagcgaaaagactatagagtgaaggagaaattttgagggtgcgtctcaccgataaagatgagacgcggaaagattagtaactggactgctgggatttt

SEQ ID NO: 2388 - DNA, 88 bp, Escherichia coli; identical to SEQ ID NO: 2307

SEQ ID NO: 2389 - DNA, 220 bp, Escherichia coli
tggagcggcaagcttttgccattgcaacgaagctgtaggagctgatgtcgtgggcaattttgaagccttcacgggtaacggcgttaacatagtcaccatccagctgatcgccaggtgcaaaaccaatagagtgtacgaaaccgtcaaatttcggccaaactttccccagttcagcgaacatggtgtcgatgctggcatcttctgcaacatcgcactgcag

SEQ ID NO: 2390 - DNA, 229 bp, Escherichia coli
cgttttccaggtcgttgtgtttaccacccgcacgcacgcagcgttgggaagtggtagcgcgggaataattacgcttgtcgagcccaaggaacacatccttgaactggttcatcccggcgttggtaaacaacaaagttgggtcgttatggggtaccagggagctgctggcaactacctgatgtcccttactatggaaaaagtcgagaaacgcctgacggatctcagcggt

SEQ ID NO: 2391 - DNA, 291 bp, Escherichia coli
taaaggtgtccgggcgggtagtgtaaacggtcagcgtgttgtcatagtcgttaacgttgaaggtgatctccacgccttcggaacgaccgatccagttacgctgcatggttttaacggtgtctggccagtgatccagtttatccagatcgttgagcagctcgtcagcgtaagcagtgattttgataaaccactgcgggatctctttacgttcaactttggtatcgcagcgccagcagcagccgtcgataacttgttcgttcgccagtacggtctggtcgttcgggcaccagt

SEQ ID NO: 2392 - DNA, 47 bp, Escherichia coli; identical to SEQ ID NO: 2228

SEQ ID NO: 2393 - DNA, 239 bp, Escherichia coli
catcacagggaaacttgcggcaggagctgcacggctaatgcgtactgactcttcgccttcagaaatttccagttcggagatgcctgattcttcaaccagctcgatcagttttttaatcttacgaatatccatgagtgggttccgtactctttgtttagtgtgattgtgacaggcgtttcaccgccgtctgtaaagcgtatgccccgacagctgtatgcatagcgataaattccagcagg

SEQ ID NO: 2394 - DNA, 341 bp, Escherichia coli
cgaacgatcggagtgtcgtcgcccgggaagtcgtactgagacagaagttcacgaacttccatttcaaccagttccagcagctcttcgtcatcaaccatgtcgcatttgttcaggaacacgatgatgtacggaacgcctacctgacgacccagcaggatgtgctcacgagtctgcggcatcgggccgtcagtcgcagcaactaccaggatcgcgccgtccatctgagcagcaccggtgatcatgtttttaacatagtcggcgtgccccgggcagtctacgtgtgcgtagtgacgggtcggggtgtcgtattcaacgtgagaagtgttgatggtgataccacg

SEQ ID NO: 2395 - DNA, 341 bp, Escherichia coli
gcctttaaccgcgatttcaatcacacgctcaggacggcgagcaatcatctcttcaaaggtcgcttgtttgataccaccgatgtggccggtgtggtgatagtacactttgtcagtacgcttgttgccggttacagcaactttgtcagcgttcagaacgatgatgtaatcaccggtatctacgtgcggagtgtattccgctttgtgcttaccgcgcaggcgacgagccagttcagtagccagacggcccagagttttaccggtcgcgtcaacaacataccagtcgcgttttacggtttctggtttagctgtaaaagttttcattaaaagcttacccaataaat

SEQ ID NO: 2396 - DNA, 282 bp, Escherichia coli
cagcaacgcgatcagaaatagttgcgccctggccaacccagtgagcgatgcgatccagatccaggcgagtgccttcttctttttcgctagcgattgggttgaagaaaccaacgcgctcgatgaagcgaccgttgcgtgcattacggctgtcagcgacaacaacctggtagaacggacgctttttagcgccgtgacgtgctaaacgaatagttaccataacatcctcttgtgtgaataaaacaaccggaccccatcgaggaacggagtccggtgtcatattaa

SEQ ID NO: 2397 - DNA, 234 bp, Escherichia coli
taaccctcattaatgcctgctactgctgattttttccccgcgacatgccgtgtcgcggggatttttttatccgggctttacagcgtttgtgggctcacttgatgacggcggacatccaccggcatcccggaacggacatccatcacatgttgcatcacttcagcgtcagtttgtgctgcatctttaaatgattgcattgcgctattcagcgtaattggcagcagctgcggatcg

SEQ ID NO: 2398 - DNA, 558 bp, Escherichia coli
agtcgccgaagctgaagttgcccagcatttcgaagaaggtatggtgacgcgcggtgtaaccgacgttttccaggtcgttgtgtttaccacccgcacgcacgcagctgttgggaagtggtagcgcgggaataattacgcttgtcgagcccaaggaacacatccttgaactggttcatcccggcgttggtaaacaacaaagttgggtcgttatggggtaccagggagctgctggcaactacctgatgtcccttactatggaaaaagtcgagaaacgcctgacggatctcagcggtgctcttgctcataattatcctgaaatcaagctaacgaaatatcgccaccagctccagcgtgtcttaaccgccgggctggtaactgaaaagtgggaataagataagttttcttgactgggaagtaaaataccgtatgcgttcagtcggcaaaatttcgccaaatctcctggatatcttccatcagatagccacgatagagcagaaaacgctggatcttaactttttctgaaaagacagttggcaaaggttcgccatattttcgcgt

SEQ ID NO: 2399 - DNA, 196 bp, Escherichia coli
cagaacgccagatcgggctcttgatagaaccagaacgcgcacggccggtgcctttctggcgccacggttttttaccggaaccagttaccttcagcacgagtcttctgagcacgagtaccctgacgagcaccagctgcataagcaacaacaacctggtgaaccagcgcttcgttgaaatcacgaccgaaggtagttt

SEQ ID NO: 2400 - DNA, 64 bp, Escherichia coli; identical to SEQ ID NO: 1931

SEQ ID NO: 2401 - DNA, 515 bp, Escherichia coli
  misc_feature (17)..(17): n=g, a, t or c
  misc_feature (59)..(59): n=g, a, t or c
  misc_feature (243)..(243): n=g, a, t or c
  misc_feature (261262)..(243): n=g, a, t or c
  misc_feature (261)..(262): n=g, a, t or c
tatcaaaactcgctttngcgatggttttcgtagtgtataaaatgttgaaaaatttgcanctaaatcccggcaggtcttaccacgattttacggttattttgaggccttaccccccaataacgcaaatcattttgcactaattattactcataaccactgcagactgcgcgcaacatgagcattttgtgcaaatcgcggtcagaccatgtacatcccgccgttcacatgcaaagtttcacccgngatgtaagctgcttcgtnngatgccaggaatgcaaccgcgttggcgatttcctgtgcgccgccgaggcgacccgcaggaacctgcgccaggatacccgcacgctggtcatcgctcagcgcacgtgtcatgtccgtttcaataaagcccggagcaacaacgtttacagtaataccgcgtgacgcaactttcgcgcgccagtgatttactgaagccgatcaagcccgctttcgccgcagcgtagttggcctgaccgccatttcccatggtacca

SEQ ID NO: 2402 - DNA, 271 bp, Escherichia coli
tacttcaggaattccatagtgtatgatgcacgacctttggtcagagaacgcagctgagttgcgtatccgaacatttcagacagcggtacttcagcgtggatcttaacgccagtaacttcagattcctgacctttgagcataccacgacgacggctcaagtcaccgataacgtcaccggtgttctcttccggagtttctacttcaaccttcatgatcggctcaagcagaactggtttcgctttcttaaagccttctttaaaggcgatagaag

SEQ ID NO: 2403 - DNA, 182 bp, Escherichia coli; identical to SEQ ID NO: 2308

SEQ ID NO: 2404 - DNA, 282 bp, Escherichia coli
acagaccacggccagcttctacgccagctttagcgaagtggccagcttcaggcttggtcacacggttagcttttttagcaccggtggtcacctgaatagcacggtagccatcgttagccaggtctttaacctgagtaacgcggtttgcttcaacttcgattacggttactgggatagaaacgccgtcttctgtgaagatacgggtcatacccacttttttaccgactaaaccaatcattgtttcaacctctcaatcgctcaatgacctgattaacccaggct

SEQ ID NO: 2405 - DNA, 379 bp, Escherichia coli
aaaatggagacttaagttgaatgaacgggagtaaagcgaaaagactatagagtgaaggagaaattttgagggtgcgtctcaccgataaagatgagacgcggaaagattagtaactggactgctgggatttttcagcctggatacgctggtagatctcttcacggtgaacagaaacttccttcggggcatttacgccaatacgtacctggttgccctttacccctaaaactgtcacggtgacctcatccccaatcatgagggtctcaccaactcgacgagtcagaatcagcattctttgctccttgaaagattaaaagagtcgggtctctctgtatcccggcattatccatcatataacgccaaaaagtaagcaatgaca

SEQ ID NO: 2406 - DNA, 541 bp, Escherichia coli
ttcgcctttgctacggcaagttaccaggtcttctacgaagtggccttcttcatccaagttggagttcgcctgggcgataacgtagttgccttcttcgatagcagacaggtagtgaatttcgtcagttacaacaccgtcggtcactttacgatacggagtctcaaggaagccgtattcgttagtctgtgcgtacacggacagagagttgatcagaccgatgttcggaccttcaggggtttcgattggacatacgcgaccgtagtgagtcgggtgtacgtctcgaacttcgaagcctgcacgttcacgggtcagaccgcctgggccgagtgcggagatacgacgtttgtgcgtaatctcagacagcgggttgttctggtccataaactgagacagctggctggaaccgaagaactctttcactgctgcggaaatcggcttggcgttgatcatatcctgtggcatcagggtatccagatcgcccagagacagacgctctttcaccgcacgctctacacgtaccaggccaacgcggaactggttt

SEQ ID NO: 2407 - DNA, 253 bp, Escherichia coli
gatcttaacgccagtaacttcagattcctgacctttgagcataccacgacgacggctcaagtcaccgataacgtcaccggtgttctcttccggagtttctacttcaaccttcatgatcggctcaagcagaactggtttcgctttcttaaagccttctttaaaggcgatagaagcagccagtttaaacgccagttcagaggagtcaacgtcatggtaagaaccgaagtgcagacgaatacccatgtctactacc

SEQ ID NO: 2408 - DNA, 524 bp, Escherichia coli
tgttgaaggaaacctgcttctcttcctgaccgtcacggttaatcacggtttcagtttgcaggttatccatcatcgctttggatacacgatcgttcgccgcagcccagatatcgataactttgttgtagcgttcgcccgcagttaccagaccagactggaactgctcctgaatttcagcaacttctgcttctgcctcggagatgatttcgtgtttcttctccgggatgaccatgtcatcgataccaacagatgcaccagaacgcgctgcataggcgaagccggtgtacatgatctggtccgcaaaaataacggtcggtttcagaccgagaatgcggtagcaggtgttcagcattttggagattgcttttttacccagcgcctggttgacgatggagtaaggcagacctttcggtacaatcatccacagaatggcacggccaacagtcgtgtctttcaggctggttttcgctactaattcaccgttagcatctttttcatactcggtgatacgcactttaacgcgc

SEQ ID NO: 2409 - DNA, 353 bp, Escherichia coli
ttgctgccgtcagcttgaaaaaaggggccactcaggcccccttttctgaaactcgcaagaattagcgacgcagacccaggcgctcgatgagctgggtgtaacgtgctacgtctttacgtttcaggtagtcgagcagtttacgacgctgagaaaccatgcgcagcagaccacgacggctgtggtgatcttttttgtgctctgcaaagtggccctgcaggtggttgatctgtgcagtcagcagtgctacctgaacttcggtagaaccggtgtcgtttgcgtcacgaccaaactcagaaacgattttagctgttgcttcagtacttagagacattttaaaactccaaagtatatag

SEQ ID NO: 2410 - DNA, 250 bp, Escherichia coli
ataataaatgtaatgtgcaatacggtgatgttttaattctgaataaaaccaggagaagttttgctcttttctcacttgctcaaacatcttttgaaaaacaacgacctgatccatcaggataataacctcttgttagttgtgagactgcgtagtgtgcacgatcggttttaccacttcaatctggtctgtcctttggctgtgatatgtacagagtgtgatagagggaatatctgaattctcccggtgagca

SEQ ID NO: 2411 - DNA, 228 bp, Escherichia coli; identical to SEQ ID NO: 2110

SEQ ID NO: 2412 - DNA, 44 bp, Escherichia coli
ctttttccagagcgcgttcagcgacagctttacccacagctgca

SEQ ID NO: 2413 - DNA, 297 bp, Escherichia coli
gcgattacggcatgcttatgatcaggaatgttaatgcctgctatacgggccactatgcactcctactatttaatatgtacgttccatgctgaaaagcccgttttcaggatactcaaatggaaacgcacagacatacaaaagattggctggctaatctagccagctcaacccaactttgcaagaaaaatatgcgaaaaaatcagccttggcgctgtttatgcttcggctcggcactgcaaatcacacggatgacaccatcacgcttaacgattttgcagttacggcataatttcttga

SEQ ID NO: 2414 - DNA, 255 bp, Escherichia coli
gtcatcagcgtcagcggtaacgggcagaagccgtaggctgacggggaggaaaaggtgtaaaagccataatagagtcctgagttgcttaacggcgtattaatgactaatggtaaaagagctatgaggcaatgcaagtgctttcactacgcgatctgtgccttctgcgaggcgacttccaaaaaaatgaagccattgaattgttgtgaattaatttcgcgatcgcgatggtgtttactgatattcccgtaaaagaag

SEQ ID NO: 2415 - DNA, 84 bp, Escherichia coli
ggttagctttgcactgtttcagacccagggagatactgacgacgttcttcgtcgatatccagaaccataacttccactacatcg

SEQ ID NO: 2416 - DNA, 183 bp, Escherichia coli
agttccagcagctcttcgtcatcaaccatgtcgcatttgttcaggaacacgatgatgtacggaacgcctacctgacgacccagcaggatgtgctcacgagtctgctggcatcgggccgtcagtcgcagcaactaccaggatcgcgccgtccatctgagcagcaccggtgatcatgtttttaac

SEQ ID NO: 2417 - DNA, 319 bp, Escherichia coli
gagaaggaaatggcgaccacgaaagaaaaggcaaaaacgataatctgaaagagccaaggtatttcagtataagcattgaatgcgacagtaaactctttcggtatcagccagagagtgagaccaaaaatgataatcgtatacataagtctttcgagtggctcgttagcaaaaagtttcaacaatggagtaaatacatccaacatatcaataactctcaactgtaagggtattgaaatgttaacacaagctctcgctgtaggggtatagccgagaccaccgaagcccggaggtggtgaaataaaaccgggcacaacacgaa

SEQ ID NO: 2418 - DNA, 239 bp, Escherichia coli
gatggaacacgtcgccgtaggtggttttacccagcgggccgtcgctccagaccaggtcgtaaacgctgtctacgccctgaatgtacatggccagacgttccagaccgtaggtgatctcgccggtaaccggtttacactccagaccaccaacctgctggaagtaagtgaactgcgtcacttccatgccgttcagccacacttcccagcccagtccccaggcacccagcgtcgggttttcc

SEQ ID NO: 2419 - DNA, 364 bp, Escherichia coli
tcagacaggtgaaccaggccgtcgatgccgccgtccaagccgatgaagataccgaagtcagtgatagacttgattttaccttcaacacggtcgcccttgttgtgggtttccgcgaactgctgccacgggttagctttgcactgtttcagacccagggagatacgacgacgttcttcgtcgatatccagaaccataacttccactacatcgccaacgttaacaactttggacgggtggatgtttttgttggtccagtccatttcggaaacgtgtaccaggccttcaacgccttcttcgatttcaacgaagcagccgtagtcggtcaggttggtcacgcgaccagtcagtttggtaccttccggat

SEQ ID NO: 2420 - DNA, 265 bp, Escherichia coli
attacgtcatggttttacagaaaattacagaaaaaggaggcaatatcgggtaaaggcattagcccgacgaatacgtcgggctacaaatattattgtgctgcaggtgttttagcgggttgttgatccacaggttctaactggaagaccacatcgacctgatcatcaaactgaatagcggcctgctcgtaagtttcctgggcggacaccggcgcggcatcggctttcatcatccgcaccattgggctgggctgatagttggaaacat

SEQ ID NO: 2421 - DNA, 230 bp, Escherichia coli
tgtcgtcgcccgggaagtcgtactgagacagaagttcacgaacttccatttcaaccagttccagcagctcttcgtcatcaaccatgtcgcatttgttcaggaacacgatgatgtacggaacgcctacctgacgacccagcaggatgtgctcacgagtctgcggcatcgggccgtcagtcgcagcaactaccaggatcgcgccgtccatctgagcagcaccggtgatcatg

SEQ ID NO: 2422 - DNA, 260 bp, Escherichia coli; identical to SEQ ID NO: 1708

SEQ ID NO: 2423 - DNA, 283 bp, Escherichia coli
gtcctggcggacgacggagcagcagggagatctgacggtaagcaacagcctgtttagacaggtcatcgtaaatgatcagcgcatcttcaccgcggtcacggaagtattcgcccattgcgcaaccggcatacggtgccaggtattgcagtgcagcggattcagacgcggttgctaccacaacgatggtgttagccagtgcgccgtgctcttccagtttacgtaccacgttagaaatggtggacgctttctggccgatagcgacatagatacatttgataccgga

SEQ ID NO: 2424 - DNA, 239 bp, Escherichia coli; identical to SEQ ID NO: 1790

SEQ ID NO: 2425 - DNA, 182 bp, Escherichia coli
gatcgccaagtttgccgagtcgtggtgcacttagcagagccgccacgcctggcaccgaggcgatcatgccactgataaaggcgacgttactgacgttacccgccagttcgcggacatacagcgtcagaatgggggcaattgagcccgtcgccacctggatgattaacgtagtgacaaacagg

SEQ ID NO: 2426 - DNA, 192 bp, Escherichia coli
taaccacaccggagtaaacacggaagaaggtcaggttaccaacaaacgggtcggtagcgattttgaacgccagtgcagagaacggctcgtcatcacttgcgtgacgttcagccggagtgtctttaccgtcgtccaggataccgttgatcgcaggtacgtcaaccggggatggcaggtaatcaattaccgcat

SEQ ID NO: 2427 - DNA, 218 bp, Escherichia coli
tgcgcacaccaggcgataacggcgacggtgatgagtgcggataccataacttttccttaatgtagtggcggaagtcctgtatgcctgatgagcgtagcgcatcaggcattctatagtctcacggagatccttaatggatctccgctgttgatcagaacatcacctgaccgccggtgacattgatcgactgtccggtgcagtacgacgccttaggactg

SEQ ID NO: 2428 - DNA, 283 bp, Escherichia coli
cattgatgaatttgctgtaagaaataccgttctgacgtgctgctgcgttgatacgcgcaatccacagttgacggaactgacgcttacgttgacgacggtcacggtaagcatactgaccagctttgataacagcctggaaggcaacgcggtatacgcgagaacgcgcaccgtagtagcctttagcttgtttcaaaattttcttgtgacgtgcacgtgcaataacaccacgttttacgcgagccatatgtgctctcctgtatctatattctaattaaaaagttaa

SEQ ID NO: 2429 - DNA, 261 bp, Escherichia coli
gaaacgatgtataccgaaactggtattactccagagaaaactcattaccagactatataaagtaccattaaaaataccaatggaaacaataccaacctattgccatcagaaccatggatataataacactacttgaactattggcaggtagcatctttgtcgagataaagaaaacagtccccatcccaatggccattaaaatcggcaagaaaaaggtcacccaccagaaccctttcatagagcaattaaaactaaatctta

SEQ ID NO: 2430 - DNA, 336 bp, Escherichia coli
tctcaacccagaaacggtgagagtgcaggttcggcaggaaacggcgtttagtcgcgttcagtgcgtgggaacggttgttaccggtcaccggacgcttgccagtaacttggcagactcgggacatgtctattctccaaaaatcaaattagctcgagcttcgtatggggtattggcgcctcgtcaggctttacagcccggtcatcgcagttctatgtgaactctcgattgccaggcccaaatgccaaacccgagattctcaaaggtggcgtagtatacgctgactcagcgatgtgctcaagtcccgaacagacaaagatcccgaaggatcgcgcatag

SEQ ID NO: 2431 - DNA, 341 bp, Escherichia coli
tcagaacttttgctacaacgcccgcgccaacggtacggccgccttcacggattgcgaaacgcagaccgtcgtccatcgcgatcgggtggatcagggtaacaaccattttgatgttgtcgcccggcattaccatctctacgccttccggcagttcgatggtaccagtcacgtcagtagtacggaagtagaactgcggacggtagcctttgaagaacggagtatgacggccgccttcatctttggacagaatgtacacttcagattcgaacttggtgtgcggcttgatggtgcccggcttagccagtacctgaccacgttcgatttcttcacgtttgatacca

SEQ ID NO: 2432 - DNA, 340 bp, Escherichia coli
agaatcgattttcgcttccagctctgcaatcggctgttcaaaatcaaggaaattcagactcatagtattcctgtattagtcaaactccagttccacctgctccgaaccaatgaggccacggagatcgtttaataaacgatcgctcggagagacacgccacgtcgcgccaaaacgcaaccgcgcgcgtgcatccgccctctgatagtagagatgtactggaattgtcccagagcggtggggttccagagactgacggagtcggtttaaaagctggtcatcaatttgcctgtccgtcagcgagatagcaagcccgcgagcatatttttcccgggcttcgtca

SEQ ID NO: 2433 - DNA, 416 bp, Escherichia coli
cggcagctttgagtaacagcgaaggattggtggtggcatcctggggatgataatggcgaatggactcaatatcgccgctgtctgccacgacagtggtgaacctgtttgatgccgtctaactcgttcataggaaatactccttgaaaagtaaagtgttagatgagtgcgttaattcacacttctgagaaatttcgctaaacgcatcaaaaaagcatagcagacaggcatggtattgctggattaagcaggtaacatcagtgttataggattattaccaaaacattatattaatggtgagagtttggacttgctcaaagtctgtagactccggcagggtaataatgtgcgccacgttgtgggcaggggctgttgcccacacactttatttgtgaacgttacgtgaaaggaacaaccaa

SEQ ID NO: 2434 - DNA, 237 bp, Escherichia coli
aacctgacgagcgtcacgagtaacgaagccagctttacgcagttcagaacgcagggactcgtcgtattccatcagagcgcgggtgataccgtgacggatcgcaccagcctgaccagagataccaccacctttaacggtgatgtacaggtccagtttctcaaccatgtcgaccagttccagcggctgacgaactaccatgcgggcagtttcacgaccgaagtactgttccagagaacg

SEQ ID NO: 2435 - DNA, 304 bp, Escherichia coli
ttcattgattgcttagccatttagtaaccctaccttacttgcggaacgggaagtcaaaggcagccagcagagcgcggccttcttcgtcagatttcgcagtagtggtaatggtaatatccaaaccacgaacgcggtcgactttatcgtagtcgatttctgggaagatgatctgctcacggacacccatgctgtagttaccacgaccgtcgaaagacttagcggacaggccacggaagtcacggatacgaggtacagcaatagtgatcaggcgctcaaagaactcccacatgcgttcgccacgcag

SEQ ID NO: 2436 - DNA, 255 bp, Escherichia coli
ttcaacgatgaacttttttgccattgcgtcacgtcacgcaactgctccattcgttgttgatgtttctcgtttaaaaccgcttgctgctccggcgttaacaggcgatacatttggttgcggacttttgccatctcaacctgacgagcaatttgctcattcgccattttttctgcctgtgcgcgcacagcgttttcatcaaaattttctgcggtgacaaggcgatgcattgtctccagttcgctaacattaacagga

SEQ ID NO: 2437 - DNA, 723 bp, Escherichia coli
  misc_feature (57)..(57): n=g, a, t or c
  misc_feature (689)..(689): n=g, a, t or c
  misc_feature (718)..(718): n=g, a, t or c
  misc_feature (721)..(721): n=g, a, t or c
caacaaggcgaaccttctgagcagaagaacgagcatggcgatgtttagcgatagttnccatctcttcctcctaccttatttcttcttcgcttttttatcagcagcgtggccgcgataagtaccgagtccggtgcgaattcacccagtttgtgaccaaccatttcgtcggttacaaataccggaacgtgctgacgaccattatggacagcgatggtcaaaccgatcatgttaggaaagatcgttgaacgacgggaccaagtgcgcaggggcttcttgtctccgctttccaccgctttctctaccttcttcagcaagtgcaggtcaataaaaggacctttcttgagagaacgtggcatggcttatcctctaaaattatttgctacggcgacgtacgatgaatttatcagtacgcttgttgctgcgggtcttcttacctttggtctgaacgccccacggagttaccgggtgcttaccaaagttacgaccttcaccaccaccatgtgggtggtctaccgggttcatcgcggtaccgcgaacggtcggacgaacaccacgccagcgtgcagcacctgctttacccagaacgcgcagcatatgctcagcattgccaacttcgcccagagttgcacggcagtctgcttctactttacgcatttcaccagaaccgcagacgcagggtgacataagcnccatcaccagggggaacctaaaacaaaangcnca

SEQ ID NO: 2438 - DNA, 395 bp, Escherichia coli
aaccgttgaaccattgactgatggcccggtaagtatggaggtaaaacatgttggtaaggttaatttgacattattcagtgtgaaattgacataaatgtggttgctgtgatctacaacttttgtaccaggactgtaggccttaaacgaataaaggtaatttgatgaactggataactggacttgctgattaagtgtaggatcgaaattagtatctgtataaaattcaacagttatgttgtgtactataccaccaatagcccaaaacttatcgtagtcgtctgctttgttgcaacccttagtttgtagatcgctgtctgtgacggaaaagaaaaattcttggttggaaggatctccgatatagattcctggcgattgaatgtcagttattgtatcgt

SEQ ID NO: 2439 - DNA, 164 bp, Escherichia coli
atttttcccaaaacgatgggatcaacaggtgcttgcgcggtgagttgtttgctcatcatgaccaccgtgacagattaagctgctttgtttacttctttgatcagcgcagcaacgcgatcagaaatagttgcgccctggccaacccagtgagcgatgcgatccag

SEQ ID NO: 2440 - DNA, 336 bp, Escherichia coli
taatcatattgcgacgggctttttccatcgctttctggatcgctgctggaacttcacgcgctttaccgtaaccaaaaccaacgcgaccgttaccatcgccaactacagtcagagctgtgaaggagaaaatacgaccacctttaacggttttagatacgcggtttaccgcgatcagcttttcctgcagttcgccagcttgtttttcgatgtgagccatcttacacctctaccttagaactgaaggccagcttcacgggcagcatctgccagtgcctggacacgaccatgatattggaacccggaacggtcaaaggatacatctttgatgcctttttc

SEQ ID NO: 2441 - DNA, 211 bp, Escherichia coli
gaggaattaggcagaacctggcttacgaaagcaccgcgctgggcgtcaactttcatcgctttcgccagttcggagttcagctcagtccccataatacccagctcaccgcgtttcacctggccgtattccaccatctgcgaggtcaggtttttcaccatgttactcgggatagcaaaaccgataccgatgttgccgccgtccggtgcgagga

SEQ ID NO: 2442 - DNA, 473 bp, Escherichia coli
ttaatttttggcattttaataacttccacttcgcattgttaataaacgaaacaaaggcgaacaaagcctgtgaagcccgaaggctccacagacagtgctacttgaaggccttactgtttcttcttaggagcgagcaccatgatcatctggcggccttcgatcttcgttgggaaggattcgaccactgccagttcttgcaaatcgtctttcacgcgattaagcacttccataccgatttgctggtgcgccatctcacgaccgcggaaacgcagcgtgattttggctttatcaccctcttcgagaaagcgaatcaggctgcggagttttacctgatagtcgccttcatctgtaccaggacggaatttaatttccttaacctggataactttttgctttttcttctgttccttagaagacttgctcttttcatagaggaatttgccgtaatccattatacgacaaaccggcggctc

SEQ ID NO: 2443 - DNA, 146 bp, Escherichia coli
acccgcgatgatggtctggttagattcttcgtcagtccatacacggaaagacgggtcttctttagccagacggcccagagccagacccattttttcctggtcagctttggttttcggttcaacctgcgatggagattaccggctca

SEQ ID NO: 2444 - DNA, 287 bp, Escherichia coli
agttgttaatgggttagctaacggcagcaacaccaccagccccaggccaattgctttaaacaaatctaacattggtggttgttatcctgtgtatctgggttatcagcgaaaagtataaggggtaaacaaggataaagtgtcactctttagctagccttgcatcgcattgaacaaaacttgaaccgatttagcaaaacgtggcatcggtcaattcattcatttgacttatacttgcctgggcaatattatcccctgcaactaattacttgccagggcaactaatgtga

SEQ ID NO: 2445 - DNA, 249 bp, Escherichia coli
catgataacaatgtggggttgtcgataggtaaatttctgggtcctggttttatagaaaacataataaagttcctctaatggtagagtaatatgatgtatacggaaacataaaaatgtttaattgttgtgaaagtaattgcaaacagatgtcctacttttatccaatatttatatggaaaaggataatgcttaaatctgttttattaattatcgatgtggtctggagaggcaactgtcaaaaatcgctca

SEQ ID NO: 2446 - DNA, 140 bp, Escherichia coli
gagaaaccatgcgcagcagaccacgacggctgtggtgatcttttttgtgctctgcaaagtggccctgcaggtggttgatctgtgcagtcagcagtgctacctgaacttcggtagaaccggtgtcgtttgcgtcacgacca

SEQ ID NO: 2447 - DNA, 45 bp, Escherichia coli
aagttgggcctgcatcattaccagtcgttcccggagggtgaaata

SEQ ID NO: 2448 - DNA, 358 bp, Escherichia coli
aagattggctggctaatctagccagctcaacccaactttgcaagaaaaatatgcgaaaaaatcagccttggcgctgtttatgcttcggctcggcactgcaaatcacacggatgacaccatcacgcttaacgattttgcagttacggcataatttcttgacggaagcacgaactttcatttttactctccgtaacttctcgggcgaccaattatcggccgtagcctttcaggttcgccttcttcaatgcagactcatactgactggacatcatcagagtttgcacttgagccataaagtccataatcacgacaacaacgataagcagtgaggtcccaccgaagtagaacggtactttca

SEQ ID NO: 2449 - DNA, 271 bp, Escherichia coli
ggcgtttagtcgcgttcagtgcgtgggaacggttgttaccggtcaccggacgcttgccagtaacttggcagactcgggacatgtctattctccaaaaatcaaattagctcgagcttcgtatggggtattggcgcctcgtcaggctttacagcccggtcatcgcagttctatgtgaactctcgattgcaggcccaaatgccaaacccgagattctcaaaggtggcgtagtatacgctgactcagcgatgtgctcaagtcccgaacagacaaa

SEQ ID NO: 2450 - DNA, 245 bp, Escherichia coli
gaatgtggtcagcgattacgcgcagcgatttattgctcagatcggttgcgccagtgactttcgctaccgcctggatcagcgtgcggaacaggtcgatgtcatagttagagttaacgtgttgcagcaccgcagcaatacgctccagacccataccggtatctacagacggcttcggcagcggttccatcgtgccatcggcctggcggttgaactgcatgaagacgatgttccagatctcaatgtag

SEQ ID NO: 2451 - DNA, 174 bp, Escherichia coli
cgatttcgtcgccttttttgtattcacgaactgcttcttcgcctgcaacgttccaggagatgtcagacaggtgaaccaggccgtcgatgccgccgtccaagccgatgaagataccgaagtcagtgatagacttgattttaccttcaacacggtcgcccttgttgtgggtttccg

SEQ ID NO: 2452 - DNA, 140 bp, Escherichia coli
aactaccgacgttttactctgccacttatcattcaacaaggcaggccaggccgcgctggcagacattcgatacccggcgctcaggctatcacccagaatcaataacgtgtccgctgcggcggcacggaaggttaacagga

SEQ ID NO: 2453 - DNA, 164 bp, Escherichia coli
tattgctggcgccataggccgccatacctgcgccggcgttataaatagttataacaccgcccaattggttaattgctgttgcatttttccctgcaccactataactatcagtaccaactcccacacctgtaccgaagtcaatggcgctgttgctagctatatct

SEQ ID NO: 2454 - DNA, 372 bp, Escherichia coli
ggataacacgcatgcgcttggtcagtttagccatttcttagtcctccactaccaggcccatggaacgtgcagtaccttcgatggagcgagtcatcgcgttcaatgtcggcaccagtcatgtcggcagcctttggtctgcgcgatttcctgcagcctgagcgcgggaaattttacccacctttgtctttgttcggcttaccggaaccagacttgataccagccgcttttttcagcagaactgctgccggcggggtcttggtaacgaaagtgaaagaacggtcagcgtaaacggtgattactaccggaatcggcagacctttttcgatggaatcagtttttgcgttgaacgctttgcagaattccatgatgttt

SEQ ID NO: 2455 - DNA, 280 bp, Escherichia coli
tttttcggcggacgacaaccgttatgagggatcggagtcacatcagtaatgttagtgatgcggaaacctgcggcgttcagagcacgaatagtagattcgcggcctggacccggacctttaaccataacttccagattcttgatgccgtattctttcacggcgtcagcgcaacgctctgctgcaacctgagctgcaaacggagtggatttgcgagaaccacggaaaccggaaccaccggctgttgcccaacccaacgcgttaccctgacgatcagtgatag

SEQ ID NO: 2456 - DNA, 82 bp, Escherichia coli
gcctgctgcagcgtcaggcggaaagtagtcaacagctcgcgtaactgccgataagcatcattcaacgcctgggaaaaatcgg

SEQ ID NO: 2457 - DNA, 356 bp, Escherichia coli
attaaacctttttctccatgtttttcatagagggcaacccatgtcctgacctgggttcgggggacaccaaaacgtgccgagatgatcctgtaaccatcatcagttgtgaagtagtgattcacgacttcaaggcgcttttcaaaagggtattttggctttgacatattaggggctattccatttcatcgtccaacaaaatgggtgcagtacatactcgttggaaatcaacacaggaggctgggaatgccgcagaaatatagattactttctttaatagtgatttgtttcacgcttttatttttcacctggatgataagagattcactgtgtgaattgcatattaaacaggagagtta

SEQ ID NO: 2458 - DNA, 90 bp, Escherichia coli
acgtgagaagtgttgatggtgataccacgagctttttcttccggcgcgttatcgatctggtcgaatgcacgagcagcaccgccgtaggtt

SEQ ID NO: 2459 - DNA, 237 bp, Escherichia coli
ccattggttcaaacatagtttctctccgatttgtgcctgtcgcctgaggccgtaatcatcgtcggcctcataaaaattaaaactcttttcgcagccaactattgagtcgcttgatccacgagccaactgatgctgtaacacgtttttctacttcagcttcaccgttaagatgtgactctttcccatagtgaagcaatcccaccgccgtcgaataatacggctcctgagcataatccg

SEQ ID NO: 2460 - DNA, 313 bp, Escherichia coli
ctttaacagggtgttgcagagtgccgttattcagcgcgacgttaatcatattgcgacgggctttttccatcgctttctggatcgctgctggaacttcacgcgctttaccgtaaccaaaaccaacgcgaccgttaccatcgccaactacagtcagagctgtgaaggagaaaatacgaccacctttaacggttttagatacgcggtttaccgcgatcagcttttcctgcagttcgccagcttgtttttcgatgtgagccatcttacacctctaccttagaactgaaggccagcttcacgggcagcatctgccagt

SEQ ID NO: 2461 - DNA, 210 bp, Escherichia coli
gtgccttcttctttttcgctagcgattgggttgaagaaaccaacgcgctcgatgaagcgaccgttgcgtgcattacggctgtcagcgacaacaacctggtagaacggacgctttttagcgccgtgacgtgctaaacgaatagttaccataacatcctcttgtgtgaataaaacaaccggaccccatcgaggaacggagtccggtgtcata

SEQ ID NO: 2462 - DNA, 456 bp, Escherichia coli
aggcagccagcagagcgcggccttcttcgtcagatttcgcagtagtggtaatggtaatatccaaaccacgaacgcggtcgactttatcgtagtcgatttctgggaagatgatctgctcacggacacccatgctgtagttaccacgaccgtcgaaagacttagcggacaggccacggaagtcacggataccgaggtacagcaatagtgatcaggcgctcaaagaactcccacatgcgttcgccacgcagagttactttacagccgatcggatagccctgacggattttgaagcctgcaacagatttgcgtgctttggtgatcagcggtttttgaccggagattgctgccaggtctgctgctgcgttatccagcagttttttgtcagcgatcgcttcaccaacacccatgttcagggtgatcttctcgacccgagggaccttgcatgacagaattgta

SEQ ID NO: 2463 - DNA, 279 bp, Escherichia coli
gcttcatggtcggcgcagaaagtttcacatcagagacggtgaaagtggtgtagctcagcccatagccgaacggatacaacgccccgttagcttcatcaaaataacgcgaagtgtatttgttcggcttgtcggcattatacagggcgaccggtattcagatggctgtagtacaccgggatctgcccgacagaacgcgggaaggacattggcagcttgccggacgggttgtaatcgccaaacaatacatcggcaattgcattaccgccttcagtccccgca

SEQ ID NO: 2464 - DNA, 197 bp, Escherichia coli
gcacgccccgggtcatcaggtcgttcatctcctggcaaatgaacgcatactgatcaaggcaggcagtccacgttgtttttaaagccggagagatcaatatgcagatgctcatgggcgagggtgtaacccgtcggatcaaaactcatagggtgtctcctgcaaaccggagggaggaaagaaaagagcgaccattttgt

SEQ ID NO: 2465 - DNA, 641 bp, Escherichia coli
gattatttcagttcgagttcgttcattgcagcaatgctgaaaccgccgtcaacgtggaccacttcaccggagataccggcagagagatcggagcacaggaatgccgcagagttacccacatcttcaatagtaacggtacggcgaatcggggtaacggcttcgcaatgagccagcattttgcggaagtctttgataccggaggccgccagagtacggatcggaccagcagagatggcgttaacacgcacaccttccggacccatcgcgttcgccatatagcgcacgttcgcttccagagacgcttttgccagacccataacgttgtagttcgggatagcgcgctcagcgccaaggtaggaaagggtcagcagggcagaacccggattcagcatggagcggcaagcttttgccattgcaacgaagctgtaggagctgatgtcgtgggcaattttgaagccttcacgggtaacggcgttaacatagtcaccatccagctgatcgccaggtgcaaaaccaatagagtgtacgaaaccgtcaaatttcggccaaactttccccagttcagcgaacatggtgtcgatgctggcatcttctgcaacatcgcctcaaacatgtcagaacccaattagcggcaaattgtg

SEQ ID NO: 2466 - DNA, 368 bp, Escherichia coli; identical to SEQ ID NO: 1879

SEQ ID NO: 2467 - DNA, 359 bp, Escherichia coli
agatgttcgcccctggctaaccagttgccacgtatgtagcggtgtaccgacggcaaaacaggggctgaaacactgggcaacaggcagtttccaactgacgtcgccgacatcagtcgatgccgcaagcacgttatcggtggcggcatatggagcgacttcattcgccagtaccgtttcacgatgacgtagtgcaaaaaccttgccgttttcgccaccggttgcggcgatattattcagactgttttgccgatcgttggaggtgagcgtagcctgaatttgtttcgcaaaagccagttcttcggagttccattccggggtaccaaaatgggatagggcctggtacatggcattttctaagg

SEQ ID NO: 2468 - DNA, 169 bp, Escherichia coli
cgttcgcggtcgaacttcagcactttaacagtgatttcgtcgcccacgttgacgatttcgctcggatgcttaacgcgtttccaggccatgtcagtgatgtgcagcaggccgtcaacgccgcccagatcaacgaatgcaccgtagtcagtgaggttcttaacgatacctt

SEQ ID NO: 2469 - DNA, 330 bp, Escherichia coli
catagctgcaactgcttcaatgatttgatctttagtgatagacatttaaattgttcctgaatatcagaataagtttatacgtaagcgaatgcgttaaaaagataacctgcgattaagcagcttctttcgcatcgcgtacagcagccagagtacgaaccagtttgccagccgaagcttctttcatggttgccatcaggcgtgcaattgcttcttcgtaggtcggcagagttgccaggcggtcgatctgagacgccgggatcagctcaccttcaaaggcagcggctttgacctcaaattttgcattcgctttcgcgaactctttgaacagac

SEQ ID NO: 2470 - DNA, 129 bp, Escherichia coli
agcaatccctgagccagaggagtaaaggcaatacagcccacgccgttattttgcagggtatccagcaggccgcttttatccacccagcggttcagtaaattgtacgaaggttgatgaattaacagcgga

SEQ ID NO: 2471 - DNA, 411 bp, Escherichia coli
taaaacgtgtcattctgattaagaccttttatcttacccttaagatttcaggaattttggctcatggaagagtcctttttatttaaattttacattccgcgatgtaaatgttccgatttaatattaccctacatttgatgctttttatctcttaaagattcatagatctgttgacaagtcactcctgcgatgtagcgttcgtcagcaatttcagcataaagctgagcttctgctgcaatatctccgagcatgttggtgagcattccttcggcggttttggttgttttgcctctgacggcagcggcaagatctgcggtatgcttcgctgcgtcaaggcgtatggcatatttttttgcttcggcacgcaactggttaacactatcagacagataagcagccctggcagaaatt

SEQ ID NO: 2472 - DNA, 339 bp, Escherichia coli
ccggtgatgtggcgttgttccatgggcgctccttggtcgtaaaggaaatcgttatcctgacgcaaggcgggaaggggagaaagacggatcggcgataacaaatatcagaaaggtataacagagataacgggcggcagaacgccgcccatctttaccaacagaacgattatttcagttcgagttcgttcattgcagcaatgctgaaaccgccgtcaacgtggaccacttcaccggagataccggcagagagatcggagcacaggaatgccgcagagttacccacatcttcaatagtaacggtacggcgaatcggggtaacggcttcgcaatgagccagca

SEQ ID NO: 2473 - DNA, 114 bp, Escherichia coli
cgagaaggctgaacataagcagccgccatcggttctggccccagctcgcgcagacaggtcattgggtgagaggttcccgcgccgacttccatgtccaatggttgaacaatggtg

SEQ ID NO: 2474 - DNA, 100 bp, Escherichia coli
tacgggtcagcatatccgcagatcggatcttgcatgctcatctgtctttactcccgtgattcaattggtgacaattaccagcctagcctttttcagaccc

SEQ ID NO: 2475 - DNA, 194 bp, Escherichia coli
agcgtggagctttgggtggcccagatttccattgggtcgtgttctacccaacctggttttgggtagatttgctcaaattcgcgctgcgacacgctaatgatattggcatcgtgatccattacgaccgcgcgggagctggtggtgccctggtcgagcgcaacgatatattttttttcagtcatgtttaattgtcc

SEQ ID NO: 2476 - DNA, 447 bp, Escherichia coli
tatgacaaagaaaatcactgatgagccaggttctggtacgaaagcgtgcaaaaagggcatcaaatgatgcccttttagtgcgcattgcgtcaaatgttatcggcaattagctcagaacttttgctacaacgcccgcgccaacggtacggccgccttcacggattgcgaaacgcagaccgtcgtccatcgcgatcgggtggatcagggtaacaaccattttgatgttgtcgcccggcattaccatctctacgccttccggcagttcgatggtaccagtcacgtcagtagtacggaagtagaactgcggacggtagcctttgaagaacggagtatgacggccgccttcatctttggacagaatgtacacttcagattcgaacttggtgtgcggcttgatggtgcccggcttagccagtacctgaccacgttcgatttcttcacgtttga

SEQ ID NO: 2477 - DNA, 165 bp, Escherichia coli
tctggaagacacgctcaacgccttcgccgttggaaattttacgaacagtgaatgcagagtgcagaccgcggttacgaatagcgataaccacgccctcgaatgcctgcagacgttttttggaaccttcaacaacccatactttcacttccacggtatcacccggac

SEQ ID NO: 2478 - DNA, 390 bp, Escherichia coli
tagtgaagccttcggtaacaccgataaccattgagttcagcagggcacgcgcggtaccagcctgtgcccaaccgtctgcgtaaccatcacgcggaccgaaggtcagggtattatctgcatgtttaacttcaacagcatcgttgagagtacgagtcagctcgccgtttttacctttgatcgtaataacctgaccgttgatttttacgtcaacgccggcaggaacaacgaccggtgctttagcaacacgagacattttttcctccgattaggctacgtagcagataatttcgccaccaagaccagcctggcgcgctgcacgatcagtcataacacctttagaggtagaaacaactgcgatacccagacccgccataactttcggcagctcat

SEQ ID NO: 2479 - DNA, 147 bp, Escherichia coli; identical to SEQ ID NO: 1892

SEQ ID NO: 2480 - DNA, 379 bp, Escherichia coli
tgctttacgcagttcagtcattttatctacagttacgccacgggaatccgcaactactgcagacagcgcgcctttggctacttcgctgacttcagcaacaatcgcttgtttgtcttgaagatttaaagccattagctttgctcctggatgtttgccagagaaaatctctggaactcacttcactcctccaaacggagagagcgtcttaattacggtgagcagaaacaagccagaatataaaagaataatcttagcgttctgtcaccgtctacgcaggggattaagtttcttgcgaaactcctgcggtcttcgacggaggcctggataggccaggctccaacgaacaaatcttttctatccgtcgctattcagcttgtga

SEQ ID NO: 2481 - DNA, 191 bp, Escherichia coli
ggatctggctgcatccccaacgaacgaattcatccacataacgtgtgtagttggtaaacaagacgaacggctgaaaatgttcaactggcgtaccggtataatggcgcaaccgtgcgagggaaaaatcgacgcggcgcgcatcaaaatgcgatagcggggagaattcagttggatgataaatgccgtctgca

SEQ ID NO: 2482 - DNA, 379 bp, Escherichia coli; identical to SEQ ID NO: 2405

SEQ ID NO: 2483 - DNA, 115 bp, Escherichia coli
tacgctctgaatcaacaaggtttttcggacagccaagggaaacaaagccgattttcggctggggagttactttgctcatagcttaaaaaatattcagttacaggaaaggtcaggg

SEQ ID NO: 2484 - DNA, 146 bp, Escherichia coli
tcacagaggaaactattttattcacgcgttagcgatagactgcattcagggcgaaaggaggtaagccgatgatttcagcgggacgctgaaacgggaaagcctctcccggagaagagggcttttaataaggaaagggttatgatgaa

SEQ ID NO: 2485 - DNA, 421 bp, Escherichia coli
aagccagctgacggcggccccagtcttccagacggtggatcttgccttctgcaccagtgatggcagcagtgtagcgctcgatcatgcccggaacctgttcgctctggtcaggatggaccataaaaacgatttcgtaatgacgcatcgaattgctccttacggattattcagcctcctgtctgggtcagccgaatcccggggaggcaaggaacgtgttaaaggtcggctgaaaaatgacgcgttatagtacttgtatgcctcgctaaactcaagggcagagccgaaataaatctcccctttcgcaattaacctctaacacgctgatttgaagttcatcacacttcatcatggtgtttttttgaacaactgcatcagaaatggtcaccatcaacttctttatcattgattaaaattaaatcag

SEQ ID NO: 2486 - DNA, 545 bp, Escherichia coli
tgtcagaggtctgtattgagtgttagttggaggtgggaaggtgtcaatttggctaatttgctaatgctttcgaattgatagattaaaaattgcatagttcttattttatttaaatatgaactatgagttattgttgcttaataagaaaactgtttctttcaataggaaaattatcatcatcatatttaacaaagaatagcactaattgctaaaaatcgaagtttattaaaccccttttgcatccattagtgtctttaggaatattcgctataaaataagggttgtgcttaatgctttaagaaaaatagcaattttcccttgaatatcgtactggtgatggaacgatgaatctgcaagctggcttttaacaagccagctctaaaagaagggaaataagaataactatactcaaaaactaacagccacggtcatcatgatgtggctgtcaatgaaactataacccaggcgctttccataacgacgtcgtcagtccatgatcaaccagccccagctgatcctgataaactgcctgccacttatcgcgt

SEQ ID NO: 2487 - DNA, 229 bp, Escherichia coli
gtcgtaaggagagaaggccagcgttccgcaggcaccgaataataacgccagcagcaggcgaatgcgctggcgttcaattaatgaggcaaaagccatgtagttatctatccagtttcggttttattcatccagcttcggctggggtgagtcatccgggattttgacatgaacctgaataatacgccgactgtcggccatcgccactttgaactggtaaccgtcgatgtcg

SEQ ID NO: 2488 - DNA, 393 bp, Escherichia coli
cctgtaaccgccccaacagagaatgataatgataataaaattagccgttaatgatagcgtttcgtaaaaacccagctctgcatatttgcggacaaaaatccctaaggcgatccctggcaatgccgcccagctgaaaaacatcatcatgctgatcatcagtgccagaggcagataaaagagaaaaacctcaccggaagaaatatgcgcgaaagtattaatgtgggcgaaaatgggcaagattaaagaaggcaggaacagcggaagcccccaccatttatcacgtatttttatataagttgcattcagtttcatagatgctcagcagaatcccccacatcctgaaggaggtgtattcagacaggcatcccacctgacttcgaatgatgattattc

SEQ ID NO: 2489 - DNA, 88 bp, Escherichia coli; identical to SEQ ID NO: 2307

SEQ ID NO: 2490 - DNA, 158 bp, Escherichia coli
aaatgttcaaggagggatcgacagatcccttcacctttcagaacggcattgattttcgaatagcgttaatcatcaactggcaaccagaagagaacgtcgcatctacgcgggtcagtattccaatcggttcgcctgcaccatgtcccggaacaggcagg

SEQ ID NO: 2491 - DNA, 124 bp, Escherichia coli; identical to SEQ ID NO: 2219

SEQ ID NO: 2492 - DNA, 66 bp, Escherichia coli; identical to SEQ ID NO: 1691

SEQ ID NO: 2493 - DNA, 355 bp, Escherichia coli
ttagcggctccggtcattgctggcattcttgccagtatgatcgtgaactggctgaacaagcggaagtaacgtgtcatgcgggcgtcaggctgccgtaatggcaatttgcgcccggaccaggccgcaggggggaaactctgcggcctttttcgttcttactgcgggtaaggcacccagtcgccgccgttcaggcgaacgtacggtttatcctggtattgaataactactgcatttgagttctcggagaccggtgctgtttgtggcaacccactggtgagttttttccagtcaacattgtcttcggtgaaaatcttgccatcgagaacgcgaaccaccagatcggagatagccagga

SEQ ID NO: 2494 - DNA, 275 bp, Escherichia coli
tgcagagtatgagtgttagtagtcaagatactcttcctgtcaaaatataagaaacgacaataataacacggcctgccgcaatcgtaagaatgagacaggccgtaaagtttggcgaacaaaagatggaacgttagtcttgttgattaaccttgcgctcaagcgatttcagacgcttgctcatgtcatcaatgttcatcaccagtgcagcggttttgcgccagactttgttgggttgcagcggaatgcctgaggaatagacgcctggttcagtgatg

SEQ ID NO: 2495 - DNA, 175 bp, Escherichia coli
tgtagatcacgtgctggcgaacaactggatcgaattttttcagttccagtttttccggcttagtacgtttgttcttcgtagtggtatagaagtgaccagtaccagcagaagaaaccagcttgattttctcacgaatacctttagccatgatttatttcctctaagtacttagtac

SEQ ID NO: 2496 - DNA, 283 bp, Escherichia coli
tgcgaacgccttgttggcttcggccatacggtgaacgtcttcacgtttcttaactgcagtacctttgttttctgcagcatcagaaagttcgttcgccaggcgcagagccatggatttatcaccgcgtttacgagcagcttcaacgatccaacgcattgccagagcattacgacgaaccggacggacttcaactggtacctgataagtagaaccaccaacgcggcgagacttaacttctacagtcgggcgcacgttttcgagagctacttcgaatgcttccagt

SEQ ID NO: 2497 - DNA, 474 bp, Escherichia coli
attaaatactcctgtaaaaacggcctcattctggaggccgtaatgatgattattggaagcgggaaagcctgaatggcgtcaaatcaaaatcgctttttttgtcttgcgcaaaatcggcagctatttcccctaaaactgacgcaaatttaaaaccgtgcccactcaggccggtaatgagcagtgtattatcgtggccgggtagggtatcgataataaaatcttcgtcaggcgaattatcataggtgcaggcagcgccgtacaggcagcaaccgatacccggcaatacattgcgcaagaacgggaaggcttctgacccatcactggccacttccgcaaacggaacacgttcatccgctgaatggataacctggcctccgttatgtttgccaatcttcaacgcgtcgttttctgccggaaaaccataatattgatcgccattgggcagttcaccggtaaacgccgggaatttattct

SEQ ID NO: 2498 - DNA, 267 bp, Escherichia coli
gcgaatacttcgctgtgaacctggaagctcacttcgtgttcgccagtggtacgcagaacgccgttcggcagacgaacttcgctcttagccacttcaacgccagctgcagttacagcgtcagcgatgtcgcgagtaccgatggaaccgaacagtttaccttcgtcgccagctttagacgcgatggtaacagtttccagtgcattgattttctcagcgcgagcattagcagctgccagaacttcagccagtttagcttccagttcagcg

SEQ ID NO: 2499 - DNA, 151 bp, Escherichia coli
gatcgctttcagttcagcgcgtttcgcgaagtatttatcagctaaagctacgcgttttacttcgcgtgctttcattgattgcttagccatttagtaaccctaccttacttgcggaacgggaagtcaaaggcagccagcagagcgcggcctt

SEQ ID NO: 2500 - DNA, 523 bp, Escherichia coli
gatgccttgtccttttacataaatgagggtattcgcagtacccaggtcaatggacaagtcattggaaaacatgccacgaaattttttcaacatactaagggataatcctgaaagctggggcggaaaagaaaatccgcttactttaccaaccacacgcagcagcgacaaggcgcaaaaatcatctgctacggtgaaaattagtgcagttcgtttcctttgttacaaatctctgcctgagtccagaaaggcttaatgcatcagcagcattcctcgcctgtttgcaaccgcgtaaggtcattcatctgcatatgtgctgcaacaatctggcgagcagacaagcacactcccatgagacgcagcgcgcattattctacgtgaaaacggattaaacggcaggttaaaccgagtatctttgtgaatattttttcacgttagtatcaagtggctgtgaggacgcgaaaaaatccccttgcccgcctgtaacaccgcgctgaatcagggtctgccactcccttcgcgaacg

SEQ ID NO: 2501 - DNA, 66 bp, Escherichia coli
acggacgctttagccagttccttagtcaggtactgacgtactttaaaatcgctgtccaggttgtca

SEQ ID NO: 2502 - DNA, 318 bp, Escherichia coli
gatcgcaggtacgtcaaccggggatggcaggtaatcaattaccgcatccagcatcgcctgaacacctttgttcttgaacgcagaaccacaggttaccaggatgatttcgttgttcagaacgcgcctgacgcagagcacctttgatttctgcttcagtcagttcttcaccacccaggtatttttccatcagctcttcagaagcttcagctgcggattcgatcaggttctggtgccattcgttagccagttcaaccatgtctgccgggatatcttcgtattcgaaggttacgccctggtcagcgtcgttccagttgatag

SEQ ID NO: 2503 - DNA, 130 bp, Escherichia coli
ctcaggaggaatataaccacgcgcgcgattactcataaatgcctgagggatcgtcaggttcagtcgctgctgaccaacatccagatgcgcagtagcgtcctggaccattgtggttaatggcacacaggca

SEQ ID NO: 2504 - DNA, 234 bp, Escherichia coli
gggcttattttttacgcgtaatacaatgaaataaaaggatttatttctggtcacgtccacacattgaccacatcgacaaaaaagcccctcgactgaggggcttcctgtttctaattacatccacataatttgctgccctgacggcaacgggtgcggccttacgacgtggacttctcccggcttcacaatgtatcgctgtaccgactcataagtgatgaacgtggcgctgcaatt

SEQ ID NO: 2505 - DNA, 198 bp, Escherichia coli
atggtattcaaccagacgtttacgtacggtctcttcctgatcatctttacgggtagtcagttcttcaccggtaacgtcgtctttgccttctactttcggcggattgaatttaacgtgataaacacgaccagacggcgcatgaacgcggcgaccgacgatacggtcaacgatcagttcgtccggtacgtcgaattccag

SEQ ID NO: 2506 - DNA, 410 bp, Escherichia coli; identical to SEQ ID NO: 2163

SEQ ID NO: 2507 - DNA, 289 bp, Escherichia coli
acacataaagcggttgcccaggctgcaaatacagcgaaattgttgtcagccagttccaaccagtaccgcccccgaaccatgacgcgatggtcgccgggaacagaataatactggaagcgaagattgccgggattacccccgccatattcactttcagcggtaaatgtgtgctctgtgcagcatagacacgacgaccttgctgacgtttcgcgtagtttaccacaatgcggcgttgaccacgctcaacaaatacaacaaagaacgtcactgcaaatactaatactgcaac

SEQ ID NO: 2508 - DNA, 222 bp, Escherichia coli
acagaaaattacagaaaaaggaggcaatatcgggtaaaggcattagcccgacgaatacgtcgggctacaaatattattgtgctgcaggtgttttagcgggttgttgatccacaggttctaactggaagaccacatcgacctgatcatcaaactgaatagcggcctgctcgtaagtttcctgggcggacaccggcgcggcatcggctttcatcatccgcacca

SEQ ID NO: 2509 - DNA, 283 bp, Escherichia coli
gcacacctgcgtggactttacggcgaatatcatccagcgattcgtggtggtcgagatgcagcgccagtggcatgttgtaggttgtggaataggcgctacacagggcgtagatctcttccagcgcgatgtgtttaaaggtccccggcgttccggcgaggatcaccggcgatcgcatttcactgcacacttcgaggatcgcttggatcgtctcggcgttatgaatgttaaaagcaggcaccgcgtagccattggcctgggcgtcctgtaacagatatttagtgga

SEQ ID NO: 2510 - DNA, 342 bp, Escherichia coli
taagtgttgtctcttcaaacatagcgcgcagcgcaggagatttgcgcaggcgacgagggcgttggattaagtctgtcatggtctgcctgatgtttgtggaatcgaggggcatagtatacctgaagcagggtagggatgttttacgaaagttgtcgcgatgttgacaagaagagaatggaagagaggccaggacatctttttaatagaaacagcaataattttatattcactgaaaatatttttaatctttatttatagctgttggttattattttttggagtttggttgcgctgctataaattgaataattaaaactttgttgcatattcataggatattta

SEQ ID NO: 2511 - DNA, 291 bp, Escherichia coli
ggatgaccatgtcatcgataccaacagatgcaccagaacgcgctgcataggcgaagccggtgtacatgatctggtccgcaaaaataacggtcggtttcagaccgagaatgcggtagcaggtgttcagcattttggagattgcttttttacccagcgcctggttgacgatggagtaaggcagacctttcggtacaatcatccacagaatggcacggccaacagtcgtgtctttcaggctggttttcgctactaattcaccgttagcatctttttcatactcggtgatacgca

SEQ ID NO: 2512 - DNA, 519 bp, Escherichia coli
aacgatcttcgtcggaagcgttcacatcagagatgatcgctttcagttcagcgcgtttcgcgaagtatttatcagctaaagctacgcgttttacttcgcgtgctttcattgattgcttagccatttagtaaccctaccttacttgcggaacgggaagtcaaaggcagccagcagagcgcggccttcttcgtcagatttcgcagtagtggtaatggtaatatccaaaccacgaacgcggtcgactttatcgtagtcgatttctgggaagatgatctgctcacggacacccatgctgtagttaccacgaccgtcgaaagacttagcggacaggccacggaagtcacggatacgaggtacagcaatagtgatcaggcgctcaaagaactcccacatgcgttcgccacgcagagttactttacagccgatcggatagccctgacggattttgaagcctgcaacagatttgcgtgctttggtgatcagcggtttttgaccggagattgctgccaggtctgctgc

SEQ ID NO: 2513 - DNA, 214 bp, Escherichia coli
ttccaggagatgtcagacaggtgaaccaggccgtcgatgccgccgtccaagccgatgaagataccgaagtcagtgatagacttgattttaccttcaacacggtcgcccttgttgtgggtttccgcgaactgctgccacgggttagctttgcactgtttcagacccagggagatacgacgacgttcttcgtcgatatccagaaccataacttcca

SEQ ID NO: 2514 - DNA, 187 bp, Escherichia coli
gtcggccatcatgtagatgctgttgaaggaaacctgcttctcttcctgaccgtcacggttaatcacggtttcagtttgcaggttatccatcatcgctttggatacacgatcgttcgccgcagcccagatatcgataactttgttgtagcgttcgcccgcagttaccagaccagactggaactgctcc

SEQ ID NO: 2515 - DNA, 274 bp, Escherichia coli
cggcgtgccagcccgttgtggctgctggaagacgaatgtgaattgactgggagttaacaagcgtaactccctgggaaatgcgagcttaaccactcaggggttagcctttattacttagaaacggtcagacgagcgcggcctttagcacgacgacgtgccagaacctgacgaccatttttagtagccatacgagcacggaagccgtgagaacggttgcgcttcagtacagacggttgaaaagtgcgtttcatggcgatttctacctaaacttgaa

SEQ ID NO: 2516 - DNA, 438 bp, Escherichia coli; identical to SEQ ID NO: 2350

SEQ ID NO: 2517 - DNA, 146 bp, Escherichia coli
tcgactcagcaagtggtttaagctgctcagccattgcgtcgccaaatgggccattaaaagcaaaatgaagttgtaacaaagttgccatagcgattctccttctgataacgcatacgaagacagtgtaaatcttttaacgtattgga

SEQ ID NO: 2518 - DNA, 166 bp, Escherichia coli
tgcctgtttacggtcatcgactcatgtcttttcgctgcctggtcacaggagagtacgcagaactgaaacgacaagacggattgagtgacgagccagaaatctgttcacttcgcatttaagataaaacgggaagcgttggaaattacaagattcaaacttaataagg

SEQ ID NO: 2519 - DNA, 70 bp, Escherichia coli; identical to SEQ ID NO: 1961

SEQ ID NO: 2520 - DNA, 341 bp, Escherichia coli
atcgttttcataactgctggcagagtcataatgcgcaccaataataatcagcggtccatcggcaggaccataatcagcaacaatgtttttgtaggggccacccgtaatggggacgtcctgcgaggtaactctggcaccgctacctgacaaagacctcttttatatattctgcggacctattcagattatcaatattgtcggcactacgtggatgcacagtttgtgtaagataacgaactgttttttctaattgctcaggacttgcgtgtcggggcgttgacggtaatgcattgacccagggttggtaaaaaataatcatagggagtaaaaacacaaataat

SEQ ID NO: 2521 - DNA, 334 bp, Escherichia coli
tgtttgacggcagcggttacgctgacgagacgggctggaatcacgcggcagagtctgcagcttgagaacagcgttccaacgatcttcgtcggaagcgttcacatcagagatgatcgctttcagttcagcgcgtttcgcgaagtatttatcagctaaagctacgcgttttacttcgcgtgctttcattgattgcttagccatttagtaaccctaccttacttgcggaacgggaagtcaaaggcagccagcagagcgcggccttcttcgtcagatttcgcagtagtggtaatggtaatatccaaaccacgaacgcggtcgactttatcgtagtcga

SEQ ID NO: 2522 - DNA, 191 bp, Escherichia coli
tgcaccggacttcttcaggttatctgctgtttcacgcgggttgaaaaccaacgccgtgtagaagaaacagaagaagatgattgcagacgcatagagtaacacataaagcggttgcccaggctgcaaatacagcgaaattgttgtcagccagttccaaccagtaccgcccccgaaccatgacgcgatggtcg

SEQ ID NO: 2523 - DNA, 348 bp, Escherichia coli
aatggggtgaaatcgtgcccggcaggtacggcgtcaagaatacgctggcgatacgccacggcagcctcaacggtggtcacgggcggagccagattgggcattacgatagcccgtccataaatttcgctggtatatggcacgacagtttttaacatgtcgccatcgcggaggtgaaggtgccagtcgtctgggcggcggatctttaatacctgggatggtgcagtcattaatctctatgctccggctgaagggatgtttttgccggacacaaaggataagcggaaacgttttcctttgcacgaaaaataaagggcgcgaatgcgccctcgtgattaatcagtaaatgga

SEQ ID NO: 2524 - DNA, 152 bp, Escherichia coli; identical to SEQ ID NO: 1631

SEQ ID NO: 2525 - DNA, 106 bp, Escherichia coli
tggtacgctgaccgcgaaccgggagaccacgacgatgacgcaaaccgcgatagcaaccaagatccatcaggcgcttgatgctcatgctgatttcacggcgcagatc

SEQ ID NO: 2526 - DNA, 397 bp, Escherichia coli
gcggctttctgtgcccaatattcggctttgctcaaatcgccggagctaaaccagctgtcggcaagaaaatattgtgcgcgtcggtccccggcctctgctgcctttaaatactggctgccaggctcggagtcgttggcgtgggcaaagaatgtcaaaaacaacatcaatgcgataatttttttcattttgataatacgattgggtagggagtaaccagtataaagagttcgaatggataaaaaaacagcctccgaaaggaggctgtagaaaggacggtattacgccagtgccgcttcgcgcaggcgagttttcaacttgttgtactcgtcaatcacgtactgctcggcggcgcgctgatcggcgatcggctcgacgcgaacggcgcagtatttgtact

SEQ ID NO: 2527 - DNA, 341 bp, Escherichia coli; identical to SEQ ID NO: 2394

SEQ ID NO: 2528 - DNA, 254 bp, Escherichia coli
agatctttcaggccgcgtaccagtttaatagcgcgatcggaggtcaggccgccaatcactggcgtaccggtgcctggtgcaaaagcaggatccaggcagtcgatatcaaaagtcaggtaaaccggcatatcacccacaatctgtttcacttgggcgataacgtcatccacgctgcgatcgttcacctggcaggcgtccagcacggtaaagccgttgtctttatcaaactcggtacgaataccaatctgcacgga

SEQ ID NO: 2529 - DNA, 367 bp, Escherichia coli; identical to SEQ ID NO: 1715

SEQ ID NO: 2530 - DNA, 137 bp, Escherichia coli
agaatcgggttctctgaggtcgactcccaaatgactaaagagatcagagaaataactgatactactgttaatattattattgtacctcgagttgaaccaatccagatcgcgccctttatcaagcataatttgcaagc

SEQ ID NO: 2531 - DNA, 159 bp, Escherichia coli; identical to SEQ ID NO: 1867

SEQ ID NO: 2532 - DNA, 228 bp, Escherichia coli
agaacggccttcacgtacggttgcagcaacagcgcccaggtacagggtcacagcacggattgcgtcgtcgttacccgggataacgaagtcaacaccgtccggatcagagttggtatcaacgatagcaaataccggaatacccaggttgtttgcttctttgatagcaatgtgttcgtggtcagcatcgattacaaacagagcgtccggcagaccgcccatgtctttgat

SEQ ID NO: 2533 - DNA, 285 bp, Escherichia coli
cattgatgaatttgctgtaagaaataccgttctgacgtgctgctgcgttgatacgcgcaatccacagttgacggaactgacgcttacgttgacgacggtcacggtaagcatactgaccagcctttgataacagcctggaaggcaacgcggtatacgcgagaacgcgcaccgtagtagcctttagcttgtttcaaaattttcttgtgacgtgcacgtgcaataacaccacgttttacgccgagccatatgtgctctcctgtatctatattctaattaaaaagttaa

SEQ ID NO: 2534 - DNA, 59 bp, Escherichia coli
caatatacgttcagatacccatagcggtagaccggaaagggagttctgtagtggctgca

SEQ ID NO: 2535 - DNA, 87 bp, Escherichia coli; identical to SEQ ID NO: 2147

SEQ ID NO: 2536 - DNA, 267 bp, Escherichia coli
agagcatcaacggttttctcggttggctcaacgatgtcaaccagacgcaagtgagtacggatttcgtactgatcgcgcgcgtctttgttgacgtgcggggagatcagaacagtgaagcgctctttgcgtgtcggcagcgggatcggaccacggacctgcgcaccagtgcgcttggcagtctcgacgatttccgcggttgcttgatcgatcagacgatgatcaaacgctttcaggcggatacggattctttggttctgcatgagacca

SEQ ID NO: 2537 - DNA, 209 bp, Escherichia coli
attctagtgggacaaaaagataaaactcaggcggtcgaacgaccgcctggagatgttcacttacgcctggtggccgttgatgtaatcaatggcagcctgaacggtggtgattttctcagcttcttcgtccggaatctcagtatcaaactcttcttccagagccattaccagctcaacggtgtcaagagaatccgcgcccaggtcttcaa

SEQ ID NO: 2538 - DNA, 68 bp, Escherichia coli
atactgagcaaggcataggctttgcttagcgcaagtttatgaagcgttttataccaacaaaaaacgga

SEQ ID NO: 2539 - DNA, 245 bp, Escherichia coli; identical to SEQ ID NO: 2450

SEQ ID NO: 2540 - DNA, 479 bp, Escherichia coli
ttgcgtttcatgataccagtggcttttgccggtgatgtggcgttgttccatgggcgctccttggtcgtaaaggaaatcgttatcctgacgcaaggcgggaaggggagaaagacggatcggcgataacaaatatcagaaaggtataacagagataacgggcggcagaacgccgcccatctttaccaacagaacgattatttcagttcgagttcgttcattgcagcaatgctgaaaccgccgtcaacgtggaccacttcaccggagataccggcagagagatcggagcacaggaatgccgcagagttacccacatcttcaatagtaacggtacggcgaatcggggtaacggcttcgcaatgagccagcattttgcggaagtctttgataccggaggccgccagagtacggatcggaccagcagagatggcgttaacacgcacaccttccggacccatcgcgttcgccatatagcgcacgtt

SEQ ID NO: 2541 - DNA, 248 bp, Escherichia coli
cgtttgctctcccggacgaattcctggtacaaatgcaccggacttcttcaggttatctgctgtttcacgcgggttgaaaaccaacgccgtgtagaagaaacagaagaagatgattgcagacgcatagagtaacacataaagcggttgcccaggctgcaaatacagcgaaattgttgtcagccagttccaaccagtaccgcccccgaaccatgacgcgatggtcgccgggaacagaataatactggaag

SEQ ID NO: 2542 - DNA, 291 bp, Escherichia coli
ttggttcagggccggaaccggcttctgatgtttcttaaccaggttgataccttcaacaatgaccttgccggaagacaggacattcttaactttaccgcgtttacctttatctttaccggttaacacgataacttcgtcatcacgacggattttcgctgccatgattcgctccttagagtacttctggtgccagagagataattttcatgaacttctcactacgaagctcacgagttaccggcccaaaaatacgcgtaccgataggctgctcgctgttgttgttcagaagaa

SEQ ID NO: 2543 - DNA, 311 bp, Escherichia coli
tactaattccattgctatctccttacgccttcacagctggtttaacgatcaggtcgctaccggttgcacccgggacagcacctttaaccagcagcaggttgcgctcagcgtcaacgcgtactacgtcaaggctctgaacggttacacgttcgttacccatctgacctgccattttcttgcctttgaacactttgcccggagtctggttctgaccgatagaacccggaacgcggtgagacaaggagttaccgtgagtagcgtcctgggtacggaagttccagcgcttaacggtacctgcgaaacctttacct

SEQ ID NO: 2544 - DNA, 307 bp, Escherichia coli
tgatagcgcgagccagctgacgctggtattttgcacgggtaccggtgatacggcttgggacaatcttaccgctttcggtgatgtagtttttcagcgtagcgatatctttatagtcgatctcttgaacgccttccgcggtgaaacggcagaacttgcgacgacggaaataacgtgccatatggctagtctccagaatctatcaattcaatctgctcggcatgcaaaaccattttgctcagtccgttctttgccttgtggcatgaaatgaacccctgaacggttatgcgactgccgaccgttatactgt

SEQ ID NO: 2545 - DNA, 85 bp, Escherichia coli; identical to SEQ ID NO: 2339

SEQ ID NO: 2546 - DNA, 291 bp, Escherichia coli; identical to SEQ ID NO: 2511

SEQ ID NO: 2547 - DNA, 221 bp, Escherichia coli
ggacgctttagccagttccttagtcaggtactgacgtactttaaaatcgctgtccaggttgtcagcgaattctttggtgttcgcaaaccaggtagagttccatggttttacaatacccaggcgaataccattaggatgtactttctgacccattgctagtctccagagtctcagcgatcggacacaaccacagtgatgtggctggtgcgcttcaggatgcg

SEQ ID NO: 2548 - DNA, 488 bp, Escherichia coli
tcgatctggttcatcattttcatggcttcaacgatgcacagggtatcgcccacgttgactttctgacccacttcgatgaacgcttttgcgtccgggcttggggtgcggtagaaagtaccaaccatcggggaacgtacgatgtgaccactgatttccgctgctgctggcgcttccatggaaggaacggtcgccggagcggctgcgttagattgagctggctgctgcatcattggtgcagcgtaagcttgttgcatcacagggaaacttgcggcaggagctgcacggctaatgcgtactgactcttcgccttcagaaatttccagttcggagatgcctgattcttcaaccagctcgatcagttttttaatcttacgaatatccatgagtgggttccgtactctttgtttagtgtgattgtgacaggcgtttcaccgccgtctgtaaagcgtatgccccgacagctgtatgcatagcgataaattccagca

SEQ ID NO: 2549 - DNA, 215 bp, Escherichia coli
tgatagtcaaaaatgctttcggcgtcttcggtggaagaaaacactctgagccacccacgaataccgtaagacgaacccatttttcccaaaacgatgggatcaacaggtgcttgcgcggtgagttgtttgctcatcatgaccaccgtgacagattaagctgctttgtttacttctttgatcagcgcagcaacgcgatcagaaatagttgcgccctg

SEQ ID NO: 2550 - DNA, 147 bp, Escherichia coli; identical to SEQ ID NO: 1892

SEQ ID NO: 2551 - DNA, 332 bp, Escherichia coli
gaatgattggccttctttatgattttaaggattatgcttctaaaatggcggagaacatggcgaggcttgctgccttacttcattacttcagcggtgatggaggcgatatatctgttaccgggtaatgactccaacttattgatagtgttttatgttcagataatgcccgatgactttgtcatgctgctccaccgattttgagaacgacagcgacttccgtcccagccgtgccaggtgctgcctcagattcaggttatgccgctcaattcgctgcgtatatcgcttgctgattacgtgcagctttcccttcaggcgggattcatacagcggcc

SEQ ID NO: 2552 - DNA, 686 bp, Escherichia coli
tgatactagtgtagccagccaataagggagaaaaatggaggaattatgaaacactgtctggaatcgtctgaatgacgggcacatttgcgagcacgcatccagtaataacacaggaaactattttatctacgcgttagcgatagactgcttgcatggcgaaaggaggtaagccgacgatttcagcgggacgctgaaacgggaaagcccctcccgaggaaggggccataaataaggaaagggtcatgatgaagctactcatcatcgtggtgctcttagtcataagcttccccgcttactaagactaccagggcgggggaaaccccgctctaccctcactcctgaaagtatgccttcacgataagattgtcaatccgcaggctttgtagtctgcgatcctgccagcaaatattctttgcgagtcgttacgcaataatcacagaggaaactattttattcacgcgttagcgatagactgcattcagggcgaaaggaggtaagccgatgatttcagcgggacgctgaaacgggaaagcctctcccggagaagagggcttttaataaggaaagggttatgatgaagcacgtcatcatactggtgatactcttagtgattagcttccaggcttactaagaacaccagggggagggggaaacctctccctaaccctcactcctgaaattatgtc

SEQ ID NO: 2553 - DNA, 193 bp, Escherichia coli
aactaccaggatcgcgccgtccatctgcgcagcaccggtgatcatgtttttaacatagtcggcgtgccccgggcagtctacgtgtgcgtagtgacgggtcggggtgtcgtattcaacgtgagaagtgttgatggtgataccacgagctttttcttccggcgcgttatcgatctggtcgaatgcgcgagcagca

SEQ ID NO: 2554 - DNA, 341 bp, Escherichia coli
gagcctgcttacggtctttaacgccggagcagtcaagcgcaccacgtacggtgtggtaacgaacacccgggaggtctttaacacgaccgccacggatcaggatcacggagtgctcctgcaggttgtgaccttcaccaccgatgtaggaagtcacttcgaaaccgttagtcagacgaacacggcatactttacgcagcgcggagttcggttttttaggagtggtagtatatacacgagtacatacgccacgtttttgcgggcatgcttccagcgcaggcacgttgcttttcgcaactttgcgagcacgtggtttgcgtaccagctggttaactgttgccatt

SEQ ID NO: 2555 - DNA, 150 bp, Escherichia coli; identical to SEQ ID NO: 2066

SEQ ID NO: 2556 - DNA, 316 bp, Escherichia coli
ttcttaaccaggttgataccttcaacaatgaccttgccggaagacaggacattcttaactttaccgcgtttacctttatctttaccggttaacacgataacttcgtcatcacgacggattttcgctgccatgattcgctccttagagtacttctggtgccagagagataattttcatgaacttctcactacgaagctcacgagttaccggcccaaaaatacgcgtaccgataggctgctcgctgttgttgttcagaagaacacaagcattaccatcgaagcgaatgacagaaccgtccgggcgacgaacacccttc

SEQ ID NO: 2557 - DNA, 204 bp, Escherichia coli; identical to SEQ ID NO: 1624

SEQ ID NO: 2558 - DNA, 150 bp, Escherichia coli
cggacgagtaatcagttcagcgataccttgcacagcgcctttcagtacatcgttcgctgcgccaaacgcatccagcagggagataccgcggcccagaactttcagcagtttgtcgttcgggatagtgatcagagagtccacatgcttgga

SEQ ID NO: 2559 - DNA, 290 bp, Escherichia coli
gtgagaagtgttgatggtgataccacgagctttttcttccggcgcgttatcgatctggtcgaatgcgcgagcagcaccgccgtaggttttagccagtacggtagtgattgcagcggtcagcgttgttttaccatggtcaacgtggccgatagtaccgacgttaacgtgcggttttgtacgttcaaacttttctttagacatcgattgtccctctaagacacggataaatcggtgatatcaccacatcaaccaggcaacatgcccgacttgttgaatgcaataaacagaag

SEQ ID NO: 2560 - DNA, 242 bp, Escherichia coli
actacagtcagagctgtgaaggagaaaatacgaccacctttaacggttttagatacgcggtttaccgcgatcagcttttcctgcagttcgccagcttgtttttcgatgtgagccatcttacacctctaccttagaactgaaggccagcttcacgggcagcatctgccagtgcctggacacgaccatgatattggaacccggaacggtcaaaggatacatctttgatgcctttttccagagcg

SEQ ID NO: 2561 - DNA, 299 bp, Escherichia coli
tttacttcttccagacgctctttcttggcgtcgtagtcaaagataccccctaagaacgtcggagcgttccgtgaggtcctgaatgcgattatttaccggattaatttcaaacatggtctgatttcttttattgagctagtcaaaatgcggtgataagagcgggattgtacccaatccacgctcttttttatagagaagatgacgctaaattggccagatattgtcgatgataatttgcaggctgcggttgccgcgaaactcgttgatatcgagcttataagccagttgcacttcgcgca

SEQ ID NO: 2562 - DNA, 135 bp, Escherichia coli
agcaatagtgatcaggcgctcaaagaactcccacatgcgttcgccacgcagagttactttacagccgatcggatagccctgacggattttgaagcctgcaacagatttgccgtgctttggtgatcagcggttttt

SEQ ID NO: 2563 - DNA, 233 bp, Escherichia coli
gaacggaaagcagcttccagaccatactgcccttcaggatcttgctcgataaatttctgaaacgagtcaagctggatagaaaggagataaggtacatccagaacttgtggacgtttaccaaaatccttacgaatacgttttttctcggtataggagtaaaccatagggttcctcagctcgctgacaagtcgacccatctgtccattgagcggacagtttgtgcaacactattt

SEQ ID NO: 2564 - DNA, 148 bp, Escherichia coli
cgcttttcagcgcagccccacaagggttagctgaatttacaagatgggcacaaaaagaagccgccctcaggcggctcctttttgataattaagactgcttggacatcgcagcaacttctgctgcaaagtcagtctcaactttctcgat

SEQ ID NO: 2565 - DNA, 233 bp, Escherichia coli; identical to SEQ ID NO: 2563

SEQ ID NO: 2566 - DNA, 226 bp, Escherichia coli
ttgcgtcacgcgccagcagaaccagcgatgactgccagtgggctaacatttcttctgttatgccagtaaaaccgaacagcactacgccgtcgatattacgccgtttcagcactcccaaatgttcggcaactaattgcggggaaaactgactttccatcatgattgggtcgtaaccttgttcatagaacgctggcagcatggtttgaacggcgagattttctgacaa

SEQ ID NO: 2567 - DNA, 91 bp, Escherichia coli
acggatttgacattcctggacgtcaaacaccggttcgccaaggcggtagctgacgtattgcagctcggaattaccgctgtagctctgaatc

SEQ ID NO: 2568 - DNA, 277 bp, Escherichia coli
ggtattgccgacaggagacaacatgcccagtccggtcacaactacacgacgcttagacacgtttgtcctccagggagggaaaaaatgattctagtgggacaaaaagataaaactcaggcggtcgaacgaccgcctggagatgttcacttacgcctggtggccgttgatgtaatcaatggcagcctgaacggtggtgattttctcagcttcttcgtccggaatctcagtatcaaactcttcttccagagccattaccagctcaacggtgtcaagagaa

SEQ ID NO: 2569 - DNA, 292 bp, Escherichia coli
cagcatcttcgtaagctttttccagcgtgatccaggcttcgtgacgtttagctttctcacgggacagcagagtttcaccgaagccgtcttctactgcgtccagagcaacgtcaacttcgtcacctacctggatttccagctcgccctgggcgtttttgaactgctcagccgggatggcggactcagatttcagaccagcgtcaaccagtactacgtctttgtcgatagcaacaacaacgccacgaacgatagaacccgggcgggtttcgatttcttttaaggactcttcaaa

SEQ ID NO: 2570 - DNA, 222 bp, Escherichia coli; identical to SEQ ID NO: 1777

SEQ ID NO: 2571 - DNA, 174 bp, Escherichia coli
taacgcccaggcgtttagcttctgaatcgcgaccgttacgtgtggagccgccagcctttttatgtgccatttgaaatctctcctcaggtcttaggcgctgatgccagtaattttcacatcagtgaaccactgacgatggccctgctgcttacgatagtgtttacgacgacgaaa

SEQ ID NO: 2572 - DNA, 103 bp, Escherichia coli
gtatttaccgctctcatgggcggcctcgacgaactggcgagtgatccagttcgtaccaatcacagcgaaacgtatcataacgcgtggatacctccataaaggg

SEQ ID NO: 2573 - DNA, 119 bp, Escherichia coli
gaccgataccgaagatacccgccagggtatccatcttgtcagcaatcgccagcgcacaagctactgggttggacggcaggtcatcaccagcaaaacgcggctgatacctgctcattcag

SEQ ID NO: 2574 - DNA, 78 bp, Escherichia coli
ggtacggttcgacgttgcggtctaaccagcgcaattcgaaataagggagccagtgttcattaatacggtaacggaagg

SEQ ID NO: 2575 - DNA, 221 bp, Escherichia coli; identical to SEQ ID NO: 1731

SEQ ID NO: 2576 - DNA, 482 bp, Escherichia coli
ttcgcattgttaataaacgaaacaaaggcgaacaaagcctgtgaagcccgaaggctccacagacagtgctacttgaaggccttactgtttcttcttaggagcgagcaccatgatcatctggcggccttcgatcttcgttgggaaggattcgaccactgccagttcttgcaaatcgtctttcacgcgattaagcacttccataccgatttgctggtgcgccatctcacgaccgcggaaacgcagcgtgattttggctttatcaccctcttcgagaaagcgaatcaggctgcggagttttacctgatagtcgccttcatctgtaccaggacggaatttaatttccttaacctggataactttttgctttttcttctgttccttagaagacttgctcttttcatagaggaatttgccgtaatccattatacgacaaaccggcggctcggcgttagggctgatctcgactaagtctactccggctt

SEQ ID NO: 2577 - DNA, 162 bp, Escherichia coli
ctttaatacctttagcgcccagacgcattgcgttctgtacagcacgcttcatagcacgacggaacataacgcgacgttccagctgagaagtgatgctgtcagcaaccagttttgcgtccagttcaggcttacgaacttcggcgatgttgatctgtgcaggaa

SEQ ID NO: 2578 - DNA, 253 bp, Escherichia coli
ttcttttattgagctagtcaaaatgcggtgataagagcgggattgtacccaatccacgctcttttttatagagaagatgacgctaaattggccagatattgtcgatgataatttgcaggctgcggttgccgcgaaactcgttgatatcgagcttataagccagttgcacttcgcgcacgccgttatccggccagagggcggtatcgacattaaaagcaataccatccagcagtggaccgccgccgaccggttc

SEQ ID NO: 2579 - DNA, 168 bp, Escherichia coli; identical to SEQ ID NO: 1661

SEQ ID NO: 2580 - DNA, 354 bp, Escherichia coli
gcgtttagtaccaacgaaaaggattttacctttgcgagaagcaatcttgttcagttcagccagagcttcgttgaacatcggtacagttttctcaaggttgatgatgtgaactttgttacgcgcaccgaagatgaacggcttcattttcgggttccagtaacgggtctggtgaccgaagtgaacaccagccttgagcatgtcgcgcatggaaacagttgccatgattaaaacctctatataaaagttggggttatgcctccacgtatcccatattaccgaccccaaagggcaccccggaatatgtgccgatacgtgtgtgttgttacacaaagtgagattgtcgcttccgtccag

SEQ ID NO: 2581 - DNA, 270 bp, Escherichia coli
ggaattaccgctgtagctctgaatcgggaatacggaacggaaagcagcttccagaccatactgcccttcaggatcttgctcgataaatttctgaaacgagtcaagctggatagaaaggagataaggtacatccagaacttgtggacgtttaccaaaatccttacgaatacgttttttctcggtataggagtaaaccatagggttcctcagctcgctgacaagtcgacccatctgtccattgagcggacagtttgtgcaacactattttgt

SEQ ID NO: 2582 - DNA, 108 bp, Escherichia coli
ggtgcagtaatgatgtccagcgtaacagtcactggcagtaatgctgcggaaacaccatccggaatgcctctgggtgaatagtattcataaaatcgcactttaaatgga

SEQ ID NO: 2583 - DNA, 116 bp, Escherichia coli; identical to SEQ ID NO: 1566

SEQ ID NO: 2584 - DNA, 36 bp, Escherichia coli
gttttcggttcaactgcgatggagattaccggctca

SEQ ID NO: 2585 - DNA, 152 bp, Escherichia coli
acatagttatttttcaacctgatacaacgagaaagaggaaggaaaagggcgttatctgacaggtcagataacgccctaacgtattaacggtaatccagcgttacgttaacgatagcgtctgcttcccctggggtgatttctgatggaactac

SEQ ID NO: 2586 - DNA, 36 bp, Escherichia coli; identical to SEQ ID NO: 2584

SEQ ID NO: 2587 - DNA, 360 bp, Escherichia coli
ggcgctgtttatgcttcggctcggcactgcaaatcacacggatgacaccatcacgcttaacgattttgcagttacggcataatttcttgacggaagcacgaactttcatttttactctccgtaacttctcgggcgaccaattatcggccgtagcctttcaggttcgccttcttcaatgcagactcatactgactggacatcatcagagtttgcacttgagccataaagtccataatcacgacaacaacgataagcagtgaggtcccaccgaagtagaacggtactttcattgcatcacgcatgaactccgggatcaggcagataaaggtaatatacagcgcaccaaccagggtcaggcgg

SEQ ID NO: 2588 - DNA, 229 bp, Escherichia coli; identical to SEQ ID NO: 1883

SEQ ID NO: 2589 - DNA, 470 bp, Escherichia coli
ttgatggtgatcttgatgatgtcgcctacgcctgcgtagcgacggtgcgagccacccagaaccttgatacacattacgcgacgtgcaccggagttgtcggcgacgttcagcatagtctgttcttggatcattttagtgctccgctaatgtcaactactactgagacccgaaaatcaggtcgttaaaaatccccatatcgagggcgcggcattataacaccgcttcaaggatatgggtagaaaaaataaacggctcatttctgagccgtttattcgtattgagagagtgtactgtattacagaaccgctttctctacaacgcgaaccagcgtccaggatttagtcttggacagcggacggcattcgcggatttcaaccacgtcaccgataccgcattcgttgttctcgtcatgtacgtgcagtttggtcgtacgcttgatgaatttaccgtagatcgggtgtttcacaaaa

SEQ ID NO: 2590 - DNA, 146 bp, Escherichia coli
ctggtagaacggacgctttttagcgccgtgacgtgctaaacgaatagttaccataacatcctcttgtgtgaataaaacaaccggaccccatcgaggaacggagtccggtgtcatattaaaagcccgaaaattttactcatttttgc

SEQ ID NO: 2591 - DNA, 226 bp, Escherichia coli
gcaattgcttcttcgtaggtcggcagagttgccaggcggtcgatctgagacgccgggatcagctcaccttcaaaggcagcggctttgacctcaaattttgcattcgctttcgcgaactctttgaacagacgagcagcagcgcccgggtgttccatagagtatgcaatcagggtcggaccaacaaacgcgtctttcaggcactcgaacggagtaccttcaacagcac

SEQ ID NO: 2592 - DNA, 363 bp, Escherichia coli
cgcgtcaggctggcgtcaaccgagagggtaaatccgctgtgtgcggcatactgattgagcgctttatcgagcgatcccggtgcgatattaacctgtgcagcaaaagcggaaaacgagagaccggccagcggcagcaggctcaggcgaatggtgttaaccaaaggtgttgttttacgaaaaacgcgtaacggcgtcataccttccccatcatcatttttgttgtgttcagctatgagtcgaacgagaagggtaaaaaggacaatcgaaataagaattattttccttacagtggtgaaatgtttatccagtaccgcgtaatagactgaattttaacgggaagcgtttgcgcgataacgttcagga

SEQ ID NO: 2593 - DNA, 283 bp, Escherichia coli
aaatcggttttccagggaaatggccctggaagaatggctcattgacagagacattttttactgcgcgcagaaaacgaccttcttcaaaatccagcacgcgatccaccagtaagaacgggaaacggtgccggcagaagttctaaaatctcttcaatctgcagagtatgagtgttagtagtcaagatactcttcctgtcaaaatataagaaacgacaataataacacggcctgccgcaatcgtaagaatgagacaggccgtaaagtttggcgaacaaaagatgga

SEQ ID NO: 2594 - DNA, 354 bp, Escherichia coli
ttcattgcatcacgcatgaactccgggatcaggcagataaaggtaatatacagcgcaccaaccagggtcaggcgggtcattactttatcgatatacttcgccgtttgctctcccggacgaattcctggtacaaatgcaccggacttcttcaggttatctgctgtttcacgcgggttgaaaaccaacgccgtgtagaagaaacagaagaagatgattgcagacgcatagagtaacacataaagcggttgcccaggctgcaaatacagcgaaattgttgtcagccagttccaaccagtaccgcccccgaaccatgacgcgatggtcgccgggaacagaataatactggaagcgaag

SEQ ID NO: 2595 - DNA, 196 bp, Escherichia coli; identical to SEQ ID NO: 2373

SEQ ID NO: 2596 - DNA, 332 bp, Escherichia coli
ggatgatttcgttgttcagaacgcgctgacgcagagcacctttgatttctgcttcagtcagttcttcaccacccaggtatttttccatcagcctcttcagaagcttcagctgcggattcgatcaggttctggtgccattcgttagccagttcaaccatgtctgccgggatatcttcgtattcgaaggttacgccctggtcagcgtcgttccagttgatagctttcattttcaccaggtcaacaacaccggtgaaatgttcttcagcaccaatcgccagctgcagcggaaccgggttcgcgcccagacgggttttgatctggttaacaacttt

SEQ ID NO: 2597 - DNA, 255 bp, Escherichia coli
gcgctgcgacacgctaatgatattggcatcgtgatccattacgaccgcgcgggagctggtggtgccctggtcgagcgcaacgatatattttttttcagtcatgtttaattgtcccgtagtcatattacagcgaagctttttgttctgaaggagttgtggtttccttttcttccacaacacagatatcgcaaggcaaatggcgaccaatcagtttgcggtaggcaaatgcacctacaatcgcgccaacgatagggc

SEQ ID NO: 2598 - DNA, 303 bp, Escherichia coli
agaagaagatgattgcagacgcatagagtaacacataaagcggttgcccaggctgcaaatacagcgaaattgttgtcagccagttccaaccagtaccgcccccgaaccatgacgcgatggtcgccgggaacagaataatactggaagcgaagattgccgggattacccccgccatattcactttcagcggtaaatgtgtgctctgtgcagcatagacacgacgaccttgctgacgtttcgcgtagtttaccacaatgcggcgttgaccacgctcaacaaatacaacaaagaacgtcactgcaa

SEQ ID NO: 2599 - DNA, 376 bp, Escherichia coli
tgatctgcacgtctacaccggcagccagatccagacgcatcagagcatcaacggttttctcggttggctcaacgatgtcaaccagacgcaagtgagtacggatttcgtactgatcgcgcgcgtctttgttgacgtgcggggagatcagaacagtgaagcgctctttgcgtgtcggcagcgggatcggaccacggacctgcgcaccagtgcgcttggcagtctcgacgatttccgcggttgcttgatcgatcagacgatgatcaaacgctttcaggcggatacggattctttggttctgcatgagaccagagctccaattattttataaacgaaaatgattactcctcagacccattacgattgatgggagagtgta

SEQ ID NO: 2600 - DNA, 252 bp, Escherichia coli
atgtgctctcctgtatctatattctaattaaaaagttaaaaacgttaacggcttatgcgtacggcaggcacgcgattaccaggcccagatcgcctttggaaaccatggctttcggacgcaggtgacgtttacgtttggtcgcttttttggtcagaatgtgacgcaggttagcgtgcttgtgcttaaaaccacctttaccggtttttttgaagcgcttagcagcaccgcgtacggtcttaatttttggcattt

SEQ ID NO: 2601 - DNA, 208 bp, Escherichia coli
gaatctgttcagcgtgcagatccactgtcagcacacggtcaacaccgacgctggagaggaagtctgcaaccactttcgcagtgattggtacacgagcggaacggacgcgacggtcctggcgcgcatagccaaagtaggggataacagcggtgatacgacctgcggaagcacgacgcagggcatcaaccataacgactaattccatcag

SEQ ID NO: 2602 - DNA, 234 bp, Escherichia coli
accaacgcgaccgttaccatcgccaactacagtcagagctgtgaaggagaaaatacgaccacctttaacggttttagatacgcggtttaccgcgatcagcttttcctgcagttcgccagcttgtttttcgatgtgagccatcttacacctctaccttagaactgaaggccagcttcacgggcagcatctgccagtgcctggacacgaccatgatattggaacccggaacggtca

SEQ ID NO: 2603 - DNA, 106 bp, Escherichia coli
tttgtcgcctttcggatgctgaccgataccgaagatacccgccagggtatccatcttgtcagcaatcgccagcgcacaagctactgggttggacggcaggtcatca

SEQ ID NO: 2604 - DNA, 181 bp, Escherichia coli
acagaccacggccagcttctacgccagctttagcgaagtggccagcttcaggcttggtcacacggttagcttttttagcaccggtggtcacctgaatagcacggtagccatcgttagccaggtctttaacctgagtaacgcggtttgcttcaacttcgattacggttactgggatagaaac

SEQ ID NO: 2605 - DNA, 132 bp, Escherichia coli
atcttcgtattcgaaggttacgccctggtcagcgtcgttccagttgatagctttcattttcaccaggtcaacaacaccggtgaaatgttcttcagcaccaatcgccagctgcagcggaaccgggttcgcgcc

SEQ ID NO: 2606 - DNA, 145 bp, Escherichia coli
gggatttttcagcctggatacgctggtagatctcttcacggtgaacagaaacttccttcggggcatttacgccaatacgtacctggttgccctttacccctaaaactgtcacggtgacctcatccccaatcatgagggtctcacc

SEQ ID NO: 2607 - DNA, 327 bp, Escherichia coli
cctgaacacctttgttcttgaacgcagaaccacaggttaccaggatgatttcgttgttcagaacgcgctgacgcagagcacctttgatttctgcttcagtcagttcttcaccacccaggtatttttccatcagctcttcagaagcttcagctgcggattcgatcaggttctggtgccattcgttagccagttcaaccatgtctgccgggatatcttcgtattcgaaggttacgccctggtcagcgtcgttccagttgatagctttcattttcaccaggtcaacaacaccggtgaaatgttcttcagcaccaatcgccagctgcagcg

SEQ ID NO: 2608 - DNA, 447 bp, Escherichia coli
agataactgcgattaagcagcttctttcgcatcgcgtacagcagccagagtacgaaccagtttgccagccgaagcttctttcatggttgccatcaggcgtgcaattgcttcttcgtaggtcggcagagttgccaggcggtcgatctgagacgccgggatcagctcaccttcaaaggcagcggctttgacctcaaattttgcattcgctttcgcgaactctttgaacagacgagcagcagcgcccgggtgttccatagagtatgcaatcagggtcggaccaacaaacgcgtctttcaggcactcgaacggagtaccttcaacagcacggcgcagcagggtgttacgaacaacacgcatgtatacgccagcttcgcgacctgctttacgcagttcagtcattttatctacagttacgccacgggaatccgcaactactgcagacagcgc

SEQ ID NO: 2609 - DNA, 333 bp, Escherichia coli
gccaggatggctttagaacgggtcttgccgacgccataaatcgaagttaatgcgattacggcatgcttatgatcaggaatgttaatgcctgctatacgggccactatgcactcctactatttaatatgtacgttccatgctgaaaagcccgttttcaggatactcaaatggaaacgcacagacatacaaaagattggctggctaatctagccagctcaacccaactttgcaagaaaaatatgcgaaaaaatcagccttggcgctgtttatgcttcggctcggcactgcaaatcacacggatgacaccatcacgcttaacgattttgcagttac

SEQ ID NO: 2610 - DNA, 351 bp, Escherichia coli; identical to SEQ ID NO: 1881

SEQ ID NO: 2611 - DNA, 133 bp, Escherichia coli; identical to SEQ ID NO: 1911

SEQ ID NO: 2612 - DNA, 100 bp, Escherichia coli
atgcgatgaatcgccatcgcttgtggactaataggacgatcggggcgcaccaggtggctcatggggttgacgatttttccgtcaatgacatcaacagagg

SEQ ID NO: 2613 - DNA, 242 bp, Escherichia coli
aaaggtgaaattaatagtggcatgatgccgatgggcgcataagcaagtccggcccatatcgcattataccccatcgtttcctggagtaacctgcggcataaggacgatcgctccagagtaaaataaatacgcgcatgtgatactcacaataccaatggtgaagttacgggacttaaacaaactgagatcaagaatcgggttctctgaggtcgactcccaaatgactaaagagatcagagaaa

SEQ ID NO: 2614 - DNA, 151 bp, Escherichia coli
atcatttcggtttcgctgtggtagcgattaaacaccggatgggtgaggatttcgtcgtcgcgcagcatcgcaggctggatagagcggctgtcgtgagccacgtctttgtccagcgtgtcgatgtccaggccgtggttatcgcccagcagca

SEQ ID NO: 2615 - DNA, 379 bp, Escherichia coli
ggatagccctgacggattttgaagcctgcaacagatttgcgtgctttggtgatcagcggtttttgaccggagattgctgccaggtctgctgctgcgttatccagcagttttttgtcagcgatcgcttcaccaacacccatgttcagggtgatcttctcgacccgagggacttgcatgacagaattgtagttaaactcagtcatgagttttttaactacttcgtctttgtagtaatcatgcagtttcgccatcgtactactccaaattacttgatagtttcgctgttagacttgaagaaacggacttttttaccgtcttcgaatctaaagcctacacggtcagccttgccggttgccgcattgaagattgctacgttgga

SEQ ID NO: 2616 - DNA, 228 bp, Escherichia coli
acctgcggtgcagccggagcttcacccgcagcacggcgacgcatacgatcctggtggtacgcgtaaccggtacctgccgggatcagacgacccacgataacgttctctttcaggccgcgcagttcgtcgcgtttgccctcaacggctgcttcggtcagcacgcgagtggtctcctggaacgatgccgcggagatgaaggactcggttgccagagacgctttggtgata

SEQ ID NO: 2617 - DNA, 108 bp, Escherichia coli
ataacggcgttattattgcaacagcgaaatatccgcaacgcgcaggaacagttcgcgcagtttctccagcatggtcagacggttgatacgcaattctttgtcatcaac

SEQ ID NO: 2618 - DNA, 351 bp, Escherichia coli
gccagcagagcgcggccttcttcgtcagatttcgcagtagtggtaatggtaatatccaaaccacgaacgcggtcgactttatcgtagtcgatttctgggaagatgatctgctcacggacacccatgctgtagttaccacgaccgtcgaaagacttagcggacaggccacggaagtcacggatacgaggtacagcaatagtgatcaggcgctcaaagaactcccacatgcgttcgccacgcagagttactttacagccgatcggatagccctgacggattttgaagcctgcaacagatttgcgtgctttggtgatcagcggtttttgaccggagattgctgccaggtctgct

SEQ ID NO: 2619 - DNA, 390 bp, Escherichia coli
atttgttcaggaacacgatgatgtacggaacgcctacctgacgacccagcaggatgtgctcacgagtctgcggcatcgggccgtcagtcgcagcaactaccaggatcgcgccgtccatctgcgcagcaccggtgatcatgtttttaacatagtcggcgtgccccgggcagtctacgtgtgcgtagtgacgggtcggggtgtcgtattcaacgtgagaagtgttgatggtgataccacgagctttttcttccggcgcgttatcgatctggtcgaatgcgcgagcagcaccgccgtaggttttagccagtacggtagtgattgcagcggtcagcgttgttttaccatggtcaacgtggccgatagtaccgacgttaacgtgcggttttgtac

SEQ ID NO: 2620 - DNA, 425 bp, Escherichia coli
taacggtacggcgaatcggggtaacggcttcgcaatgagccagcattttgcggaagtctttgataccggaggccgccagagtacggatcggaccagcagagatggcgttaacacgcacaccttccggacccatcgcgttcgccatatagcgcacgttcgcttccagagacgcttttgccagacccataacgttgtagttcgggatagcgcgctcagcgccaaggtaggaaagggtcagcagggcagaacccggattcagcatggagcggcaagcttttgccattgcaacgaagctgtaggagctgatgtcgtgggcaattttgaagccttcacgggtaacggcgttaacatagtcaccatccagctgatcgccaggtgcaaaaccaatagagtgtacgaaaccgtcaaatttcggccaaactttc

SEQ ID NO: 2621 - DNA, 253 bp, Escherichia coli; identical to SEQ ID NO: 2578

SEQ ID NO: 2622 - DNA, 159 bp, Escherichia coli; identical to SEQ ID NO: 1867

SEQ ID NO: 2623 - DNA, 232 bp, Escherichia coli
atgacagaattgtagttaaactcagtcatgagttttttaactacttcgtctttgtagtaatcatgcagtttcgccatcgtactactccaaattacttgatagtttcgctgttagacttgaagaaacggacttttttaccgtcttcgaatctaaagcctacacggtcagccttgccggttgccgcattgaagattgctacgttggaaacctgaatagcggcttctttttcaac

SEQ ID NO: 2624 - DNA, 245 bp, Escherichia coli
cgaacagtttaccttcgtcgccagctttagacgcgatggtaacagtttccagtgcattgattttctcagcgcgagcattagcagctgccagaacttcagccagtttagcttccagttcagcgcgacgagcttcgaagaattcaatgtttttcttggtagctggaacagctttaccctgcggtaccaggaagttacgagcatagcccgctttaacgtttacctgatcacccaggctacccaggttt

SEQ ID NO: 2625 - DNA, 260 bp, Escherichia coli
acagaccacggccagcttctacgccagctttagcgaagtggccagcttcaggcttggtcacacggttagcttttttagcaccggtggtcacctgaatagcacggtagccatcgttagccaggtctttaacctgagtaacgcggtttgcttcaacttcgattacggttactgggatagaaacgccgtcttctgtgaagatacgggtcatacccacttttttaccgactaaaccaatcattgtttcaacctctcaatcgctc

SEQ ID NO: 2626 - DNA, 213 bp, Escherichia coli; identical to SEQ ID NO: 1891

SEQ ID NO: 2627 - DNA, 248 bp, Escherichia coli
ctttttcttgtccaatacgttgtaggggagagtttgcagtcatttaaaaggtaacatgacaatgcatgatgaatataacaacatatgatgttatgtaatgtggaggaagatcacaaaatttcgcacaggatcgcgctgtggctaatggatgtagttatcaaattgaatttaaagtgaaaatatttttacgggcgggggcaagaaggacatagaaacaaatacgccctcggaaaatccagagggcgtcg

SEQ ID NO: 2628 - DNA, 536 bp, Escherichia coli
gatttgtggcacgtacatgccgccaaactcaccaaaataggggttaagtaatgttgtcattgttcctttccttaatatgcgcgcagcgtctggaaaaccgaggccaaaagacgtgcgtctttgatgcccggttgcgactctacagcagaattaaaatcaagtccggcgcagccggtttgtgccgcttccacgcagttatctgcgcctaagccccccgccagcagaacgttgccaagcgattgaccatttaatagtgaccagtcaaaacgttgcccgcttccaccctggccgttgtctaaaacatatttatcaacgtgctgaaactcgcgggcgggcagggtttcaccgacgcttaatgctttccagatggcaacatgtgctggcagagcttcacgcagcgtatcgatatacagctgttcttcattaccatgcagttgcactgccgccagcgataacaccttagctttgtccaccacatcggcaatatcgtgattgcggaacacgccaacatactgcaacggtgccgcagccatcac

SEQ ID NO: 2629 - DNA, 258 bp, Escherichia coli
tttcgagtggctcgttagcaaaaagtttcaacaatggagtaaatacatccaacatatcaataactctcaactgtaagggtattgaaatgttaacacaagctctcgctgtaggggtatagccgagaccaccgaagcccggaggtggtgaaataaaaccgggcacaacacgaaggcgcatttccgatatccataaagagtcggtcttgtctgttaaatttaaatggtgggagtgcgcctccggttgtaaataacgacatt

SEQ ID NO: 2630 - DNA, 239 bp, Escherichia coli
taaaggtaatatacagcgcaccaaccagggtcaggcgggtcattactttatcgatatacttcgccgtttgctctcccggacgaattcctggtacaaatgcaccggacttcttcaggttatctgctgtttcacgcgggttgaaaaccaacgccgtgtagaagaaacagaagaagatgattgcagacgcatagagtaacacataaagcggttgcccaggctgcaaatacagcgaaattgtt

SEQ ID NO: 2631 - DNA, 279 bp, Escherichia coli
ctataagagaagagtttttcacagaaataaaaaaaagaggacaaaggaaaataaatgaagttattagaccgactacaaaggctttttttacaccaatcttatcaccaacaaaaccaaaaaatattgtacctgtcagtgttcctaaacctgctattgtcatcagagttgaaatgaccactgtattaactccattatctgccaggtaggaaggaagtagtccgtttatcggccagtttgcaccaaatagacaaaaacagacgaggaaaacgatcatagaga

SEQ ID NO: 2632 - DNA, 258 bp, Escherichia coli
tgattaaaaacaatgagaaaaatagatgaaataatattatttatcgatatgtgatcgaagtcgaaatgagatataaggtgaattactggtatttgaaatttatttttttaatattgtcggaatttatctgattaactaccgggccgtagacccggcagttattttaaccacgacgtgtcgccagccagcagagcagggaaccgccgcagaccatcagcgcgccttgccagaacgagaacgacagcggggcgctgagca

SEQ ID NO: 2633 - DNA, 586 bp, Escherichia coli
taacgtaatctgaaaagggacggctggacttgtgctaccggtcgttggaaattgtctggcactgtttttttggagatctacggtaaaattaagcgaatccgatgagactgtgcagccataatcgaggacgcgcccgctaattttaataacgctatctgcggataaagcagaataggtggttaaccccagacataaaccgaggaaaataatgttattgtatttcataatctattgttccttagcgacagattgctgtctgctggttcagtaaggtaccaggagaaacttcaggaagcttgtactcgacaatacagtttgagtttttatctttgccccatgaaacctgtaattgccctgactgtggaagtccagtcagataaacctgaccattttccgcgacaatgctgccatttttattctctcgtgtgtgacaattgcaccgaatggaacgctcttattacccgtacttcaacgtcattaatacttttcccgccgatttgtgcattaaatgttgctctggccaatagcaaccgtgagtttgggatgacagtgaccacgggttcatccagttcaacattatctgcaa

SEQ ID NO: 2634 - DNA, 209 bp, Escherichia coli
cgtagtcggtcaggttggtcacgcgaccagtcagtttggtaccttccggataacgtttagcgatagctacccacggatcttcgcccagctgtttcaggcccagggatacacgggtacgttcgcggtcgaacttcagcactttaacagtgatttcgtcgcccacgttgacgatttcgctcggatgcttaacgcgtttccaggccatgtca

SEQ ID NO: 2635 - DNA, 526 bp, Escherichia coli
aatagagtgtacgaaaccgtcaaatttcggccaaactttccccagttcagcgaacatggtgtcgatgctggcatcttctgcaacatcgcactgcagaacgatgtcagaacccaattgagcggcaaattcttctacgcggcctttcagtttgtcgttctggtaggtgaatgccagttcagctccttcgcggtgcatcgcctgagcgataccgtaggcgatggatagtttgctggcaacaccggttaccagaatgcgcttaccggaaagaaaacccatagctttaatccttattgttgatgcttgttgtgcctgaaaatcaggcgattcgtcgttttagtaaacagtacgaacagataaacggttattataatcaacctggctgtgagtagctatagttgccaggtccgaccggagcaggctgcggcagggggggccgctttttcccctcaccctaaccctctccccagaggggcgaggggaccgtattgtgcaaatattgttaccccagcaacaaacaggctcatac

SEQ ID NO: 2636 - DNA, 54 bp, Escherichia coli
gaatgcttccagttcagatttaccagagcgctgagccagggtctccagcgcgct

SEQ ID NO: 2637 - DNA, 586 bp, Escherichia coli
aggctggaggtgatgaccgtcatttccctgatgcgagcagcctgttcggcagataactgcaatgtacgatcaggttctgtggtttcggtggtagaaaagcgcaaaacatcgctgctttccgtcaaccgccagtatggattgtgcgatccgagaaagttgtacaacgttgtggactccctaacggttttcatgatgcatatcctccggttaacagcggagtccgcggttaaataaaaggaacaacatgacttacatgaaattaacggcggctaaacgcattgttttttttatatatttatttgtaatccagttttggaaaaacgccagttttcaaacgaaagtcagttaaaaaatctgcctggatataacgaaggtagagcggggaaataaacggcccatccatgaggaatgggccgtgaaaggagattacgcgaccgggcgcgcaataatgctgcgggtttccatgcggacttcggcaatagtgacgtcaataacgtcagtcactttgtaaaccgtttcacctttaatttgtacagtgccgttttcctggctgcaaaccagttcatcgcgcacagcgtgtaagaaa

SEQ ID NO: 2638 - DNA, 383 bp, Escherichia coli; identical to SEQ ID NO: 1984

SEQ ID NO: 2639 - DNA, 154 bp, Escherichia coli
tgtaaacagggttttctggctcatgaccataacctcaatgatttatttttatacaaactatgttacgtgctgtaacaggagcgcgaagtgtagggtctgaggtacatcttagaaatcagaccagtggcgagagtataggtcggaccagctggaa

SEQ ID NO: 2640 - DNA, 250 bp, Escherichia coli
gtaaaataaatacgcgcatgtgatactcacaataccaatggtgaagttacgggacttaaacaaactgagatcaagaatcgggttctctgaggtcgactcccaaatgactaaagagatcagagaaataactgatactactgttaatattattattgtactcgagttgaaccaatccagatcgcgccctttatcaagcataatttgcaagccaccaacaccgagcactaacagggtcagtcctggtagattc

SEQ ID NO: 2641 - DNA, 210 bp, Escherichia coli
gcggaaagattagtaactggactgctgggatttttcagcctggatacgctggtagatctcttcacggtgaacagaaacttccttcggggcatttacgccaatacgtacctggttgccctttacccctaaaactgtcacggtgacctcatccccaatcatgagggtctcaccaactcgacgagtcagaatcagcattctttgctccttgaa

SEQ ID NO: 2642 - DNA, 390 bp, Escherichia coli
gataatcgtatacataagtctttcgagtggctcgttagcaaaaagtttcaacaatggagtaaatacatccaacatatcaataactctcaactgtaagggtattgaaatgttaacacaagctctcgctgtaggggtatagccgagaccaccgaagcccggaggtggtgaaataaaaccgggcacaacacgaaggcgcatttccgatatccataaagagtcggtcttgtctgttaaatttaaatggtgggagtgcgcctccggttgtaaataacgacattgctgtgtgtagtcctggcggcatcagtttttttcttgaagttcggctgatgtccgccctttttaaagtgaattttgtgatgcggtgaatgcggctaagcgcacgtggcacag

SEQ ID NO: 2643 - DNA, 436 bp, Escherichia coli
gcctgataagcgtagcgcatcaggcaatttttcgtttatgatcatcaaggcttccttcgggaagcctttctacgttatcgcgccatcaaatctgtcgtaacctgcgcctcaacatacaaatagccaattcccagcacctgttgtgcgcggcttaattgcccaaagccaatttgcgtcgctttcacgctcggtccttcgtcgcggtcgaacgggttaaatcctgtctggcgaataatagtattaagccagttctcaccaaaggcacaactgcgaccgtacaaccaaatctgattaatattgaggatgttgaggaagttatacagactcaaaccaatggcattggcagagcgatcaacccagctggtgatccacggttctccactttgccaggcagcgattaactgcgctgtagtcagtttttcaggatcaagttgag

SEQ ID NO: 2644 - DNA, 229 bp, Escherichia coli
caataacaatatcttcaggagatattttttgactttctttaacaagatttttaggaacaaaaaccaagtccgtagtatcaaacttgccattctgaatattgttcgcacggataagaggcaaataatcatcttttagataatttattgcctgctcttttttatacgttactcctcggattagagttgtgaccgtagatactggggcgataacccacccctccggcaattt

SEQ ID NO: 2645 - DNA, 174 bp, Escherichia coli
gccccgggcagtctacgtgtgcgtagtgacgggtcggggtgtcgtattcaacgtgagaagtgttgatggtgataccacgagctttttcttccggcgcgttatcgatctggtcgaatgcgcgagcagcaccgccgtaggttttagccagtacggtagtgattgcagcggtcagcg

SEQ ID NO: 2646 - DNA, 181 bp, Escherichia coli
taacatcttcagcgatacccgctgcagccaggatggctttagaacgggtcttgccgacgccataaatcgaagttaatgcgattacggcatgcttatgatcaggaatgttaatgcctgctatacgggccactatgcactcctactatttaatatgtacgttccatgctgaaaagcccgtttt

SEQ ID NO: 2647 - DNA, 107 bp, Escherichia coli
gcattgccagcagaccggaaccgaggttagcaccaatcaccagacagagcgccacggggaaggagataatgcctgcggcggtcagagtcgcggtcagcagtacagca

SEQ ID NO: 2648 - DNA, 302 bp, Escherichia coli
atactgactggacatcatcagagtttgcacttgagccataaagtccataatcacgacaacaacgataagcagtgaggtcccaccgaagtagaacggtactttcattgcatcacgcatgaactccgggatcaggcagataaaggtaatatacagcgcaccaaccagggtcaggcgggtcattactttatcgatatacttcgccgtttgctctcccggacgaattcctggtacaaatgcaccggacttcttcaggttatctgctgtttcacgcgggttgaaaaccaacgccgtgtagaagaaac

SEQ ID NO: 2649 - DNA, 330 bp, Escherichia coli
cggttggctcaacgatgtcaaccagacgcaagtgagtacggatttcgtactgatcgcgcgcgtctttgttgacgtgcggggagatcagaacagtgaagcgctctttgcgtgtcggcagcgggatcggaccacggacctgcgcaccagtgcgcttggcagtctcgacgatttccgcggttgcttgatcgatcagacgatgatcaaacgctttcaggcggatacggattctttggttctgcatgagaccagagctccaattattttataaacgaaaatgattactcctcagacccattacgattgatgggagagtgtaaccgttcttacgta

SEQ ID NO: 2650 - DNA, 315 bp, Escherichia coli
  misc_feature (266)..(266): n=g, a, t or c
tgcagaacaactgcagcgatttcgtcgccttttttgtattcacgaactgcttcttcgcctgcaacgttccaggagatgtcagacaggtgaaccaggccgtcgatgccgccgtccaagccgatgaagataccgaagtcagtgatagacttgattttaccttcaacacggtcgcccttgttgtgggtttccgcgaactgctgccacgggttagctttgcactgtttcagacccagggagatacgacgacgttcttcgtcgatatccanaaccataacttccactacatcgccaacgttaacaactttggacgggtgg

SEQ ID NO: 2651 - DNA, 573 bp, Escherichia coli
gagtcggacgacgcgccagtaccgcctggatggtgtcaacggtataaccttcgtcctgataccaggcgcggaagcgaccgagcataaagtcgataacatcatcaactacgttggcattagtcagcttatcgccatacagacgcaccgcttcttcggtcagcgtttgcagatcaaggttgaggttcttctcaacgataattcgcagcacgccaagcgcggcacgacgcagcgcaaacgggtctttgtcgcctttcggatgctgaccgataccgaagatacccgccagggtatccatcttgtcagcaatcgccagcgcacaagctactgggttggacggcaggtcatcaccagcaaaacgcggctgatactgctcattcagcgccaccgcgacatcttccgcttcgccatcgtgacgcgcatagtgcatccccataacgccctgggtgtcggtgaactcgaagaccatgttggtcatcagtcgcacttagacagcagacccgcacgggtagccgtgggtaacgtcagcgccaatctgttcagcaatccagccagccagcgcctggatgcggtcag

SEQ ID NO: 2652 - DNA, 303 bp, Escherichia coli
cctttgcgagaagcaatcttgttcagttcagccagagcttcgttgaacatcggtacagttttctcaaggttgatgatgtgaactttgttacgcgcaccgaagatgaacggcttcattttcgggttccagtaacgggtctggtgaccgaagtgaacaccagccttgagcatgtcgcgcatggaaacagttgccatgattaaaacctctatataaaagttggggttatgcctccacgtatcccatattaccgaccccaaagggcaccccggaatatgtgccgatacgtgtgtgttgttacacaaa

SEQ ID NO: 2653 - DNA, 320 bp, Escherichia coli; identical to SEQ ID NO: 2156

SEQ ID NO: 2654 - DNA, 170 bp, Escherichia coli
gagatatttttttgcctgtcctaagttaccaaacatagttcactctgataagaacaaagccccgccgaagcggggctaaacacggttagtggtgcgaagagatcttcacgccgccttccgggattggaacgtacggtgtttctttgtcagtacgtttgtcgctgttacgc

SEQ ID NO: 2655 - DNA, 195 bp, Escherichia coli
gcccgcgctttgcggatttttggaatccagcagcatctggtccgccattgcgcttacctgcatcactttatcttccggcattccggcctcttccagcacccgacgagccgaaagcgcgcggtcacccgaaaggttccagttgttgtagatattgtttttgtaggccatcgcatcggtatgcccggtaataataat

SEQ ID NO: 2656 - DNA, 296 bp, Escherichia coli
cgccttccgcggtgaaacggcagaacttgcgacgacggaaataacgtgccatatggctagtctccagaatctatcaattcaatctgctcggcatgcaaaaccattttgctcagtccgttctttgccttgtggcatgaaatgaacccctgaacggttatgcgactgccgaccgttatactgtgagtaatggcctggttttcgtgtccgctaacaataacgggcatttgacaccacgcctgccggtgaaagccggcttcctcctgcacagaacgatgctcaagcacgaactggcagtg

SEQ ID NO: 2657 - DNA, 493 bp, Escherichia coli
  misc_feature (414)..(414): n=g, a, t or c
aattttcttgtgacgtgcacgtgcaataacaccacgttttacgcgagccatatgtgctctcctgtatctatattctaattaaaaagttaaaaacgttaacggcttatgcgtacggcaggcacgcgattaccaggcccagatcgcctttggaaaccatggctttcggacgcaggtgacgtttacgtttggtcgcttttttggtcagaatgtgacgcaggttagcgtgcttgtgcttaaaaccacctttaccggtttttttgaagcgcttagcagcaccgcgtacggtcttaatttttggcattttaataacttccacttcgcattgttaataaacgaaacaaaggcgaacaaagcctgtgaagcccgaaggctccacagacagtgctacttgaaggccttactgtttcttcttangagcgagcaccatgatcatctggcggccttcgatcttcgttggggaaggattcgaccactgccagttcttgcaaatcgt

SEQ ID NO: 2658 - DNA, 477 bp, Escherichia coli
caacgccgccagttggtcggcctgatgttcctggataatcggttcaatcagcatatccagcttaccttccatcacttcatccaggcggtagagcgtcaggttgatgcggtgatcggtaaccgcgcccctgcgggaagttgtaagtacggttacggtcgctgcgatcgccactccccagcaggttacgacgggtagacgcttcggcctgttggcgttttgccatttcagcagcgtggatgcgagcaccgagaacagaaagtgctttagctttgtttttatgttgtgaacgttcgtcctgacattcaacaacaatcccggtcggcaagtgagtaatacgaattgccgaatcggtggtgttaacgtgctgaccacccgcccctgacgagcggaaagtatcaatgcgtaaatctgctgggttgatgtccggcagttctgcgtcaggcagttctggcattaccgcaacggtacaagcagaag

SEQ ID NO: 2659 - DNA, 219 bp, Escherichia coli
gttagcaaaaagtttcaacaatggagtaaatacatccaacatatcaataactctcaactgtaagggtattgaaatgttaacacaagctctcgctgtaggggtatagccgagaccaccgaagcccggaggtggtgaaataaaaccgggcacaacacgaaggcgcatttccgatatccataaagagtcggtcttgtctgttaaatttaaatggtgggagtg

SEQ ID NO: 2660 - DNA, 150 bp, Escherichia coli; identical to SEQ ID NO: 2558

SEQ ID NO: 2661 - DNA, 144 bp, Escherichia coli
tatccaaaccacgaacgcggtcgactttatcgtagtcgatttctgggaagatgatctgctcacggacacccatgctgtagttaccacgaccgtcgaaagacttagcggacaggccacggaagtcacggatacgaggtacagcaa

SEQ ID NO: 2662 - DNA, 291 bp, Escherichia coli; identical to SEQ ID NO: 2511

SEQ ID NO: 2663 - DNA, 410 bp, Escherichia coli; identical to SEQ ID NO: 1977

SEQ ID NO: 2664 - DNA, 354 bp, Escherichia coli
tttgtgtaataaaaaagcagacaggcgacggagtgaccactccgtcgctttacaaagagaggaaaatcataggttgccggtgtagtgccagcgtaaataacgcagcaaacgaagctgacgcttaatgcggctcggctgcgaaagcaggcggtagagccactccagccccagcgtttgccagattttcggtgcgcgttttacgtgaccggtgaaaacatcgtaagtcccgccaacgcccatatacagcgcatctggatgtaccagacggcagtcgcgcatgatgatctcctgctttggcgatcccatcgcaacggtgacgatttgcgcaccgctggcatgaatgcgttcaaacag

SEQ ID NO: 2665 - DNA, 340 bp, Escherichia coli
tcagcacgagtcttctgagcacgagtaccctgacgagcaccagctgcataagcaacaacaacctggtgaaccagcgcttcgttgaaatcacgaccgaaggtagtttcggaaacagtcagcgcgctctgcgcgtctttcaatactaattccattgctatctccttacgccttcacagctggtttaacgatcaggtcgctaccggttgcacccgggacagcacctttaaccagcagcaggttgcgctcagcgtcaacgcgtactacgtcaaggctctgaacggttacacgttcgttacccatctgacctgccattttcttgcctttgaacactttgcccgga

SEQ ID NO: 2666 - DNA, 36 bp, Escherichia coli; identical to SEQ ID NO: 2584

SEQ ID NO: 2667 - DNA, 334 bp, Escherichia coli; identical to SEQ ID NO: 2521

SEQ ID NO: 2668 - DNA, 250 bp, Escherichia coli
agctctgcaatcggctgttcaaaatcaaggaaattcagactcatagtattcctgtattagtcaaactccagttccacctgctccgaaccaatgaggccacggagatcgtttaataaacgatcgctcggagagacacgccacgtcgcgccaaaacgcaaccgcgcgcgtgcatccgccctctgatagtagagatgtactggaattgtcccagagcggtggggttccagagactgacggagtcggtttaaaa

SEQ ID NO: 2669 - DNA, 488 bp, Escherichia coli; identical to SEQ ID NO: 2548

SEQ ID NO: 2670 - DNA, 62 bp, Escherichia coli
tttcatcggatatttcaggcggtccggattgtagacacggcgacgcatggaacgcccacgca

SEQ ID NO: 2671 - DNA, 325 bp, Escherichia coli
tgccttctgcaccagtgatggcagcagtgtagcgctcgatcatgcccggaacctgttcgctctggtcaggatggaccataaaaacgatttcgtaatgacgcatcgaattgctccttacggattattcagcctcctgtctgggtcagccgaatcccggggaggcaaggaacgtgttaaaggtcggctgaaaaatgacgcgttatagtacttgtatgcctcgctaaactcaagggcagagccgaaataaatctcccctttcgcaattaacctctaacacgctgatttgaagttcatcacacttcatcatggtgtttttttgaacaac

SEQ ID NO: 2672 - DNA, 521 bp, Escherichia coli
gatggtgatcttgatgatgtcgcctacgcctgcgtagcgacggtgcgagccacccagaaccttgatacacattacgcgacgtgcaccggagttgtcggcgacgttcagcatagtctgttcttggatcattttagtgctccgctaatgtcaactactactgagacccgaaaatcaggtcgttaaaaatccccatatcgagggcgcggcattataacaccgcttcaaggatatgggtagaaaaaataaacggctcatttctgagccgtttattcgtattgagagagtgtactgtattacagaaccgctttctctacaacgcgaaccagcgtccaggatttagtcttggacagcggacggcattcgcggatttcaaccacgtcaccgataccgcattcgttgttctcgtcatgtacgtgcagtttggtcgtacgcttgatgaatttaccgtagatcgggtgtttcacaaaacgttcgatagcaacaacaatggatttctccattttgtcgctaacaacgcgacc

SEQ ID NO: 2673 - DNA, 163 bp, Escherichia coli
ttgatcatttggatgatgtcttcgatctgatctgaatcgacgatatcttccggcagatggtcattgacctcggcataggtcagatagccttgctccttaccacgggtgacaagaagtttcagctgtgactgcgggttttgctccataagacggtatccacact

SEQ ID NO: 2674 - DNA, 660 bp, Escherichia coli
ggtaagctggtcagggaacaaatccactgcaagaacacgcgcagggtccagccatgaaaggaagggggccagcgtttctttttcaaggatcaccgtcgagtagaaagggatcgctgacctttgcggcttccgggaccagaggcagaacgtcatactccgtagtactggattgcgtttcatgataccagtggcttttgccggtgatgtggcgttgttccatgggcgctccttggtcgtaaaggaaatcgttatcctgacgcaaggcgggaaggggagaaagacggatcggcgataacaaatatcagaaaggtataacagagataacgggcggcagaacgccgcccatctttaccaacagaacgattatttcagttcgagttcgttcattgcagcaatgctgaaaccgccgtcaacgtggaccacttcaccggagataccggcagagagatcggagcacaggaatgccgcagagttacccacatcttcaatagtaacggtacggcgaatcggggtaacggcttcgcaatgagccagcattttgcggaagtctttgataccggaggccgccagagtacggatcggaccagcagagatggcgttaacacgcacaccttccggacccatcgcgttcgccatatagcgcacgttcgcttccagaga

SEQ ID NO: 2675 - DNA, 140 bp, Escherichia coli
accatctctacgccttccggcagttcgatggtaccagtcacgtcagtagtacggaagtagaactgcggacggtagcctttgaagaacggagtatgacggccgccttcatctttggacagaatgtacacttcagattcgaa

SEQ ID NO: 2676 - DNA, 177 bp, Escherichia coli; identical to SEQ ID NO: 2328

SEQ ID NO: 2677 - DNA, 368 bp, Escherichia coli
tcaaagataccccctaagaacgtcggagcgttccgtgaggtcctgaatgcgattatttaccggattaatttcaaacatggtctgatttcttttattgagctagtcaaaatgcggtgataagagcgggattgtacccaatccacgctcttttttatagagaagatgacgctaaattggccagatattgtcgatgataatttgcaggctgcggttgccgcgaaactcgttgatatcgagcttataagccagttgcacttcgcgcacgccgttatccggccagagggcggtatcgacattaaaagcaataccatccagcagtggaccgccgccgaccggttcgaccatcaccttcaaatgacgttcgccca

SEQ ID NO: 2678 - DNA, 527 bp, Escherichia coli
cggcgttggtaaacaacaaagttgggtcgttatggggtaccagggagctgctggcaactacctgatgtcccttactatggaaaaagtcgagaaacgcctgacggatctcagcggtgctcttgctcataattatcctgaaatcaagctaacgaaatatcgccaccagctccagcgtgtcttaaccgccgggctggtaactgaaaagtgggaataagataagttttcttgactgggaagtaaaataccgtatgcgttcagtcggcaaaatttcgccaaatctcctggatatcttccatcagatagccacgatagagcagaaaacgctggatcttaactttttctgaaaagacagttggcaaaggttcgccatattttcgcgtcgcctgatcgcgcgccagtgcgcaccagtcgatgtcacattcacgcatcgctttttctgtcgcttcgcgggaaatacctttctgattcagttcctggcgaatacgcgcaggtccataacctttgcggctacggctggcgataaagcg

SEQ ID NO: 2679 - DNA, 352 bp, Escherichia coli
gacgcatacgatcctggtggtacgcgtaaccggtacctgccgggatcagacgacccacgataacgttctctttcaggccgcgcagttcgtcgcgtttgcccgcaacggctgcttcggtcagcacgcgagtggtctcctggaacgatgccgcggagatgaaggactcggttgccagagacgctttggtgatacccagcagatcgcgggagtaagttgcacccactttgccgttcgcttccagttcgcggtttgcgatcttgacgcgagagtattcaacctgttcgccttccaggaagtcggagctacccgcgttaacgatggtagctttacgcagcatctgacgaacgataac

SEQ ID NO: 2680 - DNA, 383 bp, Escherichia coli
cggatttgtccgcttcgatctggttcatcattttcatggcttcaacgatgcacagggtatcgcccacgttgactttctgacccacttcgatgaacgcttttgcgtccgggcttggggtgcggtagaaagtaccaaccatcggggaacgtacgatgtgaccactgatttccgctgctgctggcgcttccatggaaggaacggtcgccggagcggctgcgttagattgagctggctgctgcatcattggtgcagcgtaagcttgttgcatcacagggaaacttgcggcaggagctgcacggctaatgcgtactgactcttcgccttcagaaatttccagttcggagatgcctgattcttcaaccagctcgatcagttttttaatc

SEQ ID NO: 2681 - DNA, 482 bp, Escherichia coli; identical to SEQ ID NO: 2576

SEQ ID NO: 2682 - DNA, 198 bp, Escherichia coli
ttaccagactgaacgaacgcttccagcagtttgatacgcttggtcagctttttacgcttggtttcggagttggtttcgttcagctcttcacgcagctgttcgcactcttgctccagatccatgctcttcagcagagcctggattgcttccgcccccatcttcgcgtcgaattcgtcaccgaactcttccagcgcgtcc

SEQ ID NO: 2683 - DNA, 399 bp, Escherichia coli
agtaatgttagtgatgcggaaacctgcggcgttcagagcacgaatagtagattcgcggcctggacccggacctttaaccataacttccagattcttgatgccgtattctttcacggcgtcagcgcaacgctctgctgcaacctgagctgcaaacggagtggatttgcgagaaccacggaaaccggaaccaccggctgttgcccaacccaacgcgttaccctgacgatcagtgatagtcacgatggtgttgttgaaagaagcatggatatgagccacgccgtcagagacttgttttcttacacgtttacgtgcacgaattggtgcctttgccattattcaatcaccccgattatttcttgatcggtttgcgcggacccttacgggtacgtgcgttggtct

SEQ ID NO: 2684 - DNA, 99 bp, Escherichia coli
aagcgaaaagactatagagtgaaggagaaattttgagggtgcgtctcaccgataaagatgagacgcggaaagattagtaacctggactgctgggatttt

SEQ ID NO: 2685 - DNA, 585 bp, Escherichia coli
agcagcggatgattattgaggattcagcacgttttccttaatgtcatctttaccgggaacctaaactaaaattggcggccgcgcattcccggcgcggggtaatacggagatatcatcatgggcaaattaggtgaaaacgttccgcttcttatcgataaagccgtagatttcatggcatcaagccaggcgttccgggagtatctgaaaaaacttcctccccgtaacgcgattccgtccggaatacccgatgaaagcgtgccgttatatctacaacgtctggagtattatcgtcggctttatcggccgaagcaggtagaggggcagtaagcagacgttgcttacttttgaaaggctttttttaagctgattttggaaatcagctcagtcagtgaaaggaccattgttgatcgcacagcctgttgatagcgctgaatttgcattgcatacaaactggagtctgctggttcaaactgtggcggcggtggtaacgccgccacgcagtgcagttcaccaaagggtccaaggatttcgtcgtcggtaaaggcgtactcgttgccgtcgtgatttagctcttcacgcaatgcc

SEQ ID NO: 2686 - DNA, 335 bp, Escherichia coli; identical to SEQ ID NO: 1970

SEQ ID NO: 2687 - DNA, 480 bp, Escherichia coli
agctcgctgacaagtcgacccatctgtccattgagcggacagtttgtgcaacactattttgttgaccggaaaatggaacactttccgcaatgcctgttgctatcacgcttaaaccatttcattgcgatttacacagaacggacgtcctgtcgcagtatattaagtcgtcgatagaaacaagcattgaaaggcacagcagtagtcaaacagtgtgaaacgctactggcgccttacagcgcaaaaaggctggtgactaaaaagtcaccagccatcagcctgatttctcaggctgcaaccggaagggttggcttatttaacttcaacttcagcgccagcttcttccagagcttttttcagtgcttctgcgtcgtctttgctcacgccttctttcagagcagccggtgcagattctaccaggtctttagcttctttcagacccaggccagttgcgccacgtactgctttgataacagcaacttt

SEQ ID NO: 2688 - DNA, 190 bp, Escherichia coli
ggccaacagctttcagaccgaagctgccgaagctaacatccgtaccctgcgccagaccgcggttacggcctttgtgcattttacggaattttgtacgctttggttgtaacatcagcgacgctccttatttacggcctttacgctgctgctttttaggctgagcagccggtttttccggttgttcaacagc

SEQ ID NO: 2689 - DNA, 237 bp, Escherichia coli; identical to SEQ ID NO: 2459

SEQ ID NO: 2690 - DNA, 410 bp, Escherichia coli; identical to SEQ ID NO: 1977

SEQ ID NO: 2691 - DNA, 299 bp, Escherichia coli
gcgggaataattacgcttgtcgagcccaaggaacacatccttgaactggttcatcccggcgttggtaaacaacaaagttgggtcgttatggggtaccagggagcctgctggcaactacctgatgtcccttactatggaaaaagtcgagaaacgcctgacggatctcagcggtgctcttgctcataattatcctgaaatcaagctaacgaaatatcgccaccagctccagcgtgtcttaaccgccgggctggtaactgaaaagtgggaataagataagttttcttgactgggaagtaaaa

SEQ ID NO: 2692 - DNA, 409 bp, Escherichia coli
tttaaccgcgatttcaatcacacgctcaggacggcgagcaatcatctcttcaaaggtcgcttgtttgataccaccgatgtggccggtgtggtgatagtacactttgtcagtacgcttgttgccggttacagcaactttgtcagcgttcagaacgatgatgtaatcaccggtatctacgtgcggagtgtattccgctttgtgcttaccgcgcaggcgacgagccagttcagtagccagacggcccagagttttaccggtcgcgtcaacaacataccagtcgcgttttacggtttctggtttagctgtaaaagttttcattaaaagcttacccaataaatagttacacgttggtgaacacccaaacgtcttcaattgttgaggttcacacgacaaagtccggcaaacctac

SEQ ID NO: 2693 - DNA, 173 bp, Escherichia coli
gccacgcagagttactttacagccgatcggatagccctgacggattttgaagcctgcaacagatttgcgtgctttggtgatcagcggtttttgaccggagattgctgccaggtctgctgctgcgttatccagcagttttttgtcagcgatcgcttcaccaacacccatgttca

SEQ ID NO: 2694 - DNA, 305 bp, Escherichia coli
gcattgcgtcaaatgttatcggcaattagctcagaacttttgctacaacgcccgcgccaacggtacggccgccttcacggattgcgaaacgcagaccgtcgtccatcgcgatcgggtggatcagggtaacaaccattttgatgttgtcgcccggcattaccatctctacgccttccggcagttcgatggtaccagtcacgtcagtagtacggaagtagaactgcggacggtagcctttgaagaacggagtatgacggccgccttcatctttggacagaatgtacacttcagattcgaacttggtg

SEQ ID NO: 2695 - DNA, 228 bp, Escherichia coli
acctgcggtgcagccggagcttcacccgcagcacggcgacgcatacgatcctggtggtacgcgtaaccggtacctgccgggatcagacgacccacgataacgttctctttcaggccgcgcagttcgtcgcgtttgcccgcaacggctgcttcggtcagcacgcgagtggtctcctggaacgatgccgcggagatgaaggactcggttgccagagacgctttggtgata

SEQ ID NO: 2696 - DNA, 146 bp, Escherichia coli; identical to SEQ ID NO: 1837

SEQ ID NO: 2697 - DNA, 152 bp, Escherichia coli; identical to SEQ ID NO: 1631

SEQ ID NO: 2698 - DNA, 723 bp, Escherichia coli
  misc_feature (570)..(570): n=g, a, t or c
  misc_feature (662)..(662): n=g, a, t or c
  misc_feature (668)..(668): n=g, a, t or c
  misc_feature (696)..(696): n=g, a, t or c
taatcacggtttcagtttgcaggttatccatcatcgctttggatacacgatcgttcgccgcagcccagatatcgataactttgttgtagcgttcgcccgcagttaccagaccagactggaactgctcctgaatttcagcaacttctgcttctgcctcggagatgatttcgtgtttcttctccgggatgaccatgtcatcgataccaacagatgcaccagaacgcgctgcataggcgaagccggtgtacatgatctggtccgcaaaaataacggtcggtttcagaccgagaatgcggtagcaggtgttcagcattttggagattgcttttttacccagcgcctggttgacgatggagtaaggcagacctttcggtacaatcatccacagaatggcacggccaacagtcgtgtctttcaggctggttttcgctactaattcaccgttagcatctttttcatactcggtgatacgcactttaacgcgcgcatgcagagaagccagaccagagcgatacagacgttctgcttctttcgggccagtcagcaccatgccttcgccttttggcgttnacacagtcacgggtcatgtagtacagacccagtacaacgtcctgagacggaacgatgattggttcgccgttcgcccggggacaggatgttgntggtanacatcatcagcgcacgcgcttccagctnggcttcagcgtcagcgggacgtgaaca

SEQ ID NO: 2699 - DNA, 308 bp, Escherichia coli
aatgtgaattgactgggagttaacaagcgtaactccctgggaaatgcgagcttaaccactcaggggttagctttattacttagaaacggtcagacgagcgcggcctttagcacgacgacgtgccagaacctgacgaccatttttagtagccatacgagcacggaagccgtgagaacggttgcgcttcagtacagacggttgaaaagtgcgtttcatggcgatttctacctaaacttgaataaattcaatggctttattggatatccgccgaaaaatgaaacgatggacaccgaagccatgggtgatta

SEQ ID NO: 2700 - DNA, 261 bp, Escherichia coli; identical to SEQ ID NO: 1584

SEQ ID NO: 2701 - DNA, 358 bp, Escherichia coli
atgcgcgccgccgtgcagcaaatcttcacgcttgagatacagcgtggtgttcgtcccggctgtaatgttctggcatttggtcagcgcggttggacgcccggcatagtttttcagcaggtcgttgaactgagcctgaaattcaggatctttttgcgcactgacaaaagcttcttccagctggcgcagagcaggcatcaggatttgtggcacgtacatgccgccaaactcaccaaaataggggttaagtaatgttgtcattgttcctttccttaatatgcgcgcagcgtctggaaaaccgaggccaaaagacgtgcgtctttgatgcccggttgcgactctacagcagaattaaaatcaa

SEQ ID NO: 2702 - DNA, 106 bp, Escherichia coli; identical to SEQ ID NO: 2525

SEQ ID NO: 2703 - DNA, 136 bp, Escherichia coli
gatgccaggaaaaggcaaaacaggcaggtgaagacgggaatcatcggtattctgttggctaacgaacaggtacgtctccataccagtgccagtagccagacttttgagaatatgcctgtaacagatcattccgagg

SEQ ID NO: 2704 - DNA, 937 bp, Escherichia coli
cggagtcatcatgataccttcatgggtaccacattcgtcttcggtaaccaccaggtcctgcgccacgtcaaccagacgacgagtcaggtaaccggagttcgcagttttcagtgcggtatccgccagacctttacgagcaccgtgggtggagatgaagtactggagtacgttcagaccttcacggaagttcgcggtgattggcgtttcgatgatggagccatccggcttcgccatcagaccacgcataccagcaagctgacgaatctgtgccgcagaaccacgcgcaccggagtcggccatcatgtagatgctgttgaaggaaacctgcttctcttcctgaccgtcacggttaatcacggtttcagtttgcaggttatccatcatcgctttggatacacgatcgttcgccgcagcccagatatcgataactttgttgtagcgttcgcccgcagttaccagaccagactggaactgctcctgaatttcagcaacttctgcttctgcctcggagatgatttcgtgtttcttctccgggatgaccatgtcatcgataccaacagatgcaccagaacgcgctgcataggcgaagccggtgtacatgatctggtccgcaaaaataacggtcggtttcagaccgagaatgcggtagcaggtgttcagcattttggagattgcttttttacccagcgcctggttgacgatggagtaaggcagacctttcggtacaatcatccacagaatggcacggccaacagtcgtgtctttcaggctggttttcgctactaattcaccgttagcatctttttcatactcggtgatacgcactttaacgcgcgcatgcagagaagccagaccagagcgatacagacgttctgcttctttcgggccagtcagcaccatgccttcgcctttggcgttaacacagtcacgggtcatg

SEQ ID NO: 2705 - DNA, 275 bp, Escherichia coli; identical to SEQ ID NO: 1789

SEQ ID NO: 2706 - DNA, 252 bp, Escherichia coli; identical to SEQ ID NO: 2600

SEQ ID NO: 2707 - DNA, 193 bp, Escherichia coli
tttcacggcgtcagcgcaacgctctgctgcaacctgagctgcaaacggagtggatttgcgagaaccacggaaaccggaaccaccggctgttgcccaacccaacgcgttaccctgacgatcagtgatagtcacgatggtgttgttgaaagaagcatggatatgagccacgccgtcagagacttgttttcttaca

SEQ ID NO: 2708 - DNA, 329 bp, Escherichia coli
ggaacgcctacctgacgacccagcaggatgtgctcacgagtctgcggcatcgggccgtcagtcgcagcaactaccaggatcgcgccgtccatctgcgcagcaccggtgatcatgtttttaacatagtcggcgtgccccgggcagtctacgtgtgcgtagtgacgggtcggggtgtcgtattcaacgtgagaagtgttgatggtgataccacgagctttttcttccggcgcgttatcgatctggtcgaatgcgcgagcagcaccgccgtaggttttagccagtacggtagtgattgcagcggtcagcgttgttttaccatggtcaacgtg

SEQ ID NO: 2709 - DNA, 219 bp, Escherichia coli
ccgggagcataaagatgaaaaaaacaacgattattatgatgggtgtggcgattattgtcgtactcggcactgagctgggatggtggtaacgtcacctctaaaaaatagcaaaggctgcctgtgtgcagcctttgtgcaatttaagcgttaacttttaatcttcctgtagataaatagcacgacaatcgcaccaataacggcaaccacgaagctgccaaa

SEQ ID NO: 2710 - DNA, 169 bp, Escherichia coli
agaagagatagccatttcagcagcttcttccgcacggtcttcaccgctcgccacgccagaacccatcattgcgtagcccatctcagacattacggtgcgtacgtctgcaaagtccacgttcatcaaacccggacgagtaatcagttcagcgataccttgcacagcgcct

SEQ ID NO: 2711 - DNA, 266 bp, Escherichia coli
taacgtaattaccgccgacatccgcttcagacgcgtctcgttttgcatttgatccggacggatattcagatagagatctttaatgatcgtagcggaactttgcagcagttgggcgttaattgtcgacatgatcgcagccatcggtgcagccaggaagatcccggcagcaaacggtggcagcacttttaccattaacgttgggatcaccaggtccggtacggcgagatcggggatcaccgcccgacctaacgctccggccaggtgca

SEQ ID NO: 2712 - DNA, 426 bp, Escherichia coli
cttaacgtaaaaacaacttcagacaatacaaatcagcgacactgaatacggggcaacctcatgtcaactaagaacagaacccgcagaacaacaacccgcaacatccgctttcctaaccaaatgattgaacaaattaacatcgctcttgagcaaaaagggtccgggaatttctcagcctgggtcattgaagcctgccgtcggaggctaacgtcagaaaagagagcatatacatcaattaaaagtgatgaagaatgaacatcccgcgttcttccctccgaacaggacgatattgtaaattcacttaattacgagggcattgcagtaattgagttgcagttttaccactttcctgacagtgacagactgcgtgttggctctgtcacaggttaagtagtttgaatgattagcagttatggtgatcagtca

SEQ ID NO: 2713 - DNA, 481 bp, Escherichia coli
agatcggagcacaggaatgccgcagagttacccacatcttcaatagtaacggtacggcgaatcggggtaacggcttcgcaatgagccagcattttgcggaagtctttgataccggaggccgccagagtacggatcggaccagcagagatggcgttaacacgcacaccttccggacccatcgcgttcgccatatagcgcacgttcgcttccagagacgcttttgccagacccataacgttgtagttcgggatagcgcgctcagcgccaaggtaggaaagggtcagcagggcagaacccggattcagcatggagcggcaagcttttgccattgcaacgaagctgtaggagctgatgtcgtgggcaattttgaagccttcacgggtaacggcgttaacatagtcaccatccagctgatcgccaggtgcaaaaccaatagagtgtacgaaaccgtcaaatttcggccaaactttccccagttcag

SEQ ID NO: 2714 - DNA, 370 bp, Escherichia coli
cgctcgcgcaccatgtgttcaacagcattaccgccgccgccgccgacgccgatgactttaatcaccgcgtcattggtaagttccattggttcaaacatagtttctctccgatttgtgcctgtcgcctgaggccgtaatcatcgtcggcctcataaaaattaaaactcttttcgcagccaactattgagtcgcttgatccacgagccaactgatgctgtaacacgtttttctacttcagcttcaccgttaagatgtgactctttcccatagtgaagcaatcccaccgccgtcgaataatacggctcctgagcataatccgttaaaccggtaatgttcagcggcgcgccgatacgcacttgcgtatgaaaca

SEQ ID NO: 2715 - DNA, 53 bp, Escherichia coli; identical to SEQ ID NO: 2347

SEQ ID NO: 2716 - DNA, 239 bp, Escherichia coli; identical to SEQ ID NO: 2630

SEQ ID NO: 2717 - DNA, 321 bp, Escherichia coli; identical to SEQ ID NO: 2152

SEQ ID NO: 2718 - DNA, 793 bp, Escherichia coli
tggcagtcccagccaggcacatacggcgagtcataaccggaaagccctttggacttcacacgataatgtctttcagaatcttgttaaccgagtgaccaatatgaatgctgccattcgcataaggagggccatcatgcagaatgaaggtttttttgccttttttagccgcacggatgatgccgtacagatcatcatcagtccaacgcgccagcattccgggttcgcgcttggcgagatcgccacgcatcgggaaccctgtttccggcaaattcagggttgatttatagtcactcatcagattctcggttccgtatttcggtttgattacataacaggcttaagccggttttgttagcccaaaaaattcgcgggcggttaattcatcacgcgcaatctgcgctttcagttcgtccagcgacgcaaatcgctgctcattgcgtatttttttacgcagcactacttgtatatggcgaccgtaaaggtccattgcaacatctaacaaatgcacttccagctgctggcgaataccggcaaccgttgggcgtgttccgatgtttgccacgccgggtaacggcttttcaccgaggcccagcacttctaccgcataaacccctttcaccggggaaacctgacggcgcagcggtacattcmgccgtcgggaaacctatagtgcgccctaattcatcaccgtggactacacgcccggagatggcaaacgggtgccccagtaaactctctgccaaagccagattgtcatccgcaagggcctgacgcacggcggtgctgctgatgc

SEQ ID NO: 2719 - DNA, 428 bp, Escherichia coli
acgatcgttcgccgcagcccagatatcgataactttgttgtagcgttcgcccgcagttaccagaccagactggaactgctcctgaatttcagcaacttctgcttctgcctcggagatgatttcgtgtttcttctccgggatgaccatgtcatcgataccaacagatgcaccagaacgcgctgcataggcgaagccggtgtacatgatctggtccgcaaaaataacggtcggtttcagaccgagaatgcggtagcaggtgttcagcattttggagattgcttttttacccagcgcctggttgacgatggagtaaggcagacctttcggtacaatcatccacagaatggcacggccaacagtcgtgtctttcaggctggttttcgctactaattcaccgttagcatctttttcatactcggtgatacgca

SEQ ID NO: 2720 - DNA, 405 bp, Escherichia coli
tcttctgagcacgagtaccctgacgagcaccagctgcataagcaacaacaacctggtgaaccagcgcttcgttgaaatcaccgaccgaaggtagtttcggaaacagtcagcgcgctctgcgcgtctttcaatactaattccattgctatctccttacgccttcacagctggtttaacgatcaggtcgctaccggttgcacccgggacagcacctttaaccagcagcaggttgcgctcagcgtcaacgcgtactacgtcaaggctctgaacggttacacgttcgttacccatctgacctgccattttcttgcctttgaacactttgcccggagtctggttctgaccgatagaacccggaacgcggtgagacaaggagttaccgtgagtagcgtcctgggtacggaa

SEQ ID NO: 2721 - DNA, 247 bp, Escherichia coli
ttttcagacccgggatttcaccgcgcatagcggcttcacggaccttaatacggctcaacccgaacttccgcaggaaaccatgcggacgacctgtttgacggcagcggttacgctgacgagacgggctggaatcacgcggcagagtctgcagcttgagaacagcgttccaacgatcttcgtcggaagcgttcacatcagagatgatcgctttcagttcagcgcgtttcgcgaagtatttatcagctaa

SEQ ID NO: 2722 - DNA, 85 bp, Escherichia coli
ttgcaagctcgctgctacctcttcgcggatagattccggggaaaggtttttatacaactgccgatcgccaactttgttgaataaa

SEQ ID NO: 2723 - DNA, 165 bp, Escherichia coli; identical to SEQ ID NO: 2477

SEQ ID NO: 2724 - DNA, 197 bp, Escherichia coli
tttagtaacacgcaggccacgaacagttaccggagtcgttacttcgccagccaggatcactttcgcgaactcgatctggataccgataatgttagccgctttcagcgtgttcaggtctactacaccgccttctactttagccaggtcagacagacgaatttcggctgtaatcgctgctttacgagaagtgaagccga

SEQ ID NO: 2725 - DNA, 283 bp, Escherichia coli
agctgaccgcctttacctggtttcatttctacgttatgaacagtagaaccaaccgggatgttgcgcatcggcagggtgttacctggtttgattgcagcatcaacgccagactgaatctggtcgccagctttcaggcctttaggggccaggatgtaacggcgttcaccgtctttgtacagaaccagcgcgatgttcgcggaacggttcggatcgtactcaagacgttcaacaactgccgggataccgtctttgttgcgtttgaagtcaacaatacggtaagcct

SEQ ID NO: 2726 - DNA, 239 bp, Escherichia coli
gcacgacgaatcgcctcttcaggatcgattgtgccgttggtttccatttcgatgaccagcttgtccaggtcggtacgctgttctacacgcgctgcttcaacattgtaggcaatacgcctccacagggctgtagcatgcgtcgaccagcagacggccgattgggcgctcatcttcttccgaatgaattcgggtagaagccggcacataaccacgaccgcgctgaactttgatacgcatgc

SEQ ID NO: 2727 - DNA, 70 bp, Escherichia coli; identical to SEQ ID NO: 1961

SEQ ID NO: 2728 - DNA, 143 bp, Escherichia coli
ggtactttcattgcatcacgcatgaactccgggatcaggcagataaaggtaatatacagcgcaccaaccagggtcaggcgggtcattactttatcgatatacttcgccgtttgctctcccggacgaattcctggtacaaatgc

SEQ ID NO: 2729 - DNA, 526 bp, Escherichia coli
ttgtaccaggactgtaggccttaaacgaataaaggtaatttgatgaactggataacctggacttgctgattaagtgtaggatcgaaattagtatctgtataaaattcaacagttatgttgtgtactataccaccaatagcccaaaacttatcgtagtcgtctgctttgttgcaacccttagtttgtagatcgctgtctgtgacggaaaagaaaaattcttggttggaaggatctccgatatagattcctggcgattgaatgtcagttattgtatcgtatgcagaccagacccttgatattaacatggtgtaatacagaccaggaacagatgtattaaatagtttatgtccgccataatctttacctgaatagaccatggcattttcaatagttattggaccaggattcgctctgccagatgtattgcagtaaagaataccaccaccggtacctgtatccaggtatgaccagtacatttttaccccagtcgggccgagctgcgtgggtttataaaaaaccaagttgc

SEQ ID NO: 2730 - DNA, 676 bp, Escherichia coli
tttacgcagtatagtcattttatctacagttacgccacgggaatccgcaactactgcagacagcgcgcctttggctacttcgctgacttcagcaacaatcgcttgtttgtcttgaagatttaaagccattagctttgctcctggatgtttgccagagaaaatctctggaactcacttcactcctccaaacggagagagcgtcttaattacggtgagcagaaacaagccagaatataaaagaataatcttagcgttctgtcaccgtctacgcaggggattaagtttcttgcgaaactcctgcggtcttcgacggaggcctggataggccaggctccaacgaacaaatcttttctatccgtcgctattcagcttgtgacggcgttggcttccttcattcgcaccagtcacatagttagctatgctcctggcgactcactcagttgccgccttgccacaacccgaatatctcggatatacgtctgcattaagcattatacgtgggggtaagattgtagacaaaatcaccgccacgtaaagcattagtttacagaagcgctcaagccagcctggtcaactgcacacctgcacccatggtggtggagatgctaactttcttgatgtacacgcctttcgcctgagtcgggtttgcttttttaaccgcaaccagcagagcctg

SEQ ID NO: 2731 - DNA, 268 bp, Escherichia coli
ccaggtgcaaaaccaatagagtgtacgaaaccgtcaaatttcggccaaactttccccagttcagcgaacatggtgtcgatgctggcatcttctgcaacatcgcactgcagaacgatgtcagaacccaattgagcggcaaattcttctacgcggcctttcagtttgtcgttctggtaggtgaatgccagttcagctccttcgcggtgcatcgcctgagcgataccgtaggcgatggatagtttgctggcaacaccggttaccagaatgc

SEQ ID NO: 2732 - DNA, 268 bp, Escherichia coli; identical to SEQ ID NO: 2731

SEQ ID NO: 2733 - DNA, 101 bp, Escherichia coli; identical to SEQ ID NO: 1753

SEQ ID NO: 2734 - DNA, 398 bp, Escherichia coli
gaatacgcgagaacccgtgtgaacacctttaacagggtgttgcagagtgccgttattcagcgcgacgttaatcatattgcgacgggctttttccatcgctttctggatcgctgctggaacttcacgcgctttaccgtaaccaaaaccaacgcgaccgttaccatcgccaactacagtcagagctgtgaaggagaaaatacgaccacctttaacggttttagatacgcggtttaccgcgatcagcttttcctgcagttcgccagcttgtttttcgatgtgagccatcttacacctctaccttagaactgaaggccagcttcacgggcagcatctgccagtgcctggacacgaccatgatattggaacccggaacggtcaaaggatacatctttgatgcc

SEQ ID NO: 2735 - DNA, 157 bp, Escherichia coli
gtttacttcttccagacgctctttcttggcgtcgtagtcaaagataccccctaagaacgtcggagcgttccgtgaggtcctgaatgcgattatttaccggattaatttcaaacatggtctgatttcttttattgagctattcaaaatgcggtgataa

SEQ ID NO: 2736 - DNA, 157 bp, Escherichia coli
gtttacttcttccagacgctctttcttggcgtcgtagtcaaagataccccctaagaacgtcggagcgttccgtgaggtcctgaatgcgattatttaccggattaatttcaaacatggtctgatttcttttattgagctagtcaaaatgcggtgataa

SEQ ID NO: 2737 - DNA, 301 bp, Escherichia coli
ttttcttccggcgcgttatcgatctggtcgaatgcacgagcagcaccgccgtaggttttagccagtacggtggtgattgcagcggtcagagtagttttaccgtggtcaacgtggccgatagtaccaacgttaacgtgcggttttgtacgttcaaatttttctttagacacggctatattccttactatagtgctctccccttcaggagagagcacgggactttggtattaacccttaggcttatttaccacgggcttcaattacggcctgagcaacgttactcggcgcttcatcatacttc

SEQ ID NO: 2738 - DNA, 235 bp, Escherichia coli
acagtacgcgttcgatatcgcgcagcggcatatcgagcagcagaccgatacgggacggcagcgatttcaggaaccagatgtgcgcagtcggggaagccagttcgatgtggcccatacgctcacggcgtactttagtctgggtcacttcaacgccgcacttctcacagatgacgccacggtgtttcaggcgcttgtacttaccgcacaggcactcgtaatcttttaccggcccaaa

SEQ ID NO: 2739 - DNA, 232 bp, Escherichia coli
atactgcgatatcagccaggatcttacggtcgatttcaacagaggcttttttcaggccattgatgaatttgctgtaagaaataccgttctgacgtgcctgctgcgttgatacgcgcaatccacagttgacggaactgacgcttacgttgacgacggtcacggtaagcatactgaccagctttgataacagcctggaaggcaacgcggtatacgccgagaacgcgcaccgtag

SEQ ID NO: 2740 - DNA, 219 bp, Escherichia coli; identical to SEQ ID NO: 2659

SEQ ID NO: 2741 - DNA, 334 bp, Escherichia coli
aggttgaactgctcacgcagcaggttcagcagctcggtgttcagctcttcaacgctcttctcacgcagctcttttgctttcattacatcaccgtcttagttacaaaggtggttttaatcggcagtttcgctgctgccagcttgaatgcttcacgggccagctcttccggaacaccgtccatttcatacaggactttacccggctgaatcaaggcaacccaatactccacgttacctttacctttacccatacgcactgccagcggcttttcagtgatcggtttgtccgggaacacacggatccagatcttaccttgacgcttaactgcacgggt

SEQ ID NO: 2742 - DNA, 355 bp, Escherichia coli
ttcattgcatcacgcatgaactccgggatcaggcagataaaggtaatatacagcgcaccaaccagggtcaggcgggtcattactttatcgatataccttcgccgtttgctctcccggacgaattcctggtacaaatgcaccggacttcttcaggttatctgctgtttcacgcgggttgaaaaccaacgccgtgtagaagaaacagaagaagatgattgcagacgcatagagtaacacataaagcggttgcccaggctgcaaatacagcgaaattgttgtcagccagttccaaccagtaccgcccccgaaccatgacgcgatggtcgccgggaacagaataatactggaagcgaag

SEQ ID NO: 2743 - DNA, 281 bp, Escherichia coli; identical to SEQ ID NO: 1816

SEQ ID NO: 2744 - DNA, 261 bp, Escherichia coli
taaccgggtcgataccagttgcatcgcgtacgtcaaccttgtgcaggttgcgcgcagccaggaacaggttttcgtccagctcaccggtgatgatcagcacatcttccagagccatgtctttcagtttctgtgccagcagcttagttttcggcgcttctacagagaacttctcgacaacgatcagacgatcctgacgtaccagttcggacaggatgcttttcagcgcgccgcggtacatcttcttgttaactttttgactgt

SEQ ID NO: 2745 - DNA, 278 bp, Escherichia coli
ggacttcttcaggttatctgctgtttcacgcgggttgaaaaccaacgccgtgtagaagaaacagaagaagatgattgcagacgcatagagtaacacataaagcggttgcccaggctgcaaatacagcgaaattgttgtcagccagttccaaccagtaccgcccccgaaccatgacgcgatggtcgccgggaacagaataatactggaagcgaagattgccgggattacccccgccatattcactttcagcggtaaatgtgtgctctgtgcagcataga

SEQ ID NO: 2746 - DNA, 617 bp, Escherichia coli
tatggaaaagcaaacggcgcttcacattatgaaacgccgttttttattaacaactcatttcgactttatagcgttacgccgcttttgaagatcgccagttcgcggaagtcgttacgctcgttacaggtttgcttaccgttggcaaactcaacgatggtgtcgataaattcttccagcaactgcggcatcgctttaccgtggatcaactgacccgcgtcaaagtcgatccagtgttttttcttcgccgccagttcactgttggtggcgattttcaccgtcggcacaaatccaccatacggcgtgccacgaccagtactgaacagcaccatatggcagcccgcacccgccagggcgctggtcgctacggcatcgttacccggcgcacttaacaagttcagccctggcgttttcagacgctcgccgtaacgcagcacgtcaaccacgacgctggaacccgctttctgggtacagccaagtgatttgtcttccagcgtggtgataccgcccgctttgttccccggcgatgggttttcatagatcggctgatcatgggcaataaagtactgtttgaagtcgttgaccatggtgaccagtttttcaaacgttgcttcgtcgcg

SEQ ID NO: 2747 - DNA, 333 bp, Escherichia coli
agttttctgtccgtcgccttgatcattgttgttctgcctgtgcctgattttgttgctgagtagattcctctggcggcaagggcgcccagcctactgccgctccagagtcataacgcaaatcaacgtagctaatccgtttgccatcggtttgcgcctgctgctgtaaaaccggataaagttctacaaagcgagccaaacgtttcatcgtatcgccccggccaagattgagcttaatatcgttattcagcgtcaactgccaggaacgccgcgcggtcatcgccgcttccttcagagtaaatctgtcctttgccagcatctgccccatttcgcgat

SEQ ID NO: 2748 - DNA, 307 bp, Escherichia coli
agagaattattgatgacagcctgtacaggatcaaagcaggaaccgtcataaacggcgaggaaggagatgccagcttttgaatctcggcgggtacgtacccatccgcgcacggtgacttcgctgtcaacggctacacggccctggagtacgtcggctacaggcacaacgctcataatattctctctgttaatagtcggaaaaaataaacacttgtccacccgtaaatggggggatacctatgttacctggcatctgcaatcagacaagcagaattcgcaaatgcagcgaaagatttcggaattaaagg

SEQ ID NO: 2749 - DNA, 187 bp, Escherichia coli
gtttttctggcgtagcaacaccgagacgatcggacgccagcgcctgctgaacatgttcagccaggaatgccggatcaaggaaaatgttgataaagcctggaccggcgatctcaactttgctggcgataccgttaagatccagatgagtcagcacctgctctgctaattgtcgcggtgccatacccag

SEQ ID NO: 2750 - DNA, 145 bp, Escherichia coli
ataattattcataacatacagagcagtaaatgaatgatactgacaatgatgctagtccattatctttgcataatatttgttagcttatagattttaaaaatatttatgagaaaagtatggcaccagagggggttttgactatcaa

SEQ ID NO: 2751 - DNA, 400 bp, Escherichia coli
gcctgcagacgttttttggaaccttcaacaacccatactttcacttccacggtatcacccggacggaaggaaggtacgtcctgcttcatctgctcttgttcaagttgcttaataatgttgctcataatttaatctcttatcctgggtaaactgatatctcgggggcttacgccatcccatcatgtttatgttgctgttgtgcgtgttccgttttgaactccgccagcaaccttgcttgctcttcagtcagagccaggttttccagaagttcaggtcttctaagccaggtacggcccagcgactgtttcaaacgccagcgacgtatctcggcatggttgcccgacagtaacactggcggaacttccatcccttctaacacctcaggccgcgtatagtgcgg

SEQ ID NO: 2752 - DNA, 234 bp, Escherichia coli; identical to SEQ ID NO: 1668

SEQ ID NO: 2753 - DNA, 109 bp, Escherichia coli
cagggttggcgtaatggatcgccaggttgtcatcgattaacaaaatactgttaatcagcgagttgaggatctgcccagcatcgggctgcgtgcctgttgccataaagca

SEQ ID NO: 2754 - DNA, 192 bp, Escherichia coli
tgtagttcgggatagcgcgctcagcgccaaggtaggaaagggtcagcagggcagaacccggattcagcatggagcggcaagcttttgccattgcaacgaagctgtaggagcctgatgtcgtgggcaattttgaagccttcacgggtaacggcgttaacatagtcaccatccagctgatcgccaggtgcaaaa

SEQ ID NO: 2755 - DNA, 311 bp, Escherichia coli
tatttactcccagtgtctgtctcgtaaatgggacggtgcgtgccgtcccattttttgtatttattgattaacttgatctaaccagccccatttatcttcggtttcgccagtgaagaggccgaagaaggcttgctgaatgcttttggtaaccgggccacaacggccttcgccaacctgaataccgtctacgctgcgcactggcgtgatttctgccgccgtaccggacataaacacttcatccgccaggtacagggattcgcgcgacagcacctgctcacgtacttcaattcccagctctttcgccagtttga

SEQ ID NO: 2756 - DNA, 151 bp, Escherichia coli
aacgatcttcgtcggaagcgttcacatcagagatgatcgctttcagttcagcgcgtttcgcgaagtatttatcagctaaagctacgcgttttacttcgcgtgctttcattgattgcttagccatttagtaaccctaccttacttgcggaac

SEQ ID NO: 2757 - DNA, 509 bp, Escherichia coli; identical to SEQ ID NO: 1756

SEQ ID NO: 2758 - DNA, 266 bp, Escherichia coli
ttaaaggttgctgtattatttagcgataaaaaaagcctgccagatggcaggctatttaataacggcgttattattgcaacagcgaaatatccgcaacgcgcaggaacagttcgcgcagtttctccagcatggtcagacggttgatacgcaattctttgtcatcaaccatgaccatcactttatcgaagaaagcatcaaccggttcacgcagctcagccagttcgaccagcgcatcctggtaacgaccttccgtaaagtacggctcc

SEQ ID NO: 2759 - DNA, 266 bp, Escherichia coli; identical to SEQ ID NO: 2758

SEQ ID NO: 2760 - DNA, 152 bp, Escherichia coli
cacttgcgtgacgttcagccggagtgtctttaccgtcgtccaggataccgttgatcgcaggtactgtcaaccggggatggcaggtaatcaattaccgcatccagcatcgcctgaacaccctttgttcttgaacgcagaaccacaggttacca

SEQ ID NO: 2761 - DNA, 332 bp, Escherichia coli
gacgggcatgtacttcatcggtaagaaaaatactgagtgtcggggtttgcagagcgcccgcaataccggtgagaaaggcaacgattaaaaacgccgtcgaggtcaggtcaaacgatttcgcgctggagactgcgggggagttatgcatgctggtcgatcactggaagaggaagacgcggagtttacgctgcttgtcagaaaataaacagacagcgaaatcaaaagcgccacgaatagtcaaaatgccatttcactgttgctgattggctgctgacgctgctgaaatgaaattgctgataacggattttcccatcagcaattaggaaaaatgg

SEQ ID NO: 2762 - DNA, 209 bp, Escherichia coli; identical to SEQ ID NO: 1856

SEQ ID NO: 2763 - DNA, 266 bp, Escherichia coli; identical to SEQ ID NO: 2758

SEQ ID NO: 2764 - DNA, 540 bp, Escherichia coli
cttcaaacagatgaggcagcggtttctcaaaaccttcatcggcgcaatgcattagcgccgatgatgatcaatgcagctggtgtgacacgacattcagaacatgttggtcggtctgcacagggcacatacccgcaagtttcgcactgcgcacttcatcaagaatggtttgcagcaacagaccatcatgctgctgttctttttccagatcgcgcaggaaattgacggttgaatcatcattcagttctttcgcttcatcggctaactgtgccaacgtactagaacgttgctcgtattcttccatcgttttttggaacagttcttccagagagttcagtttttcaccgggaacatcaatggctttaacgatgggggtagcgccgacactcttcataaagttaaacatgcgcatcatttgggtcacattactctgtgcctgggcgcgaaggaaagtggcggtgccgttcagactctgttcagaacaccagttactcaggtgaaggtagagattggatgcgtaaaactcgcgggtcatttgagagt

SEQ ID NO: 2765 - DNA, 476 bp, Escherichia coli; identical to SEQ ID NO: 2177

SEQ ID NO: 2766 - DNA, 507 bp, Escherichia coli
tttcgcttccgcacgggtcatggagatggattgtgccagttcagcgtcgccgcgcactacgcgcataccgcgaccgccgccgccgccggaggctttgataatcaccggataaccaatgcgtttagcaatggcacggtttttatccatatcgtcgcccagcgggccgtcagaacccggtacgcaagggacgcccgcttttttcatcgccgcgattgcggatactttgtcgcccatcaggcgaatggtttctgctttcgggccaatgaagataaagccggagcgttcaacctgctcggcaaagttggcgttctcggagaggaagccgtaacccggatggattgctactgcgccggtgatttcagcggcgctgatgattgccgggatgttcagataactttttactgacggagcagggccaatacagaccgtttcatctgccagtaatacgtgttttagatcgcgatccgcgctggagtgcacagcgacagtctttgatgcccagttctt

SEQ ID NO: 2767 - DNA, 257 bp, Escherichia coli
acaatacccaggcgaataccattaggatgtactttctgacccattgctagtctccagagtctcagcgatcggacacaaccacagtgatgtggctggtgcgcttcaggatgcgatctgcacgaccttttgcacgcggcataatgcgcttcatgctcgggccttcgtctacgaaaattttcgtaactttcagatcgtcaatgtcagcgccatcgttgtgttcagcgttagcaatggcagattccagaactttcttgacc

SEQ ID NO: 2768 - DNA, 103 bp, Escherichia coli
gcataccacgacgacggctcaagtcaccgataacgtcaccggtgttctcttccggagtttctacttcaaccttcatgatcggctcaagcagaactggtttcgc

SEQ ID NO: 2769 - DNA, 130 bp, Escherichia coli
aaaaagtgctatgcagtaataagacggctcctgattcaggagccgttgatgtttctgggggttacagcgacgctttcttctttatctttagcgtcaggcagttttggcgaaagggcggtggccttgctgt

SEQ ID NO: 2770 - DNA, 133 bp, Escherichia coli
atgtcatcttcagtgacaacaccatgctgtgcccgaaggccttgctcaatggcattaaccagagcgggttctgctgttgaattttctgcctgataataagtaaacatagtgattctccgtgtctgtgtattta

SEQ ID NO: 2771 - DNA, 348 bp, Escherichia coli
ggaagaattcttcatagctcatgtacggcttgtcgggatggttggtcttcatatgctcgacgtagttgtcgtagtctggaatgccaatcaacatcttcgccgcctggccgagatatttttttgcctgtcctaagttaccaaacatagttcactctgataagaacaaagccccgccgaagcggggctaaacacggttagtggtgcgaagagatcttcacgccgccttccgggattggaacgtacggtgtttctttgtcagtacgtttgtcgctgttacgcaccgcaagccatgttttgaaaccgtagaagatgatgctgtacaccacaatcaggaacagaatactcaga

SEQ ID NO: 2772 - DNA, 232 bp, Escherichia coli
gtctgaccatgcctgagcggcacgctgatgcgaacggtgcgctaatgcatcttgctgttctcgggtgatgccgtaggttttcgccatttgctctgcggtgtcgcccatccgcaagccggtagaatattctgctaccgcaggtggtacgggcattaagtcgcgcaaacgcaggcgagagaagagtttcagtcgctggctcatggtacgagctttgttgacatcaaccagcacg

SEQ ID NO: 2773 - DNA, 287 bp, Escherichia coli
taagcaacaacaacctggtgaaccagcgcttcgttgaaatcacgaccgaaggtagtttcggaaacagtcagcgcgctctgcgcgtctttcaatactaattccattgctatctccttacgccttcacagctggtttaacgatcaggtcgctaccggttgcacccgggacagcacctttaaccagcagcaggttgcgctcagcgtcaacgcgtactacgtcaaggctctgaacggttacacgttcgttacccatctgacctgccattttcttgcctttgaacactttgc

SEQ ID NO: 2774 - DNA, 394 bp, Escherichia coli
cacatttggtggaaagtattcatattaaaaggaaggttgaataatttgtctttataaatcgccagtggagaattagtaaaacgattaaattctactaaatcattaacgtaatcccatatatatttatcattggtatgaaaaatatgtgcaccatatttatgaatctggataccctcacagtcctctgtgtacgcatttccaccgatatgatttcttttctcaatcactaaaacttttttgtttagcttttttaactcattcgcacaaacggcaccaaacaaaccagaaccaacaatgatataatcgtacataaaatcctcagcaaaccagtaatttattatttcttacgaacatcagcatgagtgacgtaactaagcactctgttgcaagcaat

SEQ ID NO: 2775 - DNA, 166 bp, Escherichia coli
ccatattacgaccatgagtggtggtggcggaacggtacttaggcatactttatttactcccagtgtctgtctcgtaaatgggacggtgcgtgccgtcccattttttgtatttattgattaacttgatctaaccagccccatttatcttcggtttcgccagtgaaga

SEQ ID NO: 2776 - DNA, 196 bp, Escherichia coli
tacctggatttccagctcgccctgggcgtttttgaactgctcagccgggatggcggactcagatttcagaccagcgtcaaccagtactacgtctttgtcgatagcaacaacaacgccacgaacgatagaacccgggcgggtttcgatttcttttaaggactcttcaaagagttgagcaaaagattcagtcatgttt

SEQ ID NO: 2777 - DNA, 155 bp, Escherichia coli
aatatgaatacactattagtggggttaatataaattgatttttagcagtagatattattagcaacgaaaaaaatagcaaaagcatagatttattgtttttgcatgttaatgaatacaccaaaaatggaaggaaaattataactatttgctcttga

SEQ ID NO: 2778 - DNA, 574 bp, Escherichia coli
atgccatgagtgtgtcctgttgggagtttaatgccggataaggcattttacgccgcatcctgtgcctgatgcgacgctggcgcgtcttatcaggcctacaaatccgagccgtaggccggataaggcgttcacgctgcatccggcacccggagcctgatgcgacgctggcgcgtcttatcaggcctacaaaccgagccgtaggccggataaggcgtttacgccgcatccggcatctcaatatcagatcttacatgcgccgctttcgcagccatcgtcctggattgacggcaccagatcgtcttgtgcgtcttcagcgccgtcacgggtgttctgataatacagtgttttgaccccgaatttgtaggcggtgagcaggtctttcagcaactgctgcatcggcacttttcctgacgggaagcgtgacggatcgtagttggtgttggcagagatcgactgatcgataaatttctgcatgatacccaccagttgcagataaccatcgttacccggcatttccacagcagctcataagcgtcgtgcagtgctcgtagtccggcaccacctggcgcaaaat

SEQ ID NO: 2779 - DNA, 440 bp, Escherichia coli
ggtttgcccttgtgcagctcagggttaaccactttaactacgtggcgacgacccggagatgtcggtttacatttaacaactgccattgtattactcctccgacttactcagcgccgccaacgaagtccagattctggccttctttcagggtgacgtaagcttttttccagtcgctacgacgaccgatacgctgtccgtgacgtttaactttccctttaactaccagggtgttaacgacttcgacttcgacttcaaacagtttctgcacagcagctttgatttctgctttggtcgcgtctttagcaactttgagtacgatggtgttggatttttccatcgcagtagacgctttttcagaaacgtgcggtgcacgcagcaccttcagcagacgttcttcacgaatcatgccagcatctcctcaacttgcttaacagcatcag

SEQ ID NO: 2780 - DNA, 210 bp, Escherichia coli
tatccaccaacagcattggttggttgcgacggctttttaatgcgcgctccaccatgcctttcccgataatcggtaacgggctggcggtggaacctgatgatgatatcggcttcgcgcagacgttcgtcgatatcactcagggcaatcacttccgcgccgacttcatctgccagaatttgggcacgttcgcgagtgcggttggcgataatc

SEQ ID NO: 2781 - DNA, 150 bp, Escherichia coli; identical to SEQ ID NO: 2066

SEQ ID NO: 2782 - DNA, 106 bp, Escherichia coli
ctaacgacgcgtcagaaagtgtcacggtcagcacagcatcaggcggcagtgcgactttctgacggatccagacggtaccggagacattcggttgctggatagctgg

SEQ ID NO: 2783 - DNA, 143 bp, Escherichia coli
ataacgatacccgggcgagcagtgtgaatggttacacggatgctcttagccggacgcctcgataacgatacgagatacggacgctttagccagttccttagtcaggtactgacgtacctttaaaatcgctgtccaggttgtca

SEQ ID NO: 2784 - DNA, 106 bp, Escherichia coli
tagtacttttcgccacgggcacgcagttcagccagaactgtatcgatgccttttttatcgattacacgcatacctttagcagatacgcgcagggtgacaaaacgct

SEQ ID NO: 2785 - DNA, 53 bp, Escherichia coli; identical to SEQ ID NO: 2347

SEQ ID NO: 2786 - DNA, 442 bp, Escherichia coli
cccagctcctggagcttgcggcgtgcgcgggtcgcacgacggatacgagcagatttcttatccatagtgttaccttacttcttcttagcctctttggtacgcacgacttcgtcggcgtaacgaacacccttgcctttataaggctcaggacgacggtaggcgcgcagatccgctgcaacctggccgatcacctgcttatcagcgcctttcagcacgatttcagtctgagtcggacattcagcagtgatacccgcaggcagctgatggtcaacaggatgagagaaacccagagacaggttaatcacattgcctttaaccgctgcacggtaacctacaccaaccagctgcagcttcttagtgaagccttcggtaacaccgataaccattgagttcagcagggcacgcgcggtaccagcctgtgcccaaccgtctgcgtaaccat

SEQ ID NO: 2787 - DNA, 265 bp, Escherichia coli
ttacgcgacgtgcaccggagttgtcggcgacgttcagcatagtctgttcttggatcattttagtgctccgctaatgtcaactactactgagacccgaaaatcaggtcgttaaaaatccccatatcgagggcgcggcattataacaccgcttcaaggatatgggtagaaaaaataaacggctcatttctgagccgtttattcgtattgagagagtgtactgtattacagaaccgctttctctacaacgcgaaccagcgtccaggat

SEQ ID NO: 2788 - DNA, 437 bp, Escherichia coli
gccactttgtatggcacatcgctacgtttagacagttcgtacagcgcaatgcgcagtactgctttttctacctgtcccagttcttccagcaggcgggacaggtatggcttcatcagtccgtcgaggtatgcggtattagtcgccaccccggccagcagctcacggaagtacaggacgtcaacgtcttttacatcctgttcagccaggaactggtattcaacatcagcgatgtcgttctgggacaactgccaggagtagagcgcctggacggcacactcacgagcgcggcgacgagcagcaggtttcacggatttccccttactaatttcaggccttgatggctttcaatacattaatcatttcaagcgcggtcagtgcagcttctgcacctttgttgccagctttggtgccagcacgttcgatcgcttgttcaatgc

SEQ ID NO: 2789 - DNA, 307 bp, Escherichia coli
agtttaccaatggaggaaacgcgcaggcggttgcaagtggcgcagaagtctttttcatacggcatgataaggccaatctctccggcgtaatctggatggcaaaagacttgcgcgggaccgtcgctgcgttgacgtaattggtggatccagccgcgacgcagtagctcgtcacgcagaacctgaccagagatgtgatgcttacggaagagctcgctgccctcgcccgtttccatcagttcgatgaaacgcagctggatagggcgatgctggatccagttcagaaaggtgtcgagctggtgatgattaa

SEQ ID NO: 2790 - DNA, 242 bp, Escherichia coli
ttcaatcacacgctcaggacggcgagcaatcatctcttcaaaggtcgcttgtttgataccaccgatgtggccggtgtggtgatagtacactttgtcagtacgcttgttgccggttacagcaactttgtcagcgttcagaacgatgatgtaatcaccggtatctacgtgcggagtgtattccgctttgtgcttaccgcgcaggcgacgagccagttcagtagccagacggcccagagttttac

SEQ ID NO: 2791 - DNA, 182 bp, Escherichia coli; identical to SEQ ID NO: 2425

SEQ ID NO: 2792 - DNA, 196 bp, Escherichia coli; identical to SEQ ID NO: 2373

SEQ ID NO: 2793 - DNA, 332 bp, Escherichia coli
gagcacgccacgaacgcggtcgccagggcggaagttttcacgcggcagcatatcttcgcgcaggatcacggcttcagcgttgttgcccagatccagagagatgttgtcgcggtttacttttttcaccacgccggtgatgatttcaccttcgtgttcacggaactgatcaaccaccatcgcacgttcggcttcacgcactttctgcacgataacctgttttgccgtctgggtagtgatacggtcaaaggtaacagactcaatctgatcttcaacgtaatcgcccaggttcaggctttcatcttcataacgtgcggcttcaagggtgatttcct

SEQ ID NO: 2794 - DNA, 376 bp, Escherichia coli
ggaaacctgcggcgttcagagcacgaatagtagattcgcggcctggacccggacctttaaccataacttccagattcttgatgccgtattctttcacggcgtcagcgcaacgctctgctgcaacctgagctgcaaacggagtggatttgcgagaaccacggaaaccggaaccaccggctgttgcccaacccaacgcgttaccctgacgatcagtgatagtcacgatggtgttgttgaaagaagcatggatatgagccacgccgtcagagacttgttttcttacacgtttacgtgcacgaattggtgcctttgccattattcaatcaccccgattatttcttgatcggtttgcgcggacccttacgggtacgtgcgt

SEQ ID NO: 2795 - DNA, 211 bp, Escherichia coli
cgatgtggccggtgtggtgatagtacactttgtcagtacgcttgttgccggttacagcaactttgtcagcgttcagaacgatgatgtaatcaccggtatctacgtgccggagtgtattccgctttgtgcttaccgcgcaggcgacgagccagttcagtagccagacggcccagagttttaccggtcgcgtcaacaacataccagtcgcgtt

SEQ ID NO: 2796 - DNA, 290 bp, Escherichia coli; identical to SEQ ID NO: 1953

SEQ ID NO: 2797 - DNA, 280 bp, Escherichia coli
agctggacttgctgccactgacccgccttctggataaaccagggctgatagtcaaaaatgctttcggcgtcttcggtggaagaaaacactctgagccacccacgaataccgtaagacgaacccatttttcccaaaacgatgggatcaacaggtgcttgcgcggtgagttgtttgctcatcatgaccaccgtgacagattaagctgctttgtttacttctttgatcagcgcagcaacgcgatcagaaatagttgcgccctggccaacccagtgagcgatgc

SEQ ID NO: 2798 - DNA, 329 bp, Escherichia coli
agacttaacttctacagtcgggcgcacgttttcgagagctacttcgaatgcttccagttcagatttaccagagcgctgagccagggtctccagcgcgctgtatacgatagattcagcagtagattttttaccatctaccatcaggatatttacaaatttagccagcagttctgatccgaacttcggatccggcagaattttacgctgaccaatgacgcgacgacgtggcatggaaatactccgttgttaattcaggattgtccaaaactctacgagtttagtttgacatttaagttaaaacgtttggccttacttaacggagaaccatt

SEQ ID NO: 2799 - DNA, 171 bp, Escherichia coli
acttcgattgtgaagtcaacgtgccccggggtgtcgatgatgttgatgcgatgcggctcatactgcttagccataccagaccagaatgcagtagtcgcagcggaagtgatggtaataccacgttcctgctcctgctccatccagtccatggttgcagcgccgtcatgaact

SEQ ID NO: 2800 - DNA, 218 bp, Escherichia coli
tgagggatcggagtcacatcagtaatgttagtgatgcggaaacctgcggctgttcagagcacgaatagtagattcgcggcctggacccggacctttaaccataacttccagattcttgatgccgtattctttcacggccgtcagcgcaacgctctgctgcaacctgagctgcaaacggagtggatttgcgagaaccacggacaccggaaccaccggct

SEQ ID NO: 2801 - DNA, 163 bp, Escherichia coli
ttaataaacgaaacaaaggcgaacaaagcctgtgaagcccgaaggctccacagacagtgctacttgaaggccttactgtttcttcttaggagcgagcaccatgatcatctggcggccttcgatcttcgttgggaaggattcgaccactgccagttcttgcaaa

SEQ ID NO: 2802 - DNA, 370 bp, Escherichia coli
ctgtaagggtattgaaatgttaacacaagctctcgctgtaggggtatagccgagaccaccgaagcccggaggtggtgaaataaaaccgggcacaacacgaaggcgcatttcctgatatccataaagagtcggtcttgtctgttaaatttaaatggtgggagtgcgcctccggttgtaaataacgacattgctgtgtgtagtcctggcggcatcagtttttttcttgaagttcggctgatgtccgccctttttaaagtgaattttgtgatgcggtgaatgcggctaagcgcacgtggcacagttaaaagtcatgttactccttattggtttgggtgggaaagccgactgtaattgttaactggttgcagtc

SEQ ID NO: 2803 - DNA, 206 bp, Escherichia coli
gacgagacgggctggaatcacgcggcagagtctgcagcttgagaacagcgttccaacgatcttcgtcggaagcgttcacatcagagatgatcgctttcagttcagcgcgtttcgcgaagtatttatcagctaaagctaccgcgttttacttcgcgtgctttcattgattgcttagccatttagtaaccctaccttacttgcggaac

SEQ ID NO: 2804 - DNA, 100 bp, Escherichia coli
aaaggcccctcccaacacatgggacaaaatgaaaggaggagcctcggaaaatacttttaattaatgtgcgttagacgcggtgtggttatccattgagtgg

SEQ ID NO: 2805 - DNA, 203 bp, Escherichia coli
ccagtaccgcaccgtaaggtactttgtagctttctttagtacgaccgaattcgtcgatcagtttcagttcagtattacgggaagtgataaccagtttaccgctggagttcacaaccgacttcacgttgctgagcttgatgctacctttgtttttcacttggatgctggattcagcagccgcacgagatgccgcaccaccgatg

SEQ ID NO: 2806 - DNA, 229 bp, Escherichia coli
acagaccacggccagcttctacgccagctttagcgaagtggccagcttcaggcttggtcacacggttagcttttttagcaccggtggtcacctgaatagcacggtagccatcgttagccaggtctttaacctgagtaacgcggtttgcttcaacttcgattacggttactgggatagaaacgccgtcttctgtgaagatacgggtcatacccacttttttaccgactaa

SEQ ID NO: 2807 - DNA, 400 bp, Escherichia coli
gtgtgttctctcacgcatcacaaaagcagcaggcataaaaaaacccgcttgcgcgggcctttttcacaaagcttcagcaaattggcgattaagccagtttgttgatctgtgcagtcaggttagccttatgacgtgcagctttgtttttgtggatcagacctttagcagcctgacggtccacgatcggttgcatttcgttaaatgctttctgtgcagcagctttgtcgccagcttcgatagctgcgtatactttcttgatgaaagtacgcatcatagagcgacggcttgcgttgtgcttacgagccttttcagactgaatggcgcgcttcttagctgatttgatattagccaaggtccaactcccaaatgtgttctatatggacaattcaaaggccgagga

SEQ ID NO: 2808 - DNA, 341 bp, Escherichia coli
ttaatcaatcgtgctatgtattaattgccgaatacgatgtacatatcggcatcgacctgtaggcctgataagacgcgaccgcgtcgcatcaggcatcggttgccggatgcggcgtgaacgccttatccggcctacatatcgacgatgattaaccgcgccacgctttatagcggttaatcagaccattggtcgagctatcgtggctgctgatttctttatcatctttcagctctggcagaatacggttcgccagctgtttacccagttccacgccccactggtcgaaggtgaagatgttcaggatcacgccctgagtaaagattttgtgctcatacagcgca

SEQ ID NO: 2809 - DNA, 398 bp, Escherichia coli
ccaaattgataaaagaggagaaaccttgtggcaaagcaaatgacaaccccgccgcagcggggtcaaggatcagtgagtaatgatccagaggagttcggcccagaagagcatcgacagagaaaacgcgcccatccaggaccaatatttcatatttgtgttgatcataggctacacccttaacggttattattttgtgttgagataactcaagctgttattgctgcggtgtattaaaagccctttaattcattaaaaatgggtaataagaatgatgataattattgtttcggctgatcatcttcagcaaacagttctataaaggcttgctgctgcgatgttagttgccagtcgtctggaataacgacggaacattcccgtttcgtttctgtttcattgtc

SEQ ID NO: 2810 - DNA, 188 bp, Escherichia coli; identical to SEQ ID NO: 1804

SEQ ID NO: 2811 - DNA, 399 bp, Escherichia coli; identical to SEQ ID NO: 1712

SEQ ID NO: 2812 - DNA, 385 bp, Escherichia coli
cgcctgttgctgggtatcgtcttccagcagatcgcgcaggttaacgccgccttcaccaaacaggcagagatggagtttaccaatggaggaaacgcgcaggcggttgcaagtggcgcagaagtctttttcatacggcatgataaggccaatctctccggcgtaatctggatggcaaaagacttgcgcgggaccgtcgctgcgttgacgtaattggtggatccagccgcgacgcagtagctcgtcacgcagaacctgaccagagatgtgatgcttacggaagagctcgctgccctcgcccgtttccatcagttcgatgaaacgcagctggatagggcgatgctggatccagttcagaaaggtgtcgagctggtgatgattaacatca

SEQ ID NO: 2813 - DNA, 342 bp, Escherichia coli
gtagttcttaacgccgataccacattccataccgttacggacttcgttaacgtcatctttgaagcggcgcagggactccagctcgccttcgtagataaccacgttgtcacgcagaacgcggatcgggttgtgacgtttaaccacaccttcggtaaccatacagcctgcgatggcaccaaatttcggcgatttgaacacgtcacgaacttccgccagaccgataatctgctgtttcagttccggagacagcataccgctcatcgccgctttcacttcgtcaatcaggttatagatgacggagtagtaacgcagatccaggctttccgcttcaatcactttacg

SEQ ID NO: 2814 - DNA, 452 bp, Escherichia coli
atttgatgaactggataactggacttgctgattaagtgtaggatcgaaattagtatctgtataaaattcaacagttatgttgtgtactataccaccaatagcccaaaacttatcgtagtcgtctgctttgttgcaacccttagtttgtagatcgctgtctgtgacggaaaagaaaaattcttggttggaaggatctccgatatagattcctggcgattgaatgtcagttattgtatcgtatgcagaccagacccttgatattaacatggtgtaatacagaccaggaacagatgtattaaatagtttatgtccgccataatctttacctgaatagaccatggcattttcaatagttattggaccaggattcgctctgccagatgtattgcagtaaagaataccaccaccggtacctgtatccaggtatgaccagtacatttttaccccagtcg

SEQ ID NO: 2815 - DNA, 345 bp, Escherichia coli
attcatatttttttagcatattgtgcaattattttgaggaagtgtagaaattttgtactcaaaattcgtaagtaaaataaaaaagccggggcgacccggcaaaaaaaatcactgcatattattcgctgacaaaccagtcatcggcgctttcccacgtttcctggagaatttcactaatgcgctgtttatcttcttttgtcgcgccaataaccgataaattattcgctgcggcataacgtaccgatacgtggccttcattatcaggaaacgcatactgaatacggcgggaaagttcgccagccagggcgtcaatagccccagctggcaatggagaagttttcgcta

SEQ ID NO: 2816 - DNA, 511 bp, Escherichia coli
gaatttaccgtagatcgggtgtttcacaaaacgttcgatagcaacaacaatggatttctccattttgtcgctaacaacgcgaccttgcagagtacggattttatcggtcattacgcacccgccttctcgttcagtaaagtcttaacgcgtgcgacatcgcgacgcacttgcttcaacaggtgagactgttgcagctggccacttgcagcctgcatacgcaggttgaactgctcacgcagcaggttcagcagctcggtgttcagctcttcaacgctcttctcacgcagctcttttgctttcattacatcaccgtcttagttacaaaggtggttttaatcggcagtttcgctgctgccagcttgaatgcttcacgggccagctcttccggaacaccgtccatttcatacaggactttacccggctgaatcaaggcaacccaatactccacgttacctttacctttacccatacgcactgccagcggcttttcagtgatcggtttgtccgggaa

SEQ ID NO: 2817 - DNA, 199 bp, Escherichia coli
gagcgtcgatgccgaggttaacagctacgtccacgctttctacgaatttagcagtcgccagctctttcagcagtgcgatagcttcgttgatgtcgtacttgtttggttgcatcaactttctcgcggataacacgcatgcgcttggtcagtttagccatttcttagtcctccactaccaggcccatggaacgtgcagtac

SEQ ID NO: 2818 - DNA, 192 bp, Escherichia coli
tccagccccatattttcgccgagagtgatcagctcagaaaccggcgtattctttaattcggtaagattcatagtggtgtgagttcttaaacttggggtaaatctcgaacttaatgttgtgaatggtatggcaggatcatccatgcctgtttacggtcatcgactcatgtcttttcgctgcctggtcacagga

SEQ ID NO: 2819 - DNA, 322 bp, Escherichia coli
tgttctacccaacctggttttgggtagatttgctcaaattcgcgctgcgacacgctaatgatattggcatcgtgatccattacgaccgcgcgggagctggtggtgccctggtcgagcgcaacgatatattttttttcagtcatgtttaattgtcccgtagtcatattacagcgaagctttttgttctgaaggagttgtggtttccttttcttccacaacacagatatcgcaaggcaaatggcgaccaatcagtttgcggtaggcaaatgcacctacaatcgcgccaacgatagggccgaaaagcggcaccaggaagtaagga

SEQ ID NO: 2820 - DNA, 191 bp, Escherichia coli
tggtcttggtacgctgaccgcgaaccgggagaccacgacgatgacgcaaaccgcgatagcaaccaagatccatcaggcgcttgatgctcatgctgatttcacggcgcagatcaccttcaacgacaaatttggcaacttcgtcacgcagcgtgtcgatttgtccttcagacagctcactgatcttaacatct

SEQ ID NO: 2821 - DNA, 262 bp, Escherichia coli
ttatcgattacacgcatacctttagcagatacgcgcagggtgacaaaacgcttctcgctctcaacccagaaacggtgagagtgcaggttcggcaggaaacggcggtttaggtcgctgttcaggtgcgtgggaacggttgttaccggtcaccggacgcttgccagtaacttggcagactcgggacatgtctattctccaaaaatcaaattagctcgagcttcgtatggggtattggcgcctcgtcaggctttacagcccggtc

SEQ ID NO: 2822 - DNA, 241 bp, Escherichia coli
agcgtgcagcacctgctttacccagaacgcgcagcatatgctcagcattgccaacttcgcccagagttgcacggcagtctgcttctactttacgcatttcaccagaacgcagacgcagggtgacataagcaccatcaccgagcaacgatctgaacgtaagtaccagcggaacgtgccagctgaccgcctttacctggtttcatttctacgttatgaacagtagaaccaaccgggatgttgc

SEQ ID NO: 2823 - DNA, 234 bp, Escherichia coli
gcaaacggagtggatttgcgagaaccacggaaaccggaaccaccggctgttgcccaacccaacgcgttaccctgacgatcagtgatagtcacgatggtgttgttgaaagaagcatggatatgagccacgccgtcagagacttgttttcttacacgtttacgtgcacgaattggtgcctttgccattattcaatcaccccgattatttcttgatcggtttgcgcggacccttacg

SEQ ID NO: 2824 - DNA, 334 bp, Escherichia coli
tcatctgctcttgttcaagttgcttaataatgttgctcataatttaatctcttatcctgggtaaactgatatctcgggggcttacgccatcccatcatgtttatgttgctgttgtgcgtgttccgttttgaactccgccagcaaccttgcttgctcttcagtcagagccaggttttccagaagttcaggtcttctaagccaggtacggcccagcgactgtttcaaacgccagcgacgtatctcggcatggttgcccgacagtaacactggcggaacttccatcccttctaacacctcaggccgcgtatagtgcgggcaatccagcaatccttca

SEQ ID NO: 2825 - DNA, 147 bp, Escherichia coli
tccagctcaccggtgatgatcagcacatcttccagagccatgtctttcagtttctgtgccagcagcttagttttcggcgcttctacagagaacttctcgacaacgatcagacgatcctgacgtaccagttcggacaggatgcttttc

SEQ ID NO: 2826 - DNA, 300 bp, Escherichia coli
ccgccgtgatgttaaccagcacgccgcgcgcgccagacaggtcgatatcttccagcagcggagaagagatagccatttcagcagcttcttccgcacggtcttcaccgctcgccacgccagaacccatcattgcgtagcccatctcagacattacggtgcgtacgtctgcaaagtccacgttcatcaaacccggacgagtaatcagttcagcgataccttgcacagcgcctttcagtacatcgttcgctgcgccaaacgcatccagcagggagataccgcggcccagaactttcagcagtt

SEQ ID NO: 2827 - DNA, 147 bp, Escherichia coli
cggctgacgtgcagcagcaactgcggcacatacagcatggcggcggaaatcttgtcggaaatcacttcagtcgggtggaagtgcccggcgtccaggcacagcgcagtctggcggctggtggcataccccatgtaaaactcattggag

SEQ ID NO: 2828 - DNA, 340 bp, Escherichia coli
tcgcggaatttaccctgacgatagagtgcaacttcacgcgctttcttctcgtcacgtacaacggtaacttcatcacccgcagccggtacgccggacaggccgaggatttccaccggaatggacggacccgcttccagcacttcctgacccagttcgttacgcatcgcacgaacacgaccgtattcgaagccacacagaacgatatcgcccttgtgcagagtaccttcacgtaccagaacggtagcaaccggaccacgacctttatcgaggaaggattcgataaccgcaccgctcgccatacctttacgtaccgctttcagctccagaacttccgcctgca

SEQ ID NO: 2829 - DNA, 315 bp, Escherichia coli
tatcaagtttactcattcgcttcagtctgttgttattgttgtgatttatgaatcatagcacaggtcgtatcgacttctggccctggcgctttaccccaccagggccagacgatacgtcaggcaccaacaatattgcgcagatcaaacacccgacacgccttgccttctgaacgcgggatactgccacagttaacgatcatcacatcggtagagatccccaccatcgacttaatccgatggcgcagctggtggcatacctggcaacgctgctcatgcgtcaatgtcaggctactttctttcaactccactttcaca

SEQ ID NO: 2830 - DNA, 335 bp, Escherichia coli; identical to SEQ ID NO: 1970

SEQ ID NO: 2831 - DNA, 53 bp, Escherichia coli; identical to SEQ ID NO: 2347

SEQ ID NO: 2832 - DNA, 226 bp, Escherichia coli
tgttgtgggtttccgcgaactgctgccacgggttagctttgcactgtttcagacccagggagatacgacgacgttcttcgtcgatatccagaaccataacttccactacatcgccaacgttaacaactttggacgggtggatgtttttgttggtccagtccatttcggaaacgtgtaccaggccttcaacgccttcttcgatttcaacgaagcagccgtagtcggt

SEQ ID NO: 2833 - DNA, 215 bp, Escherichia coli; identical to SEQ ID NO: 1562

SEQ ID NO: 2834 - DNA, 294 bp, Escherichia coli
taccacaatcgtcttcggtaaccaccaggtcctgcgccacgtcaaccagacgacgagtcaggtaaccggagttcgcagttttcagtgcggtatccgccagacctttacgagcaccgtgggtggagatgaagtactggagtacgttcagaccttcacggaagttcgcggtgattggcgtttcgatgatggagccatccggcttcgccatcagaccacgcataccagcaagctgacgaatctgtgccgcagaaccacgcgcaccggagtcggccatcatgtagatgctgttgaagg

SEQ ID NO: 2835 - DNA, 220 bp, Escherichia coli
ttagcagtcgccagctctttcagcagtgcgatagcttcgttgatgtcgtactgtttggttgcatcaactttctcgcggataacacgcatgcgcttggtcagtttagccatttcttagtcctccactaccaggcccatggaacgtgcagtaccttcgatggagcgagtcatcgcttcaatgtcggcaccagtcatgtcggcagctttggtctgcgcgattt

SEQ ID NO: 2836 - DNA, 267 bp, Escherichia coli; identical to SEQ ID NO: 2293

SEQ ID NO: 2837 - DNA, 221 bp, Escherichia coli; identical to SEQ ID NO: 2131

SEQ ID NO: 2838 - DNA, 383 bp, Escherichia coli
caagaattagcgacgcagacccaggcgctcgatgagctgggtgtaacgtgctacgtctttacgtttcaggtagtcgagcagtttacgacgctgagaaaccatgcgcagcagaccacgacggctgtggtgatcttttttgtgctctgcaaagtggccctgcaggtggttgatctgtgcagtcagcagtgctacctgaacttcggtagaaccggtgtcgtttgcgtcacgaccaaactcagaaacgattttagctgttgcttcagtacttagagacattttaaaactccaaagtatatagaatgaaaggacgccgatctctaattcagcgatcccagtgtacgttacgcaaagtgttaaacaatttacgcgacgttaagcggcag

SEQ ID NO: 2839 - DNA, 433 bp, Escherichia coli
atttgatctttagtgatagacatttaaattgttcctgaatatcagaataagtttatacgtaagcgaatgcgttaaaaagataactgcgattaagcagcttctttcgcatcgcgtacagcagccagagtacgaaccagtttgccagccgaagcttctttcatggttgccatcaggcgtgcaattgcttcttcgtaggtcggcagagttgccaggcggtcgatctgagacgccgggatcagctcaccttcaaaggcagcggctttgacctcaaattttgcattcgctttcgcgaactctttgaacagacgagcagcagcgcccgggtgttccatagagtatgcaatcagggtcggaccaacaaacgcgtctttcaggcactcgaacggagtaccttcaacagcacggcgcagcagggtgttacgaacaacacgca

SEQ ID NO: 2840 - DNA, 386 bp, Escherichia coli
gaatggcagcaatattgcccggcgtacggcccagcatctgcttcgcgtcatgacctactgcagctacgcttttcggtgaaccggcacgatcctgacgaatggccaccacggaaggctcattcaatacgatgccttgtccttttacataaatgagggtattcgcagtacccaggtcaatggacaagtcattggaaaacatgccacgaaattttttcaacatactaagggataatcctgaaagctggggcggaaaagaaaatccgcttactttaccaaccacacgcagcagcgacaaggcgcaaaaatcatctgctacggtgaaaattagtgcagttcgtttcctttgttacaaatctctgcctgagtccagaaaggcttaatgcatc

SEQ ID NO: 2841 - DNA, 81 bp, Escherichia coli
tcggtgaaccggcacgatcctgacgaatggccaccacggaaggctcattcaatacgatgccttgtccttttacataaatga

SEQ ID NO: 2842 - DNA, 184 bp, Escherichia coli
ttctttcagagcagccggtgcagattctaccaggtctttagcttctttcagacccaggccagttgcgccacgtactgctttgataacagcaactttgttagcgccagcagctttcagaattacgtcgaattcagttttttcttcagcagcttcaaccgggccagcagctacagctacagcagca

SEQ ID NO: 2843 - DNA, 222 bp, Escherichia coli
ttatcaagcagaataacttgcattaccttatcctctcaaagtcgtattaatggaccgtgaccgattactgatggcgatcagtgtacggcagcagggacaggtagcgagcgcgtttgatagcgcgagccagctgacgctggtattttgcacgggtaccggtgatacggcttgggacaatcttaccgctttcggtgatgtagtttttcagcgtagcgatatctt

SEQ ID NO: 2844 - DNA, 150 bp, Escherichia coli
cgcagcgcctgcgattgtggcgtcatcgccagttcgccaaacgcccgagcttcggcgtcataaccgctgctggtgccctgcgctaatcccgtttcaacaacctccaggatgcgttctgtcgccggataattgccttgagttttgtgttct

SEQ ID NO: 2845 - DNA, 177 bp, Escherichia coli
ccggaaatttctccgccattgatcaggtcgagaatagagacattatcaataatataatcggcaacagcgtcgccacgggaaacggctaacaattcctggtattcagcccggctaatgtgatgaaatttatggttaatagaattattcatatttttctcattttgattttatcaattt

SEQ ID NO: 2846 - DNA, 21 bp, Escherichia coli
gacgagcagatggcataaaag

SEQ ID NO: 2847 - DNA, 86 bp, Escherichia coli
ttaacgtgcggttttgtacgttcaaacttttctttagacatcgattgtccctctaagacacggataaatcggtgatatcaccacat

SEQ ID NO: 2848 - DNA, 334 bp, Escherichia coli
ggaagcaaatgcacggatggtgttacctaccgtttcgaactcatccagacgcaggtcgaagcccgccgtgatgttaaccagcacgccgcgcgcgccagacaggtcgatatcttccagcagcggagaagagatagccatttcagcagcttcttccgcacggtcttcaccgctcgccacgccagaacccatcattgcgtagcccatctcagacattacggtgcgtacgtctgcaaagtccacgttcatcaaacccggacgagtaatcagttcagcgataccttgcacagcgcctttcagtacatcgttcgctgcgccaaacgcatccagcagggag

SEQ ID NO: 2849 - DNA, 303 bp, Escherichia coli
atagctttcattttcaccaggtcaacaacaccggtgaaatgttcttcagcaccaatcgccagctgcagcggaaccgggttcgcgcccagacgggttttgatctggttaacaactttcaggaagttcgcacccatgcggtccattttgttaacgaacgcaatgcgcggaactttatatttgtttgcctgacgccatacggtttcagactgcggctgaacaccaccaactgcgcagtaaaccattaccgcaccatcgagaacacgcatggaacgttctacttcgattgtgaagtcaacgtgcccc

SEQ ID NO: 2850 - DNA, 411 bp, Escherichia coli
aacagcagacgttcaccggtaccaaacagcatcggtccgaaatcacccgcgctgtttatcatatggcccaagccgctaatacccatggcgaaaatcggccagactaatggaatcaccaggccgacaaggcccatcaccagcgaggagataattggtacgaagcgcgtaccgccgaagaatgccagcgcatccggcaggcggatattatggaaacgctcatgcagcatccagacgataataccggcgatcaccgcaccgaggatcccggtatcgatcgactggatcccaagaatgctctggatgttattggctttcagaaccgcggcatccgtggttggcagaatgcctttattggtcaaccagaagtttaccgcgaggttcattaccgcataaccgatgaagccagcgaat

SEQ ID NO: 2851 - DNA, 351 bp, Escherichia coli; identical to SEQ ID NO: 2618

SEQ ID NO: 2852 - DNA, 203 bp, Escherichia coli
ggttggttatgcagaaaattgtcgggataataaccatagtttttcactccattcagttgtaataggctcatccagtgagcgagttgttgcgaagaaatagcctgatgctgaccatttttctgccagttttgtgcctgtaattctaaaatagatttgtctttagcctgagggatgtttttaatttgattggtcaattgtattaa

SEQ ID NO: 2853 - DNA, 118 bp, Escherichia coli
atcaacttccagccaggttggcttttcacgctgctcagccagctccagagcggctttcacgcgagactgcttcttcgctttctcacgaatgcttacaacgtcattcggactaacctga

SEQ ID NO: 2854 - DNA, 318 bp, Escherichia coli
aacgttgcctgcttttttcgctgctttaatagcaccggacttacgcatgttttcgattgccagctcgatgtcgccgttagcttcagtcagtgcttttttgcaatccatcatgcctgcgccagtacgctcacgcagctcttttaccagggatgcggtaatttcagccattctaaaatcctcggagatgtgatctgcccggcattaaaccgcacagatataaaagtgaaaaagggggccatatgcaggccccctaaccaaacgtgtactacctggtctataagggctctcccccttcatatttcgcgccgcagatgcgtt

SEQ ID NO: 2855 - DNA, 440 bp, Escherichia coli
taccttcaacacggtcgcccttgttgtgggtttccgcgaactgctgccacgggttagctttgcactgtttcagacccagggagatacgacgacgttcttcgtcgatatccagaaccataacttccactacatcgccaacgttaacaactttggacgggtggatgtttttgttggtccagtccatttcggaaacgtgtaccaggccttcaacgccttcttcgatttcaacgaagcagccgtagtcggtcaggttggtcacgcgaccagtcagtttggtaccttccggataacgtttagcgatagctacccacggatcttcgcccagctgtttcaggcccagggatacacgggtacgttcgcggtcgaacttcagcactttaacagtgatttcgtcgcccacgttgacgatttcgctcggatgcttaacgcgtttccaggcc

SEQ ID NO: 2856 - DNA, 337 bp, Escherichia coli
gcaccaatgcgacgtagcgtgagtttgggtttacccacgggctgtgcgggctgcatatctcccggcagcaggctgacgacttcctgaaaggcttgtgaaacggtattgccgataatcacctgacactggttgtcactacgtaccacgccgagcacgccggggatggtttttaacgtcgggctgtcgataagtgcatcatctttgataacaaagcgcaaccgcgtcatacagtgcgtgaccgccgagatgttatcaacgccgcccagtgccgctatcaccgagcgtgccagcgccgcataatttttggccatcggattttatcctgttatcagtaggg

SEQ ID NO: 2857 - DNA, 51 bp, Escherichia coli
cgggcttcaattacggcctgagcaacgttactcggcgcttcatcatacttc

SEQ ID NO: 2858 - DNA, 140 bp, Escherichia coli; identical to SEQ ID NO: 2446

SEQ ID NO: 2859 - DNA, 152 bp, Escherichia coli
tcacgcgagactgcttcttcgctttctcacgaatgcttacaacgtcattcggactaacctgataagaagcgatgttaacaacacgaccgtttaccataattgctttatggctaaccagctgacgtgcttctgcacgagtggcaccgaagccc

SEQ ID NO: 2860 - DNA, 164 bp, Escherichia coli
ccggttgcacccgggacagcacctttaaccagcagcaggttgcgctcagcgtcaacgcgtactacgtcaaggctctgaacggttacacgttcgttacccatctgacctgccattttcttgcctttgaacactttgcccggagtctggttctgaccgatagaacc

SEQ ID NO: 2861 - DNA, 202 bp, Escherichia coli
tgaatatcggaaatagtcagtgacgaacatcagtatttttacataattacgtctaggtcattgtcggtttatctccttttacttgtggtaattgagggataacaacaaaaaaggtgagttttgcgactcaccttttttatttgtttcttattcagaatcaatatcttttaaatcatcctgaatcgcttgtgcgttcggattt

SEQ ID NO: 2862 - DNA, 258 bp, Escherichia coli
acaacatgctgcctgtcctgtcgtgtgtggtgaattaccgcctcttgtctccctccggttacccgaagggagcgggctttctttcaccgatggcgattagccaccataaacatcaaaatcgaagtactttttcgctaatttctcgtaagtaccgtcagcgcgcatttcggcaaaggctttgttcagtgcttcgcgcagttcgttatcttctttacgcaggcccatgccggtccctacgccaaacagtttttcatcttt

SEQ ID NO: 2863 - DNA, 182 bp, Escherichia coli
ggatatgagccacgccgtcagagacttgttttcttacacgtttacgtgcacgaattggtgcctttgccattattcaatcaccccgattatttcttgatcggtttgcgcggacccttacgggtacgtgcgttggtcttggtacgctgaccgcgaaccgggagaccacgacgatgacgcaaacc

SEQ ID NO: 2864 - DNA, 456 bp, Escherichia coli
ggggtcttggtaacgaaagtgaaagaacggtcagcgtaaacggtgattactaccggaatcggcagacctttttcgatggaatcagtttttgcgttgaacgctttgcagaattccatgatgtttacgccctgctgacccagagccggacctactggcggactcgggttagccataccagctgcaacctgcagcttgacataggcttgtactttcttagccattataaattcctcaagttgggtaataacgcctctgagaggctccccgtgatataaaaaatcgttttacgggcaaggcccataaaaacaaaaggcgcgaaattgtattccaatctcacgccttgtgcaacgattaaatcgccgcttttttgatcgctgggttaggctttttcaacctggctgaagtccagctctaccggggtcgcacgaccgaagatagaaacagacactttcagac

SEQ ID NO: 2865 - DNA, 283 bp, Escherichia coli
ttattgatcacgacggcgtaaccgtgatggatagtaaagcggcggccaatggtcgcggcagcctggatttcataaccgaaaaagcattcggtgataatgcgatacagcaccagcagcggggccgcccacagattgttgaggacgttctttttgcgccacaccgaacaaaaatgagcaacacgataggcaagaaccatgcagcacgggcgtaaactccagctgttggcgcgcagatcttccagcatctttagcgcccccgaataccatcagccagacgtttgcc

SEQ ID NO: 2866 - DNA, 187 bp, Escherichia coli
gaaatgttccgtagcaagaatatcggcatacacaccctgatgcgcacggtgaaatgcaccaaagcctaaatgaacaattcttggagccaggttattaagatcataaacagggagtgtcgcttttgctgataacaaattatttcccataacaattccttaaatataaatatggcaagctatatgtttt

SEQ ID NO: 2867 - DNA, 314 bp, Escherichia coli
tgcgtgttattttaaccagatttcaagttgtttggtcgtggaaaagtggagcaaaatgttgttaaagtggaaaaatgataaaaaagtaagtttattatattacattttaccatttaaattttggttgtctttaagaactgatatcgctgtttgtaataattctttgttatccagccatgattttttctttatgtttccttcaatgtaatcaagcaatgttctggtattgataggtcttccctgttttgctacttccactacagcatcccctaggataattcttacttcaggaagctgcgcagggaaccacttta

SEQ ID NO: 2868 - DNA, 250 bp, Escherichia coli
ccatgttcatcactggtctttccgaaaggctgtaagaaataacttcgttgttgaagagatctattactggagacaaatacagcttgcgcccattgactgcaaattcagtaacatcggtaacccacttctcgtttggccgcgtagccttgaaatctctttggagaacattaggggcggtttgccctacctctcctctgtaagagcggtatcgcttgaccttaatcgctgctttaagtgagagggttcccat

SEQ ID NO: 2869 - DNA, 359 bp, Escherichia coli
gttctgataacccgagtttttcaggatatctcccagacagatgttctgcgggaagaagctggagacagaggcggaggcgttgccttcaaagggggcaaacagcggtatgccgcactgagaagccaccatgcccgcaatcgtgtaatctgttcccggcagctgctgcgtgtggctgaaatccaggccttcatttttcaacgcgcccagttcaggcgtgagatccgggaaagcctcgttatcaaaataggtccgctcgagactttcgccgtagatataaaccaggttgagtttcgggtcagggatagttttcgacggctctttataataagccgcaaagtccgggtcgccgtcgcgtgact

SEQ ID NO: 2870 - DNA, 211 bp, Escherichia coli
  misc_feature (119)..(119): n=g, a, t or c
gttatggacatatggagcgtcttcggtgcgcagagttaacagaatcacccgctcatgcaataccttgttatgtttaaggttatgcatcagcgcaaagggaatgacgttgattgcacgcngacatatacaccgcggtcccgggcacgcgaacaggcggtgatttctccagcgaagcaatcatcgcttccagagagttaccatgttcatgcat

SEQ ID NO: 2871 - DNA, 346 bp, Escherichia coli
atgcccgggcgcgatttacgcaccagtgagaaccaggcgacgataatcgtcggtgagaggaattgcagcaccgttgccgtggctgcgttcgatttttcgatggttagcaaaaaagtgagctgtacagttagcgcgccaaccacggaaaaaatcagcaggctaatggcatctttatgattgttaataatagaaaagattttatcgccatgaacaaatgacagcgtcagtagaatcaaaccggcgaatatcaaacgcgtcatagtcaaaaactgcgacgacatctggctttgctccatgatgtattgcgcgcagacccctgaacttccccacaacacggcggcaatca

SEQ ID NO: 2872 - DNA, 211 bp, Escherichia coli
cctttcgtgtgcggagttaacgtcgagagcagcaactggctaccgacatccagaccgtcgcggctaaacacgccaggcagcgttttgaccgtcaggccatcgacgctgtattcgccccagaatttctccgcatcaaataccggctgtttttccagacgaccaaaatagaggccacagcgacgagcgctgtcgactttattcaacggcgcat

SEQ ID NO: 2873 - DNA, 367 bp, Escherichia coli
aaaaataatgtcctgcttacgcatacgagccaggttttccagccccatattttcgccgagagtgatcagctcagaaaccggcgtattctttaattcggtaagattcatagtggtgtgagttcttaaacttggggtaaatctcgaacttaatgttgtgaatggtatggcaggatcatccatgcctgtttacggtcatcgactcattgtcttttcgctgcctggtcacaggagagtacgcagaactgaaacgacaagacggattgagtgacgagccagaaatctgttcacttcgcatttaagataaaacgggaagcgttggaaattacaagattcaaacttaataaggtatgtttaatacgaagtcaac

SEQ ID NO: 2874 - DNA, 134 bp, Escherichia coli
gtttgaatctggttgccccaggtgtcgaacaacatgcgttcatagggggctaaatcgtcccgctcgtggagattgatcagcagcatctctttacttttgaacacgcgttcggtgagggttccggcttcatcgac

SEQ ID NO: 2875 - DNA, 370 bp, Escherichia coli
cgggcggagagggttaacgtcgcttaatattgcgtaggagctggaactgccgaagacggattcacctgagttggtgaagtcgaaggtacggtagtcgttgcgccaccgctggcctgaaccggcacggcggtttgctgtaccggcaccaatgtcaggtcggctttagttccgccctggttgatcaccggctgaacggtatcggtgataaataccagtttgtcattcacggtaatcgccgcactcaacagaatacgcgcgttcggctgaacatctgccgggttaaatgacagaacaaagctgaatggtgactgtttaccttcagtacgcaccgctttctgcgccagcacttttgacggtgcatcggctaacg

SEQ ID NO: 2876 - DNA, 167 bp, Escherichia coli; identical to SEQ ID NO: 1869

SEQ ID NO: 2877 - DNA, 241 bp, Escherichia coli
aatgaattgtgcccatttgtaggcctgataagcgtagcgccatcaggcatttacaacttaaatcacaccctgcgccagcatcgcatcggcaaccttcacaaaaccggcaatgttcgcgccctgcacgtagttggtttgctcaccttcaccaccatgctcaacacaggcatggtggatatccagcatgatgtgatgcaaacgtgcgtcaactttctcggctttccagcccaggcgcgcagcg

SEQ ID NO: 2878 - DNA, 176 bp, Escherichia coli
cgggatgttcagataactttttactgacggagcagggccaatacagaccgtttcatctgccagtaatacgtgttttagatcgcgatccgcgctggagtgcacagcgacagtcttgatgcccagttctttacaggcacgaagaatacgcaatgcaatctcgccgcggttggcaataa

SEQ ID NO: 2879 - DNA, 228 bp, Escherichia coli
tctccttcacgctcgaagccgtcagcggcctgttaacgcaatattacggggaggtaaagccccgtatcatcgccataactcttaaatcataaaggagagcattttttgctaaacgttatcgtggggtggctgttgcttcggacgattgaccatcatcatcggcttacctgctaataacagccatgccggaagcatgacgatacagagcagcggtagcaatgtggtatt

SEQ ID NO: 2880 - DNA, 356 bp, Escherichia coli
tgtgtttgcaattggtctgcgattcagaccatggtagcaaagctaccttttttcacttcctgtacatttaccctgtctgtccatagtgattaatgtagcaccgcctaattgcggtgcttttttttaccttgcgatcgcgaattactgatccagttcgaccatctctttcacgtcagtacggttgatctgctgtttgttgccattagcgtctttatacgaaatcataccggtatcgttatcagtctgtggtttgccgtcagagacgatggtacgtccgtcattggtgtgcatcacatagttcgaaccggaacaggcgctcagggcaaaagtcagcatacaggcagaaataattgcgg

SEQ ID NO: 2881 - DNA, 237 bp, Escherichia coli
tgggtcgttatggggtaccagggagctgctggcaactacctgatgtcccttactatggaaaaagtcgagaaacgcctgacggatctcagcaggtgctcttgctcataattatcctgaaatcaagctaacgaaatatcgccaccagctccagcgtgtcttaaccgccgggctggtaacctgaaaagtgggaataagataagtttttttgactgggaagtaaaataccgtatgcgttca

SEQ ID NO: 2882 - DNA, 136 bp, Escherichia coli
catttggcatgtagcgtacttccgggtcctgacccagattaccaacgagaataaccttgtttacgcctctgctggccatgttcgtgtctcctgaaaaaaatcgttctgaataagtgtaaacgcgcgattgtaccat

SEQ ID NO: 2883 - DNA, 150 bp, Escherichia coli
acgtttggagaactgcggacgacgacgtgctttacgcagaccgactttcttacgttcaacctgacgagcgtcacgagtaacgaagccagctttacgcagttcagaacgcagggacctcgtcgtattccatcagagcgcgggtgataccgt

SEQ ID NO: 2884 - DNA, 269 bp, Escherichia coli
gcaacactattttgttgaccggaaaatggaacactttccgcaatgcctgttgctatcacgcttaaaccatttcattgcgatttacacagaacggacgtcctgtcgcagtatattaagtcgtcgatagaaacaagcattgaaaggcacagcagtagtcaaacagtgtgaaacgctactggcgccttacagcgcaaaaaggctggtgactaaaaagtcaccagccatcagcctgatttctcaggctgcaaccggaagggttggcttattta

SEQ ID NO: 2885 - DNA, 163 bp, Escherichia coli
ttgtggttgcatggcacgagtataaataacggctgccaccgcattcgccgtgtcatgaaaaccattgattgcttcgtagaacaacacaaatgccagagcaagcaataacaaaagccctgtgtatatatcaaggccaacaaataaatttagcatatattagatt

SEQ ID NO: 2886 - DNA, 349 bp, Escherichia coli
gcttttgtgcaacagtgagtcagaacttacatctgactcactgatagtaaagtctgtttgaactcttcaggccttaagtaaacgactcgacgtttatcggcctggctttgaggcgcaacatactacactatctttatggttaaagcttgtttcgattaacatcagcttaattaccagccaccaccgcctccgccacccgcgccgccgccagcaccaccaccggaataacttcgccccaacaaactggtattggccccgcaacttaggtgcgtctgtaatgagaataaaacgccgttacgggcaatctctggagcgcgaatcgccgaagaaagcgaaggggcaatgcgta

SEQ ID NO: 2887 - DNA, 118 bp, Escherichia coli
aggacccgcgagccaggcgacagtggcggcgccataatttttccaacgcttccgagagagcacaggttatcagaggtcggcaaccccttttttcgccaccaccacgaaatccatagcc

SEQ ID NO: 2888 - DNA, 277 bp, Escherichia coli
ttacctaccggcacttcatctgcaggcaggttagggatggtcagcgcgatatcgcgaatttcagcctgtaaagcatccagctcggcttttgctgcatccagctcttcgcccagtttgttcacttccagacgtaaaggctcgatatcttccccgcgcgctttcgcctggccaatggatttcgatcgggagttacgctccgcttgcaggttttccgttttgacctgcaatactttacgacgctcttcaagagcgcccagcttatctacatccagcttaa

SEQ ID NO: 2889 - DNA, 184 bp, Escherichia coli
ttaatctcttatcctgggtaaactgatatctcgggggcttacgccatcccatcatgtttatgttgctgttgtgcgtgttccgttttgaactccgccagcaaccttgcttgctcttcagtcagagccaggttttccagaagttcaggtcttctaagccaggtacggcccagcgactgtttcaaac

SEQ ID NO: 2890 - DNA, 268 bp, Escherichia coli
  misc_feature (243)..(243): n=g, a, t or c
  misc_feature (188)..(188): n=g, a, t or c
cgctgaaacaataatgcggcgcgaatccgggtcgtttttcagctggttcagtaccgtagtgatctggtcaatatgacgaccatctggcgttggccaggcgcgccactgtttaccatacactggcccgaggtcgccgttttcatcggcccattcgtcccagatggtgacattgttttcgtgtagataancaatgttagtgtcgccctgcagaaaccacagcagttcatggatgatggaacgcangtggcaacgtttagttgtcaccagc

SEQ ID NO: 2891 - DNA, 177 bp, Escherichia coli
aaccccaggcaataaaagcaccaatattggggatgaccattgcagtcaaaaagcccccaaaagcctggacctttgcacgagcagacttgttttccataatattatcctgtagaggagagagtaattatccgcggctgataatgtccgctaattgtttttctgatgatgctgttaaga

SEQ ID NO: 2892 - DNA, 489 bp, Escherichia coli
gcctgtgcctgattttgttgctgagtagattcctctggcggcaagggcgcccagcctactgccgctccagagtcataacgcaaatcaacgtagctaatccgtttgccatcggtttgcgcctgctgctgtaaaaccggataaagttctacaaagcgagccaaacgtttcatcgtatcgccccggccaagattgagcttaatatcgttattcagcgtcaactgccaggaacgccgcgcggtcatcgccgcttccttcagagtaaatctgtcctttgccagcatctgccccatttcgcgatagccctgcaacacttcattggcgctgccttccgggccatacagcattggaagcacctgcttgctggtgcgttctggcggcacgctgaaggtattttcttccgccgtctaccatatgttgatcattccacccgcgccaatcggcacatatttcaaccagatgaatcttcaattccatcaggccactgctttt

SEQ ID NO: 2893 - DNA, 371 bp, Escherichia coli
tttggaaccttcaacaacccatactttcacttccacggtatcacccggacggaaggaaggtacgtcctgcttcatctgctcttgttcaagttgcttaataatgttgctcataatttaatctcttatcctgggtaaactgatatctcgggggcttacgccatcccatcatgtttatgttgctgttgtgcgtgttccgttttgaactccgccagcaaccttgcttgctcttcagtcagagccaggttttccagaagttcaggtcttctaagccaggtacggcccagcgactgtttcaaacgccagcgacgtatctcggcatggttgcccgacagtaacactggcggaacttccatcccttctaacacctcagg

SEQ ID NO: 2894 - DNA, 73 bp, Escherichia coli
taccagcctttaacagctccgccgttaaacactttgtttgctgcttcgtaaacttcgtcagactgataagcct

SEQ ID NO: 2895 - DNA, 381 bp, Escherichia coli
cacgcttaaaccatttcattgcgatttacacagaacggacgtcctgtcgcagtatattaagtcgtcgatagaaacaagcattgaaaggcacagcagtagtcaaacagtgtgaaacgctactggcgccttacagcgcaaaaaggctggtgactaaaaagtcaccagccatcagcctgatttctcaggctgcaacccggaagggttggcttatttaacttcaacttcagcgccagctttctttcagagcttttttcagtgcttctgcgtcgtctttgctcacgccttctttcagagcagcccgtgcagattctaccaagtctttaacttctttcagacccaagccagttgcgccacgtactgctttgataacagcaactttgt

SEQ ID NO: 2896 - DNA, 115 bp, Escherichia coli
attaacgtttggagaactgcggacgacgacgtgctttacgcagaccgactttcttacgttcaacctgacgagcgtcacgagtaacgaagccagctttacgcagttcagaacgcag

SEQ ID NO: 2897 - DNA, 520 bp, Escherichia coli
gttgtagtcgatgtcagcacgcagagtgtgcagcggtacgcgaccttcgcggtaccattcggtacgtgcgatttccgcgccgcccagacggccgctaacttcaactttaatacctttagcgcccagacgcattgcgttctgtacagcacgcttcatagcacgacggaacataacgcgacgttccagctgagaagtgatgctgtcagcaaccagttttgcgtccagttcaggcttacgaacttcggcgatgttgatctgtgcaggaacgccagcgatgtccgctacgaccttacgcagtttttctacgtcttcaccttttttaccgataacgatacccgggcgagcagtgtgaatggttacacggatgctcttagccggacgctcgataacgatacgagatacggacgctttagccagttccttagtcaggtactgacgtactttaaaatcgctgtccaggttgtcagcgaattctttggtgttcgcaaaccaggtagagttccatggttttacaataccc

SEQ ID NO: 2898 - DNA, 86 bp, Escherichia coli
tgttcgcactcttgctccagatccatgctcttcagcagagcctggattgcttccgcccccatcttcgcgtcgaattcgtcaccgaa

SEQ ID NO: 2899 - DNA, 311 bp, Escherichia coli
catttcccgatggctggtcgggataacaaaacgatcttcatagttggcaatggcgagatagcgatacatctcttcgacctgggcgacgctcaggcctacttcgtcgatggcacgagtatcagtaacgccttccacggtttgtgaacgcatatagtggcgcatcgccatcatccgtttcagcgcccgcagtaccggaccggtatcgccggcactcaacatattggcgagatattgcaccggaatacgcaggctttcgatggcgggcagcacgccttcgcttttcggcaaaccgcccgcatctgcgtaggact

SEQ ID NO: 2900 - DNA, 223 bp, Escherichia coli
ttcacgcgggttgaaaaccaacgccgtgtagaagaaacagaagaagatgattgcagacgcatagagtaacacataaagcggttgcccaggctgcaaatacagcgaaattgttgtcagccagttccaaccagtaccgcccccgaaccatgacgcgatggtcgccgggaacagaataatactggaagcgaagattgccgggattacccccgccatattcactttc

SEQ ID NO: 2901 - DNA, 286 bp, Escherichia coli
caggaaggtgttcggatcttcggcgttgatacgacattccaccgcatggccgcgaacgtgaacttcttcttgcttgatcgacagcggttgaccggcagcgatacgcagctgttctttgatcaggtcaacgccggtgatcatttctgtaaccgggtgttctacctgaatacgggtgttcatttcgatgaaatagaactcgccgttttcgaacaggaactcgaaagtacctgcaccgcgatagccgatatcaacacacgctttagcgcaacgttcgccgatgtagcga

SEQ ID NO: 2902 - DNA, 289 bp, Escherichia coli
ggctacacggccctggagtacgtcggctacaggcacaacgctcataatattctctctgttaatagtcggaaaaaataaacacttgtccacccgtaaatggggggatacctatgttacctggcatctgcaatcagacaagcagaattcgcaaatgcagcgaaagatttcggaattaaaggtaaaaaaagggagccgattagctccctgatgatattaactggcttttttaatatgcggaaggtcgaacgctttgcgcagcgcccgaacaaacgctttatcatggcagata

SEQ ID NO: 2903 - DNA, 328 bp, Escherichia coli
ttcagcaacttctgcttctgcctcggagatgatttcgtgtttcttctccgggatgaccatgtcatcgataccaacagatgcaccagaacgcgctgcataggcgaagccggtgtacatgatctggtccgcaaaaataacggtcggtttcagaccgagaatgcggtagcaggtgttcagcattttggagattgcttttttacccagcgcctggttgacgatggagtaaggcagacctttcggtacaatcatccacagaatggcacggccaacagtcgtgtctttcaggctggttttcgctactaattcaccgttagcatctttttcatac

SEQ ID NO: 2904 - DNA, 407 bp, Escherichia coli
aaaagagagaatcgtctgctctatttccgctacatccccggcagaaaattgcagcgccctgatttcatcttcggttattgccgggtcccggctggtgtcatccataacatttcctgtctttacgccctatcgtcaggtagacgatagggcatcgggttattccaccgcccactgcggattttttgccactctgctgcaatagttctggtaaatcgccatcgctaacagcgagaagaagacagggccgccaatcatccacaatgtgctgtcccagtctccggcttcaaccacaggttgaatgatggtgaagacgttcgcaaatgtcaccaccagtacgacaaccactgtcgcaatcattgccgacaaatgcgttttgaaaatcacaaacggtctgtcgagatcctgac

SEQ ID NO: 2905 - DNA, 77 bp, Escherichia coli
tctggcaggccaccggtcaacgtccagctcccttgtgtccagctataggcttctgcggtggtcacttcttttgccag

SEQ ID NO: 2906 - DNA, 166 bp, Escherichia coli
catagatacggcgaactttttgcttttcacgcaactgcacaccatagtcagacagacgcggtttacgcgcaccgtgctggccaggagcttgttcaattttacacttggtatcgatcgcgcgaacgccagacttaaggaataagtcggtgccctcacgacggctcag

SEQ ID NO: 2907 - DNA, 166 bp, Escherichia coli; identical to SEQ ID NO: 2906

SEQ ID NO: 2908 - DNA, 166 bp, Escherichia coli; identical to SEQ ID NO: 2906

SEQ ID NO: 2909 - DNA, 343 bp, Escherichia coli
gtagattttttaccatctaccatcaggatatttacaaatttagccagcagttctgatccgaacttcggatccggcagaattttacgctgaccaatgacgcgacgacgtggcatggaaatactccgttgttaattcaggattgtccaaaactctacgagtttagtttgacatttaagttaaaacgtttggccttacttaacggagaaccattaagccttaggacgcttcacgccatacttggaacgagcctgcttacggtctttaacgccggagcagtcaagcgcaccacgtacggtgtggtaacgaacacccgggaggtctttaacacgaccgccacggatca

SEQ ID NO: 2910 - DNA, 422 bp, Escherichia coli
agttcgagttcgttcattgcagcaatgctgaaaccgccgtcaacgtggaccacttcaccggagataccggcagagagatcggagcacaggaatgccgcagagttacccacatcttcaatagtaacggtacggcgaatcggggtaacggcttcgcaatgagccagcattttgcggaagtctttgataccggaggccgccagagtacggatcggaccagcagagatggcgttaacacgcacaccttccggacccatcgcgttcgccatatagcgcacgttcgcttccagagacgcttttgccagacccataacgttgtagttcgggatagcgcgctcagcgccaaggtaggaaagggtcagcagggcagaacccggattcagcatggagcggcaagcttttgccattgcaacgaagctgtagga

SEQ ID NO: 2911 - DNA, 92 bp, Escherichia coli
ggttagtttaagttcacttctctgaccggagttactgaaccataatcattaacggtctgaaatttcagctttccctgcactcctgagggtaa

SEQ ID NO: 2912 - DNA, 204 bp, Escherichia coli
taacatcttcagcgatacccgctgcagccaggatggctttagaacgggtcttgccgacgccataaatcgaagttaatgcgattacggcatgcttatgatcaggaatgttaatgcctgctatacgggccactatgcactcctactatttaatatgtacgttccatgctgaaaagcccgttttcaggatactcaaatggaaacgca

SEQ ID NO: 2913 - DNA, 83 bp, Escherichia coli
cgcctggcgctcttcttctgcgctgtgtttaccatctgccaatagcaactgccgccctttctcttccgccattcgcgcggcat

SEQ ID NO: 2914 - DNA, 257 bp, Escherichia coli; identical to SEQ ID NO: 1865

SEQ ID NO: 2915 - DNA, 350 bp, Escherichia coli
tagcgcccagacgcattgcgttctgtacagcacgcttcatagcacgacggaacataacgcgacgttccagctgagaagtgatgctgtcagcaaccagttttgcgtccagttcaggcttacgaacttcggcgatgttgatctgtgcaggaacgccagcgatgtccgctacgaccttacgcagtttttctacgtcttcaccttttttaccgataacgatacccgggcgagcagtgtgaatggttacacggatgctcttagccggacgctcgataacgatacgagatacggacgctttagccagttccttagtcaggtactgacgtactttaaaatcgctgtccaggttgtca

SEQ ID NO: 2916 - DNA, 342 bp, Escherichia coli
tccagcgggtacatgtcgataacaacatgaccatactgaccacgaccaccagactgtttcgcgtgtttaccttcaacatcggtaactttctggcggatagtttcacggtaagcaacctgcggtttacctacgttcgcttcaacgttgaattcacgcttcatacggtcaacgatgatgtcgaggtgcagttcgcccatacccgcgatgatggtctggttagattcttcgtcagtccatacacggaaagacgggtcttctttagccagacggcccagagccagacccattttttcctggtcagctttggttttcggttcaactgcgatggagattaccggctca

SEQ ID NO: 2917 - DNA, 174 bp, Escherichia coli
cctctaccttagaactgaaggccagcttcacgggcagcatctgccagtgcctggacacgaccatgatattggaacccggaacggtcaaaggatacatctttgatgcctttttccagagcgcgttcagcgacagctttacccacagctgcagccgcgtctttgttaccggtgtac

SEQ ID NO: 2918 - DNA, 246 bp, Escherichia coli
cttaaacagtcgaaatttaacgcattgttgagtaagtaagacaaaaaaagccccaccagaatggcggggcaaagagaatagcctagttagctatttaacgcgggacgttcgctgatagcgatacgctgcgctgcgatgggttcaggctcattacgaattaaatcaatatgcagtaaaccgtttacgaaggttgcgccagagacttccatattttcagccagcgtaaagctcaggctaaatggctga

SEQ ID NO: 2919 - DNA, 467 bp, Escherichia coli
tcgctaacaacgcgaccttgcagagtacggattttatcggtcattacgcacccgccttctcgttcagtaaagtcttaacgcgtgcgacatcgcgacgcacttgcttcaacaggtgagactgttgcagctggccacttgcagcctgcatacgcaggttgaactgctcacgcagcaggttcagcagctcggtgttcagctcttcaacgctcttctcacgcagctcttttgctttcattacatcaccgtcttagttacaaaggtggttttaatcggcagtttcgctgctgccagcttgaatgcttcacgggccagctcttccggaacaccgtccatttcatacaggactttacccggctgaatcaaggcaacccaatactccacgttacctttacctttacccatacgcactgccagcggcttttcagtgatcggtttgtccgggaacacacggatccagatcttacctt

SEQ ID NO: 2920 - DNA, 152 bp, Escherichia coli; identical to SEQ ID NO: 2859

SEQ ID NO: 2921 - DNA, 102 bp, Escherichia coli; identical to SEQ ID NO: 1714

SEQ ID NO: 2922 - DNA, 625 bp, Escherichia coli
  misc_feature (556)..(556): n=g, a, t or c
  misc_feature (589)..(589): n=g, a, t or c
agtgaatttcgtcagttacaacaccgtcggtcactttacgatacggagtctcaaggaagccgtattcgttagtctgtgcgtacacggacagagagttgatcagaccgatgttcggaccttcaggggtttcgattggacatacgcgaccgtagtgagtcgggtgtacgtctcgaacttcgaagcctgcacgttcacgggtcagaccgcctgggccgagtgcggagatacgacgtttgtgcgtaatctcagacagcgggttgttctggtccataaactgagacagctggctggaaccgaagaactctttcactgctgcggaaatcggcttggcgttgatcatatcctgtggcatcagggtatccagatcgcccagagacagacgctctttcaccgcacgctctacacgtaccaggccaacgcggaactggttttccgccatttcgccaacggaacggatacgacggttgccgaggtggtcgatatcatcgacttcgcctttaccgttacggatatcgatgagctttttcataacatcaatgatgtcgtctttgctcangataccggaaccttcgatttcttcgcgcagcanagaacggttgaacttcatacgaccaaccgcagacaa

SEQ ID NO: 2923 - DNA, 233 bp, Escherichia coli
tagaagtgaccagtaccagcagaagaaaccagcttgattttctcacgaatacctttagccatgatttatttcctctaagtacttagtacttttcgccacgggcacgcagttcagccagaactgtatcgatgccttttttatcgattacacgcatacctttagcagatacgcgcagggtgacaaaacgcttctcgctctcaacccagaaacggtgagagtgcaggttcggcagg

SEQ ID NO: 2924 - DNA, 136 bp, Escherichia coli
ggtgatcaatgcaacgaggaatttggcgaagatctggaagccgttgatcattttttccgggatgaatttcagccccagcgccaccagaatcgcaacaatgatcaccgggatcatgttcatcaggatcagggcgaaa

SEQ ID NO: 2925 - DNA, 245 bp, Escherichia coli
cttacgcgccgcaaggtttggcgttggataaccgatagtttcagcaacctgttttgccacatccgggcgcagcaggaagttgatcaatttcagcgcgccttctttgtttttggcatttgccgggatcgccaggctgtccatccagaaaatgccgccttctttcggccacaccacgtcaattggcgtacccgcctggcgtgcaacgaaagcagaaccgttccagatcatgccgaggttaacttcgc

SEQ ID NO: 2926 - DNA, 522 bp, Escherichia coli
ggtagccaactgctctgcgtcgatatcttccttgacctgttgatgccaggttgtttcatcccacagctcaaacttgttgaactgtccaaccagcatcacttcttttgtcagcccggcatgttgccgcagtactggcgcgattaacaatcgacctgcgccatccatctgacattcgctggcatgacctaacagtaggcgctgcacacggcgctcaaccgggttcatgctcgacagacgcgataatttttgctcgataatttcccattcaggcagggggtaaagcagcaggcacgggtgataaatgtcaatggtgcaaaccatttgaccggcagcgttctcaagcagctgttcccgataacgggtaggcactgataagcgccctttgctgtcgagattgactaacgttgctccccggaacatgccagcctcaccccttattcccactttgccccacaatttcccactgaaaggagtttacggagctgaggaaaagcttgtcaagccagtcacaaggcataccga

SEQ ID NO: 2927 - DNA, 412 bp, Escherichia coli
tccgatagtatgtcacagaaatgtgaaacaaaagtgtaaggcgaagatcggatgatcttcgccaggctatcaagcgcgttgactgtctttcatcaacaaagcggtcattgcggaaatcaggcatccagccagcaaataaatggcgacgctatgccagttcccggcaaagtaagtgatgagtgcagcggcaataaaaggtgtaaatccaccgccaaccacactggcaacctgataaccgactccagcgccactatagcgataactggcaccaaacatttcggtaaacatcggttgttgcacacacaccaccatgtcatgcgcaatgtttgccagcattatggagaagaaaactatccagaaaatagattgtgcttcaagcgccataaagaaaggaaatgcgctcaacgttccg

SEQ ID NO: 2928 - DNA, 115 bp, Escherichia coli
ataaccggagtctctccggcgacaatttactggtggttaacaaccttcagagcagcaagtaagcccgaatgccgccctttgggcggcatattttagattatccgattctgtttaa

SEQ ID NO: 2929 - DNA, 434 bp, Escherichia coli
gtagcgttcgcccgcagttaccagaccagactggaactgctcctgaatttcagcaacttctgcttctgcctcggagatgatttcgtgtttcttctccgggatgaccatgtcatcgataccaacagatgcaccagaacgcgctgcataggcgaagccggtgtacatgatctggtccgcaaaaataacggtcggtttcagaccgagaatgcggtagcaggtgttcagcattttggagattgcttttttacccagcgcctggttgacgatggagtaaggcagacctttcggtacaatcatccacagaatggcacggccaacagtcgtgtctttcaggctggttttcgctactaattcaccgttagcatctttttcatactcggtgatacgcactttaacgcgcgcatgcagagaagccagaccagagcgatacagac

SEQ ID NO: 2930 - DNA, 22 bp, Escherichia coli
cgtgtcatcgactgcacctcca

SEQ ID NO: 2931 - DNA, 202 bp, Escherichia coli
atcagaaatagttgcgccctggccaacccagtgagcgatgcgatccagatccaggcgagtgccttcttctttttcgctagcgattgggttgaagaaaccaacgcgctcgatgaagcgaccgttgcgtgcattacggctgtcagcgacaacaacctggtagaacggacgctttttagcgccgtgacgtgctaaacgaatagtt

SEQ ID NO: 2932 - DNA, 167 bp, Escherichia coli
ttaccgctggagttcacaaccgacttcacagttgctgagcttgatgctacctttgtttttcacttggatgctggattcagcagccgcacgagatgccgcaccaccgatgtggaacgtacgcatggtcagctgtgtaccctgttcaccgatggactgtgccgcgataa

SEQ ID NO: 2933 - DNA, 260 bp, Escherichia coli
cttacacgtttacgtgcacgaattggtgcctttgccattattcaatcaccccgattatttcttgatcggtttgcgcggacccttacgggtacagtgcagttggtcttggtacgcgtgaccgcgaaccgggagaccacgacgatgacgcaaaccgcgatagcaaccaagatccatcaggcgcttgatgctcatgctgatttcacggcgcagatcaccttcaacgacaaatttggcaacttcgtcacgcagcgtgtcgattt

SEQ ID NO: 2934 - DNA, 192 bp, Escherichia coli
tgttctacctgaatacgggtgttcatttcgatgaaatagaactcgccgttttcgaacaggaactcgaaagtacctgcaccgcgatagccgatatcaacacacgctttagcgcaacgttcgccgatgtagcgacgcagttccggggtaatgcccggtgctggcgcttcttcgaccactttctggtggcggcgt

SEQ ID NO: 2935 - DNA, 154 bp, Escherichia coli
aacggaacggccagtaccgtgcggcagtacagttgcaccacgtacgttctggtcagatttacgagcgtcgatgccgaggttaacagctacgtccacgcctttctacgaatttagcagtcgccagctctttcagcagtgcgatagcttcgttgat

SEQ ID NO: 2936 - DNA, 217 bp, Escherichia coli
atgaagtgctggagcattttttcagtcacgaagaagtcggcgataacgccgtctttcattgggcgaatggcagcaatattgcccggcgtacggcccagcatctgcttcgcgtcatgacctactgcagctacgcttttcggtgaaccggcacgatcctgacgaatggccaccacggaaggctcattcaatacgatgccttgtccttttacataaatga

SEQ ID NO: 2937 - DNA, 368 bp, Escherichia coli
gaagaacgagcatggcgatgtttagcgatagtttccatctcttcctcctaccttatttcttcttcgcttttttatcagcagcgtggccgcgataagtacgagtcggtgcgaattcacccagtttgtgaccaaccatttcgtcggttacaaataccggaacgtgctgacgaccattatggacagcgatggtcaaaccgatcatgttaggaaagatcgttgaacgacgggaccaagtgcgcaggggcttcttgtctccgctttccaccgctttctctaccttcttcagcaagtgcaggtcaataaaaggacctttcttgagagaacgtggcatggcttatcctctaaaattatttgctacggcgacgtac

SEQ ID NO: 2938 - DNA, 106 bp, Escherichia coli
tgcgcgatttcctgcagctgagcgcgggaaattttacccactttgtctttgttcggcttaccggaaccagacttgataccagccgcttttttcagcagaactgctg

SEQ ID NO: 2939 - DNA, 422 bp, Escherichia coli
tgacccagagccggacctactggcggactcgggttagccataccagctgcaacctgcagcttgacataggcttgtactttcttagccattataaattcctcaagttgggtaataacgcctctgagaggctccccgtgatataaaaaatcgttttacgggcaaggcccataaaaacaaaaggcgcgaaattgtattccaatctcacgccttgtgcaacgattaaatcgccgcttttttgatcgctgggttaggctttttcaacctggctgaagtccagctctaccggggtcgcacgaccgaagatagaaacagacactttcagacgagatttctcgtaatccacttcttcaacaacaccgttgaagtcagcgaacggaccatcattaacacggaccatttcacccggttcaaacagcgttttc

SEQ ID NO: 2940 - DNA, 108 bp, Escherichia coli
atgttatcggcaattagctcagaacttttgctacaacgcccgcgccaacggtacggccgccttcacggattgcgaaacgcagaccgtcgtccatcgcgatcgggtgga

SEQ ID NO: 2941 - DNA, 396 bp, Escherichia coli
ccatacagcctgcgatggcaccaaatttcggcgatttgaacacgtcacgaacttccgccagaccgataatctgctgtttcagttccggagacagcataccgctcatcgccgctttcacttcgtcaatcaggttatagatgacggagtagtaacgcagatccaggctttccgcttcaatcactttacgtgcagaggcatcagcacgtacgttaaagccaaccaggatggcgttggacgccgcagccagggtggcgtcggtttcggtgataccacctacgccagaaccgatgatcttcactttaacttcgtcagtagacagtttcagcaaggagtcggagatcgcttcgacagaaccctgtacgtctgccttcaggacgatattcacttcgtgaactt

SEQ ID NO: 2942 - DNA, 82 bp, Escherichia coli
cgctcgacgacgtggaatagagatcactaatttcaaaagcaccaggcgatacataagtttggtaaatggtgtaaccattttg

SEQ ID NO: 2943 - DNA, 486 bp, Escherichia coli
ggtttttcatatacgcgatgttgtcgtacgtccacggtgccggagcggtgttgtttttcaccgccgcgccttccgcaggcagaccaaacgcgtcccagccgatcggctgcaggacgtttttgcccagcatacgctggtagcgggcgatcacgtcaccgatggtgtagttacgtacgtggcccatgtgtagtcgaccagaaggatagggaagcatagacaggcagtaatacttctctttgctctcgtcttcggttacttcaaatgtgcgcttctcatcccaatgaagctgtactttggattctatctcttccgggcggtattgctcttgcatggcagccagtggtcctgttttcaatacggctacaaatgtagcgttgaggtggtttttcagatccgcatagcatagcccaaacgtccgcgtcaaaacagcctttcgcgcactcgacgttgaaatgatgcccggattattcatacattaatttacag

SEQ ID NO: 2944 - DNA, 58 bp, Escherichia coli
gttgcataacgtctccgtgaatcactggtcgttcacaccccctctgcatcatgcagag

SEQ ID NO: 2945 - DNA, 278 bp, Escherichia coli
gaactgtatcgatgccttttttatcgattacacgcatacctttagcagatacgcgcagggtgacaaaacgcttctcgctctcaacccagaaacggtgagagtgcaggttcggcaggaaacggcgtttagtcgcgttcagtgcgtgggaacggttgttaccggtcaccggacgcttgccagtaacttggcagactcgggacatgtctattctccaaaaatcaaattagctcgagcttcgtatggggtattggcgcctcgtcaggctttacagcccggtc

SEQ ID NO: 2946 - DNA, 605 bp, Escherichia coli
cttaaaaaaatgcccggtatcgctaccgataaccgggccaacggactgcacagttagccgttatttgtcgaacagataatggtttaccagattttccagttgttcctggcgaccactctgatgcaccggagacaaattttgttcctgagcatatttggctaaatctgccagtgacatttggcctttcaggatttgctggcccaattcgctattccagccggaataacgctgcgcgatgcgtttatccagctcgccatcttcaatcatgcgcgctgcaattttcagcgccagtgccatcgtatccatcgcgccgatatgaccgtaaaacagatcatatttatcagtactttgacgacgtactttggcatcgaagttcagaccaccggtggtgaaaccgcctgctttgagaatttcatacatcaccagcgcattctcttccacactgttcgggaactggtcggtgtcccagcccagttgcgcatcgccacggttggcgtcgacagaaccgaacaggccaagcgcaatggcggtggctatttcatgatggaaaagagtgacctgccagcgtccccgtggttagcttcaatgttcagttaaatctcttt

SEQ ID NO: 2947 - DNA, 379 bp, Escherichia coli; identical to SEQ ID NO: 2615

SEQ ID NO: 2948 - DNA, 175 bp, Escherichia coli
cgcagaacgcggatcgggttgtgacgtttaaccacaccttcggtaaccatacagcctgcgatggcaccaaatttcggcgatttgaacacgtcacgaacttccgccagaccgataatctgctgtttcagttccggagacagcataccgctcatcgccgctttcacttcgtcaatca

SEQ ID NO: 2949 - DNA, 582 bp, Escherichia coli
ttttgtacgctttggttgtaacatcagcgacgctccttatttacggcctttacgctgctgctttttaggctgagcagccggtttttccggttgttcaacagcagccataccacccaggatctcgcctttgaagatccacactttaacgccgattacaccgtaagtggtgtgcgcttcagaggtgttgtagtcgatgtcagcacgcagagtgtgcagcggtacgcgaccttcgcggtaccattcggtacgtgcgatttccgcgccgcccagacggccgctaacttcaactttaatacctttagcgcccagacgcattgcgttctgtacagcacgcttcatagcacgacggaacataacgcgacgttccagctgagaagtgatgctgtcagcaaccagttttgcgtccagttcaggcttacgaacttcggcgatgttgatctgtgcagaacgccagcgatgtccgctacgaccttacgcagttttttctacgtcttcaccttttttaccgataacgataccccgggcgagcagtgtgaatggttacacggatgctcttagcccggacgctcgataacgatacga

SEQ ID NO: 2950 - DNA, 256 bp, Escherichia coli
tactcgatgacgaccagcggctcgtcaaattctaccggttgtccactttcgaccagaattgctttcacggtaccggatttgtccgcttcgatctggttcatcattttcatggccttcaacgatgcacagggtatcgcccacgttgactttctgacccacttcgatgaacgcttttgcgtccgggcttggggtgcggtagaaagtaccaaccatcggggaacgtacgatgtgaccactgatttccgctgctgctggc

SEQ ID NO: 2951 - DNA, 268 bp, Escherichia coli
tgaacttcgccttcggtcatgttggcgaacatgttctcgagtttagatttctgctgacgcgccagtttaacttcgcggaatttaccctgacgatagagtgcaacttcacgcgctttcttctcgtcacgtacaacggtaacttcatcacccgcagccggtacgccggacaggccgaggatttccaccggaatggacggacccgcttccagcacttcctgacccagttcgttacgcatcgcacgaacacgaccgtattcgaagccacaca

SEQ ID NO: 2952 - DNA, 329 bp, Escherichia coli
ttgcggggtgaggttttcaacagccagagcaactgccattaattccagttcgtagcggatccgattgatttcgtctaattgacgtttccccacttccggaactgtaaatgcttgtgcaggtgcgacagaaagcgcattcaccgaaaccagacgtaataatgcttcacgcacaggtgtaatactcatacctaattgctccgccagatttttagtaatcaggcgtgcgccaggttttaatgcgccaatactaagctgatgtttcaggtcgttctcaacctgcagagtcaaactgacatgtttcatttttcccgttccaggcattttaattc

SEQ ID NO: 2953 - DNA, 496 bp, Escherichia coli
gtacgggctgtttttacccggttgcgtcagggtgccgcggtattcgcggatctgttccggcgtcagttcatcaacgtacgccaggcctttattgatcagttcgatcgcataggcgtggagctgatcaaaataatcggaggagtaacggacgttaccagaccagtgaaaacctaaccactctacgtcgtttttgatcgactcaacatactcgatatcttcttttaccgggttagtgtcgtcgaaacgcaggttgcactggcctttatagtcctgggcgatcccgaagttcaggcagatagatttcgcatggccaatatgcagatagccattcggctccggcgggaaacgggtgtgtactgtggtgtgcttaccactggccagatcttcatcgatgatctgacggataaagttagtcgggcgggcttctgcctcactcatcgtggattcctcaaagcgtaaacaacgtataacggcgtatgatcttataagcgggaca

SEQ ID NO: 2954 - DNA, 416 bp, Escherichia coli
ggtaccattcggtacgtgcgatttccgcgccgcccagacggccgctaacttcaactttaatacctttagcgcccagacgcattgcgttctgtacagcacgcttcatagcacgacggaacataacgcgacgttccagctgagaagtgatgctgtcagcaaccagttttgcgtccagttcaggcttacgaacttcggcgatgttgatctgtgcaggaacgccagcgatgtccgctacgaccttacgcagtttttctacgtcttcaccttttttaccgataacgatacccgggcgagcagtgtgaatggttacacggatgctcttagccggacgctcgataacgatacgagatacggacgctttagccagttccttagtcaggtactgacgtactttaaaatcgctgtccaggttgtca

SEQ ID NO: 2955 - DNA, 703 bp, Escherichia coli
tattaataaaacgtgtcattctgattaagaccttttatcttacccttaagatttcaggaattttggctcatggaagagtcctttttatttaaattttacattccgcgatgtaaatgttccgatttaatattaccctacatttgatgctttttatctcttaaagattcatagatctgttgacaagtcactcctgcgatgtagcgttcgtcagcaatttcagcataaagctgagcttctgctgcaatatctccgagcatgttggtgagcattccttcggcggttttggttgttttgcctctgacggcagcggcaagatctgcggtatgcttcgctgcgtcaaggcgtatggcatatttttttgcttcggcacgcaactggttaacactatcagacagataagcagccctggcagaaatttcagcagatttctgttgcgcatctttaacagcctcatcacgggctatagttcgcccctgttcaattattcgagcagcaaattgagcatttacctcttgtgataatgcggcagcatcacgttccgcccatttttttgccatcctcggtcgctccagacattttccgacgataaatcctgacaacacgagaaaaatcaccatgaatatctgattcactggtctattcccccaacaggtaatgcgctctcctggtcacgacgaataacctgaccgaacagttatttgaa

SEQ ID NO: 2956 - DNA, 78 bp, Escherichia coli
tgcttgatcgacagcggttgaccggcagcgatacgcagctgttctttgatcaggtcaacgccggtgatcatttctgta

SEQ ID NO: 2957 - DNA, 210 bp, Escherichia coli
ttggcgtcgtagtcaaagataccccctaagaacgtcggagcgttccgtgaggtcctgaatgcgattatttaccggattaatttcaaacatggtctgatttcttttattgagctagtcaaaatgcggtgataagagcgggattgtacccaatccacgctcttttttatagagaagatgacgctaaattggccagatattgtcgatgataat

SEQ ID NO: 2958 - DNA, 121 bp, Escherichia coli
cggacgcgctgctttcgcgttacgaccacggccacggccgccttcgacttcacgatcgctttcgtcttctgcctggcgagcatgttgagaagtagtgacgtgataatcgctggaatcttca

SEQ ID NO: 2959 - DNA, 323 bp, Escherichia coli
atcttcatagttggcaatggcgagatagcgatacatctcttcgacctgggcgacgctcaggcctacttcgtcgatggcacgagtatcagtaacgccttccacggtttgtgaacgcatatagtggcgcatcgccatcatccgtttcagcgcccgcagtaccggaccggtatcgccggcactcaacatattggcgagatattgcaccggaatacgcaggctttcgatggcgggcagcacgccttcgcttttcggcaaaccgcccgcatctgcgtaggactgaatcggtgacagcggaggaacgtaccagaccatcggcagggtgc

SEQ ID NO: 2960 - DNA, 207 bp, Escherichia coli
gacaacattccctgcgacgggctactgatgccataaatcacgttaccgcccattgcagccgcctggttgcgcagatcgtttgctgcgccgcgcatagaaccgccttcttctccgtgttgcccggaaagccagttgctttgcttacctgtcgcagtaccaatcagctggcactctgcgcctggctgctcgtccacaatgcgtacactc

SEQ ID NO: 2961 - DNA, 572 bp, Escherichia coli
gaaagtgcgagtacgatagattgcatctttttcacaggttactccttttatcattgcccgttatgggtcgatatccggagattactcgatgagaacggcggttgttattctccgcaatcctaatctctaagttaccgcatttattgagaatttctcctttttccctgtcatttttctccataatttcttcataaaaaagccgggctgcataaaagcaaacccggcctgattgagataatgaatagattttactgatgattcatcatcaatttacgcaacgcagcaaaatcggcgggcagattatgtgaaagcaagggtaaatcagcacgttctgccagctcttttggcagatccaacgtttcaccgagaatcgcttccacgctctctttaaatttcgccggatgcgcggtgccgagaacaagccatattcgcctggattcaactgatcacgcagcgcacgataagctacggcagcgtgcggctccgaagtgtagcccagttcttttaactcacgcattgtctggtgcggtggtttcatcatccacggctgcataacccagctctttcagttg

SEQ ID NO: 2962 - DNA, 586 bp, Escherichia coli
ggattaatttcaaacatggtctgatttcttttattgagctagtcaaaatgcggtgataagagcgggattgtacccaatccacgctcttttttatagagaagatgacgctaaattggccagatattgtcgatgataatttgcaggctgcggttgccgcgaaactcgttgatatcgagcttataagccagttgcacttcgcgcacgccgttatccggccagagggcggtatcgacattaaaagcaataccatccagcagtggaccgccgccgaccggttcgaccatcaccttcaaatgacgttcgcccaccagccgctgttgcagcagacggaaatgaccgtcaaacagcggctccgggaacatctgcccccacgggccagcatcgcgcagcagctgcgccacttccatggtcatttcggccgggcttaacggaccgtctgataccacttcgccttgcaatagcgaagggtccagccactcagtaaccagttcgccaaaccgttgttgaaagagtttgaatttatcctctttcagcgacaaaccccgccgccatcgcatgaccgccaaacttcagcatcatgccaggg

SEQ ID NO: 2963 - DNA, 586 bp, Escherichia coli
ggattaatttcaaacatggtctgatttcttttattgagctagtcaaaatgcggtgataagagcgggattgtacccaatccacgctcttttttatagagaagatgacgcctaaattggccagatattgtcgatgataatttgcaggctgcggttgccgcgaaactcgttgatatcgagcttataagccagttgcacttcgcgcacgccgttatccggccagagggcggtatcgacattaaaagcaataccatccagcagtggaccgccgccgaccggttcgaccatcaccttcaaatgacgttcgcccaccagccgctgttgcagcagacggaaatgaccgtcaaacagcggctccgggaacatctgcccccacgggccagcatcgcgcagcagctgcgccacttccatggtcatttcggccgggcttaacggaccgtctgataccacttcgccttgcaatagcgaaggtccagccactcagtaaccagttcgcccaaaccgttgttgaaagagtttgaatttatcctctttcagcgacaaacccgccgccatcgcatgaccgccaaacttcagcatcatgccaggg

SEQ ID NO: 2964 - DNA, 182 bp, Escherichia coli
ccttatttacggcctttacgctgctgctttttaggctgagcagccggtttttccggttgttcaacagcagccataccacccaggatctcgcctttgaagatccacactttaacgccgattacaccgtaagtggtgtgcgcttcagaggtgttgtagtcgatgtcagcacgcagagtgtgcag

SEQ ID NO: 2965 - DNA, 239 bp, Escherichia coli
acaaaaacgacaatatgaaaattattcgaggagtgaaaggcaaaaaaacggcctcccgatagggaagccgtagcaaagtgcgcgtgtttttatgccggatgcggtgtaaacatacgtggcagtgctatgtaggcatgataatgacgcttcagcgtcgcatcaggcataggttgccggatgcagcgtaaacgccttatccgtcctacggggtggtgttgttcgtataaggcgtatcaggc

SEQ ID NO: 2966 - DNA, 190 bp, Escherichia coli
aaagtacgatgtttagcatactgcccccttagtgcgggggcaggatagcagaaaattggtgagcagtgcggccttttcccctcaccccggccctctccccggaggggcgagggagaaaaaaagagtgcggtgtcgtttcagagtgagggagtacatacagcgccgaacggtcccctctccctgagggaga

SEQ ID NO: 2967 - DNA, 345 bp, Escherichia coli
accggtggtcacctgaatagcacggtagccatcgttagccaggtctttaacctgagtaacgcggtttgcttcaacttcgattacggttactgggatagaaacgccgtcttctgtgaagatacgggtcatacccacttttttaccgactaaaccaatcattgtttcaacctctcaatcgctcaatgacctgattaacccaggctgatctgcacgtctacaccggcagccagatccagacgcatcacagcatcaacggttttctcggttggctcaacgatgtcaaccagacgcaagtgagtacggatttcgtactgatcgcgcgcgtctttgttgacgtgcggggag

SEQ ID NO: 2968 - DNA, 242 bp, Escherichia coli
aaaggaacgccgattttgacttcttcaccgtttgcgatcatcagcacttcagcgaactcaacagtttcgccagttgcgatgtccagcttttccaggcgaacggtctgaccttcgcttactcggtgttgtttaccaccactttggaaaaccgcgtacatataaaactccgcttccgcgcacaccttttcaatgattcagagtgcgctataaatattcacaatagggcgcgaatattacgcaaa

SEQ ID NO: 2969 - DNA, 404 bp, Escherichia coli
ttaccaaaatccttacgaatacgttttttctcggtataggagtaaaccatagggttcctcagctcgctgacaagtcgacccatctgtccattgagcggacagtttgtgcaacactattttgttgaccggaaaatggaacactttccgcaatgcctgttgctatcacgcttaaaccatttcattgcgatttacacagaacggacgtcctgtcgcagtatattaagtcgtcgatagaaacaagcattgaaaggcacagcagtagtcaaacagtgtgaaacgctactggcgccttacagcgcaaaaaggctggtgactaaaaagtcaccagccatcagcctgatttctcaggctgcaaccggaagggttggcttatttaacttcaacttcagcgccagcttcttcca

SEQ ID NO: 2970 - DNA, 307 bp, Escherichia coli; identical to SEQ ID NO: 2748

SEQ ID NO: 2971 - DNA, 47 bp, Escherichia coli; identical to SEQ ID NO: 2228

SEQ ID NO: 2972 - DNA, 137 bp, Escherichia coli
gagaacagcgttccaacgatcttcgtcggaagcgttcacatcagagatgatcgctttcagttcagcgcgtttcgcgaagtatttatcagctaaagctacgcgttttacttcgcgtgctttcattgattgcttagcca

SEQ ID NO: 2973 - DNA, 336 bp, Escherichia coli
atgaacttctcactacgaagctcacgagttaccggcccaaaaatacgcgtaccgataggctgctcgctgttgttgttcagaagaacacaagcattaccatcgaagcgaatgacagaaccgtccgggcgacgaacacccttcttggtgcgcaccactaccgccttcagcacatcaccttttttgaccttaccacgcggaattgcttctttgatggtgatcttgatgatgtcgcctacgcctgcgtagcgacggtgcgagccacccagaaccttgatacacattacgcgacgtgcaccggagttgtcggcgacgttcagcatagtctgttcttggatc

SEQ ID NO: 2974 - DNA, 240 bp, Escherichia coli
gattaataacatgatcatttgaccatttcaggaggctataatctacattcataaaatccatcagagaatagtgtttaatattctctttgctttcgctcataattcttattttatcgttagttacattaggatcataaaccgaaaccacgtaatgggtacatccttcagttgtgttctttattcttagccggaccgtcaaagcatggttatccaccagtaatatggctgccataacactga

SEQ ID NO: 2975 - DNA, 427 bp, Escherichia coli
cttaacgtaaaaacaacttcagacaatacaaatcagcgacactgaatacggggcaacctcatgtcaactaagaacagaacccgcagaacaacaacccgcaacatccgctttcctaaccaaatgattgaacaaattaacatcgctcttgagcaaaaagggtccgggaatttctcagcctgggtcattgaagcctgccgtcggaggctaacgtcagaaaagagagcatatacatcaattaaaagtgatgaagaatgaacatcccgcgttcttccctccgaacaggacgatattgtaaattcacttaattacgagggcattgcagtaattgagttgcagttttaccacttttcctgacagtgacagactgcgtgttggctctgtcacaggttaagtagtttgaatgattagcagttatggtgatcagtca

SEQ ID NO: 2976 - DNA, 352 bp, Escherichia coli
attatttcttgatcggtttgcgcggacccttacgggtacgtgcgttggtcttggtacgctgaccgcgaaccgggagaccacgacgatgacgcaaaccgcgatagcaaccaagatccatcaggcgcttgatgctcatgctgatttcacggcgcagatcaccttcaacgacaaatttggcaacttcgtcacgcagcgtgtcgatttgtccttcagacagctcactgatcttaacatcttcagcgatacccgctgcagccaggatggctttagaacgggtcttgccgacgccataaatcgaagttaatgcgattacggcatgcttatgatcaggaatgttaatgcctgctatacg

SEQ ID NO: 2977 - DNA, 329 bp, Escherichia coli
ctgctacgttcaggctgtcgcctgaatcatttcggtgggttcctgcttcaacgggcggcctgactgcaccatctctccacaggcaagaacggcgtgccccgccgctaaaatgttgcgagcgccatttacatcggcgttcgctgtatatccacatacctggcatctgaatttactttgtgacaggcggttctctttcgctgtatgaccacagtacgcgcaacgctggcttgtatacgctggcggaacagcaagcacctgaccgccacgccagagctgcttatacgcaagctggcggcgcatttcataccagccctgatccagtatcgaac

SEQ ID NO: 2978 - DNA, 308 bp, Escherichia coli
agtttaccaatggaggaaacgcgcaggcggttgcaagtggcgcagaagtctttttcatacggcatgataaggccaatctctccggcgtaatctggatggcaaaagacttgcgcgggaccgtcgctgcgttgacgtaattggtggatccagccgcgacgcagtagctcgtcacgcagaacctgaccagagatgtgatgcttacggaagagctcgctgccctcgcccgtttccatcagttcgatgaaacgcagcctggatagggcgatgctggatccagttcagaaaggtgtcgagctggtgatgattaa

SEQ ID NO: 2979 - DNA, 176 bp, Escherichia coli
gcaaggacgcgttaacgatattaccgttaaagattattgcgtcagaaccggcaaacccgaaaccatcatcactgttgcagtacagagtgcattcccatgttaaacaacagcttttgcacgttttcgcctggattaacggttagctcctgaggcgcgccatttaaagtaaagtggat

SEQ ID NO: 2980 - DNA, 288 bp, Escherichia coli
  misc_feature (241)..(241): n=g, a, t or c
  misc_feature (277)..(277): n=g, a, t or c
tgtaaacggttggggttttcgccgtagcgaccatcggtcgggcgacgagaaggctgaacataagcagccgccatcggttctggccccagctcgcgcagacaggtcattgggtgagaggttcccgcgccgacttccatgtccaatggttgaacaatggtgcagccctggcgagcccagtaatcctgtaaggtcaggatcaagccctggaaggtcctggtatcaaacttttgcatattatttngtgctggatacgtgtggatttaaaggaagggatcantatacccgctg

SEQ ID NO: 2981 - DNA, 491 bp, Escherichia coli
ccgaagcgggtttttacgttatttgcggattaacgattactcgttatcagaaccgcccagacctgcgttcagcagttctgccaggctggcagatgcgtcttctgcagtcacctgcggtgcagccggagcttcacccgcagcacggcgacgcatacgatcctggtggtacgcgtaaccggtacctgccgggatcagacgacccacgataacgttctctttcaggccgcgcagttcgtcgcgtttgcccgcaacggctgcttcggtcagcacgcgagtggtctcctggaacgatgccgcggagatgaaggactcggttgccagagacgctttggtgatacccagcagatcgcgggagtaagttgcacccactttgccgttcgcttccagttcgcggtttgcgatcttgacgcgagagtattcaacctgttcgccttccaggaagtcggagctacccgcgttaacgatggtagctttacgcagcatctgacgaa

SEQ ID NO: 2982 - DNA, 163 bp, Escherichia coli; identical to SEQ ID NO: 2673

SEQ ID NO: 2983 - DNA, 251 bp, Escherichia coli; identical to SEQ ID NO: 2385

SEQ ID NO: 2984 - DNA, 104 bp, Escherichia coli
cggaaccagacttgataccagccgcttttttcagcagaactgctgccggcggggtcttggtaacgaaagtgaaagaacggtcagcgtaaacggtgattactacc

SEQ ID NO: 2985 - DNA, 115 bp, Escherichia coli; identical to SEQ ID NO: 2896

SEQ ID NO: 2986 - DNA, 289 bp, Escherichia coli
ccacgagctttttcttccggcgcgttatcgatctggtcgaatgcgcgagcagcaccgccgtaggttttagccagtacggtagtgattgcagcggtcagcgttgttttaccatggtcaacgtggccgatagtaccgacgttaacgtgcggttttgtacgttcaaacttttctttagacatcgattgtccctctaagacacggataaatcggtgatatcaccacatcaaccaggcaacatgcccgacttgttgaatgcaataaacagaaggaaaaaacagggaggagaaaa

SEQ ID NO: 2987 - DNA, 340 bp, Escherichia coli; identical to SEQ ID NO: 2665

SEQ ID NO: 2988 - DNA, 325 bp, Escherichia coli
gatcgttcaggtcagaagtcgcgaaacgaccaccatccagcggaaccagcggacgcagatctggcggcagtaccggcagaacggtcaggatcatccactctggtttgttaccagactgaacgaacgcttccagcagtttgatacgcttggtcagctttttacgcttggtttcggagttggtttcgttcagctcttcacgcagctgttcgcactcttgctccagatccatgctcttcagcagagcctggattgcttccgcccccatcttcgcgtcgaattcgtcaccgaactcttccagcgcgtccagatactgctcttcagtcag

SEQ ID NO: 2989 - DNA, 660 bp, Escherichia coli
  misc_feature (589)..(589): n=g, a, t or c
  misc_feature (627)..(627): n=g, a, t or c
  misc_feature (638)..(638): n=g, a, t or c
ttttgcgcactgacaaaagcttcttccagctggcgcagagcaggcatcaggatttgtggcacgtacatgccgccaaactcaccaaaataggggttaagtaatgttgtcattgttcctttccttaatatgcgcgcagcgtctggaaaaccgaggccaaaagacgtgcgtctttgatgcccggttgcgactctacagcagaattaaaatcaagtccggcgcagccggtttgtgccgcttccacgcagttatctgcgcctaagccccccgccagcagaacgttgccaagcgattgaccatttaatagtgaccagtcaaaacgttgcccgcttccaccctggccgttgtctaaaacatatttatcaacgtgctgaaactcgcgggcgggcagggtttcaccgacgcttaatgctttccagatggcaacatgtgctggcagagcttcacgcagcgtatcgatatacagctgttcttcattaccatgcagttgcactgccgccagcgataacaccttagctttgtccaccacatcggcaatatcgtgattgcggaacacgccaacatactgcaacggtgccgcagccatcacttnctgcgcctgttcaacgttgacgcaacgcggggatgtcncacaaaatcanccaccgtaaatcgcgcccgcgt

SEQ ID NO: 2990 - DNA, 346 bp, Escherichia coli; identical to SEQ ID NO: 2300

SEQ ID NO: 2991 - DNA, 235 bp, Escherichia coli
gaaaattgttttctgccggagcagaagccaattaacgtttggagaactgcggacgacgacgtgctttacgcagaccgactttcttacgttcaacctgacgagcgtcacgagtaacgaagccagctttacgcagttcagaacgcagggactcgtcgtattccatcagagcgcgggtgataccgtgacggatcgcaccagcctgaccagagataccaccacctttaacggtgatgta

SEQ ID NO: 2992 - DNA, 345 bp, Escherichia coli
aacttaacgattttaactttctcgccacgaccgtgagcaacaacttcagctttgattacgccgccatcaacgaaaggaacgccgattttgacttcttcaccgtttgcgatcatcagcacttcagcgaactcaacagtttcgccagttgcgatgtccagcttttccaggcgaacggtctgaccttcgcttactcggtgttgtttaccaccactttggaaaaccgcgtacatataaaactccgcttccgcgcacaccttttcaatgattcagagtgcgctataaatattcacaatagggcgcgaatattacgcaaaacgcacgcctttgacaagtgctacagtcaat

SEQ ID NO: 2993 - DNA, 338 bp, Escherichia coli; identical to SEQ ID NO: 1864

SEQ ID NO: 2994 - DNA, 388 bp, Escherichia coli
gaagtgaccagtaccagcagaagaaaccagcttgattttctcacgaatacctttagccatgatttatttcctctaagtacttagtacttttcgccacgggcacgcagttcagccagaactgtatcgatgccttttttatcgattacacgcatacctttagcagatacgcgcagggtgacaaaacgcttctcgctctcaacccagaaacggtgagagtgcaggttcggcaggaaacggcgtttagtcgcgttcagtgcgtgggaacggttgttaccggtcaccggacgcttgccagtaacttggcagactcgggacatgtctattctccaaaaatcaaattagctcgagcttcgtatggggtattggcgcctcgtcaggctttacagcc

SEQ ID NO: 2995 - DNA, 86 bp, Escherichia coli; identical to SEQ ID NO: 2847

SEQ ID NO: 2996 - DNA, 254 bp, Escherichia coli
gtttttgtgcctgtttagcgccatcagtaccagggtatttactgataacctgctggtatacggctttcgcttttgcggtgtcacctttgtcctgcatgatgacgccgactttaaacatcgcatctgcagcctttggtgacttcggatagtttttcactaccgaagcaaaatagtacgccgcatcatcttttttacccttgttgtagtttaactgacccagccaataattggcgtttggcaggtaagttgaatca

SEQ ID NO: 2997 - DNA, 332 bp, Escherichia coli
acgctcaacaccgtatttccacgcgaccgcggattcaacctggtcacacggacgccatgtagacatgttcggggttacgcgcagagaagcgacctgctcaaccggctggtgagtcgggccgtcttcgcccagaccgatggagtcgtgggtgtaaaccatcacctgacgctgtttcatcagcgcagccatacgtacggcgttacgtgcgtattccacgaacatcaggaaggtggaggtgtacggcaggaagccaccgtgcagggagataccgttagcaatcgcggtcataccgaactcgcgaacaccgtagtggatgtagttacccgcagcat

SEQ ID NO: 2998 - DNA, 292 bp, Escherichia coli
ttacgatcactttcgcgaatacttcgctgtgaacctggaagctcacttcgtgttcgccagtggtacgcagaacgccgttcggcagacgaacttcgctcttagccacttcaacgccagctgcagttacagcgtcagcgatgtcgcgagtaccgatggaaccgaacagtttaccttcgtcgccagctttagacgcgatggtaacagtttccagtgcattgattttctcagcgcgagcattagcagctgccagaacttcagccagtttagcttccagttcagcgcgacgagcttc

SEQ ID NO: 2999 - DNA, 87 bp, Escherichia coli
taaaattattttatccactttttacccgtcatggagtgcggctgtcaacgatctgaagcgaaccatgacgaactgtaaatctacgga

SEQ ID NO: 3000 - DNA, 116 bp, Escherichia coli
cgcattgcggccaacttctggattagcgccagcgcccagtcctttggtgataccgctaccgatttgaatcgtctgtccaaccgctgttttacgcagcgcttgtgcatcggtattta

SEQ ID NO: 3001 - DNA, 137 bp, Escherichia coli
gataatccggctctttcgcagtttgcggcgcattgtcattcacgactttagcaaccggcttctgctcctgggtcagcggagccatcccatgctgctggtagcgatccatcactggctgctgaacctgcttattggtc

SEQ ID NO: 3002 - DNA, 94 bp, Escherichia coli
tgcgtttcccactcggcttcaatagcagccagtttggttttctgcacgtcgcccatttcgtagccggattcatcacccagaacaataacagaca

SEQ ID NO: 3003 - DNA, 186 bp, Escherichia coli
cttaaaaaagcaaaagggccgcagatgcgacccttgtgtatcaaacaagacgattaaaaatcttcgttagtttctgctacgccttcgctatcatctacagagaaatccggcgttgagttcgggttgctcagcagcaactcacgtactttcttctcgatctctttcgcggtttccgggttatctttc

SEQ ID NO: 3004 - DNA, 128 bp, Escherichia coli
cggaacataacgcgacgttccagctgagaagtgatgctgtcagcaaccagttttgcgtccagttcaggcttacgaacttcggcgatgttgatctgtgcaggaacgccagcgatgtccgctacgacctt

SEQ ID NO: 3005 - DNA, 352 bp, Escherichia coli; identical to SEQ ID NO: 2976

SEQ ID NO: 3006 - DNA, 228 bp, Escherichia coli
cagcctggatacgctggtagatctcttcacggtgaacagaaacttccttcggggcatttacgccaatacgtacctggttgccctttacccctaaaactgtcacggtgacctcatccccaatcatgagggtctcaccaactcgacgagtcagaatcagcattctttgctccttgaaagattaaaagagtcgggtctctctgtatcccggcattatccatcatataacgc

SEQ ID NO: 3007 - DNA, 75 bp, Escherichia coli
ttgttcttcgtagtggtatagaagtgaccagtaccagcagaagaaaccagcttgattttctcacgaataccttta

SEQ ID NO: 3008 - DNA, 240 bp, Escherichia coli
ttgagaaatacttaattgttttaattgacatagttaccacgcaatcagtattgccagagcaaggcaaacgcaaatcgcaaacagcgataaatccattaacaagggatgccagatgtcaccggcgtagatccagccacgaagcaggcggtgtacgacaagccagatgacgaatccaaacgcgaatgctttgaaaaacggaggaaagtagacggacgcaccgaacaccagatcttgtaaggg

SEQ ID NO: 3009 - DNA, 152 bp, Escherichia coli; identical to SEQ ID NO: 2064

SEQ ID NO: 3010 - DNA, 410 bp, Escherichia coli
gctttcagcacgacataagcgcatgatcgttcacctaaacgttcatcggacattgcaaccacacaggcatcgtgaattttaggatgctgcaataaaatatcttccacttcacggctgctaatattttcgccgccgcggacaataatatcttttttgcgtccggtaatttttatatagccagcctcatccatacggcagagatcgccgctgtaataccagccttcttcatccagggcacgggcggttaattcaggttcatcaaaataccccataaacacattggggccacgcgaggcttcttcaccttcgcaacctggcggtaaggtcttgcgtgcgtcatcgaccactttaatctctacacctgcggcagcgtaaccatcggtgtgcataaagcgcgacaaaggatcatc

SEQ ID NO: 3011 - DNA, 453 bp, Escherichia coli
gaagatacgggtcatacccacttttttaccgactaaaccaatcattgtttcaacctctcaatcgctcaatgacctgattaacccaggctgatctgcacgtctacaccggcagccagatccagacgcatcagagcatcaacggttttctcggttggctcaacgatgtcaaccagacgcaagtgagtacggatttcgtactgatcgcgcgcgtctttgttgacgtgcggggagatcagaacagtgaagcgctctttgcgtgtcggcagcgggatcggaccacggacctgcgcaccagtgcgcttggcagtctcgacgatttccgcggttgcttgatcgatcagacgatgatcaaacgctttcaggcggatacggattctttggttctgcatgagaccagagctccaattattttataaacgaaaatgattactcctcagacccattacgattgat

SEQ ID NO: 3012 - DNA, 420 bp, Escherichia coli; identical to SEQ ID NO: 1849

SEQ ID NO: 3013 - DNA, 322 bp, Escherichia coli; identical to SEQ ID NO: 1871

SEQ ID NO: 3014 - DNA, 240 bp, Escherichia coli
acctgaccgcagctatcacacttagtccacaccccttcaggaatgctcgccttgcgggtgggagtaatgttgcttttaattcgttcaatccagctcattagggacctttctgtctgaacctggttcgatgccagttttatctttggggacgcataatgccatttttgcccccaacagaccatgaatgttgcacattaaaacataacagcccgaaactttggataaaaaagtggtcgaacc

SEQ ID NO: 3015 - DNA, 266 bp, Escherichia coli
cttgtgcatcggtatttaccgcgaagaattcaacaccttcaatgcgctcgcgcaccatgtgttcaacagcattaccgccgccgccgccgacgccgatgactttaatcaccgcgtcattggtaagttccattggttcaaacatagtttctctccgatttgtgcctgtcgcctgaggccgtaatcatcgtcggcctcataaaaattaaaactcttttcgcagccaactattgagtcgcttgatccacgagccaactgatgctgtaaca

SEQ ID NO: 3016 - DNA, 371 bp, Escherichia coli
agcttcagctgcggattcgatcaggttctggtgccattcgttagccagttcaaccatgtctgccgggatatcttcgtattcgaaggttacgccctggtcagcgtcgttccagttgatagctttcattttcaccaggtcaacaacaccggtgaaatgttcttcagcaccaatcgccagctgcagcggaaccgggttcgcgcccagacgggttttgatctggttaacaactttcaggaagttcgcacccatgcggtccattttgttaacgaacgcaatgcgcggaactttatatttgtttgcctgacgccatacggtttcagactgcggctgaacaccaccaactgcgcagtaaaccattaccgcaccatcga

SEQ ID NO: 3017 - DNA, 272 bp, Escherichia coli; identical to SEQ ID NO: 2357

SEQ ID NO: 3018 - DNA, 299 bp, Escherichia coli
gtgtcgatttgtccttcagacagctcactgatcttaacatcttcagcgatacccgctgcagccaggatggctttagaacgggtcttgccgacgccataaatcgaagttaatgcgattacggcatgcttatgatcaggaatgttaatgcctgctatacgggccactatgcactcctactatttaatatgtacgttccatgctgaaaagcccgttttcaggatactcaaatggaaacgcacagacatacaaaagattggctggctaatctagccagctcaacccaactttgcaagaaaaat

SEQ ID NO: 3019 - DNA, 214 bp, Escherichia coli; identical to SEQ ID NO: 2513

SEQ ID NO: 3020 - DNA, 247 bp, Escherichia coli
agggctgtagcatgcgtcgaccagcagacggccgattgggcgctcatcttcttccgaatgaattcgggtagaagccggcacataaccacgaccgcgctgaactttgatacgcatgctaatagacgcgttctcatcggtcaggtggcagatcacgtgctgcggcttgacgatttcgacatcaccgtcgtgggtgatatcggctgcagtcacagggccaatgccagatttattcaaggtaagaataact

SEQ ID NO: 3021 - DNA, 117 bp, Escherichia coli
gatcgctttcagttcagcgcgtttcgcgaagtatttatcagctaaagctacgcgttttacttcgcgtgctttcattgattgcttagccatttagtaaccctaccttacttgcggaac

SEQ ID NO: 3022 - DNA, 340 bp, Escherichia coli
taacgccagatgacactttttgtgtaatgacggagttcacatttttaatttagatcaaaggaggaagaataagcagaaaaagcccgccataacagcgggcaggaggatttagaactgataaaccagacctaaagcgacaatatcatcggtagagatgccattggcagcgtagaagctgtcatcttcatccaacaggttgattttatagtcaacgtaggtggacatgtttttattgaaatagtaagtcgcgccaatatcggcgtatttaaccagatctttatcatcaacacctgccgggttgtctgcaccacccgcagcgtgcaggtcacggcctttagac

SEQ ID NO: 3023 - DNA, 249 bp, Escherichia coli
tgattaacccaggctgatctgcacgtctacaccggcagccagatccagacgcatcagagcatcaacggttttctcggttggctcaacgatgtcaaccagacgcaagtgagtacggatttcgtactgatcgcgcgcgtctttgttgacgtgcggggagatcagaacagtgaagcgctctttgcgtgtcggcagcgggatcggaccacggacctgcgcaccagtgcgcttggcagtctcgacgatttccgc

SEQ ID NO: 3024 - DNA, 256 bp, Escherichia coli; identical to SEQ ID NO: 1861

SEQ ID NO: 3025 - DNA, 134 bp, Escherichia coli
agtgcgttacccagagtatggccaaagccacgctctaaaggctcaagggtcaccttggcgtgcgtcgaactcacttgctcgatatcaaccaggcgcggttttagaaactctgtcacagaaccctgcattgtgtc

SEQ ID NO: 3026 - DNA, 277 bp, Escherichia coli; identical to SEQ ID NO: 2888

SEQ ID NO: 3027 - DNA, 83 bp, Escherichia coli; identical to SEQ ID NO: 2913

SEQ ID NO: 3028 - DNA, 248 bp, Escherichia coli
agggatatacatccccagcattttgacaacttcatccggatcactctggagcacactaatcgcaaatccatcattgaaagttgtaccaaaggtacaccatgaatagaggctaatactcatgtctgccgcagtcagtaacacaaatggtgcggcaacaagcaggcgaagcggaagggatgatatacgttttacaaccaggatggtcagaacgaagaacagcaagcgctgaaccatatgcgctccggaag

SEQ ID NO: 3029 - DNA, 203 bp, Escherichia coli
gttatgagtgcgcgggatcagtttcggtgtgccggtggtgccaccggaaagctggaaataggccacttcatcagcaggtgatggcgtggcagtaaaatcctcagccggatggttaatcgcatcctgcaagttatgctcaccgctgtcgttgagcagttgcaccacgcgaatggaggaatgttctgtgacgaaagtattgagga

SEQ ID NO: 3030 - DNA, 589 bp, Escherichia coli
gtaattcaggcatagcatctccaggaatgaacagatgcagtcaatatgggggcaagcagataacaaaaaaccccgccggagcgaggttttttgttacatcaaagcgagaattatttgattttcgcttctttgtagatcacgtgctggcgaacaactggatcgaattttttcagttccagtttttccggcttagtacgtttgttcttcgtagtggtatagaagtgaccagtaccagcagaagaaaccagcttgattttctcacgaatacctttagccatgatttatttcctctaagtacttagtacttttcgccacgggcacgcagttcagccagaactgtatcgatgccttttttatcgattacacgcatacctttagcagatacgcgcagggtgacaaaacgcttctcgctctcaacccagaaacggtgagagtgcaggttcggcaggaaacggcgtttagtcgcgttcagtgcgtgggaacggttgttaccggtcaccggacgcttgccagtaacttggcagactcgggacatgtctattctcaaaaatcaaattagctcgagcttcgtatggggtattggcgcctc

SEQ ID NO: 3031 - DNA, 188 bp, Escherichia coli
cgtaggcgatggatagtttgctggcaacaccggttaccagaatgcgcttaccggaaagaaaacccatagctttaatccttattgttgatgcttgttgtgcctgaaaatcaggcgattcgtcgttttagtaaacagtacgaacagataaacggttattataatcaacctggctgtgagtagctatagtt

SEQ ID NO: 3032 - DNA, 350 bp, Escherichia coli
ttaacaaagaaaataatcctagaataattcccgggcatttgcccgggatgattactgttttaatggattattaatctttgcatattcaaatggactgataaacctttctctgtttacatccagaaaatcggcccaccactgtagcatcaatcgccgttcttccagatgctctgctttatggatatacgcggccctcactgaatttcgcgccatgtggctcatctgacgttcaacagcatcacgagaccacagacctgattcgaccaatgaactacaggccattgttcgaaagccatgaccacaaacctctacttttgtatcataccccatgacccgtaacgcactattta

SEQ ID NO: 3033 - DNA, 583 bp, Escherichia coli
  misc_feature (577)..(577): n=g, a, t or c
cggcgcgttgtcgcctgcacggaagccacacttcagaatacgagtgtaaccaccggcacggctcgcgaaacgcgggcccagttcgttaaacagttttgccacgatctcgttatcacgagtacgggcgaatgccagacgacgattagcaacgctatcagtcttggcaagagtaatcagcggctcaactacgcggcgcagctctttcgctttaggcagagtcgtcttgatgatttcatgacgaaccagtgaacctgccatattgcggaacatagcctggcgatggctgctgttgcggttcagttgacgaccactcttacgatggcgcatgaccttatccttctcagtaaaaccttaacctgtgatccggttactcgtcagcgatgcttgccggtggccagttttccaggcgcatgcccagagacagtccacgggaagccagcacgtctttaatctcagtaagagattttttaccaaggttaggcgttttaaggagctcaacctcggtacgctgtaccagatcaccgatatagtggatagcttctgctttaaggcagttagcagagcggacagtcaattncagatc

SEQ ID NO: 3034 - DNA, 152 bp, Escherichia coli; identical to SEQ ID NO: 2859

SEQ ID NO: 3035 - DNA, 316 bp, Escherichia coli; identical to SEQ ID NO: 2083

SEQ ID NO: 3036 - DNA, 152 bp, Escherichia coli
acttagtccacaccccttcaggaatgctcgccttgcgggtgggagtaatgttgcttttaattcgttcaatccagctcattagggacctttctgtctgaacctggttcgatgccagttttatctttggggacgcataatgccatttttgcccc

SEQ ID NO: 3037 - DNA, 72 bp, Escherichia coli
ctgagttggtaccaggttaccgtctgtcctggctttcctttttcaatcgtcactatatatgcttcacgagga

SEQ ID NO: 3038 - DNA, 76 bp, Escherichia coli; identical to SEQ ID NO: 1654

SEQ ID NO: 3039 - DNA, 433 bp, Escherichia coli
ataccttcatgggtaccacaatcgtcttcggtaaccaccaggtcctgcgccacgtcaaccagacgacgagtcaggtaaccggagttcgcagttttcagtgcggtatccgccagacctttacgagcaccgtgggtggagatgaagtactggagtacgttcagaccttcacggaagttcgcggtgattggcgtttcgatgatggagccatccggcttcgccatcagaccacgcataccagcaagctgacgaatctgtgccgcagaaccacgcgcaccggagtcggccatcatgtagatgctgttgaaggaaacctgcttctcttcctgaccgtcacggttaatcacggtttcagtttgcaggttatccatcatcgctttggatacacgatcgttcgccgcagcccagatatcgataactttgttgtagcgttcgc

SEQ ID NO: 3040 - DNA, 281 bp, Escherichia coli
gtcatggtaagaaccgaagtgcagacgaatacccatgtctactaccgggtagcctgccagcggacctgctttcagctgttcctggatacctttatcaacggccgggatgtattcgccagggattacaccacctttaatgtcgttgatgaactcgtagcctttcgggtttgaacccggctccagcgggtacatgtcgataacaacatgaccatactgaccacgaccaccagactgtttcgcgtgtttaccttcaacatcggtaactttctggcggatagttt

SEQ ID NO: 3041 - DNA, 479 bp, Escherichia coli
cgccatccactatcaacgactgcccggtggtgtaatttgcgccctccgaacaaagccacaccaccaggctggcaatctcatgcgttgcgccaaaacgccgcaagggaatcgaaggctccgcgtcgggcttcacgtcgctgtcatccatgccattcattggcgtggcgatcgccccaggcgcgactgcgttcaccaaaatcttatgcctgaccagctccagcgccatcgctttggttaacccaccgagcgcatgtttagcggctgtgtaggcgctggcatccggcagcggcgtatgttcatgtaccgacgtaatgttgatgatgcgaccgccctgcccttgtttcaccatctgacgagccgcaatttgcgagcataagaatgcaccatcgacatcaacggtaaaaatcttgcgccactcatcaaaagccatatcaagaaacggcgctttggtcattgcaccccgcattattcaccagcac

SEQ ID NO: 3042 - DNA, 273 bp, Escherichia coli
agagaacgttggttgattacgatcttaccgttgcccggtttgatgaaaacgcgagctgcggaacttttgcggcgaccagtgccgtagtattgattttcagccattgcctataatcccgattagatgtcaagaacttgcggttgctgtgccgcgtggttgtgctcgttacccgcgtaaactttcagtttacggaacatagcacgacccagcgggccttttggcaacatgcctttaaccgcgatttcaatcacacgctcacgacggcgagcaatc

SEQ ID NO: 3043 - DNA, 173 bp, Escherichia coli
tgttcgcactcttgctccagatccatgctcttcagcagagcctggattgcttccgcccccatcttcgcgtcgaattcgtcaccgaactcttccagcgcgtccagatacctgctcttcagtcaggatctgctgacgttccaggttggtcataccgccttcgataaccacatagg

SEQ ID NO: 3044 - DNA, 67 bp, Escherichia coli
tgttcgcggaacggttcggatcgtactcaagacgttcaacaactgccgggataccgtctttgttgcg

SEQ ID NO: 3045 - DNA, 713 bp, Escherichia coli
cctgaatcatttcggtgggttcctgcttcaacgggcggcctgactgcaccatctctccacaggcaagaacggcgtgccccgccgctaaaatgttgcgagcgccatttacatcggcgttcgctgtatatccacatacctggcatctgaatttactttgtgacaggcggttctctttcgctgtatgaccacagtacgcgcaacgctggcttgtatacgctggcggaacagcaagcacctgaccgccacgccagagctgcttatacgcaagctggcggcgcatttcataccagccctgatccagtatcgaacggtttaaacctgattttgcccggacattgcgccccggctggctgaccgtacccgctgctgactttgacatgttgctgaccttcaaatcctcaatgactatcattgcgtggtttttgctgacggccgttgtgactttgtgaaggtagtccctgcggatatttgcgatacaggaatgcagtcgctgtattttgcgtttctgcttttatcagttgttgctgaatttgaccttgcggcttaactgtcggctgaagtctcgccagcttcttctggattttctgaaaactgtttacaggctcaaagactgtgccatctgacagcgtggcgagtttagccacgccagcatccagcccgaccattgatgctgaagggtgaaccggagttgatacttcactttctgtctgaat

SEQ ID NO: 3046 - DNA, 181 bp, Escherichia coli; identical to SEQ ID NO: 1971

SEQ ID NO: 3047 - DNA, 442 bp, Escherichia coli; identical to SEQ ID NO: 2786

SEQ ID NO: 3048 - DNA, 368 bp, Escherichia coli; identical to SEQ ID NO: 2197

SEQ ID NO: 3049 - DNA, 114 bp, Escherichia coli
cccttgtgcagctcagggttaaccactttaactacgtggcgacgacccggagatgtcggtttacatttaacaactgccattgtattactcctccgacttactcagcgccgccaa

SEQ ID NO: 3050 - DNA, 282 bp, Escherichia coli; identical to SEQ ID NO: 2396

SEQ ID NO: 3051 - DNA, 586 bp, Escherichia coli
tatgaaacactgtctggaatcgtctgaatgacgggcacatttgcgagcacgcatccagtaataacacaggaaactattttatctacgcgttagcgatagactgcttgcatggcgaaaggaggtaagccgacgatttcagcgggacgctgaaacgggaaagcccctcccgaggaaggggccataaataaggaaagggtcatgatgaagctactcatcatcgtggtgctcttagtcataagcttccccgcttactaagactaccagggcgggggaaaccccgctctaccctcactcctgaaagtatgccttcacgataagattgtcaatccgcaggctttgtagtctgcgatcctgccagcaaatattctttgcgagtcgttacgcaataatcacagaggaaactattttattcacgcgttagcgatagactgcattcagggcgaaaggaggtaagccgatgatttcagcgggacgctgaaacgggaaagcctctcccggagaagagggcttttaataaggaaagggttatgatgaagcacgtcatcatactggtgatactcttagtgattagcttcaggcttactaa

SEQ ID NO: 3052 - DNA, 214 bp, Escherichia coli
cggccggtgcctttctggcgccacggttttttaccggaaccagttacttcagcacgagtcttctgagcacgagtaccctgacgagcaccagctgcataagcaacaacaacctggtgaaccagcgcttcgttgaaatcacgaccgaaggtagtttcggaaacagtcagcgcgctctgcgcgtctttcaatactaattccattgctatctccttac

SEQ ID NO: 3053 - DNA, 410 bp, Escherichia coli
gcgtgcgccggacacgggtgcgcatccggaactgacagtttactgaaaggatatttccctgaaaagtcagaccataacgcgaaagcgcatggcgaggtagctggttcatagatagcctgtcgttaaattttcgtcgaccgtgcgcttccggttgtggcaacccgcgaaatggcgcggcggtaagtatggcggggttattccttccccgttgaggacaccgggttgtcaggttgaccatacgcttaagtgacaaccccgctgcaacgccctctgttatcaattttctggtgacgtttggcggtatcagttttactccgtgactgctctgccgccctttttaaagtgaattttgtgatgtggtgaatgcggctgagcgcacgcggaacagttaaaaccaaaaacagtgttat

SEQ ID NO: 3054 - DNA, 292 bp, Escherichia coli
caaagaacatcggttctttgagctgatcatttttcgtctgtgaaaaggtggtatatgccatgagtgtgtcctgttgggagtttaatgccggataaggcattttacgccgcatcctgtgcctgatgcgacgctggcgcgtcttatcaggcctacaaatccgagccgtaggccggataaggcgttcacgctgcatccggcacccggagcctgatgcgacgctggcgcgtcttatcaggcctacaaaccgagccgtaggccggataaggcgtttacgccgcatccggcatctcaa

SEQ ID NO: 3055 - DNA, 176 bp, Escherichia coli
gcttcgccatcagaccacgcataccagcaagctgacgaatctgtgccgcagaaccacgcgcaccggagtcggccatcatgtagatgctgttgaaggaaacctgcttctcttcctgaccgtcacggttaatcacggtttcagtttgcaggttatccatcatcgctttggatacacga

SEQ ID NO: 3056 - DNA, 139 bp, Escherichia coli
agggattgggataatgaaataaccaaagtaaaaggccgattggatcaggccagcctggaaatttgtcagcgtaaaagcctgctggaattgaggtaataaaatgtcgttaaggttattggctaccgcccaaagaaaaaac

SEQ ID NO: 3057 - DNA, 457 bp, Escherichia coli
taatatacagcgcaccaaccagggtcaggcgggtcattactttatcgatatacttcgccgtttgctctcccggacgaattcctggtacaaatgcaccggacttcttcaggttatctgctgtttcacgcgggttgaaaaccaacgccgtgtagaagaaacagaagaagatgattgcagacgcatagagtaacacataaagcggttgcccaggctgcaaatacagcgaaattgttgtcagccagttccaaccagtaccgcccccgaaccatgacgcgatggtcgccgggaacagaataatactggaagcgaagattgccgggattacccccgccatattcactttcagcggtaaatgtgtgctctgtgcagcatagacacgacgaccttgctgacgtttcgcgtagtttaccacaatgcggcgttgaccacgctcaacaaatacaacaaagaacgtcac

SEQ ID NO: 3058 - DNA, 89 bp, Escherichia coli; identical to SEQ ID NO: 2059

SEQ ID NO: 3059 - DNA, 333 bp, Escherichia coli
tttttcagaacttttgcgaattacgcgtaaccgtagctcatcaggcgctgataacgacgattttttaaatcttcagtgcttaacacgtcgagatcggccagatccgccagcagttgcgctttcaacgatgccgccatcgcttccgggttacggtgagcaccacccagtggttccgggatgatggagtcgatcagtttcagttctttcagacgcggagcaatgatacccatcgcttcagccgccagcggcgctttgtcggcgctcttccacagaatggacgcacaaccttccggcgagataacggaataggtgctgtattgcagcatattcact

SEQ ID NO: 3060 - DNA, 285 bp, Escherichia coli
tactttaaaatcgctgtccaggttgtcagcgaattctttggtgttcgcaaaccaggtagagttccatggttttacaatacccaggcgaataccattaggatgtactttctgacccattgctagtctccagagtctcagcgatcggacacaaccacagtgatgtggctggtgcgcttcaggatgcgatctgcacgaccttttgcacgcggcataatgcgcttcatgctcgggccttcgtctacgaaaattttcgtaactttcagatcgtcaatgtcagcgccatcg

SEQ ID NO: 3061 - DNA, 187 bp, Escherichia coli
aaacgagtgttgtctgtcattttgttattcctctttaaacctgtctgaaccgttatcaaccgcgcaataaaaaagcccccggaaggtgatcttccgggggctttctcatgcgttcatgcaccactggaagatctgaatgtcttccagcacacatcgcctgaaagactagtcaggatgatggtgatga

SEQ ID NO: 3062 - DNA, 212 bp, Escherichia coli; identical to SEQ ID NO: 2018

SEQ ID NO: 3063 - DNA, 280 bp, Escherichia coli; identical to SEQ ID NO: 2797

SEQ ID NO: 3064 - DNA, 288 bp, Escherichia coli
cagtgagcatggagctggcaagaaaaaacgaatgaataaaacttccatgcaagtcatacatacctatatgccagacctggaaagaggtaacaatgatcacccctaaggctattaacagaaagaaacgaagttcaatatctctgattaaaggttttatcgttttcctgctaataacaatataccaaagagtgaagttgaaagccgatagcagggaaaaagaaccagccaccagctcaaccaaatagttattaaaatatccgatactctcgctatgagttgagaaaccac

SEQ ID NO: 3065 - DNA, 148 bp, Escherichia coli
cgatcctggtggtacgcgtaaccggtacctgccgggatcagacgacccacgataacgttctctttcaggccgcgcagttcgtcgcgtttgcccgcaacggctgcttcggtcagcacgcgagtggtctcctggaacgatgccgcggaga

SEQ ID NO: 3066 - DNA, 349 bp, Escherichia coli
ttactgatggcgatcagtgtacggcagcagggacaggtagcgagcgcgtttgatagcgcgagccagctgacgctggtattttgcacgggtaccggtgatacggcttgggacaatcttaccgctttcggtgatgtagtttttcagcgtagcgatatctttatagtcgatctcttgaacgccttccgcggtgaaacggcagaacttgcgacgacggaaataacgtgccatatggctagtctccagaatctatcaattcaatctgctcggcatgcaaaaccattttgctcagtccgttctttgccttgtggcatgaaatgaacccctgaacggttatgcgactgccgaccgt

SEQ ID NO: 3067 - DNA, 235 bp, Escherichia coli; identical to SEQ ID NO: 2738

SEQ ID NO: 3068 - DNA, 245 bp, Escherichia coli
tcatataaatctcgcggtaaagtacgcgccattacgccgccaacgccggtgcccatcccctgcatcgcgctggcggcaatcaacaccgtcaaactggaggtcgtgaccgcgaccagcgttgccagcataaaaatggacattccgacgaggatcaccggtcggcggcccacgcggtcggaaatcgggccataaaacagctgtgagacaccgtaagtcagcagataagcgcccattacgctctgcac

SEQ ID NO: 3069 - DNA, 61 bp, Escherichia coli
atgcagtctctgcaaaggatcttgttgataaaattggcagaaacgttgccacaatgaagaa

SEQ ID NO: 3070 - DNA, 201 bp, Escherichia coli
taaatactgatagcaatatgattgaaaattaataacttttcgttaggcagttttgggtgtgagttgcaagaggggagactactgaataactcaagttttataatcgaggggaaaatggtgatggcgttcatagcaaaacgccctcaaccataaaggtcgagggcgccttaagatgttaaaaacccgctatccgttaaaaaa

SEQ ID NO: 3071 - DNA, 276 bp, Escherichia coli; identical to SEQ ID NO: 2114

SEQ ID NO: 3072 - DNA, 267 bp, Escherichia coli; identical to SEQ ID NO: 2293

SEQ ID NO: 3073 - DNA, 522 bp, Escherichia coli
tgagcgaaggtacgggaaagctccaggatacccggcagacgggattcgagaacttctttacccaggtgatcgagtttcagtttcgcgtgtggcccccacggaccatcacagccgcgaccttcacggatttcgatcatgatggaacgcgcaaccacgtcacggcccgccaggtctttggcgttcggcgcataacgctccataaaacgttcgccatgtttgttcagcagataaccgccttcaccacggcaaccttcggtgaccagtacgcccgcaccggcaatgccggtcgggtggaactgccacatttccatatcctgcaccggtacgccggcacggatagccatgccgacaccgtcgccggtgttaatgtgggcgttggtggtggactgataaatacgccctgctccgccagtcgccagcacggtagcgcgggctttgaaataaaccacttcaccggtttcgatgcacagtgcggtacaacccaccaccgcgccatcctggtttttcaccagatccagcgca

SEQ ID NO: 3074 - DNA, 310 bp, Escherichia coli
atagccatcgccttcgcgggtctttaccgaccataaaatatcggagtgtagcgcccgcaatttttcatcgacaaagctggcggattccagttttaagctatcgagatcgcacagttcacgtaaatctttaggtaagtgaatctccataaaatcccgcgcagtgtcagggtgcgtgagaaaggttttaaataatgcatcatgcggcgtgctggtcgtgaagtttgtcatggcgatccatcacctgttgaaaaagatggcctgactttagcgactaacaaaaccattctcacccggcaatttcccattcccc

SEQ ID NO: 3075 - DNA, 194 bp, Escherichia coli
caactacaactcggtctgatcggagagcaacgctctcggggaattagtacagacgagtgcggcgtgcgttttcgcgagccagtttcttcgcgtgacgtttcactgcagaagctttagcgcgccttacgttcggtagtcggtttttcatagaactcacgacgacgaacttccgccagaacacctgctttttcgca

SEQ ID NO: 3076 - DNA, 511 bp, Escherichia coli; identical to SEQ ID NO: 2150

SEQ ID NO: 3077 - DNA, 146 bp, Escherichia coli; identical to SEQ ID NO: 1837

SEQ ID NO: 3078 - DNA, 326 bp, Escherichia coli
gatgccaacgccgccacgtcccggaggcgtggcctgggctacgatagtgtcattatcgctcatgatgttcctgttgctttgtgtggcggatgcgcggtgcttatccgccctacgaaaagaaaaaaggcggtcaactgaccgcccttattttagcgaaaactcaccgaatcaggattttttcttctcgcggctatgcaggccacgtttttccagaccacggtaaatcagctgctgctgaataatggttaccaggttgctgacgatatagtacagcaccagacctgacgggaaccacaggaagaacacggtgaagatgaccggcataa

SEQ ID NO: 3079 - DNA, 196 bp, Escherichia coli
cacgggcagcatctgccagtgcctggacacgaccatgatattggaacccggaacggtcaaaggatacatctttgatgcctttttccagagcgcgttcagcgacagctttacccacagctgcagccgcgtctttgttaccggtgtacttcagttgttcagcgatagctttttctacagtagaagcagctaccagaac

SEQ ID NO: 3080 - DNA, 371 bp, Escherichia coli
ttcaggcgcgagaactcatactggcgcgggtgaacaggaatcgtgatgttgtccagtacccagtcgtacagacgacggttgtcctggaactcaagcgtacacagagagtgcgtaataccttccagggcatcgctgatgcagtgggtgaagtcgtacatcgggtagatgcaccacttgttgccagtctggtggtgttcagcaaatttaatacggtacagcaccggatcgcgcatcacgataaacggtgaagccatgtcgattttcgcacgcaggcaggctttaccttcttcaaaaccaccggcacgcattttttcgaacagcgccaggttctcttcaacgctgcggtcgcggtacgggctgtttttacccgg

SEQ ID NO: 3081 - DNA, 483 bp, Escherichia coli
acagagagttgatcagaccgatgttcggaccttcaggggtttcgattggacatacgcgaccgtagtgagtcgggtgtacgtctcgaacttcgaagcctgcacgttcacgggtcagaccgcctgggccgagtgcggagatacgacgtttgtgcgtaatctcagacagcgggttgttctggtccataaactgagacagctggctggaaccgaagaactctttcactgctgcggaaatcggcttggcgttgatcatatcctgtggcatcagggtatccagatcgcccagagacagacgctctttcaccgcacgctctacacgtaccaggccaacgcggaactggttttccgccatttcgccaacggaacggatacgacggttgccgaggtggtcgatatcatcgacttcgcctttaccgttacggatatcgatgagctttttcataacatcaatgatgtcgtctttgctcagatacccggaacctt

SEQ ID NO: 3082 - DNA, 50 bp, Escherichia coli
gttgcgtatccgaacatttcagacagcggtacttcagcgtggatcttaac

SEQ ID NO: 3083 - DNA, 550 bp, Escherichia coli
catgggtaccacaatcgtcttcggtaaccaccaggtcctgcgccacgtcaaccagacgacgagtcaggtaaccggagttcgcagttttcagtgcggtatccgccagacctttacgagcaccgtgggtggagatgaagtactggagtacgttcagaccttcacggaagttcgcggtgattggcgtttcgatgatggagccatccggcttcgccatcagaccacgcataccagcaagctgacgaatctgtgccgcagaaccacgcgcaccggagtcggccatcatgtagatgctgttgaaggaaacctgcttctcttcctgaccgtcacggttaatcacggtttcagtttgcaggttatccatcatcgctttggatacacgatcgttcgccgcagcccagatatcgataactttgttgtagcgttcgcccgcagttaccagaccagactggaactgctcctgaatttcagcaacttctgcttctgcctcggagatgatttcgtgtttcttctccgggatgaccatgtcatcgataccaacagatgcaccaga

SEQ ID NO: 3084 - DNA, 86 bp, Escherichia coli
tgctcataattatcctgaaatcaagctaacgaaatatcgccaccagctccagcgtgtcttaaccgccgggctggtaactgaaaagt

SEQ ID NO: 3085 - DNA, 435 bp, Escherichia coli; identical to SEQ ID NO: 1853

SEQ ID NO: 3086 - DNA, 161 bp, Escherichia coli; identical to SEQ ID NO: 1692

SEQ ID NO: 3087 - DNA, 307 bp, Escherichia coli; identical to SEQ ID NO: 2748

SEQ ID NO: 3088 - DNA, 134 bp, Escherichia coli
agcaatagtgatcaggcgctcaaagaactcccacatgcgttcgccacgcagagttactttacagccgatcggatagccctgacggattttgaagcctgcaacagatttgcgtgctttggtgatcagcggttttt

SEQ ID NO: 3089 - DNA, 108 bp, Escherichia coli; identical to SEQ ID NO: 2940

SEQ ID NO: 3090 - DNA, 248 bp, Escherichia coli
tactgcagacagcgcgcctttggctacttcgctgacttcagcaacaatcgcttgtttgtcttgaagatttaaagccattagctttgctcctggatgtttgccagagaaaatctctggaactcacttcactcctccaaacggagagagcgtcttaattacggtgagcagaaacaagccagaatataaaagaataatcttagcgttctgtcaccgtctacgcaggggattaagtttcttgcgaaactcct

SEQ ID NO: 3091 - DNA, 53 bp, Escherichia coli; identical to SEQ ID NO: 2347

SEQ ID NO: 3092 - DNA, 149 bp, Escherichia coli
tgttgatgcagcgcagcagggtcgatttaccggaaccggacggcccgataatcaccacgacttcgccctgggcaatgttcaaatcgatattgtgcagcacctgggttgggccaaagtgcttggagacgtttttaaattcaatcacagga

SEQ ID NO: 3093 - DNA, 218 bp, Escherichia coli
tgtaccggtaccaccacccatacccgcagcaataaagaccatgtctgcaccttccagcgccgcacgcaatgcatcgcgatcctcatcagccgcattgcggccaacttctggattagcgccagcgcccagtcctttggtgataccgctaccgatttgaatcgtctgtccaaccgctgttttacgcagcgcttgtgcatcggtatttaccgcgaagaatt

SEQ ID NO: 3094 - DNA, 539 bp, Escherichia coli
ggatgtagcggataaatttgaagatactgaaaccagtcgctttagcgattgaacccaataccagcaccacaaacaggatacaggtaatgtagaaacagataatcagctgccccagttgcaccagtgtgccgacgccgtatttaccgatggtaaacgccattgccccgaacgcaccaataggtgccagacgcatgatcatattgatgatgccgaagatgacctgcgagaaactttcgatgacgttaaaaatcagttggcctttgctgcccagacggtggagcgcaaaaccaaacagtacggcaaacagcagcacctgcagaatgttaccgctggcaaatgcgccaatgacgctcgccgggatgacatccataatgaaggcgacaatgccctggtctttcgcctgatcggcgtaaaccgctaccgctttcgcatcaagcgttgccggatcgacgttcattccggcaccaggctgcacgacgttaacgatgataagaccaataatcagcgcgatggtactgacaatttcaaagtaaagcagt

SEQ ID NO: 3095 - DNA, 461 bp, Escherichia coli
  misc_feature (196)..(196): n=g, a, t or c
ctgatcacccaggctacccaggtttgctactttatcaagcagaataacttgcattaccttatcctctcaaagtcgtattaatggaccgtgaccgattactgatggcgatcagtgtacggcagcagggacaggtagcgagcgcgtttgatagcgcgagccagctgacgctggtattttgcacgggtaccggtgatantggcttgggacaatcttaccgctttcggtgatgtagtttttcagcgtagcgatatctttatagtcgatctcttgaacgccttccgcggtgaaacggcagaacttgcgacgacggaaataacgtgccatatggctagtctccagaatctatcaattcaatctgctcggcatgcaaaaccattttgctcagtccgttctttgccttgtggcatgaaatgaacccctgaacggttatgcgactgccgaccgttatactgtgagtaatg

SEQ ID NO: 3096 - DNA, 450 bp, Escherichia coli
tctccgaacaaaaaaattccagtcccgaaggactggaaggctcaatcgatcaaatcaatcagaggatgtgcacctgcatttccgggtctttgcgatccagatagtggatggactgaatgcggcgaatggtgcgtgacttgccgcggatcagcagcgtttcggtagtcgcgatattgcctttgcggctaatgccttccagcagatcgcctttggtaataccggtggcagagaagatgacgttatcgctgcgcgccatatcgcccaggcgcaatactttaccggcttcgatgcccatcgctttgcagcgtgccagctcctgctcgccaatgcgacgattctcttcgttgtcgcctttgacgtcatgacgcgccagcagacgaccgttcatgtcgccatctaatgcgcggatcaccgccgcagaaactacgccttccggcgcgccaccaatac

SEQ ID NO: 3097 - DNA, 291 bp, Escherichia coli
agagagttgatcagaccgatgttcggaccttcaggggtttcgattggacatacgcgaccgtagtgagtcgggtgtacgtctcgaacttcgaagcctgcacgttcacgggtcagaccgcctgggccgagtgcggagatacgacgtttgtgcgtaatctcagacagcgggttgttctggtccataaactgagacagctggctggaaccgaagaactctttcactgctgcggaaatcggcttggcgttgatcatatcctgtggcatcagggtatccagatcgcccagagacaga

SEQ ID NO: 3098 - DNA, 347 bp, Escherichia coli
gatcaccagacgcagtttaacgcgcagcggtgcggaataggtcacgccacggatttgacattcctggacgtcaaacaccggttcgccaaggcggtagctgacgtattgcagctcggaattaccgctgtagctctgaatcgggaatacggaacggaaagcagcttccagaccatactgcccttcaggatcttgctcgataaatttctgaaacgagtcaagctggatagaaaggagataaggtacatccagaacttgtggacgtttaccaaaatccttacgaatacgttttttctcggtataggagtaaaccatagggttcctcagctcgctgacaagtcgacccatct

SEQ ID NO: 3099 - DNA, 66 bp, Escherichia coli
tgcattacatcgcgttcagacgtttttgtgcctgtttagcgccatcagtaccagggtatttactga

SEQ ID NO: 3100 - DNA, 281 bp, Escherichia coli
tttcagaccgaagctgccgaagctaacatccgtaccctgcgccagaccgcggttacggcctttgtgcattttacggaattttgtacgctttggttgtaacatcagcgacgctccttatttacggcctttacgcctgctgctttttaggctgagcagccggtttttccggttgttcaacagcagccataccacccaggatctcgcctttgaagatccacactttaacgccgattacaccgtaagtggtgtgcgcttcagaggtgttgtagtcgatgtcagca

SEQ ID NO: 3101 - DNA, 197 bp, Escherichia coli
gctgttctcgggtgatgccgtaggttttcgccatttgctctgcggtgtcgcccatccgcaagccggtagaatattctgctacccgcaggtggtacgggcattaagtcgcgcaaacgcaggcgagagaagagtttcagtcgctggctcatggtacgagctttgttgacatcaaccagcacgcgcgccagttttttact

SEQ ID NO: 3102 - DNA, 405 bp, Escherichia coli
ttgcacgggtaccggtgatacggcttgggacaatcttaccgctttcggtgatgtagtttttcagcgtagcgatatctttatagtcgatctcttgaacgccttccgcggtgaaacggcagaacttgcgacgacggaaataacgtgccatatggctagtctccagaatctatcaattcaatctgctcggcatgcaaaaccattttgctcagtccgttctttgccttgtggcatgaaatgaacccctgaacggttatgcgactgccgaccgttatactgtgagtaatggcctggttttcgtgtccgctaacaataacgggcatttgacaccacgcctgccggtgaaagccggcttcctcctgcacagaacgatgctcaagcacgaactggcagtgaggaattcctgat

SEQ ID NO: 3103 - DNA, 277 bp, Escherichia coli; identical to SEQ ID NO: 2568

SEQ ID NO: 3104 - DNA, 250 bp, Escherichia coli
agcacggcgacgcatacgatcctggtggtacgcgtaaccggtacctgccgggatcagacgacccacgataacgttctctttcaggccgcgcagttcgtcgcgtttgcccgcaacggctgcttcggtcagcacgcgagtggtctcctggaacgatgccgcggagatgaaggactcggttgccagagacgctttggtgatacccagcagatcgcgggagtaagttgcacccactttgccgttcgcttccagt

SEQ ID NO: 3105 - DNA, 277 bp, Escherichia coli; identical to SEQ ID NO: 2568

SEQ ID NO: 3106 - DNA, 249 bp, Escherichia coli; identical to SEQ ID NO: 2445

SEQ ID NO: 3107 - DNA, 62 bp, Escherichia coli; identical to SEQ ID NO: 2145

SEQ ID NO: 3108 - DNA, 207 bp, Escherichia coli
cagagtgccgttattcagcgcgacgttaatcatattgcgacgggctttttccatcgctttctggatcgctgctggaacttcacgcgctttaccgtaaccaaaaccaacgcgaccgttaccatcgccaactacagtcagagctgtgaaggagaaaatacgaccacctttaacggttttagatacgcggtttaccgcgatcagcttttc

SEQ ID NO: 3109 - DNA, 166 bp, Escherichia coli
agtccacgggaagccagcacgtctttaatctcagtaagagattttttaccaaggttaggcgttttaaggagctcaacctcggtacgctgtaccagatcaccgatatagtggatagcttctgctttaaggcagttagcagagcggacagtcaattccagatcgtcaa

SEQ ID NO: 3110 - DNA, 312 bp, Escherichia coli
ttgttaccggtcaccggacgcttgccagtaacttggcagactcgggacatgtctattctccaaaaatcaaattagctcgagcttcgtatggggtattggcgcctcgtcaggctttacagcccggtcatcgcagttctatgtgaactctcgattgccaggcccaaatgccaaacccgagattctcaaaggtggcgtagtatacgctgactcagcgatgtgctcaagtcccgaacagacaaagatcccgaaggatcgcgcatagcgggttaaatccagccgcgttcggcaaaagaaacatactctccacgccca

SEQ ID NO: 3111 - DNA, 40 bp, Escherichia coli; identical to SEQ ID NO: 1642

SEQ ID NO: 3112 - DNA, 164 bp, Escherichia coli; identical to SEQ ID NO: 2439

SEQ ID NO: 3113 - DNA, 164 bp, Escherichia coli; identical to SEQ ID NO: 2439

SEQ ID NO: 3114 - DNA, 589 bp, Escherichia coli
agggctgatagtcaaaaatgctttcggcgtcttcggtggaagaaaacactctgagccacccacgaataccgtaagacgaacccatttttcccaaaacgatgggatcaacaggtgcttgcgcggtgagttgtttgctcatcatgaccaccgtgacagattaagctgctttgtttacttctttgatcagcgcagcaacgcgatcagaaatagttgcgccctggccaacccagtgagcgatgcgatccagatccaggcgagtgccttcttctttttcgctagcgattgggttgaagaaaccaacgcgctcgatgaagcgaccgttgcgtgcattacggctgtcagcgacaacaacctggtagaacggacgctttttagcgccgtgacgtgctaaacgaatagttaccataacatcctcttgtgtgaataaaacaaccggaccccatcgaggaacggagtccggtgtcatattaaaagcccgaaaattttactcatttttgcgggaattgcaatcaacagttgctaactctgctgtaaaagccgtcggcggtgcagccagtttggtgccggagtgcgcgcagtcaccggaccg

SEQ ID NO: 3115 - DNA, 169 bp, Escherichia coli
ttgcctttataaggctcaggacgacggtaggcgcgcagatccgctgcaacctggccgatcacctgcttatcagcgcctttcagcacgatttcagtctgagtcggacattcagcagtgatacccgcaggcagcctgatggtcaacaggatgagagaaacccagagacagg

SEQ ID NO: 3116 - DNA, 441 bp, Escherichia coli
aatctgctcggcatgcaaaaccattttgctcagtccgttctttgccttgtggcatgaaatgaacccctgaacggttatgcgactgccgaccgttatactgtgagtaatggcctggttttcgtgtccgctaacaataacgggcatttgacaccacgcctgccggtgaaagccggcttcctcctgcacagaacgatgctcaagcacgaactggcagtgaggaattcctgatggactgacctttcgaaggggagccctgcacacggtgccggacaacaccagacggttggtcatcagaaattactcttcagaatccccagcttcagcatcatcagcggtttcgtttgcgaaatcatcgcgacgctcacggcgctcgtctttcgctttaaccatcggagatgcttcggtaacagcgtgcttggtacgcataaccatgctgcggat

SEQ ID NO: 3117 - DNA, 158 bp, Escherichia coli
tcggcttcggtatacagcggcttgatggcgatcccttccgcggtttgatgaaccagcgagtcgacagttttctcccgacggctcaattccttgttggcaagctgttgccactcctgcacgttagacattatttgctccgtaaaacgcaatcaaaatga

SEQ ID NO: 3118 - DNA, 148 bp, Escherichia coli
tctgcgtcgccttccagcgctttcagagcagaaccacgaacgatcggagtgtcgtcgcccgggaagtcgtactgagacagaagttcacgaacttccatttcaaccagttccagcagctcttcgtcatcaaccatgtcgcatttgttca

SEQ ID NO: 3119 - DNA, 434 bp, Escherichia coli
aaatggaccaaatttgcgctgaatatcgtcggcgctaaatttaattcggttaacgcctgggattttctcgatgatagcatcgaccagcaccgcaatcggccccatatacgccgacgtaccgtgcggaatagcaataccttccagctcaaagaaatttcgggtatcgcgggcaaaccagtcgccgagcttataaacaaacgccgcgtgaattaccacacctgccatccctatcatccatgaaccggttgccagatgcagcaacgcgccggtgaaggtcatatgccagatattccagatatcaacatttaccacccgcgtcatacgggtcagtaacatcgccacgttaaccagaatcgcaatcggaatcgccaccagcgcaatttgcgacgcccaggtcattggtgaagagcccggccagccaacatcgaccacat

SEQ ID NO: 3120 - DNA, 221 bp, Escherichia coli; identical to SEQ ID NO: 2547

SEQ ID NO: 3121 - DNA, 309 bp, Escherichia coli
tttttctacgtcttcaccttttttaccgataacgatacccgggcgagcagtgtgaatggttacacggatgctcttagccggacgctcgataacgatacgagatacggacgctttagccagttccttagtcaggtactgacgtactttaaaatcgctgtccaggttgtcagcgaattctttggtgttcgcaaaccaggtagagttccatggttttacaatacccaggcgaataccattaggatgtactttctgacccattgctagtctccagagtctcagcgatcggacacaaccacagtgatgtggctg

SEQ ID NO: 3122 - DNA, 299 bp, Escherichia coli
  misc_feature (68)..(68): n=g, a, t or c
gctcatcgccgccagaaacgccgattttgcctggctggctttttctgcttccgcccgtgcctgtcggngttctatcaccagttcctgcaattcagctgtacgcgcttttgacctgcgccgccagctgttcgcggtggcgattcagtgcatgaacattgctgcgaaacgcatccatcagccgcccgatggtatccagctcccgtacgccagcggtttccgggaaaggggagtcaatatcaccgtccagcagccgttgcagcgcctgcgtttgttccgcaagtggacgcgtgactgagcga

SEQ ID NO: 3123 - DNA, 570 bp, Escherichia coli
acgccgtgtagaagaaacagaagaagatgattgcagacgcatagagtaacacataaagcggttgcccaggctgcaaatacagcgaaattgttgtcagccagttccaaccagtaccgcccccgaaccatgacgcgatggtcgccgggaacagaataatactggaagcgaagattgccgggattacccccgccatattcactttcagcggtaaatgtgtgctctgtgcagcatagacacgacgaccttgctgacgtttcgcgtagtttaccacaatgcggcgttgaccacgctcaacaaatacaacaaagaacgtcactgcaaatactaatactgcaaccaacagcaacacgaggaagtgcaggtcgccttgacgcgcttgctcgatagtatgggcaatggctggcgggagtcccgcgacaataccggcgaagataatgattgaaataccgttgccgatacctcgttcagtaatctgttcgcccaaccacatcaggaacatggtcctgtgaccagacttacaacagcggtgaagtaaaatgcaaagcccgggttaatcaccaggccttgcat

SEQ ID NO: 3124 - DNA, 543 bp, Escherichia coli
gattgaacgagtagtgagatcgactttcttgataacctgcccatcgaggaacggtacgagacgttccttgataccaaacgcatctttcaggtttgccttaatgacgagaacgtcattagatccggtttccatcatatcgacgactttaccgagatcgtagccttcagtggttactacctggcagcccatcaggtctttccagtagtagtccccctcttcaagctgaggcagctgcgatgaatccacgacaatttcacaattcgtcagcaggttcgccgcatcacgatcgtcaacgcctttcagcttgatgatcatgtcctgattgtggtgcttccagctttccagctggacttgctgccactgacccgccttctggataaaccagggctgatagtcaaaaatgctttcggcgtcttcggtggaagaaaacactctgagccacccacgaataccgtaagacgaacccatttttcccaaaacgatgggatcaacaggtgcttgcgcggtgagttgtttgctcatcatgaccaccgtgacagatta

SEQ ID NO: 3125 - DNA, 369 bp, Escherichia coli
tctcttccggcagctcgctgtatcctgcgctcgccatcaatacgacgtgctctcctatcgggtattttgccgtcaggctgacatagggcacccaggcatcctgcgcggaataacttgccagaccgctacgacgggactcactctctgaaatgccatagtaatagtcactgaaattctcgtcataatagagaacgcccagcgcaggtgtcagcgacagacgacctatctgcattttgtggaataccgatagctcccccacccagccgttgctgttatccagaacgtccgcagctgcagaggctttcacggttccccaacgctcgtggtgataccaggcaacccccgccatagccgtactatcacgcttat

SEQ ID NO: 3126 - DNA, 117 bp, Escherichia coli
cggagcttcaacattcatcagaacgtagtgtgctttgtgcagtttgttgatcgggtaagccagctgacggcggccccagtcttccagacggtggatcttgccttctgcaccagtgat

SEQ ID NO: 3127 - DNA, 429 bp, Escherichia coli; identical to SEQ ID NO: 2091

SEQ ID NO: 3128 - DNA, 128 bp, Escherichia coli
atgtaggtaaatcaaagctgcaacagccgcctgggatgctcagtcgctgacgcaccagagcaatcaaacgatcttcacgcagaaattgcccgatacgcggcgcggaaattaatacgcctccccgccgc

SEQ ID NO: 3129 - DNA, 292 bp, Escherichia coli
agaaacggagcggcacctcttttaacccttgaagtcactgcccgtttcgagagtttctcaactcgaataactaaagccaacgtgaacttttgcggatctccaggatccgcttttttttgccataaaaaagcccggcgataagccaggctcaaatttatacatataaatgttcttaccctaaccgagcctgcgcaaaagcaatcgcctgcgccacctgctgcggtgagacgccgccttttgccgcacgcttgtcgaggcacgattgcagcgacagaatcggatagacatcttc

SEQ ID NO: 3130 - DNA, 316 bp, Escherichia coli
gggggtataatgaccattctgttattgcatagagtagttaacatgaagcggagtagaacggaagtggggcgctggcgcatgcagcgtcaggctagccgacgtaaatcgcgttggcttgaggggcaatcgcgccgaaatatgcgtatccacagcatcaggaagtgcattctaaacaaacagcgtaactcgttattgtttgcgatctacaatatctaaatgtactgggcaccattgcggtgcccaataagtttactcttccgtctttaaactctatttttgcgccgattctttactgtcagctttcgtttctagttca

SEQ ID NO: 3131 - DNA, 511 bp, Escherichia coli
cgttgtcgcctgcacggaagccacacttcagaatacgagtgtaaccaccggcacggctcgcgaaacgcgggcccagttcgttaaacagttttgccacgatctcgttatcacgagtacgggcgaatgccagacgacgattagcaacgctatcagtcttggcaagagtaatcagcggctcaactacgcggcgcagctctttcgctttaggcagagtcgtcttgatgatttcatgacgaaccagtgaacctgccatattgcggaacatagcctggcgatggctgctgttgcggttcagttgacgaccactcttacgatggcgcatgaccttatccttctcagtaaaaccttaacctgtgatccggttactcgtcagcgatgcttgccggtggccagttttccaggcgcatgcccagagacagtccacgggaagccagcacgtctttaatctcagtaagagattttttaccaaggttaggcgttttaaggagctcaacctcggtacgctgtacca

SEQ ID NO: 3132 - DNA, 231 bp, Escherichia coli
ggcagctcatctttacgtttatagatgcgcagacctgggcggctgacacgctgaatgctttctacaacagctttgccctggaaatacttcagagtaagttccagttcaggcttggtgtcgccttcaactttaaaatcttcaataaaaccttcttccttcagcacgttggcgattgccactttcagcttggaggaaggcatggtgaccgcagctttgttcgcggcctgaccg

SEQ ID NO: 3133 - DNA, 308 bp, Escherichia coli
gtcggcagctttggtctgcgcgatttcctgcagctgagcgcgggaaattttacccactttgtctttgttcggcttaccggaaccagacttgataccagccgcttttttcagcagaactgctgccggcggggtcttggtaacgaaagtgaaagaacggtcagcgtaaacggtgattactaccggaatcggcagacctttttcgatggaatcagtttttgcgttgaacgctttgcagaattccatgatgtttacgccctgctgacccagagccggacctactggcggactcgggttagccataccagctg

SEQ ID NO: 3134 - DNA, 411 bp, Escherichia coli; identical to SEQ ID NO: 2850

SEQ ID NO: 3135 - DNA, 444 bp, Escherichia coli
tgttcctggatacctttatcaacggccgggatgtattcgccagggattacaccacctttaatgtcgttgatgaactcgtagcctttcgggtttgaacccggctccagcgggtacatgtcgataacaacatgaccatactgaccacgaccaccagactgtttcgcgtgtttaccttcaacatcggtaactttctggcggatagtttcacggtaagcaacctgcggtttacctacgttcgcttcaacgttgaattcacgcttcatacggtcaacgatgatgtcgaggtgcagttcgcccatacccgcgatgatggtctggttagattcttcgtcagtccatacacggaaagacgggtcttctttagccagacggcccagagccagacccattttttcctggtcagctttggttttcggttcaactgcgatggagattaccggctca

SEQ ID NO: 3136 - DNA, 315 bp, Escherichia coli
tcggcgggccagtttagcacaaagagcctcgaaacccaaattccagtcaattcttaatcagcttgcttacgcaggaatgctgggatatccagataatccggctctttcgcagtttgcggcgcattgtcattcacgactttagcaaccggcttctgctcctgggtcagcggagccatcccatgctgctggtagcgatccatcactggctgctgaacctgcttattggtcaccagagtgatttcaggacgtttgtccatgccgatacctgtcgcaacaacggttacgcgcagctcgtcattcatatccgggtcaaga

SEQ ID NO: 3137 - DNA, 384 bp, Escherichia coli
ggcatggaaatactccgttgttaattcaggattgtccaaaactctacgagtttagtttgacatttaagttaaaacgtttggccttacttaacggagaaccattaagtcttaggacgcttcacgccatacttggaacgagcctgcttacggtctttaacgccggagcagtcaagcgcaccacgtacggtgtggtaacgaacacccgggaggtctttaacacgaccgccacggatcaggatcacggagtgctcctgcaggttgtgaccttcaccaccgatgtaggaagtcacttcgaaaccgttagtcagacgaacacggcatactttacgcagcgcggagttcggttttttaggagtggtagtatatacacgagtacatacgccc

SEQ ID NO: 3138 - DNA, 154 bp, Escherichia coli
tgtgcgtagtgacgggtcggggtgtcgtattcaacgtgagaagtgttgatggtgataccacgagctttttcttccggcgcgttatcgatctggtcgaatgcaccgagcagcaccgccgtaggttttagccagtaccggtggtgattgcagcggt

SEQ ID NO: 3139 - DNA, 305 bp, Escherichia coli
ggtcagccagatcttccatacctaccagttctgcgcctgcagctttagcagcttcagcgtttgcaccttgggtaaatacggctacgcgaacggaacggccagtaccgtgcggcagtacagttgcaccacgtacgttctggtcagatttacgagcgtcgatgccgaggttaacagctacgtccacgctttctacgaatttagcagtcgccagctctttcagcagtgcgatagcttcgttgatgtcgtactgtttggttgcatcaactttctcgcggataacacgcatgcgcttggtcagtttagcc

SEQ ID NO: 3140 - DNA, 311 bp, Escherichia coli
ttgcgctcagcgtcaacgcgtactacgtcaaggctctgaacggttacacgttcgttacccatctgacctgccattttcttgcctttgaacactttgcccggagtctggttctgaccgatagaacccggaacgcggtgagacaaggagttaccgtgagtagcgtcctgggtacggaagttccagcgcttaacggtacctgcgaaacctttacctttagaggtgccagttacgtcaacttttttaacgtcagcaaacagttcaacgctaatgctctgacctacagtgaactcttcgccttcagccaggcggaa

SEQ ID NO: 3141 - DNA, 462 bp, Escherichia coli
gaacgggatcagggacgcaccgacggataccacctgctgggtggatacgtccatgtagtcaacctggtcgcggctgaacaagctggattcgcctttgctacggcaagttaccaggtcttctacgaagtggccttcttcatccaagttggagttcgcctgggcgataacgtagttgccttcttcgatagcagacaggtagtgaatttcgtcagttacaacaccgtcggtcactttacgatacggagtctcaaggaagccgtattcgttagtctgtgcgtacacggacagagagttgatcagaccgatgttcggaccttcaggggtttcgattggacatacgcgaccgtagtgagtcgggtgtacgtctcgaacttcgaagcctgcacgttcacgggtcagaccgcctgggccgagtgcggagatacgacgtttgtgcgtaatctcagacagcgggttgttctg

SEQ ID NO: 3142 - DNA, 267 bp, Escherichia coli; identical to SEQ ID NO: 2498

SEQ ID NO: 3143 - DNA, 217 bp, Escherichia coli
gctcttcagtcaggatctgctgacgttccaggttggtcataccgccttcgataaccacataggattcaaagtacagtacgcgttcgatatcgcgcagcggcatatcgagcagcagaccgatacgggacggcagcgatttcaggaaccagatgtgcgcagtcggggaagccagttcgatgtggcccatacgctcacggcgtactttagtctgggtcac

SEQ ID NO: 3144 - DNA, 155 bp, Escherichia coli
attgctgaaataacgtaggcctgataagcgtagcgcatcaggcaattttacgttttaatcacttcttcttgttcatcatcgctttcaggtcagcgaatgggttgtacttcgcttcaccgacatctttctgcgcatcttcccctgcgataacggtc

SEQ ID NO: 3145 - DNA, 204 bp, Escherichia coli
gccttccaggaagtcggagctacccgcgttaacgatggtagctttacgcagcatctgacgaacgataacttcgatgtgtttatcgttaatcttaacgccctgcagacggtatacgtcctgtacttcgttaacgatgtaacgagtaacagcatgaacaccacgcagacgcagaatgtcgtgcggcgcttccggaccgtcggaaat

SEQ ID NO: 3146 - DNA, 243 bp, Escherichia coli
tgcgccaaacgcatccagcagggagataccgcggcccagaactttcagcagtttgtcgttcgggatagtgatcagagagtccacatgcttggacagttcagtgatcccctgctccgcgaatgccatacgcttcttgccttcaaagttgaaaggcttagtgacgacagcaacggtcaggatacccaaatcttttgccacttcagcgacgactggtgctgcacctgtaccggtaccaccacccat

SEQ ID NO: 3147 - DNA, 333 bp, Escherichia coli
aatgatcgacgccgaaatatacggcatgatccccagagcaaagatagaagcacggctgagagcaccaccagagaacatgttaaacatctcaatgatggtgcctcgctgttgctcaagcagtttggcaagtacagcggcatcaataccagggatcggaataaaagagccaatacggaacacaatcagcgcaccgataacaaacagcagtctgcgtttcagctcgcctaagccacctttggcactttgaaaatctaatcccggttgtttagccatctgctacttattcctcgattttaccgccagcagcttcgatagcagcacgagcgcctttag

SEQ ID NO: 3148 - DNA, 181 bp, Escherichia coli; identical to SEQ ID NO: 2604

SEQ ID NO: 3149 - DNA, 75 bp, Escherichia coli
accgttttgtgccatgtaactggcgtacattcccatgtagtctgaacgtgcggtaccgtcgcctccgctatagtc

SEQ ID NO: 3150 - DNA, 83 bp, Escherichia coli; identical to SEQ ID NO: 2913

SEQ ID NO: 3151 - DNA, 115 bp, Escherichia coli; identical to SEQ ID NO: 2333

SEQ ID NO: 3152 - DNA, 359 bp, Escherichia coli; identical to SEQ ID NO: 2140

SEQ ID NO: 3153 - DNA, 131 bp, Escherichia coli
atgaatccagttcaaagccctgtaaaggaacaagccgcttttgctgtaaaaaacgttcggcaagagtgactaatttgctttgttcctgttccgtcagacacgttaaaagggggatcgatagtgcttcctgc

SEQ ID NO: 3154 - DNA, 332 bp, Escherichia coli; identical to SEQ ID NO: 2793

SEQ ID NO: 3155 - DNA, 522 bp, Escherichia coli
aatgcgcacagaagaggagtaaaccacaccgttcaaggagataacagcaacttcagtggtaccaccaccgatatcaaccaccatagaaccggtcgcttcagaaaccggcaggccagcaccaattgcggcagccatcggttcttcaatcaggaagacttcacgggcaccagcgccctgcgcggattcacgaattgcgcggcgttcaacctgggtcgcgccaaccggcacacaaaccagaacgcgcgggcttggacgcataaagctgttgctgtgcacttgtttgatgaagtgctggagcattttttcagtcacgaagaagtcggcgataacgccgtctttcattgggcgaatggcagcaatattgcccggcgtacggcccagcatctgcttcgcgtcatgacctactgcagctacgcttttcggtgaaccggcacgatcctgacgaatggccaccacggaaggctcattcaatacgatgccttgtccttttacataaatgaggtattcgcagtacccagtcaa

SEQ ID NO: 3156 - DNA, 138 bp, Escherichia coli; identical to SEQ ID NO: 2202

SEQ ID NO: 3157 - DNA, 241 bp, Escherichia coli
gccgacgccgatgactttaatcaccgcgtcattggtaagttccattggttcaaacatagtttctctccgatttgtgcctgtcgcctgaggccgtaatcatcgtcggcctcataaaaattaaaactcttttcgcagccaactattgagtcgcttgatccacgagccaactgatgctgtaacacgtttttctacttcagcttcaccgttaagatgtgactctttcccatagtgaagcaatccc

SEQ ID NO: 3158 - DNA, 138 bp, Escherichia coli
cggctttgacctcaaattttgcattcgctttcgcgaactctttgaacagacgagcagcagcgcccgggtgttccatagagtatgcaatcagggtcggaccaacaaacgcgtctttcaggcactcgaacggagtacctt

SEQ ID NO: 3159 - DNA, 203 bp, Escherichia coli
cttttcagcgcgccgcggtacatcttcttgttaactttttgactgtggtcctgcggacgagcagcaaaggtcacgccaccagaacgccagatcgggctcttgatagaaccagaacgcgcacggccggtgcctttctggcgccacggttttttaccggaaccagttacttcagcacgagtcttctgagcacgagtaccctgacg

SEQ ID NO: 3160 - DNA, 392 bp, Escherichia coli
ttgcacgggtaccggtgatacggcttgggacaatcttaccgctttcggtgatgtagtttttcagcgtagcgatatctttatagtcgatctcttgaacgccttccgcggtgaaacggcagaacttgcgacgacggaaataacgtgccatatggctagtctccagaatctatcaattcaatctgctcggcatgcaaaaccattttgctcagtccgttctttgccttgtggcatgaaatgaacccctgaacggttatgcgactgccgaccgttatactgtgagtaatggcctggttttcgtgtccgctaacaataacgggcatttgacaccacgcctgccggtgaaagccggcttcctcctgcacagaacgatgctcaagcacgaactggcagtg

SEQ ID NO: 3161 - DNA, 438 bp, Escherichia coli
ggcacaaaaagaagccgccctcaggcggctcctttttgataattaagactgcttggacatcgcagcaacttctgctgcaaagtcagtctcaactttctcgatgccttcacccacttcgaagcggatgaagccagtcacttcagcgttatgctctttcagcagctgaccaacagttttgcttggttccataacgaacggctgaccggtcagagaaacttcgccggtgaatttcttcatgcggccttcaaccattttctctgcgatttctttcggcttaccagactgcatcgcgatatccagctgtacctggtattctttttctaccacttcagcggatacgtcttccggtttgatgaattctggcttgcttgcagcaacgtgcatagcgatgtgtttaaccagctcttcgtcagcgcctttagcagcaaccagaacgcc

SEQ ID NO: 3162 - DNA, 415 bp, Escherichia coli
tcttggtacgctgaccgcgaaccgggagaccacgacgatgacgcaaaccgcgatagcaaccaagatccatcaggcgcttgatgctcatgctgatttcacggcgcagatcaccttcaacgacaaatttggcaacttcgtcacgcagcgtgtcgatttgtccttcagacagctcactgatcttaacatcttcagcgatacccgctgcagccaggatggctttagaacgggtcttgccgacgccataaatcgaagttaatgcgattacggcatgcttatgatcaggaatgttaatgcctgctatacgggccactatgcactcctactatttaatatgtacgttccatgctgaaaagcccgttttcaggatactcaaatggaaacgcacagacatacaaaagattggctggctaatcta

SEQ ID NO: 3163 - DNA, 266 bp, Escherichia coli
attgagttcagcagggcacgcgcggtaccagcctgtgcccaaccgtctgcgtaaccatcacgcggaccgaaggtcagggtattatctgcatgtttaacttcaacagcatcgttgagagtacgagtcagctcgccgtttttacctttgatcgtaataacctgaccgttgatttttacgtcaacgccggcaggaacaacgaccggtgctttagcaacacgagacattttttcctccgattaggctacgtagcagataatttcgccacc

SEQ ID NO: 3164 - DNA, 284 bp, Escherichia coli
gatggcaatacgggcaggtttctttggtatagatttcaacattggccataaattagctcctgtttttttaccctgaaatttcatgttgcagggcggcagcaaaatggagtgtccccagaagcttataacaataagtcgctgggggcctaattgcagctaacggcctgcatcatgaaagacgacaggtaaattatttgccgcgcaccaaaggcaagttttcgccagcccagccagcgacgccttctttcagcacgaatacttgcgcaaaaccagctttcgtcagt

SEQ ID NO: 3165 - DNA, 146 bp, Escherichia coli; identical to SEQ ID NO: 2517

SEQ ID NO: 3166 - DNA, 189 bp, Escherichia coli
catgaccttatccttctcagtaaaaccttaacctgtgatccggttactcgtcagcgatgcttgccggtggccagttttccaggcgcatgcccagagacagtccacgggaagccagcacgtctttaatctcagtaagagattttttaccaaggttaggcgttttaaggagctcaacctcggtacgctgta

SEQ ID NO: 3167 - DNA, 276 bp, Escherichia coli; identical to SEQ ID NO: 1796

SEQ ID NO: 3168 - DNA, 509 bp, Escherichia coli
ttaatacggtacagcaccggatcgcgcatcacgataaacggtgaagccatgtcgattttcgcacgcaggcaggctttaccttcttcaaaaccaccggcacgcattttttcgaacagcgccaggttctcttcaacgctgcggtcgcggtacgggctgtttttacccggttgcgtcagggtgccgcggtattcgcggatctgttccggcgtcagttcatcaacgtacgccaggcctttattgatcagttcgatcgcataggcgtggagctgatcaaaataatcggaggagtaacggacgttaccagaccagtgaaaacctaaccactctacgtcgtttttgatcgactcaacatactcgatatcttcttttaccgggttagtgtcgtcgaaacgcaggttgcactggcctttatagtcctgggcgatcccgaagttcaggcagatagatttcgcatggccaatatgcagatagccattcggctccggcgggaaacgggtgtgtactgtggt

SEQ ID NO: 3169 - DNA, 153 bp, Escherichia coli
taacgtgctctttgatgtacgcagctgcttcttcttcagcgctaccgccgatctcaccgatcatcacgatcgcttcggtctgcggatctttttcgaacatttcgagaatgtcgataaagttagagcccgggatcgggtcaccgccgataccga

SEQ ID NO: 3170 - DNA, 321 bp, Escherichia coli
gctcattgacagagacattttttactgcgcgcagaaaacgaccttcttcaaaatccagcacgcgatccaccagtaagaacgggaaacggtgcggcagaagttctaaaatctcttcaatctgcagagtatgagtgttagtagtcaagatactcttcctgtcaaaatataagaaacgacaataataacacggcctgccgcaatcgtaagaatgagacaggccgtaaagtttggcgaacaaaagatggaacgttagtcttgttgattaaccttgcgctcaagcgatttcagacgcttgctcatgtcatcaatgttcatcaccag

SEQ ID NO: 3171 - DNA, 304 bp, Escherichia coli
cgacccaggcgtttacccgcctttttggagccttcggccggagacagagtatttaaacgcatctcttactcctcaactttaaccatgaaggaaaccgcgttgatcataccgcgaatagcaggagtatcctcgcgctctacggtgtgaccaatacgacgcagacccaggccaagcagcgttgccttgtgtttcggcagacgaccgattgcactgcgggtttgagtaattttaatagtctttgccatggtttatttccccagaatttcttcaacggatttaccacgcttggcagcgaccatttctg

SEQ ID NO: 3172 - DNA, 150 bp, Escherichia coli
gacgcagacccaggccaagcagcgttgccttgtgtttcggcagacgaccgattgcactgcgggtttgagtaattttaatagtctttgccatggtttatttccccagaatttcttcaacggatttaccacgcttggcagcgaccatttctg

SEQ ID NO: 3173 - DNA, 163 bp, Escherichia coli
agttcagaacgcagggactcgtcgtattccatcagagcgcgggtgataccgtgacggatcgcaccagcctgaccagagataccaccacctttaacggtgatgtacaggtccagtttctcaaccatgtcgaccagttccagcggctgacgaactaccatgcggg

SEQ ID NO: 3174 - DNA, 204 bp, Escherichia coli
ttacgatggcgcatgaccttatccttctcagtaaaaccttaacctgtgatccggttactcgtcagcgatgcttgccggtggccagttttccaggcgcatgcccagagacagtccacgggaagccagcacgtctttaatctcagtaagagattttttaccaaggttaggcgttttaaggagctcaacctcggtacgctgtaccag

SEQ ID NO: 3175 - DNA, 226 bp, Escherichia coli
gtcttagttacaaaggtggttttaatcggcagtttcgctgctgccagcttgaatgcttcacgggccagctcttccggaacaccgtccatttcatacaggactttacccggctgaatcaaggcaacccaatactccacgttacctttacctttacccatacgcactgccagcggcttttcagtgatcggtttgtccgggaacacacggatccagatcttaccttgac

SEQ ID NO: 3176 - DNA, 312 bp, Escherichia coli; identical to SEQ ID NO: 1947

SEQ ID NO: 3177 - DNA, 181 bp, Escherichia coli
ttctggtgccattcgttagccagttcaaccatgtctgccgggatatcttcgtattcgaaggttacgccctggtcagcgtcgttccagttgatagctttcattttcaccaggtcaacaacaccggtgaaatgttcttcagcaccaatcgccagctgcagcggaaccgggttcgcgcccagac

SEQ ID NO: 3178 - DNA, 205 bp, Escherichia coli
aagttttcacgcggcagcatatcttcgcgcaggatcacggcttcagcgttgttgcccagatccagagagatgttgtcgcggtttacttttttcaccacgccggtgatgatttcaccttcgtgttcacggaactgatcaaccaccatcgcacgttcggcttcacgcactttctgcacgataacctgttttgccgtctgggtagtga

SEQ ID NO: 3179 - DNA, 281 bp, Escherichia coli; identical to SEQ ID NO: 3040

SEQ ID NO: 3180 - DNA, 231 bp, Escherichia coli
ggcagctcatctttacgtttatagatgcgcagacctgggcggctgacacgctgaatgctttctacaacagctttgccctggaaatacttcagagtaagttccagttcaggcttggtgtcgccttcaactttaaaatcttcaataaaaccttcttccttcagcacgttggcgattgccactttcagcttggaggaagcatggtgacccgcagctttgttcgcggcctgaccg

SEQ ID NO: 3181 - DNA, 466 bp, Escherichia coli
gttcttcgtttgtcatcagcctcagagcattcaggtaactgaatgctcttttttatgcattacaaactgcacgccggtatgcgtgcttcattcacgatttgcgtaaaacctgccaacgaacacatgccctgcgcatttcgctcttcacatcctgccagggtcagtttcacctctccgggcggcgtatttaatgacagcggcgttttatcacgcatctgctgtaaagtctggaagaccagcgaaacctgaatccactggctgttatcgcttagccgacgccagcgttcaaacaccagttcaccacctggcggcgtgttatccggctgaccgggaagcgtccagttgagctccagtgcgccgccgagatttgccagattagtatcgtgtccggcgataaacagcactgaagtgggtaatgtcacaccatacgcctgtttttgcggtggatggggcgtcaacgctgtct

SEQ ID NO: 3182 - DNA, 137 bp, Escherichia coli
aatccttaaaccatagccagaggaaaatggctccttccggtttatgaatcaggcagcgattttccggtaaatagcggcgaatgatggcgatagtttcctgaacacgctggtagtaaaacggtttgatgactgtttca

SEQ ID NO: 3183 - DNA, 229 bp, Escherichia coli; identical to SEQ ID NO: 1976

SEQ ID NO: 3184 - DNA, 202 bp, Escherichia coli; identical to SEQ ID NO: 2861

SEQ ID NO: 3185 - DNA, 255 bp, Escherichia coli
cgtgttgattttctacgttgaattggagcctggttatgcatgaaaaatctcccgcgttacccgtctgttactgcgccggtgattgttcggcattgagggtcagacgcgcaacctggttagttctgataaaacgactcagatcgacaggtttcccttgatactggatctgtactgcggctggcgcaccaattttcagtttgtacggtgcctggccggttaagttcaaattaccgtctttacgctgcataccgctaa

SEQ ID NO: 3186 - DNA, 688 bp, Escherichia coli
gcgacatcgcgacgcacttgcttcaacaggtgagactgttgcagctggccacttgcagcctgcatacgcaggttgaactgctcacgcagcaggttcagcagctcggtgttcagctcttcaacgctcttctcacgcagctcttttgctttcattacatcaccgtcttagttacaaaggtggttttaatcggcagtttcgctgctgccagcttgaatgcttcacgggccagctcttccggaacaccgtccatttcatacaggactttacccggctgaatcaaggcaacccaatactccacgttacctttacctttacccatacgcactgccagcggcttttcagtgatcggtttgtccgggaacacacggatccagatcttaccttgacgcttaactgcacgggtcatagcacgacgtgctgcttcgatctgacgggcagtcagacgaccacggccaacagctttcagaccgaagctgccgaagctaacatccgtaccctgcgccagaccgcggttacggcctttgtgcattttacggaattttgtacgctttggttgtaacatcagcgacgctccttatttacggcctttacgctgctgctttttaggctgagcagccggtttttccggttgttcaacagcagccataccacccaggatctcgcctttgaagatccacactttaacgcc

SEQ ID NO: 3187 - DNA, 231 bp, Escherichia coli
ttttcgctagcgattgggttgaagaaaccaacgcgctcgatgaagcgaccgttgcgtgcattacggcgtgtcagcgacaacaacctggtagaacggacgctttttagcagccgtgacgtgctaaacgaatagttaccataacatcctcttgtgtgaataaaacaaccggaccccatcgaggaacggagtccggtgtcatattaaaagcccgaaaataatactcatttttgc

SEQ ID NO: 3188 - DNA, 321 bp, Escherichia coli
ataacagccaacttgtgaaatgggcacggaaatccgtgccccaaaagagaaattagaaacggaaggttgcggttgcaacgacctgacgttctgcgccccagaagcagccataagtgttaaagcagctggcgacgtattcacgatcgaacaggttgttaacatgcagcgccacgttggagccagccatgccgactcgcgccagatcataacgtactaacgcatccacgaccgtataacttcccactttaaaggagttagccggatcaccataactggagccagtataacgaccaccggtgcccagcgtcagacctgaaagcg

SEQ ID NO: 3189 - DNA, 106 bp, Escherichia coli
atgcctgctactgctgattttttccccgcgacatgccgtgtcgcggggatttttttatccgggctttacagcgtttgtgggctcacttgatgacggcggacatcca

SEQ ID NO: 3190 - DNA, 212 bp, Escherichia coli
ggcgtgcgcgggtcgcacgacggatacgagcagatttcttatccatagtgttaccttacttcttcttagcctctttggtacgcacgacttcgtcggcgtaacgaacacccttgcctttataaggctcaggacgacggtaggcgcgcagatccgctgcaacctggccgatcacctgcttatcagcgcctttcagcacgatttcagtctgagtc

SEQ ID NO: 3191 - DNA, 169 bp, Escherichia coli
tttttctacgtcttcaccttttttaccgataacgatacccgggcgagcagtgtgaatggttacacggatgctcttagccggacgctcgataacgatacgagatacggacgctttagccagttccttagtcaggtactgacgtactttaaaatcgctgtccaggttgtca

SEQ ID NO: 3192 - DNA, 103 bp, Escherichia coli
cgatgtgctgcagcttcggtttgtacgggtgacgctgtacgtcctgagctttaactttgatttctttaccgtcaacaacgatggtcagaacttcgctgtagaa

SEQ ID NO: 3193 - DNA, 279 bp, Escherichia coli; identical to SEQ ID NO: 1855

SEQ ID NO: 3194 - DNA, 157 bp, Escherichia coli
gatttgttcgaaatgtcgcttcgctacgttgtttttccacattaagcggacgaatacgtttacccaccttatgggtaaataaagttccaccgatcacaatgagcacgacggtatagaccatatacccctggatattccattctgttccaccaacagt

SEQ ID NO: 3195 - DNA, 163 bp, Escherichia coli
gttgttatgcattgcactgtaccagtacacgagtacaaaagacagaaaaaaagccccgatggtaaaaatcggggcctgtatatattattttacagattgtgttcgctgttcagcgatgattacgcatcaccaccgaaacgacgacgaccggtagaatcatcac

SEQ ID NO: 3196 - DNA, 676 bp, Escherichia coli
ggtcggcagccaggtatataacccggaggccagcttgcggatcatcccggcgcgcagcatcagctgatggctgatcacctcggcgtcggcaggtgtctccttgagagtggagagcaggtattggctagtacgcatgttgttacggttccagttggaaggtagaacaggctcaaggcgagcctgggacaaaaaaaagtgatttagtttaccagtgcaaaagaaatgtcaaaagagaagggcgtgaatttaacgcggttccagcgcaaagacttcaaaacctgcgtcggtgacgcgccagcgaacgttaaaatcatgtagccagacggcataggttttgcccgtttcctcacctttacgataggccgggcgcgggtcctgcgccagtacttcgcggataaacagcgttaactgcggataacgcttctccagcgtcaaaagctgcttttcgacctctgcggtaaaactcaccgccatctctgcagctggcgcactttgcgcatagctggcactggcatcgggaagcgattcggcaaaggggagatacggtttgatatccactaccggcgtaccatcgaccagatccagactgccgagcttcagaatcacgctgtctttatggcaaacaacctctttcagctctaccagcgacatgccaattgggttagggcggaaagta

SEQ ID NO: 3197 - DNA, 405 bp, Escherichia coli; identical to SEQ ID NO: 2166

SEQ ID NO: 3198 - DNA, 406 bp, Escherichia coli
agtcacatcagtaatgttagtgatgcggaaacctgcggcgttcagagcacgaatagtagattcgcggcctggacccggacctttaaccataacttccagattcttgatgccgtattctttcacggcgtcagcgcaacgctctgctgcaacctgagctgcaaacggagtggatttgcgagaaccacggaaaccggaaccaccggctgttgcccaacccaacgcgttaccctgacgatcagtgatagtcacgatggtgttgttgaaagaagcatggatatgagccacgccgtcagagacttgttttcttacacgtttacgtgcacgaattggtgcctttgccattattcaatcaccccgattatttcttgatcggtttgcgcggacccttacgggtacgtgcgttggt

SEQ ID NO: 3199 - DNA, 107 bp, Escherichia coli
tagctttgcactgtttcagacccagggagatacgacgacgttcttcgtcgatatccagaaccataacttccactacatcgccaacgttaacaactttggacgggtgg

SEQ ID NO: 3200 - DNA, 316 bp, Escherichia coli
tgccggtggccagttttccaggcgcatgcccagagacagtccacgggaagccagcacgtctttaatctcagtaagagattttttaccaaggttaggcgttttaaggagctcaacctcggtacgctgtaccagatcaccgatatagtggatagcttctgctttaaggcagttagcagagcggacagtcaattccagatcgtcaacagggcgcagcaggatcggatcgaactctggtttctcttctttcacttcaggctgacgtacatcacgtaagtcaacgaaagcttccagttgttcagccagaatggttgccgca

SEQ ID NO: 3201 - DNA, 112 bp, Escherichia coli
aatcagcggtgaaacaaccacggtaaggccgtttagcaataaggcagggatttgatagcaaagggattttccgccaccagtgggcatgacgacgaggcaatcgcggccggaa

SEQ ID NO: 3202 - DNA, 463 bp, Escherichia coli; identical to SEQ ID NO: 1610

SEQ ID NO: 3203 - DNA, 154 bp, Escherichia coli
ggttttcgcgttcggcgtatcaaccagcgtcatttcctgggtagcagcagcgcgcggttctttcggcgcgatagcttctgccagttcaatgttcgctgcatagtcagaggtgtcggagaagaccacatcgtcttcaccgctctgcgccagcacc

SEQ ID NO: 3204 - DNA, 210 bp, Escherichia coli
ctttaaaatcttcaataaaaccttcttccttcagcacgttggcgattgccactttcagcttggaggaaggcatggtgaccgcagctttgttcgcggcctgaccgttacggataccgggtcagcatatccgcgatcggatcttgcatgctcatctgtctttactcccgtgattcaattggtgacaattaccagctagcctttttcagaccc

SEQ ID NO: 3205 - DNA, 439 bp, Escherichia coli
tgaaacgaaaagagggagactagctccctctttcaactggcttatgccagagctgctttcgctttttcaaccagagcggtgaacgctactttgtcgaatactgcgatatcagccaggatcttacggtcgatttcaacagaggcttttttcaggccattgatgaatttgctgtaagaaataccgttctgacgtgctgctgcgttgatacgcgcaatccacagttgacggaactgacgcttacgttgacgacggtcacggtaagcatactgaccagctttgataacagcctggaaggcaacgcggtatacgcgagaacgcgcaccgtagtagcctttagcttgtttcaaaattttcttgtgacgtgcacgtgcaataacaccacgttttacgcgagccatatgtgctctccctgtatctatattctaattaaaagttaaaa

SEQ ID NO: 3206 - DNA, 67 bp, Escherichia coli
gatgaatttgctgtaagaaataccgttctgacgtgctgctgcgttgatacgcgcaatccacagttga

SEQ ID NO: 3207 - DNA, 631 bp, Escherichia coli
agcagcggagaagagatagccatttcagcagcttcttccgcacggtcttcaccgctcgccacgccagaacccatcattgcgtagcccatctcagacattacggtgcgtacgtctgcaaagtccacgttcatcaaacccggactagtaatcagttcagcgataccttgcacagcgcctttcagtacatcgttcgctgcgccaaacgcatccagcagggagataccgcggcccagaactttcagcagtttgtcgttcgggatagtgatcagagagtccacatgcttggacagttcagtgatcccctgctccgcgaatgccatacgcttcttgccttcaaagttgaaaggcttagtgacgacagcaacggtcaggatacccaaatcttttgccacttcagcgacgactggtgctgcacctgtaccggtaccaccacccatacccgcagcaataaagaccatgtctgcaccttccagcgccgcacgcaatgcatcgcgatcctcatcagccgcattgcggccaacttctggattagcgccagcgcccagtcctttggtgataccgctaccgatttgaatcgtctgtccaaccgctgttttacgcagcgcttgtgcatcggtatttaccgcgaaga

SEQ ID NO: 3208 - DNA, 62 bp, Escherichia coli
gagatagcgatacatctcttcgacctgggcgacgctcaggcctacttcgtcgatggcaccga

SEQ ID NO: 3209 - DNA, 186 bp, Escherichia coli; identical to SEQ ID NO: 2046

SEQ ID NO: 3210 - DNA, 379 bp, Escherichia coli; identical to SEQ ID NO: 2405

SEQ ID NO: 3211 - DNA, 155 bp, Escherichia coli
actttcttaccgcgaatcaggtcagcaacaaggcgaaccttctgagcagaagaacgagcatggcgatgtttagcgatagtttccatctcttcctcctaccttatttcttcttcgcttttttatcagcagcgtggccgcgataagtacgagtcggt

SEQ ID NO: 3212 - DNA, 345 bp, Escherichia coli
ggtttcagtttgcaggttatccatcatcgctttggatacacgatcgttcgccgcagcccagatatcgataactttgttgtagcgttcgcccgcagttaccagaccagactggaactgctcctgaatttcagcaacttctgcttctgcctcggagatgatttcgtgtttcttctccgggatgaccatgtcatcgataccaacagatgcaccagaacgcgctgcataggcgaagccggtgtacatgatctggtccgcaaaaataacggtcggtttcagaccgagaatgcggtagcaggtgttcagcattttggagattgcttttttacccagcgcctggttgacgat

SEQ ID NO: 3213 - DNA, 294 bp, Escherichia coli
ggagatggagaatacgtcttcgatcggcagcaggaacggcttgtcaatcgcacgctctggttccggaatataagaatccaggaagccagccagttccaggattttcgcttcccactctgcgtcgccttccagcgctttcagagcagaaccacgaacgatcggagtgtcgtcgcccgggaagtcgtactgagacagaagttcacgaacttccatttcaaccagttccagcagctcttcgtcatcaaccatgtcgcatttgttcaggaacacgatgatgtacggaacgcctacctg

SEQ ID NO: 3214 - DNA, 676 bp, Escherichia coli
aataaggggatgaccatgtgcggataaaccaccacatcgcgcagcggcaatacaggggatttcaatgcgttcagaacgctcaggattcatagagctctctcttagtttaatttccgccaggtaatcagatgacacgactgtgcttcacgccatctattaacatgtacgtcagtatatggggatgtttcccccacattcaacgccgagaatagaggaaaaattaaaggggagataaaatcccccctttttggttaactaattgtatgggaatggttaattattcaccagatgcctgttgcgcttccggcttgccataaatcagcaacggtttgctttgaccatcaattaccgactcgtcgataaccactttttcgacgtcttccatggacggcagatcgtacatggtatcgagcagtgcggcttctacgatggaacgcaggccacgggcaccggttttacgcgccatcgctttcttagcgatagcatccagcgcctcgtcacggaattccagatccacgccttccagattaaacagcgcctgatactgcttggtcagggcgtttttcggctctttgaggatctgaatcagagcttcttcgctcagttcattcaacgttgcgacaaccggcagacgaccaataaactcagggataagaccaaacttgatcagatcttc

SEQ ID NO: 3215 - DNA, 306 bp, Escherichia coli
ataccagttgatagttaatgatgaaaaaaagaccaataaatgacagtgctgccaataaaaataaaattatcagccttatctttatcttttcgtataaactcagcatgttaatacatttaacaaaataactatctgaacgctgtgccgctgcaaaaattgtcccttgctgcggctttttaaccaaattacccgattctacaaaatcagcagaaagttacaacacttgcttagggcaataatttcctgtgaggtgattaccctttcaagcaatattcaaacgtaactatcctttaattttcggatcca

SEQ ID NO: 3216 - DNA, 324 bp, Escherichia coli
ttgatgaatttaccgtagatcgggtgtttcacaaaacgttcgatagcaacaacaatggatttctccattttgtcgctaacaacgcgaccttgcagagtacggattttatcggtcattacgcacccgccttctcgttcagtaaagtcttaacgcgtgcgacatcgcgacgcacttgcttcaacaggtgagactgttgcagctggccacttgcagcctgcatacgcaggttgaactgctcacgcagcaggttcagcagctcggtgttcagctcttcaacgctcttctcacgcagctcttttgctttcattacatcaccgtcttagt

SEQ ID NO: 3217 - DNA, 308 bp, Escherichia coli
tcaggagtgattttcattgttcaaccgccccgcccgcttcgtcttacgatattcatcataaactttgggatcatactgaagctccccgccagatgcctcctgtagacgcatcgcgcgaccttcgggaactaaatcccctttccagctataaagcgaagccaaacgaatacctgctgcttgtgcaagttttgtttttgaaccgaaatacaaaagagcgtcagttttaagcatttaaaacacctttattgttagtcataactaacaagatagatgttaacaaaaacatagtcaatacgatttagcattag

SEQ ID NO: 3218 - DNA, 315 bp, Escherichia coli
ctgctgaacatgttcagccaggaatgccggatcaaggaaaatgttgataaagcctggaccggcgatctcaactttgctggcgataccgttaagatccagatgagtcagcacctgctctgctaattgtcgcggtgccatacccagttttttagcaactgccatcatgccgttagcctgatagtcgccgaactgaacttttgctgactgacgaacctgcggttcgcaatccgcaggcgcgcctgccgcaatcatggcctgacggactttttctgagagaagagcctgaatattcaccggaataccttacattgatga

SEQ ID NO: 3219 - DNA, 199 bp, Escherichia coli
gactgaacgaacgcttccagcagtttgatacgcttggtcagctttttacgcttggtttcggagttggtttcgttcagctcttcacgcagctgttcgcactcttgctccagatccatgctcttcagcagagcctggattgcttccgcccccatcttcgcgtcgaattcgtcaccgaactcttccagcgcgtccagatact

SEQ ID NO: 3220 - DNA, 391 bp, Escherichia coli
cgttaacttcgataacaatgttatcgatgcccaagcccgcgagagcagcattgaggtgctctacggttgaaatccgtacatcatgctcgttgaccagacacgtacagagcatggtatcacgcacagatttggcatcggccgggaaatctaccggtggattcaagtcggtgcgacgatagatgaccccggtgttggccggcgcagggcgtaacgtcagggtgactttcttgccggtatgtaaaccgacacccgtcgcctgaacgatacgtttaagtgtcctttgtttgatcatcgtattatctcgccaaattacctatccaaccgaagtgtactatacattcggcgggccagtttagcacaaagagcctcgaaacccaaattccagtcaatt

SEQ ID NO: 3221 - DNA, 204 bp, Escherichia coli
gcagcaataaagaccatgtctgcaccttccagcgccgcacgcaatgcatcgcgatcctcatcagccgcattgcggccaacttctggattagcgccagcgcccagtcctttggtgataccgctaccgatttgaatcgtctgtccaaccgctgttttacgcagcgcttgtgcatcggtatttaccgcgaagaattcaacaccttca

SEQ ID NO: 3222 - DNA, 228 bp, Escherichia coli
aattatcctgaaatcaagctaacgaaatatcgccaccagctccagcgtgtcttaaccgccgggctggtaactgaaaagtgggaataagataagttttcttgactgggaagtaaaataccgtatgcgttcagtcggcaaaatttcgccaaatctcctggatatcttccatcagatagccacgatagagcagaaaacgctggatcttaactttttctgaaaagacagttg

SEQ ID NO: 3223 - DNA, 265 bp, Escherichia coli; identical to SEQ ID NO: 2787

SEQ ID NO: 3224 - DNA, 826 bp, Escherichia coli
tggttctgcatgagaccagagctccaattattttataaacgaaaatgattactcctcagacccattacgattgatgggagagtgtaaccgttcttacgtagcctccccgattgggagcattgttaggtagccaaattcggctaactgaggttcagattgaacctgctgtcaactacgacaagcccgcgcattatacatacttaaccaccgaacgcaagcgtattgctagtaaagtaaacagccttcgggttatctctcaagttcgttcagtgcatttttgacacgctctcttaaaccggctttctcttcgctttcttccacagtattttcttcgtcttcagaagaagagggggcattctcaaccgcgacgcctgggtcatcttcctcctcgacggattcgacgacggggagtggctgttttttgaagaaatagtgttgtgttgattgtttaaaagcgggcgtttcagcctctacagtgacttcggcttttactatccaaagcacccatagctgcctggcatacccaccaaccagcaccattcctgcaaaccacaggcaaatcagtaataaacaaattacatatattatggtgctgtgtttttgtcgggagaagataccagggtgacctgtttctttctgctcacgcgcggcgatatagagttcaaacatgtcatttccccttcactgttgtttccggggaaatatttgcttcatcccgatataagtaggcactctcccctgccacctgccagagatgtactaacgttgaaaagccaacaacaccgtcagttttcaagtggtggcttttttgaaattgctttatttt

SEQ ID NO: 3225 - DNA, 295 bp, Escherichia coli
gcattaatgatattttgagcttcttgaggatctttaactccccacatttggtggaaagtattcatattaaaaggaaggttgaataatttgtctttataaatcgccagtggagaattagtaaaacgattaaattctactaaatcattaacgtaatcccatatatatttatcattggtatgaaaaatatgtgcaccatatttatgaatctggataccctcacagtcctctgtgtacgcatttccaccgatatgatttcttttctcaatcactaaaacttttttgtttagctttttta

SEQ ID NO: 3226 - DNA, 244 bp, Escherichia coli
tttcacgcatgtacatgcgtaccgggtcagtcgtgcgcccgatttcagattccacgctggaaagcacctgcgcggcggcttcggcagcatcttcgtccgcggtgttttcagccagcatcagatcatcggcatccggtgcttcttccatcacctgaatgcccatgtcgttgatcatttggatgatgtcttcgatctgatctgaatcgacgatatcttccggcagatggtcattgacctcggcata

SEQ ID NO: 3227 - DNA, 450 bp, Escherichia coli
tatcaatacagataaactcacggccttcaatttccgcacgaccgtacttacggtcacgagtcagacccgggaaatccgcaaccagcgcatctcgggtgcgagttagacggttaaataacgtggattttcctacgttagggcgcccgacaagcgcgaccacaggtaccatgtttaaagcctcatttttataaatcatcagacaacgcacgctatattcgcgtcgttgttaaaaacaggaaaacggcccctgtccaggagccgttttcaaagtgaacgacagagacgattaacgtgtaatagagtacacggttccgtcttttgcctggatcagcagtttgccgtcagcggcaaccggttcagtctggaaaccggaactatcaactttttgctgggcaacgaaacgaccatcttcgacgttaatccagtgcagataaccttcactgtcaccga

SEQ ID NO: 3228 - DNA, 511 bp, Escherichia coli
tcgctgacctttgcggcttccgggaccagaggcagaacgtcatactccgtagtactggattgcgtttcatgataccagtggcttttgccggtgatgtggcgttgttccatgggcgctccttggtcgtaaaggaaatcgttatcctgacgcaaggcgggaaggggagaaagacggatcggcgataacaaatatcagaaaggtataacagagataacgggcggcagaacgccgcccatctttaccaacagaacgattatttcagttcgagttcgttcattgcagcaatgctgaaaccgccgtcaacgtggaccacttcaccggagataccggcagagagatcggagcacaggaatgccgcagagttacccacatcttcaatagtaacggtacggcgaatcggggtaacggcttcgcaatgagccagcattttgcggaagtctttgataccggaggccgccagagtacggatcggaccagcagagatggcgttaacacgcacaccttccggacc

SEQ ID NO: 3229 - DNA, 423 bp, Escherichia coli
ttggcagcgaccatttctggagaattcatattttccaggccatcaatagttgcacgaaccacgttgatcgggttggtggaaccataggctttatccagaacgttatgaaccccagcgacttacagaacggcgcgcattgcaccaccggcgatgataccggtaccttcggaagccggctgcatgaatacgctgagaacccgtgtgaacacctttaacagggtgttgcagagtgccgttattcagcgcgacgttaatcatattgcgacgggctttttccatcgctttctggatcgctgctggaacttcacgcgctttaccgtaaccaaaaccaacgcgaccgttaccatcgccaactacagtcagagctgtgaaggagaaaatacgaccacctttaacggttttagatacccgggttaccgcgat

SEQ ID NO: 3230 - DNA, 270 bp, Escherichia coli
tcagtacttagagacattttaaaactccaaagtatatagaatgaaaggacgccgatctctaattcagcgatcccagtgtacgttacgcaaagtgttaaacaatttacgcgacgttaagcggcagtattctactcgtagcgacctgttatcgcaagacggttaacattacgccgggtattcaaccaccaggcgacgaggcgcaacgcggccttcatcgtcaatttcgcccataccgataaatttgccgttctcaccttccgtgacgcgaac

SEQ ID NO: 3231 - DNA, 176 bp, Escherichia coli
cgcagaacgcggatcgggttgtgacgtttaaccacaccttcggtaaccatacagcctgcgatggcaccaaatttcggcgatttgaacaccgtcacgaacttccgccagaccgataatctgctgtttcagttccggagacagcataccgctcatcgccgctttcacttcgtcaatca

SEQ ID NO: 3232 - DNA, 251 bp, Escherichia coli
cggccattgttgttacgaccaccggatttgctgtttttttccagcaacggagcaaaaggtttgcccttgtgcagctcagggttaaccactttaactacgtggcgacgacccggagatgtcggtttacatttaacaactgccattgtattactcctccgacttactcagcgccgccaacgaagtccagattctggccttctttcagggtgacgtaagcttttttccagtcgctacgacgaccgatacgctgt

SEQ ID NO: 3233 - DNA, 198 bp, Escherichia coli
cgcaaagacggatgatgttgccagtatttggcggaatttctggttcgtaaagtacgatgtttagcatactgcccccttagtgcgggggcaggatagcagaaaattggtgagcagtgcggccttttcccctcaccccggccctctccccggaggggcgagggagaaaaaaagagtgcggtgtcgtttcagagtgaggga

SEQ ID NO: 3234 - DNA, 181 bp, Escherichia coli
gggccgacaattttggcgaaatgttcgttaggcagccaaccggtgggaataaataacgcagtaataaaaccccaggcaataaaagcaccaatattggggatgaccattgcagtcaaaaagcccccaaaagcctggacctttgcacgagcagacttgttttccataatattatcctgtagag

SEQ ID NO: 3235 - DNA, 57 bp, Escherichia coli
agcctggatacgctggtagatctcttcacggtgaacagaaacttccttcggggcatt

SEQ ID NO: 3236 - DNA, 40 bp, Escherichia coli
acgaggaacacaatggcgctgacggtggtaatggcgcgca

SEQ ID NO: 3237 - DNA, 155 bp, Escherichia coli; identical to SEQ ID NO: 2777

SEQ ID NO: 3238 - DNA, 275 bp, Escherichia coli; identical to SEQ ID NO: 2272

SEQ ID NO: 3239 - DNA, 171 bp, Escherichia coli; identical to SEQ ID NO: 2799

SEQ ID NO: 3240 - DNA, 171 bp, Escherichia coli; identical to SEQ ID NO: 2103

SEQ ID NO: 3241 - DNA, 267 bp, Escherichia coli
tctccttacgccttcacagctggtttaacgatcaggtcgctaccggttgcacccgggacagcacctttaaccagcagcaggttgcgcctcagcgtcaacgcgtactacgtcaaggctctgaacggttacaccgttcgttacccatctgacctgccattttcttgcctttgaacactttgcccggagtctggttctgaccgatagaacccggaacgcggtgagacaaggagttaccgtgagtagcgtcctgggtacggaagttccagc

SEQ ID NO: 3242 - DNA, 187 bp, Escherichia coli; identical to SEQ ID NO: 2514

SEQ ID NO: 3243 - DNA, 256 bp, Escherichia coli
cgggaagccagcacgtctttaatctcagtaagagattttttaccaaggttaggcgttttaaggagctcaacctcggtacgctgtaccagatcaccgatatagtggatagcttctgctttaaggcagttagcagagcggacagtcaattccagatcgtcaacagggcgcagcaggatcggatcgaactctggtttctcttctttcacttcaggctgacgtacatcacgtaagtcaacgaaagcttccagttgttcag

SEQ ID NO: 3244 - DNA, 335 bp, Escherichia coli
ttagtaaaacgattaaattctactaaatcattaacgtaatcccatatatatttatcattggtatgaaaaatatgtgcaccatatttatgaatctggataccctcacagtcctctgtgtacgcatttccaccgatatgatttcttttctcaatcactaaaacttttttgtttagcttttttaactcattcgcacaaacggcaccaaacaaaccagaaccaacaatgatataatcgtacataaaatcctcagcaaaccagtaatttattatttcttacgaacatcagcatgagtgacgtaactaagcactctgttgcaagcaatgttattgctgcac

SEQ ID NO: 3245 - DNA, 446 bp, Escherichia coli
cggcctttcagtttgtcgttctggtaggtgaatgccagttcagctccttcgcggtgcatcgcctgagcgataccgtaggcgatggatagtttgctggcaacaccggttaccagaatgcgcttaccggaaagaaaacccatagctttaatccttattgttgatgcttgttgtgcctgaaaatcaggcgattcgtcgttttagtaaacagtacgaacagataaacggttattataatcaacctggctgtgagtagctatagttgccaggtccgaccggagcaggctgcggcagggggggcgcttttcccctcaccctaaccctctccccagaggggcgaggggaccgtattgtgcaaatattgttaccccagcaacaaacaggctcatacagcccctaaccctttcatggcgatggctgggacgggtcagaccttgcccgaatattct

SEQ ID NO: 3246 - DNA, 65 bp, Escherichia coli
ggtgcgtctcaccgataaagatgagacgcggaaagattagtaactggactgctgggatttttcag

SEQ ID NO: 3247 - DNA, 493 bp, Escherichia coli
ggtttttcatatacgcgatgttgtcgtacgtccacggtgccggagcggtgttgtttttcaccgccgcgccttccgcaggcagaccaaacgccgtcccagccgatcggctgcaggacgtttttgcccagcatacgctggtagcgggcgatcacgtcaccgatggtgtagttacgtacgtggcccatgtgtagtcgaccagaaggatagggaagcatagacaggcagtaatacttctctttgctctcgtcttcggttacttcaaatgtgcgcttctcatcccaatgaagctgtactttggattctatctcttccgggcggtattgctcttgcatggcagccagtggtcctgttttcaatacggctacaaatgtagccgttgaggtggtttttcagatccgcatagcatagcccaaacgtccgcgttaaaaacagccctttcgcgcactccacgttgaaatgatgcccggattattcataccattaatttacaggg

SEQ ID NO: 3248 - DNA, 144 bp, Escherichia coli
gaaaaacttattcagcttcgatgctgataaatttacggtttttcgggcctttaacttcgaatttcactttaccgtctgctttagcaaacagagtgtggtcacgaccgcaacctacgttagcgccagcgtggaatttggtaccac

SEQ ID NO: 3249 - DNA, 145 bp, Escherichia coli
gtgtaagtgaactgtagttgccatgttttacggcaaggagagcagagatagcgctgatgtccggcagtgcttttgccgttacgcaccacgccttcagtagcggagcaggaaggacatctgatggaaatggaagccacgcaagcac

SEQ ID NO: 3250 - DNA, 184 bp, Escherichia coli
ggatatgagccacgccgtcagagacttgttttcttacacgtttacagtgcacgaattggtgcctttgccattattcaatcaccccgattatttcttgatcggtttgcgcggacccttacgggtacgtgcgttggtcttggtacgcttgaccgcgaaccgggagaccacgacgatgacgcaaacc

SEQ ID NO: 3251 - DNA, 140 bp, Escherichia coli
gtacgatccaggatgtcttcgatgatttctgcattaaggaacttcgctaccgggctgttgataccttccagacctttcgcgcgttcgttaactttgatgtaagccagacctttcgcgccgtagattttaacgaagttact

SEQ ID NO: 3252 - DNA, 257 bp, Escherichia coli
aacgatcttcatagttggcaatggcgagatagcagatacatctcttcgacctgggcgacgctcaggcctacttcgtcgatggcacgagtatcagtaacagccttccacggtttgtgaacgcatatagtggcgcatcgccatcatccgtttcagcgcccgcagtaccggaccggtatcgccggcactcaacatattggcgagatattgcaccggaatacgcaggctttcgatggcgggcagcacgccttcgcttttcg

SEQ ID NO: 3253 - DNA, 353 bp, Escherichia coli
ccgttagtcagacgaacacggcatactttacgcagcgcggagttcggttttttaggagtggtagtatatacacgagtacatacgccacgtttttgcgggcatgcttccagcgcaggcacgttgcttttcgcaactttgcgagcacgtggtttgcgtaccagctggttaactgttgccattaaatagctcctggttttagcttttgcttcgtaaacacgtaataaaacgtcctcacacaatatgaggacgccgaattttagggcgatgccgaaaaggtgtcaagaaatatacaacgatcccgccatcaccaggccatctggctggggtgcttaaccgtaagtctgacgaaatca

SEQ ID NO: 3254 - DNA, 100 bp, Escherichia coli; identical to SEQ ID NO: 2276

SEQ ID NO: 3255 - DNA, 313 bp, Escherichia coli; identical to SEQ ID NO: 1721

SEQ ID NO: 3256 - DNA, 282 bp, Escherichia coli
agattccagaactttcttgaccagtacagccgctttcttgttggtgtaggtcaaaatatccagagcctgcgacactttcttaccgcgaatcaggtcagcaacaaggcgaaccttctgagcagaagaacgagcatggccgatgtttagcgatagtttccatctcttcctcctaccttatttcttcttcgcttttttatcagcagcgtggccgcgataagtacgagtcggtgcgaattcacccagtttgtgaccaaccatttcgtcggttacaaataccggaac

SEQ ID NO: 3257 - DNA, 191 bp, Escherichia coli; identical to SEQ ID NO: 2006

SEQ ID NO: 3258 - DNA, 110 bp, Escherichia coli; identical to SEQ ID NO: 1783

SEQ ID NO: 3259 - DNA, 715 bp, Escherichia coli
acagtcgggcgcacgttttcgagagctacttcgaatgcttccagttcagatttaccagagcgctgagccagggtctccagcgcgctgtatacgatagattcagcagtagattttttaccatctaccatcaggatatttacaaatttagccagcagttctgatccgaacttcggatccggcagaattttacgctgaccaatgacgcgacgacgtggcatggaaatactccgttgttaattcaggattgtccaaaactctacgagtttagtttgacatttaagttaaaacgtttggccttacttaacggagaaccattaagccttaggacgcttcacgccatacttggaacgagcctgcttacggtctttaacgccggagcagtcaagcgcaccacgtacggtgtggtaacgaacacccgggaggtctttaacacgaccgccacggatcaggatcacggagtgctcctgcaggttgtgaccttcaccaccgatgtaggaagtcacttcgaaaccgttagtcagacgaacacggcatactttacgcagcgcggagttcggttttttaggagtggtagtatatacacgagtacatacgccacgtttttgcgggcatgcttccagcgcaggcacgttgcttttcgcaactttgcgagcacgtggtttgcgtaccagctggttaactgttgccattaaatagctcctggttttagcttttg

SEQ ID NO: 3260 - DNA, 492 bp, Escherichia coli
gcttcaacattcatcagaacgtagtgtgctttgtgcagtttgttgatcgggtaagccagctgacggcggccccagtcttccagacggtggatcttgccttctgcaccagtgatggcagcagtgtagcgctcgatcatgcccggaacctgttcgctctggtcaggatggaccataaaaacgatttcgtaatgacgcatcgaattgctccttacggattattcagcctcctgtctgggtcagccgaatcccggggaggcaaggaacgtgttaaaggtcggctgaaaaatgacgcgttatagtacttgtatgcctcgctaaactcaagggcagagccgaaataaatctcccctttcgcaattaacctctaacacgctgatttgaagttcatcacacttcatcatggtgtttttttgaacaactgcatcagaaatggtcaccatcaacttctttatcattgattaaaattaaatcagaagatcatcacagaggaga

SEQ ID NO: 3261 - DNA, 411 bp, Escherichia coli
ccaatatactgtgtgtctgtcatctctttgaacaaaaaataaggcgggagcatttcccgcctgtggtaaacgtgatggaacggctgtaattagccagccatctgtttttcgcgaatttcagccagcgttttgcagtcgatgcacagatcggctgtcgggcgcgcttccagacggcgaataccaatttcaacaccgcaggattcgcagtagccgaaatcttcgtcttccacttttttcagcgtcttctcgatctttttgatcagcttacgctcgcgatcgcggttacgcagttcgaggctgaactcttcttcctgggctgcacggtctaccgggtccgggaagttggctgcttcatcctgcatatgtgtaacggtgcgatcgacttcatccctgagttgattacgccatgct

SEQ ID NO: 3262 - DNA, 230 bp, Escherichia coli
gatacgggtcatacccacttttttaccgactaaaccaatcattgtttcaacctctcaatcgctcaatgacctgattaacccaggctgatctgcacgtctacaccggcagccagatccagacgcatcagagcatcaacggttttctcggttggctcaacgatgtcaaccagacgcaagtgagtacggatttcgtactgatcgcgcgcgtctttgttgacgtgcggggagat

SEQ ID NO: 3263 - DNA, 350 bp, Escherichia coli
atacagggcttttaaggtcgctttgcccggtgtcaactcactgtatcaggtgtaatgaagtcattcaggcgtaacagtaattacgcggagagatgtaaagtgaaatatttctttatgggcatttcttttatggtcatcgtttgggccggtacttttgccctgatgatctaaaagcaaactgtgcaatgaaaaacaggagccatcaggctcctgtttgcatttctgacgacggtgtttattccgcgttttcgtgaatatgtttgctgctggcgggtagtaaaccgtcggcacggaacatcgctttaatccctctgatggcctgacgaatacggtcgcggttttcaatcagt

SEQ ID NO: 3264 - DNA, 266 bp, Escherichia coli
tagtgtttacgacgacgaaacttaacgattttaactttctcgccacgaccgtgagcaacaacttcagctttgattacgccgccatcaacgaaaggaacgccgattttgacttcttcaccgtttgcgatcatcagcacttcagcgaactcaacagtttcgccagttgcgatgtccagcttttccaggcgaacggtctgaccttcgcttactcggtgttgtttaccaccactttggaaaaccgcgtacatataaaactccgcttccgc

SEQ ID NO: 3265 - DNA, 556 bp, Escherichia coli
ccagtacggtagtgattgcagcggtcagcgttgttttaccatggtcaacgtggccgatagtaccgacgttaacgtgcggttttgtacgttcaaacttttctttagacatcgattgtccctctaagacacggataaatcggtgatatcaccacatcaaccaggcaacatgcccgacttgttgaatgcaataaacagaaggaaaaaacagggaggagaaaagaagtggtgctgataggcagattcgaactgccgacctcacccttaccaagggtgcgctctaccaactgagctatatcagcacatcttggagcgggcagcgggaatcgaacccgcatcatcagcttggaaggctgaggtaatagccattatacgatgcccgcatcctggaactcggctacctgattttcattctgcactgaatatcgagagaagctctctttattcgagccggtaagcgaacttatcgtctcgggctacgccatcgcgtggccgaaattggtggtgggggaaggattcgaaccttcgaagtctgtgacggcagatttacagtctgctc

SEQ ID NO: 3266 - DNA, 290 bp, Escherichia coli
tcggcagacgacggtacagaggcatctgaccaccctcgaaaccgcgacgtacgccaccgccagaacgagacttctgacctttgtgaccacgaccaccggttttaccgaggccagaaccgataccacgacccaggcgtttacccgcctttttggagccttcggccggagacagagtatttaaacgcatctcttactcctcaactttaaccatgaaggaaaccgcgttgatcataccgcgaatagcaggagtatcctcgcgctctacggtgtgaccaatacgacgcagaccc

SEQ ID NO: 3267 - DNA, 581 bp, Escherichia coli
  misc_feature (540)..(540): n=g, a, t or c
ttttgtacgctttggttgtaacatcagcgacgctccttatttacggcctttacgctgctgctttttaggctgagcagccggtttttccggttgttcaacagcagccataccacccaggatctcgcctttgaagatccacactttaacgccgattacaccgtaagtggtgtgcgcttcagaggtgttgtagtcgatgtcagcacgcagagtgtgcagcggtacgcgaccttcgcggtaccattcggtacgtgcgatttccgcgccgcccagacggccgctaacttcaactttaatacctttagcgcccagacgcattgcgttctgtacagcacgcttcatagcacgacggaacataacgcgacgttccagctgagaagtgatgctgtcagcaaccagttttgcgtccagttcaggcttacgaacttcggcgatgttgatctgtgcaggaacgccagcgatgtccgctacgaccttacgcagtttttctacgtcttcaccttttttaccgataacgatacccgggcgagcagtgtgaatggntacacggatgctcttagccggacgctcgataacgatacgag

SEQ ID NO: 3268 - DNA, 108 bp, Escherichia coli
gttcagcgacagctttacccacagctgcagccgcgtctttgttaccggtgtacttcagttgttcagcgatagctttttctacagtagaagcagcctaccagaacttca

SEQ ID NO: 3269 - DNA, 427 bp, Escherichia coli
  misc_feature (409)..(409): n=g, a, t or c
agtatggaggtaaaacatgttggtaaggttaatttgacattattcagtgtgaaattgacataaatgtggttgctgtgatctacaacttttgtaccaggactgtaggccttaaacgaataaaggtaatttgatgaactggataactggacttgctgattaagtgtaggatcgaaattagtatctgtataaaattcaacagttatgttgtgtactataccaccaatagcccaaaacttatcgtagtcgtctgctttgttgcaacccttagtttgtagatcgctgtctgtgacggaaaagaaaaattcttggttggaaggatctccgatatagattcctggcgattgaatgtcagttattgtatcgtatgcagaccagacccttgatattaacatggtgtaatacagaccangaacagatgtattaaata

SEQ ID NO: 3270 - DNA, 267 bp, Escherichia coli; identical to SEQ ID NO: 2293

SEQ ID NO: 3271 - DNA, 156 bp, Escherichia coli
cgcgagccagctgacgctggtattttgcacgggtaccggtgatacggcttgggacaatcttaccgctttcggtgatgtagtttttcagcgtagcgatatctttatagtcgatctcttgaacgccttccgcggtgaaacggcagaacttgcgacgac

SEQ ID NO: 3272 - DNA, 467 bp, Escherichia coli
gcagcacggcgacgcatacgatcctggtggtacgcgtaaccggtacctgccgggatcagacgacccacgataacgttctctttcaggccgcgcagttcgtcgcgtttgcccgcaacggctgcttcggtcagcacgcgagtggtctcctggaacgatgccgcggagatgaaggactcggttgccagagacgctttggtgatacccagcagatcgcgggagtaagttgcacccactttgccgttcgcttccagttcgcggtttgcgatcttgacgcgagagtattcaacctgttcgccttccaggaagtcggagctacccgcgttaacgatggtagctttacgcagcatctgacgaacgataacttcgatgtgtttatcgttaatcttaacgccctgcagacggtatacgtcctgtacttcgttaacgatgtaacgagtaacagcatgaacaccacgcagacgcagaat

SEQ ID NO: 3273 - DNA, 292 bp, Escherichia coli
tacacttcagattcgaacttggtgtgcggcttgatggtgcccggcttagccagtacctgaccacgttcgatttcttcacgtttgataccacgcagcagaacacctacgttctcaccagcacggccttcgtccagcagtttgcggaacatttcaacgccagtacaggtagacttctgagtctctttgataccaacgatttcaacttcttcaccaactttgatgataccgcgttctacacgaccggtaacaacggtaccacgaccggagatggagaatacgtcttcgatcggca

SEQ ID NO: 3274 - DNA, 270 bp, Escherichia coli
cataagcaacaacaacctggtgaaccagcgcttcgttgaaatcacgaccgaaggtagtttcggaaacagtcagcgcgcctctgcgcgtctttcaatactaattccattgctatctccttacgccttcacagctggtttaacgatcaggtcgctaccggttgcacccgggacagcacctttaaccagcagcaggttgcgctcagcgtcaacgcgtactacgtcaaggctctgaacggttacacgttcgttacccatctgacctgccatttt

SEQ ID NO: 3275 - DNA, 335 bp, Escherichia coli; identical to SEQ ID NO: 1970

SEQ ID NO: 3276 - DNA, 330 bp, Escherichia coli
gtaattaagagcttcacgtactgccagctcgttggtgggggctttggcggtattgagcgccagcatcacggtttcgatcggctgtgacagttgggtgtggtaagccggattctggctaaagcgggcgaaggtatcgagcggtaataacccttcgtttccgtacagcaggtcgatatcgccagtttcaaacgccaccgcgcgggtagtcgggtccgggatgacgttaaaggtgatctttttaatcgctggcttttcgccccagtagttttcgttacggacgaagacatcgtactgattcagtttcgattcctgcaaaatccacggtccggt

SEQ ID NO: 3277 - DNA, 216 bp, Escherichia coli
gtcatatagccgcctgtgttgtgatgacaacgtttcgcaggctattcttgagtggtctagagtcaagattagcccccgtggtgttgtcaggtgcatacctgcaacgtgcgggggttttctctctccagcaaccaatgccaccagggataaagcccccgcaacattgcgcctcaccggaacctttccggcttgccgctgattctacgattgcttttt

SEQ ID NO: 3278 - DNA, 130 bp, Escherichia coli
tcgctttttctgcatcaaccaacacctgctccagtggcctgattggcatcgatatcaaccagttgtgcaccaccaaaggttaacctgtggcgttatggcaatcttcctcgccagcgattcccgtttatgg

SEQ ID NO: 3279 - DNA, 294 bp, Escherichia coli
tctggtgaccgaagtgaacaccagccttgagcatgtcgcgcatggaaacagttgccatgattaaaacctctatataaaagttggggttatgcctccacgtatcccatattaccggaccccaaagggcaccccggaatatgtgccgatacgtgtgtgttgttacacaaagtgagattgtcgcttccgtccagtctgtgtatacgaaatggatcggaagtccggcgcgctttataccacatatacgtcgtggacaccaataattgttggcgctgtgtacagcatcagacgtcgaat

SEQ ID NO: 3280 - DNA, 344 bp, Escherichia coli
tcagtacttagagacattttaaaactccaaagtatatagaatgaaaggacgccgatctctaattcagcgatcccagtgtacgttacgcaaagtgttaaacaatttaccgcgacgttaagcggcagtattctactcgtagcgacctgttatcgcaagacggttaacattacgccgggtattcaaccaccaggcgacgaggcgcaacgcggccttcatcgtcaatttcgcccataccgataaatttgccgttctcaccttccgtgacgcgaaccagtccttccagtggcgcaccagatgtacgaaccgggttaccatttttgaagtaaacagaagacgttaacgga

SEQ ID NO: 3281 - DNA, 188 bp, Escherichia coli
atgcgggtaatatttggcattcacttcggctgtccccaggcagcgaccgacattttgcaccgggttgcccattaaatacatcgcgggcagtaaaacggtgacatcgtgaccggttaatgcgccagcggttgccagactggcggcaacaccgactgcgccacccatactcattaatgcggctaaaagga

SEQ ID NO: 3282 - DNA, 297 bp, Escherichia coli
ggtacagcaccggatcgcgcatcacgataaacggtgaagccatgtcgattttcgcacgcaggcaggctttaccttcttcaaaaccaccggcacgcattttttcgaacagcgccaggttctcttcaacgctgcggtcgcggtacgggctgtttttacccggttgcgtcagggtgccgcggtattcgcggatctgttccggcgtcagttcatcaacgtacgccaggcctttattgatcagttcgatcgcataggcgtggagctgatcaaaataatcggaggagtaacggacgttaccag

SEQ ID NO: 3283 - DNA, 314 bp, Escherichia coli
tatgcttcggctcggcactgcaaatcacacggatgacaccatcacgcttaacgattttgcagttacggcataatttcttgacggaagcacgaactttcatttttactctccgtaacttctcgggcgaccaattatcggccgtagcctttcaggttcgccttcttcaatgcagactcatactgactggacatcatcagagtttgcacttgagccataaagtccataatcacgacaacaacgataagcagtgaggtcccaccgaagtagaacggtactttcattgcatcacgcatgaactccgggatcaggcagat

SEQ ID NO: 3284 - DNA, 124 bp, Escherichia coli; identical to SEQ ID NO: 2219

SEQ ID NO: 3285 - DNA, 434 bp, Escherichia coli
gtgcttctgcgtcgtctttgctcacgccttctttcagagcagccggtgcagattctaccaggtctttagcttctttcagacccaggccagttgcgccacgtactgctttgataacagcaactttgttagcgccagcagctttcagaattacgtcgaattcagttttttcttcagcagcttcaaccgggccagcagctacagctacagcagcagcagcggaaacaccgaatttttcttccattgcagagatcagttctacaacgtccattacagacatagctgcaactgcttcaatgatttgatctttagtgatagacatttaaattgttcctgaatatcagaataagtttatacgtaagcgaatgcgttaaaaagataactgcgattaagcagcttctttcgcatcgcgtacagcagccagagtacgaaccagt

SEQ ID NO: 3286 - DNA, 649 bp, Escherichia coli
gttggtcagcgttttgatctgcgtggcgcggtcgccaatcagttgatcatcaacagagacttcgccgaattcgttttcaatcacggcaatcttgtagccgtgctgttcgttaagaatatggcgcagcagggtggtttttcctgcgcctaaaaaaccggtgagtagggtaactgcaatcgggttcatgctctctccattaacaacagcgcataccgcctttaccatcgccgccgtagcgcgcgttctggcgttcgcggaagaattcttcatagctcatgtacggcttgtcgggatggttggtcttcatatgctcgacgtagttgtcgtagtctggaatgccaatcaacatcttcgccgcctggccgagatatttttttgcctgtcctaagttaccaaacatagttcactctgataagaacaaagccccgccgaagcggggctaaacacggttagtggtgcgaagagatcttcacgccgccttccgggattggaacgtacggtgtttctttgtcagtacgtttgtcgctgttacgcaccgcaagccaggttttgaaaccgtagaagatgatgctgtacaccacaatcaggaacagaatactcagacctgcgttggtgtagttgttcacaacgatgtggttcatattggcaa

SEQ ID NO: 3287 - DNA, 140 bp, Escherichia coli
taatttgccttaagtgtatcaggcgttggcgtctttgacttcgcggatgatgtcctggtactcgcgcaatttctgcggagtcatcatacggcgctgatcgtcaagcacgacaccgcccacttcatcggcaatatgcttgc

SEQ ID NO: 3288 - DNA, 167 bp, Escherichia coli
ttacgtttacgcatctgggttggcgtcagggtgttacgcttattcgcatacgggttttccccttctttgaactgaatacgaatcggcgatcccattacgtccagcgatttgcggaagtagttcatcaagtagccgccttgtaggaatcaggcaggtctttcacctga

SEQ ID NO: 3289 - DNA, 112 bp, Escherichia coli
  misc_feature (7)..(7): n=g, a, t or c
tcaccgncggtgagcgtcgtgcctgtcgcagtggcttttgttttgacgatctcccgtccgcccatattgacctgtgttttgtcagaagaggtgtctgactccacggttaaca

SEQ ID NO: 3290 - DNA, 87 bp, Escherichia coli
cgctcgataacgatacgagatacggacgctttagccagttccttagtcaggtactgacgtactttaaaatcgctgtccaggttgtca

SEQ ID NO: 3291 - DNA, 305 bp, Escherichia coli
cagccgctttcttgttggtgtaggtcaaaatatccagagcctgcgacactttcttaccgcgaatcaggtcagcaacaaggcgaaccttctgagcagaagaacgagcatggcgatgtttagcgatagtttccatctcttcctcctaccttatttcttcttcgcttttttatcagcagcgtggccgcgataagtacgagtcggtgcgaattcacccagtttgtgaccaaccatttcgtcggttacaaataccggaacgtgctgacgaccattatggacagcgatggtcaaaccgatcatgttaggaa

SEQ ID NO: 3292 - DNA, 143 bp, Escherichia coli
gcgcagaagtctttttcatacggcatgataaggccaatctctccggcgtaatctggatggcaaaagacttgcgcgggaccgtcgctgcgttgacgtaattggtggatccagccgcgacgcagtagctcgtcacgcagaacctg

SEQ ID NO: 3293 - DNA, 132 bp, Escherichia coli
atcacgttgtgcagagtttcaggttgcagagaaacataatcccagaaagtatcgtgggcactttgcccttgtggaattgcccagtgcggttctggttttaccgcatgaacaaaatcggggaatttatgcgca

SEQ ID NO: 3294 - DNA, 394 bp, Escherichia coli
atttttgtctgtagctcgtcaaaaagccatcaccgccggttacccggtggttgatactgatgacaaatgtaagcttgcctgatgcgcgatgcttatcaggcctaccagaagattgcaatatattgaatttgcactgttttgtaggccggataaggcgtttacgccgcatccggcatgaacaatgcgtacgttgtcaacaatctgcaccgccggtaaccccggcggttttctgtttatggctcctgatgaacaacttctggcggtggaacgtcaaccaactttctgcttaacaacgcattgagtaaaatcgcgccaaaggttgctgtaccaatccctcccaacgtaaaaccgcccagcgtgagagcaaaatcacccgcgcccagcactaaggtta

SEQ ID NO: 3295 - DNA, 279 bp, Escherichia coli
agggaaagtgggagctatgacacagagagaaaagaagaagagaaaagaaaacgcccctgccagcaactgacaggggcgtacgtacccgagaggaattaacgcagacccagctggaaaatcagcatttcagcttcgcaggcaaaagtgaaatcgatatccaggcgcacaccgtcagactcttcagtgaaagtcggggtgattttgcaaggttcagattccacgctacgggctttttcagtcagcgccgccagcgtttgctctgcttctgcgcggtttgca

SEQ ID NO: 3296 - DNA, 434 bp, Escherichia coli; identical to SEQ ID NO: 3285

SEQ ID NO: 3297 - DNA, 256 bp, Escherichia coli; identical to SEQ ID NO: 1841

SEQ ID NO: 3298 - DNA, 218 bp, Escherichia coli
attgcttcttcgtaggtcggcagagttgccaggcggtcgatctgagacgccgggatcagctcaccttcaaaggcagcggctttgacctcaaattttgcattcgctttcgcgaactctttgaacagacgagcagcagcgcccgggtgttccatagagtatgcaatcagggtcggaccaacaaacgcgtctttcaggcactcgaacggagtaccttcaac

SEQ ID NO: 3299 - DNA, 439 bp, Escherichia coli
agcgatttcgtcgccttttttgtattcacgaactgcttcttcgcctgcaacgttccaggagatgtcagacaggtgaaccaggccgtcgatgccgccgtccaagccgatgaagataccgaagtcagtgatagacttgattttaccttcaacacggtcgcccttgttgtgggtttccgcgaactgctgccacgggttagctttgcactgtttcagacccagggagatacgacgacgttcttcgtcgatatccagaaccataacttccactacatcgccaacgttaacaactttggacgggtggatgtttttgttggtccagtccatttcggaaacgtgtaccaggccttcaacgccttcttcgatttcaacgaagcagccgtagtcggtcaggttggtcacgcgaccagtcagtttggtaccttccggataacgtttagcg

SEQ ID NO: 3300 - DNA, 298 bp, Escherichia coli
cttccagagccattaccagctcaacggtgtcaagagaatccgcgcccaggtcttcaacgaaagaagcattgttggtaacttcttcctgcttaacgcccagctgttcgccgataattttcttaacgcgttcttcgatagtgctcatactcttaaatttcctatcaaaactcgctttcgcgatggttttcgtagtgtataaaatgttgaaaaatttgcaactaaatcccggcaggtcttaccacgattttacgttattttgaggccttaccccccaataacgcaaatcattttgcactaa

SEQ ID NO: 3301 - DNA, 152 bp, Escherichia coli; identical to SEQ ID NO: 2064

SEQ ID NO: 3302 - DNA, 250 bp, Escherichia coli; identical to SEQ ID NO: 2668

SEQ ID NO: 3303 - DNA, 480 bp, Escherichia coli
gtcgcctgcaatcgtgcctgttgcagtgcctgacgaccatccggcgtggaaagtagcatcgtagtccgcgacgatttatacgcatttgaactcggcgctaactgcgacagccgatcgagctgtttttgcgcgccatcaatatcgccctgacgtaacaaagaacggaaacgggcggcaacgacgtccgggttattcggatcaataagttccagccgatataacgactgttgcaccagatcttcacgatgggtcgcttcgcctaaccgaacttgctccagcaactgttgctgagcggttggtgctgcctcgaccatcggcatgacggccagaccgagggaaagcgtgaatatgtttagtgtgaatttgcgcattcctggccccagtcaggtaataactcaccttttgtcgagaagcggaaacggtgttgatcccagccttgtccaaacagggtcagcacatagttgtaataggcatcgctgc

SEQ ID NO: 3304 - DNA, 361 bp, Escherichia coli
gagatgcctgattcttcaaccagctcgatcagttttttaatcttacgaatatccatgagtgggttccgtactctttgtttagtgtgattgtgacaggcgtttcaccgccgtctgtaaagcgtatgccccgacagctgtatgcatagcgataaattccagcaggccgggacgccggtctattttgccccagagtgtcaatgttagacttgacggacattgtgcagcgatctgctgctatcctccggcaaaaaacaaaatataccttcgttgcgccaatgtcaccttttccgcagcgcaaaaactgcgtcagggaggacgaggtcgcacattataacgatttcgtagcaattggcagctaaat

SEQ ID NO: 3305 - DNA, 293 bp, Escherichia coli
attcctgaggcgtattcacatccttttgattggtgataacatgcgaatcggtattatttttccggttgtaatcttcattacagcggtcgtatttttagcatggttttttattggcggctatgcctgccccgggagcataaagatgaaaaaaacaacgattattatgatgggtgtggcgattattgtcgtactcggcactgagctgggatggtggtaacgtcacctctaaaaaatagcaaaggctgcctgtgtgcagcctttgtgcaatttaagcgttaacttttaatcttcct

SEQ ID NO: 3306 - DNA, 349 bp, Escherichia coli
atctgcagtgcggtgagatcccccattgccccactctgatttgcctgattccaggcctctttttcgataccctgccagctcagttgatatccggcatgaatcgccagttgctcgaagaagatccgctgtgccagaccacttcccacccggaagggatgcagcacgttgatttcacaatagtaatgcgccagccgctcgacgaacttcgctttctccaggccaaccagataaccttcttccttcagattctgcatcagggcattgccctctttttcgatataagcaaagtggcagaacggcgtatcaccctgattaatatcaacttcacgcagttgccctgcccagtcga

SEQ ID NO: 3307 - DNA, 219 bp, Escherichia coli
tttaggctgagcagccggtttttccggttgttcaacagcagccataccacccaggatctcgcctttgaagatccacactttaacgccgattacacccgtaagtggtgtgcgcttcagaggtgttgtagtcgatgtcagcacgcagagtgtgcagcggtacgcgaccttcgcggtaccattcggtacgtgcgatttccgcgccgcccagacggccgctaa

SEQ ID NO: 3308 - DNA, 423 bp, Escherichia coli
ttggcagcgaccatttctggagaattcatattttccaggccatcaatagttgcacgaaccacgttgatcgggttggtggaaccataggctttagccagaacgttatgaaccccagcgacttccagaacggcgcgcattgcaccaccggcgatgataccggtaccttcggaagccggctgcatgaatacgcgagaacccgtgtgaacacctttaacagggtgttgcagagtgccgttattcagcgcgacgttaatcatattgcgacgggctttttccatcgctttctggatcgctgctggaacttcacgcgctttaccgtaaccaaaaccaacgcgaccgttaccatcgccaactacagtcagagctgtgaaggagaaaatacgaccacctttaacggttttagatacgcggttttaccgcgat

SEQ ID NO: 3309 - DNA, 537 bp, Escherichia coli
gcagggcatcaagaatgctcgctggcaggccgcgtgtttccgggccgaacatcagataatcgccatcctgatagcttacggcgctgtgagcaggtgtacctttcgtggtgagggcgaacaggcgctggggattttctgcttcgaggaacgcgcgatagtcatgatgacgcgtaacggcggtaaactcgtgatagtccagccccgcgcggcgcaggcgcttatcgtcccaggcaaatcccatcggttcgatgatatgcagacgaaagccggtattagcgcaaagacggatgatgttgccagtatttggcggaatttctggttcgtaaagtacgatgtttagcatactgcccccttagtgcgggggcaggatagcagaaaattggtgagcagtgcggccttttcccctcaccccggccctctccccggaggggcgagggagaaaaaaagagtgcggtgtcgtttcagagtgagggagtacatacagcgccgaacggtcccctctccctgagggagagggttagggtgagggggcgcaaa

SEQ ID NO: 3310 - DNA, 228 bp, Escherichia coli; identical to SEQ ID NO: 3006

SEQ ID NO: 3311 - DNA, 154 bp, Escherichia coli
acgagcagcttcaacgatccaacgcattgccagagcattacgacgaaccggacggacttcaactggtacctgataagtagaaccaccaacgcggcgagacttaacttctacagtcgggcgcacgttttcgagagctacttcgaatgcttccagt

SEQ ID NO: 3312 - DNA, 190 bp, Escherichia coli
gaaaaccgcgtacatataaaactccgcttccgcgcacaccttttcaatgattcagagtgcgctataaatattcacaatagggcgcgaatattacgcaaaaccgcacgcctttgacaagtgctacagtcaatacaccgaagaaaaaaaacacaacttgtacggtaacgtttatctgtgccattttttcagt

SEQ ID NO: 3313 - DNA, 624 bp, Escherichia coli
aaaaaataacaaggtgtctgcatttccccctcatgatgagggggctttttttagcgatgataaaaaatctcaccgtcgtaggctttaatgattttaccgtcggtgtcgctgatcaacacgtacgcgccacccatataggtccagtgcgtcccggcatcaggcgcgggcaggttacgcaactgccactgcttaatgttgtactcatcggtacggtacatttctggtacggtgtcccctggtttgaaatgcttaaagtcagcaatgaaactacttaactcatacttagaaattcccgaggtattggtcgaacccgcggtggctggtgcggcccaggcggcactggtaaccagcaaaagcgcacccagcaacatcttatttttaatggtcataaactctccactttggggatctgtaatatcagtcgcatatctttcctgccatacaatataactgacaagcgatattttgttagtgatcccatgatttcgtaaaaagtgtaaatgaaaggatgccctaaaagccattccttagcgagcagagagtcagcggaaatagctgatttaaaaatcattctgggcctgaagataacatgcaagccctaaaggattgaggtatcgcattatg

SEQ ID NO: 3314 - DNA, 273 bp, Escherichia coli
tgctttcagctgttcctggatacctttatcaacggccgggatgtattcgccagggattacaccacctttaatgtcgttgatgaactcgtagcctttcgggtttgaacccggctccagcgggtacatgtcgataacaacatgaccatactgaccacgaccaccagactgtttcgcgtgtttaccttcaacatcggtaactttctggcggatagtttcacggtaagcaacctgcggtttacctacgttcgcttcaacgttgaattcacgcttcat

SEQ ID NO: 3315 - DNA, 49 bp, Escherichia coli
ctggtcagctttggttttcggttcaactgcgatggagattaccggctca

SEQ ID NO: 3316 - DNA, 248 bp, Escherichia coli
cacttttatcgtttgcacacttcacgttcaattagtctgtaaaaacgtcaaaaagagtgttttatcaacagaagaatggaggtctgacagatagtagtaatgcaaaaaaatggagacttaagttgaatgaacgggagtaaagcgaaaagactatagagtgaaggagaaattttgagggtgcgtctcaccgataaagatgagacgcggaaagattagtaactggactgctgggatttttcagcctggat

SEQ ID NO: 3317 - DNA, 147 bp, Escherichia coli; identical to SEQ ID NO: 2827

SEQ ID NO: 3318 - DNA, 231 bp, Escherichia coli
acatccgtaccctgcgccagaccgcggttacggcctttgtgcattttacggaattttgtacgctttggttgtaacatcagcgacgctccttatttacggcctttacgctgctgctttttaggctgagcagccggtttttccggttgttcaacagcagccataccacccaggatctcgcctttgaagatccacactttaacgccgattacaccgtaagtggtgtgcgcttca

SEQ ID NO: 3319 - DNA, 342 bp, Escherichia coli
aaccagctcgatgtaagccatcggcgcgttgtcgcctgcacggaagccacacttcagaatacgagtgtaaccaccggcacggctcgcgaaacgcgggcccagttcgttaaacagttttgccacgatctcgttatcacgagtacgggcgaatgccagacgacgattagcaacgctatcagtcttggcaagagtaatcagcggctcaactacgcggcgcagctctttcgctttaggcagagtcgtcttgatgatttcatgacgaaccagtgaacctgccatattgcggaacatagcctggcgatggctgctgttgcggttcagttgacgaccactcttacgatg

SEQ ID NO: 3320 - DNA, 353 bp, Escherichia coli; identical to SEQ ID NO: 2409

SEQ ID NO: 3321 - DNA, 256 bp, Escherichia coli; identical to SEQ ID NO: 1841

SEQ ID NO: 3322 - DNA, 166 bp, Escherichia coli; identical to SEQ ID NO: 3109

SEQ ID NO: 3323 - DNA, 321 bp, Escherichia coli
actccaggctcagccagttcatgccatccataatggcttcgatagcttccggcgtggaacgctcaagatcggtgtcttcaatacgcagcacgaactcaccgccgtggttacgtgcaaaaagccaggagtaaagagcagtacgcgcgccgccaacgtgcagatagcctgttgggcttggcgcgaagcgagttttgattttcatgaaatggccttacgtttagaaagatgccgacaaccggcaaatcctggaaaaattaagtgggcgatattctatcactcccgcctgattcctcaatgtagttcgggtttctaccttacgca

SEQ ID NO: 3324 - DNA, 204 bp, Escherichia coli; identical to SEQ ID NO: 3221

SEQ ID NO: 3325 - DNA, 457 bp, Escherichia coli
gatctgatagtaacggtcaaaaccggacatcatcagcagctgtttgaacaactgcggggattgcggcagtgcgtagaatttacctttgtgcacacgagaaggcaccaggtagtcacgcgcgccttccggcgtggctttggtcagcatcggagtttcgatgtcgaggaagccgtggtcatccataaaacggcgcaccaggctggtgattttagcgcgggttttcaggcgctgagccatttccggacgacgcaggtcgaggtagcggtatttcagacgcgcttcttcggtgttgacgtggttagagtcaagcggcagaacatctgcgcggttgatgatagtcagcgaggacgccagcacttcgatttcgccggtcgccatatcgcggttaatatttttttcgtcacgcgcacgtacggtgcccgtgacctgaatgcagaactcattacgcagttcagag

SEQ ID NO: 3326 - DNA, 308 bp, Escherichia coli
ataaattcatcatccactttcgcttcaatatcgaccagcgtttgatcgatacccactacccaggcagcgctggtttcgttttctggctggaattgctgaagcagcggatcgcgtgccgtttacggggaagtaatgtttttttttacgtttaccgggaaatttcatggttgtttttacgggtggttaactgagcggcgaatgttaacacaatctgacgggagcgcgcgagacgcagccagtttcaatatcagcaggcgggatcgcattttcatggcagtggttccttacaatgacgtaatttgaaagga

SEQ ID NO: 3327 - DNA, 649 bp, Escherichia coli; identical to SEQ ID NO: 3286

SEQ ID NO: 3328 - DNA, 295 bp, Escherichia coli
ctgctgaacatgttcagccaggaatgccggatcaaggaaaatgttgataaagcctggaccggcgatctcaactttgctggcgataccgttaagatccagatgagtcagcacctgctctgctaattgtcgcggtgccatacccagttttttagcaactgccatcatgccgttagcctgatagtcgccgaactgaacttttgctgactgacgaacctgcggttcgcaatccgcaggcgcgcctgccgcaatcatggcctgacggactttttctgagagaagagcctgaatattcacc

SEQ ID NO: 3329 - DNA, 312 bp, Escherichia coli
tactaattccattgctatctccttacgccttcacagctggtttaacgatcaggtcgctaccggttgcacccgggacagcacctttaaccagcagcaggttgcgctcagcgtcaacgccgtactacgtcaaggctctgaacggttacacgttcgttacccatctgacctgccattttcttgcctttgaacactttgcccggagtctggttctgaccgatagaacccggaacgcggtgagacaaggagttaccgtgagtagcgtcctgggtacggaagttccagcgcttaacggtacctgcgaaacctttacct

SEQ ID NO: 3330 - DNA, 350 bp, Escherichia coli
tgcataagcaacaacaacctggtgaaccagcgcttcgttgaaatcacgaccgaaggtagtttcggaaacagtcagcgcgctctgcgcgtctttcaatactaattccattgctatctccttacgccttcacagctggtttaacgatcaggtcgctaccggttgcacccgggacagcacctttaaccagcagcaggttgcgctcagcgtcaacgcgtactacgtcaaggctctgaacggttacacgttcgttacccatctgacctgccattttcttgcctttgaacactttgcccggagtctggttctgaccgatagaacccggaacgcggtgagacaaggagttaccgtga

SEQ ID NO: 3331 - DNA, 451 bp, Escherichia coli
tttacgccgttgcaggacgttgcaaaatttcgggaaggcgtctcgaagaatttaacggagggtaaaaaaaccgacgcacactggcgtcggcctctggcaggatgtttcgtaattagatagccaccggcgctttaatgcccggatgcggatcgtagccttcaatctcaaagtcttcgaaacggtagtcgaagatggattcgggtttacgtttgataatcaacttcggcagcggacgcggttcgcggcttaattgcagatgagtttgatccatatggttgctgtacagatgcgtgtcgccaccggtccagacaaaatcacccacttccagatcgcactgctgcgccatcatatgcaccaataacgcgtagctggcaatgttgaacggcaggccgaggaagacgtcacaggagcgctgataaagctggcaagagagtttgccgtctgccccata

SEQ ID NO: 3332 - DNA, 556 bp, Escherichia coli
gatcatgtttttaacatagtcggcgtgccccgggcagtctacgtgtgcgtagtgacgggtcggggtgtcgtattcaacgtgagaagtgttgatggtgataccacgagctttttcttccggcgcgttatcgatctggtcgaatgcgcgagcagcaccgccgtaggttttagccagtacggtagtgattgcagcggtcagcgttgttttaccatggtcaacgtggccgatagtaccgacgttaacgtgcggttttgtacgttcaaacttttctttagacatcgattgtccctctaagacacggataaatcggtgatatcaccacatcaaccaggcaacatgcccgacttgttgaatgcaataaacagaaggaaaaaacagggaggagaaaagaagtggtgctgataggcagattcgaactgccgacctcacccttaccaagggtgcgctctaccaactgagctatatcagcacatcttggagcgggcagcgggaatcgaacccgcatcatcagcttggaaggctgaggtaatagccatttatacgatgcccgcatcct

SEQ ID NO: 3333 - DNA, 281 bp, Escherichia coli
cgttaacggtgaaggacggggttttctcgttgtggaatggacaacacgcgtggaaattcttgccctgctttttcagcttcacacgggcatcgatcagatcgacgatgtcagtgcgtgccagcagatcattaatgaatacgcgtgggattcgtccagccataggccccgatttttagcaattcataaacgaaaataagccgcgcattcctttcggaagcacggccttacaactacaactcggtctgatcggagagcaacgctctcggggaattagtacagac

SEQ ID NO: 3334 - DNA, 209 bp, Escherichia coli; identical to SEQ ID NO: 1856

SEQ ID NO: 3335 - DNA, 134 bp, Escherichia coli
aagcagcgttgccttgtgtttcggcagacgaccgattgcactgcgggtttgagtaattttaatagtctttgccatggtttatttccccagaatttcttcaacggatttaccacgcttggcagcgaccatttctg

SEQ ID NO: 3336 - DNA, 196 bp, Escherichia coli
gctgttctcgggtgatgccgtaggttttcgccatttgctctgcggtgtcgcccatccgcaagccggtagaatattctgctaccgcaggtggtacgggcattaagtcgcgcaaacgcaggcgagagaagagtttcagtcgctggctcatggtacgagctttgttgacatcaaccagcacgcgcgccagttttttact

SEQ ID NO: 3337 - DNA, 251 bp, Escherichia coli
ccggtaatgcgcgtcagctctcccgcgctggtgccgggggaaccgctaagcatgcacagaatcagcaatcgtttagggtggctcattgctttcaataaggccgctgcctgttcggcactggcctgtaattgcgcgagttcagtcatatttatttaagtattttctaaattaagtaaactctaaactaaaaatgcaacatataccagcctcagcagcgtaaatgagagtaaaagccgtaagctgaaactggc

SEQ ID NO: 3338 - DNA, 546 bp, Escherichia coli
gcaaaatgttgtcattacaacaaggcggctatatgacgctcgcgcagtttgccatgattttctggcacgacctggcagcaccgatcctggcgggaattattaccgcagcgattgtcagctggtggcgtaaccggaagtaaggtgaaaacgggcgtcaggctgccgtgatggcaatatgcgcccgaaaccggccgcaggggtaacagcctgcggccttttttgtatccggcacccatgaaaaaagtcttaacgcagaacgctaatactttatttttcaagcaaaaaagattacttgctggtatccagttcttcgaaacctttcaccagatcatcaatcgctttcatctgcttgaggaacggttccagtttagccagcggcagcgcggatggaccatcacatttcgcatgttccggatccggatgcgcttcaataaacagccccgccagacctaccgccataccggctcgtgccagctcagccacctgagcacgacgaccacccggaagctgcgccaaacggatcgcggcattgcagtgcgtggggcc

SEQ ID NO: 3339 - DNA, 401 bp, Escherichia coli
ccagacgggtttcatcagcaagaattttgaacaattggatgggtaacagaaatgacatattgcgctcctgattgttgcaggtagtgtctctcttcgaagcggataagtcaaaaacatatatgacttaacgaatgtgtaagtgcagaggaaggtaataggtgtgaattttgagttggctattcatttgaaaggaggtctgaatcaggacgtaaaaaaaccgactttgcgtcggttttttactttccagccctgagttggtggctctggctggagtgagagagttcttatctaacagctcaatactattagccagtggctaacattgcaagaattagcgatttcttcagctggcggagggagcacttcggtatatatcgcagtgacgatttatatactttcac

SEQ ID NO: 3340 - DNA, 455 bp, Escherichia coli
cagaacgttatgaaccccagcgacttccagaacggcgcgcattgcaccaccggcgatgataccggtaccttcggaagccggctgcatgaatacgcgagaacccgtgtgaacacctttaacagggtgttgcagagtgccgttattcagcgcgacgttaatcatattgcgacgggctttttccatcgctttctggatcgctgctggaacttcacgcgctttaccgtaaccaaaaccaacgcgaccgttaccatcgccaactacagtcagagctgtgaaggagaaaatacgaccacctttaacggttttagatacgcggtttaccgcgatcagctttttcctgcagttcgccagcttgtttttcgatgtgagccatcttacacctctacctttagaactgaatggccagcttcacgggcagcatcctgccaatgcctgggacacgaccattgatattg

SEQ ID NO: 3341 - DNA, 115 bp, Escherichia coli
tacgtaagcgaatgcgttaaaaagataactgcgattaagcagcttctttcgcatcgcgtacagcagccagagtacgaaccagtttgccagccgaagcttctttcatggttgccat

SEQ ID NO: 3342 - DNA, 220 bp, Escherichia coli; identical to SEQ ID NO: 2835

SEQ ID NO: 3343 - DNA, 67 bp, Escherichia coli; identical to SEQ ID NO: 3044

SEQ ID NO: 3344 - DNA, 261 bp, Escherichia coli; identical to SEQ ID NO: 2744

SEQ ID NO: 3345 - DNA, 138 bp, Escherichia coli
cggataaggcgttcacgctgcatccggcacccggagcctgatgcgacgctggcgcgtcttatcaggcctacaaaccgagccgtaggccggataaggcgtttacgccgcatccggcatctcaatatcagatcttacatg

SEQ ID NO: 3346 - DNA, 195 bp, Escherichia coli
ggttggcttatttaacttcaacttcagcgccagcttcttccagagcttttttcagtgcttctgcgtcgtctttgctcacgccttctttcagagcagccggtgcagattctaccaggtctttagcttctttcagacccaggccagttgcgccacgtactgctttgataacagcaactttgttagcgccagcagctt

SEQ ID NO: 3347 - DNA, 456 bp, Escherichia coli; identical to SEQ ID NO: 2864

SEQ ID NO: 3348 - DNA, 174 bp, Escherichia coli; identical to SEQ ID NO: 1698

SEQ ID NO: 3349 - DNA, 196 bp, Escherichia coli; identical to SEQ ID NO: 3336

SEQ ID NO: 3350 - DNA, 246 bp, Escherichia coli
gaaaccatgcggacgacctgtttgacggcagcggttacgctgacgagacgggctggaatcacgcggcagagtctgcagcttgagaacagcgttccaacgatcttcgtcggaagcgttcacatcagagatgatcgctttcagttcagcgcgtttcgcgaagtatttatcagctaaagctacgcgttttacttcgcgtgctttcattgattgcttagccatttagtaaccctaccttacttgcggaac

SEQ ID NO: 3351 - DNA, 68 bp, Escherichia coli
cataccacccaggatctcgcctttgaagatccacactttaacgccgattacaccgtaagtggtgtgcg

SEQ ID NO: 3352 - DNA, 130 bp, Escherichia coli
actttcattgggctaaaactgtcgcttaccgcttccaggccaacaactgcctcacgttccgcgcgccagtcgtacacgcccagcccacttttcttgcccaaccgtccaccaatcaccagttcctgttgca

SEQ ID NO: 3353 - DNA, 549 bp, Escherichia coli
gccgtcaacgtggaccacttcaccggagataccggcagagagatcggagcacaggaatgccgcagagttacccacatcttcaatagtaacggtacggcgaatcggggtaacggcttcgcaatgagccagcattttgcggaagtctttgataccggaggccgccagagtacggatcggaccagcagagatggcgttaacacgcacaccttccggacccatcgcgttcgccatatagcgcacgttcgcttccagagacgcttttgccagacccataacgttgtagttcgggatagcgcgctcagcgccaaggtaggaaagggtcagcagggcagaacccggattcagcatggagcggcaagcttttgccattgcaacgaagctgtaggagctgatgtcgtgggcaattttgaagccttcacgggtaacggcgttaacatagtcaccatccagctgatcgccaggtgcaaaaccaatagagtgtacgaaaccgtcaaatttcggccaaactttccccagttcagcgaacatggtgtcgatgctggcatcttc

SEQ ID NO: 3354 - DNA, 411 bp, Escherichia coli
tgggcgtttttgaactgctcagccgggatggcggactcagatttcagaccagcgtcaaccagtactacgtctttgtcgatagcaacaacaacgccacgaacgatagaacccgggcgggtttcgatttcttttaaggactcttcaaagagttgagcaaaagattcagtcatgtttaatcttcaggtttatatttaacgtccacctggctccatgccggatggggttgtttaacatacccgctgtcattccattgcaacgggggtactgcaaattcggtcgcttatgcgagagccaatttctggcgcgcgtattgtagcgctttttcaatcacttgctcaatgcttaaggtggtggaatccaacactaaagcatcggctgccggaaccagtggcgctaccgctcggttacgat

SEQ ID NO: 3355 - DNA, 303 bp, Escherichia coli
caatgagacgtgccggaaagggagctccggcttttttattacctgaattgcctatcattacagtggtttcaccgttcttaccgcaatccagcccgcgcagaaaacccatcatgtcaaagcgcattccttctgcagttaaccagcgcaatcctcgccagtgaacccggacgatataatcagcttctccaaaagcaagtgagcggatacattcgggacgcgaaccgaatccccggtcagcaatgcgtatctcgtctgccgtttgcgcaaatcggtccagccgttcagcgtctctgctgtcggtta

SEQ ID NO: 3356 - DNA, 97 bp, Escherichia coli
ctctctttggtactaagctttacttggagtaaagctcgacgatcaggtgttcgttaatgtccgcagacagatcagaacgcctccggcttacgcttaa

SEQ ID NO: 3357 - DNA, 370 bp, Escherichia coli
aaaaataatgtcctgcttacgcattcgagccaggttttccagccccatattttcgccgagagtgatcaagctcagaaaccggcgtattctttaattcggtaagattcatagtggtgtgagttcttaaacttggggtaaatctcgaacttaatgttgtgaatggtatggcaggatcatccatgcctgtttacggtcatcgactcatgtcttttcgctgcctggtcacaggagagtacccagaactgaaaccgtcaagacggattgagtgacgagccagaaatctgttcacttcgcatttaagataaaacgggaagcgttggaaattacaagattcaaacttaataaggtatgtttaatacgaaagtcaacc

SEQ ID NO: 3358 - DNA, 290 bp, Escherichia coli
ccacgagctttttcttccggcgcgttatcgatctggtcgaatgcgcgagcagcaccgccgtaggttttagccagtacggtagtgattgcagcggtcagccgttgttttaccatggtcaacgtggccgatagtaccgacgttaacgtgcggttttgtacgttcaaacttttctttagacatcgattgtccctctaagacacggataaatcggtgatatcaccacatcaaccaggcaacatgcccgacttgttgaatgcaataaacagaaggaaaaaacagggaggagaaaa

SEQ ID NO: 3359 - DNA, 135 bp, Escherichia coli
gtttgaatctggttgccccaggtgtcgaacaacatgcgttcatagggggctaaatcgtcccgctcgtggagattgatcagcagcatctctttacttttgaacacgcgttcggtgagggttccggccttcatcgac

SEQ ID NO: 3360 - DNA, 304 bp, Escherichia coli
acctgggcggctgacacgctgaatgctttctacaacagctttgccctggaaatacttcagagtaagttccagttcaggcttggtgtcgccttcaactttaaaatcttcaataaaaccttcttccttcagcacgttggcgattgccactttcagcttggaggaaggcatggtgaccgcagctttgttcgcggcctgaccgttacggatacgggtcagcatatccgcgatcggatcttgcatgctcatctgtctttactcccgtgattcaattggtgacaattaccagctagcctttttcagaccc

SEQ ID NO: 3361 - DNA, 67 bp, Escherichia coli; identical to SEQ ID NO: 3206

SEQ ID NO: 3362 - DNA, 71 bp, Escherichia coli
accggttaccagaatgcgcttaccggaaagaaaacccatagctttaatccttattgttgatgcttgttgtg

SEQ ID NO: 3363 - DNA, 353 bp, Escherichia coli
ttgtagccgtgctgttcgttaagaatatggcgcagcagggtggtttttcctgcgcctaaaaaaccggtgagtagggtaactgcaatcgggttcatgctctctccattaacaacagcgcataccgcctttaccatcgccgccgtagcgcgcgttctggcgttcgcggaagaattcttcatagctcatgtacggcttgtcgggatggttggtcttcatatgctcgacgtagttgtcgtagtctggaatgccaatcaacatcttcgccgcctggccgagatatttttttgcctgtcctaagttaccaaacatagttcactctgataagaacaaagccccgccgaagcggggctaaa

SEQ ID NO: 3364 - DNA, 292 bp, Escherichia coli
taaaggtgtccgggcgggtagtgtaaacggtcagccgtgttgtcatagtcgttaacgttgaaggtgatctccacgccttcggaacgaccgatccagttacgctgcatggttttaacggtgtctggccagtgatccagtttatccagatcgttgagcagctcgtcagcgtaagcagtgattttgataaaccactgcgggatctctttacgttcaactttggtatcgcagcgccagcagcagccgtcgataacttgttcgttcgccagtacggtctggtcgttcgggcaccagt

SEQ ID NO: 3365 - DNA, 274 bp, Escherichia coli
gcaatacgctccacagggctgtagcatgcgtcgaccagcagacggccgattgggcgctcatcttcttccgaatgaattcgggtagaagccggcacataaccacgaccgcgcttgaactttgatacgcatgctaatagacgcgttctcatcggtcaggtggcagatcacgtgctgcggcttgacgatttcgacatcaccgtcgtgggtgatatcggctgcagtcacagggccaatgccagatttattcaaggtaagaataacttcatctttgccc

SEQ ID NO: 3366 - DNA, 273 bp, Escherichia coli; identical to SEQ ID NO: 1757

SEQ ID NO: 3367 - DNA, 158 bp, Escherichia coli
gcagttcgcccatacccgcgatgatggtctggttagattcttcgtcagtccatacacggaaagacgggtcttctttagccagacggcccagagccagacccattttttcctggtcagctttggttttcggttcaactgcgatggagattaccggctca

SEQ ID NO: 3368 - DNA, 278 bp, Escherichia coli
attacggtgcgtacgtctgcaaagtccacgttcatcaaacccggacgagtaatcagttcagcgataccttgcacagcgcctttcagtacatcgttcgctgcgccaaacgcatccagcagggagataccgcggcccagaactttcagcagtttgtcgttcgggatagtgatcagagagtccacatgcttggacagttcagtgatcccctgctccgcgaatgccatacgcttcttgccttcaaagttgaaaggcttagtgacgacagcaacggtcaggat

SEQ ID NO: 3369 - DNA, 273 bp, Escherichia coli
gacgtgcacgtgcaataacaccacgttttacgcgagccatatgtgctctcctgtatctatattctaattaaaaagttaaaaacgttaacggcttatgcgtacggcaggcacgcgattaccaggcccagatcgccttttttttccatggctttcggacgcaggtgacgtttacgtttggtcgcttttttggtcagaatgtgacgcaggttagcgtgcttgtgcttaaaaccacctttaccggtttttttgaagcgcttagcagcaccgcgtacg

SEQ ID NO: 3370 - DNA, 229 bp, Escherichia coli
aaggtcacgccaccagaacgccagatcgggctcttgatagaaccagaacgcgcacggccggtgcctttctggcgccacggttttttaccggaaccagttacttcagcacgagtcttctgagcacgagtaccctgacgagcaccagctgcataagcaacaacaacctggtgaaccagcgcttcgttgaaatcacgaccgaaggtagtttcggaaacagtcagcgcgctct

SEQ ID NO: 3371 - DNA, 508 bp, Escherichia coli
atcaggcatcatgcaccaattgccggatgcggcgtaaacgccttatccggcctacggttcggactatttgtaggcacgataagacgcgacagcgtcgcatcaggcatcatgcaccaattgccggatgcggcgtaaacgccttatccggcctacggttcggactatttgtaggcacgataagacgcgacagcgtcgcatcgggcatggtttgccagatacgtcatagatctaaatgccactgaataacagtttagttgccgttcttcccgcctgtcaggggcgggtttttttatatctcagataaatgcaaacgcatcgccaaacaggcgatcttcccgcgcattacgctcactgcaaaacagatcgcgggcaattttcgccatctcaaaacgtccggcaatatagatatcatgctctgccagcgtaccgtgatcctgcaataccgccgttaacacggtgccagtacgcccacgccagcccgctttcggttgttcaaccaccggcacca

SEQ ID NO: 3372 - DNA, 108 bp, Escherichia coli; identical to SEQ ID NO: 2940

SEQ ID NO: 3373 - DNA, 357 bp, Escherichia coli
tgaccaccgtgacagattaagctgctttgtttacttctttgatcagcgcagcaacgcgatcagaaatagttgcgccctggccaacccagtgagcgatgcgatccagatccaggcgagtgccttcttctttttcgctagcgattgggttgaagaaaccaacgcgctcgatgaagcgaccgttgcgtgcattacggctgtcagcgacaacaacctggtagaacggacgctttttagcgccgtgacgtgctaaacgaatagttaccataacatcctcttgtgtgaataaaacaaccggaccccatcgaggaacggagtccggtgtcatattaaaagcccgaaaattttactcatttttgc

SEQ ID NO: 3374 - DNA, 247 bp, Escherichia coli; identical to SEQ ID NO: 3020

SEQ ID NO: 3375 - DNA, 311 bp, Escherichia coli; identical to SEQ ID NO: 2543

SEQ ID NO: 3376 - DNA, 70 bp, Escherichia coli
gcgataaatagacagcccggatagcggttgtttttaacgcactccgataacgcctgataacgtgccagca

SEQ ID NO: 3377 - DNA, 362 bp, Escherichia coli
tctggcttgctgctctgggcctggcgcaccatgcgaatgattcgtgacagcgtagtatggctgccaaccgcactggcacgaaacagcacactgccgtcctgtaccactgtcccggcatggacgcctatcgccttcgcctttttgctgcgggattggttcgcccgtcagcatcgcttcatccagccatgcttcgccctgggtaatctcgccatctaccggcacgcgatcgccggtcgtcaggcgcagcaacatacctggctgcacttctgccagaggcacgcttttttcaccttcgtcagtaaccaggcgtgccgtcggcggggttaaatcgagtaacttttccagcgccttagaagaacgct

SEQ ID NO: 3378 - DNA, 53 bp, Escherichia coli
ccgacttcacgttgctgagcttgatgctacctttgtttttcacttggatgctg

SEQ ID NO: 3379 - DNA, 177 bp, Escherichia coli
tccgttagctgaaactgtttgtattccgccgtcgttaattgttgtctcattcgccacaccctcgacaatttgttcaccgccggtgagcgtcgtgcctgtcgcagtggcttttgttttgacgatctcccgtccgcccatattgaccctgtgttttgtcagaagaggtgtctgactcca

SEQ ID NO: 3380 - DNA, 281 bp, Escherichia coli
agcgtgcggaacaggtcgatgtcatagttagagttaacgtgttgcagcaccgcagcaatacgctccagacccataccggtatctacagacggcttcggcagcggttccatcgtgccatcggcctggcggttgaactgcatgaagacgatgttccagatctcaatgtagcggtcgccgtcttcttccgggcttcccggagggcccccccaaatgtggtcgccgtgatcgtagaagatttcggtgcacgggccgcacggaccagtgtcacccatctgccagaa

SEQ ID NO: 3381 - DNA, 71 bp, Escherichia coli
tagctttgcagacgttctgacgactgctgggcagagtgctcggcagtacgatagtagaagccgccttccac

SEQ ID NO: 3382 - DNA, 35 bp, Escherichia coli
ttagccatttagtaaccctaccttacttgcggaac

SEQ ID NO: 3383 - DNA, 227 bp, Escherichia coli
ttgcgtcacgcgccagcagaaccagcgatgactgccagtgggctaacatttcttctgttatgccagtaaaaccgaacagcactacgccgtcgatattacgccgtttcagcacctcccaaatgttcggcaactaattgcggggaaaactgactttccatcatgattgggtcgtaaccttgttcatagaacgctggcagcatggtttgaacggcgagattttctgacaa

SEQ ID NO: 3384 - DNA, 417 bp, Escherichia coli
ccgttgtccctttgctgcattcacttaacgtaatctgaaaagggacggctggacttgtgctaccggtcgttggaaattgtctggcactgtttttttggagatctacggtaaaattaagcgaatccgatgagacttgtgcagccataatcgaggacgcgcccgctaattttaataacgctatctgcggataaagcagaataggtggttaaccccagacataaaccgaggaaaataatgttattgtatttcataatctattgttccttagcgacagattgctgtctgctggttcagtaaggtaccaggagaaacttcaggaagcttgtactcgacaatacagtttgagtttttatctttgccccatgaaacctgtaattgccctgactgtggaagtccagtcagataaacctgaccatt

SEQ ID NO: 3385 - DNA, 253 bp, Escherichia coli
atgataatcgtatacataagtctttcgagtggctcgttagcaaaaagtttcaacaatggagtaaatacatccaacatatcaataacctctcaactgtaagggtattgaaatgttaacacaagctctcgctgtaggggtatagccgagaccaccgaagcccggaggtggtgaaataaaaccgggcacaacacgaaggcgcatttccgatatccataaagagtcggtcttgtctgttaaatttaaatggtgggag

SEQ ID NO: 3386 - DNA, 361 bp, Escherichia coli
tccagatcttaccttgacgcttaactgcacgggtcatagcacgacgtgctgcttcgatctgacgggcagtcagacgaccacggccaacagctttcagaccgaagctgccgaagctaacatccgtaccctgcgccagaccgcggttacggcctttgtgcattttacggaattttgtacgctttggttgtaacatcagcgacgctccttatttacggcctttacgctgctgctttttaggctgagcagccggtttttccggttgttcaacagcagccataccacccaggatctcgcctttgaagatccacactttaacgccgattacaccgtaagtggtgtgcgcttcagaggtgtttgtagt

SEQ ID NO: 3387 - DNA, 449 bp, Escherichia coli
aggcaaaaacgataatctgaaagagccaaggtatttcagtataagcattgaatgcgacagtaaactctttcggtatcagccagagagtgagaccaaaaatgataatcgtatacataagtctttcgagtggctcgttagcaaaaagtttcaacaatggagtaaatacatccaacatatcaataactctcaactgtaagggtattgaaatgttaacacaagctctcgctgtaggggtatagccgagaccaccgaagcccggaggtggtgaaataaaaccgggcacaacacgaaggcgcatttccgatatccataaagagtcggtcttgtctgttaaatttaaatggtgggagtgcgcctccggttgtaaataacgacattgctgtgtgtagtcctggcggcatcagtttttttcttgaagttcggctgatgtccgccctttttaaagtgaa

SEQ ID NO: 3388 - DNA, 311 bp, Escherichia coli
tcaacattcatcagaacgtagtgtgctttgtgcagtttgttgatcgggtaagccagctgacggcggccccagtcttccagacggtggatcttgccttctgcaccagtgatggcagcagtgtagcgctcgatcatgcccggaacctgttcgctctggtcaggatggaccataaaaacgatttcgtaatgacgcatcgaattgctccttacggattattcagcctcctgtctgggtcagccgaatcccggggaggcaaggaacgtgttaaaggtcggctgaaaaatgacgcgttatagtacttgtatgcctcg

SEQ ID NO: 3389 - DNA, 340 bp, Escherichia coli
cagcgtaacgacccgtagccacgccactttgcgggaaacagtgtttgttgtcataacagattatcgggtgagttgcgaaaaagtgatgaaatgatcttaaaacggttaatgatgtgaatacaatgcatttgtgatctggatcgcgttttccgtttctctgacgctgattctttcacgcgtcagagagtcggtaacatcacggtttaatgacgttcagggaggtctggcgttttggcggttgcgggtataggtggtctgacaggggagcgaggcctgtttttcaccaggtcttcgtgagtaacttttggcggtgtttcattttttacaaacagtttgaggg

SEQ ID NO: 3390 - DNA, 351 bp, Escherichia coli
gccacgtttttgcgggcatgcttccagcgcaggcacgttgcttttcgcaactttgcgagcacgtggtttgcgtaccagctggttaactgttgccattaaatagctcctggttttagcttttgcttcgtaaacacgtaataaaacgtcctcacacaatatgaggacgccgaattttagggcgatgccgaaaaggtgtcaagaaatatacaacgatcccgccatcaccaggccatctggctggggtgcttaaccgtaagtctgacgaaatcagtatagtcaatgagaatgatgtcgttcgaaatttgaccagtcaaaccgcgggcaataaggtcttcgttcagggcatagacc

SEQ ID NO: 3391 - DNA, 226 bp, Escherichia coli
ttagaggtagaaacaactgcgatacccagacccgccataactttcggcagctcatctttacgtttatagatgcgcagacctgggcggctgacacgctgaatgctttctacaacagctttgccctggaaatacttcagagtaagttccagttcaggcttggtgtcgccttcaactttaaaatcttcaataaaaccttcttccttcagcacgttggcgattgccactt

SEQ ID NO: 3392 - DNA, 269 bp, Escherichia coli
ccggctctttcggacgacgtgcttcgaacaggtccgaacgcgcgggagaccaccggtgatgtccttggtaccgccggattcctgcggaatacgcgccagggtgtcaccagagctgatctgtacgccatcttgcagtgtgaacaatcgctttacccggcaggaagtactgcgcctggcatatcggtacctgggatcagaacgttgctaccctgagcatcaacgattttcagtgccggacgcagatctttaccaccctgcggtacgttgtg

SEQ ID NO: 3393 - DNA, 169 bp, Escherichia coli
ttacgtttacgcatctgggttggcgtcagggtgttacgcttattcgcatacgggttttccccttctttgaactgaatacgaatcggcgatcccattacagtccagcgatttgccggaagtagttcatcaagtagctgctttgtaggaatcaggcaggtctttcacctga

SEQ ID NO: 3394 - DNA, 313 bp, Escherichia coli
ggaatgccaatcaacatcttcgccgcctggccgagatatttttttgcctgtcctaagttaccaaacatagttcactctgataagaacaaagccccgccgaagcggggcctaaacacggttagtggtgcgaagagatcttcacgccgccttccgggattggaacgtacggtgtttctttgtcagtacgtttgtcgctgttacgcaccgcaagccaggttttgaaaccgtagaagatgatgctgtacaccacaatcaggaacagaatactcagacctgcgttggtgtagttgttcacaacgatgtggttcatatt

SEQ ID NO: 3395 - DNA, 175 bp, Escherichia coli
tccttcactgcccgtgcacggctctcattttcgacaaacggcagcgtgatgctgctgatagtgacgggaaattgtgacattactgcgtgtcctaatacctccgcagttattgccgtaccatcagaaatataaaaaacgtggcgatcaacagcattatccattttgttcttcccgt

SEQ ID NO: 3396 - DNA, 196 bp, Escherichia coli
ggaacacgatgatgtacggaacgcctacctgacgacccagcaggatgtgctcacgagtctgcggcatcgggccgtcagtcgcagcaactaccaggatcgcgccgtccatctgcgcagcaccggtgatcatgtttttaacatagtcggcgtgccccgggcagtctacgtgtgcgtagtgacgggtcggggtgtcgta

SEQ ID NO: 3397 - DNA, 517 bp, Escherichia coli
ggcagacctttttcgatggaatcagtttttgcgttgaacgctttgcagaattccatgatgtttacgccctgctgacccagagccggacctactggcggactcgggttagccataccagctgcaacctgcagcttgacataggcttgtactttcttagccattataaattcctcaagttgggtaataacgcctctgagaggctccccgtgatataaaaaatcgttttacgggcaaggcccataaaaacaaaaggcgcgaaattgtattccaatctcacgccttgtgcaacgattaaatcgccgcttttttgatcgctgggttaggctttttcaacctggctgaagtccagctctaccggggtcgcacgaccgaagatagaaacagacactttcagacgagatttctcgtaatccacttcttcaacaacaccgttgaagtcagcgaacggaccatcattaacacggaccatttcacccggttcaaacagcgttttcggacgcggcttatcaccaacctg

SEQ ID NO: 3398 - DNA, 212 bp, Escherichia coli; identical to SEQ ID NO: 2018

SEQ ID NO: 3399 - DNA, 114 bp, Escherichia coli; identical to SEQ ID NO: 1780

SEQ ID NO: 3400 - DNA, 114 bp, Escherichia coli
gatttctttcggcttaccagactgcatcgcgatatccagctgtacctggtattctttttctaccacttcagcggatacgtcttccggtttgatgaattctggcttgcttgcagc

SEQ ID NO: 3401 - DNA, 149 bp, Escherichia coli
tttcagcgactgcgtctggctcattacgcagcagattgggatcgagcatgcttatcctgtgcttatcgaattaaatgggagatgtggccacagcctgcgaccacagggatacagtaacaacattaccgcaacgataacattaacggtag

SEQ ID NO: 3402 - DNA, 612 bp, Escherichia coli
ttaggggccaggatgtaacggcgttcaccgtctttgtacagaaccagcgcgatgttcgcggaacggttcggatcgtactcaagacgttcaacaactgccgggataccgtctttgttgcgtttgaagtcaacaatacggtaagcctgcttgtggccaccaccgatatgacgagtggtgatacggccattgttgttacgaccaccggatttgctgtttttttccagcaacggagcaaaaggtttgcccttgtgcagctcagggttaaccactttaactacgtggcgacgacccggagatgtcggtttacatttaacaactgccattgtattactcctccgacttactcagcgccgccaacgaagtccagattctggccttctttcagggtgacgtaagcttttttccagtcgctacgacgaccgatacgctgtccgtgacgtttaactttccctttaactaccagggtgttaacggacttcgacttcgacttcaaacagtttctgcacaggcagctttgatttctgctttggtcggcgtctttagcaactttgagtacgatggtgttggatttttccatcgcagtagacgctttttcagaaacgtgcggtgcac

SEQ ID NO: 3403 - DNA, 161 bp, Escherichia coli; identical to SEQ ID NO: 2239

SEQ ID NO: 3404 - DNA, 491 bp, Escherichia coli
cagattgttttgcaggcccgtattgcccggtgcatccgcattgatgcgttttaactgattaatcgcttcgccacggcgagccggaattttcgccaccgtactccagtactcgacagcaatgtcaccttccggcggcgcaccgttgaacagtttgttgtaactcgccacagcttcttctgcatgaccggtcgtcgcctgcaatcgtgcctgttgcagtgcctgacgaccatccggcgtggaaagtagcatcgtagtccgcgacgatttatacgcatttgaactcggcgctaactgcgacagccgatcgagctgtttttgcgcgccatcaatatcgccctgacgtaacaaagaacggaaacgggcggcaacgacgtccgggttattcggatcaataagttccagcccgatataacgactgttgcaccagatcttcacgatgggtcgcttcgcctaaccgaacttgctccagcaacctgttgctgagcggttgg

SEQ ID NO: 3405 - DNA, 109 bp, Escherichia coli; identical to SEQ ID NO: 1659

SEQ ID NO: 3406 - DNA, 214 bp, Escherichia coli
ctgcacggtaacctacaccaaccagctgcagcttcttagtgaagccttcggtaacaccgataaccattgagttcagcagggcacgcgcggtaccagcctgtgcccaaccgtctgcgtaaccatcacgcggaccgaaggtcagggtattatctgcatgtttaacttcaacagcatcgttgagagtacgagtcagctcgccgtttttacctttgat

SEQ ID NO: 3407 - DNA, 423 bp, Escherichia coli
taccagaccagactggaactgctcctgaatttcagcaacttctgcttctgcctcggagatgatttcgtgtttcttctccgggatgaccatgtcatcgataccaacagatgcaccagaacgcgctgcataggcgaagccggtgtacatgatctggtccgcaaaaataacggtcggtttcagaccgagaatgcggtagcaggtgttcagcattttggagattgcttttttacccagcgcctggttgacgatggagtaaggcagacctttcggtacaatcatccacagaatggcacggccaacagtcgtgtctttcaggctggttttcgctactaattcaccgttagcatctttttcatactcggtgatacgcactttaacgcgcgcatgcagagaagccagaccagagcgatacagacgttctgc

SEQ ID NO: 3408 - DNA, 174 bp, Klebsiella pneumoniae
ggggatcagcgccgccagcacaaacacagtgccgataaagaaaataatcagccgggcgatggtggtgcggatggcaaccggaataaccttatgcgggttttccgtctctccggcggcaatgccgataagctccgtcccggagaaggcgaagttcaccgccaccatggtcatcag

SEQ ID NO: 3409 - DNA, 195 bp, Klebsiella pneumoniae
ggggatccacagaggtctgaatctctgaggccagcgctttaatagtcacatctgtcatgctgttccttcctgctacagtttattacgcttcgtcgccgaaccaacaaatgttgcgagcggccatgatgagctcgccagctttctcgtcggtcatcccttcgatatcagccaggtcatcaacgccctgctcggcga

SEQ ID NO: 3410 - DNA, 179 bp, Klebsiella pneumoniae
gatcaggctgacaatcagcgccgcctccaggccttcgcgtaacataatgagaaatgggacaaacatgccaatacccttaaatgtaaagcaccgtcaacgaatgcaaaaacaggtaatatttatgatagtgattatcattacaatgctcagaaacacaagcgaaatgtgcagagaatgat

SEQ ID NO: 3411 - DNA, 501 bp, Klebsiella pneumoniae
gatctcctgacccgggcgcagccacaggtggaaggtgttgccgagaataatctgcgcgccggtggcttccacctcttccggcgtcatccctttgacggtgccgtaggtgccaacgggcataaaggccggtgtttccaccacgccgcgctcaaacaccaggcgaccgcggcgggcgcgaccgtcggtggtatccagttcaaatttcatgcttgctcctgcgtcagaaaaacagtccgacgttttcatactcgccacggaatgattccgtagctaaaaaatgcgttatggcgtctacaagccggcgtaccggccttttcagggacgctcagaaatagcctgcggattgtacgtgataaacatcgcatccccgtagctaaaaaagcgatatttctgctcaaccgccaccttataggcgttcatggtgtgctgataacccgcaaacgccgacaccagcataatcagtgtggattcagggagatggaagttagtcaccagcgcatc

SEQ ID NO: 3412 - DNA, 257 bp, Klebsiella pneumoniae
gatccagtgatgacatagtcattccttaatggttaggcatgacttgaattagcaaaccttatgccatattgcagggcaggcgtggcgcggaggtggaggcaggatgatataaagagagagcagaggctgcaccatccggacgcgcttgcgcccggctggtgcaacaggcctatttgccaagcatgcctttgtcttcgaggaaggcgataatggtgctcaggccgtcgccctgcttcagattggtgaaggtcatgggc

SEQ ID NO: 3413 - DNA, 136 bp, Klebsiella pneumoniae
gatcctcacccattatgttaataagatagtcgatatgccggacaatggtggttaagggcgtgtcgctatcgcgccggccgtcggcgcgcaggaaagcattgccgaaattgacgcccaccacgccgccgctgtcgcg

SEQ ID NO: 3414 - DNA, 153 bp, Klebsiella pneumoniae
gatcaccaggcagaccccggccagcagcaagcgcttatgccgcgagctgtcggtgatgaagccggcgggcagggtcgccagcaggccggcgataccgccgacggacatcagcaggccaatgtcctccgcctgccagtgacgctgggtgagaaa

SEQ ID NO: 3415 - DNA, 196 bp, Klebsiella pneumoniae
gatctacttatttcgacaggctgaacggacatggtttttcctttgtgcatgctatttaacgtaatgattatctggatatttattgagggcatgttcattttcgggccctctttcgtaatccactgtgcaacgatacgccaggcgattaagcgtaaaaaggtgcgtaaattgttttcattattcataattcacgaat

SEQ ID NO: 3416 - DNA, 193 bp, Klebsiella pneumoniae
gatcacatcacgccaatccagttgccgcgctgggtgcgtttcagatagctggcgatcaggctgacaatcagcgccgcctccaggccttcgcgtaacataatgagaaatgggacaaacatgccaatacccttaaatgtaaagcaccgtcaacgaatgcaaaaacaggtaatatttatgatagtgattatcatta

SEQ ID NO: 3417 - DNA, 217 bp, Klebsiella pneumoniae
gatctattgcagggcaggcgtggcgcggaggtggaggcaggatgatataaagagagagcagaggctgcaccatccggacgcgcttgcgcccggctggtgcaacaggcctatttgccaagcatgcctttgtcttcgaggaaggcgataatggtgctcaggccgtcgccctgcttcagattggtgaaggtccatgggcgatcgccgcgcatacgctggg

SEQ ID NO: 3418 - DNA, 278 bp, Klebsiella pneumoniae
gatcggccagcgatgagagtttcatcaggttaagatactggccgacaatcggctgccaggcgttggccagcccctgcggcaggaggataaagcgcagctcctgccacggcgtaaagccctgcgacagcgcggcttcccgctgcccggggctgacggcgcgcagtccggaggcgatctcttccaccagaaaggcggaggtaaagacccccagcccccacattgagcagaggaactccggcgtcagccaccagacgttgcccggcagaatggaccaggcg

SEQ ID NO: 3419 - DNA, 168 bp, Klebsiella pneumoniae
gattcgtgagacagttcggtccctatctgccgtgggcgctggagaattgaggggggctgcttctagtacgagaggaccggagtggacgcatcactggtgttcgggttgtcatgccaatggcactgcccggtagctaaatgcggaagagataagtgctgaaagcatcta

SEQ ID NO: 3420 - DNA, 168 bp, Klebsiella pneumoniae; identical to SEQ ID NO: 3419

SEQ ID NO: 3421 - DNA, 135 bp, Klebsiella pneumoniae
gatcatgcaggtcaaaggagacatcgcgaatggagggctggcgcagcgaggtgagattgcgcacctggaggatcacttcgcccggagtgttttcgcgatccggaaaacgctggttaagcgaacgcccgaccatca

SEQ ID NO: 3422 - DNA, 257 bp, Klebsiella pneumoniae
gatcagccatagcccggcgttattggcatccgcgccgcggatgtccgccgccacgatgatcccggcgatcgccgcgcagacgccgctcaggacataggccagcatcaccacgatgcgggtattgacgccggcgtttttcgccgcgcggatgttgatccctaccgcctcaataaacatgcccagcgccgttttacgggtaaacagccagaacagcagcagcgtagcggcggcgacgatcaccggcgtcggaaacagca

SEQ ID NO: 3423 - DNA, 217 bp, Klebsiella pneumoniae; identical to SEQ ID NO: 3417

SEQ ID NO: 3424 - DNA, 238 bp, Klebsiella pneumoniae
gatctccagacgtttatacagacgctgcagctggatctgggcaatagaggcaatatgtttctcgcccagcggatggaagaccaccacttcgtcgatacggttgatgaactccggacggaagttctggctgactacccccagcaccaggtccttcatatgtccgtagtccagctcgccgaaccgttcctgaatcagatcggaaccgaggttcgaggtcatgatgactaccgtattacgg

SEQ ID NO: 3425 - DNA, 217 bp, Klebsiella pneumoniae
gatctattgcagggcaggcgtggcgcggaggtggaggcaggatgatataaagagagagcagaggctgcaccatccggacgcgcttgcgcccggctggtgcaacaggcctatttgccaagcatgcctttgtcttcgaggaaggcgataatggtgctcaggccgtcgccctgcttcagattggtgaaggtccatgggcgatcgccgcgcatccgctggg

SEQ ID NO: 3426 - DNA, 118 bp, Klebsiella pneumoniae
gatcacggccatagccgctggcctgaaccttcaccagcataatttcgcgttcaacatgagccccctgccccagctcgctgacccgcaggacatccaccagcttgtgcagttgcttttc

SEQ ID NO: 3427 - DNA, 196 bp, Klebsiella pneumoniae; identical to SEQ ID NO: 3415

SEQ ID NO: 3428 - DNA, 196 bp, Klebsiella pneumoniae; identical to SEQ ID NO: 3415

SEQ ID NO: 3429 - DNA, 224 bp, Klebsiella pneumoniae
gatcgcccggaaacccctgacagcagcagcaggccggagagggcggtcgccgggactccctgcagatttatcagcagcggttcaatgtaggtgaaggcggcaaagtgagcggtaatgatgcaggccgtggcgccatacaggccaccgagcagcggattgcggaagatatcgcgataaacacgcagcctgacgggggcaggggcggccagcgggggcagcgtcga

SEQ ID NO: 3430 - DNA, 294 bp, Klebsiella pneumoniae
gatccgatcgggtgaatgctggaggtggcatggttgatgtacgagatcgagccggtgggcggcaccgcctgcagatagcgattgtagatgccatagcgcatgacatcgtcgcgcagctggcgccagctttcccggtcgggcagagagatgccggcgcgggcgaacagcgtgcgcaccctttcggttttcggctgccactcctcctgcagatatttgtcgaagtacgccccgctggcgtagcgcgactgctcgaagccggcgaagcgctggccgcgctcgcgggccagctgcatc

SEQ ID NO: 3431 - DNA, 431 bp, Klebsiella pneumoniae
gatccccggctttgacccgttggttatcggttacgttcaactgcagaatactgccggagacctgaggggtgatcccaacctgctcggcgcgcactttgccgtcgcgggtccagggtgactgagtgtagaaattccataacaaccatgcggcaatcagggcgacggccgcgaccagcagcgttgacagatattttaatcttttcataacagggagatcaccaggcaatgagtaataccagggccagacagaccgagagcgcgaacagtgagagatccattagtagcgggtgccagatgtcgcccgcatacatccagtcacgcagctggcgatgtaaaaacaaccagataaagaaacccaacaagacggctttgaacagcggagggaaatagacggatgcgccgaacaccaggtcctgcagcggcaatccgga

SEQ ID NO: 3432 - DNA, 210 bp, Klebsiella pneumoniae
gatcttatgcaccgggtagggagaaaccatattgaacggaccgcgcagatcgttatccagcagccacagaatgccgttaaccatatcgtcgatatggatccaggccaggtactgtctgccgttgccgataggcccgccgaggccgagcttaaaggcgggtgtcattttgccgagaataccgccccgcggagccagtaccacgccggtgcg

SEQ ID NO: 3433 - DNA, 294 bp, Klebsiella pneumoniae; identical to SEQ ID NO: 3430

SEQ ID NO: 3434 - DNA, 73 bp, Pseudomonas aeruginosa
aggctggagaccggcagcaggcgccgggcgaagggttccaggtggcgccagaggccgcgaccgagcgcctcga

SEQ ID NO: 3435 - DNA, 122 bp, Pseudomonas aeruginosa
ggggatccgcccgacatattccagcaccccgtcggcgcgccgccgcgccaggtcgccggtacggtacagacgctcgcccggcgcgccgaacggatgcgggacgaaggcctgagcggtgcgca

SEQ ID NO: 3436 - DNA, 66 bp, Pseudomonas aeruginosa
gatcaccaccttgatggcatccgtggccgctccggtgaccatggtcacgttgaaggtgatgcgcga

SEQ ID NO: 3437 - DNA, 193 bp, Pseudomonas aeruginosa
cgaacagcagcaggcgcagggtgttggccttctgttcctgcagctcgatgccgaacagctcgacgtgaccgtgcaacaggccgaggaaggcggcgccgaagcgccgcagggaggggcggccgtccgccgggtcctttccttcgctcatggctcagcgccggctgaccaacaggccaagcaggaagccgacggg

SEQ ID NO: 3438 - DNA, 240 bp, Pseudomonas aeruginosa
ccttgcgggtcggcagagggattggaccacgcacctgagcaccagtacgtttcgcggtttccacgatttcctgggttgattgatcgatcaggcgatggtcaaaagccttcaaccgaatccggatttgttggttttgcatttgacctcagactccaatttaccattcccaacggacggactacgcccgttaaaaggaggcgcaattgtacggatgcccccacagggtgtcaatatttaacc

SEQ ID NO: 3439 - DNA, 240 bp, Pseudomonas aeruginosa; identical to SEQ ID NO: 3438

SEQ ID NO: 3440 - DNA, 214 bp, Pseudomonas aeruginosa
tgtaggtgaaggtcaggccgagctgggtgtcgctgtcgacagtcgccttggtaccgcgctgcttggcgccgtccagcttgatgtcggaactgctgtcgtcgggatcgacggtggcgaagccgccacggatgatgaagtcaccggccttgtgtccttgaatatccgcagcggcgaacggggaggcgacggtgagggccagcagggaagcggtaag

SEQ ID NO: 3441 - DNA, 462 bp, Pseudomonas aeruginosa
atggtgaactcggtctgctcttcggcagcggcagcagccgggccagcagcggcaacggtagcggcagcagcggtaacgccgaacttctcttccatcgccttgatcagttcgaccacttgcatgacggacatttcggatacggcgttgatgatgtcttcgttggtcagagccatgactctaattcctgtattgggggacggcctgcggccatcgtattaaacaaataagattgaaagcgcttgcgagccgacttaggcggcagcagcttctttctggtcgcgaatggccgccagagtacgagccagcttgctggtagcgccttgaatcacgctcatcagctgcgatacggcttcgtcgtaggtcggcaggcttgccagtacgtcgatctgattggctgcgaggaactgaccctcgaaggcagccgccttgatctcgaacttgtcctgacccttggcgaactca

SEQ ID NO: 3442 - DNA, 316 bp, Pseudomonas aeruginosa
cgcagcgacttgaacattaatgaagaacccttgaagacggagggtagaaaatgaaatgaagatgaaaaacgaagcgaacctgaaaaaagagacggacatcacgcgaagaggccgtcttgctcattatgccgcaaggcggataacgatgcgctggagtttcgcggagttcgccgtcatatcgccgaatggtcggaactggtagagtgcgccggcaatccggccgcgccgcgcggagcttgccggggttcgcccgcggctccagcggcgtcggctactgtctgtaatgcgaggctccgccaatggagcgtcaatccag

SEQ ID NO: 3443 - DNA, 296 bp, Pseudomonas aeruginosa
ggttttatccgtcggctggacgatgtccagtacacgcttatgtgtacgaatttcgtactgatcacgcgcatctttgttgacgtgcggagagatcagcacggtgaaacgttccttgcgggtcggcagagggattggaccacgcacctgagcaccagtacgtttcgcggtttccacgatttcctgggttgattgatcgatcaggcgatggtcaaaagccttcaaccgaatccggatttgttggttttgcatttgacctcagactccaatttaccattcccaacggacggactacgccc

SEQ ID NO: 3444 - DNA, 202 bp, Pseudomonas aeruginosa
cagctcgcggttcttcatgctctctttagccatgttcctactccaatcagttacggaacgggaatttgaaagcacgcagcagggcgcgaccttcgtcatccgtacgagcggtggtggtcagggtgatgtccaggccacgcagcgcatcgatcttgtcgtaatcgatttccgggaagatgatctgctctttcacgcccatgct

SEQ ID NO: 3445 - DNA, 84 bp, Pseudomonas aeruginosa
cgctggcgtggaggccgatgcagtggtcctgcaggttgaccggcatgttcggcgtggagaacagccggctgctttccgccggcg

SEQ ID NO: 3446 - DNA, 353 bp, Pseudomonas aeruginosa
tcgctgtctcgccgctagccaccatgcagcgcccggctcggctgttgcaccggcatcttgccggtgcgtcggcgctgcctagaatcggccccattcgcacctacccccgcttcgcctacaggagttaccgccatgatgaatgccatgcagatgccgatgaacatgaatgccgccatgccgatgatgcccatgatgggcatgccgatgatgatggcgaccatgcagtgcgaaacgatggacgacggcatgctgtgcaagatgatgccggcgatgggtatggacatgggccagttccgcaacagcgccgagatgatggcgatgatgatgaactgcggcatgcccatgatgatgca

SEQ ID NO: 3447 - DNA, 276 bp, Pseudomonas aeruginosa
acatcctggaccttgaagggaccaagcccggtttccctggtacgtccctgattgaaacctgccacatcactcaacgacggaggcaaaatcgctatgcgggcctcatagacaggagtactgagaaaagcgtagatagctgcaaacaaaatacctagcaaagaaaatataagaactatccacttctcctcccataatcctcgaaccagctcaaccagatcgatatcgccagctacaccgccgtgcttttgtatttcgtcagtcatcgaaaagtccagc

SEQ ID NO: 3448 - DNA, 107 bp, Pseudomonas aeruginosa
agggtacgcaggcgcagggcatcgagttcggcgccgaaggccgccagttgttccggggtcagttcgcggtcgtcgcgcatcgcagggctcgcaggtcggttcacagg

SEQ ID NO: 3449 - DNA, 422 bp, Pseudomonas aeruginosa
  misc_feature (63)..(63): n=g, a, t or c
gaagccaccgccaatgcgaaccagtattcaccgatcacaactggcatcgactcaatcagatgnctacctataacaacagcaatcgccacggcaacgaaaatcaatagtgtcaactgaagtatcagcttgacgattgcctggagttcgccctcttctcgagtcgaaaaaatagccaactcatagcgcccagtaactacaactgcaaaaatcgtagcgaacgatagccaaacactgaaagcgcccatttcagcaggagaatacagacgaaccagtagcagagtgacaccaatcgttatgagctgtgctcccaaggtgcctactaatactcgtgcgacacggttgataaaagccgcactcatagagtttttcctaaagacatcttgagtggaaaagaacttagcgcaaggaaaagcagcatcaag

SEQ ID NO: 3450 - DNA, 422 bp, Pseudomonas aeruginosa
gaagccaccgccaatgcgaaccagtattcaccgatcacaactggcatcgactcaatcagatgtctacctataacaacagcaatcgccacggcaacgaaaatcaatagtgtcaactgaagtatcagcttgacgattgcctggagttcgccctcttctcgagtcgaaaaaatagccaactcatagcgcccagtaactacaactgcaaaaatcgtagcgaacgatagccaaacactgaaagcgcccatttcagcaggagaatacagacgaaccagtagcagagtgacaccaatcgttatgagctgtgctcccaaggtgcctactaatactcgtgcgacacggttgataaaagccgcactcatagagtttttcctaaagaaatcttgagtggaaaagaaattagcgcaaggaaaagcagcatcaag

SEQ ID NO: 3451 - DNA, 79 bp, Pseudomonas aeruginosa
ggtgataccctgtcccaggcccacgcacatggtggacacgccaagggtaccgccgttctgcttcatcacgttcaacagg

SEQ ID NO: 3452 - DNA, 163 bp, Pseudomonas aeruginosa
atccgtagagaaaccaacgtcggttggatagacgttcggactgcccttgaagcggtcaagatatccactgccgaaacgggcttttattcgatcaagattctgcgccatggaggtgagcaaaggaagtatctcaacgttgcaaacacgttccttttcattaacc

SEQ ID NO: 3453 - DNA, 368 bp, Pseudomonas aeruginosa
ccgcactcatagagtttttcctaaagacatcttgagtggaaaagaaattagcgcaaggaaaagcagcatcaagaaaacaccagagccaagcattacagttagcagggactgctcaagaatctttgtagtaaataacaaagcaaccggaatggccatgaatgcaccatacctcgaaaataagaaattcatgagaacgacactaccgcccaccaacatcgactcagccataacccccacataacccaactgcatataggctatcgcgaagaagtttacattcgcattcatatcgggattattgaaaatttccgtccccagacgaaagctcaacggctcagtcctaccctgacccaagagcgcgcccaaca

SEQ ID NO: 3454 - DNA, 266 bp, Pseudomonas aeruginosa
ccattaggaagaacattaagccccagcagcttaattttccccccctttcttaggtactttgtcttctgtgaatttattcccatccgccctgaaaactcagattggagggtacgacacacgaccccaaacaaaggatcaagcgcctgcttgttcgacgaggaaaaaatcagatcatctgcataacgagtatatataacaccattacttaaacaatgcgtctttaatatcccatccagagagtataagcatgcattgctaattgcagg

SEQ ID NO: 3455 - DNA, 264 bp, Pseudomonas aeruginosa
gcaagcaacttcaccagcgcaattgcttcatcgcgctgcttccgctcagcatatgactcaaccacataggcaggaacaccgttctgcgtgacgaccattggctcggataaatccaggtcagccgcatgacgtttcaaataactaattgtctcgactcgcatgagccggtacctccattgctgtgggaacacttaaggcctggaactcaggttctacggtgttcgaactccaccacgctccatatccaggcgacgagtgggattc

SEQ ID NO: 3456 - DNA, 170 bp, Pseudomonas aeruginosa
gccgatgctcgacttcaccacgtactggctgcccaggtacttgttgatggtcttggccttggccggggattccacgatgaccagcgatttacccatggatcggaaggttcctgcgtcgaaaagatgaatataaaggagggagcgactagcgcggcaccgctatatatagt

SEQ ID NO: 3457 - DNA, 368 bp, Pseudomonas aeruginosa; identical to SEQ ID NO: 3453

SEQ ID NO: 3458 - DNA, 383 bp, Pseudomonas aeruginosa
cgctagccaccatgcagcgcccggctcggctgttgcaccggcatcttgccggtgcgtcggcgctgcctagaatcggccccattcgcacctacccccgcttcgcctacaggagttaccgccatgatgaatgccatgcagatgccgatgaacatgaatgccgccatgccgatgatgcccatgatgggcatgccgatgatgatggcgaccatgcagtgcgaaacgatggacgacggcatgctgtgcaagatgatgccggcgatgggtatggacatgggccagttccgcaacagcgccgagatgatggcgatgatgatgaactgcggcatgcccatgatgatgcagtgcggcaacctggcgatgatgggcatgtcccaggcctgcat

SEQ ID NO: 3459 - DNA, 359 bp, Pseudomonas aeruginosa
caggggcacacgaccttcgcgataccattcggtacgggcgatttcagccccacccagacgaccgctgacctgaatcttgatgcccttggcaccaatgcgcatggcgttctgtacggcgcgcttcatggcgcgacggaacattacgcgacgctccagctgctgggctacgctctgcgcaaccagcatggcatcgagttccggcttgcggatttcctcgatgttgatgtgcacgggcacacccatttgcttggtcaggtcctggcgcagtttctcaacatcttcacctttcttgccgatcacgatgccgggacgagcggtgtggatggtgatgcgtgcggtttgagccggacgatgaatat

SEQ ID NO: 3460 - DNA, 353 bp, Pseudomonas aeruginosa
cctgcctggaacagatcgacagtgatctggtcaccagcggcatactgctcttcgcccagacggaattcccacacgccgcgaccggcggcgacattcgccttggcaaagtgaccagcttgcgctttggtaacgcgagaagcacgacgctcgccggcggtgacttgcactgcacggtagccatcggtttcttcagtcttgaactgggtgacgcgattcggctcgacctcgatgaccgtaaccggaatagagacaccttcctcggtgaaaatgcgggtcatgccgcatttacgaccgacaacaccaattgtcatgttgtaaacctcttgagtgtacggggctttcacccgctatgg

SEQ ID NO: 3461 - DNA, 129 bp, Pseudomonas aeruginosa
ccgatgatgatcaccgccggcagggtcagccacaggttggcgtgctcttccaccagcaagaccagcgcaaccgccaccatcagcttgtccgcgaccgggtcgaggaaggcgccgaacggcgtgctctgg

SEQ ID NO: 3462 - DNA, 111 bp, Pseudomonas aeruginosa
ccagcgccgccgggcggtcgccggagctgcccagggcggtggcgtaggagggcaccaggtgatcgaagggatagccgagtttcttccattgctggtgcaggtcgaggaagg

SEQ ID NO: 3463 - DNA, 88 bp, Pseudomonas aeruginosa
ccgtcgaattcgcgccagagccgctccatgccctcgagcgcttcgcgatggcgcggatcggcgcgtagccaatcctccagctcggggg

SEQ ID NO: 3464 - DNA, 124 bp, Pseudomonas aeruginosa
ccgagcgcctcggtcaggcagttcatcgagttggcggtgaacatgccggagcaggagccgcaggtcgggcaggcgctgcgctcgtactcggcgaccttctcgtcggagcaggagtcgtcggcgg

SEQ ID NO: 3465 - DNA, 128 bp, Pseudomonas aeruginosa
gatcaaaataccaaaagcaattgccagaggcacgccagcccatggttgcgcatccggagaatattgattagctccattaagaaccaatgaatgaggaacaagtattacaactaataatgtaactaaca

SEQ ID NO: 3466 - DNA, 154 bp, Pseudomonas aeruginosa
ccgaaggtctcgtccttggacaccagggcgttcttcggcacgtcgaccaggatggtcggctcgaagaaggtgccgccgagggcgtgcggcttgccgccggaaaccaccttggcgcccttggagaccgcgtcggcgatgtgttcctcgaccttgg

SEQ ID NO: 3467 - DNA, 97 bp, Pseudomonas aeruginosa
ccgatgttgtcgcccggatgcggatcgccgcgatgcggggaatacggcggcgcgctactgcgcagggggatcgcggtgaagcgcaggcgcggacagg

SEQ ID NO: 3468 - DNA, 107 bp, Pseudomonas aeruginosa
cctgcaccacttcgttgagcaggatcttgatgttgacctcatggtcggagcagtccacgccaccggcgttgtcgatgaagtcggtgttgttggcaccgccgtgcagg

SEQ ID NO: 3469 - DNA, 60 bp, Pseudomonas aeruginosa
ccgcgctgagggcgatgacgaaggaggacagccatacgccgcccaccggtaccagcccgg

SEQ ID NO: 3470 - DNA, 93 bp, Pseudomonas aeruginosa
cccggcgcatggagttccgcccggagcacagagaaaggagaaaggagaaaggagaaaggaaaacggcgccctggggcgccgtctgcgatcagg

SEQ ID NO: 3471 - DNA, 91 bp, Pseudomonas aeruginosa
cccggacggtgcttttcgcgacgggcacccggcgcggaacgcagatcgttcagttgcatggattaaccctccacacgcagcaggtagtagg

SEQ ID NO: 3472 - DNA, 124 bp, Pseudomonas aeruginosa
caacgcgagacatgctgattccccttagaacacagtgcagagcacttcgccgccaacaccagcagcacgggcagcacgatcggtcatcacacctttgttggtggagacgatcgacacaccgagg

SEQ ID NO: 3473 - DNA, 109 bp, Pseudomonas aeruginosa
cgcgacgctcgatcagtacggtgacggtcttgtccattttgtcgctgacgacgcggccggtcagcgtacggacggttttctgagcttcagccatgatcacttacctgct

SEQ ID NO: 3474 - DNA, 205 bp, Pseudomonas aeruginosa
tcttgaaccacttgtcgtggatgcgctgataggtgccgtcttcgcggatctgatggaggaagttgttgatgaaattgatgctgtcgtagtcgcctttcttcaggccgaacgccagcggctcgtaggtgaacggctggtcgaggtagaccagcttgccggcgccgaacttgctcaccgccaccacgttgtagggcgagtcgtagat

SEQ ID NO: 3475 - DNA, 247 bp, Pseudomonas aeruginosa
  misc_feature (14)..(14): n=g, a, t or c
  misc_feature (33)..(33): n=g, a, t or c
  misc_feature (220)..(220): n=g, a, t or c
  misc_feature (222)..(222): n=g, a, t or c
gccttgtccggcanttgccgatcggtgatgtancggtgcgacagcttggccgcggcgatgatcgcgccgtcggtgatgctcaccccgtggtgcacttgatagcgttccttgaaaccacggaggatggcgatggtgtcttcctcgctcggttcgtccaccagcaccttctggaagcggcgctccagcgcggcatccttctcgatgtactggcgatactcgncnagggtagtagcaccgacgcagtgca

SEQ ID NO: 3476 - DNA, 134 bp, Pseudomonas aeruginosa
tgatcaggtccaggtcgacctggtccagcacgcgcggcagcagggccgattcgagttccttgaatttcaggttcttcgggttctcggcgatgtccttgggcgtggccagggcgttgttcggatccttcaacttg

SEQ ID NO: 3477 - DNA, 70 bp, Pseudomonas aeruginosa
tgatcgtcgccagcaacagccagaccccggcggccagcaaggccgagagcatgccgaagaccagcaggtc

SEQ ID NO: 3478 - DNA, 128 bp, Pseudomonas aeruginosa
tcgaagccgagcacctgcacggcgtggctggcatttttccgcaccgccggcgacgccgaccactcggcagcccttgagcttgccgatctgtccgacggtggccccgaccggcccggtggcggcggcca

SEQ ID NO: 3479 - DNA, 70 bp, Pseudomonas aeruginosa
tgcaacgccccgccctcgtccgccaccgcccacggctgcagttctccggcgcacacctgctgcaccagca

SEQ ID NO: 3480 - DNA, 117 bp, Pseudomonas aeruginosa
aatgaccgcttgcgattatccgccattcggcgcgcgtacgcgtgaatgaaaaagcccggcgcgggaccgggcttttttcgtcgctggacgattcagccgtccagcagcgccttgttg

SEQ ID NO: 3481 - DNA, 79 bp, Pseudomonas aeruginosa
tcgcgtcccggggtcaggccggccgcggcgagcgccgggccgccctcgcgggaaagctgggcatagaggtcgtcgaggt

SEQ ID NO: 3482 - DNA, 185 bp, Pseudomonas aeruginosa
cagcaggtcgtcgggggtgaatgcgccggtgatttcgcccaggtgctgctgggcctggcgcagatcctcggccagcagttcgccggcgccattgtggataagttggctgtggccatgctccagcgcctgccctgccaggcgtagcgcttccaagtggcgccggcgggcgctgaaaccgctttccg

SEQ ID NO: 3483 - DNA, 104 bp, Pseudomonas aeruginosa
cgcaggcgacgttcttcgatgtccggcggcggcgcattgccaagcgggtcgcgcaggtgccgggcgaggctgaactgctgttggcgcaggcgctcatccatgac

SEQ ID NO: 3484 - DNA, 263 bp, Pseudomonas aeruginosa
cgttgcgcgcgcgccctccgccggccagcagcggcgttccggaaaggtcgagctggttgagcccggcgacgtccggcggggtgtccggacggtcgtcggcgagccagtcttcgaccgccagttggccactgctgagcgcgctggccagcagcttgtgcggcaggttgtactgctgccattggtcggcatcgctcggacgcaggtattgcaggccgacatgcgccgccaggaacgccgccggcagcgcgtaggcatagcgcggc

SEQ ID NO: 3485 - DNA, 263 bp, Pseudomonas aeruginosa; identical to SEQ ID NO: 3484

SEQ ID NO: 3486 - DNA, 198 bp, Pseudomonas aeruginosa
accttcaggctgtccggcaactgctcccaggagcgccagtcgcgctgcaggtcgatgggctggccgtcgacccaggagccgaccttgcgttcgaccatgaccatggtccccggtggcggcacccagcgcaggaccgcgaccagcacgacgctggcggccatgaaccagagcaggtacttgaacaggcggcggaacagg

SEQ ID NO: 3487 - DNA, 147 bp, Pseudomonas aeruginosa
tcagcaacgggtgctcctgcaaggcttccagggtggcgcggctgacgcggagtttgatttcggtttctttctgcatggggcgatgtccggctcgggacgccaggcgtccgcgggtgaaggtgttccagatcaaaggcgcgcggggtg

SEQ ID NO: 3488 - DNA, 201 bp, Pseudomonas aeruginosa
ccaggttcccggcggcgctggggttggtggcctggaacagggtggtgaaatgctcgtcggccgtcggcgcgacgcaatcggtgagttgcagggtgaaggcggtttcgccggcgctgcggcccactgcgccatcgagggcgctcaccggtacgctgtcgaggatcaccgtggggtcggtgaagccgttgaccgcgacctggc

SEQ ID NO: 3489 - DNA, 93 bp, Pseudomonas aeruginosa
gcttatcctggtaggcggctaccgcccggccgcggacgttgccggactcggtcagtgggccgctgacgtccagttcggagcggtaattgtccc

SEQ ID NO: 3490 - DNA, 227 bp, Pseudomonas aeruginosa
ccggcaaggtgctgaccacccgcccgtcgtcgagctgggtggtcagcaccgaacccttggccagattcagcttgaacgggaaattgagacggccgagagtcaccggcgccagggtgctgcccttgttgctgccagtggcggcgacgtacagctcctttaccgtaatcggcacgttctgcccggtggcggtgttggtcacgccattgatcgcgatggtggccttgttg

SEQ ID NO: 3491 - DNA, 146 bp, Pseudomonas aeruginosa
cgctcaccggtacgctgtcgaggatcaccgtggggtcggtgaagccgttgaccgcgacctggcaggtctggtcggtcacttcgccgctgaatgtgatagtgtttgccgccatcgcggttcccgaagcggcaattgccgcaaaggcc

SEQ ID NO: 3492 - DNA, 102 bp, Pseudomonas aeruginosa
tcgatcagtacggtgacggtcttgtccattttgtcgctgacgacgcggccggtcagcgtacaggacggttttctgagcttcagccatgatcacttacctgct

SEQ ID NO: 3493 - DNA, 344 bp, Pseudomonas aeruginosa
taccgtcttctaccttgaagccaacgcggtcagccttgctggtttcagtattgaagatggcgacgttggagacgtgcagaggcgcctccttctcgacgataccgccctgttggccgagcatcggattgggcttggtgtggcgcttgatcaggttcaccccgccgacgaccagacggtcgtcagcgagaaccttcagcaccttgccacgcttgcccttgtccttgccggcaatgacgattacttcgtcgtcacgacgaatcttttgcatgacggctactccttacagcacttcgggggcgagcgagacgatcttcatgaacttctcggtacggagttcacgagtc

SEQ ID NO: 3494 - DNA, 185 bp, Pseudomonas aeruginosa
tccaagcttgaactgctagaacaggaggtgcagctgatgtgaccgcatatggaaaatccagtgagaaccactgacttgtctcgacttcaatatttctttccaacagaagagaaaggttatgaaactctccatctattacagtctgccccaagccattccttaccaagaccccatactcactcata

SEQ ID NO: 3495 - DNA, 278 bp, Pseudomonas aeruginosa
gccaatggagccggcccggcgcatggagttccgcccggagcacagagaaaggagaaaggagaaaggagaaaggaaaacggcgccctggggcgccgtctgcgatcaggccttggcgggcgtcttgttccgcgggcgcagttgcgccccggccagcagcggatcgtcgatgccgctctcggcgcgcatgccggcagcgaagaacggcaccatcaggtgcatcacctgctcggtggaagtgttcacgccgaaatcggtttccgccatcgcccgcagggcct

SEQ ID NO: 3496 - DNA, 277 bp, Pseudomonas aeruginosa
tctgtacagtcccgaaagaaatgaacagccggcgaccgccgtcgaggggggagacggggcgccggccggagcctgcaatctaagggctggggcgggggtaaaacagcttcaggtcgatatggaatttgggtatcagatggggcgggggaaggcgttcgtgcagggcggcggcgcataccgggatgggggacgcgagccgatcatggcggatgaccgcgcgcggttatccgccctacgccggggtggctttccgtctgcggggcgtcatcccgccagc

SEQ ID NO: 3497 - DNA, 79 bp, Pseudomonas aeruginosa; identical to SEQ ID NO: 3481

SEQ ID NO: 3498 - DNA, 375 bp, Pseudomonas aeruginosa
tgacgcgctgtacgtgctggttgatcaggttggcatccttcagggtctgcaggctgacgacgtcgccttcgaccttggccagctcggaggtgcgtacttcagcacgatccatagccttcagggaaacgaagccgaacttcggcaggcgacggtgcagaggctgttgaccaccctcgaagcccggagcgaccttgccaccggagcgggaggtcagacctttgtgaccacggccaccggtcttgcccagaccgctaccgatgccacggcccggacggtgcttttcgcgacgggcacccggcgcggaacgcagatcgttcagttgcatggattaaccctccacacgcagcaggtagtaggccttgttgatcatgccgc

SEQ ID NO: 3499 - DNA, 244 bp, Pseudomonas aeruginosa
  misc_feature (222)..(222): n=g, a, t or c
ggtccgccggtcgaacagcgtaggtacgatggtatagggcaacgcctgtttgcgcgaccggttgatcatcgccagggtgttgaccatccgctccagccctttcaccgcgaggaactcggtctgcaccgggataccaggtgctggctggcggccagggcgttgaccatcagcacgccgagcagcggcgggctgtcgatgatcgcatggtcgaaatcctgccanagctgcgccaggctcttcgaga

SEQ ID NO: 3500 - DNA, 168 bp, Pseudomonas aeruginosa
cgtccgccgcgaccagatcgcgccaaccggcgtcgagcaaatgcgcttcccaggggcgccaggcctccagccggaagacttccatcaccgagcgcaacggacggcgccgggcctggcccggagaggacctgtcgctggcttgcgcggcactacccagtcgtggagcgg

SEQ ID NO: 3501 - DNA, 91 bp, Pseudomonas aeruginosa
cgcgccaccttcgccaggaacgcgcgcggttcgcgcaggccgggcagctccgggcggccgaggaggcgaacgaaggtgtcctggctgaggt

SEQ ID NO: 3502 - DNA, 79 bp, Pseudomonas aeruginosa; identical to SEQ ID NO: 3481

SEQ ID NO: 3503 - DNA, 118 bp, Pseudomonas aeruginosa
tccgccggccagcagcggcgttccggaaaggtcgagctggttgagcccggcgacgtccggcggggtgtccggacggtcgtcggcgagccagtcttcgaccgccagttggccactgctg

SEQ ID NO: 3504 - DNA, 144 bp, Pseudomonas aeruginosa
cacttgggcattcagaataaagtcgaccattgtgtatctccaaaaataacaatgcgcccgaacgcttgcgaccagcgttcgggcgatttcaaaggccccgccggagcggggcgttttcgttcaggcgcgttcgccgaggctggg

SEQ ID NO: 3505 - DNA, 278 bp, Pseudomonas aeruginosa; identical to SEQ ID NO: 3495

SEQ ID NO: 3506 - DNA, 74 bp, Pseudomonas aeruginosa
gttcctcgcgcgacagcgcggtgttgatcagcagcggctcggccaactggtcgccgatcttctgtcgcggattg

SEQ ID NO: 3507 - DNA, 138 bp, Pseudomonas aeruginosa
cccgacagcttagcggctacttccatcttccttaccccttaacgcttggctttcttgtccgcagcatgcccgcggtaggtgcgggtagcggcgaactcgcccagtttgtggccgaccatgtcctcgttgacgagaacc

SEQ ID NO: 3508 - DNA, 108 bp, Pseudomonas aeruginosa
ggcggctgcgctgcaggcgtcccagcggcgcgtgctggcgctcctgggtgaacaacgcgtcatcctgcccgtcgcggcgggcgtcgcgacgcacctcacggtgcaggg

SEQ ID NO: 3509 - DNA, 104 bp, Pseudomonas aeruginosa; identical to SEQ ID NO: 3483

SEQ ID NO: 3510 - DNA, 351 bp, Pseudomonas aeruginosa
tgccagtacgtcgatctgattggctgcgaggaactgaccctcgaaggcagccgccttgatctcgaacttgtcctgacccttggcgaactcacggaagatacgagcggcagcgcccggatgttcgttggagaaagcgatcagggtcgggcctttgaacacgtcgttgagcacgtcgaactgggtgccttcaacggcgcgcttgagcagggtgttacgtacgactttcacgtacacaccagcttcgcgggcctctttacggagtccggtcatggcgcctacggtcacgccacgggcatcggccacgacagcggacagggcagctttggcagcctcgttgacttcagcgacgat

SEQ ID NO: 3511 - DNA, 60 bp, Pseudomonas aeruginosa
ggtcttcgcgccacgccggttgcaacggggcgtgctggccctggtcctgctcctggccgg

SEQ ID NO: 3512 - DNA, 174 bp, Pseudomonas aeruginosa
aggcagcttgacggggttcttagcaacgcgagacatgctgattccccttagaacacagtgcagagcacttcgccgccaacaccagcagcacgggcagcacgatcggtcatcacacctttgttggtggagacgatcgacacaccgaggccgccacgaactttcggcagttgctca

SEQ ID NO: 3513 - DNA, 133 bp, Pseudomonas aeruginosa
cgttgcgcgcgcgccctccgccggccagcagcggcgttccggaaaggtcgagctggttgagcccggcgacgtccggcggggtgtccggacggtcgtcggcgagccagtcttcgaccgccagttggccactgct

SEQ ID NO: 3514 - DNA, 150 bp, Pseudomonas aeruginosa
ggcgaagtattgctggaactggccgccgaggccatcgctgcccagccgggtcagcggcgaggtggcgctgaggcgggtttccgcgcggttctcgccgccggccggacgggtggtgatggagatgatcccgccggtggcgccgctgccgta

SEQ ID NO: 3515 - DNA, 362 bp, Pseudomonas aeruginosa
attgaaataggctggatttgccttgatgcagatcaaccctggagcagaaagatgagtgtgacagtgaccgagcgtgacgatgaccacaaatcccgcgagctgcgtgcgcttggccgccgctgctgggacgtgcatcagcagggactgctggttggcgtcttccataacgaggatgacgcccacgcctatcggatcaagctggagaaagaagaagaactgcggcagataggtgaatcggcctgaaccatgcgcccccgcgtacttcgggggcgcacctttgatctcaggtccctgaaaggctccggtcgaggctgacgactcccggcggcaggctatcttcctgtacccgttgccgaggggta

SEQ ID NO: 3516 - DNA, 144 bp, Pseudomonas aeruginosa
tgtgccggcgcggcgtaccgttcgcctgggattcgcgttcgtcctcgcggatgtcgcagtacagcgcattgctgcgggcgaacagttcgaggcactcggcatccttgcccagcaatgggttggcgctgtcctcggcggacttgg

SEQ ID NO: 3517 - DNA, 205 bp, Pseudomonas aeruginosa; identical to SEQ ID NO: 3474

SEQ ID NO: 3518 - DNA, 216 bp, Pseudomonas aeruginosa
tcgcggtcggcgtgggtggccagggtcgagccgttgcccggcagcgacaggccgagcgcctcggtcaggcagttcatcgagttggcggtgaacatgccggagcaggagccgcaggtcgggcaggcgctgcgctcgtactcggcgaccttctcgtcggagcaggagtcgtcggcggccaccaccatggcatcgaccaggtccaggccgtggctggcc

SEQ ID NO: 3519 - DNA, 320 bp, Pseudomonas aeruginosa
tggattgagtctgaatcatataatttctccgacccctagtccttagacttccaccgcgcgttcaacgatatcaaccagggtccaggccttggtcttggccagcggacgggtttcgcgaatggtgaccaggtcaccaatgcggcactgattggattcgtcgtgtgcgtgcagtttggtcgaacgcttgacgtatttgccgtagatcgggtgcttgacgcgacgctcgatcagtacggtgacggtcttgtccattttgtcgctgacgacgcggccggtcagcgtacggacggttttctgagcttcagccatgatcacttacc

SEQ ID NO: 3520 - DNA, 123 bp, Pseudomonas aeruginosa
gcctggtcgaacaccgtcgccggatcggcgctggccggcagggcgacgatggccgcggtgtagccggccaggacgaaaccgtaggacgcatgattgtgcagcagcgacgcgccggcggtgcag

SEQ ID NO: 3521 - DNA, 177 bp, Pseudomonas aeruginosa
tcgagggcacgcagtccgcgatcgagggcctcttcccaggtcagcgcccagacgatcagcttcaggcacatcgagtcgtagtacggcgggatggtgtagccggtgtagatcgccgtgtcggtacgtacgccggggccgccgggggcgtagtagcgggtgatcttgccgaacgagggc

SEQ ID NO: 3522 - DNA, 187 bp, Pseudomonas aeruginosa
cagcagtagcccttgatcgcttccaggcaggcctggtggcgttccggggtatgggtggcgcaggcatcctcgaccagggtgaccaggtaaccgcggtcggcggcatcgcgcacggccatgtccacgcactggtcggtgaccaccccgcagacgatcaggtggcgggtgccgaggttgcgcagtacgt

SEQ ID NO: 3523 - DNA, 126 bp, Pseudomonas aeruginosa
tatagcggccgttgccggaggtcttggggttcggcaccactacctggacgccgtccttgagcaggtccggccagtccttcagggccttggggttgcccttgcgaacgatgaacacggtggccgagg

SEQ ID NO: 3524 - DNA, 198 bp, Pseudomonas aeruginosa
tcttgaaccacttgtcgtggatgcgctgataggtgccgtcttcgcggatctgatggaggaagttgttgatgaaattgatgctgtcgtagtcgcctttcttcaggccgaacgccagcggctcgtaggtgaacggctggtcgaggtagaccagcttgccggcgccgaacttgctcaccgccaccacgttgtagggcgagt

SEQ ID NO: 3525 - DNA, 198 bp, Pseudomonas aeruginosa; identical to SEQ ID NO: 3524

SEQ ID NO: 3526 - DNA, 157 bp, Pseudomonas aeruginosa
cggaggacataccagcacacacatgagggggaagactaaaggaggatgaacggcaggcaacctgccagatctggtagggcgcgccgaccggcgcgccctgcgcttcagatgagacccagcgccgcggcgtaggcggcagccagcgtcttgttcggcg

SEQ ID NO: 3527 - DNA, 401 bp, Pseudomonas aeruginosa
cacgatgcgatcagcacggcctttggcacgcggcatgatgcgcttgagcgaacgaccttcgttgacgaagacggtggagaccttcaggtcatccacatcggcgccttcgttgtgctcagcgttggcaacggccgactccagcactttcttcatgatctcggcggctttcttactgctgaaagccaggaggttgagcgcttcgcccaccttcttcccgcggatctggtcggcgaccaagcgggctttctgggcggagatacgagcgcccgacagcttagcggctacttccatcttccttaccccttaacgcttggctttcttgtccgcagcatgcccgcggtaggtgcgggtagcggcgaactcgcccagtttgtggccgaccatgtcctcgttgacgagaa

SEQ ID NO: 3528 - DNA, 161 bp, Pseudomonas aeruginosa
tgatccggaaatgaaaaaccccggccggagccggggttttcgcgaggcgggccgggcagatcgtggctgcccggctggcccctgttccttagtggaactggttcatggtgttgtctttgccgctggccttcagagcggcttcgcctgcgaagtactcttta

SEQ ID NO: 3529 - DNA, 69 bp, Pseudomonas aeruginosa
gccaggccgatccagaggaagtccagcaggcgccgcgaggagaggatcgccaccagcagcggcccggtg

SEQ ID NO: 3530 - DNA, 177 bp, Pseudomonas aeruginosa; identical to SEQ ID NO: 3521

SEQ ID NO: 3531 - DNA, 191 bp, Pseudomonas aeruginosa
ctcaggcgctggttgtcgctgccgcgcagggccaggctctgttcggcgtgctgttggtaggggtcgctgatcagcgcgtcgatcagcccggcggcctgttccagttgcgcgtgcagatgctccagcgggtagccgctgtagaccaggatgtcggcgcggctgcgccggcgcagttcgccgagcagggcgag

SEQ ID NO: 3532 - DNA, 290 bp, Pseudomonas aeruginosa
cagagctcggacagaccgccgttgcttagcgcagagagagcaccttgcttagccatttagtcctcgaatttaccgccagctgcttcgatagccgcacgcgcacccttggtggcggcgatacctttcagggtgaccgcacgaccaacttcgccggacagcatgactttgacgcgctgtacgtgctggttgatcaggttggcatccttcagggtctgcaggctgacgacgtcgccttcgaccttggccagctcggaggtgcgtacttcagcacgatccatagccttcaggga

SEQ ID NO: 3533 - DNA, 68 bp, Pseudomonas aeruginosa
catcgcctggcgcatttccgctccggcgccgctggccatgaccaacggcaccacgccggcgatgaacg

SEQ ID NO: 3534 - DNA, 145 bp, Pseudomonas aeruginosa
ctcgtcgagggtctgcacctgcaggcgcgagacctcgtcggcgatggcggcgatgccgcccttgcgctcggtgcgggtggtcggcacgttgtggtccggggtggcgatgttggcgtcgatccgccacggcttgcgcccggccagg

SEQ ID NO: 3535 - DNA, 85 bp, Pseudomonas aeruginosa
accatgtcggcgcggctgggtttttcgaagcagggggtgaactggccgccgatcagttcgtgccggccgtggtgcaggcgatggt

SEQ ID NO: 3536 - DNA, 196 bp, Pseudomonas aeruginosa
tatcaaccagggtccaggccttggtcttggccagcggacgggtttcgcgaatggtgaccaggtcaccaatgcggcactgattggattcgtcgtgtgcgtgcagtttggtcgaacgcttgacgtatttgccgtagatcgggtgcttgacgcgacgctcgatcagtacggtgacggtcttgtccattttgtcgctgac

SEQ ID NO: 3537 - DNA, 196 bp, Pseudomonas aeruginosa; identical to SEQ ID NO: 3536

SEQ ID NO: 3538 - DNA, 55 bp, Pseudomonas aeruginosa
tgcaggccgccgagcggcgggctgcgcgggtcgccctcgtcgcgcagcatctgca

SEQ ID NO: 3539 - DNA, 67 bp, Pseudomonas aeruginosa
tgacgcttcagctcgcggttcttcatgctctctttagccatgttcctactccaatcagttacggaac

SEQ ID NO: 3540 - DNA, 140 bp, Pseudomonas aeruginosa
cgttgtttgccataacttagaactccagtccgccttcacgagcggcatcagccagcgctttcacacggccgtggtacttgaagccagaacgatcgaacgccacctgggtgacgccggccgctttggcgcgctcggcgacc

SEQ ID NO: 3541 - DNA, 210 bp, Pseudomonas aeruginosa
gccgtagccggagatatcgcagacgatcagtcgcgggaagcgctcgcgcaacgcctcgtaggacaggcccaggcgcgcggcggcgcccggcgcgaggttctgcaccagcacgtcggcgccggccagcagcttctccagcaacggcagcgcctcggcctgcttgaggtcgaggctgaggctctgcttggaacgattggtccagacgaagtg

SEQ ID NO: 3542 - DNA, 172 bp, Pseudomonas aeruginosa
gttgctgaccagccagtttgatttcaacgccggcaggcagcttgacggggttcttagcaacgcgagacatgctgattccccttagaacacagtgcagagcacttcgccgccaacaccagcagcacgggcagcacgatcggtcatcacacctttgttggtggagacgatcgac

SEQ ID NO: 3543 - DNA, 108 bp, Pseudomonas aeruginosa
ggttcagtacctgggcctggatcgacacgtcgagggccgaggtcggctcgtccgccaccagcaccttgggttgcagcatcatcgcccgggccagggcgatgcgctggc

SEQ ID NO: 3544 - DNA, 68 bp, Pseudomonas aeruginosa
tacccagaccgttgatcggtggcggcgacacggccatgaccgtgccatcgtcgggcagcgcgaaatgc

SEQ ID NO: 3545 - DNA, 264 bp, Pseudomonas aeruginosa
gcctcgatgccacgcttgtcgatgatacgcatgcccttggcggaaacgcgcagacgtacgaagcgcttctcggactcgacccagaaacggtggtgctgcaggttcggcaggaaacggcggcgggttttgttgtgtgcgtgggaaatgttattcccggtaaccggacccttaccggttacttgacagactctagacatgcctcagccctctataacctcatgcccaacccggcatgggttggctgctttaactcaagttcgatac

SEQ ID NO: 3546 - DNA, 108 bp, Pseudomonas aeruginosa; identical to SEQ ID NO: 3508

SEQ ID NO: 3547 - DNA, 123 bp, Pseudomonas aeruginosa
catcacgtacatcgacgtgcgccaggttgcgcgcagcgaggtacaggttctcgtcgacaccatcggtcacgatcagcacgtctttcagacccagggtgtccagcttggcaaccaggcccttgg

SEQ ID NO: 3548 - DNA, 111 bp, Pseudomonas aeruginosa
cacctcgaccttgcatttcttcgggatcggcggcggcgggggaccgccgccgatagcgatggaggccgggccgatcagcgaatagggctttcggcaaaccccggtggggta

SEQ ID NO: 3549 - DNA, 152 bp, Pseudomonas aeruginosa
agcccgtcgcgcgaatgcaccaccagcacatgctcgctgccgagacgcttgagcacttcagccagcggcttgcacagttcctgggtgaacaccccgaccacctggtgcctgactcccgccgggttggtcagtgggccaagcatgttgaacag

SEQ ID NO: 3550 - DNA, 365 bp, Pseudomonas aeruginosa
tgcagtagagcagggcaaaggtggcgaaaccgccggagaacagcgccagggaggtgcgcatgaactgcggggtgcctttttcgatatagcgttcgacttcggtggcggcttccagcacctcgttggctgcttcgcgggccgcctcgattaacgcgggttcttcttcggcctgtggccggacttgcggattgctcacggggcacctctggggacggtggcgagcaggcacaacgaggccgcgccacctggatttcagggacaaggggtcgttgttggaggttatgtggcaaaggatatagataggtttatatgatttccaatatattgatcgacacgattgatatgtaaaaagacctaattggagg

SEQ ID NO: 3551 - DNA, 219 bp, Pseudomonas aeruginosa
tcgacaccaggtagaacaggccgatccgccagatcaccgagttggtggcgcgggtgatctgcttcgccgggtccttggactcggcggcggcgatggtgacgatctcggtgcccatgaagctgaacatggtcgtcagcagggcgccgagcaccgcgccgtagccgttcggcacgaagccgccgtggctcgccatcaggctggacaggccgctgacctcac

SEQ ID NO: 3552 - DNA, 157 bp, Pseudomonas aeruginosa
tgccagttgtcgaccagaacctgcagttcggggaaggtctgcggtgccaggtaagggcggttcggtaccttcgagaacaggtacatcaggcagttgatcggagcgaggaagctggagtggtcgctcaattggcgcgacagcttgtggcgtacccggc

SEQ ID NO: 3553 - DNA, 152 bp, Pseudomonas aeruginosa
gggatcggcagggcggtccagaagccgaacccggcgtactcggcgagcagcgcgtaggtgtaggcacctaccgcgtagaagccgacgtagccgagatcgagcaggccggccaggccgaccacgatgttcaggccgatgccgagcatcacgta

SEQ ID NO: 3554 - DNA, 116 bp, Pseudomonas aeruginosa
gggtgtatacgcgggtgcatacgccacgacgttgcgggcagttttgcagcgcaggcacgtcgctcttgtcgaccatgcgcttgcgcggcttacgcaccagctggttgatagttgcc

SEQ ID NO: 3555 - DNA, 141 bp, Pseudomonas aeruginosa
ccatccgccccaccacccttaccggcaccaactcctcgggcaccagcttggtggggtcgagcaggtcgaagtcgaagctgtcctgctggttctccgggatcacctgcaggcccagctcccattcgggatagtcgcccttct

SEQ ID NO: 3556 - DNA, 99 bp, Pseudomonas aeruginosa
tgtgcatcaccgcgaaggtgccgatcagcgacaccggcaccgcggccagcgggatgatcgaggcgcgccaggtctgcaggaacaggatcaccaccagca

SEQ ID NO: 3557 - DNA, 287 bp, Pseudomonas aeruginosa
tgtagagcatcgccaccacggaggatttcaatggcgcgaactcgtagtcctcctgccagtccagtccggaagaccagttcagcaggtggcgcaacgtcacctcgggatgacgggcgaacggcgggtagtagcgcgccaccgggtcgtcgagctggaagcgcccttcgccctcggcgacgccaagcagcgtggcgagcaggctcttgctcaccgaccaggtaaggtgcggggtctctgcacggctcgggccggcgtagcgctcatagaccagacgaccgtcgcggatc

SEQ ID NO: 3558 - DNA, 76 bp, Pseudomonas aeruginosa
cccatcgcctggcgcatttccgctccggcgccgctggccatgaccaacggcaccacgccggcgatgaacgccagcg

SEQ ID NO: 3559 - DNA, 138 bp, Pseudomonas aeruginosa
gacttgtctcgacttcaatatttctttccaacagaagagaaaggttatgaaactctccatctattacagtctgccccaagccattccttaccaagaccccatactcactcataccttggccaccacatataaggttcc

SEQ ID NO: 3560 - DNA, 287 bp, Pseudomonas aeruginosa; identical to SEQ ID NO: 3557

SEQ ID NO: 3561 - DNA, 186 bp, Pseudomonas aeruginosa
cgtcgaaggtgaagctgccgtcgaagtcgttgaagcggccgtacagccagctatagcccaggtgcttgatgcggaactcgatgaaggcgtgctggccttccttgtcgatcttgtagtccgcggccattgcctggccggcggtgaacagtgcggagccgagcgccagcgcggcaagggtcttcttca

SEQ ID NO: 3562 - DNA, 287 bp, Pseudomonas aeruginosa; identical to SEQ ID NO: 3557

SEQ ID NO: 3563 - DNA, 179 bp, Pseudomonas aeruginosa
gccagtagttctgggtcagccccagcaacgcggtaccgatggagaacagcacgatggtccaggtcaccacccgcacccggccgaagcggtcgcagcaccagccgccatagatgccgccgacggccatgccggcgagagtcaggctgccgagggagccggcttcgaagttgctcaggccg

SEQ ID NO: 3564 - DNA, 112 bp, Pseudomonas aeruginosa
gcaaccagtcctcgaattccggcgccggcttcaggcccagcgtctggcgcgcatagagggcgtcgtggaaggaggtggtctggtagttgagcatcacgtcgtcggagccggg

SEQ ID NO: 3565 - DNA, 155 bp, Pseudomonas aeruginosa
gacccggctggcgaccagctcgccttcgctgacctgcaacagcgcggcggcgtcgcgcgcgcgtagctgcggtcgctcggcgcgcaggtcctgccaggcgcggtaaagctcggcaggggaatgggaaaggctgggagtgctgctcatcgacggtt

SEQ ID NO: 3566 - DNA, 71 bp, Pseudomonas aeruginosa
tgcgccaccaatgcccgacaggacgacggaagcggcaaacacgatggccaagcgacgcaggaacggacgag

SEQ ID NO: 3567 - DNA, 242 bp, Pseudomonas aeruginosa
tcatctggaactccttcgaaggggatggcatcgattggcaggagaaatagaaccttgcccaggctgccgacggatatgcagtgatcaccggctcttgcgcatggcgccttctcgtggacagggcgccagctggggtgagcggcattctagcgacaggccgaaagtggttatttcttcaatgcgacaactaattataaaagcaccgaagagggcattcggcgatattgacaggcagcgacatt

SEQ ID NO: 3568 - DNA, 215 bp, Pseudomonas aeruginosa
tgagttcaattcatgaatgcccggatagcgcgggcgcaccgagggaggaggaatggcctatgacgcgctgcgtcaggcgggtagggcaggataacgcccccagcagttatccgcctagcggaatctcaggcgggtgagaaaggccggatgaagcatcgcgccctgcgccaggcgggcagggcgaagagggcccccggcctattgcaggccgtact

SEQ ID NO: 3569 - DNA, 213 bp, Pseudomonas aeruginosa
cgcgtacctgcagggcgtagaaccggccgttctcgctcaggcgcaggccgcgcccctcgcggacgaacagggccaggccgaggaggttttccagcagcttgatctgctggctgatcgctgagtgggtgacgtgcagctcgctggcggcctggctgatgctgccgagccgggcgaccgcttcgaagctgcgcagggcggtgaggggagggaggt

SEQ ID NO: 3570 - DNA, 273 bp, Pseudomonas aeruginosa
tccacaggttgcggctggcgatgcgcttgccgttgcgcgcccagaactcggggtcctcggggcgccagtcgagcagcagcggtccccgtgcggctttcagttgggtattggcgatcatgcccatgacggcattcctcaggagtgggtgggaagggtgggaggaaggtcgacgtcggccgaggcggcctggccgtcgatgcggcgttgctgcttgatcgcgtagtgcatccagaccatgcagaccacggtcaggccgaacagcaacatgaagca

SEQ ID NO: 3571 - DNA, 194 bp, Pseudomonas aeruginosa
gctccaggcaagccaagtagccccgatcgttgagcgccagcacctggtcgatgtgaaagcgcgcctgctcgtattcgccggtggccagcgaagccatgtgctgatggttgctggctttcaggcgctgcggcaggtatttgccgacggtctcgttgagcagatggccgatcgccgacttgtcgtccagctcgatc

SEQ ID NO: 3572 - DNA, 91 bp, Pseudomonas aeruginosa
gccggcaatccgagccgcgcgcgggccgcagcgcgatccgcctgcaggggaatggtgttggccagggggtggccgacgaaacgcacgggcc

SEQ ID NO: 3573 - DNA, 87 bp, Pseudomonas aeruginosa
tgccgccgtgctgggcggcgatgcgcttgacgatcgccaggccgaggccggtgcccttgccgccacgcgccttgtcgccacggatga

SEQ ID NO: 3574 - DNA, 115 bp, Pseudomonas aeruginosa
aacggtattcactggctgtcgccgttgtaaagcggcgggagggatatcaggcgaagtcgccccagagttgctgggccaccgccaacgctaccaccggcgcggtctcggtgcgcag

SEQ ID NO: 3575 - DNA, 187 bp, Pseudomonas aeruginosa
cggcgttgatgacgacgatgtagtcgccggtgtcaacgtgcggagtgtactcaggcttgtgcttgccacgcaggcggcgggcaatttcggtcgccagacgacccagggtctggccggcagcgtcgacgacgaaccagtcgcgctgtacagtttccggtttcgcggtataggttttcattcgttatag

SEQ ID NO: 3576 - DNA, 92 bp, Pseudomonas aeruginosa
tacttgggttgcaaccagcgctcgtgcaactggtccagggacttgcgcggcagcgagcgcaacgcctggtcgaccaccatcgccagttccgg

SEQ ID NO: 3577 - DNA, 250 bp, Pseudomonas aeruginosa
cccttggcatccaccagttgggagcccttgccgatgacgctggcgctcatcacgccgtcgtggaggtcgcccaggctctcgtaggccacggccttctgttcgccggtagcgaggttgatgatccacttctcctcgccacgctcggcgctgatcaagccaccgtgttcggcgacgctgccgttgaccagggtggtgtcgtagagcgcctcggtgagctgcttgcccttggcatcgaggatgccgcgcttgc

SEQ ID NO: 3578 - DNA, 120 bp, Pseudomonas aeruginosa
ttgtccttgaagcgggcgatgtcggcgaaggtcttcagcccgccctcggcgacgtagctcggcaccgcataggtggactgcgcgtcggccagggtcggcggctcgatcacttcgatccgg

SEQ ID NO: 3579 - DNA, 351 bp, Pseudomonas aeruginosa
ggcaggtaataaaaaaaccgggcctgggcccggtttcttgtgcagcagatgccttattcggcagcttctacgacttcaccgccgacaggacgatcaaccagctcgacgtacgccatgggggcgttgtcgccagcgcggaaaccgcacttcaggatgcgcaggtagccgcccggacggttggcgtagcgcttgcccaggtcgttgaacagcttgccaacggcagctttcgaacgggtacggtcgaaagccaggcgacggttggcgacgctgtcttccttggccagggtgatcagcggctcggcaacgcgacgcagttccttagccttgggcagggtggttttgatcagttcg

SEQ ID NO: 3580 - DNA, 344 bp, Pseudomonas aeruginosa
acgcttggccgctacacgacgtcttggcattgataagccctcaaacggtcttcaggttagcccgggaccataacagtcaagttacgcccgaccttactcttatcgactcagataaatataaaaacgctattacttcggacgcttggcgccgtacttcgaacgaccctgcttacggtctttgacacccgaggtgtccagcgaaccgcgcacggtgtggtaacgcacgcccggaaggtcctttacacgaccgccacggatcagcactacgctgtgctcttgcaggttgtgaccttcaccaccgatgtacgaggaaacctcgaaaccgttggtcagacgtacacggc

SEQ ID NO: 3581 - DNA, 120 bp, Pseudomonas aeruginosa
tgcaggacggtctcgttgtccagcgccagcagctcttcggcggtcagcgtgtcggccagggtggtcaggtgctgccaactggcctcgcgggcctcggggtccttcaggcggtcggcggga

SEQ ID NO: 3582 - DNA, 76 bp, Pseudomonas aeruginosa
gggtcgagccgttgcccggcagcgacaggccgagcgcctcggtcaggcagttcatcgagttggcggtgaacatgcc

SEQ ID NO: 3583 - DNA, 187 bp, Pseudomonas aeruginosa; identical to SEQ ID NO: 3575

SEQ ID NO: 3584 - DNA, 246 bp, Pseudomonas aeruginosa
acagcaatagggcggcgacgcccgtgaccagaaggacgattttcaacatgtcaatgagttcaccttgatggggtaacgatcaagtagccggacagcgcttcggtgcatgaaacgaaaggtgcggaaggaaggccggcctatgcgcgtgacgcacggcggctatttaacaggaaagcaggaggctactcaaatcaagcggttggcgccggagggggagggcggcaccctgaggcgggccccgctttc

SEQ ID NO: 3585 - DNA, 207 bp, Pseudomonas aeruginosa
gcggcgagcggcttccattgctttctggatggcggccggcacttcacgcgccttgccacgaccgaaaccaacgcgacccttgccatcacccaccacggtcagtgcggtgaaagcgaagatacggccaccttttacggttttggcgacgcggttaacctgaaccagcttctcgatgtagccttcgtcgcgcttttgctcgttgtttgc

SEQ ID NO: 3586 - DNA, 218 bp, Pseudomonas aeruginosa
gctttctggatggcggccggcacttcacgcgccttgccacgaccgaaaccaacgcgacccttgccatcacccaccacggtcagtgcggtgaaagcgaagatacggccaccttttacggttttggcgacgcggttaacctgaaccagcttctcgatgtagccttcgtcgcgcttttgctcgttgtttgccataacttagaactccagtccgccttcacg

SEQ ID NO: 3587 - DNA, 155 bp, Pseudomonas aeruginosa; identical to SEQ ID NO: 3565

SEQ ID NO: 3588 - DNA, 71 bp, Pseudomonas aeruginosa
cgcggaggatgccgagcgcctgctgcacagggcggtcggagaaactgaacagcacgcagtcggtggcgccg

SEQ ID NO: 3589 - DNA, 182 bp, Pseudomonas aeruginosa
ggcccggtttcttgtgcagcagatgccttattcggcagcttctacgacttcaccgccgacaggacgatcaaccagctcgacgtacgccatgggggcgttgtcgccagcgcggaaaccgcacttcaggatgcgcaggtagccgcccggacggttggcgtagcgcttgcccaggtcgttgaaca

SEQ ID NO: 3590 - DNA, 91 bp, Pseudomonas aeruginosa
acctccagcgtctgcggatggctgacctcacaacgcaggtgcaggcgatggtcggcgcgcgcgtcgccgctggcggcggcctcgccgatgg

SEQ ID NO: 3591 - DNA, 91 bp, Pseudomonas aeruginosa; identical to SEQ ID NO: 3590

SEQ ID NO: 3592 - DNA, 94 bp, Pseudomonas aeruginosa
cgcaggcgacgttcttcgatgtccggcggcggcgcattgccaagcgggtcgcgcaggtgccgggcgaggctgaactgctgttggcgcaggcgct

SEQ ID NO: 3593 - DNA, 92 bp, Pseudomonas aeruginosa
ggatacgctcgtcgcgcggcgcgatcggcgggatcaccggacgctggaacgggccagtggcggcgaccacgcggttggcctcgatggtccct

SEQ ID NO: 3594 - DNA, 145 bp, Pseudomonas aeruginosa; identical to SEQ ID NO: 3534

SEQ ID NO: 3595 - DNA, 58 bp, Pseudomonas aeruginosa
tccgtgtgaggtgccgggcgctcgcggcgcccgtgtcgttatcggttcggtcagaagg

SEQ ID NO: 3596 - DNA, 260 bp, Pseudomonas aeruginosa
acgcagcagggcgcgaccttcgtcatccgtacgagcggtggtggtcagggtgatgtccaggccacgcagcgcatcgatcttgtcgtaatcgatttccgggaagatgatctgctctttcacgcccatgctgtagttgccgcgaccatcgaaggacttggcattcaggccgcggaagtcacgcacgcgcggcagggagatggacagcagacgatccaggaactcgtacatccggtcgctacgcagggtgaccttgacgccga

SEQ ID NO: 3597 - DNA, 167 bp, Pseudomonas aeruginosa
tgccggtgaccttgtagctaccgtcggcctgcggctcggccttggtgcgcagcatgcccaggtcggtgccgcagtgcggctcggtcaggcacatggtgccggtccactcgccggagaccagcttggtcaggtaggttgcctgctgctcggcggtgccgtgggcatgc

SEQ ID NO: 3598 - DNA, 443 bp, Pseudomonas aeruginosa
tgacgcttcagctcgcggttcttcatgctctctttagccatgttcctactccaatcagttacggaacgggaatttgaaagcacgcagcagggcgcgaccttcgtcatccgtacgagcggtggtggtcagggtgatgtccaggccacgcagcgcatcgatcttgtcgtaatcgatttccgggaagatgatctgctctttcacgcccatgctgtagttgccgcgaccatcgaaggacttggcattcaggccgcggaagtcacgcacgcgcggcagggagatggacagcagacgatccaggaactcgtacatccggtcgctacgcagggtgaccttgacgccgatcggccagccttcacggatcttgaagcctgcgatggacttacgagcgtaagtcacgaccggcttctgaccagtgatcttttccagatcggctacggcgttct

SEQ ID NO: 3599 - DNA, 189 bp, Pseudomonas aeruginosa
tcggaagccagcagggtggcgaccgccttgcgcgacagaccgcggcgcaccggctggccgagcaggtcggtgaacagctcgtacttgatcgcggtggagaccaccacctggccgaggccgatggaggtgttggcgctcttgatgctgactgccgcctgatagtccttggcgtcttcgtcgcgggtctgg

SEQ ID NO: 3600 - DNA, 61 bp, Pseudomonas aeruginosa
cgccatggcagatcgcgcactgctgggcatagatcggcgccgcgcggctcgggtcgggggt

SEQ ID NO: 3601 - DNA, 160 bp, Pseudomonas aeruginosa
gcggcgttccggaaaggtcgagctggttgagcccggcgacgtccggcggggtgtccggacggtcgtcggcgagccagtcttcgaccgccagttggccactgctgagcgcgctggccagcagcttgtgcggcaggttgtactgctgccattggtcggcatc

SEQ ID NO: 3602 - DNA, 207 bp, Pseudomonas aeruginosa; identical to SEQ ID NO: 3585

SEQ ID NO: 3603 - DNA, 218 bp, Pseudomonas aeruginosa
ggtggcgtcggccaggtcggtcgagcgcatccagtggctgggggtcaggggaggggtgagcgtgagtttcatggcgcgggtccggggtcgctgaatctggagcaagggtggcgagcggcgccgtccgcgacaattggacgcaactaggaatcgaggaggtgctctcgtacgatcgtatgagtcttgtgaaggacaggcctggtcgggactgcccgccc

SEQ ID NO: 3604 - DNA, 61 bp, Pseudomonas aeruginosa; identical to SEQ ID NO: 3600

SEQ ID NO: 3605 - DNA, 54 bp, Pseudomonas aeruginosa
tgccggaatgggcgtcgcggtagcgggcgccggggaccggcatgtcgacggtga

SEQ ID NO: 3606 - DNA, 126 bp, Pseudomonas aeruginosa
ccgacctcggccagggtcgaagcgatgtcctcggcatgggtcagcagcttcagcggctgctccggctggttctcgtgatagacggtaaggctgctcatcggctcagactcagtactttcagttcac

SEQ ID NO: 3607 - DNA, 130 bp, Pseudomonas aeruginosa
cgcgcgccttcgttgaggatgtgctggcgcatcgcctggctcgcccgctcgctgtcgtgctggcggatcgcacggaggatggcgtcgtgttcctggaggatctcctcggcgtattccggctggcggcgca

SEQ ID NO: 3608 - DNA, 194 bp, Pseudomonas aeruginosa; identical to SEQ ID NO: 3571

SEQ ID NO: 3609 - DNA, 107 bp, Pseudomonas aeruginosa
ccagcaacgcggtaccgatggagaacagcacgatggtccaggtcaccacccgcacccggccgaagcggtcgcagcaccagccgccatagatgccgccgacggccatg

SEQ ID NO: 3610 - DNA, 263 bp, Pseudomonas aeruginosa
caccggagcgggaggtcagacctttgtgaccacggccaccggtcttgcccagaccgctaccgatgccacggcccggacggtgcttttcgcgacgggcacccggcgcggaacgcagatcgttcagttgcatggattaaccctccacacgcagcaggtagtaggccttgttgatcatgccgcggttctcaggagtgtcctgaacttcgacggtatgattgatgcgacgcaggccgagacccttgacgcaagccttgtgattggcc

SEQ ID NO: 3611 - DNA, 196 bp, Pseudomonas aeruginosa; identical to SEQ ID NO: 3536

SEQ ID NO: 3612 - DNA, 175 bp, Pseudomonas aeruginosa
tcctcgtcgaagtccaccagcacccggaacatctcctggaagtccggatcgaggtcctgcagggtgtagtagatctgccgcgagccgatgatgatcaccttcagttgcagcgggatcacctggggggtcagggaaaccgcagccaggcggccgagttcggccagcggcgactcca

SEQ ID NO: 3613 - DNA, 110 bp, Pseudomonas aeruginosa
tgccggtgttgtgcgacaggtcgaagttgatctggtatttccagtccttgtacgcggtgccgccgagttcgatgaaggcgcggcggaagtaggcggcgtcggcggtgttg

SEQ ID NO: 3614 - DNA, 179 bp, Pseudomonas aeruginosa
agcctggattttcttagccatttgctactccaaattcgggtacaagcgcctgaaggctccccggttgctttcgcgtttatcccagtgacgacaaaaccccgcagccttgggctgcggggtgagggatgcgttttcagttagaccttttcgacctgactgaactccagctccaccggggt

SEQ ID NO: 3615 - DNA, 246 bp, Pseudomonas aeruginosa
acagcaatagggcggcgacgcccgtgaccagaaggacgattttcaacatgtcaatgagttcaccttgatggggtaacgatcaagtagccggacagcgcttcggtgcatgaaacgaaaggtgcggaaggaaggccggcctatgcgcgtgacgcacggcggctatttaacaggaaagcaggaggctactcaaatcaagcggttggcgccggagggggagggcgggaccctgaggcgggccccgctttc

SEQ ID NO: 3616 - DNA, 300 bp, Pseudomonas aeruginosa
cagaaagagaaagaaagaaaactggcaagccagacttttctgagaagacaggctcatcacggagggaatgtgcgccccgtccccatgccgggaacggggcgcgatttcaccggtggatgtcggtatggcgggtttcgcggaggaacagcaaggcgcagaccaggctaccgccggtgatcagcaccggataccagaggccgtagaagatgtcgccggtgtacaccaccagggcgaacgagaccgtgggcaggaagccgccgaaccagccgttgccgatgtggtacggcagggacagcgagg

SEQ ID NO: 3617 - DNA, 228 bp, Pseudomonas aeruginosa
  misc_feature (53)..(53): n=g, a, t or c
  misc_feature (57)..(57): n=g, a, t or c
  misc_feature (111)..(111): n=g, a, t or c
gtcttcatcgccgtaccggccagttcgccggtcagggtttcccactggtgcangcancaggccttcggcgcgggtcgccttgaccgtctccaggtgctcgaaggcttccancagcacgccgttcttcatcgccccttcgcgcaggttctgccgcgacaggtggccgagcaggcgctgggtcagcagccccggcaggatcatcatcacgcaggccaccatcggcaccca

SEQ ID NO: 3618 - DNA, 189 bp, Pseudomonas aeruginosa
ccccggccgatggaaatcggccactccagccccgcgattgcagcctcctggtcgcaggggccttttttatgcgcagcagcgggggctcggtcgagccccacgtcgtttctcggcgatggcgtaaaggctcggcggccattgccgcgggctattcccgccgctccggctgcgcggagtggatatacaggg

SEQ ID NO: 3619 - DNA, 173 bp, Pseudomonas aeruginosa
tgtcctgccagcgcttggcgtggcggctgccgggaacgttgctgtgggccagttcgtcgaccagggccagcgccggcgggtcggcgaggagaccgtcgaggtccatttcctgcagtttcatccctcgatactcgaggctgcgcagcggctgctgcggcacgcctgcgaggagg

SEQ ID NO: 3620 - DNA, 68 bp, Pseudomonas aeruginosa; identical to SEQ ID NO: 3533

SEQ ID NO: 3621 - DNA, 183 bp, Pseudomonas aeruginosa
gtgactttgacagttgccatggttagagaatctcctcgacgctcttgccacgcttggccgctactgcttccggagcctgcatgttcttcaggcccttgaaggtggcgtaaaccacgttcaccggattggtggagccatagcacttggccaggacgttctgcacaccagccacttccagaacgg

SEQ ID NO: 3622 - DNA, 105 bp, Pseudomonas aeruginosa
gaaagcgcgcctgctcgtattcgccggtggccagcgaagccatgtgctgatggttgctggctttcaggcgctgcggcaggtatttgccgacggtctcgttgagca

SEQ ID NO: 3623 - DNA, 135 bp, Pseudomonas aeruginosa
gccccagcaacgcggtaccgatggagaacagcacgatggtccaggtcaccacccgcacccggccgaagcggtcgcagcaccagccgccatagatgccgccgacggccatgccggcgagagtcaggctgccgaggg

SEQ ID NO: 3624 - DNA, 112 bp, Pseudomonas aeruginosa
  misc_feature (8)..(8): n=g, a, t or c
ccgaagantgccagcttggccacgtggcagcggtgcccggcgcttgatcacagtggcaggtaggccttgcctcaggatgtacaggcccatcagcagcaggtaggcggagatg

SEQ ID NO: 3625 - DNA, 308 bp, Pseudomonas aeruginosa
tgcgattatccgccattcggcgcgcgtacgcgtgaatgaaaaagcccggcgcgggaccgggcttttttcgtcgctggacgattcagccgtccagcagcgccttgttgcgtaccgcgcccttgtcggcgctggtggcgagcagggcgtaggccttgagcgcggtgctgacgcggcgggcacgcggcgcggccggcttccagcccttcttgtcctgttcggcgcggcgtgcggcgagttcttcgtcgctgaccagcaggttgatcgagcgattgggaatgtcgatcagcaccttgtcgccgtcctgcacc

SEQ ID NO: 3626 - DNA, 207 bp, Pseudomonas aeruginosa; identical to SEQ ID NO: 3585

SEQ ID NO: 3627 - DNA, 97 bp, Pseudomonas aeruginosa
tactcgtcgtagttgcccgggaacaggcgcagctcgccagtattccaggtcggccatgtgggtgcagacgcctgttcaggaagtggcgatcgtggga

SEQ ID NO: 3628 - DNA, 112 bp, Pseudomonas aeruginosa
tccagttcgggcatcttcgcccgcacttccttgatcacgtccagcgggttggcgctgggcgtgcccttgatgccgatgtagaccgagggaatcccattgaacgaactgatcg

SEQ ID NO: 3629 - DNA, 60 bp, Pseudomonas aeruginosa; identical to SEQ ID NO: 3511

SEQ ID NO: 3630 - DNA, 174 bp, Pseudomonas aeruginosa
tctgctcttcggcagcggcagcagccgggccagcagcggcaacggtagcggcagcagcggtaacgccgaacttctcttccatcgccttgatcagttcgaccacttgcatgacggacatttcggatacggcgttgatgatgtcttcgttggtcagagccatgactctaattcctg

SEQ ID NO: 3631 - DNA, 298 bp, Pseudomonas aeruginosa
tgatagtctgccatctatagctccactgattgtcttacgacacacaaacgaaatgacagagcgtgcgccctgccaattttcggggtacaaaatagtaaagaggttcttgtacaccgtcaagacaaagccccggctatcgggatagccggggcttgtcgttgatgcttagttaccgctcgagttcagcgcttcggtcagtgcggcttccgcctcgctggcactcacacgctgcggcttgccgaggtcgcgctgacgcttgcgttcgctgtggtaagccagaccggtaccggccgggatc

SEQ ID NO: 3632 - DNA, 139 bp, Pseudomonas aeruginosa
gcctgtttccgcctcgcctcaaggcgtacggttgcgccgcgcctcgatgatgttgggcagttgcgagacgcgcgccagcaggcgtccaagagcgtccagaccgggaatctcgatggtcagttgcatggtcgcggtgttg

SEQ ID NO: 3633 - DNA, 146 bp, Pseudomonas aeruginosa
ccctggcgccgcgtccggaggggcgcttcgaagcgttgtcggaattctggctggccttgcagaagccgctagcgcatccccagcgggtcttcgcgccacgccggttgcaacggggcgtgctggccctggtcctgctcctggccggg

SEQ ID NO: 3634 - DNA, 156 bp, Pseudomonas aeruginosa
ggatgatcacgccctcctcgaagccgatggtgcggcagcgccaggccagatcgttctcgttggcgaagcgcttgcgggtcaccttgtcctcggcgaactgcagcgcggcgacgaagccggcgccctggacctcgccgaccagcggatggtcgccga

SEQ ID NO: 3635 - DNA, 186 bp, Pseudomonas aeruginosa; identical to SEQ ID NO: 3561

SEQ ID NO: 3636 - DNA, 228 bp, Pseudomonas aeruginosa
ggatatgccgtttgcgggcgatgtgcgccttgtgcttcggcgcctcgagcagcgccttgcgtagcgggtcggtgagcggcaggcgctccagcaactgcggttgcagggtggtcaggcgctcgccgaggtcctgcagggcatgcagctcgcgtttgatctgcgacttgctcttctcttcgaattgcgagtcgtcgtcgtgaaattcagccatggtggtggtccagtgga

SEQ ID NO: 3637 - DNA, 73 bp, Pseudomonas aeruginosa; identical to SEQ ID NO: 3434

SEQ ID NO: 3638 - DNA, 229 bp, Pseudomonas aeruginosa
tgccaatggagccggcccggcgcatggagttccgcccggagcacagagaaaggagaaaggagaaaggagaaaggaaaacggcgccctggggcgccgtctgcgatcaggccttggcgggcgtcttgttccgcgggcgcagttgcgccccggccagcagcggatcgtcgatgccgctctcggcgcgcatgccggcagcgaagaacggcaccatcaggtgcatcacctgctc

SEQ ID NO: 3639 - DNA, 115 bp, Pseudomonas aeruginosa
cgagccgatgatgatcaccttcagttgcagcgggatcacctggggggtcagggaaaccgcagccaggcggccgagttcggccagcggcgactccatcttcaactggcgcgactgc

SEQ ID NO: 3640 - DNA, 115 bp, Pseudomonas aeruginosa; identical to SEQ ID NO: 3639

SEQ ID NO: 3641 - DNA, 115 bp, Pseudomonas aeruginosa; identical to SEQ ID NO: 3639

SEQ ID NO: 3642 - DNA, 268 bp, Pseudomonas aeruginosa
tcactcctaggcgaggtcagtgccgctctccggccgggttcggcccggtcagttcgaccggggggagcggtcacgggttccagcattgtagcgatggcggacgcaaaaaagggcagccgaggccaccctttttcatacatcttttttgccgtgctacgcagcgatcagtgcagaccctggatgtagctggaaatcgcggcgatgtccttgttcgacagcttggcggcgatggactgcatgatcttggtgtcgccgtcgttggtgcggg

SEQ ID NO: 3643 - DNA, 121 bp, Pseudomonas aeruginosa
gcaatttgaataatttcacctgtcctatcgttcacaactatatatccattaggaggacttccatatactgttgcagagtcattccgccccagcccatctatcgtcttattaggccgacgct

SEQ ID NO: 3644 - DNA, 153 bp, Pseudomonas aeruginosa
cgcgctgcacctggccgagccagcggtcgctgatgtccagcgcccagtagccctcgggcttgttcatcagcaggcggttctgccgcacgcgcgggcggctggccttgaacagttcggcgtgatcccactgcggatgttcctcgcgcatccggc

SEQ ID NO: 3645 - DNA, 130 bp, Pseudomonas aeruginosa
gctttcagctcggcacgcttcttggcgtacttggctaccgtcagctgacgcttcagctcgcggttcttcatgctctctttagccatgttcctactccaatcagttacggaacgggaatttgaaagcacgc

SEQ ID NO: 3646 - DNA, 281 bp, Pseudomonas aeruginosa
catagccttcagggaaacgaagccgaacttcggcaggcgacggtgcagaggctgttgaccaccctcgaagcccggagcgaccttgccaccggagcgggaggtcagacctttgtgaccacggccaccggtcttgcccagaccgctaccgatgccacggcccggacggtgcttttcgcgacgggcacccggcgcggaacgcagatcgttcagttgcatggattaaccctccacacgcagcaggtagtaggccttgttgatcatgccgcggttctcaggagtgt

SEQ ID NO: 3647 - DNA, 130 bp, Pseudomonas aeruginosa; identical to SEQ ID NO: 3645

SEQ ID NO: 3648 - DNA, 296 bp, Pseudomonas aeruginosa
tcgaagccgaagatgcgtacgctgccggcgctcggcgcgaggaagccggaaagcatcttcagggtggtcgacttgcccgctccgttggggccgaggagaccgacgatctctccccggtcgatgcggaagctcaagtcgtttaccaccgtccggccggaaaagcgtttgctcagtctgtctatgtcgatcatggtttcactggaagttgagccgtttgctgatatgcgtaggggatcgcatgagcgcggtagattaccgggagttattggctggtttttccagtgggctctttttaa

SEQ ID NO: 3649 - DNA, 95 bp, Pseudomonas aeruginosa
ccgatcgccaataaatccgtcatacaactgttgctcggggtcgtcgctggcggagaaactttcttcgccatatagcgctgtcagtttgtccgccc

SEQ ID NO: 3650 - DNA, 131 bp, Pseudomonas aeruginosa
tcatttgctattggcagggaggtaaaaagattattaggtactggcttgccataagcatagagtacttctgaaggtaaggtgccatttgctaaaaatagtgcggtaacgccgaatgcataaacatcaatagc

SEQ ID NO: 3651 - DNA, 281 bp, Pseudomonas aeruginosa
acagagaaaggagaaaggagaaaggagaaaggaaaacggcgccctggggcgccgtctgcgatcaggccttggcgggcgtcttgttccgcgggcgcagttgcgccccggccagcagcggatcgtcgatgccgctctcggcgcgcatgccggcagcgaagaacggcaccatcaggtgcatcacctgctcggtggaagtgttcacgccgaaatcggtttccgccatcgcccgcagggccttgatccccgacatgctgaaggcggccgcgccgagcatgaagtgc

SEQ ID NO: 3652 - DNA, 166 bp, Pseudomonas aeruginosa
ccagcagcagaaccagaccgaggaggaatcgtttcatgggtgtccgaaggcttcaggaaaaaaggggccagcgctgaacgctagccgtgccggcccgctgtcgcaagccttgtgacgagtctaggcgtgctgccggtggtcggcgccgaacctaaggacggcggtt

SEQ ID NO: 3653 - DNA, 281 bp, Pseudomonas aeruginosa; identical to SEQ ID NO: 3651

SEQ ID NO: 3654 - DNA, 108 bp, Pseudomonas aeruginosa
tcgaaccctgcgggtcgaacagcaccaggtcggcggcctggcccaccgccaggcgcccggcaggcaggcgtagtgcctgggccgggccgtgggagaggcgggcgagca

SEQ ID NO: 3655 - DNA, 230 bp, Pseudomonas aeruginosa
gcttccattgctttctggatggcggccggcacttcacgcgccttgccacgaccgaaaccaacgcgacccttgccatcacccaccacggtcagtgcggtgaaagcgaagatacggccaccttttacggttttggcgacgcggttaacctgaaccagcttctcgatgtagccttcgtcgcgcttttgctcgttgtttgccataacttagaactccagtccgccttcacgagc

SEQ ID NO: 3656 - DNA, 277 bp, Pseudomonas aeruginosa
cgaccccacccttacctttacccatacgaacttcgaggggcttcttggtgacaggcttgtcagggaatacgcggatccagatcttgccgccacgcttcacgtgacgggtcagcgcacgacgcgcggactcgatctgacgagcagtaaggcggccacggctagtggccttcagtgcgtactcaccgaagctgaccttactaccacgatgagccagaccacggttgtggccggtcatttgtttgcggaacttcgtacgcttgggttgcagcatttgcgt

SEQ ID NO: 3657 - DNA, 230 bp, Pseudomonas aeruginosa; identical to SEQ ID NO: 3655

SEQ ID NO: 3658 - DNA, 162 bp, Pseudomonas aeruginosa
gccagcagcggcaacggtagcggcagcagcggtaacgccgaacttctcttccatcgccttgatcagttcgaccacttgcatgacggacatttcggatacggcgttgatgatgtcttcgttggtcagagccatgactctaattcctgtattgggggacggcct

SEQ ID NO: 3659 - DNA, 281 bp, Pseudomonas aeruginosa; identical to SEQ ID NO: 3651

SEQ ID NO: 3660 - DNA, 249 bp, Pseudomonas aeruginosa
ggcattgataagccctcaaacggtcttcaggttagcccgggaccataacagtcaagttacgcccgaccttactcttatcgactcagataaatataaaaacgctattacttcggacgcttggcgccgtacttcgaacgaccctgcttacggtctttgacacccgaggtgtccagcgaaccgcgcacggtgtggtaacgcacgcccggaaggtcctttacacgaccgccacggatcagcactacgctgtgc

SEQ ID NO: 3661 - DNA, 281 bp, Pseudomonas aeruginosa; identical to SEQ ID NO: 3651

SEQ ID NO: 3662 - DNA, 281 bp, Pseudomonas aeruginosa; identical to SEQ ID NO: 3651

SEQ ID NO: 3663 - DNA, 159 bp, Pseudomonas aeruginosa
gatccgcctcgccctgggcgcgcgaaatcacctcgtcgcggtaaccgttggcttcttcgatgatgcgctgggcctggccacgtgcctccggcaccacgccgttggcataggcttcggcctggttcttctcgcgctgctcgtcctcgcgggcccggatca

SEQ ID NO: 3664 - DNA, 87 bp, Pseudomonas aeruginosa
tgaactccagctcgcggtacagggcgatcagcgcttcgcgctgcggctcgccgggatacagcttgtcgatctccacgtccagttcga

SEQ ID NO: 3665 - DNA, 162 bp, Pseudomonas aeruginosa; identical to SEQ ID NO: 3658

SEQ ID NO: 3666 - DNA, 303 bp, Pseudomonas aeruginosa
gcaggctcgcgccgagccacaactggtacagcgcgctggccatgtgccgggcatcgcagggcgcgagggagccgtcgtcgcggccctgcccgaggcagccgaccaggcgttcgatgatcccgtcggagccgtcgcgcagggtgatgcgcatgctttccgaaaggtccgcgacctcggcgctgagcttgaccaccaggcagcgctgctcgtcgcagggcgggcaggcgttgtccagccacttctgccagtagctcatcagtcgttcgcgggcattcagccctggcgcggagaagcgttggtcca

SEQ ID NO: 3667 - DNA, 281 bp, Pseudomonas aeruginosa; identical to SEQ ID NO: 3651

SEQ ID NO: 3668 - DNA, 88 bp, Pseudomonas aeruginosa
cggccaggccgtcgacccgcgtggcgcgtaacgccgccgctaccgcgcgctcatccgccggcgaccactggcgcaggaacgactggtg

SEQ ID NO: 3669 - DNA, 131 bp, Pseudomonas aeruginosa; identical to SEQ ID NO: 3650

SEQ ID NO: 3670 - DNA, 116 bp, Pseudomonas aeruginosa
tcggaagaggcggaagtcaccatcaccaggccgaggccgagcagcgccaggcaacccgccagcagcgggaagtccaggtcgatgccgtgccggctcaacagcggcgacgggaaggg

SEQ ID NO: 3671 - DNA, 66 bp, Pseudomonas aeruginosa
cgcaggtcggcttgccccagacgccgacggcggcagggaagggcggtttggaacgcgggttggcgc

SEQ ID NO: 3672 - DNA, 281 bp, Pseudomonas aeruginosa; identical to SEQ ID NO: 3651

SEQ ID NO: 3673 - DNA, 230 bp, Pseudomonas aeruginosa; identical to SEQ ID NO: 3655

SEQ ID NO: 3674 - DNA, 185 bp, Pseudomonas aeruginosa
gctggaaataccactggccctgctcctgggaggacggtttctccaaggctacgatccgcgcgccgcgcgggttcaggtgttccatgaagcgcttgatggtgccgcccttgccggcggcgtcgcggccttcgaacaggaccaccacgcgctggccggtctccttcacccagctctgcaccttgagc

SEQ ID NO: 3675 - DNA, 107 bp, Pseudomonas aeruginosa
ccgagccggcggctccactcgcgccagaagccgcggttctgctcctcgtcgacgtggcggcgggttgccggtcccatgccgcgggaaaaatcgctgtagccgagggc

SEQ ID NO: 3676 - DNA, 183 bp, Pseudomonas aeruginosa
ggtcggcttcggcttcgatgttgtcggtgtattcggcgatgaagtgcggcatggtggcgtcctcagaggcggctggcgcaactggcgccggccgggttgccggcctgggcggcggggatcgccgagccgtcctgggcggtgaccgggaataccgcgttgatctgcccggtgccggaggagccg

SEQ ID NO: 3677 - DNA, 249 bp, Pseudomonas aeruginosa; identical to SEQ ID NO: 3660

SEQ ID NO: 3678 - DNA, 148 bp, Pseudomonas aeruginosa
agtcggaggacataccagcacacacatgagggggaagactaaaggaggatgaacggcaggcaacctgccagatctggtagggcagcagccgaccggcagcgccctgcgcattcagatgagacccagcgccgcggcgtaggcggcagcc

SEQ ID NO: 3679 - DNA, 279 bp, Pseudomonas aeruginosa
gccatgaattaatcctctaccttaataatcagcgcagacgcagggagcgttctacgcgcgcaacgtcagacttgttcagcatcgaggtgccgcgcagttgacgcttacgcttggtggtcatcttggtcaggatgtggctcttgaaggcgtgcttgtgcttgaggccaccagcagtcttcttgaagcgcttggccgcgccacttttggtcttcatctttggcatgttcggatactccgcattgagtgattacgcataaccgcaaggcctgccagtgccct

SEQ ID NO: 3680 - DNA, 150 bp, Pseudomonas aeruginosa
ggccaaatcgttctatcattatatatggcaccccgaaaaacagcgccatctatcctcgctacatcaatattaacatctcgcaaattggaatttatgaaattagaaccgcctatatcagcattttttagactagccatggaaagatctgcc

SEQ ID NO: 3681 - DNA, 249 bp, Pseudomonas aeruginosa; identical to SEQ ID NO: 3660

SEQ ID NO: 3682 - DNA, 137 bp, Pseudomonas aeruginosa
tgccatgatccggaaatgaaaaaccccggccggagccggggttttcgcgaggcgggccgggcagatcgtggctgcccggctggcccctgttccttagtggaactggttcatggtgttgtctttgccgctggccttca

SEQ ID NO: 3683 - DNA, 232 bp, Pseudomonas aeruginosa
tcgccgctagccaccatgcagcgcccggctcggctgttgcaccggcatcttgccggtgcgtcggcgctgcctagaatcggccccattcgcacctacccccgcttcgcctacaggagttaccgccatgatgaatgccatgcagatgccgatgaacatgaatgccgccatgccgatgatgcccatgatgggcatgccgatgatgatggcgaccatgcagtgcgaaacgatggac

SEQ ID NO: 3684 - DNA, 198 bp, Pseudomonas aeruginosa
gcgcttcgcccaccttcttcccgcggatctggtcggcgaccaagcgggctttctgggcggagatacgagcgcccgacagcttagcggctacttccatcttccttaccccttaacgcttggctttcttgtccgcagcatgcccgcggtaggtgcgggtagcggcgaactcgcccagtttgtggccgaccatgtcctcgt

SEQ ID NO: 3685 - DNA, 194 bp, Pseudomonas aeruginosa
acaaggctagctgccacaacaaatccatactctgccgctgggcaatatagattgtatagctgagcggactcaccacgaaacgcatataaaacaacggaaccatcaatacagcataacgccccgactcagcccacgcttcgccaaagactaacccaaaggcccactcgccaatgaaccaaaatataataaaagga

SEQ ID NO: 3686 - DNA, 132 bp, Pseudomonas aeruginosa
cattcagaataaagtcgaccattgtgtatctccaaaaataacaatgcgcccgaacgcttgcgaccagcgttcgggcgatttcaaaggccccgccggagcggggcgttttcgttcaggcgcgttcgccgaggc

SEQ ID NO: 3687 - DNA, 149 bp, Pseudomonas aeruginosa
tgcccttggcggaaacgcgcagacgtacgaagcgcttctcggactcgacccagaaacggtggtgctgcaggttcggcaggaaacggcggcgggttttgttgtgtgcgtgggaaatgttattcccggtaaccggacccttaccggttact

SEQ ID NO: 3688 - DNA, 279 bp, Pseudomonas aeruginosa; identical to SEQ ID NO: 3679

SEQ ID NO: 3689 - DNA, 227 bp, Pseudomonas aeruginosa
ggccggagtccttgacggtctggacgatgtcgtcctgggccatctgggtcagcgccttgcgcgccgcggcatagccgtccttgctctgatattcctcgagccagacgggctgggcgtcttcgcgcaggcgccaggtcagcggatgggtttccgccgaacgcgccatgcggttggccggaccaatggaggtaagggtcatacgtaggcctccagcagtttggcgacac

SEQ ID NO: 3690 - DNA, 201 bp, Pseudomonas aeruginosa
cagatcttgccgccacgcttcacgtgacgggtcagcgcacgacgcgcggactcgatctgacgagcagtaaggcggccacaggctagtggccttcagtgcgtactcaccgaagctgaccttactaccacgatgagccagaccacggttgtggccggtcatttgtttgcggaacttcgtacgcttgggttgcagcatttgcgt

SEQ ID NO: 3691 - DNA, 122 bp, Pseudomonas aeruginosa
ggttggagccggccaggtcggcggaaccgccgagcagctccggcagcagcagggccgaaggcagttcagcgcagttctggcctggccttgcaggcctggcgatggtctcacccttgttggca

SEQ ID NO: 3692 - DNA, 392 bp, Pseudomonas aeruginosa
ccctggccgatcagcttggccttgatggtgaccggcttggtcacgccgttcagggtcaggttgccggtgatgtcggcgctgtcgccgttggccttcacttcggtggattcgaaggtagcggtcgggttcttgctgacgttgaggaaatcaccgctgcgcaggtgcttgtcacgctcggcatggttggtgtccacgctgttggtgttgatggtcaccttgaccttgtcggccgacgggttcttctcgtcgaaggtgaagctgccgtcgaagtcgttgaagcggccgtacagccagctatagcccaggtgcttgatgcggaactcgatgaaggcgtgctggccttccttgtcgatcttgtagtccgcggccattgcctggccggcggtgaacag

SEQ ID NO: 3693 - DNA, 152 bp, Pseudomonas aeruginosa
tctcgaaaaagccgatcggcccactacctacttccaaaaccttaccttcaaaaccttcgtagcagataatgcggaggagccgtacagtgaaccccatcttcccaagaaaccacattgcatccttatgccgggcctcttgtagttcctcgaca

SEQ ID NO: 3694 - DNA, 203 bp, Pseudomonas aeruginosa
caccaggttcccggcggcgctggggttggtggcctggaacagggtggtgaaatgctcgtcggccgtcggcgcgacgcaatcggtgagttgcagggtgaaggcggtttcgccggcgctgcggcccactgcgccatcgagggcgctcaccggtacgctgtcgaggatcaccgtggggtcggtgaagccgttgaccgcgacctggc

SEQ ID NO: 3695 - DNA, 249 bp, Pseudomonas aeruginosa; identical to SEQ ID NO: 3660

SEQ ID NO: 3696 - DNA, 124 bp, Pseudomonas aeruginosa
tcgctggccttgtcctccctgccgccaagcgttcggatcggacaggccaacggcgggccgccgctggtgacgatagcctgccgcagagcaggaaatcggccgcgcaggatcggcagggtcaggc

SEQ ID NO: 3697 - DNA, 131 bp, Pseudomonas aeruginosa
cccgataccatgcatcagcctgaggatctagagatggcaagtggtctttttcgttaacgcatataaaaggtcgtagttcagccgccatgacaggatttcccgacaacaaaaaaatcaagagaaaaaaacat

SEQ ID NO: 3698 - DNA, 144 bp, Pseudomonas aeruginosa
agtcggaggacataccagcacacacatgagggggaagactaaaggaggatgaacggcaggcaacctgccagatctggtagggcgcgccgaccggcgcgccctgcgcttcagatgagacccagcgccgcggcgtaggcggcagcc

SEQ ID NO: 3699 - DNA, 192 bp, Pseudomonas aeruginosa
cgcgagagatggcaaccccttcgtaccaggcgccgatgatcacggcgaacaccgggaaaatgatgaagacaaacgacagcacaacgggactcaaacgcttgagcaggaagaagtacacgatgaatcccccgactgatgccaccagaccgagatagatcagggcagcccaagatcggcttgtgacggcagaca

SEQ ID NO: 3700 - DNA, 92 bp, Pseudomonas aeruginosa
tgggtgatgcgcaccgccgagtcggtcttgttgacgtgctggccgccggcaccggaggaacggtaggtgtccacccgcaggtcggccgggtt

SEQ ID NO: 3701 - DNA, 86 bp, Pseudomonas aeruginosa
  misc_feature (65)..(65): n=g, a, t or c
tcggcgcgcaccatcaggccgcgcttgccgcttccccggccatcctggccccgctcgccgtgcancgattcgccgatctccccgag

SEQ ID NO: 3702 - DNA, 147 bp, Pseudomonas aeruginosa
tcgatggacggccggtagacgaaagaacgcggttcggcggtgtacaccagcgaaccgttgcgcagcaggcggatgtgattgttggtccccgccagcaggatctgccccggtatcggcggctcgccatcgcgcgccaggcgcaccggc

SEQ ID NO: 3703 - DNA, 88 bp, Pseudomonas aeruginosa
gaacaccatgaaggtgccgcgcaggctgtcgacgtggtagaggaaataggtcagccaggcgatcgccaccagcacctgcggctcggtc

SEQ ID NO: 3704 - DNA, 122 bp, Pseudomonas aeruginosa
cgccttcgaagatgaccacgtcgtcgcgcagcacgcggatcggacggttgcggtgcaccatgccctcggtgaccatgcagccggcgatcgcgccgaacttcggcgagcggaacacgtcgcgc

SEQ ID NO: 3705 - DNA, 248 bp, Pseudomonas aeruginosa
gcattgataagccctcaaacggtcttcaggttagcccgggaccataacagtcaagttacgcccgaccttactcttatcgactcagataaatataaaaacgctattacttcggacgcttggcgccgtacttcgaacgaccctgcttacggtctttgacacccgaggtgtccagcgaaccgcgcacggtgtggtaacgcacgcccggaaggtcctttacacgaccgccacggatcagcactacgctgtgc

SEQ ID NO: 3706 - DNA, 256 bp, Pseudomonas aeruginosa
ggttacgcaggcggctggcgctggcagtcacagcaggttgccttctgcagggcgacctgggcattccaacgctcttccgcagaggagttcaggattagcagatgatcgctttcagctcggcacgcttcttggcgtacttggctaccgtcagctgacgcttcagctcgcggttcttcatgctctctttagccatgttcctactccaatcagttacggaacgggaatttgaaagcacgcagcagggcgcgaccttcgt

SEQ ID NO: 3707 - DNA, 129 bp, Pseudomonas aeruginosa
gccaggccatttccagccagtccccggcacctacgcagcaggccttcgacgagatagcaggccggcgcaaccgtaacagcagcagcctgccagtagttttcctccaggcaggcgtcgcgcgcgaccggc

SEQ ID NO: 3708 - DNA, 65 bp, Pseudomonas aeruginosa
tacggctgctgaggcccgcccagcgtgcccattcggccgccggccgcggatcgccggggttggcc

SEQ ID NO: 3709 - DNA, 98 bp, Pseudomonas aeruginosa
cgcaggcgttccggggcaccgccttcatccaagttcggcacccagcgctgcaggtcgccctccagcagccgcacctgctgcacatggttgagcaggca

SEQ ID NO: 3710 - DNA, 200 bp, Pseudomonas aeruginosa
cagatcttgccgccacgcttcacgtgacgggtcagcgcacgacgcgcggactcgatctgacgagcagtaaggcggccacggctagtggccttcagtgcgtactcaccgaagctgaccttactaccacgatgagccagaccacggttgtggccggtcatttgtttgcggaacttcgtacgcttgggttgcagcatttgcgt

SEQ ID NO: 3711 - DNA, 136 bp, Pseudomonas aeruginosa
gactcgaccacgtagcgcgcctcgtcgtgctcgttgaacgcggcgtacaggctcagcgactcgccgtcctcgccgtcggtccacaactccttgcccaggcgtccctggttgttggcgatcagggcgttggcggcct

SEQ ID NO: 3712 - DNA, 95 bp, Pseudomonas aeruginosa
agaaaaaccgccaggcgacagcctggcgcctcacatctgttgcagatgtccgtagagccgggcgtagaggccgccttcggcgatcagttgctggt

SEQ ID NO: 3713 - DNA, 141 bp, Pseudomonas aeruginosa
acacccgggccccccagcggaagccgaaggcgctgcgcacccagtggtagacgccgccgttggcggggaaggcggtgcccagctcggaggtcatcatggccatcggcaggaacagcaggaccagcacgtagagccaccaga

SEQ ID NO: 3714 - DNA, 282 bp, Pseudomonas aeruginosa
gcctcgatctcgtcggcgtcgccgaacagcgtcgagttggggtagacctcgaccttgaccttgcccggcagacgctcctcggcaagcttcttgaacaacagcgcccccttgcccttgggcgtgtcgtcggagaccacatgggagaacttgatcacgaccgggccggcgtcctcggcatgggcgacggcggaaacggcgaacagtgcggcgagcgccacaccgacaaacggcttgaacatcgcatgtacctgcgcgatggcaaccgacggagccccgcgacgg

SEQ ID NO: 3715 - DNA, 74 bp, Pseudomonas aeruginosa
ggctcttgccgtccgcgagacccgtggctttctcggagatgtgcggaccaagcagcactttgaatacgcgttcc

SEQ ID NO: 3716 - DNA, 51 bp, Pseudomonas aeruginosa
tgccgtcgaggtcgtaggcgatccacacgccccagccggcacggcgcatca

SEQ ID NO: 3717 - DNA, 121 bp, Pseudomonas aeruginosa
cgcgaggcgtcgcggacgtttgtgccacctctgacggatagcgtcagttcgaaccgtagacgtcgaagctgaagtacttgtcctggatctgcttgtacttgccgttggcgcgcagcgcgtc

SEQ ID NO: 3718 - DNA, 138 bp, Pseudomonas aeruginosa
cgccgaaatgctcctgcaactgcgcggagacatcgttggtcaggctgatgcgcggatcgtacatggtccgcaacagaccctcgatcttcagcgtcgggttgagcaactggccgatgcgctggatgctgttcatcaggt

SEQ ID NO: 3719 - DNA, 131 bp, Pseudomonas aeruginosa
cggcatcgagcaggcgcgcgagatcggccagcggcagtggccggctcccgctcgatgccagcaggcgtgccagcaggcggtcgccgggggtttgcatggcaggcagtggcacaggcgcttggtcgtcgggg

SEQ ID NO: 3720 - DNA, 59 bp, Pseudomonas aeruginosa
cgcaacgaaaaaagccgcccgtgggcggctttttcatgcgcggcgtttattcgctgacc

SEQ ID NO: 3721 - DNA, 69 bp, Pseudomonas aeruginosa
tggttgcattgcgaggtgcgtcgcagggggatgaaggtggaaggggactgtgcggttattgcgggattc

SEQ ID NO: 3722 - DNA, 202 bp, Pseudomonas aeruginosa
cgccgatccccaccggcgggatgtaggagcgggcgtcgttcatccagccgcgcatcgccgggtccagcgacaggtactcgttcttcaccaggatctggccctcggccggttcgccgagcggggtttcgacgaaactgaaggtgtcgcggccgggcagcccgctgggacgctgggccaactggtattgccgattgatctggga

SEQ ID NO: 3723 - DNA, 139 bp, Pseudomonas aeruginosa
acatttacatgaaactgacgggatgcgtcattccactctggcttaaagttaactgaaatatggatttctacttcgtaattctccctaggcttgacgccaacattagctatatcacgattgaacaacttgacataggccc

SEQ ID NO: 3724 - DNA, 40 bp, Pseudomonas aeruginosa
tcccgccctgggtggtgaacgccttgtacaggcgcgatgg

SEQ ID NO: 3725 - DNA, 108 bp, Pseudomonas aeruginosa
cctggcgggccggcttgtccatttcccggagcaagccctgcatctgctgccaggtacgcgccgctcctcggaacaagatggcgtttcgattctcgtcctccactatgg

SEQ ID NO: 3726 - DNA, 168 bp, Pseudomonas aeruginosa
aacccagcccctcgaccgcccagcgtatcccgccgagtaccacttccagcgccccggaggcgcgcaacacgccaaccgcgcaaagcattgcgaccaggtacggcaacaggttcctggcgacgtcgaaaccttccttcgccccctccacgaagctctcgtagaccggca

SEQ ID NO: 3727 - DNA, 69 bp, Pseudomonas aeruginosa
cgaaaccgcgttcgcgctcggccgcagccagcgcgagcagcgcggcgtcccgattcgccgcctggctca

SEQ ID NO: 3728 - DNA, 58 bp, Pseudomonas aeruginosa
cttccatcgcctgctggatcgcccggcgacgccgctcctcggcctggcgggtgaagta

SEQ ID NO: 3729 - DNA, 99 bp, Pseudomonas aeruginosa
gtcggagtggggacgcgcaacgagaggtgggggctctggttttccatggggggttagacggctccgctactgaaaaggctctacggggggatgaagccc

SEQ ID NO: 3730 - DNA, 110 bp, Pseudomonas aeruginosa
tcccatccagagagtataagcatgcattgctaattgcaggggaagtcgaaaaccccatcggcaaagaatcaccaatagtaaccaacttcagaattctctcaacccaaaca

SEQ ID NO: 3731 - DNA, 43 bp, Pseudomonas aeruginosa
tgctcagggctgctgcgctccagttggcggaacagccgctgcc

SEQ ID NO: 3732 - DNA, 216 bp, Pseudomonas aeruginosa
tgtcggcgacgaagcgctcggagggatcgaccgcgacgtggaatttgcgcaagcccttggtgcccatcaggaacggatagttgaaggcgctgcggtcggtgaggttgacctcgatggtcttcatcgctccgcccaggcagacctgcaggtcgatcaccgggcgttcgctcaggcggtcctcatcctcgtcctcgccgctgcggttgtcggcgcggt

SEQ ID NO: 3733 - DNA, 131 bp, Pseudomonas aeruginosa; identical to SEQ ID NO: 3719

SEQ ID NO: 3734 - DNA, 202 bp, Pseudomonas aeruginosa
ccactcgcgggccagccgggcgttacgcgcggtcttttccagcggcacgttgccggcgacggtggtcagcgcctggatcttcagctccttcggcgaggccatggcgaacagcagggcgatcacatcgtcggcgcccggatcggtgtcgatgatcagcgtccgcggcgatggcggcgccaccgtttcggcagcggacagagga

SEQ ID NO: 3735 - DNA, 235 bp, Pseudomonas aeruginosa
cgccctcgctcttgtccttgaccagttcggacatgctgtggcgtaccgcatccacatatccggcgtcgtcgttgcggatgtggttgaacagccagcgcgagagcaagcccttgagttcgtcgccgacatcctcgccggcctggaagcgcacccggtattcggagacccggcggatgaacagctcgtggatcttcttgtgcgcccgggaaaactggtagccggcgtcctccatcag

SEQ ID NO: 3736 - DNA, 185 bp, Pseudomonas aeruginosa
cggacgatatcggctgattcgttgttgacgatcttctgcgcctgcttgtcccacagcagcggcaccgtgacccggccgctgtagtgcgggtcgtcgcgggtgtagcgctggtgcagaaaggccaggccgtcgaggcgatcgccggtggagccgtgggcggggtcgaaggtccagccgttctcgcg

SEQ ID NO: 3737 - DNA, 64 bp, Pseudomonas aeruginosa
cgctgacggtctgccagctctggccgtcctgcttgaccttgctcttctggctgatcagttcgga

SEQ ID NO: 3738 - DNA, 122 bp, Pseudomonas aeruginosa
cacttgcggcatgctttcttgcagcagttccaggctgctcttctcgaaggtctgcaggatcacccggccattgccgtgggccacgtcgacatgcccggcggcggcgcgctcgcggggttgca

SEQ ID NO: 3739 - DNA, 172 bp, Pseudomonas aeruginosa
tgtccagcttgcagcaggccggcaagggcgccgtcgaccttgagcacgccgacctggaacgccggcacctggaccagcaacactgcgtccaggcccgccagggcgcggtcgcgcaggttcggctggtgcaactgggcgaccagcgcggcggacaatcgatagtcctgggtca

SEQ ID NO: 3740 - DNA, 95 bp, Pseudomonas aeruginosa
ggccggcgaaaggcgcctgggcgcggcggatcagcaacagctccagtccgtgcccggggttcaggcgcaacgccacgatatccacgctggccaat

SEQ ID NO: 3741 - DNA, 179 bp, Pseudomonas aeruginosa
tcgttgaagttggccggcgtgccgcccttgctcgaacggctcttggtgccgctctgggtagcgttcgccggcagctcgtagggcaccgtctgctcggcgttgtagacccgcccggtgatgatcggccggtccgggtcgccttcgaggaagctgacgatcacttcctggccgatccgcgg

SEQ ID NO: 3742 - DNA, 100 bp, Pseudomonas aeruginosa
cccggcgcgatccagttcgatgaccacccgcgactcgtcggaaagcaccagcaggtgatcgctggccttgtcgtagtagaggctcgacagatcggtgagg

SEQ ID NO: 3743 - DNA, 196 bp, Pseudomonas aeruginosa
ggctgctgcgtcgccatgtcggcggaacaggccaccgccatcagttgcttgaacgccgacggcgtctggttgagcaccgtcacgccttcgcggcacagcagacggtagaagtcttccggcgaacggctcacccattgcggcacaatcaccaggcacccgccatagagcagcgcgccgaagatttcccagaccgaga

SEQ ID NO: 3744 - DNA, 145 bp, Pseudomonas aeruginosa
aaccagacttccgggctgcgctcggcgctcggctccagccaggcccggttgagatcctggccggcggcgttggtgcgcaggttgccgtggaacgcgccgtccgggttcatgttcggcaccaggtacaggtcggccttttccagca

SEQ ID NO: 3745 - DNA, 168 bp, Pseudomonas aeruginosa
gttcgaccaccagcatcaccggcgagcgcagcaactggcgcgggtcgagcttgacgaaggcttgcagcagcgccggccgccacaaggcggcgaggctggtggacgcgttgtggcgacgttcgagcgatttgtgcaaggcgttcttggacgcctgggtctgagcgttca

SEQ ID NO: 3746 - DNA, 94 bp, Pseudomonas aeruginosa
cctgcaccgtctcggccgaggcgcccgggtagctcacctgcacggcgatggccggcggggcgatggccgggtactggttgaccggcagactgag

SEQ ID NO: 3747 - DNA, 68 bp, Pseudomonas aeruginosa
cagttgctggcggatgcgcaatttgtcatcgatgaagcggcgcagcgtcgcttccatttccggagtca

SEQ ID NO: 3748 - DNA, 150 bp, Pseudomonas aeruginosa
tgaccacctcgccggtagcggccttcaccagcggcggcccggcgaggaagatggtggcctgttcgcgcaccatcacggtttcgtcggacatcgccggcacgtaggccccgccggcggtgcaggagcccatgaccacggcgatctgcggga

SEQ ID NO: 3749 - DNA, 110 bp, Pseudomonas aeruginosa
catcacgaggcttcccgttgcagcagggcggcgagcgcacggcggtcgtgcttgccggcgccgttcagcggcagggcctggtgcgacagcaccacgcgctgtggcgcgcg

SEQ ID NO: 3750 - DNA, 64 bp, Pseudomonas aeruginosa
cgacaggctgatcggcaggctgctcgccggcttgcggctttttccgccaccagccgaacagacc

SEQ ID NO: 3751 - DNA, 159 bp, Pseudomonas aeruginosa
tggcgttcttgaagccgagctgggtgggaatccgcaggcgcagcggatagcgcgttctcctccggcagcgcctgcccggacatctccagcgccagcagcgtctgcggatgcagcgcgctgggcatgtcgaggctggagtagtagcggtcggcgcacttg

SEQ ID NO: 3752 - DNA, 162 bp, Pseudomonas aeruginosa
tgcccttgttgaggatgaccgcgtcctggcggatcgggtcgtgcagctcggtgggaacgatccaggccgagccggttgcgactttaccatccttgtagatctgcgacagagcgacgaagcccagttcggcgttgccgctggaaacgaactggtaggcctggc

SEQ ID NO: 3753 - DNA, 238 bp, Pseudomonas aeruginosa
ggccgcgtcgacgatccacggccccaccggggtggtggcgtcgcggttcttcacccgcaggttgggccggtagtagttctccaggtagtcgcggatcgcgtagtcgttgcacaccgtgtagccggccaggtagccgagggcgtcctcgcggcggacgttgcgcgccggcttgccgatcaccgccaccagttcgcactcgtagtgcatgtagtcgacgttgtccggacgccagctgacc

SEQ ID NO: 3754 - DNA, 280 bp, Pseudomonas aeruginosa
ggagttccgaggtcacctggggttcatcatcgatgatcaagacgctgaaatgccgcgaggccggtttgtccatggtcatacgctccatttgcttattttgttttttaacaggggacgtgcattggaatgcagccataccgaatggtattagccataagcatatagtcgctaagtgaggttttccgcaagtttgctcagataattttattgataatcagatgtgccaaaaggccggcgcccatggcgaatataaaagggaatgacttgttttttgacggtg

SEQ ID NO: 3755 - DNA, 111 bp, Pseudomonas aeruginosa
ttcaccgcctcgatggagacgcgcaggttacgcacgtcgttcatcgcgtcgaagatgcggaacacgtcgatgccgttgaccgccgccttggccacgaaggcgcgcaccaca

SEQ ID NO: 3756 - DNA, 101 bp, Pseudomonas aeruginosa
gcagttgcatggccggcagcttcaggctccatttcttcagcagcacgctgtacaccgcataggccagggtggcgacgatcatcatcgcgtcgccgagattc

SEQ ID NO: 3757 - DNA, 280 bp, Pseudomonas aeruginosa; identical to SEQ ID NO: 3754

SEQ ID NO: 3758 - DNA, 109 bp, Pseudomonas aeruginosa
ccgaggctggtctggtcgccgaccacttcgacgaactcgcccatcacctgctcgacctgttcgcgatgcacgttgcgcatcgacgccatggccacgccgacccgctgca

SEQ ID NO: 3759 - DNA, 154 bp, Pseudomonas aeruginosa
gcccgtcgtataggcagacaggggagatgcgaggaacaggatggcgcgggccgcctcgatcggcttgcccaggcgtcccaggggaatctgcttgttccgcgccagctgcgcggtccattgcgcccagtccagctcgcgctcttcgcgggcttcg

SEQ ID NO: 3760 - DNA, 143 bp, Pseudomonas aeruginosa
ggggcaaggcgacccattccgccggcgcttcggcgtgcgcaggcatccagggcagcagccaggccagggcgagcaacaggaggacaggcgggaaaatacgatcagacaaggttcgatccatgaacggcaaagctctcatcccg

SEQ ID NO: 3761 - DNA, 89 bp, Pseudomonas aeruginosa
tgttgacatccggataactaatcagtaccgcacgatgcttgccatggaaaacgaataggcttcccgccgctactgccgacacacacgta

SEQ ID NO: 3762 - DNA, 131 bp, Pseudomonas aeruginosa; identical to SEQ ID NO: 3719

SEQ ID NO: 3763 - DNA, 158 bp, Pseudomonas aeruginosa
tgctggaagaccgccatcagcgcgggcatcaggtcgggattcacggggtagttcattggtttggccgagtaaacctaatgtaaatgtggttgatccagtcaactattttgcttattttagttgaccttatcaaccttgtttcaggttctgaatatggg

SEQ ID NO: 3764 - DNA, 72 bp, Pseudomonas aeruginosa
gcttgaccagcagcaggtccagctcgccgctgcgatagaggcgcagcaggtgatggctgagaccgctctcga

SEQ ID NO: 3765 - DNA, 113 bp, Pseudomonas aeruginosa
ggctcctggggatgaaattgccttccagcagggtggccagcgaggcgtggccgaagttatccacagcgagcgcctcgcggtgctcgaacggccgcgtggcgccgaccgcgtgc

SEQ ID NO: 3766 - DNA, 95 bp, Pseudomonas aeruginosa
ccccgaagcggtcggccagccaggcgaaacgctggctgaagccgtagtcgccgagcggcatcagggccttgccgccgtcgctcagggcctcggcc

SEQ ID NO: 3767 - DNA, 47 bp, Pseudomonas aeruginosa
ctactggaaacggcttactagctcaaacccgggtcgttcgtcggcgg

SEQ ID NO: 3768 - DNA, 105 bp, Pseudomonas aeruginosa
ccaccgcacgggagacataggcggtcgtcaggtccaggcgctgggcggcggcagtgaaactgccggtctccgcgacgctgacgaacgcgcgcatattgaacagga

SEQ ID NO: 3769 - DNA, 142 bp, Pseudomonas aeruginosa
gcgttgctcgaatgctgttcctcgtcgatacgcatctgctcgaggatggcacgggatttccgatcctcctggggaatctgcgccaggtgttcgtccagatgcttgcacacctggtcttcggtggcggcgacgaagcccaggc

SEQ ID NO: 3770 - DNA, 70 bp, Pseudomonas aeruginosa
ggctgcgcacgccggaggggcgccagccactcgcgggtttccgtggcgatgaaggtgaagaagttgatca

SEQ ID NO: 3771 - DNA, 181 bp, Pseudomonas aeruginosa
  misc_feature (166)..(166): n=g, a, t or c
cagcttgcggctcatggcggaccgaagggatgacggagctgtcgaccttccgggaaacgccggcgcaatggcaaggggaagcgccgcctcgccggcccacgcagcaggacggataaccgccgttggccctcggggtatcggcggataacgcctgcgacgccattcnccctaccgctagcgc

SEQ ID NO: 3772 - DNA, 129 bp, Pseudomonas aeruginosa
tgaaataggcctgttcctgggcggccttggtcgcgccgccgaaggagatcacagtcaggctctggctctgcgcctgggccgccgcggcgaacgccaggccgaacagggacaaccgggaaaacacgtgtg

SEQ ID NO: 3773 - DNA, 194 bp, Pseudomonas aeruginosa
ggaagttccggacgggaagagggaagggaaggacagggcagcctcgccgggcggcgaggctgccggggaatcactgggcgtcgaaggcctggccgttgacgccggcgctgtccggccccatgaggtacaggtagaccggcatgatctcctcgccggtggggttgttcagcgggttttccccagggcaggcgagg

SEQ ID NO: 3774 - DNA, 158 bp, Pseudomonas aeruginosa; identical to SEQ ID NO: 3763

SEQ ID NO: 3775 - DNA, 46 bp, Pseudomonas aeruginosa
ccatcttcaccggcgcatcgtgcttcaggcgcgagccgttcggttg

SEQ ID NO: 3776 - DNA, 71 bp, Pseudomonas aeruginosa
tggttgcattgcgaggtgcgtcgcagggcggatgaaggtggaagggcgactgtgcggttattgcgggattc

SEQ ID NO: 3777 - DNA, 65 bp, Pseudomonas aeruginosa
ccctgctggcgggcgaactggcgcaccgccggggtcgcgcgcggtgccaggtgctcgcgggtgga

SEQ ID NO: 3778 - DNA, 148 bp, Pseudomonas aeruginosa
tgagtcgaagtaaagaattttattcttccaagcttgaactgctagaacaggaggtgcagctgatgtgaccgcatatggaaaatccagtgagaaccactgacttgtctcgacttcaatatttctttccaacagaagagaaaggttatga

SEQ ID NO: 3779 - DNA, 73 bp, Pseudomonas aeruginosa
tggccatcaggcgaccaagcatccacaggagaagacgaaatttcatgcacgcgcctcgatatccggggagatg

SEQ ID NO: 3780 - DNA, 58 bp, Pseudomonas aeruginosa; identical to SEQ ID NO: 3728

SEQ ID NO: 3781 - DNA, 129 bp, Pseudomonas aeruginosa; identical to SEQ ID NO: 3772

SEQ ID NO: 3782 - DNA, 104 bp, Pseudomonas aeruginosa
ccggcgccggggttatcgcggtgacgcggcgacaggtactgctctatcagcagcgccagcggtcgttccgcctccgccaggggcgcggtgatttcgtcgagttg

SEQ ID NO: 3783 - DNA, 171 bp, Pseudomonas aeruginosa
ccgagccggcggtgaggtggatgcccagggcgctgtcggcgaagctgttgccttcgatgcggttgaacagcgagttgtagatgaacagcgccttgccctcggcgccggaaatcatcgcgtcgccggtgctgccgctgcgcacgccctcgacgcggttgccggccagggtcg

SEQ ID NO: 3784 - DNA, 132 bp, Pseudomonas aeruginosa
ccagcgcgccgatggtggtgcccggcggcagcttgatctcgttgatcgagcgaccgatcaccttgctcgacttggcgtcgccatgggctaccacttcgatcgcttcggctgcgccgcggcgcagcgagtgta

SEQ ID NO: 3785 - DNA, 92 bp, Pseudomonas aeruginosa
cggcgaccaggcgctccggtgtctgcgcgagcgccgcctgcaccgcctggccgagacgttccggcgcggggaagccgagcgccgcggtatcc

SEQ ID NO: 3786 - DNA, 132 bp, Pseudomonas aeruginosa
cctcggcgtgaaagcgcagcggcgcgcggaacagctcgacatagggtgccagcggctcgcggggcgcgccgggcagttccaccgccagcgggtccagcgaccggccggtgatccagcggaccatgtccacca

SEQ ID NO: 3787 - DNA, 150 bp, Pseudomonas aeruginosa
cccgggcgattccctcgaagcgtgcaaccagacggtcctgctggcgaatctgcgcgtcgaggaaaccgcgctcgtcgaagccgccgggagcggcggcctgccgttcggtctggcgcggcgagggcagcgccaaggccttttccccggcca

SEQ ID NO: 3788 - DNA, 145 bp, Pseudomonas aeruginosa
ccgatgttgagcagttcgatttctccgccgcgaatccgcagcaggctcaggcaggccgccggcatgtcttcgaggtcgtgccagtcgcggccgctctgggcgcggaagtcgccctggatatcgttgagcaggcgccgcagcaggg

SEQ ID NO: 3789 - DNA, 105 bp, Pseudomonas aeruginosa
cgccctcgatgctctgctccggcaccactacctgggtcaacaggaagccgtcctggcggtacttggcggtgaggcggttggccaggtcgaccagttcggccaggg

SEQ ID NO: 3790 - DNA, 138 bp, Pseudomonas aeruginosa
tccagcggctaccgagcttgcgcatggcgaagcggttggaagtgatcgccaacaggaacaggcagacgaatccaagcattcccacgatgatgtagggacgcttgctcaactcgatgcccaactgcccccagtccaacc

SEQ ID NO: 3791 - DNA, 104 bp, Pseudomonas aeruginosa; identical to SEQ ID NO: 3782

SEQ ID NO: 3792 - DNA, 202 bp, Pseudomonas aeruginosa
cccttggcttcggaatgacgttcggtatcgcgaaaatgcctggcgaaacgcggccacatggccggaaggtcctctggaaccgcacggtacatgcccagttcggaccagtcgcccggcgcgtggaaatcgctgccggcggtgaccatcaggccgaactcgcgggccaggatcgacagggtaccgacctgttcggccggctgca

SEQ ID NO: 3793 - DNA, 83 bp, Pseudomonas aeruginosa
ccagcggcccgcccaccccgaagcccaggcctagcaggccgtaggccacgcccaggcgttggcggaaccagagtccgaggata

SEQ ID NO: 3794 - DNA, 105 bp, Pseudomonas aeruginosa
cccttgctgtcgccgccgctcttgccgagcacgttgccgagcccgccgagaccggccagggcgttgttgccggccagcttgtcgaggccggggatggtcttaacc

SEQ ID NO: 3795 - DNA, 70 bp, Pseudomonas aeruginosa
tgtagcgcacctcgatcccctgctcggtcaggtccggcacctcggcatgcagcttctggcagtacgggca

SEQ ID NO: 3796 - DNA, 132 bp, Pseudomonas aeruginosa
agctgagcaactggtcgcgcgtatcgatcaggtccaccagcacgcccaggccgctgaagatcgacgcgtattcgcagccgatcaccccggctccgtagatgatcagccggcgcggggtgtggctcagggaca

SEQ ID NO: 3797 - DNA, 183 bp, Pseudomonas aeruginosa
cgacgtcttccgcttcgccgccgtgggtggcgtagtagtagccggcgatgccctgcatttcggggaactcgccgaccatctcggtcgccaggtcacacttggacaggatgccggcgcgcgaggcgttctgcgcattgccgcctatacgttcggcgatgtaggcggccaggccggagacgcgct

SEQ ID NO: 3798 - DNA, 60 bp, Pseudomonas aeruginosa
cgtgcggcgcaggccgaggcgcgcagctcggccaggtcgtgcgccgggtcgccggcacac

SEQ ID NO: 3799 - DNA, 93 bp, Pseudomonas aeruginosa
cctcggcgccgtccggggtcttggtcttgacccggccgtcctgcggcttgcgtttctccgccacgttcatccgtcccagcgacttcaggcggc

SEQ ID NO: 3800 - DNA, 129 bp, Pseudomonas aeruginosa
gctcttccgcggcatcggccagcgactgcgaaacggaaacgtagtggacgcgctcgccctgaaagctgccgccagcctgctgcgcgggggcgttggccgcttcccgcggcgcgaggggcgcggcggagg

SEQ ID NO: 3801 - DNA, 71 bp, Pseudomonas aeruginosa
agcacgtacggcagcatcgccgacaggcgcgcgttggcgttgcgcctcgttggtgttgtagagcctggcct

SEQ ID NO: 3802 - DNA, 130 bp, Pseudomonas aeruginosa
ccccaggcgaacggatcgtcgtccgccagcagcagggtggcttccgcgctgacgtgggcgcggccgcggatggtcggcacgatgggcccgccgggctggccgtcgagccattcgtaacgcccctcgaact

SEQ ID NO: 3803 - DNA, 71 bp, Pseudomonas aeruginosa
cgcactgcgcctggtagccggcggcggtcatggtggagacggtggccgcgccttcgtcgggaccgaacaca

SEQ ID NO: 3804 - DNA, 129 bp, Pseudomonas aeruginosa
tccaccgggaggccgctgtggaagcggaattcgttgtccggactgctgatcagctcggcctccttggcccgcaccacctcgatcgtccgctccacgtcggcctcgtcgccgtactggtaggccagcttc

SEQ ID NO: 3805 - DNA, 60 bp, Pseudomonas aeruginosa
gtggccttggccgatcagcttcttgacggtttccggggtggcggaaacccgcgtctcacc

SEQ ID NO: 3806 - DNA, 152 bp, Pseudomonas aeruginosa
ccctaggcttgacgccaacattagctatatcacgattgaacaacttgacataggccctgatgactttcaaaatatcacctacgttctcggcgcatagcaacgccaatcctatcacgccataatcagatatatggtaataagttccaagattc

SEQ ID NO: 3807 - DNA, 94 bp, Pseudomonas aeruginosa
ggcagcgccgccgccccggtaagggccaggcccgccatgaatccgcgtcgagaaaccgtcatcgtcctacctgtatcaaccgtgaagctcgctt

SEQ ID NO: 3808 - DNA, 115 bp, Pseudomonas aeruginosa
tccagacccttcaccgccgtggagatcgacggctgggcgatgtacagcttgcgcgaggcctcggccacgctgccgcattccacggtggtcacgaaatacttgagttgccgcaagg

SEQ ID NO: 3809 - DNA, 103 bp, Pseudomonas aeruginosa
caggcctccgcgcggctggcgttctgcagcagcaccagccccgccagttgggtcggttcgtccagtccgccggccggcagcagggatggcgcgcagaccgcca

SEQ ID NO: 3810 - DNA, 93 bp, Pseudomonas aeruginosa
ctccagctcgacgaacaggcgctcggcgtcctgcgcctcgcagtcctcgccgtagcgcttcttcaggccgtgttcgctgagggtcaggtgcag

SEQ ID NO: 3811 - DNA, 159 bp, Pseudomonas aeruginosa
tcagcccctgggccgcgagcagacgcgccccttccagttcgcgctggaaatgccgtgcggccttgccgcccaccagcagcttggccagcaccttgcgcccacgccattcgccggcaccgacgtagcgctgcccgggcagcacccgcagcagactgtcca

SEQ ID NO: 3812 - DNA, 484 bp, Salmonella typhimurium
aatttaaaacgtttggccttacttaacggagaaccattaagccttaggacgcttcacgccgtacttagaacgagcttgcttacggtctttaacgccggagcagtcaagcgcgccacgaacggtgtggtaacgaacacccgggaggtctttaacacgaccgccacggatcaggatcacggagtgctcctgcaggttgtgaccttcaccaccgatgtaggaagtcacttcaaaaccgttagtcagacgaacacggcaaactttacgcagtgcggagttcggttttttaggagtggtagtatatacacgagtacatacgccacgtttttgcgggcatgcttccagcgcaggcacgttgcttttcgcaactttgcgagcacgtggtttgcgtaccagctggttaactgttgccattaaatagctcctggttttagcttttgcttcgtaaacacgtaataaaacgccctcacacaatatgaggacgccg

SEQ ID NO: 3813 - DNA, 432 bp, Salmonella typhimurium
aattacgcctgtttatggcaaaagcccaggacagtggaagccacttcacggaaatgaaatcagaaggcgtcggcgtcgacgcaggaggagtaaaaagagaagaatgtgaaacaggtcgcttgattacatgaaaacgcccgtaaaaaactgctgcttttgcgggcatatgcacaaagctaacacgattcagttactttacactgtgtacaggtcatgattttgcttactggcaacgcaagcaaacgaaaaggtaccctcccgtaggggggagggatttacctcaggaaagtaaagttccccagttttcaacccagggattggactggctctccggctccggatgttcgctggcgtcaatgaataacatctcccccacccgctgcgcgctttgctcttgcaacagggcatcaaactgtttgccgccattacaga

SEQ ID NO: 3814 - DNA, 228 bp, Salmonella typhimurium
aattcatattccagctcggtgatgccgagcgtcgccagctctggcggcaacaggcgcagaatatcatcgccttgctgaataccgtcaacctgctccggcaccgttgcgggttcgcgtaccagtgtacgaaaggtttccatcggcgcgtcttttttcggtaccgatttggcttcccgcgaacgtcccagttgttccgccagttgcattagctccggctgggcggcgaga

SEQ ID NO: 3815 - DNA, 432 bp, Salmonella typhimurium; identical to SEQ ID NO: 3813

SEQ ID NO: 3816 - DNA, 348 bp, Salmonella typhimurium
aatttggaacctttatcgaaaatgtgaccataacaggatgccccaggtcatcagggcaacgaaaatagacagtagcaccgcagccgatcccatatctttcgcacggccggaaagctcatggtattcagaaccgatgcggtccacgaccgcttcaatagcgctgttgaggatttcaacaatcatgataagtaaaacggaacctatcaataacacacgggtaatcgcatccacatccagccagcaggcgatgatgacgcccagcaataccgcgaggctttcctggcgaaacgccgcttcgtgagtccatgcggcgcgaaatcctttccaggaatatcctgccgctttgat

SEQ ID NO: 3817 - DNA, 305 bp, Salmonella typhimurium
gtagttaaataccgcctttttgaaaaaacgcatttcatcggggcgatgacgattcataaaccattcgtcgtcgcgataaacgttagtcacgatgtccgggttcgcattcaccaccccgaacaggtcgctggcaatgtcgctgtccagattatgcgtaaaaaccaaattcccgtcggtatcgtgcactcgcgcgccgttggaggtgatcatgtaagacttgatttcaagattatcgcggatttgccctacatcgacatgatgacgaccagtggcaaagacaaaatggatgccgcgtgcggtcaaca

SEQ ID NO: 3818 - DNA, 388 bp, Salmonella typhimurium
ctcctgcgccgaatcacgcagataatgaccggaggtgtcgtcttcttcgccgcgtcggctggaaacagtaagaatagcgatgcgggtcgggataaattcagcgctgacctgactcatctgaaatctccttattaaggattaaccgccaatgtaagataaattttgcgtaataccagtattgctctggtgaagaaagtgggtctgctttttctcccgcaacgcgtcggaaatacgttcctcaagcgcgtattgctgcgcgtcatcctgtaacaggtcgcgtaaactcacgccgccgtcgccaaacagacataaatgcagcttaccgacggacgaaacacgcaggcggttacaggtggcgcagaaatctttttcatacggcataatgagg

SEQ ID NO: 3819 - DNA, 66 bp, Salmonella typhimurium
agcgctgacctgactcatctgaaatctccttattaaggattaaccgccaatgtaagataaattccc

SEQ ID NO: 3820 - DNA, 147 bp, Salmonella typhimurium
acatttgttgagggggcttatatgatatgtttttattgtattgtcgcatttttcttaagctgaatccggattttggggaggtggctaaatgtaaatgacgtggtttaagataaatctatttttaataagctatctgttcaaattccc

SEQ ID NO: 3821 - DNA, 195 bp, Salmonella typhimurium
aattcagatcactcagaggggagaaggggggcaatatcatcggcggttacggctgtgccgccatccgggttcatatcaatacctttaccaatcagttgcatgacatcgctggtatgtaacatcagttgcttgccacaaaactcaatggagccgtccttatgtaaaacaagcgccgcattgccgcagcgaagcgtg

SEQ ID NO: 3822 - DNA, 195 bp, Salmonella typhimurium
aattcagatcactcagaggtgagaaggggggcaatatcatcggcggttacggctgtgccgccatccgggttcatatcaatacctttaccaatcagttgcatgacatcgctggtatgtaacatcagttgcttgccacaaaactcaatggagccgtccttatgtaaaacaagcgccgcattgccgcagcgaagcgtg

SEQ ID NO: 3823 - DNA, 154 bp, Salmonella typhimurium
gaaaatataggagtaacagtaaatatgatttttttaatcataatagctataatccagaatagttaactttatagaaaaagaaatgttataaaaaaaagaaatgcgtgccgaagcaacgaaaaataatgatttatctagtgtctagacaattccc

SEQ ID NO: 3824 - DNA, 195 bp, Salmonella typhimurium; identical to SEQ ID NO: 3822

SEQ ID NO: 3825 - DNA, 156 bp, Salmonella typhimurium
aatttctgaatacttggccaggaggagatgatcaatgagacgataataccgcccaacatcaatagcacaatcagcgcagccagttttaccagcgcgctgaaaatcatgtcgccttttttacccggcgggttaaaagcaggcttggttgcagccata

SEQ ID NO: 3826 - DNA, 144 bp, Salmonella typhimurium
aattacatttgttgagggggcttatatgatatgtttttattgtattgtcgcatttttcttaagctgaatccggattttggggaggtggctaaatgtaaatgacgtggtttaagataaatctatttttaataagctatctgttca

SEQ ID NO: 3827 - DNA, 151 bp, Salmonella typhimurium
aattttattatcggcatcgacaaactcatagggcgcataggtggcggaggtgccaaaatgtaatgttctggcggaaacggaagcggcgtgaacggagaggctggctaacagcatgacaataagtttttttttcatcttgatccctgatatc

SEQ ID NO: 3828 - DNA, 174 bp, Salmonella typhimurium
attaacagtaccgcaggaaacgttgaaaaactgaggattctgtcaatgtagaacgaccccataaacaccaatatcgccagtacgatattcagtgcgatcaggaaatcaaccagataggtaggtaatggaatgacgaacatagaaatgatcatcaccattagtaccagaatcagt

SEQ ID NO: 3829 - DNA, 151 bp, Salmonella typhimurium
aattgaaaatataggagtaacagtaaatatgatttttttaatcataatagctataatccagaatagttaactttatagaaaaagaaatgttataaaaaaaagaaatgcgtgccgaagcaacgaaaaataatgatttatctagtgtctagac

SEQ ID NO: 3830 - DNA, 144 bp, Salmonella typhimurium; identical to SEQ ID NO: 3826

SEQ ID NO: 3831 - DNA, 144 bp, Salmonella typhimurium; identical to SEQ ID NO: 3826

SEQ ID NO: 3832 - DNA, 144 bp, Salmonella typhimurium; identical to SEQ ID NO: 3826

SEQ ID NO: 3833 - DNA, 144 bp, Salmonella typhimurium; identical to SEQ ID NO: 3826

SEQ ID NO: 3834 - DNA, 144 bp, Salmonella typhimurium; identical to SEQ ID NO: 3826

SEQ ID NO: 3835 - DNA, 144 bp, Salmonella typhimurium; identical to SEQ ID NO: 3826

SEQ ID NO: 3836 - DNA, 230 bp, Salmonella typhimurium
aattcgaaggtaatacccttttcgagcagcagaacagagattttgcgcacaaaagggctggtgtagctaccgatgagtttcatgccgtgtcctttttgccaaccagtaaaaatcatagtatggctcaaataagacgaaaagagacacaaaaggaggttgctgaatgacataacgtgagaggactcgcgacaaaatgtttgtcggatcgtattgacgttacccgggcttaa

SEQ ID NO: 3837 - DNA, 64 bp, Salmonella typhimurium
aattcagcgctgacctgactcatctgaaatctccttattaaggattaaccgccaatgtaagata

SEQ ID NO: 3838 - DNA, 156 bp, Salmonella typhimurium; identical to SEQ ID NO: 3825

SEQ ID NO: 3839 - DNA, 195 bp, Salmonella typhimurium; identical to SEQ ID NO: 3822

SEQ ID NO: 3840 - DNA, 195 bp, Salmonella typhimurium; identical to SEQ ID NO: 3822

SEQ ID NO: 3841 - DNA, 144 bp, Salmonella typhimurium; identical to SEQ ID NO: 3826

SEQ ID NO: 3842 - DNA, 196 bp, Salmonella typhimurium
ggggatcactcagaggtgagaaggggggcaatatcatcggcggttacggctgtgccgccatccgggttcatatcaatacctttaccaatcagttgcatgacatcgctggtatgtaacatcagttgcttgccacaaaactcaatggagccgtccttatgtaaaacaagcgccgcattgccgcagcgaagcgtgaatt

SEQ ID NO: 3843 - DNA, 360 bp, Salmonella typhimurium
gatccagagcgaatcgggtagtgaaggcagtcaacaaaaaaggcagtttgaaggggatagagtgattaagggctaataaaaaagtaacatggggctgtatttccccctctggatgagggggctttttttatcgatgataaaaaatctcgccatcataggctttgatgatttttccatcggtatcgttaatcagtacatacgcgccgcccatataggtccagtgagtaccggcatctggcgcgggcagattacgtaatttccactgtttaatattatactcatcggtgcggtacatttgcggaacggtatcgccgggcttgaagtgggtgaagtcggcgataaagctttttaactcatatt

SEQ ID NO: 3844 - DNA, 126 bp, Salmonella typhimurium
gatcgataatgccagacgaaagagcgtggtaattaacagtaccgcaggaaacgttgaaaaactgaggattctgtcaatgtagaacgaccccataaacaccaatatcgccagtacgatattcagtgc

SEQ ID NO: 3845 - DNA, 196 bp, Salmonella typhimurium; identical to SEQ ID NO: 3842

SEQ ID NO: 3846 - DNA, 179 bp, Salmonella typhimurium
gatcaaggctaaacaaagacagagcggaactcaccaccatgagaacaatgaataagccaaaggccataaataattttgaacgtattttaatgttatgcaaaaacatattttctccctgggattgcatatcctcatacaggaagatttatcggcaataatgttactaactttatgatatt

SEQ ID NO: 3847 - DNA, 481 bp, Salmonella typhimurium
ccaaaataaggaaagggttatgatgaaggtagtcatcatactggtgatactcttagtgattagcctaccagcttactaagacaccagggggaggaggaatcctcccttaccctcactcctgacgttaagccacatcaagaataatgtcaatccatcagcgctgggcttgcgaggcgcttagcggaaaacgacctccgcccagcgcgccagtcctgcggtgacggagccgaaatcatcgccgccagcgacgggtatgcccggtaactgttcggaaagcgcttttttaatcaatggcgaacgggcgctgccgccggtcagatagatgacatccggtttttcctgcgcgctgtccagcgccagttgcacctgttccagaatgcgcgtcagcggttgatccagcgccgcttccagtccttgctggctgatagcgaccgccaggtcgtcgctgataaatggcagcctcgccgtaacatccgcctgg

SEQ ID NO: 3848 - DNA, 389 bp, Salmonella typhimurium
cctcctgcgccgaatcacgcagataatgaccggaggtgtcgtcttcttcgccgcgtcggctggaaacagtaagaatagcgatgcgggtcgggataaattcagcgctgacctgactcatctgaaatctccttattaaggattaaccgccaatgtaagataaattttgcgtaataccagtattgctctggtgaagaaagtgggtctgctttttctcccgcaacgcgtcggaaatacgttcctcaagcgcgtattgctgcgcgtcatcctgtaacaggtcgcgtaaactcacgccgccgtcgccaaacagacataaatgcagcttaccgacggacgaaacacgcaggcggttacaggtggcgcagaaatctttttcatacggcataatgagg

SEQ ID NO: 3849 - DNA, 319 bp, Salmonella typhimurium
cctcctgcgccgaatcacgcagataatgaccggaggtgtcgtcttcttcgccgcgtcggctggaaacagtaagaatagcgatgcgggtcgggataaattcagcgctgacctgactcatctgaaatctccttattaaggattaaccgccaatgtaagataaattttgcgtaataccagtattgctctggtgaagaaagtgggtctgctttttctcccgcaacgcgtcggaaatacgttcctcaagcgcgtattgctgcgcgtcatcctgtaacaggtcgcgtaaactcacgccgccgtcgccaaacagacataaatgcag

SEQ ID NO: 3850 - DNA, 389 bp, Salmonella typhimurium; identical to SEQ ID NO: 3848

SEQ ID NO: 3851 - DNA, 319 bp, Salmonella typhimurium; identical to SEQ ID NO: 3849

SEQ ID NO: 3852 - DNA, 389 bp, Salmonella typhimurium; identical to SEQ ID NO: 3848

SEQ ID NO: 3853 - DNA, 362 bp, Salmonella typhimurium
ccggtgttgatggcggtggcgtcgccatcggcatcggtggaacccgccaccattcctgagctggtgagatagagcgatgatggctgccagtagctggtgctggtgatgttattttcatcgtccagcgtcgggacaaggccatccagatagatattgccttcgtttagtgctttacctcggctggcggtaacgccatatacacctgccccctgcaaatggatcgtggcgccctcatcgttaacgacatcgccataatccgaagccatcatggcgtaaaaggtgtgggtgtaccatttcaatgggtatacttcaataccgccactgccctgcggcgtctgatcagaaatgagggtgatatcgcc

SEQ ID NO: 3854 - DNA, 362 bp, Salmonella typhimurium; identical to SEQ ID NO: 3853

SEQ ID NO: 3855 - DNA, 224 bp, Salmonella typhimurium
taatgccgtgagaagtgatgagagtattatctccagtcattttatagttattccgttacgaagacctggcttttattttgcactgttcgcgaagaagttattgcgatcggtacgccatttaccacactttttttatggttatgtgcgccataatacttcgacggaacagtaaaacgaagggaagaggcgatagtgtaattaattaaagcaagataatacccctg

SEQ ID NO: 3856 - DNA, 405 bp, Salmonella typhimurium
ctatcgccaataacgaattgcccgaacgtggcgataatttcaccggcatcggcttcaatcaagataagacgactggtactgatcgataatgccagacgaaagagcgtggtaattaacagtaccgcaggaaacgttgaaaaactgaggattctgtcaatgtagaacgaccccataaacaccaatatcgccagtacgatattcagtgcgatcaggaaatcaaccagataggtaggtaatggaatgacgaacatagaaatgatcatcaccattagtaccagaatcagtaattcaggtcgtaaacgagcactgttaagtagagaaagcagcactataggtatcctgttaatattaaattaagacagcttttcaatagtacgacgctgttctgccatttcatgcttgtag

SEQ ID NO: 3857 - DNA, 252 bp, Salmonella typhimurium
cgaataaaatttccgccccctgacactgacggaggtgatgaattatccggttcatttaaaataacgccagagaggttggctttgtgacgtataagcgtattttttaatgttgtatcaataaacgagggctgttgttgtgtagtaattgaatactgtaaaaacacttcattcatgtctgaattactaaatttcgtattactgcagactacatcactcagtgtcgaataagtgaatcggcattcgtcaaaatgt

SEQ ID NO: 3858 - DNA, 405 bp, Salmonella typhimurium; identical to SEQ ID NO: 3856

SEQ ID NO: 3859 - DNA, 161 bp, Salmonella typhimurium
cctgcgacactttcttaccgcgaatcaggtcagcaacaaggcgaaccttctgagcagaagaacgagcatggcgatgtttagcgatagtttccatctcttcctcctaccttatttcttcttcgcttttttatcagcagcgtggccgcgataagtacgagtcg

SEQ ID NO: 3860 - DNA, 270 bp, Salmonella typhimurium
gttctctttaacgatggctttcgccaccacttcatgcccggcctcctgcgccgaatcacgcagataatgaccggaggtgtcgtcttcttcgccgcgtcggctggaaacagtaagaatagcgatgcgggtcgggataaattcagcgctgacctgactcatctgaaatctccttattaaggattaaccgccaatgtaagataaattttgcgtaataccagtattgctctggtgaagaaagtgggtctgctttttctcccgcaacgcgtcgga

SEQ ID NO: 3861 - DNA, 285 bp, Salmonella typhimurium
atttcaccggcatcggcttcaatcaagataagacgactggtactgatcgataatgccagacgaaagagcgtggtaattaacagtaccgcaggaaacgttgaaaaactgaggattctgtcaatgtagaacgaccccataaacaccaatatcgccagtacgatattcagtgcgatcaggaaatcaaccagataggtaggtaatggaatgacgaacatagaaatgatcatcaccattagtaccagaatcagtaattcaggtcgtaaacgagcactgttaagtagagaa

SEQ ID NO: 3862 - DNA, 319 bp, Salmonella typhimurium
tactggcatcgatcatcacaggtgaaccacatgcatatatatcgaagaactctagagaatcaaaatcatccatcacggcatgatggacaaatccctttcttcccccccattcggcgtcatcaccagaaacaacagggatataatgaacgttgtcgtgctgttcactccactgctgcggtaatgcagagtaaaaatctttactatattgcattccccagtaaatgtagatctcacgacgacattttccctgaatgagatgctcaaccattgatttaactggagcgaatccagtaccgcctgcaaggaagattataggtct

SEQ ID NO: 3863 - DNA, 485 bp, Salmonella typhimurium
ctcccgctggtgcagggcattgacgatgtaaaacaccgaaacaaaggcgattaagagccaaatgagtaacgctaacgctctgaataagtagcgcgagactttcagcgtagttcgaaaggaagcaaggtatttcaaaggggcgaagctccgcctcaggatgtaaatagagtgtgactaaggtagcggtaaatgacgtagcccgcaacggcaaagaaaaagggccggatatccggccctcgcacagcaataacattactcgtcagcgtcatccgcaacgtcgtcatcgctttccgcttccggggcgatatcctcatccccttccgccacgctgccgtcgatagcgtcgagttcttcgtcatctaccggttcagcaacgcgttgcagacccaccacgttttcatcttccgccgtgcggataaggataacgccctgggtattacgtcccactacgctgatctcggacacacgggtacgcaccagagtac

SEQ ID NO: 3864 - DNA, 241 bp, Salmonella typhimurium
accagggcagcatgataataacggcgatagaaagaagaaagttaaggagtagtcgtgaaaagattttagataacacggaaccatgccagacaaatatcaggcgaatccagtgctgttgtggtctaacgatcatgattatcttcagctggtgaaaaagcactgtcattaaacgtgatccagatcaaggttgcaagcttctggtgatacacgggttccctgccctgtagaacatttttttgca

SEQ ID NO: 3865 - DNA, 165 bp, Salmonella typhimurium
caccggcatcggcttcaatcaagataagacgactggtactgatcgataatgccagacgaaagagcgtggtaattaacagtaccgcaggaaacgttgaaaaactgaggattctgtcaatgtagaacgaccccataaacaccaatatcgccagtacgatattcagtg

SEQ ID NO: 3866 - DNA, 176 bp, Salmonella typhimurium
caatagcattcggtattgatagtcgttttgcaacctggtaaatccaggtttctaccgcagccgcaccacgaggaggaattgaaaatataggagtaacagtaaatatgatttttttaatcataatagctataatccagaatagttaactttatagaaaaagaaatgttataaaaaaa

SEQ ID NO: 3867 - DNA, 161 bp, Salmonella typhimurium
tgtttaaacgtaaatccgttacgacgaagaacggagccagactgagacatgtaaaaacaaccttgcaaaaaaacggcgacagcgccgggtgaaaacaatacctgagaagggatatccatacaaacagatgaagattgcggccgtaacgtctataatcagcg

SEQ ID NO: 3868 - DNA, 288 bp, Salmonella typhimurium
taccatccagagaaaatcgggccgcgacttccgcgacacgttctgaacctttggtaataacgataaactggaccacggtgacaatagagaagacaacaaaacccaccgccaggctatcgccaataacgaattgcccgaacgtggcgataatttcaccggcatcggcttcaatcaagataagacgactggtactgatcgataatgccagacgaaagagcgtggtaattaacagtaccgcaggaaacgttgaaaaactgaggattctgtcaatgtagaacgaccccataa

SEQ ID NO: 3869 - DNA, 330 bp, Salmonella typhimurium
aatagaaatgttctacagagagatttttcatcataaagtcctttttactggcatcgatcatcacaggtgaaccacatgcatatatatcgaagaactctagagaatcaaaatcatccatcacggcatgatggacaaatccctttcttcccccccattcggcgtcatcaccagaaacaacagggatataatgaacgttgtcgtgctgttcactccactgctgcggtaatgcagagtaaaaatctttactatattgcattccccagtaaatgtagatctcacgacgacattttccctgaatgagatgctcaaccattgatttaactggagcga

SEQ ID NO: 3870 - DNA, 166 bp, Salmonella typhimurium
atagcattcggtattgatagtcgttttgcaacctggtaaatccaggtttctaccgcagccgcaccacgaggaggaattgaaaatataggagtaacagtaaatatgatttttttaatcataatagctataatccagaatagttaactttatagaaaaagaaatgtta

SEQ ID NO: 3871 - DNA, 437 bp, Salmonella typhimurium
atattcaggctgggcgatgttcgttcattgccctccaggataaaaatattgacgctgcgatccgtaaatgtttcaggcaggacaaaacacccttcctgtatgcggtatggtcgatccatgagaactccaggtttaattcagatcactcagaggtgagaaggggggcaatatcatcggcggttacggctgtgccgccatccgggttcatatcaatacctttaccaatcagttgcatgacatcgctggtatgtaacatcagttgcttgccacaaaactcaatggagccgtccttatgtaaaacaagcgccgcattgccgcagcgaagcgtgaattgatcgccaacatctaaacgataagtggtgccgatattgatcgtctgcgccagttttacggaaaggccgtcattcttcgttaccgtggtgtttctgtcctcacca

SEQ ID NO: 3872 - DNA, 224 bp, Salmonella typhimurium; identical to SEQ ID NO: 3855

SEQ ID NO: 3873 - DNA, 241 bp, Salmonella typhimurium; identical to SEQ ID NO: 3864

SEQ ID NO: 3874 - DNA, 209 bp, Salmonella typhimurium
tcatagcctacccacgcggagtcaaacagaatgtaatcgcagagatgcccgattttatccaccacctgacgggcgttgtaaatagtgccgtcataggtacccagctgaatgatcgccaggcggaacggacgcgacgcatcggcgctttccggcatcacgtcacgaatctggtcgcgcaggtacgtttcatcaaaacagtgcgcatcaat

SEQ ID NO: 3875 - DNA, 495 bp, Salmonella typhimurium
tattaaggattaaccgccaatgtaagataaattttgcgtaataccagtattgctctggtgaagaaagtgggtctgctttttctcccgcaacgcgtcggaaatacgttcctcaagcgcgtattgctgcgcgtcatcctgtaacaggtcgcgtaaactcacgccgccgtcgccaaacagacataaatgcagcttaccgacggacgaaacacgcaggcggttacaggtggcgcagaaatctttttcatacggcataatgaggccgatctcaccggcgtaatcgggatgacaaaaaacctgcgccgggccatcgctgcgctggcggagctggtggatccaaccgcgcttaatcagctcgtcgcgtaatacctgacccgaaatatgatgtttgcggaagagatcgctcccctcgcccgtctccataagttcaatgaagcgtagctgaatggggcgaggctgaatccaggcaaggaaggtatccaactgatggtgattcac

SEQ ID NO: 3876 - DNA, 268 bp, Salmonella typhimurium
tctgaaatctccttattaaggattaaccgccaatgtaagataaattttgcgtaataccagtattgctctggtgaagaaagtgggtctgctttttctcccgcaacgcgtcggaaatacgttcctcaagcgcgtattgctgcgcgtcatcctgtaacaggtcgcgtaaactcacgccgccgtcgccaaacagacataaatgcagcttaccgacggacgaaacacgcaggcggttacaggtggcgcagaaatctttttcatacggcataat

SEQ ID NO: 3877 - DNA, 258 bp, Salmonella typhimurium
tgacaatccagatagagctggcaggggaggcatgtaaatcagtcgcaatggttggcagcgcgacattagcgattgcgccatccagaaccgccatcgaaataccgataataatcgtcaggatagcgccgtatctctgcgggaggggcaggccatcggcccgtgttttttccataagtattttgtaataaggggagttatgagctgaataataatgttagcattaatactgagttgttatgtcgcagatttgtaacgaag

SEQ ID NO: 3878 - DNA, 440 bp, Salmonella typhimurium
aatagagaagacaacaaaacccaccgccaggctatcgccaataacgaattgcccgaacgtggcgataatttcaccggcatcggcttcaatcaagataagacgactggtactgatcgataatgccagacgaaagagcgtggtaattaacagtaccgcaggaaacgttgaaaaactgaggattctgtcaatgtagaacgaccccataaacaccaatatcgccagtacgatattcagtgcgatcaggaaatcaaccagataggtaggtaatggaatgacgaacatagaaatgatcatcaccattagtaccagaatcagtaattcaggtcgtaaacgagcactgttaagtagagaaagcagcactataggtatcctgttaatattaaattaagacagcttttcaatagtacgacgctgttctgccatttcatgcttgtaggcaa

SEQ ID NO: 3879 - DNA, 146 bp, Salmonella typhimurium
gtcgtcttcttcgccgcgtcggctggaaacagtaagaatagcgatgcgggtcgggataaattcagcgctgacctgactcatctgaaatctccttattaaggattaaccgccaatgtaagataaattttgcgtaataccagtattgc

SEQ ID NO: 3880 - DNA, 330 bp, Salmonella typhimurium; identical to SEQ ID NO: 3869

SEQ ID NO: 3881 - DNA, 334 bp, Salmonella typhimurium
cacccattcttcgagagattgtatccgacgactaaatgcgggttgagtcacatatcttgaggcagacgcttttgagaaattcaacgtttcttttagagccagacagtcttcgagccatgttagttcgaggtgatgccgatattgcataagctgcaaccttattagcattggatgagtttcatttatataagtagcattatacacagacagattttaagaggaaattatttgattaaacagaaacaaaagcagtaagaatatgttatgcctttgtcgggtaagtgttgttatttatgtgagtgtattctttctcaatagaaattaattagatgta

SEQ ID NO: 3882 - DNA, 136 bp, Salmonella typhimurium
cgccgttggaggtgatcatgtaagacttgatttcaagattatcgcggatttgccctacatcgacatgatgacgaccagtggcaaagacaaaatggatgccgcgtgcggtcaacagcttcagagtctctttggcata

SEQ ID NO: 3883 - DNA, 224 bp, Salmonella typhimurium; identical to SEQ ID NO: 3855

SEQ ID NO: 3884 - DNA, 176 bp, Salmonella typhimurium; identical to SEQ ID NO: 3866

SEQ ID NO: 3885 - DNA, 622 bp, Salmonella typhimurium
taatttgtttggtcgggggatttatacgcaaaatggcccgaaatatgtccgaattaaaacgtaaaaagtgataactaattgaatctattagaatcaaaaataacatattccaatcgttaaaatcacttaattaatatgtaacattatgaatttaaagagaaatatcaatggttgccgtaagcgggaatcgtattcggtctctttttttcttataaatcagttgcttatgatcaataatccgaaatttccgaaatttccgaaattttccagaatttctgtattccgggctttttcgttatatcagatccaaatccagtttaacatttcttttacagcaaaatcagagcatcacgtaagctttattatcgcgttcatcgagatagagtttcgtggtgttctctgaagtatgtcccaggagtttctgagcaaacccttcgccgtaagcgtctttatacagtcgtccggataagctgcggatctcgtgaaacggcggtgggttttcactgaaatttattccggtcaattttcgtgccgcaacaaattttttagtcaggctattaggatgaatactcccgttcgggctgtttttgcgtatgccagcgctgataaggtattcgctacg

SEQ ID NO: 3886 - DNA, 188 bp, Salmonella typhimurium
gtgtgcgacaaaaaactgtttaaacgtaaatccgttacgacgaagaacggagccagactgagacatgtaaaaacaaccttgcaaaaaaacggcgacagcgccgggtgaaaacaatacctgagaagggatatccatacaaacagatgaagattgcggccgtaacgtctataatcagcgccccacacaga

SEQ ID NO: 3887 - DNA, 152 bp, Salmonella typhimurium
cgggataaattcagcgctgacctgactcatctgaaatctccttattaaggattaaccgccaatgtaagataaattttgcgtaataccagtattgctctggtgaagaaagtgggtctgctttttctcccgcaacgcgtcggaaatacgttcct

SEQ ID NO: 3888 - DNA, 393 bp, Salmonella typhimurium
tgaagcatgcaacatgaaggcgttgttcaggcgtttgtgcgggcaaaaacgcgcctggccgcgaatatggttatcttttttgtggatctgcgaggtttgtgagaaccccgcctgttgcttatgtaccgattgggtcacaaagatcccagggtcgttttcattaagctccagccgcaacggcgaggtatccgccatcatattgataaactgctcatagcctacccacgcggagtcaaacagaatgtaatcgcagagatgcccgattttatccaccacctgacgggcgttgtaaatagtgccgtcataggtacccagctgaatgatcgccaggcggaacggacgcgacgcatcggcgctttccggcatcacgtcacgaatctggtcgcgcaggta

SEQ ID NO: 3889 - DNA, 425 bp, Salmonella typhimurium
ttatttatgcagaatgaaagaggtagcacttgactaaatagcagtaccatgtcgctaaatttacacgtacggagagaaagcaaggatgtcactcaaaaaaacggaaagcacacagcacaaactgaaacaaacctgtcaactacggctgtggttaattgtgggtggagtatgttcattaggaatgggagtactgaatatattgtcgtcaggctattttgaaccgtatgacggcggtcaaattatcttaggcctgggatgtctgggatatagtctggcactatcaaagaagatatcccacttgcaggcagagaatcagcccaaaaagccataataatagcggagggggtgctcccctccctaagcgtaaattagcgcacccgcgccagcgctaccgcctggcccagttgccaaaccgccatcgcata

SEQ ID NO: 3890 - DNA, 319 bp, Salmonella typhimurium
tgatcgataatgccagacgaaagagcgtggtaattaacagtaccgcaggaaacgttgaaaaactgaggattctgtcaatgtagaacgaccccataaacaccaatatcgccagtacgatattcagtgcgatcaggaaatcaaccagataggtaggtaatggaatgacgaacatagaaatgatcatcaccattagtaccagaatcagtaattcaggtcgtaaacgagcactgttaagtagagaaagcagcactataggtatcctgttaatattaaattaagacagcttttcaatagtacgacgctgttctgccatttcatg

SEQ ID NO: 3891 - DNA, 442 bp, Salmonella typhimurium
atgacgattcataaaccattcgtcgtcgcgataaacgttagtcacgatgtccgggttcgcattcaccaccccgaacaggtcgctggcaatgtcgctgtccagattatgcgtaaaaaccaaattcccgtcggtatcgtgcactcgcgcgccgttggaggtgatcatgtaagacttgatttcaagattatcgcggatttgccctacatcgacatgatgacgaccagtggcaaagacaaaatggatgccgcgtgcggtcaacagcttcagagtctctttggcataaggggacaacgtatggtcgggggagagcagcgtgccatctaaatcagacgcaacaacctgatacataataaaatttaacctctaagcaaagcgatttccgctggataaattaggcttgttgaaaaattcaacaatggcgttaagcgcgactgagcgcatg

SEQ ID NO: 3892 - DNA, 236 bp, Salmonella typhimurium
agatttcgcagtagtggtaatggtaatatccaaaccacgaacgcggtcgactttatcgtagtcgatttctgggaagatgatctgctcacggacacccatgctgtagttaccacgaccgtcgaatgacttagcggacaagccacggaagtcacggatacgaggaacagcaatagtgatcaggcgctcaaagaactcccacatgcgttcgccacgcagagttactttacagccgatcg

SEQ ID NO: 3893 - DNA, 297 bp, Salmonella typhimurium
tacaataataagtgaccgggatgacaatctttctgcaataaattttaatgtggtatgcggtagtttcaaaagggcgagatccagagcgaatcgggtagtgaaggcagtcaacaaaaaaggcagtttgaaggggatagagtgattaagggctaataaaaaagtaacatggggctgtatttccccctctggatgagggggctttttttatcgatgataaaaaatctcgccatcataggctttgatgatttttccatcggtatcgttaatcagtacatacgcgccgcccatataggtcca

SEQ ID NO: 3894 - DNA, 225 bp, Salmonella typhimurium
ctctttgaaaaaacgcatttcatcggggcgatgacgattcataaaccattcgtcgtcgcgataaacgttagtcacgatgtccgggttcgcattcaccaccccgaacaggtcgctggcaatgtcgctgtccagattatgcgtaaaaaccaaattcccgtcggtatcgtgcactcgcgcgccgttggaggtgatcatgtaagacttgatttcaagattatcgcggat

SEQ ID NO: 3895 - DNA, 356 bp, Salmonella typhimurium
cgaatcgcgtaacggttctctttaacgatggctttcgccaccacttcatgcccggcctcctgcgccgaatcacgcagataatgaccggaggtgtcgtcttcttcgccgcgtcggctggaaacagtaagaatagcgatgcgggtcgggataaattcagcgctgacctgactcatctgaaatctccttattaaggattaaccgccaatgtaagataaattttgcgtaataccagtattgctctggtgaagaaagtgggtctgctttttctcccgcaacgcgtcggaaatacgttcctcaagcgcgtattgctgcgcgtcatcctgtaacaggtcgcgtaaactcacgccgccgtcgcc

SEQ ID NO: 3896 - DNA, 194 bp, Salmonella typhimurium
attttgccgttgagtgaaacgacgcccagaccgcgagactcagcctcttcagcggcggcaatcacctcatacgcatgctcaacttctttacgtgtcggagaataagcctgatgtaacagctcaatctgacgtgggttcactaaggacttaccgttaaaaccaagccctttcgccaactgcacttccttcaggaa

SEQ ID NO: 3897 - DNA, 447 bp, Salmonella typhimurium
tcctggctatcaaacatcccaacggggacgacccaggtggcgatactggttaaaatggcgacaaaaaagatgatgaccagcgtatcgggcattgcccattttctggctgtttttgattctgtaacgacagacatgacagactatccctgttgcaaagcaaagaggctaagtatgagaagaagggaatagttattcattgatgcagcgcagttaagcaaaaaattccgctttgcagggtaaatagcagaatgccggatggcgatgctaacgcgtcttatccggcctacaacggtatctcacctgtaggccggacaaggcgttcacgccgccatccggcattagcttttactgttactgctgctgctgagaagcctggatcgccgtcagggcgatggtgtagacgatatcgtcaaccagcgcgccacgggacaggtcgttcaccggctt

SEQ ID NO: 3898 - DNA, 447 bp, Salmonella typhimurium
  misc_feature (400)..(400): n=g, a, t or c
tcctggctatcaaacatcccaacggggacgacccaggtggcgatactggttaaaatggcgacaaaaaagatgatgaccagcgtatcgggcattgcccattttctggctgtttttgattctgtaacgacagacatgacagactatccctgttgcaaagcaaagaggctaagtatgagaagaagggaatagttattcattgatgcagcgcagttaagcaaaaaattccgctttgcagggtaaatagcagaatgccggatggcgatgctaacgcgtcttatccggcctacaacggtatctcacctgtaggccggacaaggcgttcacgccgccatccggcattagcttttactgttactgctgctgctgagaagcctggatcgccgtcagggcgatggtgtanacgatatcgtcaaccagcgcgccacgggacaggtcgttcaccggctt

SEQ ID NO: 3899 - DNA, 225 bp, Salmonella typhimurium
gaaaaaacgcatttcatcggggcgatgacgattcataaaccattcgtcgtcgcgataaacgttagtcacgatgtccgggttcgcattcaccaccccgaacaggtcgctggcaatgtcgctgtccagattatgcgtaaaaaccaaattcccgtcggtatcgtgcactcgcgcgccgttggaggtgatcatgtaagacttgatttcaagattatcgcggatttgccc

SEQ ID NO: 3900 - DNA, 160 bp, Salmonella typhimurium
cgaggaggaattgaaaatataggagtaacagtaaatatgatttttttaatcataatagctataatccagaatagttaactttatagaaaaagaaatgttataaaaaaaagaaatgcgtgccgaagcaacgaaaaataatgatttatctagtgtctagaca

SEQ ID NO: 3901 - DNA, 162 bp, Salmonella typhimurium
cttcaacgtaatgaattttgatacccggtcgcttccacaaatttatctttgtccatcgttgttgctgaagcatttattaaaaatataatattgataataaaaataaatgctaatttaaaaatatgattcataacacctcgccaatcactttccgtgtaaaag

SEQ ID NO: 3902 - DNA, 154 bp, Salmonella typhimurium
aagatgatctgctcacggacacccatgctgtagttaccacgaccgtcgaatgacttagcggacaagccacggaagtcacggatacgaggaacagcaatagtgatcaggcgctcaaagaactcccacatgcgttcgccacgcagagttactttac

SEQ ID NO: 3903 - DNA, 405 bp, Salmonella typhimurium
cctgcacctgaccgctttgttcttcaattttgacgtgtagatcgccggataccgtttcattaatatcctgaatgcgaaacggcccagccgggacctgcgactcataaatcacccgcccgcgctgggtcacggtgactttggcgttggtgcgcgccacgcctgatatatccggggcgtagccgcgcagattaggcggtaacatctgatcgtcggtgataaggctgccgccaacatagttaaagccgtcgaaaatatcggattccagcgatccttcgcccagcgttagctgcgcccggagctgcgggatcgcccgccaggcgtaatagcggttccagtcccagttctgttcggaactggagccaaagttgtctttatcttcgctgtcattttcgtgacgatagttag

SEQ ID NO: 3904 - DNA, 120 bp, Salmonella typhimurium
atgctcaacttctttacgtgtcggagaataagcctgatgtaacagctcaatctgacgtgggttcactaaggacttaccgttaaaaccaagccctttcgccaactgcacttccttcaggaa

SEQ ID NO: 3905 - DNA, 122 bp, Salmonella typhimurium
tgcgacaaaaaactgtttaaacgtaaatccgttacgacgaagaacggagccagactgagacatgtaaaaacaaccttgcaaaaaaacggcgacagcgccgggtgaaaacaatacctgagaag

SEQ ID NO: 3906 - DNA, 339 bp, Salmonella typhimurium
accgtacccaacgccactaaatccagcagctccgccagattcggcggcgcgatgttgcgctcgtcgaaccatcctttgtcgcgcaaaaatgttcgcaacgccagcatcaggtaaaacgccacgccgacgcccgccagcgacttagacgggaattcgcagtcgcgcagattgggattaataatcgcttcggcatccggcaacgtgtcgcctggcaggtggtgatcggtcacgatcaccggaatccccaacgtctttgcatgcgctacgccggcgtgggatgaaatgccgttgtctacggtgacgataagctgcgcgccgcgcgccttcgcctgatcgacc

SEQ ID NO: 3907 - DNA, 188 bp, Salmonella typhimurium
agagcctgcgacactttcttaccgcgaatcaggtcagcaacaaggcgaaccttctgagcagaagaacgagcatggcgatgtttagcgatagtttccatctcttcctcctaccttatttcttcttcgcttttttatcagcagcgtggccgcgataagtacgagtcggtgcgaattcacccagtttgtga

SEQ ID NO: 3908 - DNA, 188 bp, Salmonella typhimurium; identical to SEQ ID NO: 3907

SEQ ID NO: 3909 - DNA, 122 bp, Salmonella typhimurium
taccataatcacccacggggcggccagcataccggccaccgtcacgacggccaatgccagcgtcaacaggccggaaacgtaagcgacaaagatccgcgtcgcttcttcaccctgcttgctct

SEQ ID NO: 3910 - DNA, 257 bp, Staphylococcus aureus
gatcatgtttttaacgtagtcagcgtgtcctgggcagtcaacgtgagcgtagtgacgtttgtcagtttggtactcaatgtgagaagtattgattgtgataccacgttctttttcttctggagcgttgtcaatcatgtcatatgattgtgcaactgagtcaccattttttgctaatacagtagcgattgctgctgttaatgttgttttaccatggtcaacgtgaccgatagtaccgatattggcatgttctttagaac

SEQ ID NO: 3911 - DNA, 310 bp, Staphylococcus aureus
gatccgtctcaacatgaacatcagcagcaacaatgatacctgttgcattttcaatatcttgttcagttaaatggtttttaatgccgcttgaaccattcgtttctactttaattttaatacccattttatccgcttgctttttcaatgcatcacgtgccatatatgtgtgtgcaatacctgttggacaagcagttactgctaacacatatggctcattagattgtttagatgattgttctgcagttgcaacttgttgtgcttcagcttctgcctcttcttcttttgtcacttcatcatcagcctcatctat

SEQ ID NO: 3912 - DNA, 216 bp, Staphylococcus aureus
gatcctgtttcttccacatcaaaatctggtattagttctgaaatacctattacgtggtaatctggaaatattactttaaagtcatttattttcccttgattattcgatgcaataacaatctctttcattaaaaatcctcctagtcattcactgatatacgttccacattgacagataaatttaaccactctttgataatgttagtaatgtgagtag

SEQ ID NO: 3913 - DNA, 280 bp, Staphylococcus aureus
gatcttaatctgattaatacgtatttaccttctttaccaagtacttgagcacttgcaccagctgaacgagcgatttgtccacctttaccaggtttaagctcgatgttgtgtactactgtaccaactggaatgttttgtaatggtaatgcgttaccaactttgatgtcagcttcagcaccactttcaacgatttgacctacttctaatcctttaggagcaatgatatatcgtttttcaccgtctgcatatacaactaaagcgatgtttgctgagcggtttg

SEQ ID NO: 3914 - DNA, 257 bp, Staphylococcus aureus; identical to SEQ ID NO: 3910

SEQ ID NO: 3915 - DNA, 246 bp, Staphylococcus aureus
gatcatatctatagtatgcatttgtgttccgtttcactgaagtatatgtatcatcagttaagtataaaccgtcatccttcaatgttacttgataagcatatttccgtgctaaccaggcaatatctatataattttctcctgcgttttcataacttcttaaatcttcaatatgtgcactaacttcagggaaaatgattctaacaacactttcatcaacccaatatttgtcatgcatccatcgcactt

SEQ ID NO: 3916 - DNA, 306 bp, Staphylococcus aureus
gatcattctgaggcacaatcgcttcaattgcaggtatcgttacattttgtaattcagcaacttctgcatttgtttgtgttttatctaatttatcagcaaatctgtcaaaatatctacctaaatccgtacgtgcaatttctttcgccgatgcatctgcatctgcatttttaattatttctatttgcttgttaaccacttctctgattgcttccaaagcatttttcttaacttcaggattaatacgttgtgctttaagttgttcaagcgcactatttttgacagtagcgatttctgcatttgtagttt

SEQ ID NO: 3917 - DNA, 120 bp, Staphylococcus aureus
gatctttagttactgtagcaactttagttttgtttggttcgcctgaacctttttcaataccagctgcttttttaagtaatactggagccggtggagtttttgtaataaatgtaaatgaac

SEQ ID NO: 3918 - DNA, 212 bp, Staphylococcus aureus
gatcatatagaatgacatccgcttcacgtattaaacgctcagcctttttcgtcaaataattcggattacctggacccgcacctatcaagtaaaccttgccatattcctctacagacatatatatacgttcccgtctgtaacttctacctcataaacatctacacaaccttcatcaggttcttgaacaatacctgtatttaaatcaatttttt

SEQ ID NO: 3919 - DNA, 196 bp, Staphylococcus aureus
gatctactttcacaatctttagcgactgacttaaactcatcaccaactagcaattgttcgacaactaaccgaattgccaaataatccgttaacaaatgttgttcaaagtgatgctgttgtgaacggtaatacaacatacctgcccaacccggtaacgccaaaagatgtccttcaacataagcttggtagtcttcct

SEQ ID NO: 3920 - DNA, 138 bp, Staphylococcus aureus
gatctaagtcattatcttctggatttacaaatgaatagtctgaagcaattaagtaatcactgtataatgcatcgtgatggaatccttgttctacatataaaacattatcttttaggtttttaccgacaacaaaccaag

SEQ ID NO: 3921 - DNA, 425 bp, Staphylococcus aureus
gatcatttgacgaatttcattgttattcaaaattctatctaatcgtgctttttcaacatttaatatcttacctcgtaatggtaaaatcgcctgcgttctagagtcacgaccagattttgtagaccccccggcagagtccccttcgactaagaaaatctcacattcttcaggacttttactagagcaatcggctaatttacctggaaggcttgctacatctaacgctgatttacgacgtgttacttcacgcgcttttttcgcagcaacacgtgcacgtgccgccataatacctttttcaaccactgtacgtgcgacttgtggattttcatataaaaatcgttcaaagtgctctgagaataatttatctacaacttgacgcacttcagaattacctaattttgtcttcgtttgaccttcgaattgag

SEQ ID NO: 3922 - DNA, 425 bp, Staphylococcus aureus; identical to SEQ ID NO: 3921

SEQ ID NO: 3923 - DNA, 257 bp, Staphylococcus aureus; identical to SEQ ID NO: 3910

SEQ ID NO: 3924 - DNA, 156 bp, Staphylococcus aureus
gatcatctattgtcgtttgtgaagctcctgtatcattagttgctgtgttttccagcatttcttcatcttctgaattaaaataatttttcaacaatgtacataattgtgttaaacgcgcttgaccatttgttttcaatccaatatcaaatgcttccg

SEQ ID NO: 3925 - DNA, 257 bp, Staphylococcus aureus; identical to SEQ ID NO: 3910

SEQ ID NO: 3926 - DNA, 136 bp, Staphylococcus aureus
gatcgttagggttcattacagaaccacgaactgttggacggatacctttccatcttgaacgtccggctttaccaacgttaactaattcgtgttgtaggttaccaacttgaccgattgtagcacggcaagtagataa

SEQ ID NO: 3927 - DNA, 136 bp, Staphylococcus aureus; identical to SEQ ID NO: 3926

SEQ ID NO: 3928 - DNA, 120 bp, Staphylococcus aureus; identical to SEQ ID NO: 3917

SEQ ID NO: 3929 - DNA, 367 bp, Staphylococcus aureus
gatcctcttttgatttatcactgtctgtagattttgatttatctttagaagcgtctttagatgtgtctttgtctttactttcatcagcattatttttatttgtattcgcgattttattttcttttgtaccattattatgattgtttaatgccatgcctccaaatatcgctaatgcaccgataattagtacagctgcaattaatggtaacaatactttggccatgccaccttttttacgttctttatctctgtcatgattgtcatgttcatcatggttttggcttgcattattagaggcatgtggttttgaagcggcagaagcacttttacttgctgcgcctccagccaaacctgctgttccagcacc

SEQ ID NO: 3930 - DNA, 136 bp, Staphylococcus aureus; identical to SEQ ID NO: 3926

SEQ ID NO: 3931 - DNA, 257 bp, Staphylococcus aureus; identical to SEQ ID NO: 3910

SEQ ID NO: 3932 - DNA, 102 bp, Staphylococcus aureus
gatcaacacaatattgtaatactgcctcattttcgcgatgcaataaattatattctaactgtacaacatcaacgtaaccatctttatttgcttctttaagtt

SEQ ID NO: 3933 - DNA, 230 bp, Staphylococcus aureus
gatcttacctgatggtgcagccatcaatccacgcatacctgctaactgtgtaaagttagatgcgttaccacgggcaccagagtcactcatcatgaagattgggtttgttttttcaagtgattgcattaattcaccttgaatttggtccttagcatctgtccaaatttcaacgacagcattgtaacgttcttcttcagtgattaaaccacgattgaattgtttagttacac

SEQ ID NO: 3934 - DNA, 247 bp, Staphylococcus aureus
  misc_feature (69)..(69): n=g, a, t or c
gatctccagttggaatacgaatcgtttgaacgtactcacattcaaaatgaactggcgattcttttacanggatatcctggagcttctatacatttttcctttgttacacctgcaaaattaaattcatcctcttctggtggcaatgctttcgatgataaattaactgcttctcttaaatcatacgttgccatattccacacaaaccaacctgtctcttcagcatttttcactgtatctttacgttcgt

SEQ ID NO: 3935 - DNA, 318 bp, Staphylococcus aureus
gatcttttgtgatttcttctttcgattcacctttactaataatttctccagttaatggattttttagtgttggcgtcgttattgtcttctcacctttttgtccttctcttgttactttttctgtccctggtgctaaatcaggattaaatttacgttctttctcgaatggaatctcttctttttctacaatcgagtctccttttacaggtccatattttgttacgctatcgaccggcggtctaactacgtctcctgtttctggattcttaattcctggtttacctggaacttcctctttctctcctgttggtaacttcg

SEQ ID NO: 3936 - DNA, 152 bp, Staphylococcus aureus
gatcgaaagcttgcgctgtaaatggtaagatttctttgttaattaatgacataaatatcttcctcctaagaatttaagtatgaattagaactatcaattgattgcgcttaattataataattctaatctcttagttagcattattacatttt

SEQ ID NO: 3937 - DNA, 479 bp, Staphylococcus aureus
gatctcttggtaaacagtgacattttcttcaatcggcgtatgattgtttgtggcaccgaccatcgatgaaacgattgaaaaatcttcaatgtcacctacagctttaagtccgagcacgcaggcacctaagcatgaactttcataactttcaggaaccactaactctgtgtcaaatatatctgacatcatttgacgccatacttcacttttcgcaaaaccacctgttgcttttatcatcttaggtgtttcattcattacttcaataagcgcaagatagacggtatacaaattgtaaagaacaccttctaatgcagcgcgaatcatatgttcttttttatgagataaagttaaaccgaagaatgaacctcttgcatttgcgttccaaagcggcgcacgttctcctgctaaatagggatggaatattaaaccatctgcacctggtttaacacgctttgcaatttgagttaagacatcataag

SEQ ID NO: 3938 - DNA, 410 bp, Staphylococcus aureus
gatcaataaatagatttaaagataattcagcagttaaatctttcttttcttgtacatattctttaaacgtatatctaacttttctttctccaattatttctcctgtcgccataacttgaccatctgtactttttatctccggaactttacgcagtgttgagataccatgagtttcaacattatcgcttaatgtgaaatcaaaataatctcccgccttaattccttctccaaatttccatttatatttcaaggttactctttctgcgttatgaggatttacaacattcgtatcttgtttatgtcctacaatttcactaccttcttctacttccactttatttgttacatctgtacctgtcgctttagtttcttccactacttctttctctgcaactgctgtaacgtcagtt

SEQ ID NO: 3939 - DNA, 240 bp, Staphylococcus aureus
gatcaacttcaattaaatgatgcataaccgcaatttcaggtaacacttcttttacagtagcacttaaatgaccggcaccacttgcaatatcaacaatatgtaattcttcttggttgttcataaaacgctcaactaaaaatcctagtatcaatccaattgaatctggtgtaatttgatgatttgcttgtatcttttcttcctgcattaaacttaaatatgcaaattggaatgctttacgtc

SEQ ID NO: 3940 - DNA, 246 bp, Staphylococcus aureus
gatctccagttggaatacgaatcgtttgaacgtactcacattcaaaatgaactggcgattcttttacacgatatcctggagcttctatacatttttcctttgttacacctgcaaaattaaattcatcctcttctggtggcaatgctttcgatgataaattaactgcttctcttaaatcatacgttgccatattccacacaaaccgacctgtctcttcagcatttttcactgtatctttacgttcgt

SEQ ID NO: 3941 - DNA, 206 bp, Staphylococcus aureus
gatcaataatctgtcctaaaaaatcattataacttacaacatctaatttcaattgatgtgcacgtactatttcttcatggctactcgcgaatgcattaccttgtataactaccatatcttcttttatgttattagcatcaaatggtaatatttttatccccttatttctaagagcaacttctgtaaatacgtagttctcaatatcc

SEQ ID NO: 3942 - DNA, 257 bp, Staphylococcus aureus; identical to SEQ ID NO: 3910

SEQ ID NO: 3943 - DNA, 196 bp, Staphylococcus aureus
gatcttaattattttaagttatcatatttatttgtaatgacagtcattaagtcatcaatgtgaacttcttcgctatcacctgttaaacgttctttaacttctacaataccttccgatgcacgtttaccaacaacaattcgcagtggtaaaccaattaaatcggcatcattaaatttaacacctgcacgttcctgac

SEQ ID NO: 3944 - DNA, 179 bp, Staphylococcus aureus
gatcttttacgtcttttgtgaaaacgattttattattaactacttttactggataacttttgtatgtcgagtcagtagcattttttctatcgtttgtagttgggtcatattcaccagttattttatgtgtgttcttatctacctttaacaacatacggtcttcttttaaaagctcatct

SEQ ID NO: 3945 - DNA, 257 bp, Staphylococcus aureus; identical to SEQ ID NO: 3910

SEQ ID NO: 3946 - DNA, 309 bp, Staphylococcus aureus
gatcttccatcgttttttcaccacgaagacgtgcatagttaactaaccaacgtaaacctaaagtagtacgacgctctggacgaacttctactggtacttgatagttagaaccacctacgcgacgagctttaacttctaatactggcataatgttgttgattgcttcttcgaatacttctaatgcatcacgaccactgcgttgttcaactaggtcgaatgctgaataaagaattctttgtgctgttccacgtttaccatctaacataattttgttaattaatttagttactaacttagagttatgaattg

SEQ ID NO: 3947 - DNA, 257 bp, Staphylococcus aureus; identical to SEQ ID NO: 3910

SEQ ID NO: 3948 - DNA, 475 bp, Staphylococcus aureus
gatccattactccagttgcttttttctcaactggtcttgtttttgttgcgttgataggaccttgtccatcgataggttgacctaatggatttactactcgtccaattagttcgtcacctacaggtacttccataatacgtcctgtacgtttaacttcgtcaccttcactaatatctgtgtatggtcctaagataaccacaccaacattagattcttcaaggttttgtgctaaacctagcacgccgttttggaattctactagctcaccagccataacgtcatttaatccgtgaattaatgcgataccatcaccaatttgtaatactgtaccaacatctgttacggacatttctgactcataattctcaatttgtgagcgaagtaatgcactgatttcttcagcttttatggccatctatgtcactcctctttattaattagtttgctcttttaaatttacgttgtaattgaataa

SEQ ID NO: 3949 - DNA, 507 bp, Staphylococcus aureus
gatcaaattgagaaatttgatatgcttttggattatctggatagaaatagttcttacggtcaaacttagattctgttgcgatttccatatttagtgccattgcagcacgcattgcccagtctactgcacgcttattaacaactggtaagacacctggatatgctaagtcgataacatttgtatttgagttaggttctgctccaaaatgcgctggtgatggagaaaacatttttgagtccgtttttaactctacgtgaacttcaagtcctataactgtttcaaaatgcatgatttccactccttataatttttcataaacgtcatgtaaattgtattgtgtttcatattgataagcgacacgatataacgttttttcatcgaatggtttaccaatgaactgtaaaccgattggtcggccatttgattgtccacaaggaacagaaataccaggtaatccagctaagtttactggtgttgttaataaatcattggcatacattgttaatg

SEQ ID NO: 3950 - DNA, 318 bp, Staphylococcus aureus; identical to SEQ ID NO: 3935

SEQ ID NO: 3951 - DNA, 507 bp, Staphylococcus aureus
gatcaatcagcttggaaatatcttctttattttttgttgtattctttttgttatttaaaatgtcatcaatcagtttgtctgagttttcttccattgaatcaatttgatgtaacacagctactttatcgtctttgaaactttccatgtcattgataacttggtcaaccatcatatcaattaaacgtttgttgtcgaatggtttatcttctctgccttttgtatctgtgtacattttataatgcgcatcaaacctagataatgcactcaattgctggcttaatgcatctttcgataagcgaccatcaaggttatgattcaatgttacatccacaacactcgttgctttcttatcatttggttcatcttgacgatttgcttgtccaaataacaattgtaaatgcattgttttatcttttaagaaatctttctcagcatcctttttcaatttagcaacgccattgacttcaactttatattccttgttagatgtatcgagttgaacacttt

SEQ ID NO: 3952 - DNA, 278 bp, Staphylococcus aureus
gatccacctgatgaaccacctggcactgctttatggtcaaatgggttaactgtttttttgaaataagatgtttctgttgaaccacccattgcaaactcatccatatttaatttaccgattaaaacggcattttcattatgtagttttttccattacagtagattcgtaaattggcacaaaaccttctaacattttacttgcacatgttgtttctaatccgtttgtaataatgttatcttttatacccattggaataccaaataatttgccatccattt

SEQ ID NO: 3953 - DNA, 228 bp, Staphylococcus aureus
gatcgaagtacatagtgtaagtaccgcgaccttgagtgtttgaacgtaatgatgttgcataaccgaacatttctgaaagtggtacataagcattaacaacttgtgcattaccacgaggttccataccatcaacacgtccacgacgagatgttacgtcacccatgatatcacccatgtactcttcaggcatttcaatagttactttcatcattggttctaagattacag

SEQ ID NO: 3954 - DNA, 145 bp, Staphylococcus aureus
gatctgttagcgtactaaatctggcagttaaataacttggtaaccaaccagccattaatgcaatgacaaatactactaagaatcctagcactgctggtataccaaatcttaggactttgtttaccccaattcctgaataaaaaat

SEQ ID NO: 3955 - DNA, 318 bp, Staphylococcus aureus
gatcttttgtgatttcttcttttggttcacctttactaataattactccagttaatggattttttagtgttggtgtcgttattgtcttctcacctttttgtccttctcttgttactttttctgtccctggtgctaaatcaggattaaatttacgttctttctcgaatggaatctcttctttttctacaatcgagtctccttttacaggtccatattttgttacgctatcgaccggtggtctaactacatctcctgtttctggattcttaattcctggtttacctggaacttcctctttctctcctgttggtaacttcg

SEQ ID NO: 3956 - DNA, 447 bp, Staphylococcus aureus
gatctaattcaccttcatgctcaacgccgttctcttcaactagacgacgaacaagaatttcattagattcaacatgttcaacacgacctctgtgcttagctgtaatagccgcaccagaatcacgtgctgcaacgtgttccatacctgtaccaacaaatggtgcttctggattcatcaaaggcactgcttgacgttgcatgttcgcacccatcaatgcacggtttgagtcatcattttctaagaatggaatacatgctgtcgctgctgaaacaacttgcttcggcgatacatccatataatccattttttctttagccataactgtattgttaccacggaaacgacatacaacttcatcatccatgaaacgaccattttcatctaatttagagtttgcttgtgctacaacatagctatcttcttcgtcagctgttaaatagtcaattt

SEQ ID NO: 3957 - DNA, 228 bp, Staphylococcus aureus; identical to SEQ ID NO: 3953

SEQ ID NO: 3958 - DNA, 367 bp, Staphylococcus aureus; identical to SEQ ID NO: 3929

SEQ ID NO: 3959 - DNA, 318 bp, Staphylococcus aureus; identical to SEQ ID NO: 3955

SEQ ID NO: 3960 - DNA, 475 bp, Staphylococcus aureus
gatcctctttatctactttagtagcagtgccatcgcctgcattttctgctttagtatccgtcttagccgtctgttgatgtattcactccagcaaccttcgaatctttactgtcagctttatcttcagtaacagcattcttttcaactttatttgttgattcagctaatgcttttgcttgagaggcttgcgcttcttggatagcctcttgtgatgtttggatggcttttaaggattcgctatttgaatcgattttagatgtaagttgattttgaagttcttttaattcttgttgttgctgatgtacttgattcatcatttgaccaagtaggtgacgttcttcgcgcattttctggatttctaggcgtaaatcttctactagttgagcgacattttgattagtaggtaagtttttgtcatcgtttttgacaatgacttgcaggaagtctttttctttttctaattcatcaaacgcta

SEQ ID NO: 3961 - DNA, 379 bp, Staphylococcus aureus
gatccaccaaagctgataaatggcaatggcacaccagttaatggaattgttgccgaaataccgccaatgtttacaaacgtttgacttccaaagtatgtggcaatcccaacacacacaagtttataaaaatatgatgatgttttatttgcaaactggaaggcacgatatacaataaagaactctaaagtaataactagcaatcctccgattaaacctaattcttcgcaaataattgcaaaaataaaatctgtatgtggttctggtaaatagcccaatttcattgcactatttcctaatccttttccaaatacgccaccgttacctatcgcaagcaatgaattggaaatatggtatccagttcctgattcgaattggaatg

SEQ ID NO: 3962 - DNA, 90 bp, Staphylococcus aureus
gatcttcacctaaaatagcatttactaaacttgatttacctacgtttggtcgtccaataatggatagtcgaattgtatcttcatcataag

SEQ ID NO: 3963 - DNA, 152 bp, Staphylococcus aureus
gatctaattagccaagtacctttatcatcttttttaaattcgccatctcgatatccttctttgtcgtataaatcctcgagattcttaatagggtagatatctaacgttttcgcaaagctctttttgatttgttcttcttttgaatctccaat

SEQ ID NO: 3964 - DNA, 246 bp, Staphylococcus aureus
gatctccagttggaatacgaatcgtttgaacgtactcacattcaaaatgaactggcgattcttttacacgatatcctggagcttctatacatttttcctttgttacacctgcaaaattaaattcatcctcttctggtggcaatgctttcgatgataaattaactgcttctcttaaatcatacgttgccatattccacacaaaccaacctgtctcttcagcatttttcactgtatctttacgttcgt

SEQ ID NO: 3965 - DNA, 356 bp, Staphylococcus aureus
gatcttttcattcttggtttaatttctgagacgttacttggttgagctatgtcaacttgagttcctgtagtttccttatcagcaactttttccgatggcaaatcaactcgcgaagtttctacttttggtgcttgcacagttttcggtgcttcttctgttgttacttgtgttgattgtgatggttgctcagttgatgtcgcgctgtatgattgtgtttcatctattgtattaacgttatttgtagttgtttgtgtttcgcttgctttactttcagtagctgaactcccactttcctctactgtagtattgttttgttccgatgctgcagcttctttttcttgtcccattccaacaac

SEQ ID NO: 3966 - DNA, 208 bp, Staphylococcus aureus
gatcgctatctctaattacttgataagcatctaaccaactatcagccacaatttcatcatataaccaagcacgcaatgcttcaaataatgtaattttggtttgcttagcatgttgcattagtgacaatgggttaacttcatggtattgaggaatgttagtaatttccaattggttgaacaatgattgaatttgatttaaaaatgggct

SEQ ID NO: 3967 - DNA, 249 bp, Staphylococcus aureus
gatccgcttcaacaaggacttttaagtttactggatggtccgattcatcatatggtgcaccataatacaactgtgccgcttcatcatattttacttcaccgacttgttcatccatcatatgtttgaatatatagttagtcgttgacagtacttcttttcgagaacggaagttttgcgacaaatcaattcgacgtccagtgccatctccatctatagtaaagcgttgatacttttcaataaataaacttg

SEQ ID NO: 3968 - DNA, 138 bp, Staphylococcus aureus
gatcaattacgatttgaggcaggtcttcaccatacagtttacgcgcatttgcataacttagttctctaatttcttcgttagcaccttccatacgcggtgtgtataattcatctttaataggaacaacacgttcaattc

SEQ ID NO: 3969 - DNA, 257 bp, Staphylococcus aureus; identical to SEQ ID NO: 3910

SEQ ID NO: 3970 - DNA, 257 bp, Staphylococcus aureus; identical to SEQ ID NO: 3910

SEQ ID NO: 3971 - DNA, 318 bp, Staphylococcus aureus
gatcttttgtgatttcttctttcgattcacctttactaataatttctccagttaatggattttttagtgttggcgtcgttattgtcttctcacctttttgtccttctcttgttactttttctgtccctggtgctaaatcaggattaaatttacgttctttctcgaatggaatttcttctttttctacaatcgagtctccttttacaggtccatattttgttacgctatcgaccggtggtctaactacatctcctgtttctggattcttaattcctggtttacctggaacttcctctttctctcctgttggtaacttcg

SEQ ID NO: 3972 - DNA, 310 bp, Staphylococcus aureus; identical to SEQ ID NO: 3911

SEQ ID NO: 3973 - DNA, 454 bp, Staphylococcus aureus
gatctatgctcagcagcactttcaattgtaggttcgaaatcagctacttttttcaacaattcaatcgctttttcattagtaatcgttgtaaaatcattcgcagcagtcacttcaataccttgctctttcgcttgttttaaaattgaacaaatacgcgcatgtgcatattgagcatagtaaactggattgtcttgagattgctctttcgctaattccatatcaaaatcaaagtgactatcaggactacgcatagttaagaaataacgtgcagcgtcaacgccaacttcgtccataatttctcttaatgtaatcgcattaccagtacgtttactcatcttcacttctttaccattttccattaaacgaaccatttgcatgatttgaatttctaaacgattactatctacaccaaacgtttcaagagatgctttcaaacgattaatataaccatgat

SEQ ID NO: 3974 - DNA, 257 bp, Staphylococcus aureus; identical to SEQ ID NO: 3910

SEQ ID NO: 3975 - DNA, 383 bp, Staphylococcus aureus
gatcggacgtccatctggtaagtaaggcatatcttcttcaggaacaatcttagaaatgacacctttgttaccatgtcgaccacacatcttatcaccaacatgaattttacgtttttgaacgatatatacacgtactaattggtttacaccaggtgataatgtatcgtcgccttcttcacgattgaatacttttacatcaagaacgataccgccagcgccgtgaggtacacgtaatgaagtatctctaacttcacgtgctttttcaccaaagattgcatgtaacaatctttcttcggcagttaactcagttacacctttaggcgttactttaccaactaaaatatctccatcttttacttctgcaccaatataaacgataccac

SEQ ID NO: 3976 - DNA, 257 bp, Staphylococcus aureus; identical to SEQ ID NO: 3910

SEQ ID NO: 3977 - DNA, 138 bp, Staphylococcus aureus; identical to SEQ ID NO: 3920

SEQ ID NO: 3978 - DNA, 136 bp, Staphylococcus aureus; identical to SEQ ID NO: 3926

SEQ ID NO: 3979 - DNA, 318 bp, Staphylococcus aureus; identical to SEQ ID NO: 3971

SEQ ID NO: 3980 - DNA, 310 bp, Staphylococcus aureus; identical to SEQ ID NO: 3911

SEQ ID NO: 3981 - DNA, 360 bp, Staphylococcus aureus
gatctgtcacgtgaacttgtaataccgcttctcctgtttcagaaatcagcttaacttctgcaccttcatgaatgcctctatcttcagcaagctctggagaaatttcaacaaatgcacgtggcactttgtatttaatcattggtgtttgataagtcatattaccttcatggaagtgctctaacaatcgaccattgtttacatgaatatcataaatttcatcttgcttaaagtaattatcaaatgataatgggaataattttgctttaccattatcaaaattgaatccttctaagtatagaataggctcatcagtaccatcaggttgtactggccattgtaaactattgaatccttctaaac

SEQ ID NO: 3982 - DNA, 266 bp, Staphylococcus aureus
gatctaaatcattaaccttaataacaatcccatcaatatcataaggtaatgactctctttggcttgtccatttttcaatatactctaaaacaccatcgatattatttacacgcgctctatttttattcgttgtaaaacctaatttatctaactcatctaatgcttcactttgcgaacgcgcattgaaatcagtgaaatcattgacactatatataaatacgcttagctttcgttttgccgttaatttagaatctaactgtcttaat

SEQ ID NO: 3983 - DNA, 341 bp, Staphylococcus aureus
gatcttttcttaagtgatattcctcatctgctggtgttaacacttctgattcatcaatatagtcaacacccatcgcctctaatactcttgcttcagtgatatgaccaatacgtgctttagccatgactggaatagaaacagcattcattacttcttctacaattttagggtttgccatacgtgcaacaccaccagcagctctaatatcagaaggtactcgttctaatgccataactgctaccgcgccagcttcttctgcaattcttgcttgctcagcattaacgacatccataataacgccgcctttttgcatttcagccatacctcttttgactctgtct

SEQ ID NO: 3984 - DNA, 135 bp, Staphylococcus aureus
gatcattctcagaataacgtacttggaaatgatactgattatattctatttcaacggatttcactctatctaattgctttaaaatgtttggaaatacttcatttacagattcagaaatgacattcgcttccatat

SEQ ID NO: 3985 - DNA, 321 bp, Staphylococcus aureus
gatcatctatagctactgcaaaattgtacgttggaatgccatctttttttacgataacccagtcaccaataccatttgaatcaaatgaaatatttccttttaccatatcatcaaatgaatacgtttggttttgaggtactcggaaacgaattgatggttggcgtccttctgcttcaaattgttgacgttgttcttcagtcaaatgcgcatgttgaccaccatagcgaggcatttcaccacgagcgatttgcgcttcacgttcagcttctaattcttcttctgtcatatagcatttatatgctttatcttctgctagtaact

SEQ ID NO: 3986 - DNA, 228 bp, Staphylococcus aureus; identical to SEQ ID NO: 3953

SEQ ID NO: 3987 - DNA, 257 bp, Staphylococcus aureus; identical to SEQ ID NO: 3910

SEQ ID NO: 3988 - DNA, 216 bp, Staphylococcus aureus
gatcaaaaatagcaccttcaatcactatatttgatgtttgttctttaacttctgaaaaatcgccacccataacaccagctaatgcaattggagtttgtccattagtaatgacaatatcgctcgttaataattcacgttctgtatcatctaatgttgtcattttttcgccttcattagcttgacgaacaacaatttgttgtgaaccaatcgcatctt

SEQ ID NO: 3989 - DNA, 213 bp, Staphylococcus aureus
gatcactgttaaagtcagtcattttaaacattctttcaatagcattaccacttaccacataagcaccatcatcatctcttgaaattgtaaatttatcttgtgacggtgtatgtttatataatactcggttaatgccaactgactcctcttcttcaactgtgaagtcaacatctttatattcttctaatttatctgctattgcatataataatt

SEQ ID NO: 3990 - DNA, 479 bp, Staphylococcus aureus; identical to SEQ ID NO: 3937

SEQ ID NO: 3991 - DNA, 249 bp, Staphylococcus aureus; identical to SEQ ID NO: 3967

SEQ ID NO: 3992 - DNA, 226 bp, Staphylococcus aureus
gatcgttctactgtcgtacctcgctttaaagccaagcgcacttttgaacgatttcggcgttcaaaactatttaataactcatcatcatttttatcaattggtgtaatcatagtcatacgtggttggatgtagtcttttgataaaccttctttaaatcctttatgtttaaaaccaagcgctttcaaattttgcaaagcatctgtacctttatcaacttcaacatcag

SEQ ID NO: 3993 - DNA, 310 bp, Staphylococcus aureus; identical to SEQ ID NO: 3911

SEQ ID NO: 3994 - DNA, 243 bp, Staphylococcus aureus
gatcaattaactcaacaaatttaaatgttccattgtcatattcaaatttcaggatattacaattaccgatattatgctttaatgcttcatctagtttaaggcaatatcttaaaaatactcccattattgttccatgactcacgactaatgcattattctttgtttgagacataatgtcatgtaaagttttcacaatgcgttcttcaacttgttgccttgcctctcctttgaaaggaacaattc

SEQ ID NO: 3995 - DNA, 257 bp, Staphylococcus aureus; identical to SEQ ID NO: 3910

SEQ ID NO: 3996 - DNA, 399 bp, Staphylococcus aureus
gatctttagcaaatccagaaattactttcgctgcagctacagcatcttcacttgaagttgcaatagcagtaggacctgttaagaattcatctaagccttcgataccagctttttcagctgcacgacgtaccatagtgtttttgtatactttatactcaacaccagcttcacgtaattgtgaacgtaagtcagtaacttcagctactgttaatccacggtagtcaacgattactgttgaaactgaatttgatagtacctcagcaatttcatcaactagttgttttttagcttcaatgatagcagacattcagacacctccatttaaatttttggtgctttttttaaaattaataaaaaaagcactttctacccacggcaaaaagtgcttgaaagatcata

SEQ ID NO: 3997 - DNA, 257 bp, Staphylococcus aureus; identical to SEQ ID NO: 3910

SEQ ID NO: 3998 - DNA, 276 bp, Staphylococcus aureus
gatcatcacgcgtttgccatggtatgccaagtgactgcgataaatctgcggcaccttcgactatcatgtctaaaccttcgacttgtgctatatcgtcaatggccataaccccttcaacatcttctatcatggcaatcaccataatatgctcattagccatctccattgcatcaagtaatggtgtacgtccaaatcttgccatgcgaccaccattcaaacttcttaatccttgcgggtaataacgacttaatttcacaatatgctcaactgtctcac

SEQ ID NO: 3999 - DNA, 60 bp, Staphylococcus aureus
gatcgatacctaaacgctttagtgaacctttaactgcctctttaatataggatttactcg

SEQ ID NO: 4000 - DNA, 379 bp, Staphylococcus aureus; identical to SEQ ID NO: 3961

SEQ ID NO: 4001 - DNA, 257 bp, Staphylococcus aureus; identical to SEQ ID NO: 3910

SEQ ID NO: 4002 - DNA, 253 bp, Staphylococcus aureus
gatcatattttgatgtggagcatgtcctttattaaacttaataacccattggtacccgtctccagtttgtttcgctgtcataagagcaatttcctttgagtcagaggccttcaatgtattccatggtgtagttggtaaattatatggcgcccctttactagaagcattgatatatgtaccaacaggatagcccgaaccatcattagcattttcaacataatatgatgaatttgcattttgatagtctgatact

SEQ ID NO: 4003 - DNA, 257 bp, Staphylococcus aureus; identical to SEQ ID NO: 3910

SEQ ID NO: 4004 - DNA, 138 bp, Staphylococcus aureus; identical to SEQ ID NO: 3920

SEQ ID NO: 4005 - DNA, 246 bp, Staphylococcus aureus; identical to SEQ ID NO: 3964

SEQ ID NO: 4006 - DNA, 318 bp, Staphylococcus aureus
gatcattggtacaagctcaatcatatcgtcttcatctgattgagcaccttcttcagctaagataacatactcttttttgaattcaggatgataaaattctaaaacttttcggtataaaacttcatttccctcttcatcgaataaagttaataattcttcttcgttattaatttctagttgtgaatcatgattatgttcagtcatagtaaaatctccttttaatgtagtgaatctaaatagccttgtaaaataaataccgctgccattttatcaatcacttgttttcttttttgtcttgaaacatctgcttctaataat

SEQ ID NO: 4007 - DNA, 409 bp, Staphylococcus aureus
gatcccattagactgtaagaaaatgtaacatctcccttagctctagtcatagcaacataacaaacaaatgcttcatccatctgtaaaatatctgatgttggacttaactcgacattagcctgctgttcaaagtatttcttttcttcatctgtaatcaagcttgacgcagttactggttgtggcatcgttccatcattcatacctactaagtaaacatgttgcttattatcgactttagccaaatccatcgtaccaatacttacttggtccaatgtttgcggaatcataacaaattctaattgttctaaaccaatatcaaatacttctaagaaacgttccatcgacattggttcatctccaaatactagaactaagtcatcaaggatttgaattaagccattccatattt

SEQ ID NO: 4008 - DNA, 318 bp, Staphylococcus aureus; identical to SEQ ID NO: 3935

SEQ ID NO: 4009 - DNA, 318 bp, Staphylococcus aureus; identical to SEQ ID NO: 3955

SEQ ID NO: 4010 - DNA, 309 bp, Staphylococcus aureus; identical to SEQ ID NO: 3946

SEQ ID NO: 4011 - DNA, 205 bp, Staphylococcus aureus
gatctgttgaacagtcatcaactacaaccacttcaaattcagttttcggaaaatcttgtttcgcaaggctattaagtaattctgttatatacttttctgaattgtatgttggaactattactgaaaatttcatcattatacctctcccactttgactactatataaacttagctaccaaataaatttctgactaaacgctcactt

SEQ ID NO: 4012 - DNA, 374 bp, Staphylococcus aureus
gatcgaaggggggaagtatatgtttagttcaatatatttagaaagtcgtttgtagttattgtttgtcccatcaatgggaatacattatctattggaaattgatgtagcgtttcgttttgtgcactcatcatatctgtaacaaaaaactgattgtagtttaattgataggcatctcgcgctgtcgtatctacgccaatatgcgttgcgacaccaccaagaacaatcgtatcaattcctcgacgtcgcaattgtaagtccaaatctgttcctacaaatgcactaaaatgtcgtttgtctatgacaaaatcgtcatctctcttgtctaataaatgatggaaacgactgtagtcgtcgccttcttttggtggtaatga

SEQ ID NO: 4013 - DNA, 123 bp, Staphylococcus aureus
gatcccctaccgttgagcttggtgctttttgaaccataatatctcctgtctctgcatgcttaaatgcatgaacaactagttctaccgcatcttctaagctcattaaaaatcttgtcatatcag

SEQ ID NO: 4014 - DNA, 315 bp, Staphylococcus aureus
gatcaagctcttcagctgtttcatacacttgtcctaagacgtctcgaatgtctttaaagccatcgctttcacgagaagatgatagctctaaaattcgacgttctgcatcacttaaaatcgcatctagttcaagttcatcattatatccatcattggcaatactatctgcagtttgaatcaatctacgttttaatgcatgcttagaaacgatatcagtataatactgaacatttcgcgtcgttggtacatttgtagataactctgcaagatattgcgggccacccgcttcattcaacgtaccttccgtcgataatt

SEQ ID NO: 4015 - DNA, 247 bp, Staphylococcus aureus
gatctccagttggaatacagaatcgtttgaacgtactcacattcaaaatgaactggcgattcttttacacgatatcctggagcttctatacatttttcctttgttacacctgcaaaattaaattcatcctcttctggtggcaatgctttcgatgataaattaactgcttctcttaaatcatacgttgccatattccacacaaaccaacctgtctcttcagcatttttcactgtatctttacgttcgt

SEQ ID NO: 4016 - DNA, 213 bp, Staphylococcus aureus
gatctgcatattctgtgattttaagtacccattgtttcatcggcttacgataaactggatgtccaccacgttcagagacaccatcaatcacttcttcgttagataaaacagtgcctaatgctggacaccagttaactgcaacttcatcaacgtatgctaaacctttgttatataactgtatgaaaatccactgtgtccatttatagtattctg

SEQ ID NO: 4017 - DNA, 265 bp, Staphylococcus aureus
gatcagaagtacgacctaattttctgtaacccatgagttaacctcctttatcaatcttcttttcttaatcctaatcctaaatcttctaatttgtatttaacttcttctaaagatttacgacctaaattacgcactttcatcatgtcagcttcagatttgtcagctaactcttgaacagaattgattcctgcgcgttttaagcagttatatgaacgtacagataagtctaattcttcaatagacatttctaatactttttcttttt

SEQ ID NO: 4018 - DNA, 136 bp, Staphylococcus aureus; identical to SEQ ID NO: 3926

SEQ ID NO: 4019 - DNA, 257 bp, Staphylococcus aureus; identical to SEQ ID NO: 3910

SEQ ID NO: 4020 - DNA, 306 bp, Staphylococcus aureus
gatctgctaacacttcgtctgtttcaacatttttaataattgtaccaggtggaacttttaatactaaatcttccgcatttttaccatgcatattactactttggccattttcacctttgcttgctttaaaatgacgttgatatctaaaatctaataacgttcttaaaccttcatccacttcaaatacgactgaagcacctttaccaccgtcaccgccagctggtccaccaaatggtacatatttttctcttctgtatgcggtaataccattaccaccatcaccggctttaagagatattttgactt

SEQ ID NO: 4021 - DNA, 215 bp, Staphylococcus aureus
gatcactgatgagtcagtgatcttatgcagataaaactttacggcctttacgacgacggcgcgctaaaactttacggccattttttgtgctcatgcgttttctgaaaccatgaactttactatgtttacgtttatttggttgataagtacgttttaccatgcaaaacacctccatctttatacagttatctaatataccagattatgcagactct

SEQ ID NO: 4022 - DNA, 219 bp, Staphylococcus aureus
gatccatgaaatcttgtcttacttcaatacgtccatcttcatcattttcttctgaatcaatcacttcagtatgaattgcatttcctggtgtttcatcatttacaaccgcttcacgttgttgttcagtaccatcttcagatacagttgaagtagattgctcatcttcattcgtttcatcttctgcatcttcttttactttagcaaccgttgaaacaaatt

SEQ ID NO: 4023 - DNA, 77 bp, Staphylococcus aureus
gatccacctaatactttgattgtaagaacttcacgagcaccagagttgtctgctactttcaagcgtgtttcttgttg

SEQ ID NO: 4024 - DNA, 85 bp, Staphylococcus aureus
gatcctattgaaccacctgcacccgtaactaaaatagttttattcgtcaattcatttgatatcatatccatatctaattcaacag

SEQ ID NO: 4025 - DNA, 395 bp, Staphylococcus aureus
gatcaataaataaattaatttctagttcagccgttacatcaaccttatcttcaatatcatttgtaaatgtatatctaatctttccaccttctaaaacttcacctgtcgccattacgactgaaccatttttaatttctggtacttttctagcagttgatacgccatgcgtatttacattatttgataaagtaaagtcaaagtagtcaccttgatgtaaaccattctcaaatttcaacttatattttagtaccgctcgttgtcctgcatgaggttctactttatttgtattgttatgcccctcaatagaaccaatttctactgtaactttacttgttacatctgtacccgtttccactttcgcgttactagcttccttagcttccgctacatctgct

SEQ ID NO: 4026 - DNA, 318 bp, Staphylococcus aureus
gatcttttgtgatttcttctttcgattcacctttactaataatttctccagttaatggattttttagtgttggcgtcgttattgtcttctcacctttttgtccttctcttgttactttttctgtccctggtgctaaatccggattaaatttacgttctttcttgaatggaatctcttctttttctacaatcgagtctccttttacaggtccatattttgttacgctatcgaccggtggtctaactacgtctcctgtttctggattcttaattcctggtttacctggaacttcttctttctctcctgttggtaacttcg

SEQ ID NO: 4027 - DNA, 121 bp, Staphylococcus aureus
gatctatggcagattggctacttatttcttttatagccatttacttccaccttacttttgttctttttttgataattcaacaagttctttagccatttcttcagaagaaattaagccacga

SEQ ID NO: 4028 - DNA, 246 bp, Staphylococcus aureus
gatcaggtcgaacaaagatatgtgaatcatttaaagtcataccacgaacacgttgtaatcctgatacagcaccacttgcttcatatctatgcatcgttcctagctcagcgatacggataggtaattcacgatatgaatgtggtttattcgcataaatcatcatatgatgtggacagttcattggacgtaataccatagattcagtttcatctaactgcattggtgggaacatatcttcttgatagt

SEQ ID NO: 4029 - DNA, 240 bp, Staphylococcus aureus
gatcactttttaaggcatctttaatcttcaatgttttaaccacggattcaggcaagacatcttctctaattaaataaaactttttataatctttattgtccatcatgtttcgctcctattcaacgaattcaaattctccgccaagaattctaacgatatcaccatttttacaaccacgttctctaagcgcatcatcaatacccatcgaacgcatttgacgagcaaatcgacgtactgctg

SEQ ID NO: 4030 - DNA, 317 bp, Staphylococcus aureus
gatctgcatttactcctaataattcaataatgaattgggtacctgaaattactttactttctctaatttcatacttgccatccaccatctcaaatacatcaaatttagcgttcgtttttgttgtattaccttctttgatataagggccttgtctatgcactttataaattcgatgatttaattgaaattcaaatgttactgacatcggctgtttaccatcagcgaaatgacttctcaaatcattttcttctctttgttcagttgatgctttaccaaacaaggcataagtcattgcatcaaaaatcattgttttaccc

SEQ ID NO: 4031 - DNA, 340 bp, Staphylococcus aureus
gatctccgctattgtcttgagattgtgttgtttccttaacttgaggtttcgcttcttccttaactacctcttctttaactgtttctatatttgctggttgtgcagtttgtggtgcttgtactgcttttggtgcttcttcagttgttacttgtgttgcgtttgacggttgttctgttactgttgcgttatatgattgagtttcttctatatgattaacgttagttgcagttgtttgtgtttcacttgttttattatcagtagctgaattcccattttcttctactgtagttgtcttttgttctgatgctgcagcttctttgtcttgtcccatcccaacaac

SEQ ID NO: 4032 - DNA, 222 bp, Staphylococcus aureus
gatctttacgaacgtaaatttgaatttgtccagctaagtcctgaacgtgtgcaaatcctgctttacctttaccacgcttagtcattaatcgtccagctatagcgacatgactatccgcttctttttctaccaattcttctttagaatactggtcccactcttctttcaaatcactagataaacctgaacggtcaaatttagaaccaaacgggtctataccaa

SEQ ID NO: 4033 - DNA, 265 bp, Staphylococcus aureus; identical to SEQ ID NO: 4017

SEQ ID NO: 4034 - DNA, 121 bp, Staphylococcus aureus; identical to SEQ ID NO: 4027

SEQ ID NO: 4035 - DNA, 318 bp, Staphylococcus aureus; identical to SEQ ID NO: 3971

SEQ ID NO: 4036 - DNA, 318 bp, Staphylococcus aureus; identical to SEQ ID NO: 3971

SEQ ID NO: 4037 - DNA, 138 bp, Staphylococcus aureus; identical to SEQ ID NO: 3968

SEQ ID NO: 4038 - DNA, 458 bp, Staphylococcus aureus
gatcgttatctatattttgtgattcttgacgtctttttttctttctatgaatcaagtcatcatttgaatcattatcttcgccgaataatttatcaaaccagctcatattttcactaccttccttaattattcaaaaaatgcttgtccaatttcatagctgtcatttaataccataatacctttttcttcaggtgcattaggtaaattcaattctttcattgaacaaatcataccgcttgaggcaacaccacgtaattcagcatctttaattaccataccgctaggcatcactgcacctactttagcaacaacaactttctgtccagcttcaacgttaggcgcgccacatacaatttgtaatgtgtcatttccaacgtttacatttagtacacttaatttatctgcatcaggatgtttgtctttagtttcaacgtagccaactacaaatttcggtgata

SEQ ID NO: 4039 - DNA, 381 bp, Staphylococcus aureus
gatcattttggttcacttcagcagacactgtagcgccaacatttacttggccaaattgtactactcctttatgcaagttttgaccatttggtgctttggttacttcactaacagcaatttcaaaattgtcattataaacaatacctgtatccgcaacttgtccaccactgattgcataaaatggtgtttccgttaacatgaagtatactgtttcacccgcttcaacttgtgaaacttcttcaccattgtatatcaagtgtgttagtgttgtttgagctgtcgcagtatcataaccaacaaaagtacttgcagatgtaatatttttcaatacttcactttgaacttgcattgattgagaattttgacgtgcttgacgtgcac

SEQ ID NO: 4040 - DNA, 387 bp, Staphylococcus aureus
gatcttcttcctcttcaccaaaatgagaaacaactgcatctaacaagtcaccaagacctaaaccatgtgaccctgatatcggatacggttcaccaaatcctaatgaatagaaatcatacacgtctgtacgcatttccatattatctactttgttaaccgctaatacgaccggttttttagatttgtataaaatttgagcgaccatttcatcgctttgtgtcaatccttcacgcacgttaaccataaaaataataacatccgcttcatctatggcgatttctgcctgcgctctaatttgtgtttggaatggtgcatcaccaatttcaataccacctgtatcaataatattgaaatcatgtgttaaccattcacctgaagaataaatac

SEQ ID NO: 4041 - DNA, 145 bp, Staphylococcus aureus; identical to SEQ ID NO: 3954

SEQ ID NO: 4042 - DNA, 310 bp, Staphylococcus aureus; identical to SEQ ID NO: 3911

SEQ ID NO: 4043 - DNA, 170 bp, Staphylococcus aureus
gatcaattcaccatataactgttcagtatctttatttttagactgctcatattcttcaatcaacttcgctaatttattttgatatttgtgcaactgctgttgaacaaatcgaactaaatcattcgcacgttgtttaacgcgttcacgttcgccacgcgcatcataaaaac

SEQ ID NO: 4044 - DNA, 341 bp, Staphylococcus aureus; identical to SEQ ID NO: 3983

SEQ ID NO: 4045 - DNA, 327 bp, Staphylococcus aureus
gatcgttcttcgttttatcatccatcaatactcacaccctttaataagatggtaaatgggcacggaatctttcaataaatttctctccacgctcttcaaaagtactatattgatcccaactcgcacaagcaggtgacaataatacaacatcatttggttctataatatcttgtactttatcaacagcgtcttcgacattgttcgcttcaatgaccgatttcccttgactattacctagtttagcaaacttagctttcgtttgtccgaatacaaccatcgcgcgaacattttccatataaggaatgagttcgtcaaattcattccctc

SEQ ID NO: 4046 - DNA, 321 bp, Staphylococcus aureus; identical to SEQ ID NO: 3985

SEQ ID NO: 4047 - DNA, 84 bp, Staphylococcus aureus
gatcttttgcttgtaattcatccaattcttgcgcttttttgattgcattttctttatccagcgctagaaaagacttaattgttg

SEQ ID NO: 4048 - DNA, 378 bp, Staphylococcus aureus
gatcttctgctaaagctaatcctactgacatagcaaaaccttgtccaagtggtccggtagtaacttctacaccatctgtatgtctgtattcaggatgacctggtgttttagaaccccattgtctaaattgctttaattcttctaattctaaactaccagaaacatgtaacaagctatacaataatgctgaaccatgccctgcagataatacgaaacggtctctattgaagtaatctttagattgtggattaaaattcagatgacgtgtccacaaagtgtaagccattggggcagctcccataggtaatcctggatgaccagaattcgctttttcgattgtgtcgatacttagtgcacgtagcgtatcaacagctaatt

SEQ ID NO: 4049 - DNA, 318 bp, Staphylococcus aureus; identical to SEQ ID NO: 3955

SEQ ID NO: 4050 - DNA, 318 bp, Staphylococcus aureus; identical to SEQ ID NO: 4026

SEQ ID NO: 4051 - DNA, 210 bp, Staphylococcus aureus
gatctaaaatatcatcaagtttatctgagttatagaaactttcgtatttttcttggaattctactaaaaatgctttaactatttcagcaaggtcacctttaaatttaccataaccttcgccctcatattttgcctcaatatctttaattggcatgtctgttaatccagcgtatattgaaattaaatttgttatacctggcttgttgtcac

SEQ ID NO: 4052 - DNA, 156 bp, Staphylococcus aureus
gatccagccttcaaccgcacctttaccagcacccatacgtacttctaaaggttttttagtatatggtgtatgtgggaagattttaatccaaactttcccgccacgtttcatgtaacgtgtcattgctatacgagcagattcgatttgacgagatgt

SEQ ID NO: 4053 - DNA, 341 bp, Staphylococcus aureus; identical to SEQ ID NO: 3983

SEQ ID NO: 4054 - DNA, 246 bp, Staphylococcus aureus; identical to SEQ ID NO: 3964

SEQ ID NO: 4055 - DNA, 240 bp, Staphylococcus aureus; identical to SEQ ID NO: 4029

SEQ ID NO: 4056 - DNA, 408 bp, Staphylococcus aureus
gatcattctatctaattaatttgtgtacaattttgataacttattttcccttagtttactactctagattatcttttaataacttagtactttcagcttttgactgctcactaggaatgaagtagtacaatccgtcactttgaatgccgccttgaccactcaattgatgtttattaatcgtgtcattagcatctttataattgcttctaatcgtattcaaatcacctaatgttaaatctgttttaacattattttgaatttcattcattagactattaaaatgtgtaatcgatgatgggcttgcaatcttattggccatcgcttcaagcacaatttgctgacgttgttgtcgaccaaagtcaccaccagcaccttcttctttacgacttctaataaacttcaatgctt

SEQ ID NO: 4057 - DNA, 257 bp, Staphylococcus aureus; identical to SEQ ID NO: 3910

SEQ ID NO: 4058 - DNA, 152 bp, Staphylococcus aureus
gatccaactttactaaaaatagttcagcatctccatcttcatgcaacgcatcataaatattttcaaagtaactaatatcacgcgttaagaagccatcgcgttccccagtgattttcattaactcagcaaatgtttttaaaccttctctatca

SEQ ID NO: 4059 - DNA, 216 bp, Staphylococcus aureus
gatcccaactcgcacaagcaggtgacaataatacaacatcatttggttctataatatcttgtactttatcaacagcgtcttcgacattgttcgcttcaatgaccgatttcccttgactattacctagtttagcaaacttagctttcgtttgtccgaatacaaccatcgcgcgaacattttccatataaggaatgagttcgtcaaattcattccctc

SEQ ID NO: 4060 - DNA, 111 bp, Staphylococcus aureus
gatcgttcttcgttttatcatccatcaatactcacaccctttaataagatggtaaatgggcacggaatctttcaataaatttctctccacgctcttcaaaagtactatatt

SEQ ID NO: 4061 - DNA, 553 bp, Staphylococcus aureus
gatcaatcgtagcgaatggatagttcgctgctaaagcacctgcttttgttattgcattaaataatgttgatttaccaacgtttggcaatccaacgatacctgctgttaaagccattaatcattctcctatctttgtgtatcatcatgagattcgatgatttttttaagttttttatcaaacgtttgacgtggaatcataatacttctttgacaattttcacatttaattcttatgtctgcacccattctaataatcttaaaacggtttgttccacacgcatgttgttttttcatttctactatatcatttattccatattttgacgccattaaatatgacctccatgtattataaactactaaacaccgttttcactatgattataagcagtcataattggttgaggtgttttaataccttcttgtaaaaacattttttgtacttctttgcgaataattcgagctccagcaaatccttcacctggaattgtttctgcagatattctcaatattactcttgtatcttcaatagcatcaataccaataacaaccg

SEQ ID NO: 4062 - DNA, 138 bp, Staphylococcus aureus; identical to SEQ ID NO: 3968

SEQ ID NO: 4063 - DNA, 213 bp, Staphylococcus aureus; identical to SEQ ID NO: 3989

SEQ ID NO: 4064 - DNA, 318 bp, Staphylococcus aureus; identical to SEQ ID NO: 3955

SEQ ID NO: 4065 - DNA, 168 bp, Staphylococcus aureus
gatctaaatgtaactccatgttacctgttcctttaaattcttcgtaaatcatatcgtccatacgtgaacccgtatcaactaatgcagttgcaagtattgttaaacttccacccgcttcaatatttctcgctgcaccgaagaatgcttttggtttgtgtaaagatgcag

SEQ ID NO: 4066 - DNA, 111 bp, Staphylococcus aureus; identical to SEQ ID NO: 4060

SEQ ID NO: 4067 - DNA, 249 bp, Staphylococcus aureus; identical to SEQ ID NO: 3967

SEQ ID NO: 4068 - DNA, 318 bp, Staphylococcus aureus
gatcttttgtgatttcttctttcgattcacctttactaataatttctccagttaatggattttttagtgttggcgtcgttattgtcttctcacctttttgtccttctcttgttactttttctgtccctggtgctaaatcaggattaaatttacgttctttcttgaatggaatttcttctttttctacaatcgagtctccttttacaggtccatattttgttacgctatcgaccggtggtctaactacgtctcctgtttctggattcttaattcctggtttacctggaacttcctctttctctcctgttggtaacttcg

SEQ ID NO: 4069 - DNA, 138 bp, Staphylococcus aureus; identical to SEQ ID NO: 3968

SEQ ID NO: 4070 - DNA, 318 bp, Staphylococcus aureus; identical to SEQ ID NO: 3955

SEQ ID NO: 4071 - DNA, 257 bp, Staphylococcus aureus; identical to SEQ ID NO: 3910

SEQ ID NO: 4072 - DNA, 454 bp, Staphylococcus aureus; identical to SEQ ID NO: 3973

SEQ ID NO: 4073 - DNA, 318 bp, Staphylococcus aureus; identical to SEQ ID NO: 3955

SEQ ID NO: 4074 - DNA, 276 bp, Staphylococcus aureus; identical to SEQ ID NO: 3998

SEQ ID NO: 4075 - DNA, 367 bp, Staphylococcus aureus; identical to SEQ ID NO: 3929

SEQ ID NO: 4076 - DNA, 383 bp, Staphylococcus aureus; identical to SEQ ID NO: 3975

SEQ ID NO: 4077 - DNA, 479 bp, Staphylococcus aureus
gatcttcagggtttacaatgttcaacatactagcctccaagacgcttgtaccgctagatgttaaaataagtacatcattttgactcccaaatattggctttagaccttgaaatgcttgttgtgcgatgtcttcaaaatctttagaacgatgaccaaccataggtgcttgaatttctctcataatggcatcaggtacaggggttgggccaggtgttaataacaacggttgatgataatacatttatatgcctcctataaataagatttcactattttagcaaattttctgaaaatttaaaagcctaaaaaagtgataacgctatattgtcgaacaaacgttatcacttaacgattttatttggcctgaatgatgggatagatttttatgtccacattatttcttacagcatttgaaatcatgcaattattatctgcaattgttatcaattttggtaatcgcttttctaattgtgctattt

SEQ ID NO: 4078 - DNA, 294 bp, Staphylococcus aureus
gatcaggcgttgaaacaacacctagatttggtttaatcgttgtaaaatgatatgccccaattttaggcttagcttttgaaacgatagataataaagtcgatttacccacactagggaaacctactaatcctacatcagctaataatttcaattctaaagatacatctaattcctcacctggttcacctttttcactgaagtcaggtgcagggtttctaggtgttgcaaaacgtgaattacctcggccacctcgaccgcccttcgctactacagctctttgaccatcttcaacaa

SEQ ID NO: 4079 - DNA, 145 bp, Staphylococcus aureus; identical to SEQ ID NO: 3954

SEQ ID NO: 4080 - DNA, 228 bp, Staphylococcus aureus; identical to SEQ ID NO: 3953

SEQ ID NO: 4081 - DNA, 254 bp, Staphylococcus aureus
gatcaaattcaaatttactttcttcaattttcttccaacttcttggatgcgttgaataaatcacaggcattttatactttttggcaatatcatttatcgcattcattaatgatttaaaattcttttcattatcgatattctcttctctatgcgcagatactaaaatgtattgttgcggttctaatcctagtttatttaaaacgtcactgtgattaattttatctcgatgcgcttctatcacttctgtcatcggt

SEQ ID NO: 4082 - DNA, 306 bp, Staphylococcus aureus; identical to SEQ ID NO: 3916

SEQ ID NO: 4083 - DNA, 213 bp, Staphylococcus aureus; identical to SEQ ID NO: 3989

SEQ ID NO: 4084 - DNA, 138 bp, Staphylococcus aureus; identical to SEQ ID NO: 3968

SEQ ID NO: 4085 - DNA, 152 bp, Staphylococcus aureus; identical to SEQ ID NO: 3936

SEQ ID NO: 4086 - DNA, 318 bp, Staphylococcus aureus; identical to SEQ ID NO: 3935

SEQ ID NO: 4087 - DNA, 282 bp, Staphylococcus aureus
gatcaatttcatctttagccgcttgtttcttcacaacttttggtgttaccgcattaatcgctgcttctgcatttgctttagcttcatcaacttgtgcgttagtagttgctgctgaaatggcttgatttgctttaccattttcagtatttgcttcagcatcagctgcttgtttttcttcatctgttgcatctggcgtagcttgaatctcttgcaatttgttatttaaaattgctgtgatttcattacgtgcagttgcttttttattaactgttggtgttactt

SEQ ID NO: 4088 - DNA, 154 bp, Staphylococcus aureus
gatcagcataaatgatgccgtctgctacaacatcatcttcttgtccaccaacagtacctaattcagcttctacagaaacacctttttcatgagcgtattcaacaacttttttagttgttgctacgttttcttcgaatgggctgtgtgaagcatc

SEQ ID NO: 4089 - DNA, 318 bp, Staphylococcus aureus; identical to SEQ ID NO: 3971

SEQ ID NO: 4090 - DNA, 246 bp, Staphylococcus aureus; identical to SEQ ID NO: 3964

SEQ ID NO: 4091 - DNA, 225 bp, Staphylococcus aureus
gatcgaaatcaatatttgtcataattgcgtaatcaggtttataacttaaaaagtgacgtctatattcacatgcctcaaaagcgaaataatcactttcaggcaatcccatacctgtgccatcaccaattaaaaatgaagtctttttatcaccattcataacatgtgataataaacctgttgtagaagttttaccatgtgcaccagttacagctactgaagtatatt

SEQ ID NO: 4092 - DNA, 256 bp, Staphylococcus aureus
gatcacagttagtgtcaacgatacctacgataggaatatttaatttacgagcttcagcaattgcattacgctctttacgtgggtcaactacgaataatgcttgaggcattgatttcatatcacgaattccgcctaagaatttgattaaacggtcgtattcttttttaagttctactacttcttttttaggtaatacttcgaataaaccatcttcttccattttttcaatttcagaaatacgtttgattcgttttga

SEQ ID NO: 4093 - DNA, 186 bp, Staphylococcus aureus
gatcaccattcaatgcatttttagcacttgaaacattttgaatagccgcttcaacatcttgtttagacgtatttgcaccttgcgttttattcagaattgcttcagctctgcttaccgcatttgtatacgcatcacgtttagctttatctgcatcagtaaatttaacactttgtttaactgtgtttt

SEQ ID NO: 4094 - DNA, 174 bp, Staphylococcus aureus
gatcacgcatattttgtttaatttcagaccattctatgcgtttttcttgtaaaccagcctctactatttcacgtactttctcttctgcttcacgtaataagtcttcactttcacgtacatatacaaacccacgagattgaatttcaggtcccgcagctatacgtctatttttag

SEQ ID NO: 4095 - DNA, 105 bp, Staphylococcus aureus
gatccacgacaccttttgctaaatagaaatcaaccgtttctttcttaccttgccattgattgactacataatctccagttaaaataccacttaaatattcaactt

SEQ ID NO: 4096 - DNA, 318 bp, Staphylococcus aureus; identical to SEQ ID NO: 3935

SEQ ID NO: 4097 - DNA, 234 bp, Staphylococcus aureus
gatccacattttcttcttcgctaaatgtaattgcaattttagataacaagtctaaatgttcgccatctttaccagcaattcccacgacaactttaactacttcgccatcccagtcaacgccttcagggatttgtaataatgttaaacctgagtgaatcacatttgttttagcttcatctgtgccatgaggaattgctaagccatttcccataaatgttgatacgacttgctcac

SEQ ID NO: 4098 - DNA, 466 bp, Staphylococcus aureus
gatcaccttgagaaccatgccctgaagtatggatgttagaaatcttgctatggataacatctgcaccagctttatacaaggaattaatagttctgttaatactttttgtattacctgggataggtgatgaactaaatacaacggtatcttcaggtataattttaatttgcttatgagtaccattagcaattctagataatgctgccattggttcaccttgtgaaccagtacatagtatcaataactcatgcttcggtacggtattaattttattaggttcaataaatgtttcaggtggtgctttaatataaccaagttccatacctattttaatattgttttccatcgaacgaccgaacgtaacaattttacggttatttttgatagcagcttcaactgcttgttgaactcggtaaatattagaagcgaaggtagcaaatataatacgacctttacaattacggaa

SEQ ID NO: 4099 - DNA, 342 bp, Staphylococcus aureus
gatcaatattatcacgcgttattgttgaaactggaataactggcacatcttcgccaatttcttctttaaacaagtttaaattatcttgtgattcaggtaaatccatcttgttagctactacgatttgaggtctatcttctaaacgttgctcgtacgcagctaattcttgattaatgactttataatcttcaataggttctctaccttcagaaccgctcatatcaatcatgtgaacaataacttttgttctctctacatgtcttaaaaattgatgtcctaatccaacgccatcagatgcaccttcaattaaacctggtaaatctgccataacaaaactacgtt

SEQ ID NO: 4100 - DNA, 227 bp, Staphylococcus aureus
gatcgaaatcaatatttgtcataattgcagtaatcaggtttataacttaaaaagtgacggtctatattcacatgcctcaaaagcgaaataatcactttcaggcaatcccatacctgtgccatcaccaattaaaaatgaagtctttttatcaccattcataacatgtgataataaacctgttgtagaagttttaccatgtgcaccagttacagctactgaagtatatt

SEQ ID NO: 4101 - DNA, 265 bp, Staphylococcus aureus
gatcagaagtacgacctaattttctgtaacccatgagttaacctcctttatcaatcttcttttcttaatcctaatcctaaatcttctaatttgtatttaacttcttctaaagatttacgacctaaattacgcactttcatcatgtcagcttcagatttgtcagcgaactcttgaacagaattgattcctgcgcgttttaagcagttatatgaacgtacagataagtctaattcttcaatagacatttctaatactttttcttttt

SEQ ID NO: 4102 - DNA, 318 bp, Staphylococcus aureus; identical to SEQ ID NO: 3971

SEQ ID NO: 4103 - DNA, 256 bp, Staphylococcus aureus; identical to SEQ ID NO: 4092

SEQ ID NO: 4104 - DNA, 454 bp, Staphylococcus aureus
gatcttcatcacaaaatgccacatgttgattcaactttaatagacttaaaccaacttgatgtacgtcattgttcggtcttgcatgtgcaattgcaatttcaggtgcgataacgatataaggtccaagttcattaacgctatcaatcattgcttgaacatagccttgttcaataatttgttcttgtagtaatggctgagaagctatagttatagcttcagtccaatcatttacttgttcttttacaatgatgcgtgttgttgacaaaatgtctaatgacacgttattaagcctcctttgtcatagttaaagcaatgtgttgtttaattttaaaaatattcccatctaagaaatcttgtcgatataagtcgttgcttaagcattcgcttaactgtcccaatgcctttaaatgtgcattggggtggtccgttgctaatgtaattacaaggtgaacgg

SEQ ID NO: 4105 - DNA, 318 bp, Staphylococcus aureus; identical to SEQ ID NO: 3971

SEQ ID NO: 4106 - DNA, 257 bp, Staphylococcus aureus; identical to SEQ ID NO: 3910

SEQ ID NO: 4107 - DNA, 219 bp, Staphylococcus aureus; identical to SEQ ID NO: 4022

SEQ ID NO: 4108 - DNA, 249 bp, Staphylococcus aureus; identical to SEQ ID NO: 3967

SEQ ID NO: 4109 - DNA, 213 bp, Staphylococcus aureus; identical to SEQ ID NO: 4016

SEQ ID NO: 4110 - DNA, 309 bp, Staphylococcus aureus; identical to SEQ ID NO: 3946

SEQ ID NO: 4111 - DNA, 194 bp, Staphylococcus aureus
gatccaaaagattatagcaataggtcttgataaataatgtcgtgtcatttgagctaagtccatacctgttgctattcctaatctcactgtcatgctttgaagtaacattgctgataaacttgaaataagaattacgaatagcaaagtatagccatattgggcgccaccttgcattgatgttatccagtttccgg

SEQ ID NO: 4112 - DNA, 318 bp, Staphylococcus aureus; identical to SEQ ID NO: 4068

SEQ ID NO: 4113 - DNA, 204 bp, Staphylococcus aureus
gatctttagaaacagtagtgacacgtttaccttctacaattaaatctttccagtaactgtcatcctttgttttcatcactacatatttttgaccatttaaagttgctgtatagaatggatgttcaacaaagccgtccataactgactcactattttcttcactttcaaaaacaacaaaatgcgcttcttgtaaatctgttaatt

SEQ ID NO: 4114 - DNA, 318 bp, Staphylococcus aureus; identical to SEQ ID NO: 4026

SEQ ID NO: 4115 - DNA, 185 bp, Staphylococcus aureus
gatcaattctaattcttcaacagcattgtctaatactttagaattttgtactgcgtcacctacacccatgttcacaacgattttatctatttttggtacttccattactgaactataattgaattttttcattaagttttcagtaacttcagtgttaaacttttcttttaaacggttcaaagtgg

SEQ ID NO: 4116 - DNA, 318 bp, Staphylococcus aureus; identical to SEQ ID NO: 3971

SEQ ID NO: 4117 - DNA, 77 bp, Staphylococcus aureus; identical to SEQ ID NO: 4023

SEQ ID NO: 4118 - DNA, 318 bp, Staphylococcus aureus; identical to SEQ ID NO: 4026

SEQ ID NO: 4119 - DNA, 304 bp, Staphylococcus aureus
gatcatattgaatagaatcaacttttgcattgataccatctttgttacgtttgaaatcgataacacggtattgacgtttgtgtccaccaccatggtgtcttacagtcaatttaccttggttgttacgtcccgcttttttcggtagcggttttaataatgacttttcaggtgtagttttcgtgatttctgcgaaatctaacgaagtcatattacgacgaccatttgttattggcttatactttttaatagccattgtcgcttacctccttaatggtaattgttttattagttaaataagtcgatt

SEQ ID NO: 4120 - DNA, 381 bp, Staphylococcus aureus; identical to SEQ ID NO: 4039

SEQ ID NO: 4121 - DNA, 106 bp, Staphylococcus aureus
gatcaaacacttataattcctccttattattatcactaggtgctacgatatggtgcgcgcagacaacgtggctcataactttcattggcacctactaagataatcg

SEQ ID NO: 4122 - DNA, 257 bp, Staphylococcus aureus; identical to SEQ ID NO: 3910

SEQ ID NO: 4123 - DNA, 256 bp, Staphylococcus aureus
gatcttcaattgcgtctttcatttgagatacagcaactttactgtcatcatattgaacacttacttgaccattttcaaggttaacgtcagctgaagtgacaccgtcaatattatttaatgcagattcaacagcacttttgcagtgaccacagctcataccttcaacatttaaaatttcttgtgacatagcattcacctccttttagagccacttattatttataataattagtggctcttatgcagttggagcgaa

SEQ ID NO: 4124 - DNA, 256 bp, Staphylococcus aureus; identical to SEQ ID NO: 4092

SEQ ID NO: 4125 - DNA, 341 bp, Staphylococcus aureus
gatctaacgcaataagtacagatttatatcctggttctgttacagcatattctccagcaatataaagttttccgggtgctttgacctgaatcattttatctcttccttactcaattatttcaattcctgtggcaataatgtcactatcaataatttggttattatcaaactgtgttaataatttatctataatctgttgcttgtttttcttttctacaagtattttcacattaggtcccgcatccattgtaaaataacacggataccccgcttctcggcattcgtgaacaagcgccatgacatcataactttcttgcacaagatatgtgaacggcggtgtt

SEQ ID NO: 4126 - DNA, 96 bp, Staphylococcus aureus
gatcaaagctaacaaaatcacctactgaaatacctaaactctttgtatcttcttctgatgtagttacttcatcaattcttatttccatatgctttt

SEQ ID NO: 4127 - DNA, 315 bp, Staphylococcus aureus
gatcagcaccaaataatttcttagctaacaattctaaagtacctttcaaatcactcattttaacgtttttatcaacaactaatccttcgatttgtgtaaattgatgactatgtgtcgcatcatcagagtcacgacgatacactttaccagggcaaataattttaactggaccttgaccatgacgtgattccatcgtacgtgcctgcactggtgatgtatgcgtacgtaataaaatttcatccgtaatatagaaactatcttgcatatcacgtgcagggtgtgatttaggtaaattcagcatttcgaagttataat

SEQ ID NO: 4128 - DNA, 274 bp, Staphylococcus aureus
gatccctcttccatcttaacgtctgatacaccagtgtattgaataattgaacgcaatttttctaaatatgcatatgcttctttaggtgaacgaatatctggttcagatacgatttcaattagcggtgtaccttgacggttcaagtcaactaatgaatactcacctttatgtgttgacttaccagcatcttcttccatgtgaagacgagtaataccgattcgttttgtttcaccgtcgacttcgatatcgatatatccattttcaccaattggtt

SEQ ID NO: 4129 - DNA, 318 bp, Staphylococcus aureus; identical to SEQ ID NO: 3971

SEQ ID NO: 4130 - DNA, 249 bp, Staphylococcus aureus; identical to SEQ ID NO: 3967

SEQ ID NO: 4131 - DNA, 225 bp, Staphylococcus aureus; identical to SEQ ID NO: 4091

SEQ ID NO: 4132 - DNA, 318 bp, Staphylococcus aureus; identical to SEQ ID NO: 3971

SEQ ID NO: 4133 - DNA, 357 bp, Staphylococcus aureus
gatctttcaacaatttgatatctgccttattcgctttatctagcacttttgcaatttgttgcattgaaaatgcatttttagatttttgtatgcctctcgcaggctttttcgaagatttttgaacaggagcgacactcactccttgtgcttttagtgtttttagttcttgctctaactgttccatacgttgcaacaatacatctgtgtttggcgatgaagcaatttgtgctggttcagctacattcgcaatcacttgtggttgacccttaatctgctcagctaattttactaacaacacttcaaaatgaacgttttgattcacactaaaacgaatcgacactaatgtatcattaataa

SEQ ID NO: 4134 - DNA, 228 bp, Staphylococcus aureus; identical to SEQ ID NO: 3953

SEQ ID NO: 4135 - DNA, 257 bp, Staphylococcus aureus; identical to SEQ ID NO: 3910

SEQ ID NO: 4136 - DNA, 84 bp, Staphylococcus aureus; identical to SEQ ID NO: 4047

SEQ ID NO: 4137 - DNA, 228 bp, Staphylococcus aureus; identical to SEQ ID NO: 3953

SEQ ID NO: 4138 - DNA, 145 bp, Staphylococcus aureus; identical to SEQ ID NO: 3954

SEQ ID NO: 4139 - DNA, 266 bp, Staphylococcus aureus; identical to SEQ ID NO: 3982

SEQ ID NO: 4140 - DNA, 381 bp, Staphylococcus aureus; identical to SEQ ID NO: 4039

SEQ ID NO: 4141 - DNA, 204 bp, Staphylococcus aureus
gatcaacgacaaaccagatgcctaatgtctttttagcattttgatagtaaaaaataccgctatcagcttcctttgttttaccattttcttttttcaagtccttgccataagctttttggatatcttttaatgaaatattatttttaactacaaattgcaattgacttgcttcgtttccttttgcagaaacacctttaaaagttt

SEQ ID NO: 4142 - DNA, 93 bp, Staphylococcus aureus
gatctgcattaacgcttttgaaccgttgtgattcattatgaatgatttcttggtaaccttcaattactttttcgtgaaactttaaatcttctt

SEQ ID NO: 4143 - DNA, 310 bp, Staphylococcus aureus; identical to SEQ ID NO: 3911

SEQ ID NO: 4144 - DNA, 288 bp, Staphylococcus aureus
gatcatatgtttgcgataaatcagatttgacattggctagtcctttaacctgtttcattttctgttcaatatcttttacagttgattttatggcatccattgatggaccttttacagtaacctctacagatttattacctgcacctgttcctaaatcttgatttttccactctccaggatgtttaaagccatctgcatgtttaataaccttatccgcttctacatcaaaattaggcgtgtcattatcatattcaaccatgattgccatactatttgtactacccgttg

SEQ ID NO: 4145 - DNA, 179 bp, Staphylococcus aureus
gatcttttacgtcttttgtgaaaacgattttattattaactacttttactggataacttttgtatgtcgagtcagtagcattttttctatcgtttgtagttgtgtcatattcaccagttattttatgtgtgttcttatctacctttaacaacatacggtcttcttttaaaagctcatct

SEQ ID NO: 4146 - DNA, 120 bp, Staphylococcus aureus; identical to SEQ ID NO: 3917

SEQ ID NO: 4147 - DNA, 78 bp, Staphylococcus aureus
gatccacctaatactttgattgtaagaacttcaccgagcaccagagttgtctgctactttcaagcgtgtttcttgttg

SEQ ID NO: 4148 - DNA, 122 bp, Staphylococcus aureus
  misc_feature (121)..(121): n=g, a, t or c
gatctatggcagattggctacttatttcttttatagccatttacttccaccttacttttgttctttttttgataattcaacaagttctttagccatttcttcagaagaaattaagccaccna

SEQ ID NO: 4149 - DNA, 277 bp, Staphylococcus aureus
gatccacctgatgaaccacctggcactgctttatggtcaaatgggttaactgtttttttgaaataagatgtttctgttgaaccacccattgcaaactcatccatatttaatttaccgattaaaacggcattttcattatgtagtttttccattacagtagattcgtaaattggcacaaaaccttctaacattttacttgcacatgttgtttctaatccgtttgtaataatgttatcttttatacccattggaataccaaataatttgccatccattt

SEQ ID NO: 4150 - DNA, 306 bp, Staphylococcus aureus; identical to SEQ ID NO: 3916

SEQ ID NO: 4151 - DNA, 341 bp, Staphylococcus aureus; identical to SEQ ID NO: 3983

SEQ ID NO: 4152 - DNA, 204 bp, Staphylococcus aureus
gatcataaccatttaataacgttggtaaatttttattcacacttgctgtcgcattagttaatcgctgttctaactgtggtaagtcattgcgcacaaagttagcagctttagctacatcacttttcactttcgagaagtttgcttgagcatttttaacagcactaatgtattgttgttcaatacttggtaatactgtttgtaagc

SEQ ID NO: 4153 - DNA, 121 bp, Staphylococcus aureus; identical to SEQ ID NO: 4027

SEQ ID NO: 4154 - DNA, 180 bp, Staphylococcus aureus
gatccatcactttgtcgtcaccaattggttgtgtatctttaccagacttactacctttgctaccttgttgtcctttagctggttgttcacttactgctggtttacctaataacatacgttgtggttctgtcgtatcatacttagctaagttagctgtttttaaataacttgctagtactt

SEQ ID NO: 4155 - DNA, 258 bp, Staphylococcus aureus
gatcgcctttaacgattggtttcggtttcactttttctttaccatcttcagctgaaacgtgcttcgcttcaccaaactctgttgttttttcacgttcaatattatcttcaacttgtactacagattttaaaatgaatttacaagtatcttcttcaatattttgcatcatgatatcaaataattcatgaccttcattttgatagtcacgtaatggattttgttgtgcataagaacgtaagtgaataccttgacgtaatt

SEQ ID NO: 4156 - DNA, 136 bp, Staphylococcus aureus
gatcaaaatctttgtcatcatagtaagaaccaaacgtgtcataaaatgttctagttgctaattcaactaattcactagcattttgttctgaaatttctttgattatcccagccatataaatcctccaataaacagt

SEQ ID NO: 4157 - DNA, 108 bp, Staphylococcus aureus
gatcttttgctttttgagcaatatctgtttgttgtgcttgttgctttggcatatcatcgccttcgtttttacgattttgtaaatattccgttcgaactctttgccatt

SEQ ID NO: 4158 - DNA, 318 bp, Staphylococcus aureus; identical to SEQ ID NO: 4026

SEQ ID NO: 4159 - DNA, 222 bp, Staphylococcus aureus; identical to SEQ ID NO: 4032

SEQ ID NO: 4160 - DNA, 255 bp, Staphylococcus aureus
gatccaaaccaccacataaccaaatgattggttgattaaatgaatttaaggcaaactgtgttgctagcgtgtttgttgctttggaatcattataatatttattagttctattagtaccaacatattgcaatctatgctctattcctgaaaatgtagttaaactatcaataattgctttaataggtacaccagctaaaatacaagcaagcacagctgctaatatattttctaaattatgttcaccaggcaatacta

SEQ ID NO: 4161 - DNA, 280 bp, Staphylococcus aureus
ggggatcattcaagtaagcatagaataaacctataatgagtccgcctccaatatagttaccgataaaagccgcagcgatattcgaaatagctggtatgaagtgcaatgtatcaacttgataaattaaaccacccataaataagcaactgttgtaaacgacgtgttcataacccataaaggcgaatatggtaacaccgaacatcatgacaaacatttttgcgagtacatcgtcaatttgcatggcaataactaatgaaatattgataaagaaattggcgaa

SEQ ID NO: 4162 - DNA, 166 bp, Staphylococcus aureus
gatcgcagttacttctaaacctgcagattgtaatgcacgaatagctgattcacgacctggaccaggtcctttaactgttacttcaactgtttttaaaccatgctccatagctgatttagatgcagtttcagaagccatttgtgctgcaaatggtgttgatttttta

SEQ ID NO: 4163 - DNA, 152 bp, Staphylococcus aureus; identical to SEQ ID NO: 3936

SEQ ID NO: 4164 - DNA, 67 bp, Staphylococcus aureus
gatctctctccagcaaatcctttgaactccgcttcttttttaatactttcgaaattaacatattctt

SEQ ID NO: 4165 - DNA, 209 bp, Staphylococcus aureus
gatcatcaatttcttcacctaaattaaacgcagttgtaggcgctgttggaccaactactacatcataattttcgaatactttatcaaagtcatttttaatcaatgttctaactttttgagattttttatagtaagcatcatagtaacctgaacttaatgcaaatgtacctaagaaaatacgacgttttacttctttaccgaaaccttca

SEQ ID NO: 4166 - DNA, 219 bp, Staphylococcus aureus; identical to SEQ ID NO: 4022

SEQ ID NO: 4167 - DNA, 257 bp, Staphylococcus aureus; identical to SEQ ID NO: 3910

SEQ ID NO: 4168 - DNA, 201 bp, Staphylococcus aureus
gatcaccggctttaacgttatttgttaaagatttagggacagttgcaaccatcgatactttatcatcaacattacttgcaagaatgataattgtatcttgtagtttagatttaaaatcgtccattgtcgagcgaattgctttcgcatttggtacatccacttcagtaaccaatactttatagccattgatttcttcaactt

SEQ ID NO: 4169 - DNA, 152 bp, Staphylococcus aureus; identical to SEQ ID NO: 3936

SEQ ID NO: 4170 - DNA, 225 bp, Staphylococcus aureus
gatcgtctaacttatctacaactttaacttgtgacacgataaataattgatgtaatgcatcaaatgaagttaagaattcagatgcattaaatttatcgttactagcaatcgtaactttagcttctaatgatttaccaataactttttcattacgagcagtttctaatgcacggttcacatcatcacgtaaattcataaatgtacgccatttatccaataaagctt

SEQ ID NO: 4171 - DNA, 185 bp, Staphylococcus aureus; identical to SEQ ID NO: 4115

SEQ ID NO: 4172 - DNA, 387 bp, Staphylococcus aureus
gatctttaccatcaaaaatttcatcaaaagatgttgctacaattttattgttcttaattccaacacccttagctgtttcaccttgcattaataagtctaccgcatatccacctaaacgtgatgctaaaactctatccgcacctgttgggctaccaccacgttgaacgtgacctaacacagacactctattatcaacattgatgtattgtgataattctttttgacaatcttgcgcagtcatacaaccttctgctacaagaacgattgagtgtttcttaccacgtttaataccttgttcaattttatcagctatttctttaatatctgttttcacttctggaactacaattgtctcagcaccaactgataatccagcccataatgcta

SEQ ID NO: 4173 - DNA, 318 bp, Staphylococcus aureus; identical to SEQ ID NO: 3935

SEQ ID NO: 4174 - DNA, 225 bp, Staphylococcus aureus; identical to SEQ ID NO: 4091

SEQ ID NO: 4175 - DNA, 138 bp, Staphylococcus aureus; identical to SEQ ID NO: 3920

SEQ ID NO: 4176 - DNA, 120 bp, Staphylococcus aureus; identical to SEQ ID NO: 3917

SEQ ID NO: 4177 - DNA, 410 bp, Staphylococcus aureus; identical to SEQ ID NO: 3938

SEQ ID NO: 4178 - DNA, 225 bp, Staphylococcus aureus; identical to SEQ ID NO: 4091

SEQ ID NO: 4179 - DNA, 200 bp, Staphylococcus aureus
tcgtggacatcctctcggttcatattcaggcatatccggaccacaacttggatagtcagtttgttgattttcccaggtaatcacaccatttttcacaaatactttccaagaacatgagcctgtacagttaacaccatgtgttgttcttacttctttatcgtggctccaacgttctctgtacattttttcccattctctac

SEQ ID NO: 4180 - DNA, 241 bp, Staphylococcus aureus
ccattgttcaatggtgccttcatgaacactctcacctaacttaggcattgttatttccatgactttccctccctagaattctgctaattcacgcattttatttaagattttttctggattcatcataatttcattttctaatacaggagaaaatggcatagatggtacatctggagcagctaaacgcatgattggtgcatctaaatcgaacaagcaatgctctgcaataatcgctgacact

SEQ ID NO: 4181 - DNA, 414 bp, Staphylococcus aureus
tctttaaaacaatattcagcataatctacaaagtagtcaatcgttttacgatttagaaaatcgccatctttgtgtaacacttctggtgtatcaaaatgatgcaatgttacaaatggttcaacatgacgtttatgacactctgcaaataacttatggtaatactcaacacctttagggttaacttcgccatatccatttgggaagatacgagaccatgcaattgaaattcggataccattaacaccgaatttttcacttaattctaaatccactggatatctgttataaaaatcactcgctggttctgcagtgtaccaatagttttcttctaaatacgtatcccatgctacgcgacctttaccatccgtatttgtcgcaccttctgcttgatatgctgctgttgctccaccaaaa

SEQ ID NO: 4182 - DNA, 397 bp, Staphylococcus aureus
tgcttcgtaaatgattctgcatcctcaaattttactgccactttcatcatttcaagttgtttcttcatttcttttacgataggtagtcgctcttgatttttaactcttgaaaatgcaaatgactctaacatcagtcgcaaatcatacatttctttcttttcttgttccccaaacggcaacacatgtgcacccattctttctaattggatgagttgattttgttgcaataatttaaatgcatctcgaattggcgaacgactcacattaaattgctttgccatttgattttcagtgagtaacgtaccttcagctatgtgaccattcacaatgcctaagcgtaattctgccgcgataccttctccagttgtcataccttccaaccatttctctggatatc

SEQ ID NO: 4183 - DNA, 200 bp, Staphylococcus aureus; identical to SEQ ID NO: 4179

SEQ ID NO: 4184 - DNA, 164 bp, Staphylococcus aureus
tactttcaaataactactgtttaatatagttattaccgataaagtgctgtctaactagattaagactacaacttaaaaaagctccctcactaatttgtgagggagacaaaaattatttcgcatattctactgctctagtctctcgaacaactgtcaccttgata

SEQ ID NO: 4185 - DNA, 164 bp, Staphylococcus aureus; identical to SEQ ID NO: 4184

SEQ ID NO: 4186 - DNA, 209 bp, Staphylococcus aureus
cacttgataatccgcttctcttaatcctcttttttctttagctaatggatgaaatggacgatcttttaaacttgcaaactgctctgacatcacaaaaggatgtgacgctaaatctaattctgataattgtttagcaagctgtgtggcagcagtagtcagtccttcttcaacgcgagccacttcccattcatgacttagatcacaattca

SEQ ID NO: 4187 - DNA, 330 bp, Staphylococcus aureus
tgacatcttcgtatgagttcttgattggcacagtcaatgacttaacatctttttcacctcggataccaaaactcaaacctgtttggaaaatccctgaatcaggaatgtttgtattcacatagcctcttaaaatacctgcaacttttggtaatttaacaactgttctaaaattaaccatttcttttttcaatgtttgcatcacttgttgctgacgtcgcacgcgtccgaagtcaccttcagggtcgtgacggaatcttgcataaccaagtaattctttaccattcaacctatggttaccctttttcaaagatacaccaatatttttcgaca

SEQ ID NO: 4188 - DNA, 241 bp, Staphylococcus aureus; identical to SEQ ID NO: 4180

SEQ ID NO: 4189 - DNA, 194 bp, Staphylococcus aureus
taagcattcagttaatgtacctacagggtttcctcctaccgctaaaattctttcagctaattcgtctacatattggcttgcttcattatataattcttcaaatttaacgtgtaatgagaagaagttaggccctttcacataccagtggaaattgtgtagctttgtgtaagctactgtccagtttgctacttgtt

SEQ ID NO: 4190 - DNA, 241 bp, Staphylococcus aureus; identical to SEQ ID NO: 4180

SEQ ID NO: 4191 - DNA, 194 bp, Staphylococcus aureus
gttttgtcgcgtgataaagtgctacatgtgaatgtgtgtacctttattaccaatcaaagcttcgtatgcctgctctaaattggtaatgataacttttttgttttccccactttcaacaaatcgtatcgcagcttctatttttggcaacatcgatccttccacaaacttaccttgtgccgcgtattttttcagtg

SEQ ID NO: 4192 - DNA, 200 bp, Staphylococcus aureus; identical to SEQ ID NO: 4179

SEQ ID NO: 4193 - DNA, 209 bp, Staphylococcus aureus; identical to SEQ ID NO: 4186

SEQ ID NO: 4194 - DNA, 218 bp, Staphylococcus aureus
caatcttcacatgttggttaagccgacgagttctaacaatatgaatgagtgattcactagaattgatgtttaaagcatgttgaacttctggaacttcatgcgcttcaacaacctcattcacaacaacttcagttaaatatgcgacgcccatttcttcttgcatttctttaaaactaacaagttcagaaaatggaaactctgtaacctcctgataaatg

SEQ ID NO: 4195 - DNA, 218 bp, Staphylococcus aureus
tcaacattatcgcttaatgtgaaatcaaaataatctcccgccttaattccttctccaaatttccatttatatttcaaggttactctttctgcgttatgaggatttacaacattcgtatcttgtttatgtcctacaatttcactaccttcttctacttccactttatttgttacatctgtacctgtcgctttagtttcttccactacttctttctctgc

SEQ ID NO: 4196 - DNA, 425 bp, Staphylococcus aureus
tctggaaataatgctacgattttcatatccatctctcctaaatgataaattttgacttccttaaagtacgtgttgcatgttgcttgttttaaaaatatgacaaaaaaacggcaccgtttgacataccacccccttgaattattgttaaattcaaagcgaagttagcaaacagcaccgtgtaccttacaccagcaacacttattctattgacttatcgaaaacaaatattgaaatgacttcatcatcattcaaatcaatatctgtaaataattttacaaacttagcgcctacaagactttccatctcatttacatctatttctttatacatctgtttaatcttctctgtgcgtgtataatggagcatcgattcattgcgtttgtcgtttaggtaaaaactctcaactttactcaaaacacctgtca

SEQ ID NO: 4197 - DNA, 77 bp, Staphylococcus aureus
ctgccatggaacgctttatcaatgccggcttgtgcatacatcgcagtacctgaataatctttacctgttgcattttc

SEQ ID NO: 4198 - DNA, 515 bp, Staphylococcus aureus
ctttcttctttaacatgtggtgtatgagaccaaacttcttcagctgtatgcactaagattggtgctaacaacttcgtcatatcaactaaaatttgatataacactgtttgcatactacgacggatatgagaatcacgttgttcaatatataaaatatctttaccgtaatccaaatagaaattacttaactcaacattgataaagttttgaacttcttgataaatatttaagtagtcaaagttttcatagttgttaatcgtacttgcagtaaattcacgtaaacgatttagcaagtaacgatccacttctaataactctgattcaggaatgctatctgtgtcaggattgaaatcgttaatgttacctaacataaatcttaatgtatttctgattttacgataaacatcagatgtttgttttaaaatttcatcagaaattctaacatcagctaaatagtccgtactacttacccaaagtctcgcaatatcagcacctttttgtttaaccacttggtc

SEQ ID NO: 4199 - DNA, 77 bp, Staphylococcus aureus; identical to SEQ ID NO: 4197

SEQ ID NO: 4200 - DNA, 269 bp, Staphylococcus aureus
catcgtcatcgtttgcaccgtcaaatactggtgatgcaacgtgaataccaagatttttagcagccatacctaagtgtagctctaatacttgtccgatgttcatacgagatggtacaccaagaggatttaacatgatatcgatcggacgtccatctggtaagtaaggcatatcttcttcaggaacaatcttagaaatgacacctttgttaccatgtcgaccacacatcttatcaccaacatgaattttacgtttttgaacgatatataca

SEQ ID NO: 4201 - DNA, 214 bp, Staphylococcus aureus
gtccatctggtaagtaaggcatatcttcttcaggaacaatcttagaaatgacacctttgttaccatgtcgaccacacatcttatcaccaacatgaattttacgtttttgaacgatatatacacgtactaattggtttacaccaggtgataatgtatcgtcgccttcttcacgattgaatacttttacatcaagaacgataccgccagcgccgtg

SEQ ID NO: 4202 - DNA, 202 bp, Staphylococcus aureus
tcttttcgccaatatcttacattttcctcactattatctagttgtgcaatgatatgatccatcatttcaattaactcatctggcaatggtcgaatttgtttagcgttcaactctaacagttcagaataaatcccttgggcagatgtgtgtaataataataatttttggaaacgtctacttaatttatcgttacttgaagtag

SEQ ID NO: 4203 - DNA, 269 bp, Staphylococcus aureus; identical to SEQ ID NO: 4200

SEQ ID NO: 4204 - DNA, 269 bp, Staphylococcus aureus; identical to SEQ ID NO: 4200

SEQ ID NO: 4205 - DNA, 206 bp, Staphylococcus aureus
cccatatgtcgcagtaccatctgcatgtgttgttacattgtatgcatttgttttacttggcttcttgtatgtcgggcgagctccgtatgacacttgaccgtttgcatgtgttgttacgttgtatgcatttgttttgcttggcttgttttgtgttgggcgagcgccatatgatacttggccgtttccatgtgttgttacgttatatg

SEQ ID NO: 4206 - DNA, 530 bp, Staphylococcus aureus
gattgactacataatctccagttaaaataccacttaaatattcaacttgatctggtagttcaccttctccattagcaaagaagacattgccgatttcaaataattttacatctttatttttgcgtgccacattatatgatgccgcttcgattaaatgtggtaataaactttgacgtaatgacgcatgcgcttcactcattggcatcaataaatcaattgtttgacgctgttgcatcgaaaatgcagtagcatcttctttagaaactaacgaatacgtaatagcttggtctaatccagcaccttctaacacttctttaaccattctagttttatattggcgatcagttagctgaccactagtaactttatcgaagacaggtaacgttgatggaatatcgtcgtatccatatatacgtgcaacttcttcaattaaatcttctttaattgtaatatctttacgacgtgatggtactagcactgtaataacatcatcatttatttctgtatcaaaccctagttgattaaaaata

SEQ ID NO: 4207 - DNA, 223 bp, Staphylococcus aureus
tggtgtattcgtttgttcaacgtcgttgagacgctgtaataattcgttcaaatctacatttttcttttctaaggctgctgcttctatacttacttgtccgccacaacaaaaatctattcccacacttctaaaaatatccgctgctttcggataatcagttactacatctgctactatgtcatttttatttatcattatagataacctcctcatttccagtgta

SEQ ID NO: 4208 - DNA, 96 bp, Staphylococcus aureus
atctaatcctttttcactccatgcaattgcagcatctaaaggtcccataaacatttcgtaaagacgcaaagtatctgcaccatgagactgtactat

SEQ ID NO: 4209 - DNA, 269 bp, Staphylococcus aureus; identical to SEQ ID NO: 4200

SEQ ID NO: 4210 - DNA, 257 bp, Staphylococcus aureus
tacaccaatgcgtccacccatgtgtaagtaagcgccgaaagcatcgttatcagttttagttctgatagcaaaacgacgaacacttaatttttcaccgattgttgaaattgcttctttaattctttcatcaactgatttaccatttggtaaagttgtttccattaaagcttcaacagtttcagcttttgtatctaatacttgattagcgatttctttaactaactcttggaaaccttcgttacgagcaacaaagtctg

SEQ ID NO: 4211 - DNA, 142 bp, Staphylococcus aureus
aagatcccctaccgttgagcttggtgctttttgaaccataatatctcctgtctctgcatgcttaaatgcatgaacaactagttctaccgcatcttctaagctcattaaaaatcttgtcatatcaggatctgtaatcgttaaa

SEQ ID NO: 4212 - DNA, 133 bp, Staphylococcus aureus
gtttgtaagctgatatcctcttgtttgatacctctaaacccaccaactgtgcctaatatatacgtatctttatttgctgctttttttgcgatgcgaacggcggcttgatgtattgctttaactttatcttcaa

SEQ ID NO: 4213 - DNA, 142 bp, Staphylococcus aureus
tgaaaagcagacatattttaaaattttcatgcgatctgtgaggcctttaaacttatagccattgacaatgactacggaaaaagctaacgcagcaacaagatccattgtaaaatagccttccaaacttcctgaaatgaaagga

SEQ ID NO: 4214 - DNA, 611 bp, Staphylococcus aureus
tgttaacacctttttcacgtgcgtatttacgtactgaaggcattgctttaacagttctgttttcatctacttcttcagtttgagtagctacaggtgcttgctctgctggcgcttcctctttcgcaggttcttctttagatgatgaatcatcatcatgacctttaaattgcatatcttctgcatcaggtgcatcgattttaacaataacgtcaccaactacagctactgtaccttcttctaccataacttcttctacagtaccagatgctggtgatgggatttctactactgatttatcgttttgtacctcagctaaaacatcgtcttcttcaatagtatctccagctttaacaaaccattttacaatttcaccttcgtggataccttccccgatatcgggtaatctaaattcaaatgccacgtttttgccctcctaagatttcgtaaattaaacatttcattttaatcaatgagactaaaatacgctaacttcgttaacttttaaaatgtattaaaattctaaagtttcttttgctttttcgatgatgtcatttttgtttggtaaccaaacattttcagcttgagtgaatggataaattgtatctgctgct

SEQ ID NO: 4215 - DNA, 332 bp, Staphylococcus aureus
ccccatcggtttattaaatcgtccatttcaatactgtttttccccaagatgtcgataaatccatttcaaacgcttggacgatatcttgcatcgtacatacattaatttcatgtccttttaataatgctaacttttcaactatgtctgggtacttacgatataaatcaacaacttgctcaaaatctttagagccgcttcgactactaccaatcaacgttaatcctttttcaagtactaatcgtgtattcacttccacgggtaattcacttacgcctaacaaagcaatactgccttctggtgaaatatgttcaactatttgttgaagtgcaact

SEQ ID NO: 4216 - DNA, 207 bp, Staphylococcus aureus
actctatcacactctcttttatatttatcaaaagatataaaaaaggatagtatctttcaactatcctttaatcaatattattcttcaatccattgtgtatggaatacgccttctttatcttttctttcgtacgtatgagcaccgaagtagtcacgttgtgcttgaattaagtttgcaggtaaatcagcagcacggtaactatcatag

SEQ ID NO: 4217 - DNA, 107 bp, Staphylococcus aureus
tgtgttttatcgattgtttttgccatttgtccacctaaagcatcaatttcacgaacaacgatacctttagctggtccacctacagatgggttacatggcataaatgc

SEQ ID NO: 4218 - DNA, 808 bp, Staphylococcus aureus
aattaatacgcctggcattaccgcatactcaggaaaatgcccttgaaagaatggttcgtttcctgatacttgtttaatagccacacaacgttgaccttcttcatattcaactactttatcaattaataaaaatggctgtctgtgaggtataatttgtttaatttggttataatcaaaaattgtttccatggttgaaatcctccattatattaatttactgaattaatcgttaatacgttcaatgtctgcacctaattgcttcaatttaccgtgtaagtcaacatagcctctatctaggtgcgttaattcagtaacgcttgttttaccatcagcaactaatccagctaaaattaaggcggctgctgctcttaaatcagtcgctttaacttgtgcaccttgcaattgacttttaccttcaagtttagcactacgaccttctacattgatattagcattcatacgtttgaactctgcaacatgcataaaacggttttcaaaaacagtttcggttacgactttatgaccatttgccgttaataacaatgccatcatttgtgattgcatatcagtcgggaatccaggatgtggtagagttttgatgtctacaggttgtaattccccttcagcacgtacacgaataccatcttcttgatagtccaattcaacgcccatttcttctagtttatagactaaactcgccatatgttctttgattgcaccacgtacaaaaatatcaccacgcgttatagcaccagcgattagtaatgtgcctgcttcaattctatctggaatgatagcatgttctaca

SEQ ID NO: 4219 - DNA, 549 bp, Staphylococcus aureus
tgctgccataataatattttgtgttgctcctacacttggaaaatctaaatgaattgatgtaccttttaatccatctttagcattagcataaatattaccattttcaagatgaatttctgcgcctaaagcttcaaaacctttaatgtgttgctcaatcggtctacttccaattgcacaaccaccaggcaatgcaacaatagcatgtcctagtcttgctaaaagaggtcccataactaaaatacttgcacgcattttactaacatattcatatggtgcctcttcatttagagtctttgttgcatcaacgacaacagcattttcgtcctttttgtatgtaacgtcagcatttaaagttgttaatacattatttattgtttctacatcacttaaagctggaacattaactaatttgctcggtttatcagaagctaataaagatgctgtcaatattggtaatactgcatttttagcaccttctactttaacttcacccgttaatttatttccacctttgattactattttatccatcgtaaatcctccacttag

SEQ ID NO: 4220 - DNA, 195 bp, Staphylococcus aureus
tacatcttgtgctaatgcctcttcgactatagcatctacttcgctagcactcttaattgtataacctttaccacctgctgcctcagcaaattttgcatgatccatatcagaaaaatcaactgcatattctaattcaccagctgcttgttgttcatatttaataaatgctaactgtttgttattaagtacaaatac

SEQ ID NO: 4221 - DNA, 181 bp, Staphylococcus aureus
atcttcatcattttcttctgaatcaatcacttcagtatgaattgcatttcctggtgtttcatcatttacaaccgcttcacgttgttgttcagtaccatcttcagatacagttgaagtagattgctcatcttcattcgtttcatcttctgcatcttcttttactttagcaaccgttgaaaca

SEQ ID NO: 4222 - DNA, 191 bp, Staphylococcus aureus
ttaaagtgtaaaaaggtagttgaatattgctaaatgtatcatctgcttttttcaaaccgtaagtaaagatagctacaacacctaatacttctgcacctgctagttttaaggcttcaactgctgtgactgaagatccccctgtcgaaattaaatcttctatcacaactacttttttaccttcacttttagca

SEQ ID NO: 4223 - DNA, 246 bp, Staphylococcus aureus
ccatcgtgattactatcattaaaacttcttggatatacttgatatgctactgcttctttccaccattgcttattcattttaaaactcctttgctatcgctgtgttgattttcttatttttaattctgtatctataatgacgagttcaataacatcctgtgctttgtttttcaatatatttaaaattgctgcaccagcctgttgacctaacattcgaggcttgatgtcaatacaggtttgtggtggt

SEQ ID NO: 4224 - DNA, 324 bp, Staphylococcus aureus
gcgaattcgccacctaaatatgttgttgcaacaatgctaccaccttctggcattaattttttagcttcatgagccacaattgttaatgagtaagaactaatgtcttgagctaacaagaagccttcacgtgaagtttcagaaaagcgtccgcgtaagtcttccatattagcaaatgcgattgaatgatatacaccatcaatattgccaacatctttaccaatttgctcaaaaccattaataacctcttcatcgctttgaacatcaatttgatataagtgcgcttctggttgatttaattgttctaataatttttcaagctcttta

SEQ ID NO: 4225 - DNA, 268 bp, Staphylococcus aureus
gattctttagcaattttagattttttaactttatcatttttatccattgaatgaactgggccatttggttttgctctgtctttcgataatcctggattgttaggatttactgggccacttggatgagttggtctgctcggcttctctgggttttcaggtccttttggatcttttggtttctctccaccgaactctacaatcttatctactggttgttttgtgatctcttctgttggttgaccctcgccaactttttcacctgttaatg

SEQ ID NO: 4226 - DNA, 148 bp, Staphylococcus aureus
tgatttaacaccaatttgttcaccatcttgaccgattaaacgtaattcttttgcacgaattttgtcattgatttgagtttgatcttttgctatggttgacacctccaaaatttttacgaaatttgcaccaagcaaaaaggaagagcag

SEQ ID NO: 4227 - DNA, 100 bp, Staphylococcus aureus
tgtgattggtaattcgataatcttaccagatggtgcggccatcaatccacgcatacctgctaactgtgtaaagttagatgcgttaccacgggcacctgaa

SEQ ID NO: 4228 - DNA, 225 bp, Staphylococcus aureus
caatgtctgcacctaattgcttcaatttaccgtgtaagtcaacatagcctctatctaggtgcgttaattcagtaacgcttgttttaccatcagcaactaatccagctaaaattaaggcggctgctgctcttaaatcagtcgctttaacttgtgcaccttgcaattgacttttaccttcaagtttagcactacgaccttctacattgatattagcattcatacgtt

SEQ ID NO: 4229 - DNA, 266 bp, Staphylococcus aureus
tagaacgaccagttgttttaggacgatgttgacgacgatattttacacgttttggtagtaacattattattttcctcctccactagtgttcttagtaggaagaacttctccacgataaatccatactttaacgcctaatttaccgtaagtagtgtcagcttcagcgtgtgcataatcgatgtcagcacgtaacgtatgaagtggaacagttccttctgaatattgttcagcacgagcgatgtcagctccgcctaaacgaccagata

SEQ ID NO: 4230 - DNA, 205 bp, Staphylococcus aureus
tctgcacctttcgaagtgccacgatgcttgtgtgtatgcttgtactcagctgaattttgccaatgataaaatgcttgcctattttcccacagcgtaataatgatatagtgtctaccagctgttctaggtcttaaaaaccttaatgctttaaatccatcaacgttttttaaatgcttattacgtcgcaaaaatttttgctcgaatg

SEQ ID NO: 4231 - DNA, 372 bp, Staphylococcus aureus
gattatgtaaccgacgaatgctgcgatagctgctacgccatcaccgccagctaatccgattgcgacacctaatgcgaaaatcataggcaagttatcaaaaatgataccaccagcacctgtcattaatttagcgacagtttgtacgccaccattttgtataaacggcaagtagtgttgtaatgattcaccttgcatagctgtaccgatagctaataacagaccagctgctggtaaaatcgcaacaggtaacattagcgctttaccaatacgttgcaattgaccgaaaagtttcttcctcacttgtccaacctccaaagttgtatttattatttaagattcaataaaaaaagacacgagcaaatagactgtgtt

SEQ ID NO: 4232 - DNA, 104 bp, Staphylococcus aureus
gctttcgccgcttcaataatcccctcgtctacttccaataatgagttttcaacaagtcttgcaatgtaaggtgccacatatactgttaaaggcacgatggcagc

SEQ ID NO: 4233 - DNA, 289 bp, Staphylococcus aureus
aactgcgaattcgccacctaaatatgttgttgcaacaatgctaccaccttctggcattaattttttagcttcatgagccacaattgttaatgagtaagaactaatgtcttgagctaacaagaagccttcacgtgaagtttcagaaaagcgtccgcgtaagtcttccatattagcaaatgcgattgaatgatatacaccatcaatattgccaacatctttaccaatttgctcaaaaccattaataacctcttcatcgctttgaacatcaatttgatataagtgcgcttct

SEQ ID NO: 4234 - DNA, 103 bp, Staphylococcus aureus
atcagattcactctctgaaccacttaatgacgctgatgtgcttaccgaacctgattgactcgtacttttagatatacttgttgaatcgcttagtgacgttgat

SEQ ID NO: 4235 - DNA, 310 bp, Staphylococcus aureus
tacttcgcgatccattgtttgttcgaaaagaatagcacccaaaattttatctggtgagaatgaaggtgaagttaccacacgtgtacgcatatcgtgaacaagttggaacatttcgtcttcattgctatattgatcttcgtttacaccatattctttaagtgcttttggtgtactaccaccactttggtctaatgcggcaataaagccttttccatttttcattttttctaattgctctttattcatactttccactccttaacttttcaatacacctccagtatgataaaaatgagaacatttctcaagt

SEQ ID NO: 4236 - DNA, 392 bp, Staphylococcus aureus
tatttcggtttatcttcttctgtgtcttcctcaaatgactgattaccgctattttggccaccttcgtaacctaattcactcttaatatccacgtggctattttcttcgatttcttcaatcacgccataattaccgtgaccattttcagttcctaaaccagaatgagaaatatgatgattgttttcagtaatttcctcgattggtccttgcgcttgaccatgttcttcaggtagttcatctactagttcaatcagattactttcagtcgtatattctttcgtatcttcaattgttgtatgatcgctaacagcaccagttacaataccttttgtagaatcttcgtcaaattcaactaggttagactcagtagtaacctgaccaccacctgggtt

SEQ ID NO: 4237 - DNA, 192 bp, Staphylococcus aureus
aaagaaattgctaaataacgagtaacgttatttaactttcttctacctacttcaccttgttttgcccattctgagaatttagggacaatatccatttgtaataattgcattacgattgatgcagtgatgtagggtacaatacccattgcaaaaatagaaaatcgtttcaaggctccgccaccaaaagtattt

SEQ ID NO: 4238 - DNA, 119 bp, Staphylococcus aureus
gcaatatcgaaatgaatgtgaggtgtttgaccactaaaatgtgttacaaaacttgccgcaaatagcgctttaccttgtccattcgtatggttaactaaatcagcgatatcactgtgttt

SEQ ID NO: 4239 - DNA, 192 bp, Staphylococcus aureus; identical to SEQ ID NO: 4237

SEQ ID NO: 4240 - DNA, 384 bp, Staphylococcus aureus
gttatcattagtgctgttatataacagattacatttcccaaagtttcctacttatacatttcttatttctttttcaagattctctacttcttgtttaaaaataggatcttcttttaaatctttagatattttttcatgagcatgaatgacggtcgtatgatcacgcccaccaaattcttcaccaattttaggtaatgagaaatctgtaagctctctagacaagtacatagctatttgacgcggatatgcaattgactttgtacgtttttttgcactgaaatcttcaattctaacattatagtactggcctacaattttttgaatatcttggatggtaatctttttagattttggtgcttgaatgatatcttttaaagcttcagc

SEQ ID NO: 4241 - DNA, 192 bp, Staphylococcus aureus
tcaatactttgtgaatgatatagtcctccgtgaacaccgccaccaaatggtgcacgaatcgttaatgggcattgccaatcattatttgaacgataacgcattttcgcagcttcactaataatttgatttgtcgcaggtaaaataaaatctgcaaattgaatttctgcaattggtcttttacctaccatagct

SEQ ID NO: 4242 - DNA, 436 bp, Staphylococcus aureus
atttttttaaaataataccaatctcatttttaaattctaaacttggtttcgtataatacgctcttaaatctttaaatttaggatttatttctgttggtacttgttttgtggttggcgattgtggtgtgtctgatttagtagattgcattggttgtggcgtgtttgttgatggaggtgttgtcactttagttgaaggcggtgttgtcgcatttgctgtttgttgcggtgcttctactttagttgagggcggtgttgtcgcgtttggttttgattgcggtgcttctattttagttgagggcggtgttgattgtggtgcttccactttagtggaagatagtgttgtcgcgtttgctgcttgcgttgtcgttgtgattacacctgttgttaaaaggcctagtgctaaacttgttttagcaatcgttgttattttcatagt

SEQ ID NO: 4243 - DNA, 217 bp, Staphylococcus aureus
ttggtaacggcccatacgttttttcttaggtttgtaattcatgatattaacacttgcaacttttacgttgaagatttcttcaactgccatttttacttgtgttttgttaacacgagtatcaacgtcgaaagtgtatttgtcttcagccattgcttcagaagatttctcagtgattacggggcgcttaagaatatctcttgcttccattatccgagca

SEQ ID NO: 4244 - DNA, 212 bp, Staphylococcus aureus
tggaattgtacgaagttctcttcttctaatgctttgatttcttctttcgataacgctcgataccaatctttcgcttttttcgccgcaataggaacaacatctttttcaagatatccttcttttaacattgcattcgcaatttctatcgctttttgccgtttaattacttcaaattctttccatttttcggggtaacctttcattgtaaaggg

SEQ ID NO: 4245 - DNA, 168 bp, Staphylococcus aureus
ttaatgcactccacgtttcgaaatcatcatatgactctatgttgcctttttcaacccattttattcgtaaagtatctgtttctttagcttctacatcattcgtacttacagtgattttaaatacaacaccaatatgtaccttgcccacttcattattatcgtcattaa

SEQ ID NO: 4246 - DNA, 162 bp, Staphylococcus aureus
cccaccttcctccggtttgtcaccggcagtcaacttagagtgcccaacttaatgatggcaactaagcttaagggttgcgctcgttgcgggacttaacccaacatctcacgacacgagctgacgacaaccatgcaccacctgtcactttgtcccccgaagggg

SEQ ID NO: 4247 - DNA, 968 bp, Staphylococcus aureus
acgtcaatacctttccaaatttcttcatttactaagcgttcaacttgatcaatttcatcattagtcattggaccaaaatgagagaaatcaaaacgtaaacgatctgcttctactagtgaaccagcttggttaacatgatcacccagtactgatttcaacgctgcatgtaataaatgtgttgcactatggttcttttgaatgtcacgtcgatcattttggttcacttcagcagacactgtagcgccaacatttacttggccaaattgtactactcctttatgcaagttttgaccatttggtgctttggttacttcactaacagcaatttcaaaattgtcattataaacaatacctgtatccgcaacttgtccaccactgattgcataaaatggtgtttccgttaacatgaagtatactgtttcacccgcttcaacttgtgaaacttcttcaccattgtatatcaagtgtgttagtgttgtttgagctgtcgcagtatcataaccaacaaaagtacttgcagatgtaatatttttcaatacttcactttgaacttgcattgattgagaattttgacgtgcttgacgtgcacgatcacgttgttgttgcatttctgactcgaatgttgtcatatcaactttcaatcctgcttgcactgctatttcttcagttaattcaattgggaacccatacgtatcatacaatttaaatgcatctttcccattaatttcatttgttgtcgctttagcttttttaattaattcatttaaaatcgctaaaccatcttctaatgtttcatggaatcgttcttcttcagactttataacacgcttaatgaaatctgctttttccttaacatttggataatatggttccataatgtctgcaacaatatcaacaagtttgtacataaatggctcattgattcctaacgtttgactaaaacgaacggcacgacgtaacaatcgacg

SEQ ID NO: 4248 - DNA, 234 bp, Staphylococcus aureus
tgaatttttaaaagcttatctgacttcttaacatgttcagcatcaataatcgttgctgccttaatttcaactttatcaaagtctttaatatcaatttgaggtttgctaggaatctcttctttttcctctttagtagcaggcggttgcattgattctttgatatatgcaatttccgcttcgctatccaatcttgggaaaataggtttaggttgcccagtaaccataattgactca

SEQ ID NO: 4249 - DNA, 257 bp, Staphylococcus aureus
ttactcataattattctttatttaaatctgcttccgtaacataaacatcccttggttttgaaccattagcactcgaaacataaccgagttgctctaattgatcgataattcttgctgctctattatagccaatttggaaatgtctttggattaatgatgttgaaatatgtccttcattaaccataaatgcacaaacatcatcaaataattcatcttgtgattgtgtttgtgtttttttcaacaattctttttcttca

SEQ ID NO: 4250 - DNA, 661 bp, Staphylococcus aureus
agcagctgctccaccagcaatttggtgcatcataggtgtttctacttccaagaaacctttattatttaaataattacgcatttcttgaatgattttactacgattaataaatgtacgagtgctatcttcgttcgtaattaaatctaaatatctttgacgatatctctgttcaatatcctgtaaaccgtggaatttatccggtaatggtcgcaatgatttagttagtagcgtgaatttcttcgctttaaccgataattcgccagtatttgttttgaacattacaccttcaacaccaacgatatcgcctaaatcagcatttttccataaatcaaattcgtcatcgccaacttgatctttacgaacgtaaatttgaatttgtccagctaagtcctgaacgtgtgcaaatcctgctttacctttaccacgcttagtcattaatcgtccagctatagcgacatgactatccgcttctttttctaccaattcttctttagaatactggtcccactcttctttcaaatcactagataaacctgaacggtcaaatttagaaccaaacgggtctataccaagatcatataattcttgtaatttttgacgtcgaaccaacatttggtcattcatttcttctgacataactttctctcctttaacttgttgt

SEQ ID NO: 4251 - DNA, 242 bp, Staphylococcus aureus
tgcttcgattcttcgagctatctgttttgaaaatttctcctcgccatagcgataaaaaatcttcactaacgcttcatatgaccaattgttaacaatttcatatgctgttagttcttgtgtttggtccatacgcatgtctaatgttgcgtcatggtgataactgaatcctcgttctggaatgtcgagttgtgggcttgaaacacccaagtcgtaataaattccatctactttttcaatgttta

SEQ ID NO: 4252 - DNA, 661 bp, Staphylococcus aureus
agcagctgctccaccagcaatttggtgcatcataggtgtttctacttccaagaaacctttattatttaaataattacgcatttcttgaatgattttactacgattaataaatgtacgagtgctatcttcgttcgtaattaaatctaaatatctttgacgatatctctgttcaatatcctgtaaaccgtggaatttatccggtaatggtcgcaatgatttagttagtagcgtgaatttcttcgctttaaccgataattcgccagtatttgttttgaacattacaccttcaacaccaacgatatcgcctaaatcagcatttttccataaatcaaattcgtcatcgccaacttgatctttacgaacgtaaatttgaatttgtccagctaagtcctgaacgtgtgcaaatcctgctttacctttaccacgcttagtcattaatcgtccagctatagcgacatgactatccgcttctttttctaccaattcttctttagaatactggtcccactcttctttcaaatcactagataaacctgaacggtcaaatttagaaccaaacgggtctataccaagatcatataattcttgtaatttttgacgtcgaaccaacatttggtcattcatttcttctgacataactttctctcctttaatttgttgt

SEQ ID NO: 4253 - DNA, 254 bp, Staphylococcus aureus
tcaatatcttcttctaaccacttcttcacctgcgtcgtgatggctactttttcatctttcacaattgtataatgtgcgtcactcacttcaacgtcatctgcttgtaatagttggcgcacgcattgaccacctttatctgtatcaaagtctctagtatctgataccgttagtacggctgctttaactgtacgattcaatttaacgttttgatgttcgcccataatattacactccttttgtcttatcttttttta

SEQ ID NO: 4254 - DNA, 156 bp, Staphylococcus aureus
cgcctccttcaacgatgtgaatacattttaaagtaagttattataaccctaaggtcagtcttacgtttgtctgaggtaagacttcgggatgtgttgagtggttaatgttttccttcccctaccctatccttacttaatctttttattaaaaacttt

SEQ ID NO: 4255 - DNA, 225 bp, Staphylococcus aureus
ctttaaccattctagttttatattggcgatcagttagctgaccactagtaactttatcgaagacaggtaacgttgatggaatatcgtcgtatccatatatacgtgcaacttcttcaattaaatcttctttaattgtaatatctttacgacgtgatggtactagcactgtaataacatcatcatttatttctgtatcaaaccctagttgattaaaaatagtaacaa

SEQ ID NO: 4256 - DNA, 254 bp, Staphylococcus aureus
tgctaatgctgcagctgttggttcattaatgatacgctcaacttctaaaccagcaattttaccagcatctttagttgcttgacgttcagcatcgttaaagtatgcaggtactgtaattacagctttgtcaactttctcacctaaatagctttcagctgtattttttaagttttgtaaaatcatagctgagatttcttgtggtgtgtatgatttaccttcaatatctactttataatcagtacccatatgacgtt

SEQ ID NO: 4257 - DNA, 156 bp, Staphylococcus aureus; identical to SEQ ID NO: 4254

SEQ ID NO: 4258 - DNA, 143 bp, Staphylococcus aureus
ccaattttccgatctactttcacaatctttagcgactgacttaaactcatcaccaactagcaattgttcgacaactaaccgaattgccaaataatccgttaacaaatgttgttcaaagtgatgctgttgtgaacggtaataca

SEQ ID NO: 4259 - DNA, 155 bp, Staphylococcus aureus
tctttacgacgtttacgttcttcatgtcgttttcttaaacgctcttcttcttcaggatcacgtggtttctttaattgttgagaaactttttcgattaattcttcttcagtaagcgcagccagtgggcggttattaacaaaagtgaatgtttttcg

SEQ ID NO: 4260 - DNA, 405 bp, Staphylococcus aureus
tgtcattactgcgcattgatcctttttgatggatggcatctttgtacaaaggtagacttgcattaaatacaatgccatgatcttcacaatgcacataaacttctacaccatcatctttacctacaacatttgtagctttaacttttagtccaaagttatctttaaagaattgttcacctactttttcaaattctttacgatgcttcttcgcaaattcaatcgcatttttttctgcaggcggttggaagccttggcctacatattttgaagcttccatttcttctggtacagattttgtttctgtttttgtgtctttttttgattcattttccatcgtggaacatccccctaaaattaatgtcgtagctaaaactgatccaatgaattttttcatatgacacctcg

SEQ ID NO: 4261 - DNA, 167 bp, Staphylococcus aureus
cttcgataccagctttttcagctgcacgacgtaccatagtgtttttgtatactttatactcaacaccagcttcacgtaattgtgaacgtaagtcagtaacttcagctactgttaatccacggtagtcaacgattactgttgaaactgaatttgatagtacctcagca

SEQ ID NO: 4262 - DNA, 205 bp, Staphylococcus aureus
ctgacttagtacgtacgattacagctttgacaacgtcaccttttttaacaacgccacctggtgttgcatttttaacagtacatacgataacatcgccgatgtttgctgttttacgaccagatccacctaatactttgattgtaagaacttcacgagcaccagagttgtctgctactttcaagcgtgtttcttgttggatcattag

SEQ ID NO: 4263 - DNA, 264 bp, Staphylococcus aureus
cccactgctgtttttattgttctaaatccaatcttgtaaggatttaactttaacatgggttagcgcctcttatctttcttcacaatatttattgaataatgtttgtaattgattaattacgttcatcacatcatgaccttcgatttgatgtctttcaatcatttctgtaatctttccatcttttactaatgcaaatgacggacttgaaggcgcataaccttcgaagtattcacgcgctctttgtgtcgcttctttatcttgtcc

SEQ ID NO: 4264 - DNA, 277 bp, Staphylococcus aureus
agccttcgtttcacttggttgtgctttagtgacatgttctggtaaattgatttttacagtcttttcagttgattctgaaataccatctaaatctacttctgcatcaacttcgcttatattttgtaagtcatctcgactaccgaagatttcaatttctttatcttctaaatcaatcgaacttaactctttatcatctgctaaactacctttctgtttaacatttactttaacctttttgctaaaaggctctactttaacttgtaaattcacttcatta

SEQ ID NO: 4265 - DNA, 171 bp, Staphylococcus aureus
tacggtgtggaaggaataacaattgttaaacctggcgatgaagcaaatatactttcaatactttgtgaatgatatagtcctccgtgaacaccgccaccaaatggtgcacgaatcgttaatgggcattgccaatcattatttgaacgataacgcattttcgcagcttcacta

SEQ ID NO: 4266 - DNA, 371 bp, Staphylococcus aureus
tcacttacgcctgctgttcgtttaacaatatcatttaaaacatatcgtacaccgcgttcagtgattgcttcacccttcatatttacaataagaaaatcatgattgcatgactgaattggtttgaaatgttctaaataattttcgatgctttgtctacaataagcaccaaacggtacaaagcgctctttgctcccttttcctaatacggtaacaccattcgcgtaaaaatctatatcttgttttttaatatttactaattccgaaacacggatgcctgtagcatacaacaattcaagaataactcgatcccgtaaattttttgaagtgtcctcttctacagttttgaataacgcttccatttcttcttcgta

SEQ ID NO: 4267 - DNA, 195 bp, Staphylococcus aureus
tgacgcatgcgcttcactcattggcatcaataaatcaattgtttgacgctgttgcatcgaaaatgcagtagcatcttctttagaaactaacgaatacgtaatagcttggtctaatccagcaccttctaacacttctttaaccattctagttttatattggcgatcagttagctgaccactagtaactttatcgaa

SEQ ID NO: 4268 - DNA, 295 bp, Staphylococcus aureus
tgatagttctgctggataacgctctaaaaatgactccggtaaatccacaagtttaattaattcctttgcacgtttatccttttcctctttagtccatttcaacaatttgggtaccaacacaatattctctttaatcgtcatatgaggcattaagccaatttgttgaataacatagccaatatttctacgcaattcgacaggattcatactccgaacatctttaccatcaatttcaatttgtccttctgtcgcttcaatcatacggtttatcattcttaaagcagtcgttttgcca

SEQ ID NO: 4269 - DNA, 295 bp, Staphylococcus aureus; identical to SEQ ID NO: 4268

SEQ ID NO: 4270 - DNA, 167 bp, Staphylococcus aureus; identical to SEQ ID NO: 4261

SEQ ID NO: 4271 - DNA, 155 bp, Staphylococcus aureus; identical to SEQ ID NO: 4259

SEQ ID NO: 4272 - DNA, 264 bp, Staphylococcus aureus; identical to SEQ ID NO: 4263

SEQ ID NO: 4273 - DNA, 155 bp, Staphylococcus aureus; identical to SEQ ID NO: 4259

SEQ ID NO: 4274 - DNA, 329 bp, Staphylococcus aureus
tgcatttttagctgaaccaggatgaacatttacaccgtggcatgtaataaccgcttcagcagcgttaaagctttcatattgtaattctccatattgactaccatccatagtataagcaaaatcagcattgaagcggtcaacatcaaatttatgtggaccacgaccgatttcttcgtctggtgtaaatccaatgcgaatggtaccatgtttaatttctggatgttcttgtaaataacaaatagcttccataatttccacaatacccgctttatcgtctgcacctagtaacgatgtaccatcagttaccattaatgtatgaccaactaaac

SEQ ID NO: 4275 - DNA, 268 bp, Staphylococcus aureus
ctacattatatccttcttctgctaattgtaacgcaatactacgtccaattcctcttgatgcacctgttactaaagcactcttagtcattttcattccatcctttcacatcttctaaagtttgaattgatgttaacttaacatctctatttatttttttaattaagccagataaaacttttccaggaccaatttcaataaaatgatcaacaccttggtctattagccattctgttgagttaatgaattgtactggtgaatataattgct

SEQ ID NO: 4276 - DNA, 203 bp, Staphylococcus aureus
tgcattatttttcaagtaaaggagtcttattaggcgtccctggttttcttggatactttttcggcgtctgtctttttttatcaataatgaacatctggcgctctccagcatcttctggcaattcaaaggtatgtgtttctgtaacattaccacctaacacactaattgcaaattttgcttcttctaattcttcttcacctttt

SEQ ID NO: 4277 - DNA, 448 bp, Staphylococcus aureus
agtttattctgttttaaaaacttgtgttgcttcaacagcttttttccaacctctatataatttttctctttcgccttcatccattttcggatcgaatttttcttctaatttccagtttttagcgatatcatctttactctcccagaatccaactgctaaacctgccaaaaatgcagcacctaaagctgtagtttcttgaatttcaggtctttcaacagaagtattaacaatgtctgcttggaactgcataataaagttatttttaactgcaccaccatcgacacgtaaactttggacatcaataccagagtcttttgacattgcttccataacgtcacgagtttggtaacatagtgattctaaagttgcacggataaagtgctctttttcagttccacgtgttaaaccgaaaatcgcaccacgtgcttcagaatcccaatatggtgtt

SEQ ID NO: 4278 - DNA, 266 bp, Staphylococcus aureus
tatgttggtttcataccgacaacgccacaatatgcagccggttgtctaattgaaccacctgtgtctgaacctaagctaaatggtactaagccagctgcaactgctgctgcagatccacctgatgaaccacctggcactgctttatggtcaaatgggttaactgtttttttgaaataagatgtttctgttgaaccacccattgcaaactcatccatatttaatttaccgattaaaacggcattttcattatgtagtttttccattac

SEQ ID NO: 4279 - DNA, 205 bp, Staphylococcus aureus
gccttttcaagtcgttgttccactttcttaatttcattgttcatgtttaactttgccacgttaatcacctttggtattatctttttctttatagccaaggtgcattgcagcaacgccccctgtaaaactacgtactcttacatttatgaaacctgcttcttcaaacatgcgcttcaactcttcttttccaggaaaattaaacgta

SEQ ID NO: 4280 - DNA, 147 bp, Staphylococcus aureus
gcttctctttcaaaccaaatatttgaaccgtgttctgcaaataaatcagcaacatgattcactgtttctttcgtcatgataatttcgccattttcagcataaaatactggtaacggtacaccccacacacgttgacgagaaataacc

SEQ ID NO: 4281 - DNA, 206 bp, Staphylococcus aureus
tgccattcgaattgctgcagaaatcccacctaagccaccaccaataacgatgatatgtttagtcatgacgttcacctcttcgttttaatatgcgtagtaactgcgttaatctcggtcgattatagcgttgcacaataatgattggaacattagctatcattgcatagaaaatatttatatactttactaaacgagggcctttattg

SEQ ID NO: 4282 - DNA, 103 bp, Staphylococcus aureus
caagagatcgaacgacgacatcagcacctgcacttaaaattaagaagcctaatatcgttttaatggttcctgaagtgatcgttgcggcaggttttttctgaac

SEQ ID NO: 4283 - DNA, 502 bp, Staphylococcus aureus
taatttgttgcttgtctactgtcaccttctctaaggataaacacatctatatttgagttttctccgtctttaaatttatctttatcagatccaagtaaagtgattcgagaatgctgttgccctactgtgacttctaaatagtgtttaccctcatcagtatatttaaatccagtcacatttttacgctctaaaattggtttattataatagtgttttaactctgattcactttgttgtttaacttctgctttcgcttgtactgattgtacattcgatgtaattacacctgttgctaacattcccaatgctaaacttgcttttgctatcgctttaaatttcataatttttagccccaatctatttaaatttgatttttcaattacgtaatatgaacaatctacctacattatattgaggcgctatcccctttcaaattaaacctcatttaactaaacttgaatcattgttaaggtaattaataaaatgctaactgttattaatc

SEQ ID NO: 4284 - DNA, 169 bp, Staphylococcus aureus
tgtttgtcgtttctgctgcatctgcttgatgcgccattgtaaatgtagcgaagcccatcgttgcaatcgctgctgctgttaattttttcatgtataaaacatcctccattaaagttaaagttagttttcaattaaactgtactgcacatactaaaagaattagacaact

SEQ ID NO: 4285 - DNA, 662 bp, Staphylococcus aureus
taaagcaatccataggcctgcaagctcaaaataagcagtttttttaccagtcaatagcaatttcccaagtaaaatatctctataaaaatgtattgaatcgtttaaatttctgactgaaaagcatatatgattaatagattttaacatctgcttcacttctttcttagaatttttataataaattatttttgtatcgatttttgaaatgacgtcattaatttttatacgatgatctgcgcaactgcataagaggctctaataacttaagttaaaggcaaaaggtatacagttgactacgcaactacataagaggcactaataacttaagttaaaggcaaaaggtatacagttgactgagcaactgcataagaggctctaataacttaagttaaaggaaaaaggtatacagttgactgagcaactgcataagaggctctaataacttaagttaaaggcaaaaggtatacagttgactgagcaactgcataagaggctctaataacttaagttaaaggcaaaaggtatacagttgactgagcaactgcataagaggctctaataacttaagttaaagagcctctaaaagtccatataaataatcttggcattgttgtacgaatgtatgtacttgttcggagtgtttgcgttttttatggtaattg

SEQ ID NO: 4286 - DNA, 273 bp, Staphylococcus aureus
gctaaattcgtgtcatattcaaagaaggcttctatttcattaatcgtgttctttccaccatatctaaaaaattctggctcgtatgatacaaattcataatctgaaacttctgtcgtttgtcgaacatgtggtaaccaattcttcaagatgctgtatatttctgcgtaattttcgtcattcctgaataacctcaactttaaaatgtcaccttgtttgatataacgcattaaaaaatattgatctatatctcccttatctttaagatgttttaca

SEQ ID NO: 4287 - DNA, 169 bp, Staphylococcus aureus; identical to SEQ ID NO: 4284

SEQ ID NO: 4288 - DNA, 133 bp, Staphylococcus aureus; identical to SEQ ID NO: 4212

SEQ ID NO: 4289 - DNA, 159 bp, Staphylococcus aureus
gcaattctaagttgtaataatgcgacttcaatttgtccatattgatttgcgtcataattgcgaatcactgtttcattacttgtccaaatctgattcaaactattgttcaaagattctaattccgctttatttttatctttaatcgcttttgtcatcgca

SEQ ID NO: 4290 - DNA, 256 bp, Staphylococcus aureus
tcacgtacacgtggtaatgatactgaaattaatttgtctaagaattcatacattctttcaccgcgaagtgttactttcgcaccgattggcataccttcacgtaaacggaaagtcgcgattgattttttagctttagttactaatggtttttgaccagtgatcaattctaattcttcaacagcattgtctaatactttagaattttgtactgcgtcacctacacccatgttcacaacgattttatctatttttggta

SEQ ID NO: 4291 - DNA, 656 bp, Staphylococcus aureus
gcaattgaaatattaatgtctttatgtaagacaatttcatttccttgccagctactatttaataaaggatatgcttttaaagcatctgctacagcttttacaaagaaagcaaagaacgttagattatatccttctttatttttaaagctgtttttataatgatttctcgtattcacaagatttgtagcatctacttcaatcatcatccatgcatgtggaatctctgttacactattaaccatattttgcgcaattgctttacgcacaccatttactggtattgtgctgttttcactattgtcttcagatgattggttacttgatgtatctactgatgttgattttgtttgaacttgtttgtcagattgagctgtggtaccaccattttcaataactgacattatatccttcttagttacacgaccttcaaatccactacctacaacttgtgataaatcaatgtcatgctctgaagcgagtttaaatacaacaggtgaaaagcgaccattattacgtggttgattttgtttagcagtagatgtctgttccactgttgcactagcttttttagtagatttctgagtatgctcatccacttttgcttgtatctcttcagttgtttcatttgtcttttcatcagcagtttcaattttaca

SEQ ID NO: 4292 - DNA, 337 bp, Staphylococcus aureus
tgtttcttcgctttcttcagttatgtcgcttacttctgaaactgaagacgaagttgattgatcaacttgctcattttccaattgattatcatcttgactttcttcaaatatttccgtttgagttgaatcaacagaaggtttctgctctgaatattgttgtgcattttgataatcattttctgtttctgcatgaccaataagttgattgttctcaacattgtttgatgtcatattatttgttttatatgcatttgtatttgactcttgtgaatcagatcttgatgatggtgtggcttgactcgcaggcattctttcactcacagcttgcttactttgt

SEQ ID NO: 4293 - DNA, 234 bp, Staphylococcus aureus
tgcttgttttatggttggagattgtggtgtgtctgatttagtagattgcattggttgtggcgtgtttgttgatggaggtgttgtcactttagttttcggcgttgtggattcggttgtcgtttgtgattgttcttgtttaggcgctggcgttgctgatatattaagcgttttctgctcttcttgtttaggttgtgatattttttctattttggaagctgaggttttttcctcatt

SEQ ID NO: 4294 - DNA, 255 bp, Staphylococcus aureus
aatgaaaattctctagccatgtattttttctccttccagtttatattactgaataaatacgatagatatggcgatgccctaagcatgaacgcttaatgaaaattcattaatatagaacacactcagggtaaaagcttttatcttaccaacggtagtgagcaaatgctttgtttgcttcagccattttgtgagtgtcctcacgtttcttaacggcaccacctgtattatttgctgcatctaaaatttcgttagcta

SEQ ID NO: 4295 - DNA, 255 bp, Staphylococcus aureus; identical to SEQ ID NO: 4294

SEQ ID NO: 4296 - DNA, 244 bp, Staphylococcus aureus
tacgttcttcatgtcgttttcttaaacgctcttcttcttcaggatcacgtggtttctttaattgttgagaaactttttcgattaattcttcttcagtaagcgcagccagtgggcggttattaacaaaagtgaatgtttttcggcgtccaggtccacaataagattgacaacctatcacgatttcagcatcgggatctaatttttccaacttcttttgtaacgttcttatattgactgcctgaca

SEQ ID NO: 4297 - DNA, 380 bp, Staphylococcus aureus
taaatccatccatttatatattacttttaggtcttcttcgctaaggcctaatgatttataatcaatcatgttaaatcctcctatttatacgtgaatagctctactttctgctttcaatcctaattccatcaacacttcagagatggaaggatgtgcgtgtgttgttagtcctaattctaatgccgagccattcatgaactgtaacagtgatgcctcattaatcaattctgttacatgtggaccaatcatattaatacccacaatttcttcagttgattgatcaatcaccatttcgctatacccttcgtttgtgtcatggctatcaatcactgctttaccaattgctttaaatggtactttaaaacttttaactttcattc

SEQ ID NO: 4298 - DNA, 126 bp, Staphylococcus aureus
atacatggggtttaaatcattatctaataacagcaccttgttcaattaatgctgcttcaatttccgcttgtacttttgaaacgcgctcatctgtcaatgtttcttctgtgtctaaataatttaaac

SEQ ID NO: 4299 - DNA, 422 bp, Staphylococcus aureus
cgacacttggatatggcgcgtcttcagcagcctttgtcgctttattgatgatgtctttatgctccgcttctatttctgccaaccaagcatcatcgataatgccagctgaaagcaactcttttttgaacttttcattgcagtctgcttttttaagcgtttcacgctcttctttcgtacgatattggtcgtcatcatctgatgaatgagctgtcatacgacttgttactgcttcaatcaaagttgaaccttgaccagaaatagctcgatctcttgcttctttcatcgctttatacattgctaatggatcattaccatctacttgttcaccatgtataccgtaaccaagtgctctatccgataatttttcagctgcgtattgtaatgaatcaggtactgaaattgcatatttattatttataatg

SEQ ID NO: 4300 - DNA, 140 bp, Staphylococcus aureus
tgtgatgttaccttcacctggtactaaacgtacacgtgctactgagtttttacgacggcctgtgcctctatattcaacttgtgccaaagtcatttcctccttctaattaaccacgtaattcgtagttttctggttgttgt

SEQ ID NO: 4301 - DNA, 160 bp, Staphylococcus aureus
tacgcattgtaagctgtgtacctggttcaccgatagattgggctgcaattgtaccaactgcttcaccaacttcaactttttcaccagtagcaaggtttttaccgtaacatttttcacaaacaccatgtcgtgcgttacaagtaaatgctgagcgaatata

SEQ ID NO: 4302 - DNA, 257 bp, Staphylococcus aureus
tttcgtgtgacaatgttgtaataaatgatggattaaagccactttgaattaaaggaggtagttgattatctgggacgaaatagtctcgtgctgctggaccagttgggtcttgtgcaaataagtattgatcatatgcagatacttgaccattcggtgtaacgaatgaatttgctttcactccccatttaacacctttagagttctgactttctacttcagtaacatagtttttttgattataactaattgttttagag

SEQ ID NO: 4303 - DNA, 407 bp, Staphylococcus aureus
cacctgtcgttttcgcttggtctacatcattttgactattagcagcttcaatgttgctatttgcttgtgtcacagcattatctacgtccgcattagccgctgcaatttcttcagcagtaatgtcttgcgtttgagcgattgctgttttacgttcattcgctttcgtagcaattgcttctttcgcattatctttagttgttgttgctggctgaatcgcttcaattttagcaattgctgcttttttagccgcttcaacttccgcatttgtatgtgctgcatctattgcggcatcagctgttgttttttcagtttgaacttgttgtttagcagctgctttttcttcagttgttgagccgttatttccatcaattgctgtttcttgagcttgtactttatctgcaattgct

SEQ ID NO: 4304 - DNA, 241 bp, Staphylococcus aureus; identical to SEQ ID NO: 4180

SEQ ID NO: 4305 - DNA, 1088 bp, Staphylococcus aureus
tctaatccttcccatggatttcgtgctgcaaaaatcgaaattggtgataatggtgtaataacacgtttcgcattttcaatgactgaattgatatttaactgtgttgtcatacctttcacctcctataaatacttcttcaaataattcggatgactttctatcgctttcgagcgtgcttcacctagattaactaaccacacgtacaataccgcaaaagccttagagtatcgatgccgcgccacccaaatacttaataaactgccaaagattaaaataacaacactaatgatgacactcactgtaggcggcgttgtcgcatgtgttgttatattttgtaatacagcgtaaaaataattatgtgtgatgacgtagataaatgtcacgattgcaatcaaaatcataccaacaagacgtgccatgcgtcctttactaaaggctaccatttgattccaagatacaagtaatgaccatcctagaatgagtgcacttaacacttcatatgcacttctgtcactactcatccaaaatagaaatgccacgataatagctaatacacgtcccatgacaatccagccataagcgtctttagcagatgcttgttttggaatattgaatcgcttcacgatagaacctgattgtaaaaataatgttgctttaaaaataccgtgcaatattaaatgaataatcgctgctgaatatacacccaatgcacattgaactaacataaagcccatttgactcatcgtagagcccactaattggcgtttatagtcaacttgaactaagctaatacccgatcctaacaatacagaaatactagaaaggataagtaataatgataacgcaaatccattatcaaatatcggcgcaaaacgagttagaataacaccacctgcattcacaattcctgcatgcataattgccgatactggcgttggtgccgttacagattcaatcaaccatcgatgaaaaggaaattgtgctgccggtatcatgacagctaatacaagtagtacattcgtcaacaatgaccatgtcggatgaactatatgttgtggtacccgccactcgccagtcgcaatataaat

SEQ ID NO: 4306 - DNA, 117 bp, Staphylococcus aureus
agccacgatgtgcacctccttgatatcgtgatgtggtcacagggctcagttttgccctcccactcttaacatttcgtgacgaaatgggcgctctaaaagcgcgaccacataatttta

SEQ ID NO: 4307 - DNA, 266 bp, Staphylococcus aureus; identical to SEQ ID NO: 4278

SEQ ID NO: 4308 - DNA, 91 bp, Staphylococcus aureus
gcctaacttttcacccagtgcaccgaatggttcggctacagaataccctgtaattctgtgttcactcaatgcggctggcatttctgctggc

SEQ ID NO: 4309 - DNA, 91 bp, Staphylococcus aureus; identical to SEQ ID NO: 4308

SEQ ID NO: 4310 - DNA, 195 bp, Staphylococcus aureus
caaaggacataaggcaatgaactaagtgatttgtctataaagcgactcttcaaaaattgttctacctgtttgatcttgtctttttgatatgcgatatcttcgaatgttaagttgagcgcctttaaaacttcacttttagtaatatcatgattcaacctttgatcaatcaacttaatgaagaaacggcgaacttca

SEQ ID NO: 4311 - DNA, 97 bp, Staphylococcus aureus
ccttatcatttggtaagactgttgactgtgtaacaatacatgatatttttcctcacgccaaagctgttcgatatagccacgttctttcataaaatta

SEQ ID NO: 4312 - DNA, 305 bp, Staphylococcus aureus
tgtgaatcaagttctggattgattgcacaatcaccaaagatgtattgttcatcacctttaatcataaagaagatacctgatgttcttgatacacctggtttcgttttgatgatttgtaaagctggacgcacagtgtcgcctgttgaatgtgctgcaccactaactaaaccatctgctttaccagcataaacaagcattgtaccgaagtagttcacattgtttaataattcttgtgcttgttcttcagtcgctttacctttacgtcgttcaacaaatgattgaactaattcagctttcaattcact

SEQ ID NO: 4313 - DNA, 195 bp, Staphylococcus aureus
agagtagtgaacgtcacgtacttccatttgagcacgttcacgtgttaaaccaccaggtcctaatgctgatagacgacgtttatgcgttaactcagctaatgggtttgcttggtccatgaattgtgataattgagagctaccaaagaattctttaatagatgcaataacaggtcgaatattaattaattgttgagg

SEQ ID NO: 4314 - DNA, 202 bp, Staphylococcus aureus
gattaacagcagcctgcttttcttcgtcagttgcattaggtgtttgtttaaccgcttcaatacgcttcgccacttcagcagtgattttatctcgcgctgcttgtttttttactacatcaacttgaacagcatcgatattattctctgctactgtcgcagcttggtctacttctgcatttgtgttagcttgtttaatactttc

SEQ ID NO: 4315 - DNA, 287 bp, Staphylococcus aureus
tctttttaagtgcttttaatatttcatcttttaaagctaggactcctttgtactctaaatgtacaccgtctggtgcaaaatattcactatgtccttgtgatcgcttataccaatcaattaatgtgacattggactttcgtttcgccgcgtcagctaataatcgatttacatttgcctcataaattcttggaacacgtgtattaactaaataaatcttggcttttccaaattgattaagtaaatcgtcgagctgtttgacagtaaagtcgccatttgtacctaattct

SEQ ID NO: 4316 - DNA, 186 bp, Staphylococcus aureus
attttagtgcctaaaccatcaatattcatggcttgtcttgatacaaagtgaatcaatccttcaacaagttgtgcttggcattttggattaatgcaacgaagtgctacttcgccttcaatacgtactaattcatgtccacaacttggacaatgggttggcatatgatatgtgacagcatcctcaggt

SEQ ID NO: 4317 - DNA, 195 bp, Staphylococcus aureus; identical to SEQ ID NO: 4313

SEQ ID NO: 4318 - DNA, 109 bp, Staphylococcus aureus
tgtttctgggttcatcgtcgtttcccataattgttcagggttcatttcacccaaacctttgtaacgttgtaacgtgaagcctttaccaagttctttttgcaatttatta

SEQ ID NO: 4319 - DNA, 751 bp, Staphylococcus aureus
tacacttggatcttcatcgtaataatgactcattattccacctcatcttcactttgtaactcgtcattataattataacatttcactcagtctttaaatgaataaaaccccgttatcaaaataacggggttttaacttctcaaagaatcattatattatagcaatacttgctataaaactttgattattaagtttaagatacttgaattattttaattctacagtagctccaacttcttctaattgttctttaagtttttcagcttcttctttaggtaaagcttctttgattactttaggagctccgtctactaattctttagcatcttttaatcctaaaccagttgcttctttaacagctttaacaactttgattttagatgaaccagctgaagttaactcaacgtcaaattcagttttttctgctgcagcgtcagcgccaccagctgcacctgctactgctactggagcagctgcagttacaccaaattcttcttcaattgcttttactaagtcgtttaattctaatactgacatttctttaatcgcttcaatgatttgttcatgattagccattttataattcctccattatttttaatttttttacgctaaaaattattcagcgttttcttctttttgttctccaatagctttaaccgcataagcgaagttgcgtacaggagcttgtaatactgataaaagcatagatacaagaccatcgtgtgaaggtaatgaaccaacagtttta

SEQ ID NO: 4320 - DNA, 170 bp, Staphylococcus aureus
taaatgatggattaaagccactttgaattaaaggaggtagttgattatctgggacgaaatagtctcgtgctgctggaccagttgggtcttgtgcaaataagtattgatcatatgcagatacttgaccattcggtgtaacgaatgaatttgctttcactccccatttaaca

SEQ ID NO: 4321 - DNA, 372 bp, Staphylococcus aureus
tcgatattctccaactctaacagcttaattttattattaatcgttccaccgaaccctgttaagctacccgttttaccgacaacacgatgacatggcacgataatagataatggattacttccgactgcacctccaaccgcttgggctgacatttttggcttgttaagcagcttgcctacttttttggcaatagcaccatacgttgttagagtcccataaggaacctgtcttaattcattccaaacacactgttgaaaatgactacctgttggctttaaaggtattgtgatttcaggattgtcacctttaaaatacgcgtctaaccactgtgtcgcctctctaaatatcgctaaagacgtattttcttcccta

SEQ ID NO: 4322 - DNA, 151 bp, Staphylococcus aureus
gccattgcttcagaagatttctcagtgattacggggcgcttaagaatatctcttgcttccattatccgagcacctcctcaacttttttagcagcagcttcagtaattactaagctgtcagcattagtgatatctaaaacatttaaaccttg

SEQ ID NO: 4323 - DNA, 178 bp, Staphylococcus aureus
tggaccttcacctgcaactgcgcggtcacgtgcttctttagttgcttgatatacagctaacgcatccataccatcaacttggataccaggaatacctacagcaattgctttttgagctaatgtttcagcagcagtttgcttgcttcttggtgttgaaattgcatagttattgttttga

SEQ ID NO: 4324 - DNA, 226 bp, Staphylococcus aureus
gtgttagcaaatgttaaaccgcctataacatatggcgttttgccactcgcggcaattcctataacgacatcttttgatgttaaatctatatttttcaaatcttcttccgctaattttttgtgatcttccgcaccttctacagccatcgtcatagcatgttgtccaccagcaataatacctataatttcatgagggtcagtattgaatgtaggtacacactccgctg

SEQ ID NO: 4325 - DNA, 178 bp, Staphylococcus aureus; identical to SEQ ID NO: 4323

SEQ ID NO: 4326 - DNA, 413 bp, Staphylococcus aureus
cactcgtcataacatcaattacacttaaccctttaccacctttatcatatccaccttcaaattgatttgcggcaagagcgccaccccacatgaaattttgcggtaattttgtcattattacaacacactcctagtttttaaatattttaaaaataacatcttcagtcgtaatgatttcattcattgtcagttctacttttcctaaatcggcagagttgctaataacgacaataacgtcagcattgtagccttgttgttgtatatattgctggtcgaattgcaacaacgtttgccctgcttcaacatgatcattttgctttacaaagcacttgaaccctttaccttccaagtcaactgtattcacgccaatatgaatgactatgtccacaccgtcttctgattgaataccaact

SEQ ID NO: 4327 - DNA, 105 bp, Staphylococcus aureus
cctgtttctggattcttaattcctggtttacctggaacttcctctttctctcctgttggtaacttcggatcaaattcgtctcgatgacctggcgctattgtttca

SEQ ID NO: 4328 - DNA, 105 bp, Staphylococcus aureus; identical to SEQ ID NO: 4327

SEQ ID NO: 4329 - DNA, 180 bp, Staphylococcus aureus
gccttgtcgtccttcaaagtttcgattacttgtagatgcacaatgtacgccctcaggtacttggtcaggattcatgcctaaacacattgaacatcctggttcacgccattcaaatcctgcatttttaaagatagtatctagacctaatttttctgcttctttttttactgtacgagaacc

SEQ ID NO: 4330 - DNA, 246 bp, Staphylococcus aureus
cataaaaataataacatccgcttcatctatggcgatttctgcctgcgctctaatttgtgtttggaatggtgcatcaccaatttcaataccacctgtatcaataatattgaaatcatgtgttaaccattcacctgaagaataaatacgatctcgtgttacacctggcgtgtcttccacaatcgaaacacgttctccaactattctattaaaaattgtagatttacctacattaggcctacctacaat

SEQ ID NO: 4331 - DNA, 180 bp, Staphylococcus aureus; identical to SEQ ID NO: 4329

SEQ ID NO: 4332 - DNA, 149 bp, Staphylococcus aureus
ttgattttagatgaaccagctgaagttaactcaacgtcaaattcagttttttctgctgcagcgtcagcgccaccagctgcacctgctactgctactggagcagctgcagttacaccaaattcttcttcaattgcttttactaagtcgtt

SEQ ID NO: 4333 - DNA, 158 bp, Staphylococcus aureus
tgtaatagataccgaggttccatctttttcttttgcgatctcactttcttctcttaaataatcaatcatacgaatatctctatccagggtctcatctgtttgcttaaaataagctactttaaccgtctgcccagtcttcaatttaccttcgaattgtt

SEQ ID NO: 4334 - DNA, 115 bp, Staphylococcus aureus
aatagttgtcgttctactattgccacttttttacctaattgagacgcacgtatcgcagcaacatatcctgcagtacctccaccgagaacgactaaatcatattgtttctctgaca

SEQ ID NO: 4335 - DNA, 129 bp, Staphylococcus aureus
cacgcgttgcattaatcccaacaatccaatctgcctcacttctcgctaacgctgcataatacaaatcgttatattgacgaccgtcttttaaatttttaaaaccttgttgaatagcttttttagtaactg

SEQ ID NO: 4336 - DNA, 208 bp, Staphylococcus aureus
cggataatcatataatgtgtgtgctagaatactagctactcttaatgtgtccggcacaaccacttgtgttacgttagctggtaatgattgttctttattgaccactaccaacttacacccttgatcagctacattttgacagaacttatgactgtctacagtatatccaactgaagcgacaaaaatgctaccttctctcgctgtacgt

SEQ ID NO: 4337 - DNA, 356 bp, Staphylococcus aureus
tgttatcagcctctttaattgctgctttaatatcagcttttgcacgttcaataacttcattttctttgtcttcattccataaacctttgttttcaaggaatttacggaaacgtactaatgggtcttttttctcccattcagcatcttcgtctgaagttctgtaacgagttggatcgtcaccagccattgtatgaggaccataacgatatgtcatagtttcaattaatgttggaccttcacctgcaactgcgcggtcacgtgcttctttagttgcttgatatacagctaacgcatccataccatcaacttggataccaggaatacctacagcaattgctttttgagctaatgtttca

SEQ ID NO: 4338 - DNA, 133 bp, Staphylococcus aureus
ccaactttgatttgaccacgttcaacacggcctgtagcaacagtaccacgaccagtgattgagaatacgtcctcaactggcatcatgaatggtttgtcagaatcacgttctggagttggaatgtaagtatcta

SEQ ID NO: 4339 - DNA, 887 bp, Staphylococcus aureus
catactgctttattttcaaaaaatcaaatgctcatttacaaaagtaaactccgctttaatttttcttaatgcattgtctaacaaccgctttctttaaaaagaatagattgtcaagcgctcgcataagcaatatcactttaaccaaaaaatatttgaatgttaaataaacattcaaaactgaatacaatatgtcacgttattccgcatcttctgaagaagatgttccgaatatatccttagaaaggaggtgatccagccgcaccttccgatacggctaccttgttacgacttcaccccaatcatttgtcccaccttcgacggctagctcctaaaaggttactccaccggcttcgggtgttacaaactctcgtggtgtgacgggcggtgtgtacaagacccgggaacgtattcaccgtagcatgctgatctacgattactagcgattccagcttcatgtagtcgagttgcagactacaatccgaactgagaacaactttatgggatttgcttgacctcgcggtttcgctgccctttgtattgtccattgtagcacgtgtgtagcccaaatcataaggggcatgatgatttgacgtcatccccaccttcctccggtttgtcaccggcagtcaacttagagtgcccaacttaatgatggcaactaagcttaagggttgcgctcgttgcgggacttaacccaacatctcacgacacgagctgacgacaaccatgcaccacctgtcactttgtcccccgaaggggaaggctctatctctagagttgtcaaaggatgtcaagatttggtaaggttcttcgcgttgcttcgaattaaaccacatgctccaccgcttgtgcgggtccccgtcaattcctttgagtttcaaccttgc

SEQ ID NO: 4340 - DNA, 248 bp, Staphylococcus aureus
aagtctatgaagtgttggtgcacggttaagtaatacaggatgttctctaattacttcttccaatacgtcccaaacttcatcatccatacgttcgattttactcttcgcatttttaatgttagttgcaatttcacgttgaactaattctttcattacgaatggtttaaatagttcaagtgccatttcttttggtaaaccacattggtacattttcaagcttggacctactgcaataactgaacgtcctg

SEQ ID NO: 4341 - DNA, 175 bp, Staphylococcus aureus
cctacagtcacttcatcaggaactaattcgccacggtccatataagacttagcttctttacctaattcagtttcttcttttatagcttttctgaacatgtcaccagttgaaatgtggggtattgggaatttcttgacaatttcacttgcttgagttcctttacctgcgccaggta

SEQ ID NO: 4342 - DNA, 132 bp, Staphylococcus aureus
cacgacggtctcctacgcgttgacgaatcttttcaatttcgatttcgataaagttttccattgtccattgacctctacaatcacaaacacgacggacaaaattatttaataaatcattaccatattctgtat

SEQ ID NO: 4343 - DNA, 480 bp, Staphylococcus aureus
tattcaatgtttgattttaataatctttcgaatgtttctttttcaagtaaatctgccatacgaataccgatacgttgaactttgtctacatatgctggaccgataccttttttagttgtaccaatcttattgtcaccacgtaaacgttcttcatattcatcttgtgctaagtgatatggtaaaatcacttgcgcacgattagatatacgtaaattacttgtaggaatgccacgttcatttaatccgtctaattctttcaatagtgcaactggatcaacaacgactccgttaccgattaccgctaatttgtctttgtaaaagataccagatggtactaaatgtaatttatatgtttctccgccaaattgaatggtatggcctgcattattaccacctgaaaaacgcgcgataacatctgactgttctgccaagaaatccgttatttttccttttccttcgtctccccattgtgtcccaact

SEQ ID NO: 4344 - DNA, 480 bp, Staphylococcus aureus; identical to SEQ ID NO: 4343

SEQ ID NO: 4345 - DNA, 260 bp, Staphylococcus aureus
tcgtttaaatcatgtaatcaaatttaatattcgtaaaattattctacaacgatacccatactacgtgcagtaccttcgataatacgcatagctgcttcttcgtcagcagcgtttaagtcttgcattttgctgttagcaatttcgcgtacttgatctttagttactgtagcaactttagttttgtttggttcgcctgaacctttttcaataccagctgcttttttaagtaatactggagccggtggagtttttgtaataaa

SEQ ID NO: 4346 - DNA, 186 bp, Staphylococcus aureus
tatgtttaaattcactaaatggccagaacctaaatgaaactttaccaacaatttggtcttcatcaatgaggccaaacgcacggctatctttacttacttcacgattatctccaagcactaaatatttaccttttggaatgacatttgatttaggattcgcattcggtaaatctttaacttggaaag

SEQ ID NO: 4347 - DNA, 271 bp, Staphylococcus aureus
tctgttaagtcgtttactgctacaacttcaagaccttctacttcttgaattcttctgaatgctaaacgaccaattctaccaaaaccattaattgctacttttactgccattataatggcctcctttaaaatgatatttaaaaagtattaaactttttatctcttattcaagtattatctttgctgcggcttcatcagtgattaacactgtattcttgggtgcaatcgtcaagtatgctttaattgcttcacctttcgatttgcctcctgca

SEQ ID NO: 4348 - DNA, 246 bp, Staphylococcus aureus
cctacagctttaagtccgagcacgcaggcacctaagcatgaactttcataactttcaggaaccactaactctgtgtcaaatatatctgacatcatttgacgccatacttcacttttcgcaaaaccacctgttgcttttatcatcttaggtgtttcattcattacttcaataagcgcaagatagacggtatacaaattgtaaagaacaccttctaatgcagcgcgaatcatatgttcttttttatga

SEQ ID NO: 4349 - DNA, 317 bp, Staphylococcus aureus
ctgattcttgcattgttacaccgtataacctatctgcaaattccattgttcctttacggtgtgtaataacaatgaattgtgtttcgtctgataactcatttaaatattttgcgtatctaataacatttgcttcatctagtgcagcttcaacctcatctaatataacaaaaggtgcagatcttacttttaaaattgcaaatagtaaagcaatagcagttaatgcacgctcaccaccactcagtaacgataaatgttgcaactttttacccggtggttgtaccacaatatcaataccagctgttaaataatcggcttca

SEQ ID NO: 4350 - DNA, 255 bp, Staphylococcus aureus
cctttgtatggaccatgaactgaacctaatgctggcgctaatgcatcaataccagttttttcaactagttcttgacattctttaggatcagcataaatgatgccgtctgctacaacatcatcttcttgtccaccaacagtacctaattcagcttctacagaaacacctttttcatgagcgtattcaacaacttttttagttgttgctacgttttcttcgaatgggctgtgtgaagcatcgatcattactgatgtg

SEQ ID NO: 4351 - DNA, 264 bp, Staphylococcus aureus
ctcgtatgcctccaaactcatttccttaacctcttgtaaaaactgtgtccacattttatcaggtgacggttgccctctatataccaacgtattagcaaacatgcctagcatttgctccgtgcctttatgcatacgcgcactcatcacactaccgacaacaacatcatcttttcgagcatatctacttaacaacgtcatgaccacactcataaagaacataaaatcagtaatttgatgcttttctacatacttttgaagtagctg

SEQ ID NO: 4352 - DNA, 203 bp, Staphylococcus aureus
tgtgggtgatcgttagggttcattacagaaccacgaactgttggacggatacctttccatcttgaacgtccggctttaccaacgttaactaattcgtgttgtaggttaccaacttgaccgattgtagcacggcaagtagataagatcatacgaacttcaccagatcttaatctgattaatacgtatttaccttctttaccaag

SEQ ID NO: 4353 - DNA, 99 bp, Staphylococcus aureus
ggtttacctggaacttcctctttctctcctgttggtaacttcggatcaaattcgtctcgatgacctggtgttatcgtttctggtccgtattctgttaat

SEQ ID NO: 4354 - DNA, 260 bp, Staphylococcus aureus; identical to SEQ ID NO: 4345

SEQ ID NO: 4355 - DNA, 206 bp, Staphylococcus aureus
gcgaacattttccatataaggaatgagttcgtcaaattcattccctcgatccaaaccaccacataaccaaatgattggttgattaaatgaatttaaggcaaactgtgttgctagcgtgtttgttgctttggaatcattataatatttattagttctattagtaccaacatattgcaatctatgctctattcctgaaaatgtagtta

SEQ ID NO: 4356 - DNA, 379 bp, Staphylococcus aureus
ggctttttaacgattgattctacttgtaaaatcgctgcttgtggatgatttataatacccattgatgatactgaaccaaatgtaccagtattatttaccgtaaatgtaccgccctgcatatcttcagctgtcaattgcttattacgcgctttcgttgctaaagtattaatttctctagctatacctttgattgacttttcgtctgcatgcttaatcacaggtacgtataatttattttcatcagcaacagcaattgaaatattaatgtctttatgtaagacaatttcatttccttgccagctactatttaataaaggatatgcttttaaagcatctgctacagcttttacaaagaaagcaaagaacgttagattatatc

SEQ ID NO: 4357 - DNA, 226 bp, Staphylococcus aureus
tatttttgtctcatataagggaataataatacgtctctgattgatggagagtcagttaataacataaccaatctgtcaataccgataccaagaccacctgtcggaggcataccatattctaacgcttcaatgtaatcttcatccatttcatgcgcttcatcattaccttgcgctttttcaacaagttgcgcttcaaaacgacctttttgatcaataggatcattta

SEQ ID NO: 4358 - DNA, 401 bp, Staphylococcus aureus
tgctaaattgataccttgatttaacattaatttgaaaaatttaccgaacgcttcgccgtcagaatgttcaacttgatcataatgtgtgactttttcatctgtaaagtacaatgttaaagatccataaatacgattaattgtagctgtgatattatgtttttcgattaatttaagtaaaccttcttctagttgttggcctaagctgtctaatttttcataaacaccgtcttgttctagtacttcgagtaatgcaatacctgctttcatagataacgggttaccagccattgtaccagcttgatatgcaggtcctagaggtgctacttgttccataatatcttgacgtccaccatagcctccaattggtaaaccaccgccaacaattttaccaaatgcagtta

SEQ ID NO: 4359 - DNA, 263 bp, Staphylococcus aureus
atcaaagttgaaccttgaccagaaatagctcgatctcttgcttctttcatcgctttatacattgctaatggatcattaccatctacttgttcaccatgtataccgtaaccaagtgctctatccgataatttttcagctgcgtattgtaatgaatcaggtactgaaattgcatatttattatttataatgacacatacaaaaggaagtttgtgtacacccgcgaagtttaaaccttcatggaagtcaccttggtttgagctacc

SEQ ID NO: 4360 - DNA, 173 bp, Staphylococcus aureus
atttttgtctccaactacaactaatgcagtgaaacggaaacgacgaccaccttttacaacttttgctacacggttgattgtaacaacgcgttcttcaaattctttcgtctcttcttctctacgagccatgtatttgtccctcctttaaattaaaattctaatccgctttctct

SEQ ID NO: 4361 - DNA, 473 bp, Staphylococcus aureus
tgttctatatttttgataacttcttctttacgtttttgtaaattgaccatatattggtattcgtcatcaatttgctttatttgaacttcatctagtccaccagtttgctcttttcgatacctcgcaataaatggtactgtatttttttcttctagcagtgttaatactgcttcaatttgttttttactaaattgatatttctctatgattgaattaatcaattgattgtccatttacttaacccacactttttcttaaatttactcatttattttaacatattctaaaatacttctattaagatatgatacttaatgtaattttcacttccaaaacatttaaaacgaatgattaggtcatactatattttaaaacgcactaagattattgaaaatgacacaccatcatttctaaatttcataatctaagactactttttttattctaatagcaacccacctatttaaaacgac

SEQ ID NO: 4362 - DNA, 261 bp, Staphylococcus aureus
tgaatacagtgatttttttaccgcgaccttgtttattaacagtagcagtaactgttgcaccttcaactgttggcgctccaactttaactgaatctccacctacaaataatactttatcaaatgtaaaagtatctccttcgtttacgtctaatttttcaacgaagatttcttgaccttcttctactttgatttgttttccacctgtttcaataatagcaaacatactttgcacctcctgtataataagtcacgccatacata

SEQ ID NO: 4363 - DNA, 208 bp, Staphylococcus aureus
gacgtcatccccaccttcctccggtttgtcaccggcagtcaacttagagtgcccaacttaatgatggcaactaagcttaagggttgcgctcgttgcgggacttaacccaacatctcacgacacgagctgacgacaaccatgcaccacctgtcactttgtcccccgaaggggaaggctctatctctagagttgtcaaaggatgtcaaga

SEQ ID NO: 4364 - DNA, 294 bp, Staphylococcus aureus
aactgttactaatttttgaccaaagcgaatcgtcagcacatcttcaactttaacatccgatccagctttagcaacattaccatttattgtaattctaccttgatcacttacttcttttgctagcgtacgtcgctttattaaccgtgatacttttaaatatttatctaatctcatgtattactctcccctttttctagccactgctttaacgcggcctcatcaaatgacttatccttcgtcttctcatataaatttaaaaaatgctctgcaaatactttttcaaatttaactctt

SEQ ID NO: 4365 - DNA, 266 bp, Staphylococcus aureus
tcaggattagctcctgctcctaaaccacgtgttaatttttcaccgatttggattttagattcagctttagataagtttaaagcttgaccgtctgtgttgatagcgataaattcaacattattcattccgtggtcaatcattcggtttacggcgttgttaccgccaccacctacaccaatgacctttaaagtcgctaaatgattaaatccttgttcaaattctaacatttaaatttcctcctagttttattggccaataatcattca

SEQ ID NO: 4366 - DNA, 277 bp, Staphylococcus aureus
caacatttccaccttcgatgacttcaatgattggcaaatcaaactttttagcaaattcataatctctgtcatcatgcgctggtactgccataattgctccagtaccatatgttgataatacataatcagcaatccaaatttgtactttttcaccagataaaggattagttgcatatgcaccagtaaatacacctgatttatcttttgctaaatctgtacgttctaaatctgactttttagaagcttctgtttgataagcttttactttttctttata

SEQ ID NO: 4367 - DNA, 181 bp, Staphylococcus aureus
tgtatcgatattatattgtaggcgaacaaaagcacttgtaattcgatttagcgtgctgacttgatccgcaacttgtaatttaagaattcttgtcattataagccctccatttcatgatttgatttgccactcggaaccattggggttacagcttcagtaggggaaatacgaacctcaatta

SEQ ID NO: 4368 - DNA, 330 bp, Staphylococcus aureus
taagtaacgaaagctagatctctataataaggcgctgtaatatcaccttcttctaatgcgtatgccatcccaatctgagttgcttcttgtccttgaccacttacaacaaatggaattttacctgcacggttcaataaccacagtctttcatctatttttctacctaaatccatccatttatatattacttttaggtcttcttcgctaaggcctaatgatttataatcaatcatgttaaatcctcctatttatacgtgaatagctctactttctgctttcaatcctaattccatcaacacttcagagatggaaggatgtgcgtgtgttgtt

SEQ ID NO: 4369 - DNA, 435 bp, Staphylococcus aureus
atttacaaaatagacttatcgtcccacccttatcagtataaatataagttatattttttaaaaaaacatactttatttttaatatcttgattattactctaggtgtacttatatcatctttatctcattgtaaccttattattcactcaatattagcttaacatataataaatgttaatatttgtaaaaagcttttttaatataaattaaggttggaacataaatatgccccaacctcaaagacgttatattaagattaacgacggataccaagtgatttaattaattcacggtaacgttgaatatctttactacgtaagtagtttaataaatgtctacgacgacctaccatttttaataatccacgacgtgaatggtggtcttttttgtgtgtacgtaagtgttcgtttactgcgttgatttctgcagtaagta

SEQ ID NO: 4370 - DNA, 828 bp, Staphylococcus aureus
taaatcactaatactaagtccaataattttatcagtgaaatattgtgctatctctttgactttcgcatcatcttgaccgacatgtataccatccgcgttaatttcttttgccaaggatacatcatcattaacgataaaaggcacatcatattgatgacagagatgctgtaattctttagctaatacaagtttatcgtttccttttaaagctgattcacccttttctcgaaattggaaaagtgtaatccctgcctttaatgctgcttctaatacttcatgaatagttcgatgactcggaacatcggaggtcccacaaataaaatacacatttagatacgattggttaaacatattattccacctcttgaatacgaatccgttgttgataggttgtttcatttaaatgatataacgtatcaagcaacaatggtgaaaacgtaccaggaccaccacaattttcattttcagcagctacctcagcagcaatattaaatacgcttaccgcttcaattaacgcttctatgtctggttctgtttctctaaataaaaatccagcaataacgcctcctaataaacaaccagctccagttactcgtgctaataatggagatccattagctaatacgaaggctttattatcttgaacaataacgtcctctttacctgtgattactattgcagttttatatgttgcgtaagcctttttcgctattgcaaccgcatcaagattagcatcactatctgtacctttcatagttgctgtatcatcaatcaacgctaatatttcagatgcattgcctttaattactgatactttcgctgatttca

SEQ ID NO: 4371 - DNA, 122 bp, Staphylococcus aureus
taacttgtgttgccggttgaatcactactatattttgtgtgccctgatcttttgcttgtgcaacttcttgattcgtatctgctgcattaatattttgcttcgctgtggctacagcttgatca

SEQ ID NO: 4372 - DNA, 194 bp, Staphylococcus aureus
taaattcttttaaatacgcagcatcagcttttaagtaatggcgtaatgcgtcagctcctatatctccggataacatcttctgaataaagtcatcctcataaatatcattaatgattggctttgcagcttggtacaatttttgtgaaaattccattgtaaaaaatcctccctaaataaaaaaactacttccaaca

SEQ ID NO: 4373 - DNA, 352 bp, Staphylococcus aureus
tgctaatatcggtagaattgaaataacggctaagaagatagaacctacaaaagttaaacgatataaaactttagtaatatattttttggtttgttcaccaggtctaatacctggaacatagctaccttgtttcttaaggttatcagccattttttccggattaacttgtacaaatgcatagaagtatgtgaatagtataattagtacaatatatacaaccataccaacattacttgaaggatttgcagcattcgcaatgttttgtgcccattctttatctggatagaacaacgttaatgttctaggcagtaagaagaacgccattgcaaagattacaggaataacaccggct

SEQ ID NO: 4374 - DNA, 310 bp, Staphylococcus aureus
tactacactacttgttaatgatattgcgccatcttcgtctaaagaactgacatcgcttaccgcatcatccattgttgtatctacatctaagaagtcttgaccctctattgcatctattacactttggatagatgacttttcattgtcataatcagctgttagatattcaatatcttttgtcatgtcatgcacctatccctcaatattatagtaaagcttggcaaattccgtaccccaatgttcatctgcttcaaagaacttttgtgctgaattcatgacgccaccaccgagtgtactcaatggacctttg

SEQ ID NO: 4375 - DNA, 589 bp, Staphylococcus aureus
gtgataacctttaaatcagttataagaaacgttttgctgccactgaaattggtggaatttgatctaaatctaaatgtttatcttcagtaattgatctaaatgcccacttaccataaccaagcgcttcttcatttacaattttacctggtaatggcgcagcattaggatcaacatatacatctacaatcgttggtacatcttgtgctaatgcctcttcgactatagcatctacttcgctagcactcttaattgtataacctttaccacctgctgcctcagcaaattttgcatgatccatatcagaaaaatcaactgcatattctaattcaccagctgcttgttgttcatatttaataaatgctaactgtttgttattaagtacaaatacagttaaaggtaaatcatattgtactgctgtagcgaagtcttgcattaccatttggaatgcaccgtcaccagcaattgcgatggcttgtctatttggatatgcaatttttgatgcaattgcacctggaagaccgcaacccattgtacctaaccaacttgaaatgatgaacttgttatttacaccaaggtttaagtatcgagt

SEQ ID NO: 4376 - DNA, 333 bp, Staphylococcus aureus
taaatcatctaaatctgctaataattgatctgcatattctgtgattttaagtacccattgtttcatcggcttacgataaactggatgtccaccacgttcagagacaccatcaatcacttcttcgttagataaaacagtgcctaatgctggacaccagttaactgcaacttcatcaacgtatgctaaacctttgttatataactgtatgaaaatccactgtgtccatttatagtattctggatctgttgtattaacttcacgatcccaatcataactgaaccctaattctttaatttgtcgtttaaaagtttggatatttttctttgtaaattc

SEQ ID NO: 4377 - DNA, 656 bp, Staphylococcus aureus; identical to SEQ ID NO: 4291

SEQ ID NO: 4378 - DNA, 320 bp, Staphylococcus aureus
tgctaaaccgtaaggtgatgtataggggctgacgcctgcccggtgctggaaggttaagaggagtggttagcttctgcgaagctacgaatcgaagccccagtaaacggcggccgtaactataacggtcctaaggtagcgaaattccttgtcgggtaagttccgacccgcacgaaaggcgtaacgatttgggcactgtctcaacgagagactcggtgaaatcatagtacctgtgaagatgcaggttacccgcgacaggacggaaagaccccgtggagctttactgtatcctgatattgaaattcggcacagcttgtacagga

SEQ ID NO: 4379 - DNA, 256 bp, Staphylococcus aureus
cgacgtcctttcatacctgttttttcatctacaacatttacaaatgaatcaatattagctagtggagactcaccagtccctgatggcttgatttcatctgtttcaggtaacaacaatggtagctcttcttcaggaacagttgtcattgttccatcttcccaatgaatgacaggaattggttcgccccaataacgctgacgactgaataaccaatctcttaatttgtaattaactttcttttcgccagcaccttttt

SEQ ID NO: 4380 - DNA, 630 bp, Staphylococcus aureus
acagattacatttcccaaagtttcctacttatacatttcttatttctttttcaagattctctacttcttgtttaaaaataggatcttcttttaaatctttagatattttttcatgagcatgaatgacggtcgtatgatcacgcccaccaaattcttcaccaattttaggtaatgagaaatctgtaagctctctagacaagtacatagctatttgacgcggatatgcaattgactttgtacgtttttttgcactgaaatcttcaattctaacattatagtactggcctacaattttttgaatatcttggatggtaatctttttagattttggtgcttgaatgatatcttttaaagcttcagcagttaattcagttgtaattggttttcctaataattgtgaatatgcaagtaaacgtgttaatgcaccttctaattcacgaatattagattgaatttgatttgctatataatttaaagcttctggtggaatatctaatttttcttcttcaattttcttctgcaaaattgccattcgagtttcataatctggtggcgtaatatcaacaattagcccccattcaaagcgtgaacgtaatcggtcttctaattgtgcaatttcctttggtggtc

SEQ ID NO: 4381 - DNA, 132 bp, Staphylococcus aureus
tattctgcatttttcaatttgccagaaatcgcttggtttaccatttgacgtgtgtaatgtaagctgattctacgtcctacaccatattttccgccagtccatccagtattaacaagataaacatcaacatca

SEQ ID NO: 4382 - DNA, 395 bp, Staphylococcus aureus
tatctagttttcaatgtacaatttctttttagtcaagcgctcgcatactgctttattttcataagcaatatcactttaaccaaaaaatatttgaatgttaaataaacattcaaaactgaatacaatatgtcacgttattccgcatcttctgaagaagatgttccgaatatatccttagaaaggaggtgatccagccgcaccttccgatacggctaccttgttacgacttcaccccaatcatttgtcccaccttcgacggctagctcctaaaaggttactccaccggcttcgggtgttacaaactctcgtggtgtgacgggcggtgtgtacaagacccgggaacgtattcaccgtagcatgctgatctacgattactagcgattccagcttcatgt

SEQ ID NO: 4383 - DNA, 395 bp, Staphylococcus aureus; identical to SEQ ID NO: 4382

SEQ ID NO: 4384 - DNA, 87 bp, Staphylococcus aureus
tacaactgatgaaccaacaccatgtaaaccaccagatactttgtatccgccaccgccaaatttaccaccagcatgtaaaacagttaa

SEQ ID NO: 4385 - DNA, 203 bp, Staphylococcus aureus
gctcataaaaatagttctatattttaaatataccaagcaccattaactttctgtatagttccagtaacacttctagcatttgggtgatataaataggcgcatgtatgagcaacctcactcggtaaaaccaatcgctgttgtggtaattcagttatcattgcttgaagttcatcttcttgccactcacttgccatattaccggc

SEQ ID NO: 4386 - DNA, 75 bp, Staphylococcus aureus
ccaccgccacgccattgtggagcacggattgtaccttgacgagcacgacctgttcctttttgcttccatggttta

SEQ ID NO: 4387 - DNA, 187 bp, Staphylococcus aureus
acggaaacaaatacggcataatttaaatttacgatatacagaatgtggacggccacaacgttcacaacgagtgtattcacgaactgcatatttttgttttttttgttgcttagcaaccattgaagttttagccacttaattagcctcctttaaataattatttacggaatggcataccgaagttagc

SEQ ID NO: 4388 - DNA, 151 bp, Staphylococcus aureus
tacagtattactaatatgatcaacttctttatcgctcggtcctctaccactcataacaatacaatatgttccaatatgattatcatgtgccacctttgctccatcgataatttgttcctctggaattaaagcatatcgctgtttttgttta

SEQ ID NO: 4389 - DNA, 353 bp, Staphylococcus aureus
cttttactaagtcgtttaattctaatactgacatttctttaatcgcttcaatgatttgttcatgattagccattttataattcctccattatttttaatttttttacgctaaaaattattcagcgttttcttctttttgttctccaatagctttaaccgcataagcgaagttgcgtacaggagcttgtaatactgataaaagcatagatacaagaccatcgtgtgaaggtaatgaaccaacagttttaacttcttctgctgtaataacattgccttccataacgcctgatttaatttctaatgcttcatgatctttagcaaatccagaaattactttcgctgcagctacagca

SEQ ID NO: 4390 - DNA, 505 bp, Staphylococcus aureus
gctatttttaaatttttctactgcgtctttagctttatccataaaactcatattaatcgctcctcttatatttgattagtttaattgaacttattttttaagtttatcaattgcatcagttattttgtttttagcattttcaacaacttcttttgctttaccagtcgctttatcttgctgaccttctttttctaattctttgttatcagtaacgttacctactgtttctttaacatttcctttaaattgatcgaacttactttcgtctgccatagtgaaacctccttggatgtatatatttatataccactaaggaggttcgctaaacattataatatgaagtttttatgttatagtatagtatttatacgattaaatataaaacatgtatccgtctaaatcttcacttgtatctacatattccgctaaatatttcaatgttgtattatctaaaacatctctcactgcatctctcatgcgaatccatagttgtttttgcgcaggt

SEQ ID NO: 4391 - DNA, 298 bp, Staphylococcus aureus
tacatcaatatcgcttaattcttttttactacgtttcaaagccttttctacagcgccaactggtgcaatacccataatagaaggatctacaccatgacttccaaagccatcaagcactgccaatggttcgatatttaattctttagctttgtcttctgacatgactaacatcatcgcagcaccatcattgattcctgatgcattacctgctgtaactgtaccgtcttttttgaaagctggtcttaatcgacttaatttttcgactgatacattttcacgtacaccttcatccttagtg

SEQ ID NO: 4392 - DNA, 352 bp, Staphylococcus aureus
tgttgccgctgttttcacaccacaactatttaatgttttaattttctcttcagcagtacctttaccacctgaaatgattgcaccagcatgtcccatacgttttccaggaggtgctgtttgtccaccgataaagcctacaactggttttgtcatattcgctttaatccattcagctgcttcttcttcagccgtaccaccgatttcaccaatcataacaactgctttcgtttcgtcatcttcattgaatgcttttaaaacatcaataaagtttgttccgttgactgggtctccaccaataccaacagctgtagtttgaccaataccttcttcagtcaattggtgcactgcttca

SEQ ID NO: 4393 - DNA, 488 bp, Staphylococcus aureus
tgaacttcaacatgttttgcaacaggtataaaagcctcaacataaacacgatcatcatcaaagtatttttttccttcacttttagcttctttaaatgccttttctaaatcttcagctttctttacaatacgtatacctttaccaccaccgccactggcagctttgataacaactggataaccgatgtctttggcaagattctcaatttcagacacatgattcacagcaccatttgatcctggaatcacaggaacacctgcatgatgaactgtttgtcttgctgttattttatcccccatcatttccatcgtttttttagtaggccctataaacgctatgccttgttcctcaacggtttgagcaaattttgttgattctgataaaaagccatatcctgggtgaattgcattagcaccagtgatttgtgcagcagatatgatgcggtcaatatttaaataactatctaaagcattagcttccccaataca

SEQ ID NO: 4394 - DNA, 262 bp, Staphylococcus aureus
tacaatgaacaattcgaaacgatcagtaaatctaggatcttcaggatttttcttcgctaaaggtgaaatttcagtcggatgaccatagataaacgttggctgaataagtgtttcttcaactttttgctcaaagaattcatttaaaatatgaccatatttcattgtatctttaatttcaataccatgttctttagctaaagctttagcttcttcatcacttttaacttcataaaaatctacaccagtagcttcttttacagca

SEQ ID NO: 4395 - DNA, 183 bp, Staphylococcus aureus
gaacttctgccaatatcaattgcagggaagatacgacgttcagacaatttacgatctaaatgtaactccatgttacctgttcctttaaattcttcgtaaatcatatcgtccatacgtgaacccgtatcaactaatgcagttgcaagtattgttaaacttccacccgcttcaatatttctcgct

SEQ ID NO: 4396 - DNA, 509 bp, Staphylococcus aureus
tgatcagaataacctttaaaaataactgaatctatattttcctcgttaaaataataaatttcatcttctacaacaccaatcggatatttacatgcagaatagtcaaacatatacttttgattttcaatttctacaattggtcctctattaataatcattaacttttgcgaaccttcttttaaataaataatgcttcctattgtttccatttattttcctcctttgtcaccgtctcaatttcaacattccttcgcatttccaagtcaatcatctcttcttccactttacgaatgccatgttgaatttgctgttgctgctcgtataacgcttccgttgaacgtcgtttcgcaaaatgaaattcatcgcggaactgttccatacgactagccatattgctactataataacgctcacctaaatgttgatataattgatctatcgaatgattaagcgcatcactttcatctatcaatgctttaacctctcgcttttcatcatataagtcatcc

SEQ ID NO: 4397 - DNA, 342 bp, Staphylococcus aureus
ctcatcattacttgcttcttaataagcgtaccttgaatacgtggtccgatatcggcttcaggatgattatatgacgaaattgcgccacatactggtacacgtgcaaaacgatttaaatgcttaaatacttcatcgccaactgttccaccaacattttcaaaataaacatcaataccatctggtactgcttgtgctaacgcttctgcaaaatcctctttcttataatcaataccagcgtcaaagcccagtgtctctgttaaataatttacttttttgtcgccacccgcaatacctactacacggcaacctttaatcttagcaatttgacctacaactgaacct

SEQ ID NO: 4398 - DNA, 484 bp, Staphylococcus aureus
tacttttatcaaattcttcacctatctatgacaatgaaaggctcagtttatacttttagtgtttcataaaaataatgattacttctatgacacgttcgttttgtacaaactaagcctttatgccttattaatggttaaatattaactatttaactgtgcctcaccttggcgttgcttttctttagcagcttcatttacttgctcatccgcatgataagaactacgtactaaaggtccagcttggcaatgtttaaaccctttatccattgccacttttcttaatttaccaaactctaaaggcgtgtaatatttttgaacctttaaatgtttacgtgaaggttgtaaatattgaccaatcgttaaaatatctacatcattcgcacgtaaatcatccatcgtttcataaatttcttctatagtttcacctaatccaaccataatacttgatttagttgggatatccggttgtaattcttttgaacga

SEQ ID NO: 4399 - DNA, 203 bp, Staphylococcus aureus
gaaacgatagataataaagtcgatttacccacactagggaaacctactaatcctacatcagctaataatttcaattctaaagatacatctaattcctcacctggttcacctttttcactgaagtcaggtgcagggtttctaggtgttgcaaaacgtgaattacctcggccacctcgaccgcccttcgctactacagctctttg

SEQ ID NO: 4400 - DNA, 234 bp, Staphylococcus aureus
actcatcattggacgtttatcttgtcgttgttcaacaccacgagataactgacttaatgcgataactggacattttaattcacgggctaatgcttttaatgtacgagagatttcagaaacttcctgttgtctgttatcggacgcacgtgaaccactaccttgaatcaactgtaagtagtcaatcacaatcatgtctaagccatgttcttgctttaatcgacgacatttagaacg

SEQ ID NO: 4401 - DNA, 218 bp, Staphylococcus aureus
gttctggtaaacgtacgaaagtaccagttaagctgtcagcatcaaagtttaagtactcaggtacgaaattgttgatttcaactgattcaacgatgatgtttaatttttgagatttttcacgaactgaaattgtttgaccaggtttaacagaataagatggaatatcaacacgtttaccatctactaagatatgaccgtggttaactaattgacgtgct

SEQ ID NO: 4402 - DNA, 343 bp, Staphylococcus aureus
caacagttgattattcttcagttgcttctgtttcttctgatttttctttttcatctaaatcgatgttttgttctgcagctacttcttcattagaaacgccttgttgaccttctaagattgcatctgccattttagcagttaataatttaaccgcacggatagcatcgtcgtttgctgggataacgtagtcaatttcgtcaggatcacagttagtgtcaacgatacctacgataggaatatttaatttacgagcttcagcaattgcattacgctctttacgtgggtcaactacgaataatgcttgaggcattgatttcatatcacgaattccgcctaagaattt

SEQ ID NO: 4403 - DNA, 217 bp, Staphylococcus aureus
tgtcctcttcgtattttttcaaattctgcaaggatttcagaagataacggaattcgagttcttggcttgttttcacttatatcatctaatgatttactcacatcaatttcattttcttttaaatctctccacatttcgcgagatgatattctatatgcacctgatccaaagatagcatgttgctcactcatatcacttgttacaactgtaatatgct

SEQ ID NO: 4404 - DNA, 174 bp, Staphylococcus aureus
aatgcattttgtttcatcgcctctgcatatgcagttttcagtctgcttccttcaatagcaacttcttgttctccttcttgtccgttataatattctgttgattcattgctgattggcggtagccatgcagtaattgcagtcacgacaaatgtgatgactaaagttatccaaaag

SEQ ID NO: 4405 - DNA, 279 bp, Staphylococcus aureus
attttttcttacgtccacgaacgataagtttgtctgatgattttttaccacgacgagttttcttaccaagcgtaggtttaccccatggtgacattggagatggtctaccgataggagcacgaccttcaccaccaccgtgtgggtgatcgttagggttcattacagaaccacgaactgttggacggatacctttccatcttgaacgtccggctttaccaacgttaactaattcgtgttgtaggttaccaacttgaccgattgtagcacggcaagtagata

SEQ ID NO: 4406 - DNA, 126 bp, Staphylococcus aureus
gtgctgttgtttacctaacaaattaccagcaccacgaatgttcaaatcacgcatcgcaatcttaaatcctgagcctaactccgtaaattctttaatcgcttgtaatcgatcttctgcagtctcagt

SEQ ID NO: 4407 - DNA, 164 bp, Staphylococcus aureus
tcaatacgacaccaccattatttacaggacctccgatgacgtagtggtcctctgttaagacataacaaaatattctacctttgtaatcagtacgcggtttatctatcacagtacgaatcgccccagatgtaccgattgtgacagcaacttctcctttaccaaca

SEQ ID NO: 4408 - DNA, 165 bp, Staphylococcus aureus
gctataatcgcttcagcttgtttctctgcagcttgcttagtttcttcaccagctttttgagcttgtatcaaagcatcacttacagattgatgcacgtcttgataagacttaatattagtatctctctcttcgattactttttcaagttgttttttatcttcttta

SEQ ID NO: 4409 - DNA, 197 bp, Staphylococcus aureus
cctttcatacggtaagcaattgcaaccgatgccggatgagaatgagtgccatcaacaatcatttcggtatgtagagcatcattcaaccatgctgctccaaaaacacctggttctctatgttggaatggcgtcgctgcattatataaatgcgtgacatgtttagctcctcgctcaacagcttcaactgcttcttcgta

SEQ ID NO: 4410 - DNA, 209 bp, Staphylococcus aureus
tgtcaaatttaggattaccacgcttactatttctgttacgagaaccacttggtttaccgttacggcctttgcgagataatggtttttcaaaagttaattgaacttcaacttcatcgtttgcttctactaactcttgtaaaagtgcagcaactaaatcaacatcgttatattcatttaacaactctgtagaaatgcgtttcaagcgtgat

SEQ ID NO: 4411 - DNA, 209 bp, Staphylococcus aureus; identical to SEQ ID NO: 4410

SEQ ID NO: 4412 - DNA, 258 bp, Staphylococcus aureus
aagaagttgtatgcctcgtctacttttttcactgttttttgtaagtcgatgatataaataccatttctctcagtgaagatatattttttcatttttgggttccaacgacgtgtttggtgaccgaagtgaacacccgcttctagtaattgtttcattgaaattactgccattataaattcctcctattggttaattacctccatagcaaactattgtaaagacaatatataaatattgcaccctttacacaatcacgtt

SEQ ID NO: 4413 - DNA, 258 bp, Staphylococcus aureus; identical to SEQ ID NO: 4412

SEQ ID NO: 4414 - DNA, 140 bp, Staphylococcus aureus
tatgtacttctcgttcaaaacgttttaatgtttcttctttttctctaggtggtataaaaatcgccttaattgcaactttaatgttaagtatcgtatcttcagcaagataaacggtactcatgccaccgccgccaagctta

SEQ ID NO: 4415 - DNA, 134 bp, Staphylococcus aureus
gaacgaccttgtctacgtccgtcaacacctgaagtatcaagtgctccacgtacaatatggtaacgcacacctggtaagtcttttacacgtccaccacgtacaagtacaacactgtgttcttgtaagttatgtcc

SEQ ID NO: 4416 - DNA, 133 bp, Staphylococcus aureus
tactttcaaccatgctaatgatgtatcttcttgcccaacgaacgcagtttgtccaaattgaattagactggctggcaacgttgataaaatacccgcaaatatgataatagaaataccattaccaacaccgaac

SEQ ID NO: 4417 - DNA, 808 bp, Staphylococcus aureus; identical to SEQ ID NO: 4218

SEQ ID NO: 4418 - DNA, 561 bp, Staphylococcus aureus
tcatttttgcatcaattggtgcgatatttaatgtttcgccaaatgttttcatgcctttttctaagccttctgttaaaatttgatgcacaatgtcatcatttttatctttccaataagtactgtctggtaaaaatgtattaattggtggttcgtgaaatgcaatctttttaacgacttcagggtaatcttttaacacatgcatcgcaacgattgaacctgaacttgaacctaatatatagacaggttcatcacttaatgactttgcaagttcggcaatgtcctgtgcgtcgcgtttgacacgataatcactgtcagggtttgaagcggaatcagggagtggttcagttaactcgctttctccataatcacgacgatcaacggctacaacagtaaaatggtcttttaactgttctgcaagaggcagaaaaatgtctccggtaccgtttgcaccaggaataaagatgagcacgggtccttgtccgacttggtggtatcgtaatttagcgccttgtaattctaaagtttccatattcaatgacctccatttgttaattgttaggt

SEQ ID NO: 4419 - DNA, 257 bp, Staphylococcus aureus
gcatgtgtatctaaatcaactttacgatatggtgtttcaataaagccgaattcatttacacgtgcataacttgataatgagttaatcaatccaatgtttggtccctcaggtgtttcaattggacacatacggccatagtgagagtagtgaacgtcacgtacttccatttgagcacgttcacgtgttaaaccaccaggtcctaatgctgatagacgacgtttatgcgttaactcagctaatgggtttgcttggtccat

SEQ ID NO: 4420 - DNA, 235 bp, Staphylococcus aureus
agtgatagcatgtgtatctaaatcaactttacgatatggtgtttcaataaagccgaattcatttacacgtgcataacttgataatgagttaatcaatccaatgtttggtccctcaggtgtttcaattggacacatacggccatagtgagagtagtgaacgtcacgtacttccatttgagcacgttcacgtgttaaaccaccaggtcctaatgctgatagacgacgtttatgcgtt

SEQ ID NO: 4421 - DNA, 263 bp, Staphylococcus aureus
tgtctttcgataatcctggattgttaggatttactgggccacttggatgagttggtctgctcggcttctctgggttttcaggtccttttggatcttttggtttctctccaccgaactctacaatcttatctactggttgttttgtgatctcttctgttggttgaccctcgccaactttttcacctgttaatgggttcactgtgattggtgttgtgattgtcttacttcctggttgtccttcttgtttcactcgctcttcacca

SEQ ID NO: 4422 - DNA, 284 bp, Staphylococcus aureus
tgtaattggttttcctaataattgtgaatatgcaagtaaacgtgttaatgcaccttctaattcacgaatattagattgaatttgatttgctatataatttaaagcttctggtggaatatctaatttttcttcttcaattttcttctgcaaaattgccattcgagtttcataatctggtggcgtaatatcaacaattagcccccattcaaagcgtgaacgtaatcggtcttctaattgtgcaatttcctttggtggtcgatcactcgaaataactatttgcttgt

SEQ ID NO: 4423 - DNA, 267 bp, Staphylococcus aureus
gccattttgtgagtgtcctcacgtttcttaacggcaccacctgtattatttgctgcatctaaaatttcgttagctaaacgatcttccatcgttttttcaccacgaagacgtgcatagttaactaaccaacgtaaacctaaagtagtacgacgctctggacgaacttctactggtacttgatagttagaaccacctacgcgacgagctttaacttctaatactggcataatgttgttgattgcttcttcgaatacttctaatgcatca

SEQ ID NO: 4424 - DNA, 267 bp, Staphylococcus aureus; identical to SEQ ID NO: 4423

SEQ ID NO: 4425 - DNA, 151 bp, Staphylococcus aureus; identical to SEQ ID NO: 4322

SEQ ID NO: 4426 - DNA, 122 bp, Staphylococcus aureus
acctctgaacgtaccagtttgagatgcttctaacgtccaattcattgtcatgccagtcatggcatatttttgaccacctaattgtggaatccagaaacttgtcattgtatccatagcttgaa

SEQ ID NO: 4427 - DNA, 180 bp, Staphylococcus aureus
ttttctaaaccatcaagttcaccagaattaatatgtttaccttcaccagtgtatgctgcttcttcaacatttccaccttcgatgacttcaatgattggcaaatcaaactttttagcaaattcataatctctgtcatcatgcgctggtactgccataattgctccagtaccatatgttgat

SEQ ID NO: 4428 - DNA, 180 bp, Staphylococcus aureus; identical to SEQ ID NO: 4427

SEQ ID NO: 4429 - DNA, 607 bp, Staphylococcus aureus
tacaccttggcgtaacacgttgtcagcttctttaaatgcttccatcattggcgtagatttgtcaacgatatctaataaacggtcatttggtataacgattaatgtatctactgcagctttcatagcttctactccagcagcagcttgagtttgacgtttacgtccttcaaaactaaatggacgagttacaacaccaacagttaatgcgcccatttcttttgcaattttagcaacgactggtgctgcaccagtaccagttccgccacccataccagaagtaacaaataccatgtctgcaccttggattgcatcttcaatttgttcacgagattcctctgcagcttttttaccgatttcaggattagctcctgctcctaaaccacgtgttaatttttcaccgatttggattttagattcagctttagataagtttaaagcttgaccgtctgtgttgatagcgataaattcaacattattcattccgtggtcaatcattcggtttacggcgttgttaccgccaccacctacaccaatgacctttaaagtcgctaaatgattaaatccttgttcaaattctaacatttaaatttcctcctagttttattgg

SEQ ID NO: 4430 - DNA, 286 bp, Staphylococcus aureus
ctacaggagcagtttcctcattagattcacttttttctacactagatttatcacttttagacgcattctgcttatcctcatctttactagacttttcgctatcttcagaatcagtatccgcactagaagttgtagcaggtgtagtagccgaagcttcataacttacattatcgctatttgaactcgcaacagctacttctgtatcttgcttgtcttttttagcttttgatgtttttttagcatcggataaatcaaatgtaatcttcttgacgctaaataaactaga

SEQ ID NO: 4431 - DNA, 559 bp, Staphylococcus aureus
aacaattgcttctattgctgttgttacttttgctaattctctcaataaatcaatatctgcttcacgaccatgctcttttgcaacgatttgagacaagattgataatactgcaatttgtgcagtatatgcttttgtagatgcaactgcgatttcaggacccgcgtgtaataacaatgtgtggtctgcttcacgtgataaagttgaacctgcaacattagtgattgttaatgatttatgacctaatttattagtttcaactaatacggcgcggctatctgcagtttcacctgattgagaaatataaacgaacaatggtttttcagataataatggcatgttgtagacaaactctgatgcaacgtgtacttcagttggtacgccagcccatttttctaaaaattctttacctactaaacctgcatggtagcttgtacctgctgcaataacgtaaatgcggtctgcttctttaacatcattgatgatgtcttgatcaattttcaagttaccttctgcatcttgatattcttgaataatacgacgcattactgctggttgttca

SEQ ID NO: 4432 - DNA, 208 bp, Staphylococcus aureus
tgtacgtaactcatgtgatacattggcaacaaattcacgacgctcacgttcaacttgttgttgttcagttacgtcatgtaacacagcgatataaccagttacaaatcctgtttcctgcacaatcgtactaaagttaacacgtgcgattagaccttcttcttcatttaaatctaataagaaactatcattattctcttgaatttcttcc

SEQ ID NO: 4433 - DNA, 144 bp, Staphylococcus aureus
tcatcttcaacttgtacacgaattaaagttcgtgtttctgggttcatcgtcgtttcccataattgttcagggttcatttcacccaaacctttgtaacgttgtaacgtgaagcctttaccaagttctttttgcaatttattaagc

SEQ ID NO: 4434 - DNA, 275 bp, Staphylococcus aureus
catttatagaaaatggtggtgtctcagatttattaatcactttaatatttgtaacttgtacttcaacttggccagttttaattttaggattaactgtttcagggtcacgcttcgtaactgtaccttgaacttctacaacatattcagaacgtactgtttcagcaattttcaatgcctcttctgaaaatgcaggattaaacacgacttgtacaattccttctctatctcttaaatcaacgaaaatcaatccaccaaggtcacgacgattgttaacc

SEQ ID NO: 4435 - DNA, 1013 bp, Staphylococcus aureus
tgtatctaatctgacacccgtcacacgtctttgatatgttttaatattgtccacacgtgcacctgtatgaattgtgacaccttcttcacgcgctagcttttccaaggcattggctaaatgatggattccaccttctacataccaaaggccttgctcttgttgcatatggaataacatagataatacagctggcgcatcgtatgatgaagaacctacatatttgataaaatagcctaacatttgtcgcaagtatggattcgagatacgcttgtctatggcctgttgcatagtatgtacataatcataattaataagagcatttaatggcccatgaaatttaataatttgagatagtgtatctaaaccatagttgaaataccctttttcagtaatacgatcgattcgtcttgtataattcaaataattttgcagttcctctatatcctgtttcgacaatatcgcattatgctgacctgtttctttaataccttcatacaaatcgatagtcgttccatctggaaaaaagctacgccattgatgtggcaatcgcttgattgtaacgtagtctgacatttgcttcttgctatattcgaataatttttcaaaaatataaggcatcgttaaaatagatggacctaaatcaaagccaaagccatctgattcatgacgattcactttgcctcctatatgattattttgttcatataatgagaccgaatagccactttgtgccattcgaattgctgcagaaatcccacctaagccaccaccaataacgatgatatgtttagtcatgacgttcacctcttcgttttaatatgcgtagtaactgcgttaatctcggtcgattatagcgttgcacaataatgattggaacattagctatcattgcatagaaaatatttatatactttactaaacgagggcctttattgaatatgatgactggaagtatcgatatccaatgaatcaactctgccctctttgtctctataatcattttttcaatttca

SEQ ID NO: 4436 - DNA, 325 bp, Staphylococcus aureus
gactgcattcataaatgatgctgcaaacgcaaatccagcatttttaaacactaatgtgaatggagacgttgctacattatcactaccccccattaatgcactactatcataaggaattaacataccgataacaaaaatggctaaaatgtaaaataataaaattctccagaatacttgtttaattgctttcggcacagcacgttcaggattttctgattcaccagccgtaataccaattaactcagtaccttggaatgagaaaccagcgattaagaatacacctagaattgataacaaacttcctcctaagttgccaccaagaatt

SEQ ID NO: 4437 - DNA, 453 bp, Staphylococcus aureus
acttgtacttgttgactggctttgtgacattgaatcacttaatgatgtagatgtgcttgttgagctcgagtcacttacacttgttgaacctgatattgagtcacttaaacttgtcgatgttgaaactgatacgcttccgctcattgagtcagatgttgaaagtgatgtactcgttgaatttgatccactgatgctagacgaatcacttgtagacattgagtcgctttctgatgcactgatgctcatagagtcaaattgactattacttgttgagcttgactgcgaatcgctcacacttgttgacgttgattctgatccactcatactttgcgagctactcaatgattttgaatcacttaatgaatccgaagtgctaagacttgtggaaccacttaaagatattgatccacttaatgagtcggagtcacttgtactagtagaatcactcattga

SEQ ID NO: 4438 - DNA, 1012 bp, Staphylococcus aureus
tgtatctaatctgacacccgtcacacgtctttgatatgttttaatattgtccacacgtgcacctgtatgaattgtgacaccttcttcacgcgctagcttttccaaggcattggctaaatgatggattccaccttctacataccaaaggccttgctcttgttgcatatggaataacatagataatacagctggcgcatcgtatgatgaagaacctacatatttgataaaatagcctaacatttgtcgcaagtatggattcgagatacgcttgtctatggcctgttgcatagtatgtacataatcataattaataagagcatttaatggcccatgaaatttaataatttgagatagtgtatctaaaccatagttgaaataccctttttcagtaatacgatcgattcgtcttgtataattcaaataattttgcagttcctctatatcctgtttcgacaatatcgcattatgctgacctgtttctttaataccttcatacaaatcgatagtcgttccatctggaaaaaagctacgccattgatgtggcaatcgcttgattgtaacgtagtctgacatttgcttcttgctatattcgaataatttttcaaaaatataaggcatcgttaaaatagatggacctaaatcaaagccaaagccatctgattcatgacgattcactttgcctcctatatgattattttgttcatataatgagaccgaatagccactttgtgcattcgaattgctgcagaaatcccacctaagccaccaccaataacgatgatatgtttagtcatgacgttcacctcttcgttttaatatgcgtagtaactgcgttaatctcggtcgattatagcgttgcacaataatgattggaacattagctatcattgcatagaaaatatttatatactttactaaacgagggcctttattgaatatgatgactggaagtatcgatatccaatgaatcaactctgccctctttgtctctataatcattttttcaatttca

SEQ ID NO: 4439 - DNA, 263 bp, Staphylococcus aureus
aattttcttgtcacgaacgagctctgcaattttttcaatcatacgagccttattcacttggaaaggaatttcagtgacaacaatacgttgacgtccgcctccacgttcttcaataactgcacgagaacgcatttgaattgaaccacgacctgtttcatatgcacgtctaataccactcttacctaaaataagtccagcagttgggaaatcaggaccttcaatatcctccattaactcagcaattgaaatatcagggttcttac

SEQ ID NO: 4440 - DNA, 1013 bp, Staphylococcus aureus; identical to SEQ ID NO: 4435

SEQ ID NO: 4441 - DNA, 507 bp, Staphylococcus aureus
agtctaaaattaatgattcgaatggtaagtattcgcgtacgtcacggttattaactgtgatgttaccttcacctggtactaaacgtacacgtgctactgagtttttacgacggcctgtgcctctatattcaacttgtgccaaagtcatttcctccttctaattaaccacgtaattcgtagttttctggttgttgtgcagcgtgtggatgttcagcgccaccatatacaaataattttttaccttgtttttcgcctaaacgagtgcttggtaacatacctttaattgagttttcaattaaacgttctgggttagttcttcttaattcaccagcagtgattgatttgataccacctgggtgatttgagtgacggtagtaaactttgtcagtttctttgttaccagtaaattcgatttttgatgcattaataacgattacataatcaccagtatcaacgtgtggtgtgtaagttactttatttttaccgcgtaagatagatgctacttct

SEQ ID NO: 4442 - DNA, 267 bp, Staphylococcus aureus
gttttctacttccgtatcagctgcaggtttaacttttgcttgtgtttgaattgcattgattttatctaatacttttgattttgtatcagcaacttcctgttttgatttaacaacttggatgtcatgtaaaccttgcttttgagctgcatctactgctgcatcagcttctgctacttcttcatttgttgcatttgaaactgtagcattttgagcttttctagctgttgcagcttgtttaacttcattataggcatccatttttgtttg

SEQ ID NO: 4443 - DNA, 407 bp, Staphylococcus aureus
ttaatactacgagccatttgggcgcctcccttcttattatgtgcgtgcagctttaagccgcacacccaaataagttgattatattattttttcttacgtccacgaacgataagtttgtctgatgattttttaccacgacgagttttcttaccaagcgtaggtttaccccatggtgacattggagatggtctaccgataggagcacgaccttcaccaccaccgtgtgggtgatcgttagggttcattacagaaccacgaactgttggacggatacctttccatcttgaacgtccggctttaccaacgttaactaattcgtgttgtaggttaccaacttgaccgattgtagcacggcaagtagataagatcatacgaacttcaccagatcttaatctgattaatacgta

SEQ ID NO: 4444 - DNA, 230 bp, Staphylococcus aureus
agagtatacagtatcgatttcttgacgtgagttagcgtgcatttgtaataaacgacctacacgttcacgtttacctttagtagagttcttaacgtatgaaccagatgtcattgtacctgaatacacacggaagaatgttaatttaccaacataagggtcagtcataactttgaacgctaatgcagcgaattcagctgaatcgtctgctttcgcgattacttcttcttcag

SEQ ID NO: 4445 - DNA, 307 bp, Staphylococcus aureus
tgaatcacttcctgtggcacctgaaccgataatttgatggatttcatcaaagaatagtacggcattttgtgaagatttaacaccttcgattaatttttgaatattttcttcaaaagcaccacgatattgcgttccagcttctaatgatgaaatgtctacagaaataatttctttgtctttgattgctgctggtacatttccttcaacgattgcctgtgctaaaccttcaacaatcgcagttttaccaacaccagcttctccaactaatataggattgtttttagttcgtctacttaaaacttcagca

SEQ ID NO: 4446 - DNA, 147 bp, Staphylococcus aureus
accaattttcttctggtttttcagagtttaaaattgtcggttcttcttccgcttttgtatttcgctcaataatcgttcctgacaatggcgtttgcacatcaatgaccgttttcgatgcttcgatactcacaatttcatcatccactt

SEQ ID NO: 4447 - DNA, 299 bp, Staphylococcus aureus
tgcttgatcacccattgtaacaatgaataaatctaagttttcttcaatatctaattcgataccttcttcttcaagtgcaagcaataatcgttctatacttagcgcaaaaccaatacctgtttcacttggaccatctagcaattctaataaaccattataacggccaccaccacaaagcgttgtaatggcaccatcatagttagggttatccatcattaattcaaatgctgtatgtgtataataatccaatccacgaactaagttaggatcttcaatatatggaatacctaaatcatcta

SEQ ID NO: 4448 - DNA, 479 bp, Staphylococcus aureus
tatttgctttctacttcgcgatccattgtttgttcgaaaagaatagcacccaaaattttatctggtgagaatgaaggtgaagttaccacacgtgtacgcatatcgtgaacaagttggaacatttcgtcttcattgctatattgatcttcgtttacaccatattctttaagtgcttttggtgtactaccaccactttggtctaatgcggcaataaagccttttccatttttcattttttctaattgctctttattcatactttccactccttaacttttcaatacacctccagtatgataaaaatgagaacatttctcaagtcataaaccttgaaaagtgtataaaatgtgaaaaataattgtcagtttaattaaaaatattattttattctaggtatgactaacgccattaatgacataaagaaaatatgtgtaataatccaaccgattaattctgtcacactaaattgaaaaattgga

SEQ ID NO: 4449 - DNA, 479 bp, Staphylococcus aureus; identical to SEQ ID NO: 4448

SEQ ID NO: 4450 - DNA, 491 bp, Staphylococcus aureus
actaccgccaactgagtattgaattgtttttacatgctttttctgttttaaatatttttcaacatctttcgcatgattcaacactgcttgctccgtttcaccaggcttcggtgtataagtaatagctaaaaatttatcgtcacctgctgaaataaagctagtgcctagtctcggtcctccaaatacaatagttgcaaccaaaattaatgtacttaatataattacaatccacttatgatttaatgaccaatgtaatacttttttataagttgtactaacaacacctaatccttcttgatgttgtttattacgacgtttaacgccttttttaaatagtgtagctgccaacgctggaacgagtgtaattgacactaataacgatgctaataaactaaatgcaatagccaatgcaaaaggtctaaacatttcgcctactgaacctgatacaaacacaagtggtaagaagacgataatagtaactagtgtcgatg

SEQ ID NO: 4451 - DNA, 256 bp, Staphylococcus aureus
catcatatctgtaacaaaaaactgattgtagtttaattgataggcatctcgcgctgtcgtatctacgccaatatgcgttgcgacaccaccaagaacaatcgtatcaattcctcgacgtcgcaattgtaagtccaaatctgttcctacaaatgcactaaaatgtcgtttgtctatgacaaaatcgtcatctctcttgtctaataaatgatggaaacgactgtagtcgtcgccttcttttggtggtaatgagatcatt

SEQ ID NO: 4452 - DNA, 869 bp, Staphylococcus aureus
ctgtaatcgttccgcaaccaatattagtacgttcgccaattacagcatcgccaatataacttaaatgtgaaaccttggcaccatctttaagatctgcttttttaatttctacaaaatttccaaccttaacatctgcacctaattgcgcgcctggtctcaattgcgcaaacggtccgaccttagtattcgctcctacgctagcatcattaacaacagactgttgaatacatgcaccattttcaatcgtactattgttaatttcagagtactgaccaataacaacatcttcgccaatttctgtacgaccattaattcgtacgcctggttcaatgactgtatcactaccaattgtaacgtctggaccaatataagtgctgtcaggatcgatgattgtcacaccatttagcatgtgataatgattcgtacgacgttgcatcgccttctcagcctgactaagcattacacgatcatttacacccatgatttcttcaacatcattggtacgatagacttctacgatgccgccatcatttaaaattaacgacaatacatcagggaggtaatattcaccttgcgcattatcatttttcacttgtgttaatttttcaaacaacgttttattattaaacgcaaaaatacctgaactaatttcattaatatccttttcagcttgcgttgcatctttctcttcaactatgcgttctaaacgacctgacgcatttcgaacgattcttccgtatccatatggttgttgaatcgatgcagataatacagttgcttgagcattagcatcctcgtgatgcgcaatcaatgttactaatgtttcctttgtgatgagcggtgtgtcaccacatacaacgattgtcgta

SEQ ID NO: 4453 - DNA, 511 bp, Staphylococcus aureus
ttttaatggcgctcactgtcttcttagaaaaatcatgtcgtgctaaaaaagttttaacagtttcttgttgtgatatatgatacttaaatttcatcgttcttcatcacttgatatgaaagaatcgtgcacacgtttccagaatgggaatggtctaaaacgtgcaaacctcactttttcatttgctacacggtattgtattgaattaacatttttatgtttgatactaacatgatctatcgtcattctaatggtatcatgattaactggtgatattaaacatgtatgatgctttggtaatacaagtggtgatcctaccgttctaaacacacgattatttatcgaggcaatttctgtaatttgcattgcttcaagtgaaggatgtatcagtgcgccacctagcgctttgttataagccgttgaacccgaaggtgttgatacacataatccatcgcctctaaatcgctcaaagtgtttccctcttaagttaacatccacaacaagtgttgagcca

SEQ ID NO: 4454 - DNA, 202 bp, Staphylococcus aureus
agtgccttgaagtagggggtgaaatcctgctttatatgcgtcgtggttagatagtgataatgagccaagtgtacgaccgtgaaaattgttattcatagcgatgatttcaacttgtccgtcagtaatgcctttaacttcagagccccattttctagcaattttaatggctgcttcaacagcttcagtaccagagttaaggggg

SEQ ID NO: 4455 - DNA, 256 bp, Staphylococcus aureus; identical to SEQ ID NO: 4451

SEQ ID NO: 4456 - DNA, 290 bp, Staphylococcus aureus
tctacagcatttccaactaacccgattgataatccttctccacgttctttcgcctcttctgctaattttaatgcttcatctaaatcagctgttttaacatcacagtatttcgtatcaattcgcttatcaacacgtgtttcatcaacatccacgcaaattgctaccccatgattcatagtaattgctaacggttgcgcaccacccataccacctaaacctgctgtcagtgtaacagtgcctgctaaatctccattaaagtgttgattacctagctcggcaaatgtctcata

SEQ ID NO: 4457 - DNA, 381 bp, Staphylococcus aureus
acagtaaatattttattacttcacaaaatgcttaaaaatatggcgggatgcttttaaggtcaaggataatacttgtgtaattttttataggttgtagctactctatcacactctcttttatatttatcaaaagatataaaaaaggatagtatctttcaactatcctttaatcaatattattcttcaatccattgtgtatggaatacgccttctttatcttttctttcgtacgtatgagcaccgaagtagtcacgttgtgcttgaattaagtttgcaggtaaatcagcagcacggtaactatcatagtaattaatacttgatgagaaaccaggtgttggtacaccattttgaacaccagttgcgacaacatcacgtaacgct

SEQ ID NO: 4458 - DNA, 553 bp, Staphylococcus aureus
taaagcaatgctatcaagcgcttgacttgttgtatcatcaacttgttgatttgttctattattcgtaatatctgtcatggcttgatttacaaattcattgattttatctagtgctacttgtctttcttctgctgttgcttctttatcctgattaatcttagcacgtaattcattcgctttttgattgattttttcacgtgcagctggtttaacttttgtttcaggttgaataattttaatcgctgatacaccatttgttgctgcttgattcacctgactattcgtttgagcttggtcaatagctgcaagtgctttttctttttctttagctaatgcttgtgaagcaacttctttctcattatctgttgaatcaagactattatcaatttgctgttgcttttctttaacagctttttcaatatctgcaattgcctttgttttaattactacttcagcttcaacattatctatagcatttaccgcttgatttgtagttgtgtctacctgatcatttgtttggttttgattaatttgattaattgcttgatcttta

SEQ ID NO: 4459 - DNA, 150 bp, Staphylococcus aureus
tgcttcatttcgtttgaagatagttcacgcccatttttccaatgttgtgctgtaacaacctcgcctgtttctatgcgtttcgtccatactaatttgggcacaataccttctgctgataatgccgcaataaatggatttgaatttcgtttt

SEQ ID NO: 4460 - DNA, 208 bp, Staphylococcus aureus; identical to SEQ ID NO: 4363

SEQ ID NO: 4461 - DNA, 119 bp, Staphylococcus aureus; identical to SEQ ID NO: 4238

SEQ ID NO: 4462 - DNA, 553 bp, Staphylococcus aureus; identical to SEQ ID NO: 4458

SEQ ID NO: 4463 - DNA, 436 bp, Staphylococcus aureus
aacaacagcgtctaaacgacttgctaataagatcatgaagttttcaccgtgtacaccgaattttttaccagcgatgtcaaatgtgttacggaattgtctttcagtcattccatataagtaacgtaatttttgtttttcacgtaattgtaaaccatattctgataattttttacgttggtttggaccatgttgtcctggtgcgtaaggacgtttttctaattctttaccagtaccgcttaaagagatacctaaacgacgagattttttccagtttgaacctctgaatcgagccataataagactcctcctttaattcttttttgttgttatgaataaacaaaaaagagtgttgcatgcttactaagatatattgttttatgtgtcttcaccttatagcgacagttacgtgacacgtccgcattgggaacaacatagc

SEQ ID NO: 4464 - DNA, 494 bp, Staphylococcus aureus
taagacttagcttctttacctaattcagtttcttcttttatagcttttctgaacatgtcaccagttgaaatgtggggtattgggaatttcttgacaatttcacttgcttgagttcctttacctgcgccaggtaaacccatcaaaatgatattcataagtgccctcctaaaattatctaccaccaaagcctttatattctttttgagatacttgagcttctaaagatttcattgtttcaatcgctacaccaataacgataagtaaacttgtaccaccaatctgaattgattgtggtaatcccataaacttagttgctaatatcggtagaattgaaataacggctaagaagatagaacctacaaaagttaaacgatataaaactttagtaatatattttttggtttgttcaccaggtctaatacctggaacatagctaccttgtttcttaaggttatcagccattttttccggattaacttgtacaaatgcataga

SEQ ID NO: 4465 - DNA, 195 bp, Staphylococcus aureus
gcacgagcgattccgtgacggatagcttgagcttgtccagtgaaaccaccaccatgaacgttaactaaaacatcatagttacctttagtttcagttacatcaaatggttggtttaagtctaaaattaatgattcgaatggtaagtattcgcgtacgtcacggttattaactgtgatgttaccttcacctggtact

SEQ ID NO: 4466 - DNA, 246 bp, Staphylococcus aureus
tgtgacgggcggtgtgtacaagacccgggaacgtattcaccgtagcatgctgatctacgattactagcgattccagcttcatgtagtcgagttgcagactacaatccgaactgagaacaactttatgggatttgcttgacctcgcggtttcgctgccctttgtattgtccattgtagcacgtgtgtagcccaaatcataaggggcatgatgatttgacgtcatccccaccttcctccggtttgtca

SEQ ID NO: 4467 - DNA, 464 bp, Staphylococcus aureus
aattggtgtaatcatagtcatacgtggttggatgtagtcttttgataaaccttctttaaatcctttatgtttaaaaccaagcgctttcaaattttgcaaagcatctgtacctttatcaacttcaacatcaggatcgattttaattgcatacgctttctcagctttagcaatttcttttgcactgtctaacaatgcatttaacgcttctttattactataatcaacaacaaaaccacgcgaaatataacatagcgtataaggtaatttaggtacttttttaaaaagtaactgcgcaacaccctgaacttcaccgtcacgacctacagcgattcttcgcgcgtaccatccagttaatttctttgtttctgcccatttcgttaattgtaataaatctccatttgggtgggatttaacaaatgcgtcatgttcctgattagtgatatgcatcttttccatgatttatg

SEQ ID NO: 4468 - DNA, 208 bp, Staphylococcus aureus
gatgttgattttgtttgaacttgtttgtcagattgagctgtggtaccaccattttcaataactgacattatatccttcttagttacacgaccttcaaatccactacctacaacttgtgataaatcaatgtcatgctctgaagcgagtttaaatacaacaggtgaaaagcgaccattattacgtggttgattttgtttagcagtagatg

SEQ ID NO: 4469 - DNA, 136 bp, Staphylococcus aureus
agaaggtctatgtttctgctccaccggttctgctttaggcactgtgattggtttctctgtcatcggttttgtttcttgttgttttttaggtgccataggttctacaacaggtttcgatttaggctcttcctttgga

SEQ ID NO: 4470 - DNA, 195 bp, Staphylococcus aureus; identical to SEQ ID NO: 4465

SEQ ID NO: 4471 - DNA, 194 bp, Staphylococcus aureus; identical to SEQ ID NO: 4372

SEQ ID NO: 4472 - DNA, 721 bp, Staphylococcus aureus
tcaaaagattctgcaacattgacagcatcttgacccgtcattgaatcgacaactaacataatttcgtttggtttagcaatgtcttttacttcttttaattcgttcatcaatgcttcatcgatgtgtaatcgacctgctgtatcaatgattacaaagtctaaatgttcttctttagcatgttttaatgcattagttacaatttgttgtggctttacttgatctccttcactgtatacaggaatatcaatttgtttccctactgtttgtaattgatttatcgctgctggacgataaatatctgctgcaactaacataggttttttgttgtattttttacgcatcaataatgctaatttacctgcagttgttgttttaccagcaccttgtaaaccaaccatcataacaacagtaggtggtttatttgacatattaatcgacgtattttctccacccatcaactgcgttaattcatcttgaactattttaataacttgttgccctggtgttaatgattgcattacatcggaacctaatgcgcgttctgatactgttttaataaattcttttaccactttaaagtttacgtcagcctcaagtaacgctaatcttacttcacgcatcattatctttatatcagcttcagtaagtttacccttaccacgcattttttgcatcgtcgcttgcaagcgttctgataacccttcaaatgccatatcgatgt

SEQ ID NO: 4473 - DNA, 1204 bp, Staphylococcus aureus
tataaatgatatattaagtttttagtattgttaattatatatatttcagaataattatcattctgattgatatttggaactaaccctttaaagtcttgattggatatagcttttaataattttttatattttatatcttttatggaacacttatatgaaaactcctcgcacaaaatattatcatccttctcctttttatattctttaaagtaatacaattcatctattgttaacgatgtaaatttttttataacatttgttttcttataaggttcactataaacatatactacatgaaccaaatttatagaatcagaaggcgaaaacaaatcttcaaaaatgtttattgcattatcatatacagctaaaaaataagtattattgatagttttaccgtcctccaaaaactggtatttatcgccacttaaacttaaatgaattgcgttttttacctttctaaaattcaacttttttatatccaaattatttatatcaaagcacataatttacaacaccttattcccttaagatttttccttctttagttaaagaagctattctttttcctttgttatttattaacttccaataagaaccaccatgtgattgccctttatttttggaaatagtccatttagtttttgaatctctccaggtaggatttttcccttaaaccttttgagtaaattcaccaatactcatccccttatcatttaacaaacttttattaatgtttttggttatattatgagtctttactgcttttagattgtaaaaattatcgtcataaatagtggcattttccgagattcaaatggtacaaagtacattgtaatatgcataatgatacctgtaattaatgtaataatagaaaagtgtatatatctcatatcgccacctgctatacaacttattaaataattaattccaagacatattaattatctaattataaccttagttacgttattacataatataaaaatatataataacttatttgcttgctcctttcactttttaagagtaaaaaataacctgaaacatagactttaacatccaagtttcaggttagtgtaatgtaaatgatttactttgttatattatgattaaacatctaattctctgcttgtaagtgctttaatcatctctggatcagcatgtgagaaaaattggctattactttcttctaatgtcgcaattt

SEQ ID NO: 4474 - DNA, 280 bp, Staphylococcus aureus
tagcttctaattgacgtaattgtttatcgcctcgccattcttgtgccaattcaacagcagctctttctaagttaccactaaactgttgtaattttgtttcgaatttttcaaataacgtaaacgcatctgctacactacctgcgaaaccagctaacactttaccttcatataaacgtcgcacttttcttgccgtttgtttcatgatgacttgttgaccaagcgttacttgcccatctccagccatagctgctttcccattatgtcttacagcataaattgt

SEQ ID NO: 4475 - DNA, 1204 bp, Staphylococcus aureus; identical to SEQ ID NO: 4473

SEQ ID NO: 4476 - DNA, 138 bp, Staphylococcus aureus
ctataatatcttgtactttatcaacagcgtcttcgacattgttcgcttcaatgaccgatttcccttgactattacctagtttagcaaacttagctttcgtttgtccgaatacaaccatcgcgcgaacattttccatat

SEQ ID NO: 4477 - DNA, 157 bp, Staphylococcus aureus
tgtacgtccatcataaagtacagttttaccatcacgagccataccagcttcttcaattgttgaccatacatcgtcatcgtttgcaccgtcaaatactggtgatgcaacgtgaataccaagatttttagcagccatacctaagtgtagctctaatact

SEQ ID NO: 4478 - DNA, 238 bp, Staphylococcus aureus
tcatggtatgaaccatcatataatttagctttaacatcaattaaaggataacctgctaaaacaccattttccatagcatctttaagaccagcttctactgatggaatgtattcacgaggaactacaccaccaacgatagcgttttcgaattcgaaacctgcgcctgtttcgtttggtgtgaattcaatgtgaacatcaccgtattgaccacgaccaccagattgacgagagaatttac

SEQ ID NO: 4479 - DNA, 269 bp, Staphylococcus aureus
tggattgctgcctctgtttctaagattccaccttcaggatttaattgagttggtttttggtgttttttcataatgttaacaccttccacaacgacacggtcttttttaggtagagtagcaattactttaccttctttacctttgtctttacctgcgataactttaacgttgtcaccttttttgatatgcatgtgggcacctccttatttgtattggttgttattaattaaagtacttctggtgctaatgatacgattttcatgaagtta

SEQ ID NO: 4480 - DNA, 663 bp, Staphylococcus aureus
tgcgtatgacatgtatcaaaacatactgataaacgttcgttattatgaactccatcaataatacgtgctaactcttcaaatgagcgaccaatctctgtacctttacctgccatcgtttcaagcgcaatacgtacattattgtcattcgttaaaacttcatttaatccttcaataatcttattaattccggcatcaacaccagctccaacatgcgcacctggatgtaatacaatatctttagcccctatagcttgcgttctttcaatttcttgttgcaagaaatctacaccaagattaaacgtttctggtttggttgtatttgcaatattaatgatgtatggtgcatgaacaacaatattagataaaccatatttttccatcacttcatgacctttagttatatttaaatcttcaatacttttacggcgcgtgttttgaggtgcaccagtataaatcataaatgttgtttcaccatattcatgcgcttctatagcagaaccttctaacatctttttaccactcattgaaacatgtgatcctaataacataaaacacacctaaccttttttgttttgcttacgtttttgtctattttgctgcttactaaattgcttacgctcttgacgtttcattttttcaacttcttgtttaaatttcttctta

SEQ ID NO: 4481 - DNA, 157 bp, Staphylococcus aureus
acaaccataactccaacttgttgttcgtcacctgctaatgcgtcacaaatacgttgttcaattaatcgtctcattaaaggatgtgtgccaagtggctcgcttacttctacctttatgtctggataccgtcgtttcatttcatgaacgatattcggta

SEQ ID NO: 4482 - DNA, 122 bp, Staphylococcus aureus
tgtaagttactttatttttaccgcgtaagatagatgctacttctgatgataaacgacctaatgtttggccttcagcatcgataacataccatttgcgctcaatgtttgattcatttgccata

SEQ ID NO: 4483 - DNA, 120 bp, Staphylococcus aureus
ggaggcataccatattctaacgcttcaatgtaatcttcatccatttcatgcgcttcatcattaccttgcgctttttcaacaagttgcgcttcaaaacgacctttttgatcaataggatca

SEQ ID NO: 4484 - DNA, 182 bp, Staphylococcus aureus
taacagcttgtgtcaattgttcaacttgtgctttatcaagcgttggattgttagtttgattaattaaatcttttgcattttgaactgctgcttggtaagcatctttttgtggtttatcttcattgataaacttgctacccgcttccgtttgctgttgatcttgaatgctattacgtaaagct

SEQ ID NO: 4485 - DNA, 238 bp, Staphylococcus aureus
caacacctccatagataaataatggattgtacgctttggctggtgcttcggccacagctaaactcgctgcatgtggaaagcggttaccgggtccgattacaaaagtgtcaaatgtgttatgggcattgaattgctctctaccaagcacatgattatcctcagttgtttcagtagaaggttttgttgtttcttttggagtagcagtttcattattactataatttgctaattcttcagt

SEQ ID NO: 4486 - DNA, 349 bp, Staphylococcus aureus
gcccattctgagaatttagggacaatatccatttgtaataattgcattacgattgatgcagtgatgtagggtacaatacccattgcaaaaatagaaaatcgtttcaaggctccgccaccaaaagtatttaataactcagtggcaccttgagaaccttggggattatcaaaagctgcaggatttactcctggagctggtatataagtccctattttaaaaattactaacattgctagtgtgaagaaaatcttgttacgaacctcttttgttctaaagaagttcacaagggtttgaatcattagatcacctcgtgtgctccacctttagcatcaatagcttctgctgctga

SEQ ID NO: 4487 - DNA, 568 bp, Staphylococcus aureus
tgcaatgccagaaaatgtattaacaactggcacgtctaatagatttgctaaacggattgttttacgtaacgtttcatcggcttctttcgcttctatcggatctggagaaattggattgttatgacaactgaaaccacttatttgtaagcctctgtctgtgattgacttcataaatgcttggcgcttgtcttcattttctaacaactcatctaacttacaaaatttatctcctgggttaccacctgttccaacttcaatcatatccaatccagattctgagacataatctaacatatcttcaaaatttttatcgtaaaataatactgaaaatacacctattttcattgaaaagcactccttctttttatattgagaattttgtatcatatatgataatcattaaagttgtatgctcttgttatcaagatcgctacgataaatcgcttctataagggcatttacattgcgtgcttcttccggtttcaccacaatctcttctatccctaaacacgcattgacaaagttacgcgcctgtctctcaccagcaatgtcttcgttatgctcaaca

SEQ ID NO: 4488 - DNA, 170 bp, Staphylococcus aureus
gttctgcaaaacttgctgcaaccggatcatgtgtaaccatgacaatagttgtatcaaacgatttattcatttcttccaaacgttgtaataggtcatttgcacttttcgagtcgagtgcgcctgttggctcatctgcaaatatgatttgtggtttgtgaacaaatgctctc

SEQ ID NO: 4489 - DNA, 120 bp, Staphylococcus aureus
gtcagttaataacataaccaatctgtcaataccgataccaagaccacctgtcggaggcataccatattctaacgcttcaatgtaatcttcatccatttcatgcgcttcatcattaccttg

SEQ ID NO: 4490 - DNA, 552 bp, Staphylococcus aureus
gaattcgccacctaaatatgttgttgcaacaatgctaccaccttctggcattaattttttagcttcatgagccacaattgttaatgagtaagaactaatgtcttgagctaacaagaagccttcacgtgaagtttcagaaaagcgtccgcgtaagtcttccatattagcaaatgcgattgaatgatatacaccatcaatattgccaacatctttaccaatttgctcaaaaccattaataacctcttcatcgctttgaacatcaatttgatataagtgcgcttctggttgatttaattgttctaataatttttcaagctctttacggctacgttctttacggtaagtaaatactaatttagcacctaattgatctaaaactttagcgacaccaaaagcaatactacgcttattagcgattcccatgatgacatatgttttgttttcaagatttaacatgtaagataactccttataataattaatttaacggatagaatatctaatcccagttttaactaactttttattcgtcaatacattttaacacaatta

SEQ ID NO: 4491 - DNA, 552 bp, Staphylococcus aureus; identical to SEQ ID NO: 4490

SEQ ID NO: 4492 - DNA, 370 bp, Staphylococcus aureus
taaaatctcgttatactcaacaacatctccaactgcaacgattggacgttggttgtaacatgtacctgagtttgaacgtttaaatttagctaatggatagcgatctaattcaccttcatgctcaacgccgttctcttcaactagacgacgaacaagaatttcattagattcaacatgttcaacacgacctctgtgcttagctgtaatagccgcaccagaatcacgtgctgcaacgtgttccatacctgtaccaacaaatggtgcttctggattcatcaaaggcactgcttgacgttgcatgttcgcacccatcaatgcacggtttgagtcatcattttctaagaatggaatacatgctgtcgctgctgaa

SEQ ID NO: 4493 - DNA, 90 bp, Staphylococcus aureus
tctggtgctaatgatacgattttcatgaagttaccttcacgtaattcacgagcaacaggtccgaagatacgagtaccacgtgggcctttg

SEQ ID NO: 4494 - DNA, 89 bp, Staphylococcus aureus
tgttaccgactgtattcttccatgtatctggactatcatgccatgcaaccgttgccccatgtggcgggttttgaataaatctttctacg

SEQ ID NO: 4495 - DNA, 413 bp, Staphylococcus aureus
aatgaaaccacgacctatgttaccagcaccaaagtgaactgctttcattatgcatctgcctcctcgaatacttgtttaatttcttctgcagattttgcttgaacgatacgatccacattttcttcttcgctaaatgtaattgcaattttagataacaagtctaaatgttcgccatctttaccagcaattcccacgacaactttaactacttcgccatcccagtcaacgccttcagggatttgtaataatgttaaacctgagtgaatcacatttgttttagcttcatctgtgccatgaggaattgctaagccatttcccataaatgttgatacgacttgctcacgatctttcattgcttgaatataagcatctgttacagcaccactatcaactaaggctttacctgctttttc

SEQ ID NO: 4496 - DNA, 258 bp, Staphylococcus aureus; identical to SEQ ID NO: 4412

SEQ ID NO: 4497 - DNA, 323 bp, Staphylococcus aureus
tgtgcagatgatttgaatgtttcacgatatgaaaccattggagcacctacgttacattcaacgttgaattctttcttcatacggtctactaagatgtctaagtgaagctcacccataccaccgatgataacttgtccagtttcttcgtcagtgtgtgcatggaatgttgggtcttcttcttgtaatttaactaaagcttgagtcattttatcttggtcagctttagattttggctctactgataagtgaataactggctctgggaattccattgattccaagataatgtcatttttctcaccacataaagtatcaccagtacc

SEQ ID NO: 4498 - DNA, 197 bp, Staphylococcus aureus
gacgttgtactgctggaattttatccataataaatctcatatcatcgatgaatcccatattcatcatttcatcagcttcatctaaaatcaaagtatgaattccgtccgtttttaatgtgcgacgatttaaatggtcgataacacgcccaggtgttccgactacgatttgtgggccttttttcaaggctttaatttgg

SEQ ID NO: 4499 - DNA, 107 bp, Staphylococcus aureus
attgatttgataccacctgggtgatttgagtgacggtagtaaactttgtcagtttctttgttaccagtaaattcgatttttgatgcattaataacgattacataatc

SEQ ID NO: 4500 - DNA, 141 bp, Staphylococcus aureus
tgttgcttgtttttcttttctacaagtattttcacattaggtcccgcatccattgtaaaataacacggataccccgcttctcggcattcgtgaacaagcgccatgacatcataactttcttgcacaagatatgtgaacggc

SEQ ID NO: 4501 - DNA, 154 bp, Staphylococcus aureus
ttttagcgcttcaccgaccgttttcaattcatagcctccttacacttactcgaagaaaccaaaaccaccaccaaacggatctccaaaatctaaattattcttactttggactgtctgtttcttcatttcttcgtaatgtatttcttgattttca

SEQ ID NO: 4502 - DNA, 334 bp, Staphylococcus aureus
tacttaagtcaaattttcctgggcaataagaatgttcaatttccatcgtatcaatatcaacattctcattttcgaacattttgctaattaagaggtacatcacagtaaacgcttcatcaatcgttgtttctgtttgtcctttgaacatcagcgatatatttaatacaccttgatctagaacgacacctaagccaccagaatttctaacaatggcattataaccaatctcattcgttaaataatcaatgccatcttttaaaaacggcaatcttgaatcatgaataccaagaataacagtatgttgatgaatccaagtacgcacaacattatctga

SEQ ID NO: 4503 - DNA, 482 bp, Staphylococcus aureus
ttaccaggtaatttttttataatatcaacaaagaatcgtccaggaagtactactgagcctgtttctgaaatattgacaatatcttcgccatctacagttttaggaatagtgatttctattgaaatttcagagtctgaaccagttaatataacttcatgttctttcgcatcgattttgataccagttaatataggtaatgttgttcttggtgaaatagcttttaatgtgtcatttaattgtgtaataaaataatctcttttaatagtgaattccatcattaattaaaactccttccagtcgtttatatataattatataggttttaagttcttagtaatagtagtaggtgctgtggattggtggataagtcttaaaaacatagatttggcgaagttatacacatgttgataacttgtgtatggtgtgtatgacttttaaacattatccacaaaatgagttttgctcatcttgccacattagca

SEQ ID NO: 4504 - DNA, 220 bp, Staphylococcus aureus
tatcggtaaatttattatattgtttcataaaatgtaacttaactgtgcctgttggaccgttacgttgcttagcaatgataatttcaatttcaccgttttcatcattcgtttgtggctcgaaaccaccatcatcgtcatcatcttcatcgccgccacggttatagtaatcatcacggtataagaatgcaacgatatcggcatcttgctcaatcgaaccaga

SEQ ID NO: 4505 - DNA, 236 bp, Staphylococcus aureus
tgcaataccatgctcaagtttggcaaaacaggtttcaaatgttgagcgtgtaggatttttagtacgtgtataatcaaaacctgtcgattgtcctagttttggatgcttgtaggcagtagataaatggattggattcgctatagcaccggttgaatcatcggttaatgtgatttgggctaactgtgtatccttcatattaagaccctcctataagaaaaaataaaaaaagcttccgt

SEQ ID NO: 4506 - DNA, 85 bp, Staphylococcus aureus
atgatttgattgctgttttcttgacgttcttttcgacgttgtgcacgccactttaatgagcgactcatatcatagtaatgattaa

SEQ ID NO: 4507 - DNA, 260 bp, Staphylococcus aureus
tcttgatgcagatttttgagggactgatttgattgcgttttgttttgttgtttgttgtgactgctcttttgctggcgcttcatttacctgttgttgtttgtcaggtacttctacttcctcttcatcatctattacaaaaaatccactaaataaatcttttaaagccaagtggctcactcctcttctcctacaagtttagtcccaattctaacaaacgtcgcaccttcttcaactgcaataagatagtcattactcattcc

SEQ ID NO: 4508 - DNA, 177 bp, Staphylococcus aureus
aatgactttacatttttcgcaaataggttttactgatggtcttactttcatttttatacctccctatattatggagtgacgattatttataacgataagtaattcttccgcgtgttaaatcgtacggagacatctcaacagttactttgtcgccaggtagaatacgaatgtaattca

SEQ ID NO: 4509 - DNA, 405 bp, Staphylococcus aureus
ccattgaatctctgtcacgtactgtaacttgattatcttctaatgaatcaaagtcgaatgttacacaataaggtgtaccgatttcatcttgacgacggtatcttttaccgatagattgtgattcatcgaaatcgattgagaatttagaacttaattgctcaaaaatcttaatcgcttcgccagataatttcttacttaaaggtaaaatcgctgctttatatggtgctaatgcaggatggaagtgtaaaactgtacgtgcatctttactaccttcaacgccttcttcatcatatgcatcacataagaaagctaatgttacacgatctgcaccaagtgatggctcgatacaatatggaatatatttttcgttcgtttctggatcatggtatctgaaatcttcaccag

SEQ ID NO: 4510 - DNA, 299 bp, Staphylococcus aureus
tagtcgaatttcattgttttatcaaagttttccatttgcgacactcctttaattacaaatataactcactatcatcatacaatattatggctttaaattatagatttttaatgtaatctttaataaagcttaatgattttgagatattttcaggttgtgtaccgccaccttgagccatatctggacgaccgccacctttaccaccaacgattggtgccatttgtttgataagatcaccggctttaacgttatttgttaaagatttagggacagttgcaaccatcgatactttatcatca

SEQ ID NO: 4511 - DNA, 110 bp, Staphylococcus aureus
tgtacacccgcgaagtttaaaccttcatggaagtcaccttggtttgagctaccttcaccaacagttgctgttgcaattttcttcttaccatccatttttaaagctaaagc

SEQ ID NO: 4512 - DNA, 353 bp, Staphylococcus aureus; identical to SEQ ID NO: 4389

SEQ ID NO: 4513 - DNA, 197 bp, Staphylococcus aureus
tgcgcttttaaatcgtttattaaaacttctatcatatcgtctttagaattgaagtgttgtgctttttcgacatgttgctggcccgaatcataaatatacttcgcttcattaccaaacgtatacaacacatctatatgcttttcttctaaataattacctacaccgatatgcatttctttgctattttcacctaattc

SEQ ID NO: 4514 - DNA, 197 bp, Staphylococcus aureus; identical to SEQ ID NO: 4513

SEQ ID NO: 4515 - DNA, 135 bp, Staphylococcus aureus
ttcacattgtgcgtattcttctctcgtcaacaatgtttctgcttttttctctccatgtcgcgtaccaatgatttcaattgcattatcagcttcaaacaattctaataatgcggtcgcaagatcccctaccgttga

SEQ ID NO: 4516 - DNA, 610 bp, Staphylococcus aureus
caaagattggtttacaacgttttaattgatctaagtttgctgggtactcagtaatttctttaccgtctaattcataagctgtacagattttcactgtgtctaggcctgttaaaacatcgattgagttaatagataaatctgtaataccacttacacgacgagagtgacgtaatacaactgaatcaaaccaacctacacgacgtggacgtcctgttgttgtaccgtattcacgaccaacctctctaatatgatgtccatcttcatcgaataattcagtagggaatggaccatcaccaacacgtgatgtataagctttacatacaccaattacctttgaaacgaatgtaggacctacacctgtaccaacagtaacgttacctgcaattggattacttgatgtaacgaatggatatgtaccatggtcgatatctaacattacaccttgcgcaccttcgaaaagtaccttttcatctgctacaaatgcatcgtctaagatttttgatgtgtctgttacaaattcttttagacgttgacctgctgcataatattcttcaaagatatcatcaaatgatggacatgtttcgttaaacatacctttgaaatatgcttg

SEQ ID NO: 4517 - DNA, 213 bp, Staphylococcus aureus
cctttataaacgataaaaccatctttaatataaataccatcaacttcttgttgagttgagaaatacaatgtcttagcttttaattcttccgactctatcacttgtctttgatgataattacaaatcaaataatcctcttccgtttgatttttatatatttgctttttagcattttgatagttttctaaattttcatggtaatctagatgcgcc

SEQ ID NO: 4518 - DNA, 521 bp, Staphylococcus aureus
tgctgtatcaatgattacaaagtctaaatgttcttctttagcatgttttaatgcattagttacaatttgttgtggctttacttgatctccttcactgtatacaggaatatcaatttgtttccctactgtttgtaattgatttatcgctgctggacgataaatatctgctgcaactaacataggttttttgttgtattttttacgcatcaataatgctaatttacctgcagttgttgttttaccagcaccttgtaaaccaaccatcataacaacagtaggtggtttatttgacatattaatcgacgtattttctccacccatcaactgcgttaattcatcttgaactattttaataacttgttgccctggtgttaatgattgcattacatcggaacctaatgcgcgttctgatactgttttaataaattcttttaccactttaaagtttacgtcagcctcaagtaacgctaatcttacttcacgcatcattatctttatatcagcttcagtaagtttaccct

SEQ ID NO: 4519 - DNA, 144 bp, Staphylococcus aureus
ttactaataacatcagttttgattttgcgttgtgcatcataaattaattgacctgattccctcatatatacaaatcctcgagaaataatgtctggaccagaaagtaatttatttgtattaaaatcaatactaacaacaacgata

SEQ ID NO: 4520 - DNA, 375 bp, Staphylococcus aureus
gcaataatgcgctgttgtttatccaatacgattggcatttgatcccgaacccactgtggcactttacaatctataaacaggcgattcactttcttataaccatcgcgcccattcagtttaaatgtatcgccactttgtcgtgttctcactgtaagcggaaataaacattttggtaaattagaatgtatctctaatcgatatttgttaaaaatataattacctggctttttaattgtttgaactctaaaatatgtatcgccattatttttagccattattattaatttaccatatgcgatttgaattatccatttatccgtgagattaatactgaattgtgctttcttactactaaattgtttaaaccactcttcg

SEQ ID NO: 4521 - DNA, 521 bp, Staphylococcus aureus; identical to SEQ ID NO: 4518

SEQ ID NO: 4522 - DNA, 230 bp, Staphylococcus aureus
attgtattaggaccatttggatgtgcagaaattgcccagcattcaccagttgtttcattagggatatcatagttaaatgcttttaatgcatgaccgccccaaattctgtctttaaaaacgggttgtaaaaataatgccatagttaaaactcctctatattttcattaataagttataaatttctgtagtactgtttgcattaattagtgattggcgtgtctcatcattca

SEQ ID NO: 4523 - DNA, 559 bp, Staphylococcus aureus; identical to SEQ ID NO: 4431

SEQ ID NO: 4524 - DNA, 235 bp, Staphylococcus aureus
tactgcaataactgaacgtcctgaatagtcaacacgtttaccaagtaagttttgacggaaacgaccttgtttaccttttaacatatgagataaagattttaatggacggttacctgggccagtaactggacgaccacgacgaccattatcaattaaagcgtcaacggcttcttgtaacatacgtttttcgttttgaacgatgataccaggtgcacctaaatctaataaacgtttc

SEQ ID NO: 4525 - DNA, 353 bp, Staphylococcus aureus; identical to SEQ ID NO: 4389

SEQ ID NO: 4526 - DNA, 196 bp, Staphylococcus aureus
aactacatctcctgtttctggattcttaattcctggtttacctggaacttcctctttctctcctgttggtaacttcggatcaaattcgtctcgatgacctggtgttatcgtttctggtccgtattctgttaattcattaatcggatcttttgtgatttcttctttcgattcacctttactaataatttctccagtt

SEQ ID NO: 4527 - DNA, 438 bp, Staphylococcus aureus
agaataacgatatccttgtatgtcgcacttctatagcttcctgttttcatatcataaactttttgatgttctaagatatctttaacttgttctactataaaatgcgcttcttgttcactaccagttaaatcactatgttcttgatccgcttcaacaaggacttttaagtttactggatggtccgattcatcatatggtgcaccataatacaactgtgccgcttcatcatattttacttcaccgacttgttcatccatcatatgtttgaatatatagttagtcgttgacagtacttcttttcgagaacggaagttttgcgacaaatcaattcgacgtccagtgccatctccatctatagtaaagcgttgatacttttcaataaataaacttggatcagcttgtctaaatttataaatggattgcttaacatctccaacc

SEQ ID NO: 4528 - DNA, 244 bp, Staphylococcus aureus
tgtctaccagaacgaccacgtaattgcctgtctacacggctattttccatatgttcatgaataataacagctaatccacctaatgcttcgacaccttcaccaagtttaatatctgtgcctcgacctgccatactagtcgcaacagtcatggaaccaatttgccctgcttcagctatcatctgcgcttcttttgcaacattttgcgcaatgagtaaattattaggaatatccatttggaataata

SEQ ID NO: 4529 - DNA, 386 bp, Staphylococcus aureus
tgcctgcaagtgggtcacgtttacaaatactttctattgtatcgataatctctttattgtttgttgtagaagttgctgaaacaaaccaactttttttaggaatattttggcaaaacttatcaggattaccaaattcaggactttgtcgcgctaaatttttccatagtgtccaactaccacctaattcgtcagttggtggcgctggtgtatcattatcaccataagtagagctttctgtaatactaccgtttgtcacaaagacaagatcgtttatagtcagtttaatagattctgcattaccattacggtcaattaatatttctcgggcaattttttgacttgtcgtaacatctattttaatatcttcgacttttacatcgtattca

SEQ ID NO: 4530 - DNA, 267 bp, Staphylococcus aureus
tgtaacacggcatgcctatgactgaatgtaccacgttcactatcttgaccagttaagcgaatcggtgtaccatcttgtaaaattgtcgcaaatgcaagttgttctgcttgtgcccaattaactaaaccatcttctttattaaacggctcatgacgcttctcaagaactttgtttaactttttcaaaatgttaaagccatccggatatgttaacaatgcatcatttatttctttcaagtgatcaaaagtaaatgattgttcgtctgct

SEQ ID NO: 4531 - DNA, 230 bp, Staphylococcus aureus
gcatcatgttgcgcttctgcatctactgtagcttctttatttgaagtctcagctgcattgtcatttttagactgctcaacgctggctttttcaattgcttcagttgcagaaatttgatcctctttatctactttagtagcagtgccatcgcctgcattttctgctttagtatccgtcttagcgtctgttgatgtattcactccagcaaccttcgaatctttactgtcagc

SEQ ID NO: 4532 - DNA, 193 bp, Staphylococcus aureus
gcctctacataaccactatcaaattcaaacaatccaatatcgaagtaatcccaactcacaccttttttgtgttgaaaaataggttctaaatcgtctcctccaatttgcaaaactctaaatttacgtggcatcattttcaccttctattaactcatcgagctgattaataatattcttagaagcatatgcatct

SEQ ID NO: 4533 - DNA, 135 bp, Staphylococcus aureus
ttcctcaaatttcacaagtacgtgatcttcacttgccgccacaggttccgaattttgcaataaactaacgagtgattttttatcattatttttggcatgatcaatcacttcttgccaatgatctttcaacaattt

SEQ ID NO: 4534 - DNA, 135 bp, Staphylococcus aureus; identical to SEQ ID NO: 4533

SEQ ID NO: 4535 - DNA, 213 bp, Staphylococcus aureus
catttcgtttgaagatagttcacgcccatttttccaatgttgtgctgtaacaacctcgcctgtttctatgcgtttcgtccatactaatttgggcacaataccttctgctgataatgccgcaataaatggatttgaatttcgttttaaaaacaacttttgtccatcttgttcagccatatatgcttcaccagatgcaccacctgctgaatcaag

SEQ ID NO: 4536 - DNA, 653 bp, Staphylococcus aureus
gaatacgaggaagaccttgtgtgatatcgctacctgctaccccacctgtatggaatgtacgcattgtaagctgtgtacctggttcaccgatagattgggctgcaattgtaccaactgcttcaccaacttcaactttttcaccagtagcaaggtttttaccgtaacatttttcacaaacaccatgtcgtgcgttacaagtaaatgctgagcgaatatacatttgttcaataccagcatctgtaattttcttagcaatttcaggtgtaattaattcatcaggacgaatgattatttcatcagtttcaggatgacgaattgtttctttagaataacgaccttcaatacgttcgataaatggttcaatcatttctgtaccttctttaatatcagaaactaataaacctctatcagtaccacagtcttcttcacgaacaataacatcttgtgccacgtcaacaagacgacgagtaagatatcctgagtcagctgttttaagtgctgtatcggcaagacctttacgtgcaccgtgagttgagatgaagtattcaagtactgttaaaccttcacggaatgaagatgtgattggtaattcgataatcttaccagatggtgcggccatcaatccacgcatacctgctaactgtgtaaagtta

SEQ ID NO: 4537 - DNA, 135 bp, Staphylococcus aureus; identical to SEQ ID NO: 4533

SEQ ID NO: 4538 - DNA, 147 bp, Staphylococcus aureus
ttacctgcctcaattcttcctgcaatatgatccacatcatgtgttgtaaatccatctctatgtgcaatttcatacatgtagtctaatgccttacgaggacctggaccaactggtgcgtcttctgatgcttttgcatcatctctcaca

SEQ ID NO: 4539 - DNA, 147 bp, Staphylococcus aureus; identical to SEQ ID NO: 4538

SEQ ID NO: 4540 - DNA, 234 bp, Staphylococcus aureus; identical to SEQ ID NO: 4248

SEQ ID NO: 4541 - DNA, 264 bp, Staphylococcus aureus
tgttcaccatttctaatcttatcggctaaatcattcagttttcttaatcggtgatttacacctgattttgaaattggaccagttgataccatttctccaagctctttcaacgaaatttcttgatgttctactcgaattctagcaatctctctcaacctgtctggtaaattttcaataccaatttctttatcaatcaatttaatgctctcaacttgtttcatcgcagcactaactgttttatttagattggccgtttcacaatta

SEQ ID NO: 4542 - DNA, 111 bp, Staphylococcus aureus
tgtctatcttgtaaacgcattaattctgggccatatgcaccccaacgtcctgattcttcccataattcagcttgttgtaacgctggcattaaaatttcaacagaatcgata

SEQ ID NO: 4543 - DNA, 236 bp, Staphylococcus aureus
tccagccttcaaccgcacctttaccagcacccatacgtacttctaaaggttttttagtatatggtgtatgtgggaagattttaatccaaactttcccgccacgtttcatgtaacgtgtcattgctatacgagcagattcgatttgacgagatgtgatccaagacgttgttgtagcttgtaaaccaaactcaccaaatgttacgtagttaccgcctttagaacgaccagttgtttta

SEQ ID NO: 4544 - DNA, 236 bp, Staphylococcus aureus; identical to SEQ ID NO: 4543

SEQ ID NO: 4545 - DNA, 422 bp, Staphylococcus aureus; identical to SEQ ID NO: 4299

SEQ ID NO: 4546 - DNA, 257 bp, Staphylococcus aureus
accgttaatgataatgtaaagtattgttgtggtttgaactgattaatctcttgttgtcgtgtatttactaattgaatcgttggtgtctgaacacgtcccagggatagctgtgcatcatactttgttgttagtgcacgcgttgcattaatcccaacaatccaatctgcctcacttctcgctaacgctgcataatacaaatcgttatattgacgaccgtcttttaaatttttaaaaccttgttgaatagcttttttagt

SEQ ID NO: 4547 - DNA, 759 bp, Staphylococcus aureus
gtttcatcatcaaaatcagcgatagtgttcataaatgccttccactcaaatacgagatcactacaatcttggattggataatgactcaaagacatatgattaaatttattgaagatagttgtcaatttatgtctgatatcctgcgattgtaagctgtctttacgtctaataaatgattgatatgctttcgtatgaccatattttatagatgcttctttatcatattgtgactgtagtgtcttgtttaaaatgctggtatctattagagagagtcctttaataaattcacatacagagcgtctaattaattgtaagtcagaaatctttttatctaacttgcttatttgctctgataataactttcgcaattgttcattatcatacgaaatgtattgttttattttagcgatatcaaaatcaaaagacttgagtattaaaatcttttgtaatttttctaagtcttgctgtttataaacgcgataatttttatcatttttatctggaactaataatcctatttcatcgtaataatgtaaagttcttttagttacacctgtaatttcaataatatcttttaaagtgtatgtgtatgccaaaattcagtcacctcatttattattttttgtgctggaagtgttgtagcaacttcaataggtatgtttgttttttgtaaaaagtattttaccaagtgatagccacatgcatacccggcagcatgagataagccaacgataggcctactttgaaagtttattaatt

SEQ ID NO: 4548 - DNA, 757 bp, Staphylococcus aureus
gtttcatcacaaaatcagcgatagtgttcataaatgccttccactcaaatacgagatcactacaatcttggattggataatgactcaaagacatatgattaaatttattgaagatagttgtcaatttatgtctgatatcctgcgattgtaagctgtctttacgtctaataaatgattgatatgctttcgtatgaccatattttatagatgcttctttatcatattgtgactgtagtgtcttgtttaaaatgctggtatctattagagagagtcctttaataaattcacatacagagcgtctaattaattgtaagtcagaaatctttttatctaacttgcttatttgctctgataataactttcgcaattgttcattatcatacgaaatgtattgttttattttagcgatatcaaaatcaaaagacttgagtattaaaatcttttgtaatttttctaagtcttgctgtttataaacgcgataatttttatcatttttatctggaactaataatcctatttcatcgtaataatgtaaagttcttttagttacacctgtaatttcaataatatcttttaaagtgtatgtgtatgccaaaattcagtcacctcatttattattttttgtgctggaagtgttgtagcaacttcaataggtatgtttgttttttgtaaaaagtattttaccaagtgatagccacatgcatacccggcagcatgagataagccaacgataggcctaccttgaagtttattaata

SEQ ID NO: 4549 - DNA, 310 bp, Staphylococcus aureus
tatttttacaatctccaccaatgacacgtcgtcattgctacctcataccaaacaaaaaacagtctcgcaatcaagactgttttccactcaatatattcatccattagcgtaatagattatttgacttctgtagctacaaagattttacgtttttcccaaacgcctgtcttttcattgtaatcatcacaagtaattaatgttaattgtttatctttacctttttgttcatctagaactcctacatctgtaggcttaacatctcttatacttgtcattttatacttacgtgtttcattaccaactttaaagt

SEQ ID NO: 4550 - DNA, 134 bp, Staphylococcus aureus; identical to SEQ ID NO: 4415

SEQ ID NO: 4551 - DNA, 436 bp, Staphylococcus aureus; identical to SEQ ID NO: 4463

SEQ ID NO: 4552 - DNA, 208 bp, Staphylococcus aureus; identical to SEQ ID NO: 4468

SEQ ID NO: 4553 - DNA, 208 bp, Staphylococcus aureus; identical to SEQ ID NO: 4468

SEQ ID NO: 4554 - DNA, 1256 bp, Staphylococcus aureus
tgtccagattgttctccacctaagttataattaccgcgacgcatttcttctactacatatctgtcgccaactttagttttattagatttaattccttcttgttcaagcgctttgtaaaaacctaaattactcataacagtagaaacaatcatgtcattattcaattcttgatttttatgcatttcttgaccaataataaacataatttggtcaccgtcaacgatttgaccattctcatctactgctatgattctgtctccatcgccgtcaaatgctaacccaaaatcactttcagtttcaactactttttcagctaatttttcaggatgtgtagagccacatttctcattgatattatatccatcaggactacatccaattgtttcagtatctgcttctaagtcaccaaataagaatggcgctagtgatgatgttgaaccatttgcaccatctaaagcaattttcaaaccttcaaagttaacatctactgttgattttaaatagctcaaatatttttgtgccccttcaaagtaatctgaataatgtacaatatcattgccaactggtcttggtaattctgggttttcttgatccaataatgcttcaatttcattttcttgttcatctgatagtttaaaaccatctgatccaaagaatttaataccattatctgcaactggattatgagaggctgaaatcattacacctaactctgcacccatatcgcgtgttaaatatgcaacacctggtgttgaaataatacctaatcgcatcacttctgcaccaattgaaatcaaaccagctattaatgctgattctaacatttcacctgaaactctagtatcgcgacctacaagtacacgtgggtgtttttcacctttattatgtgctagaacatagccaccgtatcttcctaatttaaatgccaattcaggtgttagttcttggtttgcgacacctcttactccgtctgtaccaaaatattttcccattgtttactctcctttaatttagctatttattttacatttatataagccttcgtttcacttggttgtgctttagtgacatgttctggtaaattgatttttacagtcttttcagttgattctgaaataccatctaaatctacttctgcatcaacttcgcttatattttgtaagtcatctcgactaccgaagatttcaatttctttatcttctaaatcaatcgaacttaactctttatcatctgctaaactacctttctgtttaaca

SEQ ID NO: 4555 - DNA, 578 bp, Staphylococcus aureus
ttttgctggcgcttcatttacctgttgttgtttgtcaggtacttctacttcctcttcatcatctattacaaaaaatccactaaataaatcttttaaagccaagtggctcactcctcttctcctacaagtttagtcccaattctaacaaacgtcgcaccttcttcaactgcaataagatagtcattactcattcccattgataattcatcacaaggcgcatattctaaattgagtcgttgtatttcttcttttttcaaacgtaactgtttaaataacgatctaatatatgcttcatcatctgtcaatggtgccatcgtcattaaacctacaatttcgattttgtcatattttttaagatcatctataaactgatcaacatcttctaaagcaataccatgtttagaagcttctcccgaaacgttcacttgcaagaaacatttaattttatgttctgcacgtttgttaatttctttggctaagctcaatcgatctaaagcatggaaataatctacgtcgtttataacgtccttaacttttcgagattgtaatgatcctataaaatggatcaccgcatctga

SEQ ID NO: 4556 - DNA, 126 bp, Staphylococcus aureus
agaaatatgtacaagtccttgtacacctggtgcaatttcaacaaatgcaccaaagtttgccaatcttactacgacaccttcaatgacatcattttcgtggaattgacctttaatattttcgaaagg

SEQ ID NO: 4557 - DNA, 206 bp, Staphylococcus aureus
caccatgtttgcgtttcttacacgagtaagcatatctgcgattggatctgtcattgtcattgattgttgcctcctttcagactcttttttattaccagctagctttacgaacgccagggatttggcctttgtaagctaattcacggaaacaaatacggcataatttaaatttacgatatacagaatgtggacggccacaacgttca

SEQ ID NO: 4558 - DNA, 310 bp, Staphylococcus aureus
tacaacttcatcatccatgaaacgaccattttcatctaatttagagtttgcttgtgctacaacatagctatcttcttcgtcagctgttaaatagtcaatttgatcagtgatagcatgtgtatctaaatcaactttacgatatggtgtttcaataaagccgaattcatttacacgtgcataacttgataatgagttaatcaatccaatgtttggtccctcaggtgtttcaattggacacatacggccatagtgagagtagtgaacgtcacgtacttccatttgagcacgttcacgtgttaaaccaccaggt

SEQ ID NO: 4559 - DNA, 307 bp, Staphylococcus aureus
tgtttgtttgtataagttatttaaaatgacactagcatttgcatccttacgcacatcaataacgacacgcacaccagtacgtaaacttgtttcatcacgtaaatcagtgataccgtcaattttcttgtcacgaacgagctctgcaattttttcaatcatacgagccttattcacttggaaaggaatttcagtgacaacaatacgttgacgtccgcctccacgttcttcaataactgcacgagaacgcatttgaattgaaccacgacctgtttcatatgcacgtctaataccactcttacctaaaata

SEQ ID NO: 4560 - DNA, 183 bp, Staphylococcus aureus
tgttttcaacgtataatctttttctaaacttttatatttagtattgcttgaagcaccctggtcactacctccatgaccaggatcaagcactattgttttaccttgcaaaggatttttctccttcgtattatccgcgacaatatctaaatttgtgtgccatccagctatccaacctttttcatt

SEQ ID NO: 4561 - DNA, 267 bp, Staphylococcus aureus; identical to SEQ ID NO: 4423

SEQ ID NO: 4562 - DNA, 185 bp, Staphylococcus aureus
gtattaataaaatatttaataatggtaacacaaacataaagctgtcaaatcggtctaaaataccaccgtgtccaggtagtattcgacctgagtctttaacgccgaaatgacgcttaaatcctgattccactaaatcacctaattgaccaaataaacttaaaatcaatgtcactccaagtaatatc

SEQ ID NO: 4563 - DNA, 156 bp, Staphylococcus aureus
tgtattttgatcacctgtgtaagcgtgaattgtagtcattaaaccttcaactaaaccaaagtcatcgtttaaaactttagcaactggtgctaatgagtttgtagtacatgaagcacctgaaacaactgtttcagaaccgtctaactcttggtggtt

SEQ ID NO: 4564 - DNA, 467 bp, Staphylococcus aureus
cttcaccttcgttatcacgaattgatttaataaattcatttgtgaatttttcacttgatgtgtaaatcactttggcatctggattattatctaaaacatgatgaccaatggcatgcattaaatgggtttttcctaaaccaacacctccatagataaataatggattgtacgctttggctggtgcttcggccacagctaaactcgctgcatgtggaaagcggttaccgggtccgattacaaaagtgtcaaatgtgttatgggcattgaattgctctctaccaagcacatgattatcctcagttgtttcagtagaaggttttgttgtttcttttggagtagcagtttcattattactataatttgctaattcttcagtagtaataaagtgaggtttaacttcatagcctacaacatcaaataagattgcttggataatttcagcatattgttgatttaaccaatttgca

SEQ ID NO: 4565 - DNA, 485 bp, Staphylococcus aureus
tcaaaatcagcttgttgagatgtatcatctttattttgattagaaaaatgtgtagcctttgatctttttctttgccgtcttttcttagatgtattcctcgtaaataattctaattcatctttatcttcatttgattcttgttgatcgttcttcgttttatcatccatcaatactcacaccctttaataagatggtaaatgggcacggaatctttcaataaatttctctccacgctcttcaaaagtactatattgatcccaactcgcacaagcaggtgacaataatacaacatcatttggttctataatatcttgtactttatcaacagcgtcttcgacattgttcgcttcaatgaccgatttcccttgactattacctagtttagcaaacttagctttcgtttgtccgaatacaaccatcgcgcgaacattttccatataaggaatgagttcgtcaaattcattccctcgatccaaaccaccaca

SEQ ID NO: 4566 - DNA, 540 bp, Staphylococcus aureus
gttaataatttacgatcttttaacgttcttcctgtcatatcgtcgttaactacttttaatccttgtttagttaataaatcagcaactaaccatttcaagcgtccaggtaaataacctatttcaatatttgcaccttcatctaatgagtcagggaagacacaaacagagtatccttctaatggagatttttctctgttaagccctgctgaaagtagtgctgctggtccatgacataatgtaactataaagcggtcattgtctaatgcccaatctaatgtttgttgaacgtcctcactttcagaaataccaacaactgcagcatgtccgcctgggataaagacagataaatagtctgaatcaggtcctaattcatttttaatcacatctgctaatttttttggctgttttaatttttctttcaatttattataagtacttataactgcctcgtcttcagttggcatagcccataattctaatttaactggataaccagataatgtcgcaacatcaacgtcaaaacctgcttccattaaatga

SEQ ID NO: 4567 - DNA, 158 bp, Staphylococcus aureus
tacctccatctcaccaaaacgttgtccaccgaattgcgctttaccgccaagtggttgttgtgtaacaagtgaatatggtcctgttgaacgcgcatgtaatttatcatcaaccatgtgcgcaagtttcaacatgtacattacacctactgaaatacggt

SEQ ID NO: 4568 - DNA, 143 bp, Staphylococcus aureus
tgtaagtattcaccttttaactcttcatagttttcaataacaccgttatgaactagagtaaaacggccatttgatgattgatgtggatgagagttttcatgattcggtacaccgtgtgttgcccaacgtgtgtgaccgattcc

SEQ ID NO: 4569 - DNA, 299 bp, Staphylococcus aureus
gaatagtataattagtacaatatatacaaccataccaacattacttgaaggatttgcagcattcgcaatgttttgtgcccattctttatctggatagaacaacgttaatgttctaggcagtaagaagaacgccattgcaaagattacaggaataacaccggctgagttcacttttaaaggtagataagttgcctgtgaacctaatctttgagcagtttgtttcttagcatattgaatcggaattttacgaacggcttcaagtacataaatagcacctacagttaatagtatcagtgaca

SEQ ID NO: 4570 - DNA, 261 bp, Staphylococcus aureus
agcttcccaatcacggataataccaacacgaagtccgattggattaattttttgacccacagtattccctccttaaaagttaattaagcttctttagcttcttctttaccgtcacttacgacgattgtaatgtggcttgtacgtttgttaatcgcacttgcacgaccttgcgcacgtggacggaaacgttttaatgttggtccttcgttagcatatgcttctttaactactaattcatctgtgttcatgtcatagttatgt

SEQ ID NO: 4571 - DNA, 184 bp, Staphylococcus aureus
taaaccattggcacgtctaattttttcaacattttccggtgaacctgaaccgtagtattgaattgcgatacggtataagttttcttgaccattcactgtatgtctttggccaccaccttgacgttgttgttgctgttgttgattttgattagcttgttgttgattttgattattttgtgcttga

SEQ ID NO: 4572 - DNA, 196 bp, Staphylococcus aureus
tatcttgatctgaagcagaatcatagaatgcatgaccatattggtgtttaactttttcagcagtttcataagaagtgtttaatccttgtgcaatatcgtctgtaatatcacgccctgccatttcgatagaatcagcatctactaattcaccgcgttcataaaaagcaacttgcgtaacgtcttcaccaatatcaat

SEQ ID NO: 4573 - DNA, 423 bp, Staphylococcus aureus
catctgttgaataaatccaatcgtaaaatttattgcctgaagggaacattaacgcagcaggcatttggataaataaatcccaaaaataatcactgcgacccgcttctaatactaagacttctttatctttatcttcactcagacgattacctagtacagaacctgcactgcctcctccaatgatgacataatcatatgatttgtttttgttactcatcgttatgacctccaaagtttgttgtatttcaaagtgagtattgcatgaaatatttgttagtggctgattggttatcgttgaattgctaaacttagctaaccaaaacactcgcttttccttttacgattgttactaacagtaatgaaataatctatgattcattttgcgtttagtccaaattatcaatcaacatttcgccacttata

SEQ ID NO: 4574 - DNA, 185 bp, Staphylococcus aureus
caacagttgctttctctgtagttaaattcacttgggcattaacgtcatcaagtttattcagtttcttttcgatacgatttgaacatgcggcacaagtcataccagtgatatctaatgttgtttttttcgtattagccacattattgcctccctgtgattcattgttacacgtctaatgtaccccc

SEQ ID NO: 4575 - DNA, 278 bp, Staphylococcus aureus
gagcagcatcttcaccttgttcaatgtatacttgaacagcaccagaccatgtagcacggccacaaagtaccccgttgaatttagcaccagcttcgtgagcaaattttaaagtttcttggaataattccgcagaaacaccagcacttaagtaaatgtatggtaaatgagttgctgcatcttgatctttaaagtgttgtgccgcttcctcttttgtataaaccacttcaccttcagcaaagccttctacatatttcatgtttactggtacttcaactttc

SEQ ID NO: 4576 - DNA, 511 bp, Staphylococcus aureus
taaagaagatacctgatgttcttgatacacctggtttcgttttgatgatttgtaaagctggacgcacagtgtcgcctgttgaatgtgctgcaccactaactaaaccatctgctttaccagcataaacaagcattgtaccgaagtagttcacattgtttaataattcttgtgcttgttcttcagtcgctttacctttacgtcgttcaacaaatgattgaactaattcagctttcaattcacttgtcgcaggattaattaattcaatattagaaatatcaagatcaagtttttgcgctaaagattgaaccttagtctcatcacctaacacgattggtgtaacataatctgttgcttgtaattgtgttgcagctgttagaacacgttcgtcctctccttcaggtaatacgattttaacgtttttaccagaaagtttgtcttttaatacatttaataaatcagccataatgtcctcctgtaatataaatcttattaatcattcacggtataatta

SEQ ID NO: 4577 - DNA, 339 bp, Staphylococcus aureus
taaaatgttatgtactgcctttttaaaaatacgtaccatcgttttcacttctttatttgacatacttaacactggcacaaacgtaatgacattttctaaatttctaatcattagcccgttttctttacaattacgtacaatacgttcaactttttcaatttctaacggcgttttactatctttatctgtaactaattcaactccaaacattaagcctcgtcctcttacatcaccaacatttcgatgacgcttcagcgcatgtaactgtttctcaagtgttgatgatgtcgtttcaatatgtgacaataacttacgtttttcataaagtcttatattttc

SEQ ID NO: 4578 - DNA, 117 bp, Staphylococcus aureus; identical to SEQ ID NO: 4306

SEQ ID NO: 4579 - DNA, 215 bp, Staphylococcus aureus
acaaccgttatgaggtactggagtaacgtctctgatcgcagttacttctaaacctgcagattgtaatgcacgaatagctgattcacgacctggaccaggtcctttaactgttacttcaactgtttttaaaccatgctccatagctgatttagatgcagtttcagaagccatttgtgctgcaaatggtgttgattttttagatcctttgaatccta

SEQ ID NO: 4580 - DNA, 134 bp, Staphylococcus aureus
taacggtacaccccacacacgttgacgagaaataacccattcgccacggtcacgaaccatattgtaaatacgtgttttaccccaatttactttgaagtttgtattttcgattgcatctaaaatatcttgtctta

SEQ ID NO: 4581 - DNA, 418 bp, Staphylococcus aureus
tgtttttagtttacccgaactatcccttgataatgattgtgacatctgcggataatatttcattttcttagatatcgtcgaaatatcaccgattacttgaagtccatctgtcgtaaacaattcaattctgctttgtttgtttttacttggggcgtatgtcacttcggcaatatatcgtctaacttcaggtgtcatttcagataacgccttaatcatatcatcttcttttgtacctttgaaaccatccatgacaggtgcatcattaattttgacatcatttgaacctttaagcaatttaccattttctaataaaggtaaatatttacctttatatttcactaaagcaataatttcattttctgtgatatctacgtttaatgtgtttggtaattgcttgtgtatctcaacacttttgatt

SEQ ID NO: 4582 - DNA, 250 bp, Staphylococcus aureus
ccttcgttattgtctaagattttattataaagttgtgtcgtcgaaagttgaaaatgtgacgttggttttttcagtaatttgtcaattttagttgtttcagtgtatgtgtctactgacatcctaaatccctccaaagcgataatttaaatgtaagcctttacatttaattagtataacacattaacataattaatctacaatattttactgtaaatttatttgtgaaaaattgacattaattcattaatta

SEQ ID NO: 4583 - DNA, 260 bp, Staphylococcus aureus
tgggcgtttaataccatctgctactggtacttctacgacatttttaccatcgaagcgatccgtctcaacatgaacatcagcagcaacaatgatacctgttgcattttcaatatcttgttcagttaaatggtttttaatgccgcttgaaccattcgtttctactttaattttaatacccattttatccgcttgctttttcaatgcatcacgtgccatatatgtgtgtgcaatacctgttggacaagcagttactgctaaca

SEQ ID NO: 4584 - DNA, 248 bp, Staphylococcus aureus; identical to SEQ ID NO: 4340

SEQ ID NO: 4585 - DNA, 112 bp, Staphylococcus aureus
tgaatggtggtcttttttgtgtgtacgtaagtgttcgtttactgcgttgatttctgcagtaagtacagcgatttgtacttctggtgaaccagtatcagtttcgtgtacacgg

SEQ ID NO: 4586 - DNA, 310 bp, Staphylococcus aureus
ccaccttcaaatcctggtcttacaccaccgcctgaacgagctttttgacctttgtgtccgcgaccacttgttttaccgttacctgtcgcaacaccacgtccaacacgattgcgttctttacgtgaaccttctgccggttttaactcatgtaatttcatttcggcacctccttgattatttttcttctactgttactaagtgcttaactttgttgatttgcccacgaatagcagggttatcttcaacaactactgaactgttagtctttttaagacctaaagcttcaacagttttacgttgtgtttcagga

SEQ ID NO: 4587 - DNA, 298 bp, Staphylococcus aureus
tgaacaagagaattcgtcaacattaaatcaaataatttacataaaaataacaagaggctaaagcattagcctctgttatatacttgttattccgttacttcagtttgagattcaacttctgcaactggtttagctgttttttcgtattttacgtcgctataacgtctcataccagtaccagctggaattaacttaccaataattacgttttctttaagacctaataagtcatcacgcttacctttaattgctgcatctgtaagaactcttgttgtttcttggaatgatgctgcagata

SEQ ID NO: 4588 - DNA, 371 bp, Staphylococcus aureus
ttttacattttctgcctcattaatttcttcaaaaccaccaatttcatttaataaatatgttaattcattacgtgctaatggctcatcatctatgattaatgctttcatatttattcctcctcttgtctttcataaggaagtacacaccaaaaagtggtaccgctcgatgtcgattcaaattgtaatgctgcggattttccaaataatccttttaggcgtaagtttaaattttctaaagcactaccagttccagactctgattctacagatgtttctcccaacaaatgcattttatctttagaaataccctgaccattatcttgtacaataatacgtacatgtgttgcagtttctttaatcactgacacgtc

SEQ ID NO: 4589 - DNA, 189 bp, Staphylococcus aureus
tactaccttgtaatcgatgtgctaatttactagactcatccattaactgttgataagttaattcatcagttgtgtgtctaacagcaatgctttgtggatttgcatccgcaaacgcttgcagcttgttaataatatctgtcatattaagtctccctcattagaactcattataaatgaagttattgtgtg

SEQ ID NO: 4590 - DNA, 542 bp, Staphylococcus aureus
gatagaagaatgttaataacaatgttctaatatgcgctccatccacatcggcatcagtcataatgacgattttgtgatatcttgctttcgctagatcaaagtcgccaccgattcctgtaccaaatgctgtgatcatttgacgaatttcattgttattcaaaattctatctaatcgtgctttttcaacatttaatatcttacctcgtaatggtaaaatcgcctgcgttctagagtcacgaccagattttgtagaccccccggcagagtccccttcgactaagaaaatctcacattcttcaggacttttactagagcaatcggctaatttacctggaaggcttgctacatctaacgctgatttacgacgtgttacttcacgcgcttttttcgcagcaacacgtgcacgtgccgccataatacctttttcaaccactgtacgtgcgacttgtggattttcatataaaaatcgttcaaagtgctctgagaataatttatctacaacttgacgcacttcagaattacctaattttgtcttcgtttga

SEQ ID NO: 4591 - DNA, 298 bp, Staphylococcus aureus; identical to SEQ ID NO: 4587

SEQ ID NO: 4592 - DNA, 310 bp, Staphylococcus aureus; identical to SEQ ID NO: 4586

SEQ ID NO: 4593 - DNA, 87 bp, Staphylococcus aureus
tatgcagataaaactttacggcctttacgacgacggcgcgctaaaactttacggccattttttgtgctcatgcgttttctgaaacca

SEQ ID NO: 4594 - DNA, 132 bp, Staphylococcus aureus
cttagtttcttaaacgcttgttgtaagattgttaattcatcctttgttaacacatcaaacgcttttgttaatgtctcagcatgcttagggaaaatatctgccatttgactttgacctttttcagttaaacaa

SEQ ID NO: 4595 - DNA, 100 bp, Staphylococcus aureus
ccttgcctaatattttatgcgcaagattgatacctgcaactaagccgctagctgcgctttctacataaccttcaacaccagtcatttgtcccgcaaactg

SEQ ID NO: 4596 - DNA, 309 bp, Staphylococcus aureus
taccttttcagcttccatatgaccaccacgagtcttagcaccttgtgccaacttcagctcaaatgcgcgtacgttagataactgtgcaacctctttaaataaaccttcactaaaattaccttctttatcacgaacaccaaataaaccgggaccaatttggaaaatgatatccccattaccttttaaatgatattctgataagccaccttcacctgtattcatccaagtgcccgctttagctagacctttagataaagctgtaatggcattttttcctaaagcgccataactcataccagattgtcctac

SEQ ID NO: 4597 - DNA, 371 bp, Staphylococcus aureus
gtgcatcgattttaacaataacgtcaccaactacagctactgtaccttcttctaccataacttcttctacagtaccagatgctggtgatgggatttctactactgatttatcgttttgtacctcagctaaaacatcgtcttcttcaatagtatctccagctttaacaaaccattttacaatttcaccttcgtggataccttccccgatatcgggtaatctaaattcaaatgccacgtttttgccctcctaagatttcgtaaattaaacatttcattttaatcaatgagactaaaatacgctaacttcgttaacttttaaaatgtattaaaattctaaagtttcttttgctttttcgatgatgtcatttttg

SEQ ID NO: 4598 - DNA, 205 bp, Staphylococcus aureus
aatacttctgaaattctcgcgtagtttctacgtttacgatgtcttccatattggacaacttgacctgccaaacagattcacccctcaaaaattatgtgatccgcttttagctaaataccataagcatattaataaaaagacaaaaagaaaacggcaacactaatgatgacaccattttcgattctatatttattcttaattaact

SEQ ID NO: 4599 - DNA, 282 bp, Staphylococcus aureus
tcctcaaattttactgccactttcatcatttcaagttgtttcttcatttcttttacgataggtagtcgctcttgatttttaactcttgaaaatgcaaatgactctaacatcagtcgcaaatcatacatttctttcttttcttgttccccaaacggcaacacatgtgcacccattctttctaattggatgagttgattttgttgcaataatttaaatgcatctcgaattggcgaacgactcacattaaattgctttgccatttgattttcagtgagtaacgta

SEQ ID NO: 4600 - DNA, 152 bp, Staphylococcus aureus
taaccaggttctgcttttttagttaaatcaatcattgctgctaatgaaccaggttccgtatcagtcatataacccgcattaccttccatattcacttccatcatggcattacatggacataccgtcgcacattgaccacaagatacacatga

SEQ ID NO: 4601 - DNA, 162 bp, Staphylococcus aureus
acttcaacagattgtaatacttcatagtattaatttctctcgtatatttatctttaaacagttgatgtgcgcgctcacccatctcgtgcaattccttactcgagtgagtgttgatgaagttataaatggcatgtgcatcgccattatcaatttggatacccg

SEQ ID NO: 4602 - DNA, 1076 bp, Staphylococcus aureus
atatcttccaaagcgatcacctaaaacatcttcaagtgataaatcttgaattatttcactcactagatttcctcctcatcaaattgatcattttcaagcacttgtacttcagaattatctaaaatactttggtcctcttgcataccaaactcaacatgcttttcaatccattcacgtctaggttgtactttgtcacccattaatgttgttacacgtttagatgaacgcacttcatcttcaacttgtacacgaattaaagttcgtgtttctgggttcatcgtcgtttcccataattgttcagggttcatttcacccaaacctttgtaacgttgtaacgtgaagcctttaccaagttctttttgcaatttattaagctcttcgtctgtccaagcgtattcaactcgctttgttttgcctttaccttttccaatttataaagtggaggtaaagcaataaatacacgacctgcttgaacaagcggtttcatatatttgaagaagaatgttaacaatagcacttgaatatgcgcaccatcagtatcagcatcagtcataataattacacgattataattactatcttcaattttaaagtcagtaccaacgcctgccccgattgtgtggataattgtattaatttcttcatttttaaaaatatcttctagacgtgctttctctgtattaattaccttaccacgtaatggtaatatcgcttggaatttgcggtctcgtccaagttttgctgaacctcccgcagaatcaccttcgactaaatacaattcatttttttcagtgtttttactttgtgcaggtgttaatttaccagatagcaaagtgtctttacgcttgtttttcttacctgaacgagcatcttcacgagctttacgtgcagcttcccttgcttgttgtgctttaatcgcttttttcacaagtgatttagacaattgtcctttttcttctaaatagaatggcaatttgtctgcaacaactgaatcaacagcacttctagcttcagaagtacccaatttagatttcgtttgtccttcaaattgcaataattcttctggaatacgaaca

SEQ ID NO: 4603 - DNA, 204 bp, Staphylococcus aureus
tgtaattgtgctatcgcctcttcgactgtcacacctttaagttgtgttgccgcattggttaaatgtccaccgccaccaagtgcttccattgttaactggacatttactgaaccgagtgaacgcgcagatataccaatcagattatcttcacgtctcgcaacaacatatgatgcttcaataccttctaaacttaacagttcatct

SEQ ID NO: 4604 - DNA, 407 bp, Staphylococcus aureus; identical to SEQ ID NO: 4303

SEQ ID NO: 4605 - DNA, 321 bp, Staphylococcus aureus
gattttcttatgtctgctaacatctgcaatgatcaaatccggttttaatttacttatcacttccatattcggttgcggtctagatccaaccgattcatatgccccaatcttatctcttactgactttgttatatttttagtgctgccatcatctgcaataccaacaggtttcatatctaatgctgctaaataatcagcaaaactatattctaatacaacaacacgtttaggatttttcttaattttttcagttcctaattcatcttttattgtcgtcatttcagttttctcttcagtatctttttgaccacaacccgctac

SEQ ID NO: 4606 - DNA, 467 bp, Staphylococcus aureus
agtcaactaatgaatactcacctttatgtgttgacttaccagcatcttcttccatgtgaagacgagtaataccgattcgttttgtttcaccgtcgacttcgatatcgatatatccattttcaccaattggttgatcaaattgagaaatttgatatgcttttggattatctggatagaaatagttcttacggtcaaacttagattctgttgcgatttccatatttagtgccattgcagcacgcattgcccagtctactgcacgcttattaacaactggtaagacacctggatatgctaagtcgataacatttgtatttgagttaggttctgctccaaaatgcgctggtgatggagaaaacatttttgagtccgtttttaactctacgtgaacttcaagtcctataactgtttcaaaatgcatgatttccactccttataatttttcataaacgtcatgtaaattgtat

SEQ ID NO: 4607 - DNA, 336 bp, Staphylococcus aureus
tgtttacgtccgtcgtatactgcaaaagtatgtccgatgaaattagggaaaattgtagaacgacgtgaccatgttttgattacttgtttcttttcgcttccttcttgagcttcaacttttttcattaaatgctcatcgacgaaaggtccttttttaatactacgagccatttgggcgcctcccttcttattatgtgcgtgcagctttaagccgcacacccaaataagttgattatattattttttcttacgtccacgaacgataagtttgtctgatgattttttaccacgacgagttttcttaccaagcgtaggtttaccccatggtgacattgga

SEQ ID NO: 4608 - DNA, 117 bp, Staphylococcus aureus
cattgtttgaatcgaacttgttaaacttaatgaagctgttggcgaactacctgccgctaatgatacaatcatcgtttctccaattgctcttgaaatcgcgagaacgattgaagctac

SEQ ID NO: 4609 - DNA, 484 bp, Staphylococcus aureus; identical to SEQ ID NO: 4398

SEQ ID NO: 4610 - DNA, 150 bp, Staphylococcus aureus
agtgttactttcgcaccgattggcataccttcacgtaaacggaaagtcgcgattgattttttagctttagttactaatggtttttgaccagtgatcaattctaattcttcaacagcattgtctaatactttagaattttgtactgcgtca

SEQ ID NO: 4611 - DNA, 200 bp, Staphylococcus aureus
tattgtgttactttgcaaataacgtgccgtgcgatgaatgctattatcgatgtcagacataatttgcgccatatgttgttgcactgccgtttgattatctgcactttgagccatatgttgcaaaatacgcgcaattgcttctttataagttgttatttttttactttttccatcgataagccatacctctggatgataca

SEQ ID NO: 4612 - DNA, 166 bp, Staphylococcus aureus
catttcacccaaacctttgtaacgttgtaacgtgaagcctttaccaagttctttttgcaatttattaagctcttcgtctgtccaagcgtattcaactcgctttgttttgcctttacctttttccaatttataaagtggaggtaaagcaataaatacacgacctgct

SEQ ID NO: 4613 - DNA, 245 bp, Staphylococcus aureus
taagtttgttgagttcacgctttaaatctttatttagttgatggggtactctgagctagacaatatttgtatgtggcaaacattatcgttgcactcatttgctttatataaaagtagttagtgtatttatataaattcttatactaattcgataattactgattcagcaccgtcaccgcgacgagggccttgtttaaggatacgagtgtaaccaccttgacgttctgtgtaacgctctgcgattt

SEQ ID NO: 4614 - DNA, 218 bp, Staphylococcus aureus
gtatcatttacaactgcatcaatccaagcttttgcttcttcttcagcttcatccacttcattaccttcataaaagtcgacgcctttgttttccaattcaacgtgtttggtataaagtgtacccatgtcttcaccatgaatacgtagaccatctttcatatcagcacctgctttagttcctgataatgaacattttgcctcatccacttctaaagaatt

SEQ ID NO: 4615 - DNA, 136 bp, Staphylococcus aureus
atgaattgcaatgttgatacggtttgcagcacgttcaatctctacgtgagaaactgatgcttcttttaattcattatcaataaatttacggatttttaaatcttcgtgtaaaagtgaagcgaagtctttttcagca

SEQ ID NO: 4616 - DNA, 126 bp, Staphylococcus aureus
ggtgtgtttgatcctaatgatttacttaagatatcagtgatacctgctaattcaagtacggcacgaacaggaccaccagcgataactcctgtaccaggtgcagccggtttcataaatacgcttcct

SEQ ID NO: 4617 - DNA, 329 bp, Staphylococcus aureus
ttcactcggaagatagttaatcgctacatctgcaccttctttagcatacgcaattgctgctgcacgccctattgctgagtcaccacctgtgactaatattttatagccttgtaagcgttgatgaccttggtaagacgtttcgccacaatcgggtgctggcgtcatttcagattgtaaacccggtacctcttgttcttgtttttcataatccgttgttttaaattttgttctaggatcttgagctgccatttttttacatctccttattcgcttaatggttattatttacccaatcttcctaggaacttaatcatgattacactaaaaat

SEQ ID NO: 4618 - DNA, 465 bp, Staphylococcus aureus
attttttcactatcattgtgatggtgtggtattgggtcacctagtttaacaccacttaattccgccatatgattagccactttattgactgtaccaggtccaaccacaacttgaatgcgttcatcgtgtataacacccatgacaccatcaatatgccttagttcttggtcatctactttattctcatctaatactttaatacgcacacgtgtcatacagttcatgacactatctatattatccataccacctactgcagcaataattcgttctgcaagttgttgttctttggtcatttaaatccctcctaaggttgtctatctctgattgctcgtttaacaatgtcaccattgtttaataaccgtcttgttgcttcttccttagaaatgccacacatacccataactgtcgcaactttcacatcatgctcagatacctgatataacgccattgcttcatcatatg

SEQ ID NO: 4619 - DNA, 1077 bp, Staphylococcus aureus
atatcttccaaagcgatcacctaaaacatcttcaagtgataaatcttgaattatttcactcactagatttcctcctcatcaaattgatcattttcaagcacttgtacttcagaattatctaaaatactttggtcctcttgcataccaaactcaacatgcttttcaatccattcacgtctaggttgtactttgtcacccattaatgttgttacacgtttagatgaacgcacttcatcttcaacttgtacacgaattaaagttcgtgtttctgggttcatcgtcgtttcccataattgttcagggttcatttcacccaaacctttgtaacgttgtaacgtgaagcctttaccaagttctttttgcaatttattaagctcttcgtctgtccaagcgtattcaactcgctttgttttgcctttacctttttccaatttataaagtggaggtaaagcaataaatacacgacctgcttgaacaagcggtttcatatatttgaagaagaatgttaacaatagcacttgaatatgcgcaccatcagtatcagcatcagtcataataattacacgattataattactatcttcaattttaaagtcagtaccaacgcctgccccgattgtgtggataattgtattaatttcttcatttttaaaaatatcttctagacgtgctttctctgtattaattaccttaccacgtaatggtaatatcgcttggaatttgcggtctcgtccaagttttgctgaacctcccgcagaatcaccttcgactaaatacaattcatttttttcagtgtttttactttgtgcaggtgttaatttaccagatagcaaagtgtctttacgcttgtttttcttacctgaacgagcatcttcacgagctttacgtgcagcttcccttgcttgttgtgctttaatcgcttttttcacaagtgatttagacaattgtcctttttcttctaaatagaatggcaatttgtctgcaacaactgaatcaacagcacttctagcttcagaagtacccaatttagatttcgtttgtccttcaaattgcaataattcttctggaatacgaaca

SEQ ID NO: 4620 - DNA, 316 bp, Staphylococcus aureus
tatgaataaatcaatcattaatctagtcattcagattatatttataattcatcattattatctctgttatctgcttcatcgtttaaatcatgtaatcaaatttaatattcgtaaaattattctacaacgatacccatactacgtgcagtaccttcgataatacgcatagctgcttcttcgtcagcagcgtttaagtcttgcattttgctgttagcaatttcgcgtacttgatctttagttactgtagcaactttagttttgtttggttcgcctgaacctttttcaataccagctgcttttttaagtaatactggag

SEQ ID NO: 4621 - DNA, 280 bp, Staphylococcus aureus
ccgtccacacatagctacccagctatgccgttggcacgacaactggtacaccagaggtatgtccatcccggtcctctcgtactaaggacagctcctctcaaatttcctacgcccacgacggatagggaccgaactgtctcacgacgttctgaacccagctcgcgtaccgctttaatgggcgaacagcccaacccttgggaccgactacagccccaggatgcgatgagccgacatcgaggtgccaaacctccccgtcgatgtgaactcttgggggagataa

SEQ ID NO: 4622 - DNA, 736 bp, Staphylococcus aureus
aatgctttgattttcttatcatcttgatgtccttctttaacagcaattaagtttgcataaggattatctttcgcactttctacagcaatagaatcttttttaggatttagtttttgttcgattgcaaagttcgaattaatgataacagcatcagcgtcttcattttgataaattttaggtaagaattctgctgattgtttattattaaacttaatatcttttttattctctgtaatatcactaaacttagcatcttcaatttttacgccttttttgattttaattaaacctgcatcaacgaagaattttaagaaacgtccttgttcagctggattattagacacatagactgttgcaccttttggtaattcttttaaacttttatactttttagagtatacagccataggttctaagtgaacatcaccggcacttacgattttgtaacctttatcctttttctctgtgtttaaatatggtgtatgttggaaatagtttgcgtcaatttcacctttgtctagtaatttattaggtgtagtgtaatcgttaattgttttaatatctagttcataaccttttttctctaataatggttttgctttttctaaaatttcagcatgtggtgctggtgaagcacctactgttattttcttgtcgtcactgccacttttgtttccattaccgcaagctgctaatacaactgcaaatgttaatactaaaataagaccaaataatt

SEQ ID NO: 4623 - DNA, 384 bp, Staphylococcus aureus
gattcttctccagtaatatatagtacttttttcttttgagataacgatgcacaaatttgtaaaagtaacgttgacttaccaatacctggatccccaccaataagtactaacgatccgctcacaatacctccacctaatacacggttgaattctgctgaatctgttaacactctcggcgttgtttcatgtttaatactatttaatttttgtactttacctgctaattccttggttttaactccatgtttaggattggctgctttttcaacaatttcctccatttgattccaagcgccacaattaggacatttccccatccatttaggagattgataaccacaagccatacattcaaaaatcacttttttcttggccaaaattgca

SEQ ID NO: 4624 - DNA, 217 bp, Staphylococcus aureus
caattttaaatgcttctccgattgaatttgtacctgttgcacatgctgtaactgttgcaccatttggtccttttgcacctaagtcaattgatacttgcccagttgccatatcaggaattaacattggtacgaaaaatggactcacacgtcttgggcctttatccattaattgtttatgtgcaatttcaaatgtttccataccaccgataccagaacc

SEQ ID NO: 4625 - DNA, 903 bp, Staphylococcus aureus
caattggcacctgacaactaccatccatttctgctaaaaacgttcgttcagcagtcacacattttgcaacctcatcattatgtactttgcttaataatgttaatagttcttcatcgtcactacgacattctatccctaaagcaccttgtccgattgcaggtaacaatgtatctctatcaagataagatgttacaatatcatctgaccagcccattcttcttaaaccagctgcagctaaaataatcgcatcataatcttcagtttgtaacttttctaatcgtgtatctatattacctctaatccatttaatctctaaattaggatacttagataatatttgtgcaccacgacgtaatgaactagtaccaataatactgccttctggcaattgggatagtggtgtatgtgttttagaaatatacgcatcaaaaggtaattctctatcagggatacaacctaatgttaaaccttccggaattacacttggtacgtctttaagcgagtgtattgccatatcgatatttttttcaaaaagttcatgttgtatttctttaacaaataagcctttgcctccgactttagacaattgtttatctactatacgatcgcctttcgtgacaatttctttaatttcaatttctagatttggctcgacagcttttaatttatcaataaattgctggctttgtgttaaagctaatttacttcttctggagccaacgactaatttacgcatgttcaattcctcctaggaacggattgctctagattattttctcaattcacaaaatgtgttgcaaaaaataaattaatcatatttaagcaaaataaaataatgttatagtatattaaatatcttgaattcaaccatttgttgattctaagtaaaatataacttccata

SEQ ID NO: 4626 - DNA, 105 bp, Staphylococcus aureus
cattatctttatatcagcttcagtaagtttacccttaccacgcattttttgcatcgtcgcttgcaagcgttctgataacccttcaaatgccatatcgatgtcctc

SEQ ID NO: 4627 - DNA, 403 bp, Staphylococcus aureus
tacattgatattaaaatgacatctctcactgcattcgtttaaccttttataaattttcaaaattaacaactaatcgttcgtccatgttcgcgattcaacgctaatgcatgatagtaatcatccatcaaatcatatcaaccaaattccattatcaatcgctattgattgtcattcaactttctaatagtgatatgcttctcaggcttaaaaatcgtcatatcttttctattaattaaatcatctgtgagctttaatgctactaattcattgctgccataatacttaatatataacgttcttgtagttaaatttattacggtctgatacatcgtatagtgattgtcagcatcatgcggacgtacaattccaatcggtatatttaccgcatctaataaataaaatg

SEQ ID NO: 4628 - DNA, 620 bp, Staphylococcus aureus
tctttattatccaacattttcacttcctcattcatcttctaaagcttgccttacatccgcttcggtataaccaaatgcatttaactttttcaataactgcttaccattggaatggccgattcgcaattttctacttaaaatttctctacggcgccttgcatctttcccaacaattaaccccaactctattagcacagatttatcaattgattcataagcttcatcaaagggtgaactaacatgcattaacgcttctttaatatcaattaagtcggcatgttcaacaccaattttcccttttttatttttagctttttctctatcaatatacgcatgtttaacacctttgacatgttcagtaattgtacttctaattttatctcctgggaaatctggatctgttaatacaataacgcctcgactttgttgagcatttctaattacttctaaagtttgttcgttgatggcactaccattcgtttcaatcgtatcacattcaacagctcgtttaacacgctcagtatcatctcgtccttctacaactataaactcattgattttcatttaaaacgccttcctacaattcttaatttcaaagctctaaccatctctatcgcacg

SEQ ID NO: 4629 - DNA, 365 bp, Staphylococcus aureus
tgcacgtgccgccataatacctttttcaaccactgtacgtgcgacttgtggattttcatataaaaatcgttcaaagtgctctgagaataatttatctacaacttgacgcacttcagaattacctaattttgtcttcgtttgaccttcgaattgaggatcaccatgtttgatagatataattgctgtcataccttcacgtgtatcttcaccagaaagtctatctttttcttctttcataatcttgctacttaaaccataactatttaagacacgcgttaatgcacgtttgaatccgtcttcatgcgtaccaccttcatacgtatgaatgttatttgcgtaagttaaaagatttgtggcatatcctg

SEQ ID NO: 4630 - DNA, 336 bp, Staphylococcus aureus; identical to SEQ ID NO: 4607

SEQ ID NO: 4631 - DNA, 536 bp, Staphylococcus aureus
tatttacagcattgttaataccaacacctgttccacaaatacaaacacctaagtctgcattaccgctaacaacttgttcgccaacttttttaccaaaaattggataatgtgttcttgtgaaatcgtatgttcctacgtcaatgacttcatgtccttttgattttaaaaattcagatacacgcatttttgtatctgtaacaatatggtcgcatcctaatgcaatcttcatagtaatttttcctccttagcacattttattaagcatatctacgcggatttggtgtctaccaccatcgtatttaccttcaacaaaacctttaacgacatttttcgctaatgtgtctccaacaatttcagatcccatagtgatcattcttgaattgttatggcctctagtcatatatccagagcgttcatctgatacttcagcagcaatcatgcctttgatttttgtagcaaccataaagctacctgcaccaaatgcatcgataacaatacctaagttaccttcttgactttgaacatcttttgctaca

SEQ ID NO: 4632 - DNA, 373 bp, Staphylococcus aureus
atagtcatacgtggttggatgtagtcttttgataaaccttctttaaatcctttatgtttaaaaccaagcgctttcaaattttgcaaagcatctgtacctttatcaacttcaacatcaggatcgattttaattgcatacgctttctcagctttagcaatttcttttgcactgtctaacaatgcatttaacgcttctttattactataatcaacaacaaaaccacgcgaaatataacatagcgtataaggtaatttaggtacttttttaaaaagtaactgcgcaacaccctgaacttcaccgtcacgacctacagcgattcttcgcgcgtaccatccagttaatttctttgtttctgcccatttcgttaattgta

SEQ ID NO: 4633 - DNA, 351 bp, Staphylococcus aureus
tgtttttggtggaataatatctttacctgttgttacatcaacgtatctcacttgtgtaacagcagactctgtatattcgaatgttccaaattgtacttgttgtaaatttgtcgcgccacctgttgaggctgtcattgataatgaaaagttggtcgtaccacttttcgcaatccaatctgaaatattacgtgtccatgtttgacctgcatatttgacagtcataacctttgtatcaccattatagttaatatcaaaatcttggaacgtgttatttgtaggttgaacatttaacttcgcagcattatcagctgttgaacttgatgtatacgttgtcgcaacaccataactatc

SEQ ID NO: 4634 - DNA, 936 bp, Staphylococcus aureus
ctttttttaaaatttaaggctgctacgtttagttcaaatgattatgaatgacatttcatggtatcatccagcctcagtacttggagataacattttggcggtgagacagaaatcatatttttacaaaatttatttcgtcgtcccaccccaataaagaaaaagtatttctttattgttgtgtaacttctccacgttgtatttcactatccaaattttgtttcatattttcaaacaactcttgaaatctaacctcatcttgatcagaataacctttaaaaataactgaatctatattttcctcgttaaaataataaatttcatcttctacaacaccaatcggatatttacatgcagaatagtcaaacatatacttttgattttcaatttctacaattggtcctctattaataatcattaacttttgcgaaccttcttttaaataaataatgcttcctattgtttccatttattttcctcctttgtcaccgtctcaatttcaacattccttcgcatttccaagtcaatcatctcttcttccactttacgaatgccatgttgaatttgctgttgctgctcgtataacgcttccgttgaacgtcgtttcgcaaaatgaaattcatcgcggaactgttccatacgactagccatattgctactataataacgctcacctaaatgttgatataattgatctatcgaatgattaagcgcatcactttcatctatcaatgctttaacctctcgcttttcatcatataagtcatccatttgctcatgtttcgctgtgattattttattgatttcatccagtttattcgacatcatttcaccacgttttaatttttaccaatttcattaccaatcattacgtcagtttggtcaaaagcctcaccaactttttgtatattatcgctcgcagttcgtattgcttcagca

SEQ ID NO: 4635 - DNA, 218 bp, Staphylococcus aureus; identical to SEQ ID NO: 4614

SEQ ID NO: 4636 - DNA, 898 bp, Staphylococcus aureus
cactgcctttaattcgttcaacttcaatctctaagccatcatcaagaataagtactaatttaccaccgtattggttacctagacgtggttctagtcttggctctttagactttttagttggaaatccaaataatatcgaatggatgaatgcttgaatcgtcgatttacccgcttcattttcaccaaaaatttcagtgaagtttttattaaattcaattttacgttgaacaaattgaccgtaaccataaatttcaagtgatttaattatcattttgttcacctctcatttcagcttttaatatttcttcagcacgattaactaatgctgtatggtcgaatgttccataatcgtctaggaacttagatgcccttggatttaaatataaatctgacatcgctttatcaaaaacagtttgatcgactaataattccgctgaaaattcattaactaaaggtgactcatcattttgtgcatattgtatttttaactcatcaatatatacaaattgattttcgttttcttcataatctgtaatcatttcttcaacttgtaataaatcttgaggtgaaattaatgtctcactattaataacaagcgttaaacgataaaaggcttttccttcttctctcacttgttctttaaagttttgaatgacctcgtataaaccttgcttagatgtcttatccgtttcaatagttgcttcttcaaatctaatatactgtgtaggataaaatttagtctttaattttaagtggtcaccctcgattaataagcaacctttttcaccttgctcattaaaatgtctaccttgaatattacctgaatagttaattacaggcatatcacttaattgttgacgttcatgtatatgacctaaagcccaataatgatacaatt

SEQ ID NO: 4637 - DNA, 160 bp, Staphylococcus aureus
catatttgctaaaaatttatctattctcatcgtaaaaacctaactctacgtcttaatttttcaggaatttcacctaagaattcgtccgcaagacgcgttttaattgtgattgtaccgtaaattagaatacctactgtaacacctaaaataataatgatta

SEQ ID NO: 4638 - DNA, 834 bp, Staphylococcus aureus
catttttctgatgcattaaatcttcagaatcactaaacattgcgccaaatgctacacccttgtctaagtttctcgcataagtaccgccacctatagtataaggttcagtcatatcatttgtttgatttctatatgcagtaactaacttttgtacaaaaggatcatttttatcaacataatgtggtggttggactttacctaatttcacttcaaagccatattgttgaatctcatttgcaaaacgatccatagctttttcaaattcaaatccttctgggtagcgtaagttgataccgaaaagacctgcgttttcattatcatatgtaataacaccaatgttagttgtcacgtcacccatgacatctgtatggaatttcattcccatcttttcaccaaaatctgaattaaataagtagcgattactaaatgctacaaacgcttgtgcattattatcaagatttaatgatgctaagaattttagtaagtaaagacccgcattcacaccgatagatggatccataccatgaaccgctttaccttcaactgttaaaactagaatgccactatcaacagtactatcaccttgtaaatgattttgttctaaaaagtactcaaagtcttgaataacatctgtcatattttctttaacaagcactcttgcttctgcatgatcaggtaccatgttgtaacgttcaccagatttaaaagttattaattcataatcaggttcatcttgatcttcagtaagtttattttgaactaaatcaaatgttgtaatgcctttttcaccatgaatacatggaaattctgcatctggtgcaaaacctaatgttg

SEQ ID NO: 4639 - DNA, 774 bp, Staphylococcus aureus
cacttgttgatgttgatgtacttgctgatcctgatgcacttgtacttcttgatgtgctttgtgaatcgcttaatgatgttgatgttgaatcggattcacttgtactttctgatgttgagccagactctgatgtacttaccgatgtagataaacttgcaatggtcgacatgcggtttgaagttgatgtacttagcgaatcacttaatgatgctgatgtgctttgtgaatcggattcactgctttgcattgacgcagatgttgaatcacttaaagatgttgacgacaaatcggattcacttgcgcttgctgagttactgagcgatgttgacgtacttgctgatcctgagttacttgtacttgttgagtcactgagtgatgttgacgcactttctgatgttgactcacttgcacttgttgagatactttgtgaatcagattcactctctgaaccacttaatgacgctgatgtgcttaccgaacctgattgactcgtacttttagatatacttgttgaatcgcttagtgacgttgatgtcgatgtggattcactttggcttgttgactgacttgtatatgatgatgtgctttgtgaatcggattcgctcgtgcttgtacttgttgagtttgaggcactttggcttgctgagtttgagtctactccgctttgattcattgaggcacttagtgacaatgatgtactcgttgagtcagacaaacttgtactcgttgacgtacttgtacttcctgatgttgattgagacatacttatgctca

SEQ ID NO: 4640 - DNA, 203 bp, Staphylococcus aureus
tattcttgttaactcttctgcattgtcgaaaatttcagtcgctgtgccttctttatagacagtccctttattcataacgataacatgatctgcttccatcgcctcagataaatcatgcgtaatagaaatgattgtaatattatgttctgatttaacttttctcactaaatccaataaattttgacgtgcatcaggatctaaca

SEQ ID NO: 4641 - DNA, 936 bp, Staphylococcus aureus; identical to SEQ ID NO: 4634

SEQ ID NO: 4642 - DNA, 152 bp, Staphylococcus aureus
tccaggttttacattacttacttttacagctttataagttgtcacacctgcgcatgtaatagaagacgctgctgctggatctaatttttcaggtactttcacagcatagtctgcagtaacaataacttgttcagccattgcaccatctactg

SEQ ID NO: 4643 - DNA, 275 bp, Staphylococcus aureus; identical to SEQ ID NO: 4434

SEQ ID NO: 4644 - DNA, 335 bp, Staphylococcus aureus
gcataaatctcatttctttatattaatcttggcaagactcacatacaccataaacttcaagtttgtgtttgtgaatattaacaccaggtagtgataattttatctgatctattggacaataatctattacctttgtatctccacacttttcacagataaaatgatgatgatgatggtttgtacaagcgattctaaacttcatttcaccatcaagttctgtattttcaataattcctaaatctttaaataagtgcaggtttctatatattgtgtcgaatgaaattccaggataattttcatccataacttgttgtatatactttgcgtttatatac

SEQ ID NO: 4645 - DNA, 533 bp, Staphylococcus aureus
gctttagtcatactatattctccactcacattatatgcaacaactggaacattcgtatgatttttaacatctcgaactatatctaaataacttagagcaggtttaacaatcatcatgtcgcacccttctttaagatcactttctaattcacgaagtgcttccaaacggttagcagggtccatctgatacgtttttctatccccaaatgatggcgctgaatctgctgcatctctaaaaggtccaaagaaacttgatgcatacttgacaccataactcattataggaatattgtaatagccggcttcatctaatccacgacgaatttcagcaacaaaaccatccatcatattacttggcgcaataatatcagcaccagcttccacttgagaaattgctgttttaacaagtagtggcaatgatttatcattgtcaacgtcatgtgtatggtcatcaatcacgccacaatgaccatgatcagtatattcacataaacaagtgtctgcaacaattaataagtcatcatacattttttt

SEQ ID NO: 4646 - DNA, 322 bp, Staphylococcus aureus
cactcatcgaaccagatgtactcgcacttgttgagtctgatgttgaatcactaacactatcagataatgacgttgaatcactcatacttgttgatgtacttgtcgaaagcgacatactttgtgaatcactagtacttgtacgcatcgaagtactagttgaagctgatgtactacgagagtcacttgttgatgttgatgtacttgctgatcctgatgcacttgtacttcttgatgtgctttgtgaatcgcttaatgatgttgatgttgaatcggattcacttgtactttctgatgttgagccagactctgatgtacttaccga

SEQ ID NO: 4647 - DNA, 353 bp, Staphylococcus aureus; identical to SEQ ID NO: 4389

SEQ ID NO: 4648 - DNA, 266 bp, Staphylococcus aureus; identical to SEQ ID NO: 4229

SEQ ID NO: 4649 - DNA, 186 bp, Staphylococcus aureus
ctcacgtttcttaacggcaccacctgtattatttgctgcatctaaaatttcgttagctaaacgatcttccatcgttttttcaccacgaagacgtgcatagttaactaaccaacgtaaacctaaagtagtacgacgctctggacgaacttctactggtacttgatagttagaaccacctacgcgacg

SEQ ID NO: 4650 - DNA, 336 bp, Staphylococcus aureus; identical to SEQ ID NO: 4607

SEQ ID NO: 4651 - DNA, 393 bp, Staphylococcus aureus
ttgcaattgacttttaccttcaagtttagcactacgaccttctacattgatattagcattcatacgtttgaactctgcaacatgcataaaacggttttcaaaaacagtttcggttacgactttatgaccatttgccgttaataacaatgccatcatttgtgattgcatatcagtcgggaatccaggatgtggtagagttttgatgtctacaggttgtaattccccttcagcacgtacacgaataccatcttcttgatagtccaattcaacgcccatttcttctagtttatagactaaactcgccatatgttctttgattgcaccacgtacaaaaatatcaccacgcgttatagcaccagcgattagtaatgtgcctgcttcaattctatctgg

SEQ ID NO: 4652 - DNA, 303 bp, Staphylococcus aureus
gctaaagattgacgtaatcctttattactcgccacgccaccagcaacaattaatcgctgaacaccatattctttacaagcttgaatagctttaaacgtgagcacctctacaacactgttttgaaagctcgttgctacgttagcttcaatgattggaatatttttttgtcgttgattgtgaagttgattgattacggcacttttcaacccactaaaactaaaatcataactatctttatccaaccaaacacgagggaatgaataagtatcttcaccttcagcagccaaccgatcaacttgtgga

SEQ ID NO: 4653 - DNA, 150 bp, Staphylococcus aureus
catcaaaggcactgcttgacgttgcatgttcgcacccatcaatgcacggtttgagtcatcattttctaagaatggaatacatgctgtcgctgctgaaacaacttgcttcggcgatacatccatataatccattttttctttagccataac

SEQ ID NO: 4654 - DNA, 166 bp, Staphylococcus aureus
cctgtcgcaacaccacgtccaacacgattgcgttctttacgtgaaccttctgccggttttaactcatgtaatttcatttcggcacctccttgattatttttcttctactgttactaagtgcttaactttgttgatttgcccacgaatagcagggttatcttcaaca

SEQ ID NO: 4655 - DNA, 203 bp, Staphylococcus aureus
tctgttttacctacaattggttcaacttcatctttccatcttttagtatcacggtttaataccttctaaagatgttttttcaaaattaatgtgaccatatgaatgactcgcaaatgaccatccatcccgtttcattgcgcgaacaactttcctcagctgcctttttattctttgtataatctttactcgttaattcattcgtg

SEQ ID NO: 4656 - DNA, 201 bp, Staphylococcus aureus
tctgttttacctacaattggttcaacttcatctttccatcttttagtatcacgtttaataccttctaaagatgttttttcaaaattaatgtgaccatatgaatgactcgcaaatgaccatccatcccgtttcattgcgcgaacaacttcctcagctgcctttttattctttgtataatctttactcgttaattcattcgtg

SEQ ID NO: 4657 - DNA, 213 bp, Staphylococcus aureus
tcaacttggccagttttaattttaggattaactgtttcagggtcacgcttcgtaactgtaccttgaacttctacaacatattcagaacgtactgtttcagcaattttcaatgcctcttctgaaaatgcaggattaaacacgacttgtacaattccttctctatctcttaaatcaacgaaaatcaatccaccaaggtcacgacgattgttaacc

SEQ ID NO: 4658 - DNA, 224 bp, Staphylococcus aureus
catgaactttcataactttcaggaaccactaactctgtgtcaaatatatctgacatcatttgacgccatacttcacttttcgcaaaaccacctgttgcttttatcatcttaggtgtttcattcattacttcaataagcgcaagatagacggtatacaaattgtaaagaacaccttctaatgcagcgcgaatcatatgttcttttttatgagataaagttaaacc

SEQ ID NO: 4659 - DNA, 191 bp, Staphylococcus aureus
gtagcgttctgatcattattgataacatttgtttgcgttgcttgtaattgatcaatttcatctttagccgcttgtttcttcacaacttttggtgttaccgcattaatcgctgcttctgcatttgctttagcttcatcaacttgtgcgttagtagttgctgctgaaatggcttgatttgctttaccattttc

SEQ ID NO: 4660 - DNA, 653 bp, Staphylococcus aureus; identical to SEQ ID NO: 4536

SEQ ID NO: 4661 - DNA, 892 bp, Staphylococcus aureus
ccagctcgcgtaccgctttaatgggcgaacagcccaacccttgggaccgactacagccccaggatgcgatgagccgacatcgaggtgccaaacctccccgtcgatgtgaactcttgggggagataagcctgttatccccggggtagcttttatccgttgagcgatggcccttccatgcggaaccaccggatcactaagtccgtctttcgaccctgctcgacttgtaggtctcgcagtcaagctcccttatgcctttacactctatgaatgatttccaaccattctgagggaacctttgagcgcctccgttaccttttaggaggcgaccgccccagtcaaactgcccgcctgacactgtctcccaccacgataagtggtgcgggttagaaagccaacacagctagggtagtatcccaccagcgcctccacgtaagctagcgctcacgtttcaaaggctcctacctatcctgtacaagctgtgccgaatttcaatatcaggctacagtaaagctccacggggtctttccgtcctgtcgcgggtaacctgcatcttcacaggtactatgatttcaccgagtctctcgttgagacagtgcccaaatcgttacgcctttcgtgcgggtcggaacttacccgacaaggaatttcgctaccttaggaccgttatagttacggccgccgtttactggggcttcgattcgtagcttcgcagaagctaaccactcctcttaaccttccagcaccgggcaggcgtcagcccctatacatcaccttacggtttagcagagacctgtgtttttgataaacagtcgcttgggcctattcactgcggctcttctgggcgttaaccctaaagagcaccccttctcccgaagttacggggtcattttgc

SEQ ID NO: 4662 - DNA, 197 bp, Staphylococcus aureus
taatcttcatccatttcatgcgcttcatcattaccttgcgctttttcaacaagttgcgcttcaaaacgacctttttgatcaataggatcatttaattcagtaaatgcatttgcatgctctctacctacaatgaacaattcgaaacgatcagtaaatctaggatcttcaggatttttcttcgctaaaggtgaaatttc

SEQ ID NO: 4663 - DNA, 552 bp, Staphylococcus aureus
tcacgataggtgattcattgttaaatgggtaggttgcaactaagcttgaaggaatcaatggtgtgacttcttgtggaatcatttggtatatattttttctaaataatgtacctaattgttcacttcgttcagtttgatagtctgcttcgtcttgctcattataaaaatgaataccagcaacttcatcaataattgttgatgcataggacttaaatatgacatctttctccaaaatatcatttaaaatacgtgtcattagtggaccattgtgcgtcgtttgttctgataatgtacgaatctcacctgtaatatgaacgtttgtcgacaatttgatgtgtggcgacatagctgggtatttaggaactaatgttctgaaagataaaccagcataataatccaacgtatgttttgcttcaatgattaattctttatctacttctgcttgataatcagaatgtaatacgtcatctaattgccatggatgaacaatcataatgtgataatcattaaagttaaactttggcgtaaattcattttctaattgtttaatta

SEQ ID NO: 4664 - DNA, 532 bp, Staphylococcus aureus
tgcgcttcatcgttgtttgtatcaacgcttcttatatgaaaatgaccaccattgtcgtcataattgatatctggtctctcagatgtcaatcctataatcgcattaacactaccaaacaatacagctgaagctccagcacaaacgatatcatgaccatattcaccatggtcagcatggccatccataataacgtctgttactttgccttcatcattaactgtaatatcaacagtaatcataataattacgcgttgattttatcgattgttaatttagtgtatggttgacgatggccttttttacgttttgaatttttacgacgtttgtatgtgaatacagtgatttttttaccgcgaccttgtttattaacagtagcagtaactgttgcaccttcaactgttggcgctccaactttaactgaatctccacctacaaataatactttatcaaatgtaaaagtatctccttcgtttacgtctaatttttcaacgaagatttcttgaccttcttctactttgatttgttttccacc

SEQ ID NO: 4665 - DNA, 259 bp, Staphylococcus aureus
tcagcgcatcaccaatgccgtgtaatataacgtttgcttgtttaattttgtctaaagtgtttatgactgatggctctaacaacaatgtattatatgttgtttcactgacattatcaggtacatacatcgtcgtataataaccgccagcttgttgtgccatactggctgcaattgtgtttgcctgaaagacaacattttcgcctagtccacctctggctggtacgaagaatacattatatggtaataaatgaattgcttc

SEQ ID NO: 4666 - DNA, 185 bp, Staphylococcus aureus
ggttgaataaacgtgcgaagaaaccttttttctcttcttgaggttttggttctgacatttctgactgtgaagctgtgctgtcattttctgctttcgcttccaatgaatcgttcgaagtagcttgtttagaagcttctgcatgggcttctgctacttgttgttcagcatcatgttgcgcttctgca

SEQ ID NO: 4667 - DNA, 151 bp, Staphylococcus aureus
caactatacatttcgaaaaattcttctagtgaacctgcgccaccaggagccatgacaaatgcatctgcaagttctgccattttatttttacgttcatgcatagaatcaactaaaattaattcagttaaacgttggcttgtgatttcatgtt

SEQ ID NO: 4668 - DNA, 162 bp, Staphylococcus aureus
taaaatcattcgcagcagtcacttcaataccttgctctttcgcttgttttaaaattgaacaaatacgcgcatgtgcatattgagcatagtaaactggattgtcttgagattgctctttcgctaattccatatcaaaatcaaagtgactatcaggactacgca

SEQ ID NO: 4669 - DNA, 265 bp, Staphylococcus aureus
tctacaagtattttcacattaggtcccgcatccattgtaaaataacacggataccccgcttctcggcattcgtgaacaagcgccatgacatcataactttcttgcacaagatatgtgaacggcggtgttgatcctagattcgtggcatgcatacgcaaaccattttcttcaattacttcaccaaggcgtttaaaatctttgtcttgaatcgctgcttttgcttcagctaaatcttcatcaatatgatctaaccaatattgataaa

SEQ ID NO: 4670 - DNA, 198 bp, Staphylococcus aureus
acgtcctgcgcttaatgcgtagttgcctcctgatccaatagcgataaggtcatcatctggagcaataacttcgccagttccactgacaactaaaatagcatctttatccattacaattagcatagcttctaattgacgtaattgtttatcgcctcgccattcttgtgccaattcaacagcagctctttctaagttacc

SEQ ID NO: 4671 - DNA, 213 bp, Staphylococcus aureus
aaattattgtttgatttgccagttattataaactgtgtgtgttgatgacgaagacaaccctccgacacgcttaatgagctcgggggacccctgtcgaatccatgaacgtccccgaaataataaatcaaacaaatcatacttttgtaatttacaaaagcacatataactatatcaaatatagcccgattaagcaactaaatcgcttaataacgg

SEQ ID NO: 4672 - DNA, 222 bp, Staphylococcus aureus
tgtgacattattttctgctttggcagtttgttgtacttcctcaaccaatgttgttccaatacctgttacagatgttaaaattgttaatgctgctaaactcttgatgactacgtttttgttcattttaagttcctctcttttaattattttgatatctagatacataattcagtatatttagttaattatgtaaccgttttcttaatcactctttaaaaaatc

SEQ ID NO: 4673 - DNA, 280 bp, Staphylococcus aureus
tgcttctttgtcagtaatatgtgaagatgtttcttcatggtcatcatgcattaaactgtcatcatattttcctaatctaggaataatgagcttagttgtaactagcaatatcgtaggaagtaatacaacgacactcgctgcgataaagtaccagttcatagcaacgtttgttttaatagaatctgaaacgatacgtgttgccggttctgtaaatgaatagaccaaagcatcttgcataccaacaactatatttgctgcaaatcctccaacagcggaagca

SEQ ID NO: 4674 - DNA, 201 bp, Staphylococcus aureus
gatactaatggcgttaacaattcatgtacatgaggaatgacataagtgtcgccttctttttcaagaccctccatagaaataatacatggatgtgcaccacgtgctactacctctttaacgttaccacgaattgataaattaactttctcttgtgttgctaaacctacaactggtgtaccttcttcgattaaggcaattgta

SEQ ID NO: 4675 - DNA, 118 bp, Staphylococcus aureus
tgaaattaatttgtctaagaattcatacattctttcaccgcgaagtgttactttcgcaccgattggcataccttcacgtaaacggaaagtcgcgattgattttttagctttagttact

SEQ ID NO: 4676 - DNA, 155 bp, Staphylococcus aureus
ttcttcacaacttttggtgttaccgcattaatcgctgcttctgcatttgctttagcttcatcaacttgtgcgttagtagttgctgctgaaatggcttgatttgctttaccattttcagtatttgcttcagcatcagctgcttgtttttcttcatc

SEQ ID NO: 4677 - DNA, 75 bp, Staphylococcus aureus
tatggtaacgcacacctggtaagtcttttacacgtccaccacgtacaagtacaacactgtgttcttgtaagttat

SEQ ID NO: 4678 - DNA, 231 bp, Staphylococcus aureus
ccaatgccatctattaaaatatttcctgaatttaccttttcatttaatatcatatctttaccgttgtaattaatgacatctcctttttccacaaggaaaatcttttctggtgcaacacctgcttcagctgctagcttcgcatgtgctatctgcattttaaattcaccttgtacaggaataaagtattcaggtttcataatattaatcatcatttttaattcttccatgcaa

SEQ ID NO: 4679 - DNA, 320 bp, Staphylococcus aureus
tgtcaggtatatatgggaaaatcagcgttctagaattatttttaggatctttagaaacagtagtgacacgtttaccttctacaattaaatctttccagtaactgtcatcctttgttttcatcactacatatttttgaccatttaaagttgctgtatagaatggatgttcaacaaagccgtccataactgactcactattttcttcactttcaaaaacaacaaaatgcgcttcttgtaaatctgttaattgatcatttgtaggtgtaacattttcaaattccgtcactgctgatttaacttgatcagctaactctactcta

SEQ ID NO: 4680 - DNA, 508 bp, Staphylococcus aureus
cctccctatattatggagtgacgattatttataacgataagtaattcttccgcgtgttaaatcgtacggagacatctcaacagttactttgtcgccaggtagaatacgaatgtaattcattctgattttaccacttacgtgagctaaaatctcatgaccattttctaattctactttaaacattgcgttcggtaaagtatctaatacagtaccttctaattcaattacatcttgtttagccattgattaacttccccctttttgcaatagtaaggtaatcgtcaatagacaactttattgttacgaatctatcagtgattaattttataagttaaacaaaaattacgggaattaattatcgttaattgccactctcatctatctaatatgattaaatcatgcctcacttaaaatagaccgctaaaagttgatctattacaaatgatctaaaatatcaatgacatctttggtaacgtcgctaatatcttttgaaccatcaatatttttc

SEQ ID NO: 4681 - DNA, 80 bp, Staphylococcus aureus
caaatcaggtaaaccaggatgtgcacctactgcaacattatgtgctttggcaagttttaccgtttcattcattacatttt

SEQ ID NO: 4682 - DNA, 309 bp, Staphylococcus aureus
aacgccacctggtgttgcatttttaacagtacatacgataacatcgccgatgtttgctgttttacgaccagatccacctaatactttgattgtaagaacttcacgagcaccagagttgtctgctactttcaagcgtgtttcttgttggatcattagttaaacctcccttatctctaaacttgtattaaataattactgactcttcaacaatctctactaaacgaaaacgttttgttgctgataaaggacgagtttcttgaattttaacaatgtctcctaatttagctgaattgttttcatcatgagttt

SEQ ID NO: 4683 - DNA, 140 bp, Staphylococcus aureus
tacattaacagcagctagcttttgttgaccattctcagatgtagtaaaaccagcaacctcatgcccctcttcttttagtctttgaactaatttaatgccaataaggcccgttgcaccagttacaaaaattttactcatta

SEQ ID NO: 4684 - DNA, 572 bp, Staphylococcus aureus
catcacataagaaagctaatgttacacgatctgcaccaagtgatggctcgatacaatatggaatatatttttcgttcgtttctggatcatggtatctgaaatcttcaccagagtgttcagcatgtttacgtaagtcgaagtctgtacgacttgcgataccccataactcaccccaaccaaatgggaatttatattcaatatcagttgttgcatttgagtaatgagataattcatcttcatcatgatcacgtaaacgcatattttcactgctcatatttaagcttgttaaccagtcacttgcaaaagttttccaataattttgccattcgatttcttctccaggtttacagaagaattcaagttccatttgttcaaattctcttgttctgaaaatgaagttacctggagtgatttcattacggaatgatttaccaatttgaccgataccaaatggtaattttttacgcattgaacgttgcacgtttttatagtttacaaaaataccttgtgctgtttcaggacgtaagaaaatttcatttgtagaatcttcagttacaccttggaatgtttta

SEQ ID NO: 4685 - DNA, 360 bp, Staphylococcus aureus
cgctcgcgttcttgatggtgttgcaatatctttattatccaacattttcacttcctcattcatcttctaaagcttgccttacatccgcttcggtataaccaaatgcatttaactttttcaataactgcttaccattggaatggccgattcgcaattttctacttaaaatttctctacggcgccttgcatctttcccaacaattaaccccaactctattagcacagatttatcaattgattcataagcttcatcaaagggtgaactaacatgcattaacgcttctttaatatcaattaagtcggcatgttcaacaccaattttcccttttttatttttagctttttctctatcaatatacg

SEQ ID NO: 4686 - DNA, 104 bp, Staphylococcus aureus
cccatactacgtgcagtaccttcgataatacgcatagctgcttcttcgtcagcagcgtttaagtcttgcattttgctgttagcaatttcgcgtacttgatcttt

SEQ ID NO: 4687 - DNA, 267 bp, Staphylococcus aureus
tcactttcacgtacatatacaaacccacgagattgaatttcaggtcccgcagctatacgtctatttttaggatctaacgttacaacagcaataaagataccatcttctgctaaaagatgacggtctctcaacacgatatttcctacatccccaataccaatgccatctattaaaatatttcctgaatttaccttttcatttaatatcatatctttaccgttgtaattaatgacatctcctttttccacaaggaaaatcttttctggt

SEQ ID NO: 4688 - DNA, 166 bp, Staphylococcus aureus
tgatgttgaatcactaacactatcagataatgacgttgaatcactcatacttgttgatgtacttgtcgaaagcgacatactttgtgaatcactagtacttgtacgcatcgaagtactagttgaagctgatgtactacgagagtcacttgttgatgttgatgtactt

SEQ ID NO: 4689 - DNA, 265 bp, Staphylococcus aureus; identical to SEQ ID NO: 4669

SEQ ID NO: 4690 - DNA, 126 bp, Staphylococcus aureus; identical to SEQ ID NO: 4556

SEQ ID NO: 4691 - DNA, 382 bp, Staphylococcus aureus
cctctaggtattttaatcattttgacatctccctcggcaaactattttatttaattacctttttaaaactaaaactatatacgaccacttaactttgcacgataaatcataatcttaaaagcaaaagaaaaagcccttgcacagcctgaaactgcacaagggacgaatatccgtgttgccaccctcattggtttaaaaaacatgcctaattgtaatcatcattactttttataagcgtgcatttaataaacccactcaaaacgtttaacgtacgtttaacggctttacttttcataaagcacctcttcttgtgttcaatgtatataaactactcagcataatctttcagtctatggattatattcctacacaatcttagtta

SEQ ID NO: 4692 - DNA, 662 bp, Staphylococcus aureus
tgcatactttcaacatgaatacgctgaacaccttcacttactgcatatcttagttcctcgtctgtcttaccagggccaccaaaaataatatgatttgctggtttaaaagcaagaccttttgctatttcaccttgagatgcaacttcgaatccttcaacatactgactaattgtatctaggatttttcgttcactatttgctttcattgcatagtacatttgacaattactcggcaatgacgatgtaatatgttgcaaatgatgttccagtccgactaaatcatagatataatgacaaactggatgagattgtgcttttaattgttcaataacaggttgaactatacgcattagccttcatcccctttctgtttagacgtcgctagagatgcacttaaatggcgatatatttttccgcgatcatcacctaaaataaatgtttgtacaccttgtgcctgccattttgcaatatcttcatcttcacgtggtaatgcacaaaaatgtttaccatgtgcattcacaacttcaaaaatatgttgaacatgtgatgttacttgatcatcacgcgtttgccatggtatgccaagtgactgcgataaatctgcggcaccttcgactatcatgtctaaaccttcgacttgtgctatatcgtcaatggccata

SEQ ID NO: 4693 - DNA, 180 bp, Staphylococcus aureus
tgcatcaatattggcatgatttccagacaataaaacatctggaactgttagacccttaaattcacgcggacgtgtatattgcggaaactctaataacccatctgaaaatgaatcgtcttgatgtgactgttcattacctaaaacacctggaatcagtctaacaatagcatcagtcatggt

SEQ ID NO: 4694 - DNA, 174 bp, Staphylococcus aureus
tgccagctgaaagcaactcttttttgaacttttcattgcagtctgcttttttaagcgtttcacgctcttctttcgtacgatattggtcgtcatcatctgatgaatgagctgtcatacgacttgttactgcttcaatcaaagttgaaccttgaccagaaatagctcgatctcttg

SEQ ID NO: 4695 - DNA, 495 bp, Staphylococcus aureus
gtactgctagagtttgaaatagaatcgcttaatgatgttgatttactagctgaatccgacatgcttgatgatacactttgtgaattcactaaacttgtgcttgttgagcttgatacactattactttcagatgtgcttaatgacttagatgcactcacagaatcagataggcttacacttgtcgatttcgaggtactagctgatgtagataccacaatcgatcctgatgtactcgttgatgcactttgtgagtcagctttacttgttgacacactttgagattgttgtgtacttcctgatgttgatacggaatcactcatgctatttcttgttacttcatatttaaaagttgtcgtcgttttgttaccgctcgcatctgtagaaacgattgatatagtacttgtaccaatgtttgttggtgtaccactaatagtattatttgtactatcaaatgttagtccggatggcaatccagtcactgtattcgtcaccgca

SEQ ID NO: 4696 - DNA, 220 bp, Staphylococcus aureus; identical to SEQ ID NO: 4504

SEQ ID NO: 4697 - DNA, 255 bp, Staphylococcus aureus
atacaagtgattttacaacttgttggcatcgtggacatagatgcgtcaattcatcaacagcaccaagatcctctgaatagttccaacatctttcacatttttcaccatctgcatgttcgatgacaatatcaccatgttcataagctgttgcctgatcgtctaacttatctacaactttaacttgtgacacgataaataattgatgtaatgcatcaaatgaagttaagaattcagatgcattaaatttatcgttac

SEQ ID NO: 4698 - DNA, 661 bp, Staphylococcus aureus
aaaggaaattcttcatttttgtcattttgaaaaacaagttgttctttatctatttgaccttttagctttacttgcaagtaaattttaccagtcatatctgaaatcaattgcgccttttcgtcaactagttgttgttcctcagttacatttttattttcttgattaaaaattagtaactctaacgctttattctcttttatcttttcatcaaaaattgatgtagttaattctgttttatcttttgcttcaggttgattaaatttggctgatggatattttatctcatcagccaacacgctaccaatcattgttgtatatgtaagtatacctaagctaataatagctataatagattttgtagcaatttgtttaacatttctcattattccacattgcctttagatttttttctaacaaacaatgtgattgcgattaataatgctaaggatgcaactggtattgcatatatatatgcaggtgtaccagcatttgtttgtggattttctactttgtctttattcgaactattagattcactttgaccagtagtcgttccatcagatcctttgtcactacctgaagcagaattttatcatctttacctggtgcattagcacctgctacatcagttggtccattaaatttatatgtaatggtggaa

SEQ ID NO: 4699 - DNA, 302 bp, Staphylococcus aureus
caagatgatcccggatccccttgtctaccagaacgaccacgtaattgcctgtctacacggctattttccatatgttcatgaataataacagctaatccacctaatgcttcgacaccttcaccaagtttaatatctgtgcctcgacctgccatactagtcgcaacagtcatggaaccaatttgccctgcttcagctatcatctgcgcttcttttgcaacattttgcgcaatgagtaaattattaggaatatccatttggaataatactttcgaaaagtattcagccgcttcagcagttctcgt

SEQ ID NO: 4700 - DNA, 252 bp, Staphylococcus aureus
agctaagtcctgaacgtgtgcaaatcctgctttacctttaccacgcttagtcattaatcgtccagctatagcgacatgactatccgcttctttttctaccaattcttctttagaatactggtcccactcttctttcaaatcactagataaacctgaacggtcaaatttagaaccaaacgggtctataccaagatcatataattcttgtaatttttgacgtcgaaccaacatttggtcattcatttcttctga

SEQ ID NO: 4701 - DNA, 136 bp, Staphylococcus aureus
tgcttcttcgtcagcagcgtttaagtcttgcattttgctgttagcaatttcgcgtacttgatctttagttactgtagcaactttagttttgtttggttcgcctgaacctttttcaataccagctgcttttttaagt

SEQ ID NO: 4702 - DNA, 102 bp, Staphylococcus aureus
tagtttactgggattgggttcccctcaaacatatgatcaacagccacaacaccttcttttgatccaacatgtgccaattgtaattttcctatacaatcacca

SEQ ID NO: 4703 - DNA, 364 bp, Staphylococcus aureus
taaaatcgtagtacctaccgtagtaaagaacattgcgattttcggcgtcgcatgaagtgcatttaacgtattaccaattccggcaataattgctgcagccggtaaaatggcaactggtaacattaacgaacgccctaaattttggaaaaatttatacattgaatgtcatccttcttaaaataatgtagaaatataaagattactaatgtaactagaataactacttcgatactccgttatagtcacctaggcttactaaccagctatatttctacctcaagttattttataaactttttacaatttcatgcaattcttgttgtaactttgctgttcgtgtttcaatctcttttgtaatataatc

SEQ ID NO: 4704 - DNA, 353 bp, Staphylococcus aureus
ccttgatttgaaaagtattcaactaattgaacgataacttctgtatctgtttctgaaatgaatgatacaccttgtaagtattcaccttttaactcttcatagttttcaataacaccgttatgaactagagtaaaacggccatttgatgattgatgtggatgagagttttcatgattcggtacaccgtgtgttgcccaacgtgtgtgaccgattccaacaggtccatcaaaatcgctactatcagcaactttacgtaattctgcaatacgacctttttctttaaatacagttgtattatcatcatttactactgcgatacctgcagagtcataacctctgtattctaatttttc

SEQ ID NO: 4705 - DNA, 325 bp, Staphylococcus aureus
taaaatatcttgcaatttatcgttatactttttcgtttcttcagaacgtttatcattcgataaatctccgttatttttaatctcatttaatttattaatcaacgctaactttgtaatatcgttatcatctaaataagtggcaatattaatcgcttcatcaagatgtccttgtcctaattccatccaatataataagtagtctttgtttgaatttggtgtcacattattaagtaaattttctttcttatctttttctaaaccttgtttatttgtttggatataacttttggcataaatgtaaagtgcctctttatctaatttttta

SEQ ID NO: 4706 - DNA, 135 bp, Staphylococcus aureus
aaatggacctgatttaatacgaacttgctcgccaacttcgagttcaacatcgatagtcttttctttaagacccatttgttttaagatgaagcgaacttcttctggtaacaatggatttggcttagaccctgcacc

SEQ ID NO: 4707 - DNA, 298 bp, Staphylococcus aureus
aacaacagcgtctaaacgacttgctaataagatcatgaagttttcaccgtgtacaccgaattttttaccagcgatgtcaaatgtgttacggaattgtctttcagtcattccatataagtaacgtaatttttgtttttcacgtaattgtaaaccatattctgataattttttacgttggtttggaccatgttgtcctggtgcgtaaggacgtttttctaattctttaccagtaccgcttaaagagatacctaaacgacgagattttttccagtttgaacctctgaatcgagccataata

SEQ ID NO: 4708 - DNA, 444 bp, Staphylococcus aureus
accatcgatatcacaaataccttcgaccttcggaggattaaatacaagatgatacgttgtaccacatgactcacagattcgacgacctgtaagacggttcattaattcttcttccggaacttcgatattgatgacagcatcaatgtttctgtcaagctcagacataatattatttaatgcctcagcttgctcgattgttcttgggaagccatctaataaaaagcctttttttgcatcgtcttcagaaattctttccttaacgatacctacagtcacttcatcaggaactaattcgccacggtccatataagacttagcttctttacctaattcagtttcttcttttatagcttttctgaacatgtcaccagttgaaatgtggggtattgggaatttcttgacaatttcacttgcttgagttcctttacctgcgccaggtaaacc

SEQ ID NO: 4709 - DNA, 224 bp, Staphylococcus aureus
tcttgtttgcgaataagtgagatgtgaaagctcttgaacgttttaattgacctgaagcagttcttttaacacgtttagctgctccgcggtgagttttcatttttggcataatataagtcctcctgtaatagctttaattatttttcagctgttggcgctaacatgataaacatttgacgcccgtccattttaggtttttgttcaactgttgctatatctttgca

SEQ ID NO: 4710 - DNA, 215 bp, Staphylococcus aureus
ccgcgaagtgttactttcgcaccgattggcataccttcacgtaaacggaaagtcgcgattgattttttagctttagttactaatggtttttgaccagtgatcaattctaattcttcaacagcattgtctaatactttagaattttgtactgcgtcacctacacccatgttcacaacgattttatctatttttggtacttccattactgaactata

SEQ ID NO: 4711 - DNA, 147 bp, Staphylococcus aureus; identical to SEQ ID NO: 4280

SEQ ID NO: 4712 - DNA, 385 bp, Staphylococcus aureus
tttacctattattttttcttgttagctaccgttttaactggtcctttacgagtacgcgcgttgtttttcgttttttgaccacgaactggtaaaccacgacggtgacggataccacggtatgatgaaatttccattaaacgtttgatatttaagttagtttcacgacgtaagtcaccttcgactttataaccgtctacaacttcacggatgcgacctaattcgtcatcagttaaatctttcacacgagtatcagctgatacgttagcttcttcaagaattttttgagcagttgacgtaccgataccgtatatataagttaatgagataactacgcgtttttcacgtggaatatctactcctgcaatacgtgccatattaatttaca

SEQ ID NO: 4713 - DNA, 607 bp, Staphylococcus aureus; identical to SEQ ID NO: 4429

SEQ ID NO: 4714 - DNA, 319 bp, Staphylococcus aureus
aatcttttcaatttcgatttcgataaagttttccattgtccattgacctctacaatcacaaacacgacggacaaaattatttaataaatcattaccatattctgtatgacgtacttctggatggaattgaacaccataaatgcgacgtttcttatcttcgattgctgcatagtctgtgcttgggctatcagcgataacttcaaagccttctggaatttcaataactttatcagaatgactcatccaaacagtttgttctgctggtaagccagcgaataactcatctgacttcgcattaatgattgctttaccgtattca

SEQ ID NO: 4715 - DNA, 116 bp, Staphylococcus aureus
aacgataagcttcaacaaagcgctttagctcttcttcatcttgaatgtcatcaaccatgtgtggtgtcggcacaatcattttaagctcacgataagcgtccataaattctttttta

SEQ ID NO: 4716 - DNA, 276 bp, Staphylococcus aureus
tgcttcctgtaacagaatcctcattttttgtcacttctcttatttctaatgcctcaatactatcaacattaattgcctgaccgagacgttcaaacgctatcttatttgcagctaatctcgcaccattgtatgcataaacatctctaccatgaaaagtatgactttcttccgaatgaggcaatcggcttttcacttcatcaatttcgataacttttttaataccttcgtaatgtttaatatgacttaaagaaccattatcaggtgtaataatgtaat

SEQ ID NO: 4717 - DNA, 238 bp, Staphylococcus aureus
acaaacaatctagctataacggatcccattgaatgtccgattataatgtatggtttatcaacattgcctctcactgtttgcgctacttcaaaggcatcaccgataactcgtttcatatcatcgtaatgccctcttgttgattcatcaatattaataccatgtcctcgatgattatgacgtatcacatcgaagccatgctttgaaagtgcatgtgctaatttatcgtaacgttccatat

SEQ ID NO: 4718 - DNA, 135 bp, Staphylococcus aureus
atactggtttagctgttgcaggacgcttacggtgtttaaatgcttctctatttgcatctgtaaagttatgaatatcaactaatgaacctggtaataacttcgtatcacctgcttcgataattctaactttacgta

SEQ ID NO: 4719 - DNA, 416 bp, Staphylococcus aureus
cgtgcttctgcaattgattgtgtgttcatcaattgatgtcgaagttcgctagcgcctcttatgccacgcacatagattttaaagaatctacgcaagctcttgaattgtcgtatttcatctttttcatatttgttaaacaatgataaatgcaatctcaatagatctaatagttccttgcttgtgtgttcgcgtggttctttttcaaaagcgaatggattgtggaaaatgcctctaccaatcatgacgccatcaatgccatatttttctgccagttcaagtcctgtttttctatcgggaatatcaccgttaattgttaacaatgtatttggtgcaatttcgtcacgtaaatttttaatagcttcgattaattcccaatgtgcatctactttactcatttctttacgtgtacgaagatg

SEQ ID NO: 4720 - DNA, 174 bp, Staphylococcus aureus
tcatctttcacaagtctttcactcatgataacggcatcctcatagttgtaaccgtcccaagtcatgaaaccaactactacgtttctacctaatgccatttctcctaattccatagatggtccatctgctaaaatctcgttatactcaacaacatctccaactgcaacgattgga

SEQ ID NO: 4721 - DNA, 86 bp, Staphylococcus aureus
taccgtcacttacgacgattgtaatgtggcttgtacgtttgttaatcgcacttgcacgaccttgcgcacgtggacggaaacgtttt

SEQ ID NO: 4722 - DNA, 444 bp, Staphylococcus aureus
catcacttacaggtaatgccggtctgacatttgctaagcctcgatataattcccacaaatcttcaaatgaagatggcattaccaatacgtcattgtcatttctctctcgatgcatatcattgattaaatattcaagtctcgctttatttgattttaacgtttccatttaagcctccggtaatgctaggaatgcttctttatcgacatcatccaatttgaacaaccaattttcttctggtttttcagagtttaaaattgtcggttcttcttccgcttttgtatttcgctcaataatcgttcctgacaatggcgtttgcacatcaatgaccgttttcgatgcttcgatactcacaatttcatcatccactttaacttcatctggacttacgaattcaacataacctactgtcccaatatcatcttgcaattcaggtgtcatactaa

SEQ ID NO: 4723 - DNA, 254 bp, Staphylococcus aureus
tgtttacgtgccatttaaaatttgcctcctttacctattattttttcttgttagctaccgttttaactggtcctttacgagtacgcgcgttgtttttcgttttttgaccacgaactggtaaaccacgacggtgacggataccacggtatgatgaaatttccattaaacgtttgatatttaagttagtttcacgacgtaagtcaccttcgactttataaccgtctacaacttcacggatgcgacctaattcgtca

SEQ ID NO: 4724 - DNA, 134 bp, Staphylococcus aureus
aaccgtcattacgacgaacacctgacttagtacgtacgattacagctttgacaacgtcaccttttttaacaacgccacctggtgttgcatttttaacagtacatacgataacatcgccgatgtttgctgtttta

SEQ ID NO: 4725 - DNA, 225 bp, Staphylococcus aureus
aaattaacaatttcgtcttgtgttgctaattcaatattatctgtgccgaaataagattttaatttaatgtcattaatttcatgatggccacgcactaaaaccataatatattcgccatcaactttgaaaatcatcgttttaacgatttcatctactggtctacctaagaagtctgccaattcttgcgcagtcttaacatttggtgtttcaattttttctaaaggt

SEQ ID NO: 4726 - DNA, 893 bp, Staphylococcus aureus
tatgaattcacctataaattgctttttcaaaagttcaaatgcttctgcatcttggaaattgccttttttatcacgcaactcatctaataataatttttttaatttatctggttcttcagtagcacttgtcacgattgaaaaactatacgtcggctctagtacaaattgataaccaaatgtatcatcgataagtccttcgtttaataaattctgataaaaatctgtttcttccccaaaaattaactcaaagaataatgacatttctaaatcacgttgtacatatttttgaggcgcttcttgtaatggtttatttttaaaaccaagcattagtcttggtgattgaattttcatagattcagtaacaaatgcttctttaacatcctccggttcatcaacaagtcctcgttcgattttgggttggttaactttattacgagcatcctcgtgttgttttactattcgacatattgcttcaggatccacatcgccaacaacaaataaaaccatatttgatggatgataaaacgtttcataacatagatacaaatcatcttttgtaatatcgtatatactttctacactaccggcaatatcaacacgtattggatgttgttgatacattgcacgcaatgtattaaacattaatttatatccaggttgctcttgatacatttttatttcttctgcaataatacctttttctttatcaacagtttcttttgtaaaataaggcgtttcaaccattgtaagtaaacgtttaatgttgttttcaatattatcagttgcactgaacaagtagcttgtacgatcaaagcttgtaaactgcatttgcttgtgcgttatcttcagcaaacgcagtaaataagtcttcttcttctttttcaaataattta

SEQ ID NO: 4727 - DNA, 75 bp, Staphylococcus aureus; identical to SEQ ID NO: 4386

SEQ ID NO: 4728 - DNA, 229 bp, Staphylococcus aureus
gattggactagctgaaattgcattaacgcgaatattatctggacctaagtctaatgctaaatatttaacatttgcttctaagctcgctttagcaacacccatcacattatagttttgaactgcgaattcgccacctaaatatgttgttgcaacaatgctaccaccttctggcattaattttttagcttcatgagccacaattgttaatgagtaagaactaatgtcttga

SEQ ID NO: 4729 - DNA, 299 bp, Staphylococcus aureus; identical to SEQ ID NO: 4569

SEQ ID NO: 4730 - DNA, 189 bp, Staphylococcus aureus
tgatctagattgtgctcattagtcatatcacgaactgtcacaacaacaccacttttacctccctgttcaatcttgtcgatatagcttgtggtcacaacaaagaatcgtgcattcatttctaaatcgcgcatttcagtttgttttgatttaaaagtatcttctatttgtcttaataagaaagctttagca

SEQ ID NO: 4731 - DNA, 146 bp, Staphylococcus aureus
taataatgccatatgacgagaacgtttgatagctgtagtcaacatacgttgatatttagctgaagtaccagttacacgacgtggtaaaattttaccgcgttctgagataaaacgttttaataattcagtgtctttgtagtcgatat

SEQ ID NO: 4732 - DNA, 256 bp, Staphylococcus aureus
gtggttgcgatacaggtacataatcttgtttttcaacatcgtaaacaagtcgagctttagtttctttatcctttttgtaaaatccttgtttcgttttacgtccgagtgcgccattgtcaaacaacgtatttacaattttgacatcatgaaaataaggtgtttcttcaggtacttgttgcatgcctttaattacagacactgcaatatctaaaccgactaggtcagatagcgcatatgtacctgttttaggacgacc

SEQ ID NO: 4733 - DNA, 244 bp, Staphylococcus aureus
tctacgtgaacttcaagtcctataactgtttcaaaatgcatgatttccactccttataatttttcataaacgtcatgtaaattgtattgtgtttcatattgataagcgacacgatataacgttttttcatcgaatggtttaccaatgaactgtaaaccgattggtcggccatttgattgtccacaaggaacagaaataccaggtaatccagctaagtttactggtgttgttaataaatcattgg

SEQ ID NO: 4734 - DNA, 426 bp, Staphylococcus aureus
ctttttctacagccattataaattgctccttatttaagtatttcagctacacgtaatttcgcgcttcgtgctctgttattgtcatctaaatcttcttctgtagcggtaatcggtttacgattaacacgctttaacttaggtgtatatgcttctggtataactggtaatcctcttggtacctctggacctttttcatattcttggaacacctgtttacataaacgatcttctaaagaatggaaagtgattaccgaaatcctgccatctactttcactaattcaatcgcttgttctattgaatcttcaaaagctgacaattcatcgtttactgcaattcgtagtgcttgaaatactcgttttgcaggatgtccgccttttcttcttgcttttgcaggaataccttcttttataatgtcaactaattct

SEQ ID NO: 4735 - DNA, 294 bp, Staphylococcus aureus; identical to SEQ ID NO: 4364

SEQ ID NO: 4736 - DNA, 278 bp, Staphylococcus aureus
tctaattcacgaatattagattgaatttgatttgctatataatttaaagcttctggtggaatatctaatttttcttcttcaattttcttctgcaaaattgccattcgagtttcataatctggtggcgtaatatcaacaattagcccccattcaaagcgtgaacgtaatcggtcttctaattgtgcaatttcctttggtggtcgatcactcgaaataactatttgcttgttattctgatgcaattcattaaaagtatagaaaaattcttcttgtgtttg

SEQ ID NO: 4737 - DNA, 396 bp, Staphylococcus aureus
tctgtgttgatagcgataaattcaacattattcattccgtggtcaatcattcggtttacggcgttgttaccgccaccacctacaccaatgacctttaaagtcgctaaatgattaaatccttgttcaaattctaacatttaaatttcctcctagttttattggccaataatcattcaaatagagatttcattagttttttgaatttactttcttctttatctttatctttgtcttgaacatgttcatgattctgtttatgttcctgatgattatcttctgattgataaatttcttcatctgttgactctacttcattttcatgagtatcttttttgtttgttttacgtttaaaccaatcaaatccgcctaatttagattcgttatctttgtctttca

SEQ ID NO: 4738 - DNA, 393 bp, Staphylococcus aureus
ctaattactggtatacctccaccaccagcagcaataacgagtgtatcatttttaataagtgttttaatactctctaattcaataatagagatgggttgtggtgaaggaacaacgcgtctatatcctcttccagcatcttcaacaaatataaatcctttttctttttgaatttgttcagcttcttctttgttgtaaaataacccaattggttttgaaggattgttaaatgccggatcattttcatcaacttcaacttgtgtcactagtgttaccacttgtttatccattccaatagaatgcaattcattttgtaagctttcttgtaattgatagccgatgtaagcttgactcattgcgccacattcagcaaatggaaatgccggaccttggtta

SEQ ID NO: 4739 - DNA, 229 bp, Staphylococcus aureus; identical to SEQ ID NO: 4728

SEQ ID NO: 4740 - DNA, 208 bp, Staphylococcus aureus; identical to SEQ ID NO: 4363

SEQ ID NO: 4741 - DNA, 75 bp, Staphylococcus aureus; identical to SEQ ID NO: 4386

SEQ ID NO: 4742 - DNA, 134 bp, Staphylococcus aureus; identical to SEQ ID NO: 4415

SEQ ID NO: 4743 - DNA, 562 bp, Staphylococcus aureus
cattgttaatggatcatcaatttcttcacctaaattaaacgcagttgtaggcgctgttggaccaactactacatcataattttcgaatactttatcaaagtcatttttaatcaatgttctaactttttgagattttttatagtaagcatcatagtaacctgaacttaatgcaaatgtacctaagaaaatacgacgttttacttctttaccgaaaccttcagatcttgacattttatataattcttctaatgaatgagcttctttagaatgataaccataacgaattccgtcaaaacgagaaaggtttgacgaagcttctgatgatgcaatcacgtaatatgatggaataccaaatttagtatttggcaatgatacttcctcaacgacagcacctaaagattttaaagtttctacagcgttttgaactgcttcttttacgtcatcagctacaccttcacctaagtattctttaggtaatgcaacttttaatcctttaatatctttaccaatttcagatgtaaagtctacatcatcaactggtgcacttgtagagtcattaaca

SEQ ID NO: 4744 - DNA, 447 bp, Staphylococcus aureus
tcaataccaacacgactagttcctggaataggcgcttctatacgaatatctttcgctgccaatgccattttaatgtcatcttgtaatgccgtaattcttgaaactttaacacctttttcaactgataattcaaatcttgtaacacttggaccttcagttacatcttgtacttctgcaggtacattaaagtaaaataatgcgtcattcagttctttctttttatctgtaatccagtcctcgtccgactcaataacttgtggttcttctagtaatgaaacacttggcaatttaatatttgggcctttacgaatcatcggcttagatgtttgtacagcttgatttgttgcaacatcttgttggttcgtccgaggtctattttcattagctgtatcttcatttttatttgaaaatgatgactgtaaatctttttgttgatcatcattatct

SEQ ID NO: 4745 - DNA, 142 bp, Staphylococcus aureus; identical to SEQ ID NO: 4211

SEQ ID NO: 4746 - DNA, 121 bp, Staphylococcus aureus
attttgatagttttctaaattttcatggtaatctagatgcgccgaataaatgttagtaattatagcaatgtgtggtttatacttttcgattccaagtaactggaatgacgacaactctgta

SEQ ID NO: 4747 - DNA, 229 bp, Staphylococcus aureus; identical to SEQ ID NO: 4728

SEQ ID NO: 4748 - DNA, 562 bp, Staphylococcus aureus; identical to SEQ ID NO: 4743

SEQ ID NO: 4749 - DNA, 269 bp, Staphylococcus aureus
tttttgacctttgtgtccgcgaccacttgttttaccgttacctgtcgcaacaccacgtccaacacgattgcgttctttacgtgaaccttctgccggttttaactcatgtaatttcatttcggcacctccttgattatttttcttctactgttactaagtgcttaactttgttgatttgcccacgaatagcagggttatcttcaacaactactgaactgttagtctttttaagacctaaagcttcaacagttttacgttgtgtttcagga

SEQ ID NO: 4750 - DNA, 256 bp, Staphylococcus aureus
actaataataagtgatgtagctaagtcacgtaacatagctttacgttgatcagaagtacgacctaattttctgtaacccatgagttaacctcctttatcaatcttcttttcttaatcctaatcctaaatcttctaatttgtatttaacttcttctaaagatttacgacctaaattacgcactttcatcatgtcagcttcagatttgtcagctaactcttgaacagaattgattcctgcgcgttttaagcagttata

SEQ ID NO: 4751 - DNA, 135 bp, Staphylococcus aureus; identical to SEQ ID NO: 4718

SEQ ID NO: 4752 - DNA, 542 bp, Staphylococcus aureus; identical to SEQ ID NO: 4590

SEQ ID NO: 4753 - DNA, 282 bp, Staphylococcus aureus; identical to SEQ ID NO: 4599

SEQ ID NO: 4754 - DNA, 264 bp, Staphylococcus aureus
tgttgtggatatgcaggacctacaattgtcccgacatattcaatttcatccattgttaatgttaaatttaattcttcttttacttctcttaacagcgcgtgtacttgtgattccccttcttctattttaccacccgggaaataatacttttcgcgattccttacttgaacaagcaatattttatcagctgtttcttcaactaaacagacacatttaatcatctttgacaccccaactttgtgaaatcaatttttcaaattatac

SEQ ID NO: 4755 - DNA, 359 bp, Staphylococcus aureus
tgtaattaacagaatcggacttaaaactactaaaccatatattgaactcactacatcgaataatcgcttcataattatctcctcacttcaacagattgtaatacttcatagtattaatttctctcgtatatttatctttaaacagttgatgtgcgcgctcacccatctcgtgcaattccttactcgagtgagtgttgatgaagttataaatggcatgtgcatcgccattatcaatttggatacccgcatcatattgttcaacatgttgaacgatatcagattgcttatccatgatgagtaccaacgctttcttagctgcaagatagccataattcttgctcggcacgcctaaaccgacg

SEQ ID NO: 4756 - DNA, 175 bp, Staphylococcus aureus
acctattgctttatgcaatagtacagctacaacagatgaatctacgccgccactcatcgcacataatacacgacggtctcctacgcgttgacgaatcttttcaatttcgatttcgataaagttttccattgtccattgacctctacaatcacaaacacgacggacaaaattattt

SEQ ID NO: 4757 - DNA, 490 bp, Staphylococcus aureus
taaagtttctatttcattttcacactcggatatttgtcgttcaagtttgcgttgttcacgtctttgttctttttggttatgatacgacgattgttccatagactttttatgtgcttgtacgttaactgactgttcttcttggtgcgctttcaacgcttccgcttcctcaactttttcaatgtaatattgataatctcctaaatacatctttccgccatcaattgttaaatcaaataccttgtttgctaattggttaataaagtaacgatcatgggaaacaaatagtattgttccttcaaaatgttggagtgcttgctctaacatttcttttgaatctatatcgaggtggttggtaggttcatctaaaataagtacattgtcacgttgcaacataagtagtgctagttgtaaacgtgctttttcaccaccagataaatcattaattatctttttaacatcgtcttgtacaaataagaaacgtccaagaact

SEQ ID NO: 4758 - DNA, 184 bp, Staphylococcus aureus
cgccgtccatttgagcagcaccagtgatcatgtttttaacgtagtcagcgtgtcctgggcagtcaacgtgagcgtagtgacgtttgtcagtttggtactcaatgtgagaagtattgattgtgataccacgttctttttcttctggagcgttgtcaatcatgtcatatgattgtgcaactgagtc

SEQ ID NO: 4759 - DNA, 393 bp, Staphylococcus aureus
taatcattaaagttgtatgctcttgttatcaagatcgctacgataaatcgcttctataagggcatttacattgcgtgcttcttccggtttcaccacaatctcttctatccctaaacacgcattgacaaagttacgcgcctgtctctcaccagcaatgtcttcgttatgctcaacattagctttgctttcaaaaatagttccaaagcggggctcatatatttcaaatggaaataaattgataccgccatcttctcctgataaactaacgtgaaccttatcttctttgatatttgcagaccacgaacattcaaactgcatgcttgctcgattggcaaatgtcatataactagtaacatgatcatcgacatcaaatttagtatgatcaaatgttcc

SEQ ID NO: 4760 - DNA, 607 bp, Staphylococcus aureus; identical to SEQ ID NO: 4429

SEQ ID NO: 4761 - DNA, 196 bp, Staphylococcus aureus; identical to SEQ ID NO: 4572

SEQ ID NO: 4762 - DNA, 149 bp, Staphylococcus aureus
ttacgaccttctgtaattgtaatttcaaccaatgttgtgtttttatctttatcttgtttcttaactttcacttcagccggttgcgtcataccatcttctaattcaatacctttttctagcgctttcacttcttctctcattaaataacc

SEQ ID NO: 4763 - DNA, 142 bp, Staphylococcus aureus
atacttagcgcaaaaccaatacctgtttcacttggaccatctagcaattctaataaaccattataacggccaccaccacaaagcgttgtaatggcaccatcatagttagggttatccatcattaattcaaatgctgtatgtg

SEQ ID NO: 4764 - DNA, 214 bp, Staphylococcus aureus
atgacaaccgtttcgtattcacccttaacgtttttaacatctttatacaaacgattaatttcaaacttaccttccagatgttgatgcgcctcgttttgtattttgacttcaaattgtttctcttttttatacgcttgatataagcgttttgatttttctgatgttgaggcacgtccaaccatatcaatctcataatctgattttaaatagcaaa

SEQ ID NO: 4765 - DNA, 411 bp, Staphylococcus aureus
ctcttgaagctaaagtcataatatgaccaagttctgcaaggtttgatttttcaactataattaacgtaaaatagccgtcatctaacttagcgtccggcactaatttttcaaatcctgccattgaatttgttaaacctaaaaagaataataatgcttctccttggaaaacattaccatcatattcaattcttaaatctacagctttcatttgaggtaacatttcgaaacctttgatgtaataagcaaatggaccaacaatagatttcaatttactcggtgtttcataagagacttgcgtcaattgtccgcctgcagctaaattaataaagtatcgattattcattttaccaatatctactttagtagaatgaccttcaatgatgacatcaagtgcccccatgatgtcattag

SEQ ID NO: 4766 - DNA, 217 bp, Staphylococcus aureus
ctttcaactatcctttaatcaatattattcttcaatccattgtgtatggaatacgccttctttatcttttctttcgtacgtatgagcaccgaagtagtcacgttgtgcttgaattaagtttgcaggtaaatcagcagcacggtaactatcatagtaattaatacttgatgagaaaccaggtgttggtacaccattttgaacaccagttgcgacaaca

SEQ ID NO: 4767 - DNA, 239 bp, Staphylococcus aureus
tgattttcaatttctacaattggtcctctattaataatcattaacttttgcgaaccttcttttaaataaataatgcttcctattgtttccatttattttcctcctttgtcaccgtctcaatttcaacattccttcgcatttccaagtcaatcatctcttcttccactttacgaatgccatgttgaatttgctgttgctgctcgtataacgcttccgttgaacgtcgtttcgcaaaatga

SEQ ID NO: 4768 - DNA, 183 bp, Staphylococcus aureus
tgatttcatctgtttcaggtaacaacaatggtagctcttcttcaggaacagttgtcattgttccatcttcccaatgaatgacaggaattggttcgccccaataacgctgacgactgaataaccaatctcttaatttgtaattaactttcttttcgccagcacctttttgctctaataattgaa

SEQ ID NO: 4769 - DNA, 234 bp, Staphylococcus aureus
ccgcgtaatttggcacgcttaattttaataccaccaggcaatctgccacctactttagcaacaatgacatattgtcctgcatcaacgttcggtgcaccacaaacgatttgtacaggttcgtcttctccgatatcaacttggcaaacatttaatttatcagcatcaggatgtttctcttttgacttaacgaagccgacaactaaatttttgatatcttttgtgtagtcaattaaa

SEQ ID NO: 4770 - DNA, 136 bp, Staphylococcus aureus; identical to SEQ ID NO: 4469

SEQ ID NO: 4771 - DNA, 149 bp, Staphylococcus aureus
ggaaattcttattgtttttagcatgagaaatatagtaagccatacttccaatcattgtttctctcggaaatactacctcacccttgcctaatattttatgcgcaagattgatacctgcaactaagccgctagctgcgctttctacataa

SEQ ID NO: 4772 - DNA, 190 bp, Staphylococcus aureus
aggtttgttgccatcttctttgccaggcttgttgccgtcttctttaccaggttttttgttgtcttctttaccaggcttgttgccatcttctttaccaggttttttgttgtcttctttaccaggcttgttgccgtcttctttgccaggcttgttgttgtcttctttaccaggcttgttgttgtcttcttta

SEQ ID NO: 4773 - DNA, 168 bp, Staphylococcus aureus
agctgttttaagtgctgtatcggcaagacctttacgtgcaccgtgagttgagatgaagtattcaagtactgttaaaccttcacggaatgaagatgtgattggtaattcgataatcttaccagatggtgcggccatcaatccacgcatacctgctaactgtgtaaagtt

SEQ ID NO: 4774 - DNA, 348 bp, Staphylococcus aureus
cattggctttaacgacagccatcactgttttatttggatgcaatgtactgaatactttgaaatttgatgcaacagcgtttaaatctacattcatatacgcagatctataatatttatccgacatattacttcctcctgtaattcccacacgttttaaaactagatcttaattatcattgtataacaaatttaaaatgctgacttttctaaaacaacttggctcatcgcataatgctcagtgtgtgagatactaacatgtacgataaacccttcgtaatcaatctttggtttgccaagttcgtcgttgtaacagtctatatcgttaaaagctacatgttttcctaagcc

SEQ ID NO: 4775 - DNA, 543 bp, Staphylococcus aureus
gtacgagtaggagcaaactcacctaatttatgacctaccatatcttcagttacatatacaggtacgtgtttacgtccgtcgtatactgcaaaagtatgtccgatgaaattagggaaaattgtagaacgacgtgaccatgttttgattacttgtttcttttcgcttccttcttgagcttcaacttttttcattaaatgctcatcgacgaaaggtccttttttaatactacgagccatttgggcgcctcccttcttattatgtgcgtgcagctttaagccgcacacccaaataagttgattatattattttttcttacgtccacgaacgataagtttgtctgatgattttttaccacgacgagttttcttaccaagcgtaggtttaccccatggtgacattggagatggtctaccgataggagcacgaccttcaccaccaccgtgtgggtgatcgttagggttcattacagaaccacgaactgttggacggatacctttccatcttgaacgtccggctttaccaacgttaactaattcgtgttgt

SEQ ID NO: 4776 - DNA, 543 bp, Staphylococcus aureus; identical to SEQ ID NO: 4775

SEQ ID NO: 4777 - DNA, 181 bp, Staphylococcus aureus
tgaatagattcatctaaaagaattttacgaatgatttcacctgatgtcgtcattttcccttgaccagcaagatatagtggataatagaaacctgagaagaataagaatgtttctaaaaatacactcgtaactctggccatatattggtcgtatatcgaagcttctttaccccaaagtttgt

SEQ ID NO: 4778 - DNA, 543 bp, Staphylococcus aureus; identical to SEQ ID NO: 4775

SEQ ID NO: 4779 - DNA, 99 bp, Staphylococcus aureus
tttaaatcattatctaataacagcaccttgttcaattaatgctgcttcaatttccgcttgtacttttgaaacgcgctcatctgtcaatgtttcttctgt

SEQ ID NO: 4780 - DNA, 573 bp, Staphylococcus aureus
taaatacaacggtatcttcaggtataattttaatttgcttatgagtaccattagcaattctagataatgctgccattggttcaccttgtgaaccagtacatagtatcaataactcatgcttcggtacggtattaattttattaggttcaataaatgtttcaggtggtgctttaatataaccaagttccatacctattttaatattgttttccatcgaacgaccgaacgtaacaattttacggttatttttgatagcagcttcaactgcttgttgaactcggtaaatattagaagcgaaggtagcaaatataatacgacctttacaattacggaagatcttatctacgttttgaccaacttcacgttcgcttaaagtaaaatcaggcacaagtgaatttgttgagtctgaaagtaaacatagaacgccttcttcgcctaattgagccattttagcaatgtttgctggtttgcctacaggtgtaaaatcaaatttaaagtcaccggtatgaactacttttccttcaggtgtatctacgatgacgccataagtttcaggaatactatgtgtagtta

SEQ ID NO: 4781 - DNA, 183 bp, Staphylococcus aureus; identical to SEQ ID NO: 4768

SEQ ID NO: 4782 - DNA, 246 bp, Staphylococcus aureus
ctttagagtttatctattatttaccagttttaccttctttacggcgaacgtattcaccttggtaacgaatacctttacctttgtaaggctctggaggtcttactgaacggatgttagatgctaatgctccaacttgttcttttgaaataccttcaactttaacgactgtgtttttctcaactgagaaagtaatgttttcttcagctttaatttctactgggtgagaataaccaacgttaaggatta

SEQ ID NO: 4783 - DNA, 168 bp, Staphylococcus aureus; identical to SEQ ID NO: 4773

SEQ ID NO: 4784 - DNA, 77 bp, Staphylococcus aureus
accatatgcttcaagtgcccatacctccatctcaccaaaacgttgtccaccgaattgcgctttaccgccaagtggtt

SEQ ID NO: 4785 - DNA, 614 bp, Staphylococcus aureus
agtgcaagcaataatcgttctatacttagcgcaaaaccaatacctgtttcacttggaccatctagcaattctaataaaccattataacggccaccaccacaaagcgttgtaatggcaccatcatagttagggttatccatcattaattcaaatgctgtatgtgtataataatccaatccacgaactaagttaggatcttcaatatatggaatacctaaatcatctaaataagcttttacttgttcataatatgccttagattcctcatttaagaaatcagtgattctaggtgcagtcttaatcgcttctttatcacggtctactttacaatccaaaattcgcatcggatttgtatgcaaacgtgattgacaatctgaacaaaattcatgaattactggttcaaagtgtttcactaacgcttcgttatattcttttcgagacgccatatcccctacactattaataacaagctttaaatgttttaatccaaatgattgataaatatgcataaccatagctaatacttctgcatctacgctaggattttcagcaccaatagcttctacaccaaattgattaaattgacgatagcgtcctttttgcttacgttcata

SEQ ID NO: 4786 - DNA, 179 bp, Staphylococcus aureus
cttttcaacccactaaaactaaaatcataactatctttatccaaccaaacacgagggaatgaataagtatcttcaccttcagcagccaaccgatcaacttgtggaccacctggataatttaaaccaattgttcgtgccactttatcataagcctcacctactgcgtcatctcgtgtttc

SEQ ID NO: 4787 - DNA, 164 bp, Staphylococcus aureus
tgttaaaagaccgtgaatcttagtaggaccaacataagcaacaggtaatattggtgacttacttaacattgcaattgttgaagcaccacgtttcaaaggtgcaccttcttgcgatgtgcgagaacctgttgggaagataccaactgtcttattatctttcaaca

SEQ ID NO: 4788 - DNA, 258 bp, Staphylococcus aureus
tacaactctagaaggtataataaaaacgcgcaactaatgttacgcgtttgaattaatcatatgatattatttgcgatactttaatttagcgaaagcatcatgttgatggatagactcttcattacgacattcgatatcgaaaccgtctaaccaatcaaattcaactaagtccgcggcaattaaacgaattaagtcttcgacaaaacgtggattttcatatgcacgctctgtcacacgtttttcatcaggacgttttaa

SEQ ID NO: 4789 - DNA, 288 bp, Staphylococcus aureus
tgtggtatgtctgtaactggcatcaaaccattggtaccgaaatcgaacaagtacatgtgtgcttgatcaggacgatggtgtcttgcaacatcgaaaataatgttgtgtaagaacgttgttctaccatatcctggacttccgattaacgcgatgtgcccagcttttttcaattgcaataccatcggtccttgatattgttcttctggtacgtctttaagtcctaatgttaattccacttcttttgcatcatctgaccataattttctgaaatctgtttctactaaatct

SEQ ID NO: 4790 - DNA, 398 bp, Staphylococcus aureus
tacatcagatcactcgcattaccttgcatgacaccaacacctgacgtgacggtttgtgtcgctttattcccacttccgtaaaaatgcggcgcaactgtcgacgcataatattgtaaattaatccattgtgccacaagtgccggaccagaaatgatggtatttaataatgtgccatctttatctttacgccaatcataattgtgtaaaaatgtccgcccttctaaatcaatgccttttgttaattggcgtcgtccaattataaatgatgcatttttagccaatccccattctggacgtacctcactccaatcactcgcaaaccgctgcgcttcttccactggatgattcacacgaccaatcgttggcagtttgtccaaacgttcgcgattcgcgtgttc

SEQ ID NO: 4791 - DNA, 295 bp, Staphylococcus aureus
tacttcatgattattatctgttgtagacactgctggatcttccgatgtatctttcgatgcatctttcgatttgtgtatttgctgattcaaatggtctaggtcttctaacgccttatttaccattgcttcatcatttttatcatctttttctccatgttttgttgtagccgtttgtgacatatcatttttcattgcattaagatcgtcctcgccactttgttgacccctatcaacatttgaagaaacctcatttaaatctttaagcaattgatctaatttactgtctatatcactt

SEQ ID NO: 4792 - DNA, 203 bp, Staphylococcus aureus
gactgaaatttttacatcaaaaccgacaatagcttcaacaacaggtaatactctgttcatctcttcttctaatgaaaccatttcatgaccgggtctcgttgaaacacctccaacatctataatgtcagcaccttcatctatcatggctttcactctatttatagctgattcaacattattaaattttccaccatctgagaatg

SEQ ID NO: 4793 - DNA, 246 bp, Staphylococcus aureus
tgtaacaataccatcataaattatacacgacgacgttttggtggacgacaaccgttatgaggtactggagtaacgtctctgatcgcagttacttctaaacctgcagattgtaatgcacgaatagctgattcacgacctggaccaggtcctttaactgttacttcaactgtttttaaaccatgctccatagctgatttagatgcagtttcagaagccatttgtgctgcaaatggtgttgatttttta

SEQ ID NO: 4794 - DNA, 390 bp, Staphylococcus aureus
ctgggttaggctctgtttgacgttgtttcgtataatttaatacttttgttaagtcatcttcagatgctagcgctttttgttgattattttcgatagttttaacaccatcgtatactgtaaagttataaggtcctaaatatttcactaaatatttatggtcaaatgtacgtgttaataattctggtctgtcagtttcagcaaaagctaagtttaagaagaataatgctactgaagccgccattacgacaggaacaaatttcttactaaatgcttttgtgtctaaccattttgttttaaatattaaaatgaataagtaaactaacgtatcaatgaaataaacaaagtcataccatttgaatgatgcactaaccgcaccacccatagattcta

SEQ ID NO: 4795 - DNA, 225 bp, Staphylococcus aureus
  misc_feature (8)..(8): n=g, a, t or c
  misc_feature (104)..(104): n=g, a, t or c
aattgttncaatagttccaccttgggcaatagctatatcgattaatactgaaccttttttcattgatttaaccatctcacgagtaaccaattttggcggtttcncacctgaaattaaaattgtagaaataaatacatctgctttcttaatttgttctgctaaattttctggtgttgatttgactactgtgacatctttttctgcatacatatcttcaagatattt

SEQ ID NO: 4796 - DNA, 85 bp, Staphylococcus aureus
taatgatttactcatcttacgcccgtcttcagcacgaactaaaccgtgtaataatacatcattaaatggacgacgatctgtaaat

SEQ ID NO: 4797 - DNA, 189 bp, Staphylococcus aureus
tgtattaacttcacgatcccaatcataactgaaccctaattctttaatttgtcgtttaaaagtttggatatttttctttgtaaattcacgtgggtcgttgccagtgtctaaagcatattgctctgctggtaatccgaatgcatcccaccccatcggatgtaatacattatatccttgcattcttttata

SEQ ID NO: 4798 - DNA, 344 bp, Staphylococcus aureus
acgaattgttttgtcctgattgttgaccaccgaatccttgaccgtaatcttggaattcattttgttgacgttggccaccattttgttgcgcatttttaggttcaaggaattgaacgctatcacacacaacttcagtaacaaacacacgacgaccttcttgattttcataattacgggattgtaagcgaccatctacaccagctaaactacctttagataaatagttatttacattatctgcttgtcttctaaaaacaacacagttaataaaatctgcttcgcgctccccttgagcattcgtgaacgtacgatttactgcaagagtgaatgtcgctacactcaca

SEQ ID NO: 4799 - DNA, 238 bp, Staphylococcus aureus
cgtaaacgacttctgctttttcgatgttagcagcataatcactttctttactgtaaacgattgtatcctcaccgatagcacttaatgccataaattcatgtgtatggctaccgcctatagcacctgaatctgcaactactggtcttgcgttaatgccaactctctcaaaaatacggctatacgcttgatacatatcttgatacgtttgatctaatgatgcctcgtcagcatggaatga

SEQ ID NO: 4800 - DNA, 165 bp, Staphylococcus aureus
gtaatattcataagcacaccttgtgcaccaacgatagatgtttcaagtaatggagaagagattgcttttttagcagcttctaccgctctattttcaccagaagaaacaccaatacccattaatgcagaaccttggttagacataattgtcttaacgtctgcaaag

SEQ ID NO: 4801 - DNA, 520 bp, Staphylococcus aureus
tggtggtggttgtataaaatctggattttggtcatagaactctaataaacggtctgtatatttactaatattaaagaaataactttcttctttaactagttcaacttcgtgtccagaatctggacttttgccaccaataattttaccgttttcgtattgtgggtctactaattgtgactctgtatagtatgtttcatccggaacagaataccaaccttcatattcacctaaatagatatcaccttgctttaataaacgttcaaacacttgctcaacgacatgtttatgacgttcttcagttgttctgataaaatcatcatttgaaatttcaagcttagcccacaattgtttaattccagcaatcatctcatccaaatattcaatttctgtcttaccagctttttgagctttttcttgaattttttgaccgtgttcatccgttccagtcaaatagcgaacatcatatccttgcattctcttatatcttgcaataacatctccagccactgtagaatatgca

SEQ ID NO: 4802 - DNA, 266 bp, Staphylococcus aureus
tatcttgtactttatcaacagcgtcttcgacattgttcgcttcaatgaccgatttcccttgactattacctagtttagcaaacttagctttcgtttgtccgaatacaaccatcgcgcgaacattttccatataaggaatgagttcgtcaaattcattccctcgatccaaaccaccacataaccaaatgattggttgattaaatgaatttaaggcaaactgtgttgctagcgtgtttgttgctttggaatcattataatatttatta

SEQ ID NO: 4803 - DNA, 386 bp, Staphylococcus aureus
tctaccatgattcctaattctatatcatccgaaatgtcatgaccttcatttttaaggttttctttttcttctaataatatagctttagcttctctaaattcgttaattgttgcaaccattgggaacatgatatttaacttaccataaactgatgcacgtaataatgcacgtagctgtggtctgaaaatatcttgttgcgcaaggcataaacgaatcgcacggtaacctaagaatggattcatttcttcaggcaagtttaagtatgataattctttatctccacctatatctaaagtacgtacaacaacacgtttaccgcccattgcttctaatacttctttataagcttcaaattgttcttcttctgtaggcatttggtcacgacc

SEQ ID NO: 4804 - DNA, 330 bp, Staphylococcus aureus
taccttttttacctttaccgccaccagtgaactgtttcatcattttcttcatatcgttaaattgtttcatcaaacgattgacttcttgtaatgaacgaccagaccctttagcaatacgctttttacgtgatacattcaatgtgtctggattgtttctttcagccggcgtcattgactggataatcgctttaatatgatcaatttgcttttcactcatattaagcttatctagccctttcattttattcatacctggaatcattttcataatatcatccagtggtcctagatttttcacctgatcaagttgttctaaaaaatcatctaaag

SEQ ID NO: 4805 - DNA, 219 bp, Staphylococcus aureus
atcttacgcccgtcttcagcacgaactaaaccgtgtaataatacatcattaaatggacgacgatctgtaaattctaagccttggaatatcatgcgtgctacccagaaaaagataatatcgtaacctgtaactaaggcatttgttgggtagtatcgtttaaagtcttcactttctaaatcaggccaacctaacgtagagaaaggccataaagcacttgag

SEQ ID NO: 4806 - DNA, 165 bp, Staphylococcus aureus; identical to SEQ ID NO: 4800

SEQ ID NO: 4807 - DNA, 135 bp, Staphylococcus aureus; identical to SEQ ID NO: 4515

SEQ ID NO: 4808 - DNA, 155 bp, Staphylococcus aureus
atacgttaaatttgttcctttgcgtccaaattcaatttggaaagctttcttttgactaagtctcttttcaatttcctctggcttcatattaatgactgtagataatttctttgcagtctcttttttatcaactacatgcctaggttttttagaat

SEQ ID NO: 4809 - DNA, 435 bp, Staphylococcus aureus
ccattgacacatgcttagcaacttctttaggctgtttagcatttttaaatgtcacaggtccacctaatgaaatataaaaattcagcttattagttacaatatctgcaatttctggagaaccactaaagctatgcataatcccgcctacctcttcagcatgctcctccaataagatatcgatacagtcttgagttgcttcacggttatgaatgataattggtaacttcaaacgcttagctaaagcaatttgctttctaaaaacttccttttgaacatctgcaggagatttatcccagtgataatctaatcccatttcaccaataccaatcacttttggatgctgagctaaagattcaatccattccaagtgttcttctgtaaaatcaattgcgtcaactggatgccaaccgataatgccatataaaaaatcatact

SEQ ID NO: 4810 - DNA, 124 bp, Staphylococcus aureus
ataagtgtcgccttctttttcaagaccctccatagaaataatacatggatgtgcaccacgtgctactacctctttaacgttaccacgaattgataaattaactttctcttgtgttgctaaacct

SEQ ID NO: 4811 - DNA, 288 bp, Staphylococcus aureus
tgatgatgttgagtcggattcactttcacttgtagaaccacttaatgatgtggatgtactaatggaatcagatttacttgtactgattgaatcacttgtcgacattgatgttcttaatgaatcagacttactatcacttgtggaatcacttaatgatgttgacaaacttgtagagtcagacaaacttgtactcgttgacatactcagtgatgttgaaacactctcgctcttaaacgttgacgttgattcactgatacttgtcgatgttgaaatggacgtactaccact

SEQ ID NO: 4812 - DNA, 116 bp, Staphylococcus aureus
aatataatgttttgtgatttcagcatgtctcgaatttcatctgctcgtgcaaaatctttgtttttccttgcttcattacgctcttcgattaatttttcaacatcttcatccaataa

SEQ ID NO: 4813 - DNA, 118 bp, Staphylococcus aureus
ggtttggattaccttgcattttatgttcaatatatgaacgcacaactgcagctgttccctcaggtcttaatgtaatacttctatcgcctttatctttaaatgtatacatttctttttg

SEQ ID NO: 4814 - DNA, 118 bp, Staphylococcus aureus; identical to SEQ ID NO: 4813

SEQ ID NO: 4815 - DNA, 85 bp, Staphylococcus aureus
atttgtagttacaatttttgaactcaatgtcccatcttcatttaccattaaacgccatacgcgatctaagaatcgacgagaccca

SEQ ID NO: 4816 - DNA, 173 bp, Staphylococcus aureus
atgattaatttcgctaccatcgaatcataatatggcggtatcgtataattagtataacatgctgactctattcgaacaccatatccacctggtgcaagatattgctcaattttacctggtgatggcataaagttcttgtaaggattttcagcattaattctaaattcaattgc

SEQ ID NO: 4817 - DNA, 169 bp, Staphylococcus aureus
ttgtgcttgaattaagtttgcaggtaaatcagcagcacggtaactatcatagtaattaatacttgatgagaaaccaggtgttggtacaccattttgaacaccagttgcgacaacatcacgtaacgcatcttgatattcagtaacgatgtttttaaagtaaggatctagc

SEQ ID NO: 4818 - DNA, 205 bp, Staphylococcus aureus; identical to SEQ ID NO: 4262

SEQ ID NO: 4819 - DNA, 180 bp, Staphylococcus aureus
ccgttttaactggtcctttacgagtacgcgcgttgtttttcgttttttgaccacgaactggtaaaccacgacggtgacggataccacggtatgatgaaatttccattaaacgtttgatatttaagttagtttcacgacgtaagtcaccttcgactttataaccgtctacaacttcacgga

SEQ ID NO: 4820 - DNA, 222 bp, Staphylococcus aureus
catcatagcataactttctgcaattaattgcatgtcagcatattcgataccattgtgtaccattttcacatagtgtccagcaccattaggtccaatataagtaacacatgaagcaccgtcttttgcctttgcagcaattgcatcaagaatatctgcaactttgttataagcttcttcttgtccacccggcattaatgacggaccagttaacgctccaatttc

SEQ ID NO: 4821 - DNA, 361 bp, Staphylococcus aureus
tcaggtgtaaatacgccatctgaaccaaatggtaattcacgcattagataataacgtgtagcatctaaaccatagcgatcaattaaaatattagggtctacgacattacctttagatttactcatttttccatctttcatcaaaatccaaccatgtgcaaagacttttttaggtaacggtaagtctaatgccatcaataaaataggccaaataattgagtggaatcgcacaatttccttagccattaaatgaatatctgctggccagtatttgttaaatagtgactcatcatctgataaatagcctaatgctgaaatatagttaactaacgcatcaatccaaacataaacaacatgttttg

SEQ ID NO: 4822 - DNA, 328 bp, Staphylococcus aureus
taaagtattgttgtggtttgaactgattaatctcttgttgtcgtgtatttactaattgaatcgttggtgtctgaacacgtcccagggatagctgtgcatcatactttgttgttagtgcacgcgttgcattaatcccaacaatccaatctgcctcacttctcgctaacgctgcataatacaaatcgttatattgacgaccgtcttttaaatttttaaaaccttgttgaatagcttttttagtaactgagctaatccataatcgacggattggctttttgttaccaactttatccaaaatcaatcttgcaactagttcaccttctcgtcc

SEQ ID NO: 4823 - DNA, 193 bp, Staphylococcus aureus
cgctttgtcgttcattttaccattttcatccataacgataatattttctaattgatgtctttgaccaatttcaaaatcattagggtcatgtgctggtgtcactttcatagcaccagaaccgaagtctatatcaacatactcatctgctaaaataggcagttcgcgtcctacgattggtaatataacagtttta

SEQ ID NO: 4824 - DNA, 161 bp, Staphylococcus aureus
gaatgtttggtaacactgtgaagtattgccaaatttctctttcaagaccttcttctctaatcacttggcgtaaaatcgcgtctgattctctaacgatttctagtttatcttcagtaatttctccaagtacacgaataccaagaccaggtcctgggaatggt

SEQ ID NO: 4825 - DNA, 240 bp, Staphylococcus aureus
aacgccgcattcaacaccagtctcaccatgtgcttttaacatacggtattcaccatgaataggtaagaaatatttcggcttgattaatcgaagcattaattgttgatcaccttgagaaccatgccctgaagtatggatgttagaaatcttgctatggataacatctgcaccagctttatacaaggaattaatagttctgttaatactttttgtattacctgggataggtgatgaactaaa

SEQ ID NO: 4826 - DNA, 424 bp, Staphylococcus aureus
tatagttcacacgttcaacaggtgaatacaatgaatcaacagggattacaccaattggtaaatcactagtattattttgttctgctaatgcgtaacctctacccttgttagcaactagacgaatttttaagtgaccacctttagatactgttgcaattttaagctctgggtttaaaatttcaacatcactatcatgtgtaatgtcgcttgctgttacttcgccttcatcacgtacatcaatttctaaagttttatcttcttcagagtaaattttcaatgctaattgtttaatgttcataataattgtagaaacatcttcaactacattgtctactgctgagaattcatgtaaaactccctcaatttcaatatacttaacggctgcacctggtaatgaagatagtaggatacgacgtaaggagtt

SEQ ID NO: 4827 - DNA, 96 bp, Staphylococcus aureus
cttcaatttcacgtgcgttaacgccttgttctataacaagcttacggtcaaattggaatgcttctttaataccttctttaagttccgcttcattat

SEQ ID NO: 4828 - DNA, 240 bp, Staphylococcus aureus; identical to SEQ ID NO: 4825

SEQ ID NO: 4829 - DNA, 361 bp, Staphylococcus aureus; identical to SEQ ID NO: 4821

SEQ ID NO: 4830 - DNA, 122 bp, Staphylococcus aureus; identical to SEQ ID NO: 4482

SEQ ID NO: 4831 - DNA, 193 bp, Staphylococcus aureus; identical to SEQ ID NO: 4823

SEQ ID NO: 4832 - DNA, 331 bp, Staphylococcus aureus
tgatttctacgacattaactttaatatttcgttttttagcacgttgtcttaaagcaataatatttcctatatcactgtataaattcaatttatctgacataaaatgataaatagtcaattcatgcatattatgattgacctccttcaaacgaacggtttaattgttcaagcataggcgctaatgatgtatagtttggtattgcaactgtgaaacctttataatccatagtctttgccgttgctttataaatatcacgctcaactataattggtacttcaacctctgctaacttcaatcgcaattgaagttcttctgctcgtgtacctgtca

SEQ ID NO: 4833 - DNA, 163 bp, Staphylococcus aureus
cactttcaatcatatctttagtcgttgttttaccattagaccctgtgacggcaattactttagggtttacatgtctcaagtaagcttgtgccaattgttgtaatgccgttaatgtgtcttcaacccatataataggcccgcttacattttcatctataggtgt

SEQ ID NO: 4834 - DNA, 488 bp, Staphylococcus aureus
aaattaaatgctttatatttggctaatcattatattgttaaaacaaatttatctttaattatactatgtcttcagtcatttttcatcgaataatcattatatcaaaaataataagagcaggacataagcatcagatttctttcagctttttcctactcttataattcattcgatcttaattattttaagttatcatatttatttgtaatgacagtcattaagtcatcaatgtgaacttcttcgctatcacctgttaaacgttctttaacttctacaataccttccgatgcacgtttaccaacaacaattcgcagtggtaaaccaattaaatcggcatcattaaatttaacacctgcacgttcctgacgatcatcgtacaacacatcaaatttagtattaaattcagcatatagtgcatctgctagttctcgttgatcatctttcttaggattaatagaaattaaatgtaaatcaaacggagtaactga

SEQ ID NO: 4835 - DNA, 160 bp, Staphylococcus aureus
tgcctcttttgataaaggaacgtgaaccgccatttggtcaccgtcaaagtcagcgttataagctgttgttacaagtggatgtagacgaatcgcacgaccttcaactaaagttggttcaaatgcttgaataccaagtctatgaagtgttggtgcacggtta

SEQ ID NO: 4836 - DNA, 288 bp, Staphylococcus aureus
tgatgatgttgagtcggattcactttcacttgtagaaccacttaatgatgtggatgtactaatggaatcagatttacttgtactgattgaatcacttgtcgacattgatgtacttaatgaatcagacttactatcacttgtggaatcacttaatgatgttgacaaacttgtagagtcagacaaacttgtactcgttgacatactcagtgatgttgaaacactctcgctcttaaacgttgacgttgattcactgatacttgtcgatgttgaaatggacgtactaccact

SEQ ID NO: 4837 - DNA, 435 bp, Staphylococcus aureus
ccacggtatgggataaatgaagcaccgactgataaatcaatatagcctcgtgtttttagtttacccgaactatcccttgataatgattgtgacatctgcggataatatttcattttcttagatatcgtcgaaatatcaccgattacttgaagtccatctgtcgtaaacaattcaattctgctttgtttgtttttacttggggcgtatgtcacttcggcaatatatcgtctaacttcaggtgtcatttcagataacgccttaatcatatcatcttcttttgtacctttgaaaccatccatgacaggtgcatcattaattttgacatcatttgaacctttaagcaatttaccattttctaataaaggtaaatatttacctttatatttcactaaagcaataatttcattttctgtgatatctacgtttaatgtgttt

SEQ ID NO: 4838 - DNA, 186 bp, Staphylococcus aureus
tgttactgttgtcgattgaccaaatgatgacgttttttgttgcaactcattactccatccaatttgaccaggtgcttctccatcaaacatacctttagttgattttccaaatccaaatcgttcataccaagatttcattttgtctgcaccaactaaatcttgtaaatgcatcatcaatgtattaga

SEQ ID NO: 4839 - DNA, 135 bp, Staphylococcus aureus
gctacaacatactctaattctttacctgtgtattctttttctaatttgattgatgctttatcccaatccagtgcttctgctacagcgtcagacaaggcttctgcaataatatatttttcgccatttacattgtat

SEQ ID NO: 4840 - DNA, 491 bp, Staphylococcus aureus
tacacatgttgtatacacgagagctcttactaacaatcaacgtcatttatttttgtctcatataagggaataataatacgtctctgattgatggagagtcagttaataacataaccaatctgtcaataccgataccaagaccacctgtcggaggcataccatattctaacgcttcaatgtaatcttcatccatttcatgcgcttcatcattaccttgcgctttttcaacaagttgcgcttcaaaacgacctttttgatcaataggatcatttaattcagtaaatgcatttgcatgctctctacctacaatgaacaattcgaaacgatcagtaaatctaggatcttcaggatttttcttcgctaaaggtgaaatttcagtcggatgaccatagataaacgttggctgaataagtgtttcttcaactttttgctcaaagaattcatttaaaatatgaccatatttcattgtatctttaatttcaataccatgt

SEQ ID NO: 4841 - DNA, 257 bp, Staphylococcus aureus
ggacctgtcaaaccatcttccacaactttaacccacgctaatcctttagcaccatagatgtttacaaattctgttaaagcatccatatctttacgagtatattgttcagctgcacctttagcgacaattgctttaatttcaccatcattttcaacagtatctttaaatactttaaagtccatatcacgtcctaattgagaaacgtcaattaattccatttcaaaacgtgtatctggtttatcagaaccatagcgacg

SEQ ID NO: 4842 - DNA, 968 bp, Staphylococcus aureus
acgtcaatacctttccaaatttcttcatttctaagcagttcaacttgatcaatttcatcattagtcattggaccaaaatgagagaaatcaaaacgtaaacgatctgcttctactagtgaaccagcttggttaacatgatcacccagtactgatttcaacgctgcatgtaataaatgtgttgcactatggttcttttgaatgtcacgtcgatcattttggttcacttcagcagacactgtagcgccaacatttacttggccaaattgtactactcctttatgcaagttttgaccatttggtgctttggttacttcactaacagcaatttcaaaattgtcattataaacaatacctgtatccgcaacttgtccaccactgattgcataaaatggtgtttccgttaacatgaagtatactgtttcacccgcttcaacttgtgaaacttcttcaccattgtatatcaagtgtgttagtgttgtttgagctgtcgcagtatcataaccaacaaaagtacttgcagatgtaatatttttcaatacttcactttgaacttgcattgattgagaattttgacgtgcttgacgtgcacgatcacgttgttgttgcatttctgactcgaatgttgtcatatcaactttcaatcctgcttgcactgctatttcttcagttaattcaattgggaacccatacgtatcatacaatttaaatgcatctttcccattaatttcatttgttgtcgctttagcttttttaattaattcatttaaaatcgctaaaccatcttctaatgtttcatggaatcgttcttcttcagactttataacacgcttaatgaaatctgctttttccttaacatttggataatatggttccataatgtctgcaacaatatcaacaagtttgtacataaatggctcattgattcctaacgtttgactaaaacgaacggcacgacgtaacaatcgacg

SEQ ID NO: 4843 - DNA, 217 bp, Staphylococcus aureus
tgtgttgctaaacctacaactggtgtaccttcttcgattaaggcaattgtaccatgtttaagttctccaccagcaaaaccttctgcttgaatgtaagaaatttctttaagttttaacgcaccttctaaacttacgttatagtcaatagtacgtccgataaagaatgcattgcgtgttgtttctaagaaatctgtagcaatttgttccataattggtg

SEQ ID NO: 4844 - DNA, 349 bp, Staphylococcus aureus
ttgatacaaatccataattaaccttattattgtggttttaccagcgccatttctaccaataaaaccagtgacgaatccttgaggaactttgaaagagatattctttaaattaaactgatcacttgaataattaacattacttaattctatggcattcatgatgattcctcctcataaatgaacgttaaaatatcctgcagttcctcaagtgacatttcgatggcttgcgcttcattaaccaattctttaaccaaattttcaatggtaaaaaattgtttctcttttaaaatagaactatcttgctccttaacaaaggtcccttttcctctaattgttgtaacaaaaccgt

SEQ ID NO: 4845 - DNA, 176 bp, Staphylococcus aureus
catttcatgatagctaaaatgccccggtttaatctttaattgtttacgtaattcctcaagtaaaagataatgtgttgaataacgatgtggtataccaaaatggtaatcatcgccattattattaaattcatttaagtgcatacctttttgtcccataatgacattgccttcatgat

SEQ ID NO: 4846 - DNA, 491 bp, Staphylococcus aureus; identical to SEQ ID NO: 4840

SEQ ID NO: 4847 - DNA, 328 bp, Staphylococcus aureus
tgcctgtttcaagtctaacagcctttacctcattaagatcaaaattttgtggatttccaggtggcgttaataaatcgccaagttgattacgccataaatcattagccttctccgttttagtacgatgtatattcaagtcattagaaaagaaacaaactaacggacgtttaccacctgatacataatctatgcgcgctagaccgccgaagaataatgtctgcgcctcatttaattgatatacgcgttgttttatttctttcttaggcataataattttcaattctttttcactaactaaatgcgtcatttggtgatcttgaataatacc

SEQ ID NO: 4848 - DNA, 109 bp, Staphylococcus aureus; identical to SEQ ID NO: 4318

SEQ ID NO: 4849 - DNA, 435 bp, Staphylococcus aureus; identical to SEQ ID NO: 4809

SEQ ID NO: 4850 - DNA, 454 bp, Staphylococcus aureus
taacgtattaccaattccggcaataattgctgcagccggtaaaatggcaactggtaacattaacgaacgccctaaattttggaaaaatttatacattgaatgtcatccttcttaaaataatgtagaaatataaagattactaatgtaactagaataactacttcgatactccgttatagtcacctaggcttactaaccagctatatttctacctcaagttattttataaactttttacaatttcatgcaattcttgttgtaactttgctgttcgtgtttcaatctcttttgtaatataatcgatacgctcgtttcgttttaaatctttaggtaaatcgttaatatcgattggtttgccaatatttatgtatgcttgtcctgttaaaagaccgtgaatcttagtaggaccaacataagcaacaggtaatattggtgacttacttaacattgcaat

SEQ ID NO: 4851 - DNA, 263 bp, Staphylococcus aureus
tactttactttttcgttcttttttcgttactgtttcctcatcaatcgagtcgctattttgttctttaggagctgattgaggttgttcgttgtcgactgaaattacattcgattcattttggtcgtcaatttcttgattatatctataatcctcattttcaatattagagtctgtagaatcatcgatattattatcattcgcatgactagaagcagaatcattatttttatcattgctttcttcttttttgaagtctttattta

SEQ ID NO: 4852 - DNA, 435 bp, Staphylococcus aureus; identical to SEQ ID NO: 4809

SEQ ID NO: 4853 - DNA, 189 bp, Staphylococcus aureus; identical to SEQ ID NO: 4797

SEQ ID NO: 4854 - DNA, 216 bp, Staphylococcus aureus
tgtggaccatccataagcggttctctttgtcgaacgccaccactttggttgccaattgattcgctatcaaagtacgatttatcttgatttgattgttcttgaatatgttcttcattatcagttgttgcatattcactatccacctctgttttttccattgttgctgtatggaattgtacgaagttctcttcttctaatgctttgatttcttctttc

SEQ ID NO: 4855 - DNA, 319 bp, Staphylococcus aureus; identical to SEQ ID NO: 4714

SEQ ID NO: 4856 - DNA, 122 bp, Staphylococcus aureus
ccctgcatcatcgataattgcagcttgaataccaggtaatggtttgcccattgagccaagcttgacgtccatcgttggatagttaacaatcatatgtccacctgtttctgtcatccaccaag

SEQ ID NO: 4857 - DNA, 128 bp, Staphylococcus aureus
cattaatttcatgatggccacgcactaaaaccataatatattcgccatcaactttgaaaatcatcgttttaacgatttcatctactggtctacctaagaagtctgccaattcttgcgcagtcttaaca

SEQ ID NO: 4858 - DNA, 128 bp, Staphylococcus aureus; identical to SEQ ID NO: 4857

SEQ ID NO: 4859 - DNA, 263 bp, Staphylococcus aureus; identical to SEQ ID NO: 4851

SEQ ID NO: 4860 - DNA, 281 bp, Staphylococcus aureus
ttgcttgaatcacttcagctaaattatgtggtggtatatctgtcgcgtaacctgcagatatacctgtagaaccattcactagtaagttaggaaatcttgatggcaataccattggttcgagtgtcgtatcatcatagtttggaatgaaagaaactgtctctttattaatatcacgtaataactcttcagctagtaagcttaacttagcttcagtgtaacgcattgccgctggcggatcattatcgatactaccattattaccatgcatttctattaagaca

SEQ ID NO: 4861 - DNA, 153 bp, Staphylococcus aureus
tattcaacgaattcaaattctccgccaagaattctaacgatatcaccatttttacaaccacgttctctaagcgcatcatcaatacccatcgaacgcatttgacgagcaaatcgacgtactgctggatcactgttaaagtcagtcattttaaac

SEQ ID NO: 4862 - DNA, 202 bp, Staphylococcus aureus
actgtatcatcggatttgtaagttaagatttcttgtaatgtgtatgcagcaccatatgcttcaagtgcccatacctccatctcaccaaaacgttgtccaccgaattgcgctttaccgccaagtggttgttgtgtaacaagtgaatatggtcctgttgaacgcgcatgtaatttatcatcaaccatgtgcgcaagtttcaaca

SEQ ID NO: 4863 - DNA, 224 bp, Staphylococcus aureus
ccaaatatgaatagggataagaataatacagtgaaaattgctgctgctgtttctgcatcaactgggtcaacctcaccattaactgttgttgacacatctgtagtcattacacctgatgctgctaaaaccatcaatagtaaactaaataccgttgctaaaccctgaacaacaattcctattattgtcattattttgatcgatttttccattgtcttactccttta

SEQ ID NO: 4864 - DNA, 176 bp, Staphylococcus aureus
aaatcttcgtgtaaaagtgaagcgaagtctttttcagcataccatttagcttcccaatcacggataataccaacacgaagtccgattggattaattttttgacccacagtattccctccttaaaagttaattaagcttctttagcttcttctttaccgtcacttacgacgattgta

SEQ ID NO: 4865 - DNA, 520 bp, Staphylococcus aureus
gacatgtgtatcgattaacataattatctctcctaatttttaaaaatacagttatttaatcactgcaccatttggaattgcacttggtaaacttactaaggttaatacaccatctttttcagcagataatatcataccttcagatttttgtcccattaatttagctggtttcaggttagtaacaactgctacttttttaccaataatatcatctggtgtatagaatttggcaattcctgatacaatttgtctttgttcagaatctaagtctacttgaatttttaaaagcttatctgacttcttaacatgttcagcatcaataatcgttgctgccttaatttcaactttatcaaagtctttaatatcaatttgaggtttgctaggaatctcttctttttcctctttagtagcaggcggttgcattgattctttgatatatgcaatttccgcttcgctatccaatcttgggaaaataggtttaggttgcccagtaaccataattgactcattaagcacacca

SEQ ID NO: 4866 - DNA, 289 bp, Staphylococcus aureus
tcaggtaaataacctaagtcacgatattgctcaataaattgtaaaatttgcccatcacgtttacttaactttttacgttcttcattaacaattaatgacatatgaccaaaacgaggtggctcccagccaaatgcttcataaatcataatttgtttaggcgtgtttgaaatatgatcatcaccacgaattacatctgaaatttgcatgtaatgatcatctatagctactgcaaaattgtacgttggaatgccatctttttttacgataacccagtcaccaataccatttg

SEQ ID NO: 4867 - DNA, 430 bp, Staphylococcus aureus
tgatggagaaaacatttttgagtccgtttttaactctacgtgaacttcaagtcctataactgtttcaaaatgcatgatttccactccttataatttttcataaacgtcatgtaaattgtattgtgtttcatattgataagcgacacgatataacgttttttcatcgaatggtttaccaatgaactgtaaaccgattggtcggccatttgattgtccacaaggaacagaaataccaggtaatccagctaagtttactggtgttgttaataaatcattggcatacattgttaatggatcatcaatttcttcacctaaattaaacgcagttgtaggcgctgttggaccaactactacatcataattttcgaatactttatcaaagtcatttttaatcaatgttctaactttttgagattttttatagtaagca

SEQ ID NO: 4868 - DNA, 289 bp, Staphylococcus aureus; identical to SEQ ID NO: 4866

SEQ ID NO: 4869 - DNA, 289 bp, Staphylococcus aureus; identical to SEQ ID NO: 4866

SEQ ID NO: 4870 - DNA, 217 bp, Staphylococcus aureus
aacgataagtttgtctgatgattttttaccacgacgagttttcttaccaagcgtaggtttaccccatggtgacattggagatggtctaccgataggagcacgaccttcaccaccaccgtgtgggtgatcgttagggttcattacagaaccacgaactgttggacggatacctttccatcttgaacgtccggctttaccaacgttaactaattcgtgt

SEQ ID NO: 4871 - DNA, 172 bp, Staphylococcus aureus
atataaatcaacaggtaaccaatgttttaatttttcaggatctgctaacatattttcatttttaggatcgatgtaacgtaaataataccaacaactacctgcccattgtggcattgtatttgtttcacgacgtcctttcatacctgttttttcatctacaacatttacagat

SEQ ID NO: 4872 - DNA, 568 bp, Staphylococcus aureus
gaaaattttacgcattgtttctatatcaaatgcaatcgtaatgataacaagtgaacttgcgaataataatccgccgacgaaaccgccaccaggtgtataatgtcctgctaagaaaagtgaaaaaccaaagaccattaccatgaaaaagataataactgcagcaaattgcaaaattagatcattttgttgtctattcatgatttttcacctcgttaccttgcgtttgacgctttttacgtaatttaatcattgtatatacagctaatcctgcgataccaagcacagatgactcgaataaagtatccataccacggaaatcaacaagtatgacgtttaccatgtttttaccgtgagctaaatcataaacgtgctcttgataaaacttagatatcgattcaaaatgtctatttccgtatgcaattaaaccgataataatgacggacaaaccaacaccaccagcaattaaagcattagtaagctggaatgagcgcttttcattataacgatttaaatttggtaagtggtagaagcataataagaacaatgctgttgaaatagattcaacgac

SEQ ID NO: 4873 - DNA, 520 bp, Staphylococcus aureus; identical to SEQ ID NO: 4865

SEQ ID NO: 4874 - DNA, 117 bp, Staphylococcus aureus; identical to SEQ ID NO: 4306

SEQ ID NO: 4875 - DNA, 392 bp, Staphylococcus aureus
taccttcaataacagtaatatacatgtcgtccactttatcaatcatttcttcaaataatgtttgccctccaaatatgaaaacatggcccggtagttggtaaatatcttcaatagagtgaattacatcaacgccctctacgttgaaacttgtatctgaagtaagtacaacatttcgacgattcggtagtggtttaccaatcgattcaaatgtcttacgacccattactaaagtatgacctgttgataattttttaacatgcttcaaatcatttggtaggtgccaaggtaattgattttcaaaaccaattactcgttgcaagtcatgtgcaactagaatggataaagtcataattatcctccttcttctatcatttcattttttattactaagt

SEQ ID NO: 4876 - DNA, 222 bp, Staphylococcus aureus
gatagcaaagtgtctttacgcttgtttttcttacctgaacgagcatcttcacgagctttacgtgcagcttcccttgcttgttgtgctttaatcgcttttttcacaagtgatttagacaattgtcctttttcttctaaatagaatggcaatttgtctgcaacaactgaatcaacagcacttctagcttcagaagtacccaatttagatttcgtttgtccttca

SEQ ID NO: 4877 - DNA, 185 bp, Staphylococcus aureus
caacttctacagtgaagtctacgtgtccaggtgtatcgataatgtttacacggtgaccttcccaagctgctgttgttgcagcagatgtgatagtaataccacggtcttgttcttgctccatccagtccatttgtgaagcaccttcgtgtgtttcaccaattttgtggatacggccagtgtaataa

SEQ ID NO: 4878 - DNA, 136 bp, Staphylococcus aureus; identical to SEQ ID NO: 4469

SEQ ID NO: 4879 - DNA, 155 bp, Staphylococcus aureus; identical to SEQ ID NO: 4808

SEQ ID NO: 4880 - DNA, 155 bp, Staphylococcus aureus; identical to SEQ ID NO: 4808

SEQ ID NO: 4881 - DNA, 94 bp, Staphylococcus aureus
tggtgctctgtggaaatgagaaccgtgtgacataggtccacgagattgtccgtggcgtttaattgcaccttggaaacctttaccttttgataca

SEQ ID NO: 4882 - DNA, 203 bp, Staphylococcus aureus
ttcaccaccaggttcacgtaaatgaacatgaacatcgacaaatccaggtgacacaaagtgacctttcgcatctatgatgtcaacaccattgcttggttcaattgcaggtgcaatttgtttaattaccttaccatcaattaaaatatctgcttgttgtaattcgccattttgtaatactttaccgtttttaattaatttcatca

SEQ ID NO: 4883 - DNA, 260 bp, Staphylococcus aureus; identical to SEQ ID NO: 4345

SEQ ID NO: 4884 - DNA, 203 bp, Staphylococcus aureus
gtaaaagtgaagcagaagtctttttcagcataccatttagcttcccaatcacaggataataccaacacagaagtccagattggattaattttttgacccacagtattccctccttaaaagttaattaagcttctttagcttcttctttaccgtcacttacgacgattgtaatgtggcttgtacgtttgttaatcgcacttgca

SEQ ID NO: 4885 - DNA, 222 bp, Staphylococcus aureus; identical to SEQ ID NO: 4876

SEQ ID NO: 4886 - DNA, 127 bp, Staphylococcus aureus
cggcctttacgacgacggcgcgctaaaactttacggccattttttgtgctcatgcgttttctgaaaccatgaactttactatgtttacgtttatttggttgataagtacgttttaccatgcaaaaca

SEQ ID NO: 4887 - DNA, 153 bp, Staphylococcus aureus; identical to SEQ ID NO: 4861

SEQ ID NO: 4888 - DNA, 162 bp, Staphylococcus aureus
actgcactcggtctcccgtgaaaatatcgtgtctctgtccagtgctgtccaatcaattttgatccaactatacgattgtcatacgtaattaaactgccatttgcttgttgataaaaaaatatttgaccaattaacgtgatagctaacgggaataaaaatcca

SEQ ID NO: 4889 - DNA, 162 bp, Staphylococcus aureus; identical to SEQ ID NO: 4888

SEQ ID NO: 4890 - DNA, 286 bp, Staphylococcus aureus
tatctcttgcttccattatccgagcacctcctcaacttttttagcagcagcttcagtaattactaagctgtcagcattagtgatatctaaaacatttaaaccttgagcagttgtcacttgaacgccagggatgttgcgtgctgataattcaacatttacatcttcgttttcagtaactactaatacttttttaggttgttctaatgtagataatacatttttgaattctttagtttttggagcttcgaagttgaatgcgtcaactacagttaagccattctcttga

SEQ ID NO: 4891 - DNA, 235 bp, Staphylococcus aureus
gaattgcaaaaccatcataaggtgatttatcaaaccttggtatatcataagtagctacaatatcttctgctaagatatgatttagacttttttcaagtgctaccgtaattgccggcattgaactctgctgattaacgatacgttgaattgcttctttaactgggattgggtttcttttttctactaccattaaaaatcatctccaaaacttttattttttcatgatatactagat

SEQ ID NO: 4892 - DNA, 162 bp, Staphylococcus aureus; identical to SEQ ID NO: 4888

SEQ ID NO: 4893 - DNA, 174 bp, Staphylococcus aureus
aataaattatatattattgttcttctttaacatatggtaataatgccatatgacgagaacgtttgatagctgtagtcaacatacgttgatatttagctgaagtaccagttacacgacgtggtaaaattttaccgcgttctgagataaaacgttttaataattcagtgtctttgt

SEQ ID NO: 4894 - DNA, 445 bp, Staphylococcus aureus
tgtaaactcatatgaccttgttgaataccttctgacacaagcgcgcgacatgctgcaaagttttgcgctaaaccaacggcagcaactacatgacctaattcttgtgctgactctacatttagtagctctaatgaagctttagcaattggtaatacttttgtaccaccgccaacgattgccaatgtcataggcacttcaattgtaccaatcaatcgttgacgatcttgatcgtaacgccatgtagcaataccacgatactgtccgtcacgactcgcgtatgcatgcgcacttgcttctgcaccacgcgtatcatttcctgttgctaaaacaacagcatgtatgccattcataacacctttattatgtgttgctgcacgatgaatatctacttgggccaatacagaagcacgttccattcgtttggcaacctcttctccagttctct

SEQ ID NO: 4895 - DNA, 142 bp, Staphylococcus aureus
gaatttaacaacgccgtcgattttagcgaataatgtatcatcgccaccacgacctacattttcaccagggtaaattttagtaccacgttggcgatataaaattgaaccacctgttacgaattgaccgtcagcacgtttagca

SEQ ID NO: 4896 - DNA, 154 bp, Staphylococcus aureus
ataaccgagtccttgaatcatgcctccacctgtaccgataccgcctacacgacgttgtgattggccgtcgaaataatgtagtgacgtaccggtaccaacatttgcaaaaatataatctgctaagtcatggccttgctcttttaacaaaatacct

SEQ ID NO: 4897 - DNA, 265 bp, Staphylococcus aureus; identical to SEQ ID NO: 4669

SEQ ID NO: 4898 - DNA, 169 bp, Staphylococcus aureus
actatggttcttttgaatgtcacagtcgatcattttggttcacttcagcagacactgtagcagccaacatttacttggccaaattgtacctactcctttatgcaagttttgaccatttggtgctttggttaccttcactaacagcaatttcaaaattgtcattataaac

SEQ ID NO: 4899 - DNA, 286 bp, Staphylococcus aureus; identical to SEQ ID NO: 4890

SEQ ID NO: 4900 - DNA, 192 bp, Staphylococcus aureus
taattcgttcaaatctacatttttcttttctaaggctgctgcttctatacttacttgtccgccacaacaaaaatctattcccacacttctaaaaatatccgctgctttcggataatcagttactacatctgctactatgtcatttttatttatcattatagataacctcctcatttccagtgtatacaattt

SEQ ID NO: 4901 - DNA, 265 bp, Staphylococcus aureus; identical to SEQ ID NO: 4669

SEQ ID NO: 4902 - DNA, 126 bp, Staphylococcus aureus
aacaatggtttttcagataataatggcatgttgtagacaaactctgatgcaacgtgtacttcagttggtacgccagcccatttttctaaaaattctttacctactaaacctgcatggtagcttgta

SEQ ID NO: 4903 - DNA, 174 bp, Staphylococcus aureus
gtacttgaactacatctgcagtttcaatttggcttgcaactgcctcttcaacatatctattagcttgataacttgaaataattccatgaaactcatccatggctactaatactttcataaccttgaccaccttactttattatttgttgtgatacgttttttattcataaaaga

SEQ ID NO: 4904 - DNA, 192 bp, Staphylococcus aureus; identical to SEQ ID NO: 4900

SEQ ID NO: 4905 - DNA, 174 bp, Staphylococcus aureus
tgatttttttgtcttttattaaagttaataaattctcaaccgattcgtagcgaatgctcatcttacgcgtcctcctcattcatgattgtaggcactttaaattgtccatcttctgtttctttggcatttttcaaagctaattcttgtggaatacctttaattgctttatcttca

SEQ ID NO: 4906 - DNA, 167 bp, Staphylococcus aureus
ttatcgtttctggtccgtattctgttaattcattaatcggatcttttgtgatttcttctttcgattcacctttactaataatttctccagttaatggattttttagtgttggcgtcgttattgtcttctcacctttttgtccttctcttgttactttttctgtccct

SEQ ID NO: 4907 - DNA, 106 bp, Staphylococcus aureus
tcattgcacaagcaagttcgaagaagtatacgacgtaaccgaaagtttcttcatctaattgtggaatgttcactaccatgttaggaacaccaccatcagtatgcgc

SEQ ID NO: 4908 - DNA, 126 bp, Staphylococcus aureus; identical to SEQ ID NO: 4902

SEQ ID NO: 4909 - DNA, 265 bp, Staphylococcus aureus; identical to SEQ ID NO: 4669

SEQ ID NO: 4910 - DNA, 138 bp, Staphylococcus aureus
tgtgcccatctgatttagctcgctattattttcatcaactgcttgtgtgtcatttaacaatactgaatgtggctgattagcgttatcattttctgagacatttacttggtttacatctaatgcgcccgccacactttc

SEQ ID NO: 4911 - DNA, 143 bp, Staphylococcus aureus
tgccacgtaatttcgcaacatcttcagcatttttaaggttttgtaaaccatcgattgtagcacgaaccatgttgattggtgtgtttgatcctaatgatttacttaagatatcagtgatacctgctaattcaagtacggcacga

SEQ ID NO: 4912 - DNA, 284 bp, Staphylococcus aureus
cacttccagcaacaataactatatcttcgcttgttgtatttttaatttgttgtaacagttgttcaaattgtgttgacgttatatgaggacccggtgcattgatttctgtttcttgtcctgtttttaatttcacattaatacgtgtatcttcatcaacttcaataaaattcgattgaattgcactgttatttaatgtatctataatgaatttcccaggaaatccacctgcaaatcccaaggcagttgactcaacatccaatgtctttaagacgcgcgagacatta

SEQ ID NO: 4913 - DNA, 491 bp, Staphylococcus aureus; identical to SEQ ID NO: 4840

SEQ ID NO: 4914 - DNA, 256 bp, Staphylococcus aureus
tctgttttttccattgttgctgtatggaattgtacgaagttctcttcttctaatgctttgatttcttctttcgataacgctcgataccaatctttcgcttttttcgccgcaataggaacaacatctttttcaagatatccttcttttaacattgcattcgcaatttctatcgctttttgccgtttaattacttcaaattctttccatttttcggggtaacctttcattgtaaagggcattcccttaacctccaata

SEQ ID NO: 4915 - DNA, 394 bp, Staphylococcus aureus
aacactaagaagttgtcttcactttcaaggtctttaacagcaatcattgtactaatgacttcatcattttcaagttcaatagcattcactacaggaatacctttagactgtcttgataactcaggcacttcgtaacctttaagtttgtatacacgacctttgttagtaaagaacaatacatggtcatgtgtacttaaagttaccaattgactgacaaaatcttcttccaatgtattcataccttgaacaccacgaccaccacggttttgagcacgatatgtagataccggcaaacgtttaatgtagttattatggcttagtgtaattactatttgttcttctggaattaagtcttcgtcctctaagtcttcaaatccacctaattgaatttctg

SEQ ID NO: 4916 - DNA, 79 bp, Staphylococcus aureus
ttaaatcatgtcctggagatgaacctgttgctaagaagtaacgcaagctatcagcaccgtattcgtcaataacatccat

SEQ ID NO: 4917 - DNA, 394 bp, Staphylococcus aureus; identical to SEQ ID NO: 4915

SEQ ID NO: 4918 - DNA, 124 bp, Staphylococcus aureus
tgacgagctgctgcgttgatacgtgtaatccataatttacggaagtcacgtttacgttgacgacggtcacggaaagcatattgacctgatttcattacttgttgcttagctactttgtataatg

SEQ ID NO: 4919 - DNA, 160 bp, Staphylococcus aureus
gctcatcttcattcgtttcatcttctgcatcttcttttactttagcaaccgttgaaacaaattgatcatcacctaagcgaattaagcgaacaccttgtgctgcacgaccattttgagaaatatctgcaacatctagtcgaataatgacacctgcattagt

SEQ ID NO: 4920 - DNA, 165 bp, Staphylococcus aureus
agtctctttgaactttgacccataattctaagtaaactttagagcctagaagcatttctatatcacgtctcgcacgttttcctacttcttttaactttttaccgccttttccaatgacaattcctttttgcgaacctctttcaacatatatagttgcttcgatat

SEQ ID NO: 4921 - DNA, 224 bp, Staphylococcus aureus; identical to SEQ ID NO: 4863

SEQ ID NO: 4922 - DNA, 375 bp, Staphylococcus aureus; identical to SEQ ID NO: 4520

SEQ ID NO: 4923 - DNA, 209 bp, Staphylococcus aureus; identical to SEQ ID NO: 4186

SEQ ID NO: 4924 - DNA, 349 bp, Staphylococcus aureus; identical to SEQ ID NO: 4486

SEQ ID NO: 4925 - DNA, 350 bp, Staphylococcus aureus
tgcaagatattgctcaattttacctggtgatggcataaagttcttgtaaggattttcagcattaattctaaattcaattgcgtgtcctgttaatttaatatcttcttgtttatacggtaacacgtcacccatagcaacttgtaattgtaatttaactaaatcaattcctgttaccatttcagttacaggatgttctacttgaatacgtgtattcatttccataaaataaaatttattatcatttaaatcatatataaactcaattgttcccgcattttcataatttacagctttcgctgcacgaactgcggcatttcccatttcacgacgtgtttcatcatctaaaattg

SEQ ID NO: 4926 - DNA, 349 bp, Staphylococcus aureus; identical to SEQ ID NO: 4486

SEQ ID NO: 4927 - DNA, 223 bp, Staphylococcus aureus
gtcataactttgaacgctaatgcagcgaattcagctgaatcgtctgctttcgcgattacttcttcttcagggttgctagcacggtgaccaataattggtttaacgtctagtggtgaaggtaagtaatcaattacagcgtcaagcattaattgaacacctttgtttttgaaagctgtaccacaaagtactgggtagaattctacgttagtagtagcttggcgga

SEQ ID NO: 4928 - DNA, 209 bp, Staphylococcus aureus; identical to SEQ ID NO: 4186

SEQ ID NO: 4929 - DNA, 209 bp, Staphylococcus aureus; identical to SEQ ID NO: 4186

SEQ ID NO: 4930 - DNA, 224 bp, Staphylococcus aureus; identical to SEQ ID NO: 4863

SEQ ID NO: 4931 - DNA, 491 bp, Staphylococcus aureus; identical to SEQ ID NO: 4840

SEQ ID NO: 4932 - DNA, 104 bp, Staphylococcus aureus
atttaataaattaaactgaactttaggtaaaatttcttccaatgcttcattcgttaattgtcttatttttttcaggtctaattgtttaaaatcgccattaatac

SEQ ID NO: 4933 - DNA, 104 bp, Staphylococcus aureus; identical to SEQ ID NO: 4932

SEQ ID NO: 4934 - DNA, 156 bp, Staphylococcus aureus
gacgattacctagtacagaacctgcactgcctcctccaatgatgacataatcatatgatttgtttttgttactcatcgttatgacctccaaagtttgttgtatttcaaagtgagtattgcatgaaatatttgttagtggctgattggttatcgttg

SEQ ID NO: 4935 - DNA, 245 bp, Staphylococcus aureus
aatcacgatcgtgtcataactatgtccatgtcgtgcagcatatttatagaaatcaaaagtgtccatgacataaatatattgggatttaggatcaatagcatttaatccaaaattttcttcagttaaactacgagaacgattagccaaatctacacttgttgttgaagatgcctcacttgctgctattgcagaaaaagcacctgtataactaaataagtttaaaacatggcgttctttggcatatt

SEQ ID NO: 4936 - DNA, 370 bp, Staphylococcus aureus
ctaagttaatttatcgtttagtatcgatagttctatataatttatttagcatctttaccatataattcttgtttgattttagtcgtcgaaatgccttctgtacgttttaaataaatgacttcacatttatcctttaagaagtcgaattcaccttcccagtcatgtcccataacaaaaacatctacatcaaatttttcgacatcgtcttctttttgtccccagcccttttctggaatgactaaatcgacatagcgtattgattcaagcatcatttttcgttgttcataatcataataagattttttatgtttaatttgattaaattcatctgttgataatgctactattaaataatcgcccatctctcttg

SEQ ID NO: 4937 - DNA, 697 bp, Staphylococcus aureus
cattaatcgttcacttgcaactctaatagcaacaccatcacgattatcatcttgaggttcaagtgccataatacgtgggccatctttttcaaaggttgagtaatcatagttaataatttcattaatgatatttggttgtgcatgctcgtctgaatcaaaggcatcctcactgaatgataaaatttcatgtttaatgttcaatgcttttaacgtctcgtggaataacactacacctttcttcgtttcagccattttatcatgcatacttgctgacgcatcaattaacaatgtaaatgtcgcatcaaatgatttacttaaatcttgttttttgtaaaacaatttatattgatcgtcgataaaccaattaattaaatccttttgtaatcgcccttttgttaaattaaaacgtgcatctcgttgttctcgttcaatcgttttctttataatttgaattaagtctttgatttcatattgtacgtcttgtttcgattcttgatattctaaaacatattgtggctcaatttcaggaatttgccattttatttctacatttttgttcacaccatcaagttgaaatgcttggctttgaccaacagcatcgccttcttcacgatttagcgtatcgtttgatcctttgccctttttggtcatcatatcagtcatatcatctgtagcatcgccttcacgtgcttcatca

SEQ ID NO: 4938 - DNA, 491 bp, Staphylococcus aureus; identical to SEQ ID NO: 4840

SEQ ID NO: 4939 - DNA, 435 bp, Staphylococcus aureus; identical to SEQ ID NO: 4809

SEQ ID NO: 4940 - DNA, 250 bp, Staphylococcus aureus
aatcataattgtgtaaaaatgtccgcccttctaaatcaatgccttttgttaattggcgtcgtccaattataaatgatgcatttttagccaatccccattctggacgtacctcactccaatcactcgcaaaccgctgcgcttcttccactggatgattcacacgaccaatcgttggcagtttgtccaaacgttcgcgattcgcgtgttcagaaatcatcggcatcgcgtcattcaatgattcatatgcatc

SEQ ID NO: 4941 - DNA, 343 bp, Staphylococcus aureus
tacattagtggatgcacatgattttctaaattacgcgctaaccgaattctagaagacataacaattggtgtttcttcattacttttcatccattggctgatattatcatgaatattatgcgtcatcatgttgcacctcactctcagcttttagtgctttaatttcatctctaacaatggctgcttcctcaaaatcttggatttcaataagttttttcaaatattcattcttttcttcgatttttcgctttaaagctatctttttatgtgaagaatgtggtgtctttccaacgtgctcaaattgtccaccttgaactctgcggacgatatcaatgatgtcatct

SEQ ID NO: 4942 - DNA, 179 bp, Staphylococcus aureus
ttatcttttctttcgtacgtatgagcaccgaagtagtcacgttgtgcttgaattaagtttgcaggtaaatcagcagcacggtaactatcatagtaattaatacttgatgagaaaccaggtgttggtacaccattttgaacaccagttgcgacaacatcacgtaacgcatcttgatattc

SEQ ID NO: 4943 - DNA, 279 bp, Staphylococcus aureus
tgtaggatcaattatcgtaaaattgcgttctataccaattcgatctgcatcacgacgtaaaatacgaacacacattgagtggaatgttgacatccaaataacttctgcttgatcacctactaatttttgaacacgttctttcatttctcttgcagctttatttgtaaaagtaatagccaaaacattgtatggtgagacatctttttcgtctaataaataagcaattctatgtgttaaaacacgtgtcttccctgaaccagcacctgccataattaacaa

SEQ ID NO: 4944 - DNA, 261 bp, Staphylococcus aureus; identical to SEQ ID NO: 4570

SEQ ID NO: 4945 - DNA, 179 bp, Staphylococcus aureus; identical to SEQ ID NO: 4942

SEQ ID NO: 4946 - DNA, 82 bp, Staphylococcus aureus
gataatcctggattgttaggatttactgggccacttggatgagttggtctgctcggcttctctgggttttcaggtccttttg

SEQ ID NO: 4947 - DNA, 547 bp, Staphylococcus aureus
tgcccttcatatttgttacctaaatttacttttccagaaaaatgaaaactcttattagagtcaatacgtgttcctaatgtaatagcacctttttggctgtatgcatcctgtgttaacgtcacaataccggtactttgatcataggtagcattacctgacgttgtcatatattgttttaagttatctttattaactgtaattgtattagcagttactgcggttgtcgtcgctgctgacgcaaatgttgacatagctaagcgactgaaagttcgaagttttactggtgcggtgctagttgacgttgtgctagttttgtttaagttgaccgaagatggcgttgtgctttgtgaagtgttatttgatgcagtactttgatttgttgatgtattaattggttgttctgtacttgaagttgaagctacagatttagtatcagaacttgatgtagtattctttgaggatgttgattctgatgtagatgtcaatttctcttgttgattgcttgtactattagttgtcgaagtgaccttttcagacttttcacttg

SEQ ID NO: 4948 - DNA, 260 bp, Staphylococcus aureus; identical to SEQ ID NO: 4583

SEQ ID NO: 4949 - DNA, 299 bp, Staphylococcus aureus
gcctttaccaattaccataccaggtttaccagtatgaattgcaatgttgatacggtttgcagcacgttcaatctctacgtgagaaactgatgcttcttttaattcattatcaataaatttacggatttttaaatcttcgtgtaaaagtgaagcgaagtctttttcagcataccatttagcttcccaatcacggataataccaacacgaagtccgattggattaattttttgacccacagtattccctccttaaaagttaattaagcttctttagcttcttctttaccgtcacttacgac

SEQ ID NO: 4950 - DNA, 267 bp, Staphylococcus aureus
gatttcaatttactcggtgtttcataagagacttgcgtcaattgtccgcctgcagctaaattaataaagtatcgattattcattttaccaatatctactttagtagaatgaccttcaatgatgacatcaagtgcccccatgatgtcattaggtatatgcaatgcacgtccaaagtcattaacagtacccataggaatgacacctagcttaggacgattaggcttttctgcgataccattaactacttcatttaatgttccatcacca

SEQ ID NO: 4951 - DNA, 217 bp, Staphylococcus aureus; identical to SEQ ID NO: 4843

SEQ ID NO: 4952 - DNA, 134 bp, Staphylococcus aureus; identical to SEQ ID NO: 4580

SEQ ID NO: 4953 - DNA, 134 bp, Staphylococcus aureus; identical to SEQ ID NO: 4580

SEQ ID NO: 4954 - DNA, 218 bp, Staphylococcus aureus
cgataattactgattcagcaccgtcaccgcgacgagggccttgtttaaggatacgagtgtaaccaccttgacgttctgtgtaacgctctgcgatttcaccaaataatttttgaagtgcagtttgtgtagtttcatcttcgtttaagatttcaacattacgtaaagttttagctgcattacgacgagaagctaaatctccttttttacctaaagtgatt

SEQ ID NO: 4955 - DNA, 151 bp, Staphylococcus aureus
tatttcatcttccaattgctgcgtattaaagtaacctgcgcctattgtgcctaacccaccactgttacttactgatgcaactaatttcggtgtcgtacttcctgccatacctgcttgtataattggatattcaatacttaacatttgagta

SEQ ID NO: 4956 - DNA, 193 bp, Staphylococcus aureus
taacatattagctataaaaatgtacagaatcagcgttactgctaagaagtggaattgaccaccttttttccaagccatgttaccttcaatgattcccctcacgaaatcaaaaatccattcaacgaaattttgtttgccagttggtctttttttcaaattacgcgtacaaatgatagcaagtagaaaaacaaga

SEQ ID NO: 4957 - DNA, 127 bp, Staphylococcus aureus
ccatatcttcagttacatatacaggtacgtgtttacgtccgtcgtatactgcaaaagtatgtccgatgaaattagggaaaattgtagaacgacgtgaccatgttttgattacttgtttcttttcgct

SEQ ID NO: 4958 - DNA, 206 bp, Staphylococcus aureus
ccatcagatgcggcaatacctttaattaatttagacatgattatttagtcaatccttcttttgataagacgtcactgattgcttgaatggcgtcagattcatcactaccgtcagcataaattgtaatttcagcatctttaccaacaccaaggctcataacacccatgattgattttaagtttactttcttaccgttatattctaat

SEQ ID NO: 4959 - DNA, 299 bp, Staphylococcus aureus
agatcatcgattaagacaccaatatatgcatctgaacgacttaatatcttttcgcctgtgtttaacactttacctgcagcgttaatacctgccatcaatccttgtcctgctgcttcttcataaccagatgtaccattaatttgacctgcagtatataagtttttaatcattttcgtttcaagtgtaggccataactgcgttggcacaatcgcatcatattcaattgcgtagccggcacgcatcatatctgctttttcaagacctggtatcgtctctaacatttgacgttgcacatgttc

SEQ ID NO: 4960 - DNA, 395 bp, Staphylococcus aureus
cgacttgcactgaaaccagcaattgccatatgagtaattggtgcttctgtaccaccagtaatcattgcatctgcatcaccgcgttgcacaattttaaatgcttctccgattgaatttgtacctgttgcacatgctgtaactgttgcaccatttggtccttttgcacctaagtcaattgatacttgcccagttgccatatcaggaattaacattggtacgaaaaatggactcacacgtcttgggcctttatccattaattgtttatgtgcaatttcaaatgtttccataccaccgataccagaaccaatccatacaccgattcgatctgcagtattttcattgatatctaattgcgcatctttaacagcctctctagctgctacaattgcatattg

SEQ ID NO: 4961 - DNA, 183 bp, Staphylococcus aureus
gcctaaaaaggctggattttccaatgtgtcatcattacggatctcgaagttctcataacgcacatcatgtaataacatattcatgcgtgctaagttgtatgtagtattgttacgttcttgtccgaaataacgatacacttgcgtttctttaccaacacgtaacaacaatgaaccggaaccaca

SEQ ID NO: 4962 - DNA, 279 bp, Staphylococcus aureus
gttcttgataatttcttcatttaatctttcactaaattcttcggccgtgttaatgcccatgatatttaatcgatagttcattgcagcgacctcaataattaccgcaacatttctaccaggtcttacaggtattgtttttttagtgatttcagtatctaaaatacttagcgtctcttcattaagacctacgcggtcatataacttttgcttgttccagttttccaaattaatatttaatctaattcgtttttcagttaatattgaacccgcgccaaataa

SEQ ID NO: 4963 - DNA, 206 bp, Staphylococcus aureus
tgtcttcctcaaatgactgattaccgctattttggccaccttcgtaacctaattcactcttaatatccacgtggctattttcttcgatttcttcaatcacgccataattaccgtgaccattttcagttcctaaaccagaatgagaaatatgatgattgttttcagtaatttcctcgattggtccttgcgcttgaccatgttcttca

SEQ ID NO: 4964 - DNA, 127 bp, Staphylococcus aureus; identical to SEQ ID NO: 4957

SEQ ID NO: 4965 - DNA, 239 bp, Staphylococcus aureus; identical to SEQ ID NO: 4767

SEQ ID NO: 4966 - DNA, 197 bp, Staphylococcus aureus
catattcgcttaataagtcacgaacttccatttctactaattctaataattcttcatcgtcaaccatgtcaactttgtttaagaatactactaatgctggtacaccaacgttacgtgataaaagaatgtgttcacgagtttgtggcattggaccgtcagcagcagatactactaagataccgccgtccatttgagca

SEQ ID NO: 4967 - DNA, 344 bp, Staphylococcus aureus
gttacagctatgattggtgcttcagagattagataacttaactcaacttctgttaaaattttcaaacctcgtttcactgcttcatcaataatagatactgtataaggtattccaggatttttaacaattattggattattatcaagcaacgttaatggatgacttccacttacaacagaaatgcccatagattctaaatcttttgcatgagcatcttgtgataagtcttttccatcattgacagttacattcgcacctaatttacttaataatttagctgcttcataaccactttttgccaaaccgacaactaatacatttttattttctaaccctgtataatt

SEQ ID NO: 4968 - DNA, 378 bp, Staphylococcus aureus
agttttactgtcagatttcttcttatcatctgaatttgaatcagaattattcgtcgaattgctgtctacattctctgatgaaaattctacgtctattttatctttttcagtaagtttttgtcccttactaattgattggtgggacacaaaaccgctaccttttaaatttactttaatatttgttaggttttcaaaagcaatgacatcttctttcgtccatcctgacatgtcaggcatagttaagtctccatctgttaataacagtactttactatgaggtaagactttattccctgcttttatagattgtgcttttatttgtgtgccagaaccaatagtaactggttctaatgattttgcactcacattatcaatagc

SEQ ID NO: 4969 - DNA, 279 bp, Staphylococcus aureus; identical to SEQ ID NO: 4962

SEQ ID NO: 4970 - DNA, 200 bp, Staphylococcus aureus
catattcgcttaataagtcacagaacttccatttctactaattctaataattcttcatcagtcaaccatgtcaacctttgtttaagaatactactaatgctggtacaccaacgttacgtgataaaagaatgtgttcacgagtttgtggcattggaccgtcagcagcagatactactaagataccgccgtccatttgagca

SEQ ID NO: 4971 - DNA, 150 bp, Staphylococcus aureus
tgccaggcttgttgccgtcttctttaccaggttttttgttgtcttctttaccaggcttgttgccatcttctttaccaggttttttgttgtcttctttaccaggcttgttgccgtcttctttgccaggcttgttgttgtcttctttaccag

SEQ ID NO: 4972 - DNA, 518 bp, Staphylococcus aureus
taactgtacccgcttcacgaatagcaccactgaagtacaatagtttttcagttaacgttgttttccctgcatcgggatgtgaaataatcgcaaaagtctttctagactcaacttcttgctttaagttcattagtctttctcctttttatatgtttctatccaatctgttagttgtgatgcaatcgattctgcctcttcctcttctttaaaaacaaacaattgcatgagtattgcttcaaaacaagtttcttcatctaatgtcattgccatctgatatgaccaaaaccaatctggtatagcaatgattatctggttatttaatgcttcgaataaataaacatcaatagttttaccttcatcaataaatcttttattaatcaacagggccaccaccgaactttttgtaagctgcttcaaggccaattaaatcatctcgatgtggcaccttaatatgccctggcatgatttgatatggttctcttccttttgatgctaaaacgacagtatccccaggctca

SEQ ID NO: 4973 - DNA, 306 bp, Staphylococcus aureus
gcattcgcactttcaatgactggcttttcattatcctcataccgtaaatcttccacgccatataatttcaatgctttcacttgtaaatcacctcaaatttgatttaattcacaacttttttctttttaaaaatacctgtcgcaaaataacctgcaatgacaatggaattacttacgagtaaatgttccatataaaaatcagtgatttgtcttaatggcccaagcataaaagttagcattgattctaccatattaattctctccttcattttcatctaaatcgagcggcttaagtaatgctttaata

SEQ ID NO: 4974 - DNA, 136 bp, Staphylococcus aureus
catgctattcctcctgttgagatttcaatgattattttagttccatttgttgagtcgactgctaaagttccatttaaatgttgtacacgctgtgaaatacttttcacctcacaatcactatcgatacctttgccat

SEQ ID NO: 4975 - DNA, 684 bp, Staphylococcus aureus
tacaaatttttctccctttaaattaatgataatcattatcattgataatatttctcattaatagtagcagttttttgaccataatttcaatagcctttcaaataatttagtgtcaattttattgatatttgcaattaaactgaaatttaatttttcggaatgtgtattttgtttacttaaagtaaaatagaacacttaagattttgatgtctgggaatagtggaaatgataaaaactactaatgattgattaagtagtggttcttaacattagcctcagctaatgtgtacttaaaaataggaatacatgagtaaaactcatgtggaagtgataatttctaaaggaaaaagtttttctttatgttggggccccgcccgaacttgcacaatattgttagctgactttccgcctgcttttatgttggggccccgccaacttgcacattattgttagctgactttccgcctgcttctatgttggggccccgccaacttgcacaatattgttagctgactttccgcctgcttctgtgttggggccccgccaactactgccaatataaatagcattgtacatcttagagcattgatttcttactcagactcataatgagttagatacacataaaaaaagaccttcacatgtaggagacaagacgaaacgaatcgctatttcctttacatg

SEQ ID NO: 4976 - DNA, 221 bp, Staphylococcus aureus
aaagaatgcattgcgtgttgtttctaagaaatctgtagcaatttgttccataattggtgcatcgtcaacaattgcttctattgctgttgttacttttgctaattctctcaataaatcaatatctgcttcacgaccatgctcttttgcaacgatttgagacaagattgataatactgcaatttgtgcagtatatgcttttgtagatgcaactgcgatttcag

SEQ ID NO: 4977 - DNA, 250 bp, Staphylococcus aureus
gacctttagggttacgtgcttcgaaaatctcttgaatacgaggaagaccttgtgtgatatcgctacctgctaccccacctgtatggaatgtacgcattgtaagctgtgtacctggttcaccgatagattgggctgcaattgtaccaactgcttcaccaacttcaactttttcaccagtagcaaggtttttaccgtaacatttttcacaaacaccatgtcgtgcgttacaagtaaatgctgagcgaatata

SEQ ID NO: 4978 - DNA, 192 bp, Staphylococcus aureus
agccatcgcgttccccagtgattttcattaactcagcaaatgtttttaaaccttctctatcagatcgttctactgtcgtacctcgctttaaagccaagcgcacttttgaacgatttcggcgttcaaaactatttaataactcatcatcatttttatcaattggtgtaatcatagtcatacgtggttggatgt

SEQ ID NO: 4979 - DNA, 298 bp, Staphylococcus aureus
aaactcaactttagtgacatatgcttcaacttcgtcgccctcttttacaacttcacttgggctatcaatatgatgcgtagatagttgactaataggaataatcccattaaatttaccaccgttgatatgaacaacaacttgcttgtcttcaacttgttgtacctcgccagtgactttgtcaccttctttaatatcgttaatcattgattcattgaattcttcagtcatcttgtttgcctccttatacactacatatttataacatcttataaactgacagaattgtcaagaaattcta

SEQ ID NO: 4980 - DNA, 215 bp, Staphylococcus aureus
tgatgtaatgcatcaaatgaagttaagaattcagatgcattaaatttatcgttactagcaatcgtaactttagcttctaatgatttaccaataactttttcattacgagcagtttctaatgcacggttcacatcatcacgtaaattcataaatgtacgccatttatccaataaagcttgatctacttctacaactttaggcatgtctgctaagtg

SEQ ID NO: 4981 - DNA, 197 bp, Staphylococcus aureus; identical to SEQ ID NO: 4966

SEQ ID NO: 4982 - DNA, 392 bp, Staphylococcus aureus; identical to SEQ ID NO: 4236

SEQ ID NO: 4983 - DNA, 250 bp, Staphylococcus aureus; identical to SEQ ID NO: 4977

SEQ ID NO: 4984 - DNA, 239 bp, Staphylococcus aureus; identical to SEQ ID NO: 4767

SEQ ID NO: 4985 - DNA, 306 bp, Staphylococcus aureus
tgttcaccatgtataccgtaaccaagtgctctatccgataatttttcagctgcgtattgtaatgaatcaggtactgaaattgcatatttattatttataatgacacatacaaaaggaagtttgtgtacacccgcgaagtttaaaccttcatggaagtcaccttggtttgagctaccttcaccaacagttgctgttgcaattttcttcttaccatccatttttaaagctaaagcagcaccaacagcatggggtatttgagttgctaccggtgaactttgagacaaaatattcttagctctactacta

SEQ ID NO: 4986 - DNA, 237 bp, Staphylococcus aureus
cattaaataaaccatgatatcatcacgacaaccaattacacttgataaatcacatataccggttttaattaattcttgagcattgcctaaccacacatctgtaccatgagataatcctgagatttgaactaattcagaaaatgttgttggctttgtatcttctaacatttgacgcacgaatcctgtaccgaattctggtaccccaaatgtacctgttttacataaaatttcatcttc

SEQ ID NO: 4987 - DNA, 332 bp, Staphylococcus aureus
aaaaatttcacttttagttctattatcactatcattagttaattgtctcgtatggtcatgtcccatattatttatcaaatgtgcttctactttccaacctacacctttatgtgacgtagattgatcaagtaatgtacgatatgatggttgttgataactaatcgtctctgaataattactctcttttgtaatatttccagttaagcctccacgattaatcgaaaaatctccacctgttttataaccatacgtatatttaacttctcttgattcatcctgattttttggtgcaaagtcagtcacatttgtattgttgttgtcatcaacatttt

SEQ ID NO: 4988 - DNA, 424 bp, Staphylococcus aureus
tgttttaccccaatttactttgaagtttgtattttcgattgcatctaaaatatcttgtcttactttactgattgaggcaaaccattgtggtgtagcacggaagattacaggtttttttgttctccagtcgtgtggatagctatgtgtaataaagtctaattttaatagtgcacctttttctgttaataaatcagtaacggctttattagctttatcatagaacatcccttcaaattggccgccttcttcagtaaatacacctttatcatcgattggactaattactggcaattcatatttttgaccaacaatatagtcatcttccccgtgacctggtgctgtatgtacacaacctgtaccagcatctgtagtaacatgatcaccattaatcactaacgattctctgtctaagaatggatgttgt

SEQ ID NO: 4989 - DNA, 190 bp, Staphylococcus aureus
aagaaaatctcacattcttcaggacttttactagagcaatcggctaatttacctggaaggcttgctacatctaacgctgatttacgacgtgttacttcacgcgcttttttcgcagcaacacgtgcacgtgccgccataatacctttttcaaccactgtacgtgcgacttgtggattttcatataaaaatc

SEQ ID NO: 4990 - DNA, 138 bp, Staphylococcus aureus
tatgaaccgtcattacgacgaacacctgacttagtacgtacgattacagctttgacaacgtcaccttttttaacaacgccacctggtgttgcatttttaacagtacatacgataacatcgccgatgtttgctgtttta

SEQ ID NO: 4991 - DNA, 239 bp, Staphylococcus aureus; identical to SEQ ID NO: 4767

SEQ ID NO: 4992 - DNA, 156 bp, Staphylococcus aureus
atgccgcattaccaatttcttctccaaatgataaagggatgatatccttaaatgtttctacgattgtgtcattactttttttagttgatttggacatcatagtcaccgcctatcattaaattaaacccattctacgtaaatcttctgttgcagttg

SEQ ID NO: 4993 - DNA, 535 bp, Staphylococcus aureus
tatgaggtaagactttattccctgcttttatagattgtgcttttatttgtgtgccagaaccaatagtaactggttctaatgattttgcactcacattatcaatagctttttgtttgtcttgaccttcaacatctggcactttactatactctgcattagatgtgtcatcttttgatttacctacatttaaatatttcaaagtattttccattattggtttaaacgctttactaacacctaattcataagcttcttggtcatttttttgtgccaagctcataccagcgtatacaataactttaggatttttcttcggcgcgtcacccataaaacttacaaaatatgggtttggacctttaacgtatccaccaccattaggtgcagcgacttgtgctgtaccagtcttaccttcgacctcataaccatcaatacgatagtttgcagcgtgactcttcttactattcacaactaaatccaattgcttttcaactttttcagcagtatcttttgttattggtttgcctgcgatttgttt

SEQ ID NO: 4994 - DNA, 189 bp, Staphylococcus aureus
taatgcacgaccatttgctgcatatgggaatttagaagctttaattgctaaaccttcttctttagcttgcgcttctgaataaccaactgtagctaattctggttcagtaaagcatactgctggcataccaatgtaatcaacttcagcagcttgaccatcaattgcttcagcagcaactttagcttcata

SEQ ID NO: 4995 - DNA, 219 bp, Staphylococcus aureus
tgcataacttctttatcatctacaggtattgtttttggatcaattcctgataaatcttgaagcatacgaatcattgttggatcatcgtgtccaagtatatcaagttttaatacattatcatgaatagaatggaaatcaaaatgtgtcgtcatccatgctgaattttgatcatcggcaggatattgtatcggcgtaaaatcataaatatccatgtaatca

SEQ ID NO: 4996 - DNA, 353 bp, Staphylococcus aureus
caacgacagcacctaaagattttaaagtttctacagcgttttgaactgcttcttttacgtcatcagctacaccttcacctaagtattctttaggtaatgcaacttttaatcctttaatatctttaccaatttcagatgtaaagtctacatcatcaactggtgcacttgtagagtcattaacatctgcaccagaaatagcttctaatacgattgcattatcttttacatttcgagtcaatggaccaatttggtctaatgaagatgcaaaagcaactaatccaaatcgagatacacgaccgtatgttggtttcataccgacaacgccacaatatgcagccggttgtctaattgaa

SEQ ID NO: 4997 - DNA, 391 bp, Staphylococcus aureus
caatgtgagaagtattgattgtgataccacgttctttttcttctggagcgttgtcaatcatgtcatatgattgtgcaactgagtcaccattttttgctaatacagtagcgattgctgctgttaatgttgttttaccatggtcaacgtgaccgatagtaccgatattggcatgttctttagaacgatcgaatttttcttttgccattataaaatctctcctattctaattaaaaataatatttaaatttatctctcatgatagtttctcaccatcatgagaaattatttatagcgatgcaaaaagaattttacaattcttttataatgcattcaccccaaaaaatcaaactataaagatgatagcttacatttaagctcaccttgtatttta

SEQ ID NO: 4998 - DNA, 215 bp, Staphylococcus aureus
tactcaatgtgagaagtattgattgtgataccacgttctttttcttctggagcgttgtcaatcatgtcatatgattgtgcaactgagtcaccattttttgctaatacagtagcgattgctgctgttaatgttgttttaccatggtcaacgtgaccgatagtaccgatattggcatgttctttagaacgatcgaatttttcttttgccattataaa

SEQ ID NO: 4999 - DNA, 426 bp, Staphylococcus aureus
ttgattgcatataatagtaaaaacattacatcttgaacagtaatcgttttgttaagcaatgtctctaatgaggccatacaagatggttcaatttcaggatatttaaatttagtcacttcaccttttaaagcatgttcataaaatgtttgcatcatcaatgcacgttctgaaccagagccttcaacacaaagataaatttgtacagcaataccgcctctaactcttcgttgcgatatgcctgcaaatttcttaccatcgatacttaagtcaaattttcctgggcaataagaatgttcaatttccatcgtatcaatatcaacattctcattttcgaacattttgctaattaagaggtacatcacagtaaacgcttcatcaatcgttgtttctgtttgtcctttgaacatcagcgatatatttaataca

SEQ ID NO: 5000 - DNA, 190 bp, Staphylococcus aureus
taacttgtccagtttcttcgtcagtgtgtgcatggaatgttgggtcttcttcttgtaatttaactaaagcttgagtcattttatcttggtcagctttagattttggctctactgataagtgaataactggctctgggaattccattgattccaagataatgtcatttttctcaccacataaagtatcacc

SEQ ID NO: 5001 - DNA, 937 bp, Staphylococcus aureus
ctttttttaaaatttaaggctgctacgtttagttcaaatgattatgaatgacatttcatggtatcatccagcctcagtacttggagataacattttggcggtgagacagaaatcatatttttacaaaatttatttcgtcgtcccaccccaataaagaaaaagtatttctttattgttgtgtaacttctccacgttgtatttcactatccaaattttgtttcatattttcaaacaactcttgaaatctaacctcatcttgatcagaataacctttaaaaataactgaatctatattttcctcgttaaaataataaatttcatcttctacaacaccaatcggatatttacatgcagaatagtcaaacatatacttttgattttcaatttctacaattggtcctctattaataatcattaacttttgcgaaccttcttttaaataaataatgcttcctattgtttccatttattttcctcctttgtcaccgtctcaatttcaacattccttcgcatttccaagtcaatcatctcttcttccactttacgaatgccatgttgaatttgctgttgctgctcgtataacgcttccgttgaacgtcgtttcgcaaaatgaaattcatcgcggaactgttccatacgactagccatattgctactataataacgctcacctaaatgttgatataattgatctatcgaatgattaagcgcatcactttcatctatcaatgctttaacctctcgcttttcatcatataagtcatccatttgctcatgtttcgctgtgattattttattgatttcatccagtttattcgacatcatttcaccactgttttaatttttaccaatttcattaccaatcattacgtcagtttggtcaaaagcctcaccaactttttgtatattatcgctcgcagttcgtattgcttcagca

SEQ ID NO: 5002 - DNA, 145 bp, Staphylococcus aureus
ctgttcctttttgcttccatggtttacgtccgccaccgcttactgctgaacgattcttaacagcatgcgtaccttgacgtaatgaagcacgttgtaaattaatagcttcgaataaaacgctattatttggctcaataccgaatac

SEQ ID NO: 5003 - DNA, 352 bp, Staphylococcus aureus; identical to SEQ ID NO: 4373

SEQ ID NO: 5004 - DNA, 310 bp, Staphylococcus aureus; identical to SEQ ID NO: 4235

SEQ ID NO: 5005 - DNA, 225 bp, Staphylococcus aureus; identical to SEQ ID NO: 4228

SEQ ID NO: 5006 - DNA, 143 bp, Staphylococcus aureus
ttcttcatctgatgattgttgtatatcttcttcaacacgatccatgaaatcttgtcttacttcaatacgtccatcttcatcattttcttctgaatcaatcacttcagtatgaattgcatttcctggtgtttcatcatttacaa

SEQ ID NO: 5007 - DNA, 379 bp, Staphylococcus aureus
gttattccgcatcttctgaagaagatgttccgaatatatccttagaaaggaggtgatccagccgcaccttccgatacggctaccttgttacgacttcaccccaatcatttgtcccaccttcgacggctagctcctaaaaggttactccaccggcttcgggtgttacaaactctcgtggtgtgacgggcggtgtgtacaagacccgggaacgtattcaccgtagcatgctgatctacgattactagcgattccagcttcatgtagtcgagttgcagactacaatccgaactgagaacaactttatgggatttgcttgacctcacggtttcgctgccctttgtattgtccattgtagcacgtgtgtagcccaaatcataag

SEQ ID NO: 5008 - DNA, 200 bp, Staphylococcus aureus
tactttttctgtccctggtgctaaatcaggattaaatttacgttctttctcgaatggaatctcttctttttctacaatcgagtctccttttacaggtccatattttgttacgctatcgaccggtggtctaactacatctcctgtttctggattcttaattcctggtttacctggaacttcctctttctctcctgttggta

SEQ ID NO: 5009 - DNA, 192 bp, Staphylococcus aureus
tgttcggccgcaagtgctcttacaacaccgatacgttgttgttgcccacctgatagttctgctggataacgctctaaaaatgactccggtaaatccacaagtttaattaattcctttgcacgtttatccttttcctctttagtccatttcaacaatttgggtaccaacacaatattctctttaatcgtcata

SEQ ID NO: 5010 - DNA, 422 bp, Staphylococcus aureus
tgtatctcaacacttttgattaatggattctcttcgagatcattaatagcattttttttactaaacgtatacatccttgaatcatttttaacacctaaaactttgtttatctttgaagtactaacgtgattatttccatttatatttacatgcgcaattttactaagtggtgaaaacatgtaaattaatataacagcaatcaacaataccaatattgtaataacactgtattggattcgcttttgtcgcttacgtcttaacttccgcttttcttcaagtgttaatggctttaattgtgttactttactttttcgttcttttttcgttactgtttcctcatcaatcgagtcgctattttgttctttaggagctgattgaggttgttcgttgtcgactgaaattacattcgattcattttggtc

SEQ ID NO: 5011 - DNA, 163 bp, Staphylococcus aureus
cgcttgtcatgtatcactcttcatctatcacatgtacagtttcttcaccgaaaagatcttttgctttttgagcaatatctgtttgttgtgcttgttgctttggcatatcatcgccttcgtttttacgattttgtaaatattccgttcgaactctttgccattg

SEQ ID NO: 5012 - DNA, 255 bp, Staphylococcus aureus
accatatcttcagttacatatacaggtacgtgtttacgtccgtcgtatactgcaaaagtatgtccgatgaaattagggaaaattgtagaacgacgtgaccatgttttgattacttgtttcttttcgcttccttcttgagcttcaacttttttcattaaatgctcatcgacgaaaggtccttttttaatactacgagccatttgggcgcctcccttcttattatgtgcgtgcagctttaagccgcacacccaaata

SEQ ID NO: 5013 - DNA, 87 bp, Staphylococcus aureus
gtatcaagtgctccacgtacaatatggtaacgcacacctggtaagtcttttacacgtccaccacgtacaagtacaacactgtgttct

SEQ ID NO: 5014 - DNA, 197 bp, Staphylococcus aureus; identical to SEQ ID NO: 4966

SEQ ID NO: 5015 - DNA, 98 bp, Staphylococcus aureus
ccttcgatgacttcaatgattggcaaatcaaactttttagcaaattcataatctctgtcatcatgcgctggtactgccataattgctccagtaccata

SEQ ID NO: 5016 - DNA, 237 bp, Staphylococcus aureus
gctctactttctgctttcaatcctaattccatcaacacttcagagatggaaggatgtgcgtgtgttgttagtcctaattctaatgccgagccattcatgaactgtaacagtgatgcctcattaatcaattctgttacatgtggaccaatcatattaatacccacaatttcttcagttgattgatcaatcaccatttcgctatacccttcgtttgtgtcatggctatcaatcactgct

SEQ ID NO: 5017 - DNA, 174 bp, Staphylococcus aureus
aattgctggaatttctaaagaacgactcataattgcagagtgacttgttcttccgccaatgtttgtagcaaaaccttgtacgaattctttatttaattgagcagtatcagatggcgttaagtcattccctacaataacaacgctttcatcaatcatactcggattcggtaattc

SEQ ID NO: 5018 - DNA, 255 bp, Staphylococcus aureus; identical to SEQ ID NO: 5012

SEQ ID NO: 5019 - DNA, 262 bp, Staphylococcus aureus; identical to SEQ ID NO: 4394

SEQ ID NO: 5020 - DNA, 189 bp, Staphylococcus aureus; identical to SEQ ID NO: 4994

SEQ ID NO: 5021 - DNA, 395 bp, Staphylococcus aureus; identical to SEQ ID NO: 4960

SEQ ID NO: 5022 - DNA, 380 bp, Staphylococcus aureus
tttcttgcaaacgcgcaatttgcacacgatcccatggttttagatttgtatatatttttttagtttctcgttccaatgacgcttcaagcatgtcaatttcttcttgtaaatccacatcatttttatcttgagattcttttaaagattcaattttatttcgaatttcaaaaagtggtttttcaaaatctaacattatttagtcacctcttgatggatttttagaatttcagacaatgtttgacgcatatcattacgatgtacaactttatccaattgtccatgctctaataaaaattctgcagtttggaaatcatctggcaatttttcgtttattgtctgttcaataactcgacgacctgcaaaacctatcaacgcttttg

SEQ ID NO: 5023 - DNA, 278 bp, Staphylococcus aureus
gttcatcaagtaaaagaacgtttgcacttgataacatcattttacttagcatacaacgtactttttctccacctgaaagtacactagcttttttcttaacttcttctccactaaatagcatacggcctaagaagccgcgtaaaaatgtttcagtttgctcatcttctggtgcgtattgtcttaaccaatctacaaggttcatattaacgccctcaaagaattctgagttatctttagggaagtaacttaatgacgttgttacaccccatttatatgaa

SEQ ID NO: 5024 - DNA, 171 bp, Staphylococcus aureus
gcttgagcttgtccagtgaaaccaccaccatgaacgttaactaaaacatcatagttacctttagtttcagttacatcaaatggttggtttaagtctaaaattaatgattcgaatggtaagtattcgcgtacgtcacggttattaactgtgatgttaccttcacctggtact

SEQ ID NO: 5025 - DNA, 219 bp, Staphylococcus aureus; identical to SEQ ID NO: 4995

SEQ ID NO: 5026 - DNA, 225 bp, Staphylococcus aureus
ccttgaataataccaccagttggaaaatcaggacctttaatatatttcattaattgattgactgtaatatccggattatcaatatatttaagtgttgcttgaatcacttcagctaaattatgtggtggtatatctgtcgcgtaacctgcagatatacctgtagaaccattcactagtaagttaggaaatcttgatggcaataccattggttcgagtgtcgtatca

SEQ ID NO: 5027 - DNA, 371 bp, Staphylococcus aureus
tacattgtctactgctgagaattcatgtaaaactccctcaatttcaatatacttaacggctgcacctggtaatgaagatagtaggatacgacgtaaggagtttcctagtgtagtaccgtagccacgttctagtggttcaacaacgaacttaccgaatttagcatcttcactaatttcaattgtctcaattctaggtttttcgatttctatcatttaaatatcctccttatatacgtcgacttaatttaaaatgtttgctcagtgacctgtaacaataccatcataaattatacacgacgacgttttggtggacgacaaccgttatgaggtactggagtaacgtctctgatcgcagttacttctaaacctgc

SEQ ID NO: 5028 - DNA, 156 bp, Staphylococcus aureus; identical to SEQ ID NO: 4992

SEQ ID NO: 5029 - DNA, 210 bp, Staphylococcus aureus
tatactgcaaaagtatgtccgatgaaattagggaaaattgtagaacgacgtgaccatgttttgattacttgtttcttttcgcttccttcttgagcttcaacttttttcattaaatgctcatcgacgaaaggtccttttttaatactacgagccatttgggcgcctcccttcttattatgtgcgtgcagctttaagccgcacacccaaata

SEQ ID NO: 5030 - DNA, 379 bp, Staphylococcus aureus; identical to SEQ ID NO: 5007

SEQ ID NO: 5031 - DNA, 87 bp, Staphylococcus aureus; identical to SEQ ID NO: 5013

SEQ ID NO: 5032 - DNA, 155 bp, Staphylococcus aureus
caatgaaccagatgtacttgttgaagtcgaaccacttgttgattttgaatcacttaatgaatcagattcactcacgctttctgaacttcttagtgacgtcgatacacttaatgatgacgaatcgcttgtgcttactgaatcgctcatcgattgtg

SEQ ID NO: 5033 - DNA, 244 bp, Staphylococcus aureus
tactttttcaatactaatttctaattgtttcgcgtactgcgtaatattcttcttaaaattatcaagcagctctttttcaaggttatttgtaaaatataacccgataatttgcataccaatgataatcagtaatacataaacaattacaagtttagtatgaagggattgtagttgttttagccacttcattcgtttcgacctctactcatgttgttggaggaaatatccaacgcctctacgcgtc

SEQ ID NO: 5034 - DNA, 306 bp, Staphylococcus aureus
aatttttcaacttcttcaattactttatcttcagtgatattaaaactttctaatacttttgcagcaattccttcaggttctttcattaaccccaataataggtgttctgttcctatatttgaatgatttaaacgaattgcttcttcttgggcatgtgctaatacgcgctgtgcacgctcagttaatctaccaaataacataaataatgacctcctactttatatgttctcttagtatatctgctcgtttttcttttacagatttgtcatcttcttcatctaataaaaatggtgactgtatagctac

SEQ ID NO: 5035 - DNA, 565 bp, Staphylococcus aureus
atacctggcttgttgtcacgatcaaatttaataataccatctgaatcagttactgcgcttttaatttttttagctgcaacattcggctcgtctaataatgaaatgaagtttttagcattatcatcactcttactcatttttcttgttgggtcttgtaaactcatgacacgtccaccaactttaggcatacgaatttcaggtttcacaagcacatcattatagcgactattaaatctatctacaaggttacgagtcaattcgatatgctgcttttggtcatctccaactggaacgatattagtattgtaaagaacaatatcagctgccattaaaggtggatatgttaatagaccagcaggtataccttcaactgctttctgagctttatctttgtattgcgtcatacgctctaattctccaacagaagcaatcgtagttaacatccatcctgcttgtacgtgtgcagggacttcagattgtatgaacaatgttgctttgtctggatctataccagaagctaaataaatcgctgctaattgtctggtctgtttacgtaattttaaac

SEQ ID NO: 5036 - DNA, 99 bp, Staphylococcus aureus; identical to SEQ ID NO: 4353

SEQ ID NO: 5037 - DNA, 395 bp, Staphylococcus aureus; identical to SEQ ID NO: 4960

SEQ ID NO: 5038 - DNA, 210 bp, Staphylococcus aureus
tctacaaagatacatgttagttgatcacctattgctttatgcaatagtacagctacaacagatgaatctacgccgccactcatcgcacataatacacgacggtctcctacgcgttgacgaatcttttcaatttcgatttcgataaagttttccattgtccattgacctctacaatcacaaacacgacggacaaaattatttaataaatca

SEQ ID NO: 5039 - DNA, 80 bp, Staphylococcus aureus
gtacctttgaccggccattgtttctacagcaatctttttgtttctagctaaacttgctacgacagattctttatccataa

SEQ ID NO: 5040 - DNA, 219 bp, Staphylococcus aureus; identical to SEQ ID NO: 4995

SEQ ID NO: 5041 - DNA, 219 bp, Staphylococcus aureus; identical to SEQ ID NO: 4995

SEQ ID NO: 5042 - DNA, 643 bp, Staphylococcus aureus
tgcgatttcacttaaagaataatcttcaagataaaataattccaaataattacgttgtttattcgtcaataaggattgataaaaatcaaacaaataattcattcgtaacgttttaactaaatcattttgacccatgattatcgtccttttcttctgttacaatttgatcattttcaactgttgttatttcttcattttgttcaatcatatcagcgaataagccgtagacataactttcagggttaaatggttgtaagtcatctaattgctcacctaaacctacatatttaactgggatgtgcaattcattacgaatggctaatacgataccacctttggctgtaccatctaatttcgttaatacaatacctgtaacatttgttacttctttaaagtttctagcttgtgacaacgcattctgaccagttgtagcatctaaacatagtaatgcttcatgaggcgcatctggcactgctcgattaattacacgcttaactttttctaattcttgcattagatttgttttattttgtaaacgtccagcggtatcacagattaaaatatcaacacctttgtttttagcggcattaatcgcatcatacataacagcagctggatcagaaccttcactttggctaattac

SEQ ID NO: 5043 - DNA, 136 bp, Staphylococcus aureus
ctgctgaatgatgctattgattttctcatgagacatggcgataacatcgtgttcaatcggtgaatgcaatgtcatagggcttggtccatacacctttccaaaatttaaaatggcttgatttgaaaaacgaccagca

SEQ ID NO: 5044 - DNA, 521 bp, Staphylococcus aureus
aatttgtgcgatcaatttttgcatcattgtcatcaccctcttttataaaattctaataaatgcttcattaaatctttcagtaaaattgttgtcattaaatgatcttgaccatgcatcatcgttacactgtatgcaatatcatcaccttgcgcttctttagccaacaggcttgtttgtgctctatgcgcttccgcaatgcaattgtttccttcttcaatcagtgcatctgcttttgcaaaatctccagcttgagctgctgttaatgcttctaaaaacttagaacgtgcatcccctgcaaatgcaacaatttcaaaacctaataattggacttcttctctattcatagcattaatccccttttaaacttattttctttgtttccaagatgtcgcagtatcttttaatactttatttaagtcatcaatatttttgaaaccagttgtacgtaaccattcacgagcagcatcttcaccttgttcaatgtatacttgaacagcaccagaccatgtagcacggccaca

SEQ ID NO: 5045 - DNA, 404 bp, Staphylococcus aureus
gtttgataaataacttcaagatctgtttcagctaatacttgcaattcacttgaatcttcatctaatcgctctgcacgtaatttagtctgactaagcgattcttctccagtaatatatagtacttttttcttttgagataacgatgcacaaatttgtaaaagtaacgttgacttaccaatacctggatccccaccaataagtactaacgatccgctcacaatacctccacctaatacacggttgaattctgctgaatctgttaacactctcggcgttgtttcatgtttaatactatttaatttttgtactttacctgctaattccttggttttaactccatgtttaggattggctgctttttcaacaatttcctccatttgattccaagcgccacaattaggaca

SEQ ID NO: 5046 - DNA, 196 bp, Staphylococcus aureus; identical to SEQ ID NO: 4572

SEQ ID NO: 5047 - DNA, 282 bp, Staphylococcus aureus
caccttttttgatatgcatgtgggcacctccttatttgtattggttgttattaattaaagtacttctggtgctaatgatacgattttcatgaagttaccttcacgtaattcacgagcaacaggtccgaagatacgagtaccacgtgggcctttgtcatcacggatgataacacatgcattttcatcaaatttgatgtatgaaccgtcattacgacgaacacctgacttagtacgtacgattacagctttgacaacgtcaccttttttaacaacgccacctgg

SEQ ID NO: 5048 - DNA, 395 bp, Staphylococcus aureus; identical to SEQ ID NO: 4960

SEQ ID NO: 5049 - DNA, 343 bp, Staphylococcus aureus
tatgcataatcccgcctacctcttcagcatgctcctccaataagatatcgatacagtcttgagttgcttcacggttatgaatgataattggtaacttcaaacgcttagctaaagcaatttgctttctaaaaacttccttttgaacatctgcaggagatttatcccagtgataatctaatcccatttcaccaataccaatcacttttggatgctgagctaaagattcaatccattccaagtgttcttctgtaaaatcaattgcgtcaactggatgccaaccgataatgccatataaaaaatcatactcatcgattaatttcatcgcgcgttcaattgtcgattt

SEQ ID NO: 5050 - DNA, 108 bp, Staphylococcus aureus
tgttacgtcaataacgtcgccagctacaaaagtatctactgagacttcttgacctacttcgtaagcatccacgtctacattgcggaattcacgaatgaagcgcttagg

SEQ ID NO: 5051 - DNA, 153 bp, Staphylococcus aureus; identical to SEQ ID NO: 4861

SEQ ID NO: 5052 - DNA, 262 bp, Staphylococcus aureus; identical to SEQ ID NO: 4394

SEQ ID NO: 5053 - DNA, 148 bp, Staphylococcus aureus
tcccataattgcagatgataaagttgatttacctgtcccgtttggtcccataatcgcatgtatttcatcagtgttaattgtcaagttaacaccttttaagatttctttatcctcaatagacacatgtaggtctttgatttctaatgtt

SEQ ID NO: 5054 - DNA, 137 bp, Staphylococcus aureus
gcaaaccgctgcgcttcttccactggatgattcacacgaccaatcgttggcagtttgtccaaacgttcgcgattcgcgtgttcagaaatcatcggcatcgcgtcattcaatgattcatatgcatctaaagcaataga

SEQ ID NO: 5055 - DNA, 392 bp, Staphylococcus aureus; identical to SEQ ID NO: 4875

SEQ ID NO: 5056 - DNA, 244 bp, Staphylococcus aureus; identical to SEQ ID NO: 4733

SEQ ID NO: 5057 - DNA, 131 bp, Staphylococcus aureus
acgaatgtattgtagaaaaacccactacgtttttcaggtttagaatagtcacaaccagccaaaaagaccataatacctaaaaataatggtagtaacgcttttttcttcatttttccacctctatcattata

SEQ ID NO: 5058 - DNA, 137 bp, Staphylococcus aureus
catctgtgtttggcgatgaagcaatttgtgctggttcagctacattcgcaatcacttgtggttgacccttaatctgctcagctaattttactaacaacacttcaaaatgaacgttttgattcacactaaaacgaatc

SEQ ID NO: 5059 - DNA, 172 bp, Staphylococcus aureus; identical to SEQ ID NO: 4871

SEQ ID NO: 5060 - DNA, 136 bp, Staphylococcus aureus; identical to SEQ ID NO: 4701

SEQ ID NO: 5061 - DNA, 137 bp, Staphylococcus aureus; identical to SEQ ID NO: 5054

SEQ ID NO: 5062 - DNA, 134 bp, Staphylococcus aureus; identical to SEQ ID NO: 4415

SEQ ID NO: 5063 - DNA, 134 bp, Staphylococcus aureus; identical to SEQ ID NO: 4415

SEQ ID NO: 5064 - DNA, 299 bp, Staphylococcus aureus
tgcatcaactgcttctttaattttcttagttaaagaaactgtttctggtgtcgtatttgcaccttttgtctttgtttcattaatttggaaaccattagttcctaaatatgcactatttttttgtaactttctttgaattaaatgaatcatcgtcgcaatagaagttttaccatttgtacccgttacaccaaatgtcactaactgatgactcggataatcatataatgtgtgtgctagaatactagctactcttaatgtgtccggcacaaccacttgtgttacgttagctggaaagcttg

SEQ ID NO: 5065 - DNA, 401 bp, Staphylococcus aureus
agcgaaggtagcaaatataatacgacctttacaattacggaagatcttatctacgttttgaccaacttcacgttcgcttaaagtaaaatcaggcacaagtgaatttgttgagtctgaaagtaaacatagaacgccttcttcgcctaattgagccattttagcaatgtttgctggtttgcctacaggtgtaaaatcaaatttaaagtcaccggtatgaactacttttccttcaggtgtatctacgatgacgccataagtttcaggaatactatgtgtagttaagtagaaagaaatcgtaaagtgcttagatttaatcacactgtcctcattgatttcatttagtttagcagtacgtaataaatgatgttcttcaagtttattacggattaaacctaatgcta

SEQ ID NO: 5066 - DNA, 401 bp, Staphylococcus aureus; identical to SEQ ID NO: 5065

SEQ ID NO: 5067 - DNA, 385 bp, Staphylococcus aureus; identical to SEQ ID NO: 4712

SEQ ID NO: 5068 - DNA, 420 bp, Staphylococcus aureus
tttttttattcacaaaaaaactctcttcatcatgtcaacaaaaactacaacatgattatgaagagagctttaatttatatcatctgtatgagtactttatacaatttcaattatacaagtgattttacaacttgttggcatcgtggacatagatgcgtcaattcatcaacagcaccaagatcctctgaatagttccaacatctttcacatttttcaccatctgcatgttcgatgacaatatcaccatgttcataagctgttgcctgatcgtctaacttatctacaactttaacttgtgacacgataaataattgatgtaatgcatcaaatgaagttaagaattcagatgcattaaatttatcgttactagcaatcgtaactttagcttctaatgatttaccaataactttttcattacga

SEQ ID NO: 5069 - DNA, 200 bp, Staphylococcus aureus
ttctattcttcttcagtcgtaccttctgctttaccttctttagcaacagtacctttttccaatgctttccaagctaatgtggcacatttaatacgagctgggaattgagatacaccttgcaatgcttcaatatctcccatttcttctgtaatcacatagtcttcaccaagcatcattttcgtaaattcttggctcatttg

SEQ ID NO: 5070 - DNA, 361 bp, Staphylococcus aureus
ttctttcgtatcttcaattgttgtatgatcgctaacagcaccagttacaataccttttgtagaatcttcgtcaaattcaactaggttagactcagtagtaacctgaccaccacctgggtttgtatcttcttcatattcaacaacatcagcatgatgttttgaattttcatgtgtcgattcttcaaagtctacatgaatagaatcttcttcagtttcaatggtaccttctgcatgaccttctgcaccttcaacagctgtatgatattcaaaatcaattggcttagaatcattactttcttcgattgtaccagtcaattcatgcttctccactggcggctctgatttaaattcaagttcgata

SEQ ID NO: 5071 - DNA, 312 bp, Staphylococcus aureus
caactttattatttggtaatgcagcattttgtatttcagttgtatcaacttctaattccgtaccatttagtgatgccttaatatttaaatcttctaataaactcactaaagttttaacatcagagatttgcggtaacccttctaatttcacatgtccttgagctaataatgttgcaggaatgatagctacagcactgtttttcgcgccactgatattaacttccccatttagtgtgcgtccacctcttatttttattacctcttgagccatatcatttatctcctttgtccattactttttaattttttgca

SEQ ID NO: 5072 - DNA, 140 bp, Staphylococcus aureus; identical to SEQ ID NO: 4683

SEQ ID NO: 5073 - DNA, 140 bp, Staphylococcus aureus; identical to SEQ ID NO: 4683

SEQ ID NO: 5074 - DNA, 130 bp, Staphylococcus aureus
tcattagaaacgccttgttgaccttctaagattgcatctgccattttagcagttaataatttaaccgcacggatagcatcgtcgtttgctgggataacgtagtcaatttcgtcaggatcacagttagtgt

SEQ ID NO: 5075 - DNA, 229 bp, Staphylococcus aureus; identical to SEQ ID NO: 4728

SEQ ID NO: 5076 - DNA, 157 bp, Staphylococcus aureus
gcttctttttccatagtttctaaatcgtctgcaaatacttcaaatgaaattgaagcatctggaatttctttcacagcttcttcagcaaaagctttgtaatctgttacgcccgctttagccattaaactaggatttgttgtaaaaccatccacttgtt

SEQ ID NO: 5077 - DNA, 193 bp, Staphylococcus aureus
aaatcataaggggcatgatgatttgacgtcatccccaccttcctccggtttgtcaccggcagtcaacttagagtgcccaacttaatgatggcaactaagcttaagggttgcgctcgttgcgggacttaacccaacatctcacgacacgagctgacgacaaccatgcaccacctgtcactttgtcccccgaagg

SEQ ID NO: 5078 - DNA, 193 bp, Staphylococcus aureus; identical to SEQ ID NO: 5077

SEQ ID NO: 5079 - DNA, 157 bp, Staphylococcus aureus; identical to SEQ ID NO: 5076

SEQ ID NO: 5080 - DNA, 193 bp, Staphylococcus aureus; identical to SEQ ID NO: 5077

SEQ ID NO: 5081 - DNA, 270 bp, Staphylococcus aureus
agcaattttgaaggccatttcagatgaatcgacatcatggtatgaaccatcatataatttagctttaacatcaattaaaggataacctgctaaaacaccattttccatagcatctttaagaccagcttctactgatggaatgtattcacgaggaactacaccaccaacgatagcgttttcgaattcgaaacctgcgcctgtttcgtttggtgtgaattcaatgtgaacatcaccgtattgaccacgaccaccagattgacgagagaattt

SEQ ID NO: 5082 - DNA, 137 bp, Staphylococcus aureus; identical to SEQ ID NO: 5054

SEQ ID NO: 5083 - DNA, 147 bp, Staphylococcus aureus
tggagttggtccgaatacgataccaccgccacgccattgtggagcacggattgtaccttgacgagcacgacctgttcctttttgcttccatggtttacgtccgccaccgcttactgctgaacgattcttaacagcatgcgtaccttg

SEQ ID NO: 5084 - DNA, 149 bp, Staphylococcus aureus
cttgagtgacttccatttgtcgttgctttgtatctacaggatttacactaatgctatttactttgactaagatatcatcgttttctggcgttggctttctttgttcgtatactttaaataaatttccttcttccaatttaaagggcttc

SEQ ID NO: 5085 - DNA, 565 bp, Staphylococcus aureus; identical to SEQ ID NO: 5035

SEQ ID NO: 5086 - DNA, 386 bp, Staphylococcus aureus; identical to SEQ ID NO: 4803

SEQ ID NO: 5087 - DNA, 85 bp, Staphylococcus aureus
ttttcaatgctaattgtttaatgttcataataattgtagaaacatcttcaactacattgtctactgctgagaattcatgtaaaac

SEQ ID NO: 5088 - DNA, 85 bp, Staphylococcus aureus; identical to SEQ ID NO: 5087

SEQ ID NO: 5089 - DNA, 219 bp, Staphylococcus aureus; identical to SEQ ID NO: 4805

SEQ ID NO: 5090 - DNA, 307 bp, Staphylococcus aureus; identical to SEQ ID NO: 4559

SEQ ID NO: 5091 - DNA, 165 bp, Staphylococcus aureus; identical to SEQ ID NO: 4800

SEQ ID NO: 5092 - DNA, 288 bp, Staphylococcus aureus; identical to SEQ ID NO: 4836

SEQ ID NO: 5093 - DNA, 307 bp, Staphylococcus aureus; identical to SEQ ID NO: 4559

SEQ ID NO: 5094 - DNA, 98 bp, Staphylococcus aureus; identical to SEQ ID NO: 5015

SEQ ID NO: 5095 - DNA, 413 bp, Staphylococcus aureus
taaataatctgtaggctttacttcttgtgctactttagatgcaacataaccaatattgccggataatcttccagttaagcgactttttttaaacatatctccaattagagaagtaactgtcgttttaccatttgtacccgttacagctatgattggtgcttcagagattagataacttaactcaacttctgttaaaattttcaaacctcgtttcactgcttcatcaataatagatactgtataaggtattccaggatttttaacaattattggattattatcaagcaacgttaatggatgacttccacttacaacagaaatgcccatagattctaaatcttttgcatgagcatcttgtgataagtcttttccatcattgacagttacattcgcacctaatttacttaataatt

SEQ ID NO: 5096 - DNA, 204 bp, Staphylococcus aureus
tgtttaactgattctgctgattctactgactccgaagtgatgtcatgatcttcatcatgattagattcagtttgattacctatgtgatgttgaggttctgttttttcagtaccttcatgaatgcttggttcgtcagccactgtattttcagtatcatttttagcaacaccaaccgttgatgcagtagctacacctgttttttca

SEQ ID NO: 5097 - DNA, 214 bp, Staphylococcus aureus
caagtgttcagtcattatttttgctgctaatgaaactgattcttgtggtgtgattgaaccattagtccaaacatccaatgttaatttatcaaaatcactgctttgacctacacgtgtattttcaacagtatagttcacacgttcaacaggtgaatacaatgaatcaacagggattacaccaattggtaaatcactagtattattttgttctgct

SEQ ID NO: 5098 - DNA, 147 bp, Staphylococcus aureus
agtgtgtgagatactaacatgtacgataaacccttcgtaatcaatctttggtttgccaagttcgtcgttgtaacagtctatatcgttaaaagctacatgttttcctaagcctgtgcctaatgctttactgaacgcttcttttgtagc

SEQ ID NO: 5099 - DNA, 214 bp, Staphylococcus aureus; identical to SEQ ID NO: 5097

SEQ ID NO: 5100 - DNA, 308 bp, Staphylococcus aureus
tacctacaccagataacgtaccaccagtaccaacaccagctaggaacgcatcgatagttttcccttcaaattgttgtaataactcaggacctgtagttaactcatgaacttcagggttcgcagggttttcaaattgttgtggctcgaagtaaccatgttcttctttcaattctttagcttttttaattgcacctttcatcgcttctgatccaggcgttaaaactaattccgcaccgtatgcttttaataaattacgacgctcttggctcattgtttcgggcatagtaaatactgctttatatccttta

SEQ ID NO: 5101 - DNA, 175 bp, Staphylococcus aureus
atctatatcactccataaaagtgacctagatggctttattgtttgagtcgaatttgactcatacatagctttgtttaaatgctgattaacgaatttcttggattctagcagctttaccacgtaaactacgtaagtaatataatttagcacgacgtactttaccacgacgtttaac

SEQ ID NO: 5102 - DNA, 227 bp, Staphylococcus aureus
taacgtatgaaccagatgtcattgtacctgaatacacacggaagaatgttaatttaccaacataagggtcagtcataactttgaacgctaatgcagcgaattcagctgaatcgtctgctttcgcgattacttcttcttcagggttgctagcacggtgaccaataattggtttaacgtctagtggtgaaggtaagtaatcaattacagcgtcaagcattaattgaaca

SEQ ID NO: 5103 - DNA, 148 bp, Staphylococcus aureus; identical to SEQ ID NO: 5053

SEQ ID NO: 5104 - DNA, 279 bp, Staphylococcus aureus; identical to SEQ ID NO: 4943

SEQ ID NO: 5105 - DNA, 159 bp, Staphylococcus aureus
atttcaccacgagcgatttgcgcttcacgttcagcttctaattcttcttctgtcatatagcatttatatgctttatcttctgctagtaactgatctattaatggttggtagatatgttgacgttcagattgacgatatggtccgtagccattgtcttta

SEQ ID NO: 5106 - DNA, 148 bp, Staphylococcus aureus; identical to SEQ ID NO: 5053

SEQ ID NO: 5107 - DNA, 254 bp, Staphylococcus aureus
tgattattttgttcatataatgagaccgaatagccactttgtgccattcgaattgctgcagaaatcccacctaagccaccaccaataacgatgatatgtttagtcatgacgttcacctcttcgttttaatatgcgtagtaactgcgttaatctcggtcgattatagcgttgcacaataatgattggaacattagctatcattgcatagaaaatatttatatactttactaaacgagggcctttattgaatatga

SEQ ID NO: 5108 - DNA, 254 bp, Staphylococcus aureus; identical to SEQ ID NO: 5107

SEQ ID NO: 5109 - DNA, 546 bp, Staphylococcus aureus
tgtacgttcataagcactaattcctgttgttgtatctacatgatcaatactcactgtaaattgcgtaccaaagatgtcggagttatcatcaaccatttgtaccaaatccaaacgttgtgcaatatctttagacactggtgcgcatattaatccccttgcttctttcgccataaaattaatggtattatcgttcatccattcagtaaccgctactaaatcaccttcattttcacgattctcatcatctactacaataattggttctccattttttaaagccattaaagcactgtcaatattatcgaattgcatgctacccctcctaaaaaccaaatgctcttaatttatctacagataattggtctttatctttatttaaaatattttcaacatatttaaacaaaacgtctgtttctaaatgtactttatctcctaattttttggatgataaaatcgttgaacgcctcgtttctggaataagatgaatgtcaaaactgttatcatgcttatcaaataccgttagactaacaccatccacagtaatag

SEQ ID NO: 5110 - DNA, 468 bp, Staphylococcus aureus
tatatttaatagcaataatatcttcttcggtaaaataatggcgacagcgtgtttcagtatcgattaatgaaccataaactttaggcatagacaaagctccttaacttacgattcctttggatgttcaccaataatgcgaacttcacgatttaattcaatgccaaatttttctttgacggtcttttgtacataatgaataaggttttcataatctgtagcagttccattgtctacatttaccataaaaccagcgtgtttggttgaaacttcaacgccgccaatacggtgaccttgcaaattagaatcttgtatcaatttacctgcaaaatgaccaggcggtctttggaatacactaccacatgaaggatactctaaaggttgtttagattctctacgttctgttaaatcatccattttagcttgtatttcagtcattttaccaggagctaaagtaaatgcagcttctaa

SEQ ID NO: 5111 - DNA, 548 bp, Staphylococcus aureus
tgtacgttcataagcactaattcctgttgttgtatctacatgatcaatacctcactgtaaattgcagtaccaaagatgtcggagttatcatcaaccatttgtaccaaatccaaacgttgtgcaatatctttagacactggtgcgcatattaatccccttgcttctttcgccataaaattaatggtattatcgttcatccattcagtaaccgctactaaatcaccttcattttcacgattctcatcatctactacaataattggttctccattttttaaagccattaaagcactgtcaatattatcgaattgcatgctacccctcctaaaaaccaaatgctcttaatttatctacagataattggtctttatctttatttaaaatattttcaacatatttaaacaaaacgtctgtttctaaatgtactttatctcctaattttttggatgataaaatcgttgaacgcctcgtttctggaataagatgaatgtcaaaactgttatcatgcttatcaaataccgttagactaacaccatccacagtaatag

SEQ ID NO: 5112 - DNA, 163 bp, Staphylococcus aureus
gaataccttctgacacaagcgcgcgacatgctgcaaagttttgcgctaaaccaacggcagcaactacatgacctaattcttgtgctgactctacatttagtagctctaatgaagctttagcaattggtaatacttttgtaccaccgccaacgattgccaatgt

SEQ ID NO: 5113 - DNA, 546 bp, Staphylococcus aureus; identical to SEQ ID NO: 5109

SEQ ID NO: 5114 - DNA, 517 bp, Staphylococcus aureus
tggtggttgtataaaatctggattttggtcatagaactctaataaacggtctgtatatttactaatattaaagaaataactttcttctttaactagttcaacttcgtgtccagaatctggacttttgccaccaataattttaccgttttcgtattgtgggtctactaattgtgactctgtatagtatgtttcatccggaacagaataccaaccttcatattcacctaaatagatatcaccttgctttaataaacgttcaaacacttgctcaacgacatgtttatgacgttcttcagttgttctgataaaatcatcatttgaaatttcaagcttagcccacaattgtttaattccagcaatcatctcatccaaatattcaatttctgtcttaccagctttttgagctttttcttgaattttttgaccgtgttcatccgttccagtcaaatagcgaacatcatatccttgcattctcttatatcttgcaataacatctccagccactgtagaatatgca

SEQ ID NO: 5115 - DNA, 80 bp, Staphylococcus aureus; identical to SEQ ID NO: 5039

SEQ ID NO: 5116 - DNA, 201 bp, Staphylococcus aureus
tggttctcttccttttgatgctaaaacgacagtatccccaggctcagctatgtcaattgcatgttttatcccttctgcacgatcatcaaattcaatatagttttgatgtgttgcacctttggctaattctgccgttaacattttcgggtcatcatttgccggattatccggtgtgaaaatgacataatctgcacgacaggc

SEQ ID NO: 5117 - DNA, 109 bp, Staphylococcus aureus; identical to SEQ ID NO: 4318

SEQ ID NO: 5118 - DNA, 153 bp, Staphylococcus aureus
catcgaaccagatgtactcgcacttgttgagtctgatgttgaatcactaacactatcagataatgacgttgaatcactcatacttgttgatgtacttgtcgaaagcgacatactttgtgaatcactagtacttgtacgcatcgaagtactagt

SEQ ID NO: 5119 - DNA, 190 bp, Staphylococcus aureus
accgcaataatgcgctgttgtttatccaatacgattggcatttgatcccgaacccactgtggcactttacaatctataaacaggcgattcactttcttataaccatcgcgcccattcagtttaaatgtatcgccactttgtcgtgttctcactgtaagcggaaataaacattttggtaaattagaatgta

SEQ ID NO: 5120 - DNA, 262 bp, Staphylococcus aureus; identical to SEQ ID NO: 4394

SEQ ID NO: 5121 - DNA, 370 bp, Staphylococcus aureus; identical to SEQ ID NO: 4936

SEQ ID NO: 5122 - DNA, 206 bp, Staphylococcus aureus
caggatctgcttctaataatgcacgagcgattccgtgacggatagcttgagcttgtccagtgaaaccaccaccatgaacgttaactaaaacatcatagttacctttagtttcagttacatcaaatggttggtttaagtctaaaattaatgattcgaatggtaagtattcgcgtacgtcacggttattaactgtgatgttaccttca

SEQ ID NO: 5123 - DNA, 236 bp, Staphylococcus aureus
tgcttcgcttcaccaaactctgttgttttttcacgttcaatattatcttcaacttgtactacagattttaaaatgaatttacaagtatcttcttcaatattttgcatcatgatatcaaataattcatgaccttcattttgatagtcacgtaatggattttgttgtgcataagaacgtaagtgaataccttgacgtaattgatccattgtgtcgatatgatcagtccaatggctatc

SEQ ID NO: 5124 - DNA, 121 bp, Staphylococcus aureus
accatagaatgccgcttcaccaatcgcttcttcgtacgataagccaagctcatccgctgcctctttaagcatattttcagctttattccacatatcatcatcatcaaagtacttttcttta

SEQ ID NO: 5125 - DNA, 251 bp, Staphylococcus aureus
gctgtcattgttcttcccattgcagcagatgctgtcggccatgtataatgtctcgtttgtgcttcttgaacagtttcagttgtcaaagcagcataagccctaatctctccatcaaatgctaatgctttaacaatataatcgtgtgtcattatttcaatctcctctattactctatatttaaaaaattactttacttcataaaatgcaacaattgtacttattctacacccatcattctaaataatgaagta

SEQ ID NO: 5126 - DNA, 251 bp, Staphylococcus aureus; identical to SEQ ID NO: 5125

SEQ ID NO: 5127 - DNA, 275 bp, Staphylococcus aureus
cgtgtttgttgatggaggtgttgtcactttagttttcggcgttgtggattcggttgtcgtttgtgattgttcttgtttaggcgctggcgttgctgatatattaagcgttttctgctcttcttgtttaggttgtgatattttttctattttggaagctgaggttttttcctcattagtatttggtgccttttcgagtttaggcgtgcgttcttgtcttgtgttagctgcttgtgttgtcgctgaatttgcacctgctgttatgtttatcattgcta

SEQ ID NO: 5128 - DNA, 124 bp, Staphylococcus aureus
aacgctttgcgccaacttcttcagacatgtcttcactcctctaaccaaataataaatttttcaatgctgtaattcctaaatctaaggcatagaaaaagactaagaagaatataacagtagaaac

SEQ ID NO: 5129 - DNA, 361 bp, Staphylococcus aureus; identical to SEQ ID NO: 5070

SEQ ID NO: 5130 - DNA, 311 bp, Staphylococcus aureus
tctttttcttttttacctagatccatatagcgagaatacatgtcttttacagtatttcgaatgcttgttttatctttaatcatcgtgattaaatcaaagtctgacgcacgaattgtaaagtaagatgcatagtaataaagtggatgatgtactttgaaatatgcgatacgtactgccattaaaacgtatgctgctgcatgggctttagggaacatgtacttaattttaagacatgaatctaaataccaatctggcacttcattttctttcatcgtttcaatcatttcttcagttaaacctttacctttacg

SEQ ID NO: 5131 - DNA, 548 bp, Staphylococcus aureus
taaaaagattacctcaccgtttgaacctgttagtgtagcgatacctaagtcaccatgttgcaataattcatttattgatgcagttccttttaataatcctgccattaatgtgcctaatgtaccatgttggtataaaacattagtcataaaatctcccactcctctttaacatttatctttattttagttaaatacgtcaggtaacatatttgttgaaagtttgatattatctttgtaatttacaggtatatcaattaatactggaccatctgtttcatagccctctttaattgccgcttctaattcttcttgattagtaactcgtaaacctttcgcgccaaatgattctgcatattttacaaaatctacaggaccgaagtctacacctgacgaacgtttatatttcatttcttcttggaattcaaccatgttatattttccatcattccaaataagctggatgatatttaaatttttacgtacggccgtttctaaatcttgtgatgaaaataaaaagccaccatcgccagcaacggacacaacttgcg

SEQ ID NO: 5132 - DNA, 275 bp, Staphylococcus aureus; identical to SEQ ID NO: 5127

SEQ ID NO: 5133 - DNA, 124 bp, Staphylococcus aureus; identical to SEQ ID NO: 5128

SEQ ID NO: 5134 - DNA, 643 bp, Staphylococcus aureus
  misc_feature (616)..(616): n=g, a, t or c
ggactcgaaccaccgacctcacgcttatcaggcgtgcgctctaaccagctgagctataggcccattaatttgaatgaacaaacattcaaaactgaatacaatatgtcacgttattccgcatcttctgaagaagatgttccgaatatatccttagaaaggaggtgatccagccgcaccttccgatacggctaccttgttacgacttcaccccaatcatttgtcccaccttcgacggctagctcctaaaaggttactccaccggcttcgggtgttacaaactctcgtggtgtgacgggcggtgtgtacaagacccgggaacgtattcaccgtagcatgctgatctacgattactagcgattccagcttcatgtagtcgagttgcagactacaatccgaactgagaacaactttatgggatttgcttgacctcacggtttcgctgccctttgtattgtccattgtagcacgtgtgtagcccaaatcataaggggcatgatgatttgacgtcatccccaccttcctccggtttgtcaccggcagtcaacttagagtgcccaacttaatgatggcaactaagcttaagggttgcgctcgttgcgggacttaacccaacatntcacgacacgagctgacgacaaccatg

SEQ ID NO: 5135 - DNA, 211 bp, Staphylococcus aureus
ctgtcgcaataacaggtatacccgctgtgtcacctgctgtattaaacgttgataaatttcatgtaatgtttcagtatctctaataagctctctatcaattaaatcttgataaagtgccggtggttgaatttcaataaaatcataatatttggcaattttttcaacttgactctggtccttctgcataactgccgtaaataattcaccttca

SEQ ID NO: 5136 - DNA, 538 bp, Staphylococcus aureus
ggccttgcctgttcaaataatgatttatccatattattactcgcctttacttttgttatgctcatttagcattttttgataataatactcatattgatctgtaataagttctgatccaaaacgttcagcaatatctgctagcatgtttttctgaagtttgttgtataacaccttatcttcaagtaatcggatagcatagtcactcgctgaatcacaatcacccacatctacgacaaatccagtttcaccatgtttaataacctctttaattccaccggcatttgaaccaattggaacgacgcctgttttcatagcctcaagtaaagttagtccaaagctttctttttcacttaataataatactaagtcagataattggtaaaattcacttacgcaatcttgtttccctaaaaataaaacatcctcttctacgtttaactctttcgtcaattgacgcattggcactaattcaggaccatctccaagtaaaattaatttactaggtatcttttcacgtacttttgcaaatgtttctata

SEQ ID NO: 5137 - DNA, 279 bp, Staphylococcus aureus
ggcttgactcgcaggcattctttcactcacagcttgcttactttgtacaggctttaattcaggcacattgacttttgaatgctttttacgatccatcatacgctttttatcagatggcgtcatgacaacattaaatggtcttttacttaaagttgaaaccttttcagtctgtttctttggatttacgttttcaatagttttctcttcgacattttgttcactttcagctgcttcgttttgcacattttctgtaatttctgcgttattcttttctatttc

SEQ ID NO: 5138 - DNA, 547 bp, Staphylococcus aureus; identical to SEQ ID NO: 4947

SEQ ID NO: 5139 - DNA, 124 bp, Staphylococcus aureus
tttagaagttgcattgctagaagtatttacgcttgttccgaatccagtgctaccagatttacgaccatgtgatgttggtttgtcatcaaaaccagttgcaataactgttacaacaatctcatct

SEQ ID NO: 5140 - DNA, 136 bp, Staphylococcus aureus
acctgttaagaattcatctaagccttcgataccagctttttcagctgcacgacgtaccatagtgtttttgtatactttatactcaacaccagcttcacgtaattgtgaacgtaagtcagtaacttcagctactgtt

SEQ ID NO: 5141 - DNA, 309 bp, Staphylococcus aureus
aattaattcatcttcgtcaaagtcaggccataatttttgattaaagataaattcactatacgaaacttgccaaatcaagaaattacttattctttgttctcctgaagtacgaattaacaactctggatcaggatagtcttttgtcattaaatgattgtttatatatgtttcatctatgatatcactatttaaaccttgttgatgaagctcgtcaaacatatttttaatactatgaacaagttctgctctgccaccataattaattgcaaatattaattttaagccggtattattagctgtcttttcttt

SEQ ID NO: 5142 - DNA, 173 bp, Staphylococcus aureus
attctagttttatattggcgatcagttagctgaccactagtaactttatcgaagacaggtaacgttgatggaatatcgtcgtatccatatatacgtgcaacttcttcaattaaatcttctttaattgtaatatctttacgacgtgatggtactagcactgtaataacatcatc

SEQ ID NO: 5143 - DNA, 129 bp, Staphylococcus aureus; identical to SEQ ID NO: 4335

SEQ ID NO: 5144 - DNA, 776 bp, Staphylococcus aureus
cacttgttgatgttgatgtacttgctgatcctgatgcacttgtacttcttgatgtgcctttgtgaatcgcttaatgatgttgatgttgaatcggattcaccttgtactttctgatgttgagccagactctgatgtacttaccgatgtagataaacttgcaatggtcgacatgcggtttgaagttgatgtacttagcgaatcacttaatgatgctgatgtgctttgtgaatcggattcactgctttgcattgacgcagatgttgaatcacttaaagatgttgacgacaaatcggattcacttgcgcttgctgagttactgagcgatgttgacgtacttgctgatcctgagttacttgtacttgttgagtcactgagtgatgttgacgcactttctgatgttgactcacttgcacttgttgagatactttgtgaatcagattcactctctgaaccacttaatgacgctgatgtgcttaccgaacctgattgactcgtacttttagatatacttgttgaatcgcttagtgacgttgatgtcgatgtggattcactttggcttgttgactgacttgtatatgatgatgtgctttgtgaatcggattcgctcgtgcttgtacttgttgagtttgaggcactttggcttgctgagtttgagtctactccgctttgattcattgaggcacttagtgacaatgatgtactcgttgagtcagacaaacttgtactcgttgacgtacttgtacttcctgatgttgattgagacatacttatgatca

SEQ ID NO: 5145 - DNA, 239 bp, Staphylococcus aureus
atcaatatcgcttaattcttttttactacgtttcaaagccttttctacagcgccaactggtgcaatacccataatagaaggatctacaccatgacttccaaagccatcaagcactgccaatggttcgatatttaattctttagctttgtcttctgacatgactaacatcatcgcagcaccatcattgattcctgatgcattacctgctgtaactgtaccgtcttttttgaaagctggtc

SEQ ID NO: 5146 - DNA, 206 bp, Staphylococcus aureus
tctcatgatagtttctcaccatcatgagaaattatttatagcgatgcaaaaagaattttacaattcttttataatgcattcaccccaaaaaatcaaactataaagatgatagcttacatttaagctcaccttgtattttaacctaggctagctagtcaaaacaagttatattattcacctttatttttcttgataatatcttcagc

SEQ ID NO: 5147 - DNA, 269 bp, Staphylococcus aureus; identical to SEQ ID NO: 4200

SEQ ID NO: 5148 - DNA, 147 bp, Staphylococcus aureus; identical to SEQ ID NO: 5098

SEQ ID NO: 5149 - DNA, 309 bp, Staphylococcus aureus; identical to SEQ ID NO: 5141

SEQ ID NO: 5150 - DNA, 380 bp, Staphylococcus aureus; identical to SEQ ID NO: 5022

SEQ ID NO: 5151 - DNA, 640 bp, Staphylococcus aureus
gtaaataattaggggctcttatgcagttacttttataaatctttgctttaaaatacttatatttctcagcaccaattgtggtacagtttattctttaaacgctgcaactgtattcctttgtcccccttatagtttagtgattaggggctcttatacagttgcacatttagtataacgtctaaaattcccattttttaataacataatgaaaataataatgaaaaacattttataaaaagtaaaaaacaccagaagattcacttctggtgttaactagacaaaattattcagctactgcatatacagaaacttgttttttgtcgcgacctttacgttcgaatttaacaacgccgtcgattttagcgaataatgtatcatcgccaccacgacctacattttcaccagggtaaattttagtaccacgttggcgatataaaattgaaccacctgttacgaattgaccgtcagcacgtttagcacctaagcgttttgattcagagtcacgtccgttttttgtagaacttaccccttttttagatgcgaagaattgtaagtttaattttaacatcggaatgcacctcacttataatttaatctaatattctcattatattcttcttcaatagtttgtaaagacaca

SEQ ID NO: 5152 - DNA, 270 bp, Staphylococcus aureus; identical to SEQ ID NO: 5081

SEQ ID NO: 5153 - DNA, 270 bp, Staphylococcus aureus; identical to SEQ ID NO: 5081

SEQ ID NO: 5154 - DNA, 297 bp, Staphylococcus aureus
taatgactttacatttttcgcaaataggttttactgatggtcttactttcatttttatacctccctatattatggagtgacgattatttataacgataagtaattcttccgcgtgttaaatcgtacggagacatctcaacagttactttgtcgccaggtagaatacgaatgtaattcattctgattttaccacttacgtgagctaaaatctcatgaccattttctaattctactttaaacattgcgttcggtaaagtatctaatacagtaccttctaattcaattacatcttgttta

SEQ ID NO: 5155 - DNA, 193 bp, Staphylococcus aureus
tgcaacgtgttccatacctgtaccaacaaatggtgcttctggattcatcaaaggcactgcttgacgttgcatgttcgcacccatcaatgcacggtttgagtcatcattttctaagaatggaatacatgctgtcgctgctgaaacaacttgcttcggcgatacatccatataatccattttttctttagccata

SEQ ID NO: 5156 - DNA, 404 bp, Staphylococcus aureus
tacgtatcgtcattttcatctatcagccaactaccttgtttaacagtcaaaaatagcaccactatcgttaactattactatcaaaaacattcaaacacgaactaattaccataattaagaaagccctcgcatacacatgttgtatacacgagagctcttactaacaatcaacgtcatttatttttgtctcatataagggaataataatacgtctctgattgatggagagtcagttaataacataaccaatctgtcaataccgataccaagaccacctgtcggaggcataccatattctaacgcttcaatgtaatcttcatccatttcatgcgcttcatcattaccttgcgctttttcaacaagttgcgcttcaaaacgacctttttgatcaataggatcattta

SEQ ID NO: 5157 - DNA, 262 bp, Staphylococcus aureus
tgcataccaaactcaacatgcttttcaatccattcacagtctaggttgtactttgtcacccattaatgttgttacacgtttagatgaacgcaccttcatcttcaacttgtacactaattaaagttcgtgtttctgggttcatcgtcgtttcccataattgttcagggttcatttcacccaaacctttgtaacgttgtaacgtgaagcctttaccaagttctttttgcaatttattaagctcttcgtctgtccaagcgtattc

SEQ ID NO: 5158 - DNA, 107 bp, Staphylococcus aureus
taataatcccatacgacttggtatacctttgaaataccaaatgtgagaaactggagcagcaagttcaatgtgacccattctttcacgacgtactttagatttagtta

SEQ ID NO: 5159 - DNA, 234 bp, Staphylococcus aureus; identical to SEQ ID NO: 4769

SEQ ID NO: 5160 - DNA, 267 bp, Staphylococcus aureus; identical to SEQ ID NO: 4687

SEQ ID NO: 5161 - DNA, 267 bp, Staphylococcus aureus; identical to SEQ ID NO: 4687

SEQ ID NO: 5162 - DNA, 234 bp, Staphylococcus aureus; identical to SEQ ID NO: 4769

SEQ ID NO: 5163 - DNA, 992 bp, Staphylococcus aureus
  misc_feature (752)..(752): n=g, a, t or c
  misc_feature (980)..(980): n=g, a, t or c
  misc_feature (989)..(989): n=g, a, t or c
tatgtaagccattttataaaatacaaacaacacctcaaaaccaaaaaacacgagattttcactatctttcatgaaaacctcgtgtttgattataatgatagtgttcagagcactaccttctttatctatatagtcagttgatatttttaaaatttaataaccattctaccagttatagtaccattttccatttcttcaaaaatatcattgatttcttctaattttcttaattgaactttaggtgttactttattttcagcagcaaattcaaacgcttcacgtaagtcttgtcttgtaccaacaagtgaacctactacttcaataccatcaagcactaatcttgggatatctaagttcattttatcaacaggtaaaccaacggcaacaactcttgcaccagcttttacaacatcaaccgcttggttaaatggcgtcttagcaactgaagttaccactgttgcatctaatcctttgttatcagttaatttcataacttctgcaactggatcaacatctttagaattaataatagcatcagcacctaattctttcgcgaatgctaatttatcatcattgatgtcgaaggcaacaattttagcccccataacgtttttagcatattgtaaagctaggttacctaaaccacctataccaaaaacacctaaccattgtccaggttttacattacttacttttacagctttataagttgtcacacctgcgcatgtaatagaagacgctgctgctggatntaatttttcaggtactttcacagcatagtctgcagtaacaataacttgttcagccattgcaccatctactgtataaccagcatttttcacactacggcaaagtgtttcacgacctgttgtacaatattcacatcttccacagctttcgaacatccaagcgatagacacacggtctccaatttttaatgattctacatcttccgcaacttcgatgactttaccaatacnttcatgacntaa

SEQ ID NO: 5164 - DNA, 205 bp, Staphylococcus aureus; identical to SEQ ID NO: 4262

SEQ ID NO: 5165 - DNA, 329 bp, Staphylococcus aureus
taaaatttttaattagctaaaaatcatcgcattaattttttgagctacatcatcaaaattcggacattttaacgacacatataatttaattttaggttcagtaccagaaggacgtaaagcgataaatccttcgtcaaataagacacgaataacatttgatttaggagaattaatctgcgacgttgtatctttatccaaatgataaacctcgctagttaaataatcttcaattgctttcactttgagtccttgaatctcttgcggtggatttgaacggaatttggtcattattgcattaattttctttttcccttcaaatccttctagcg

SEQ ID NO: 5166 - DNA, 385 bp, Staphylococcus aureus
gtccattgtagcacgtgtgtagcccaaatcataaggggcatgatgatttgacgtcatccccaccttcctccggtttgtcaccggcagtcaacttagagtgcccaacttaatgatggcaactaagcttaagggttgcgctcgttgcgggacttaacccaacatctcacgacacgagctgacgacaaccatgcaccacctgtcactttgtcccccgaaggggaaggctctatctctagagttgtcaaaggatgtcaagatttggtaaggttcttcgcgttgcttcgaattaaaccacatgctccaccgcttgtgcgggtccccgtcaattcctttgagtttcaaccttgcggtcgtactccccaggcggagtgcttaatgcgttagc

SEQ ID NO: 5167 - DNA, 263 bp, Staphylococcus aureus; identical to SEQ ID NO: 4439

SEQ ID NO: 5168 - DNA, 576 bp, Staphylococcus aureus
tattcgcaacagttaatttgggctttacaaattttgctaattcataagcaatacctttacttgcaccacctgcgcccaaaattaaaatgtatgcattttctaaatctggataaacgctgtgcaatcctttaacataaccaataccatctgtattataccctatccacttgccatcttttatcaaaacagtgttaactgcacctgcattaatcgcttgttcatcaacataatctaaatacggtatgatacgttctttatgaggaattgtgatattaaagccttctaattcttttttcgaaataatttctttaattaaatgaaaatcttcaattggaatatttaaagcttcataagtatcatctaatcctaaagaattaaaatttgctctatgcataacgggcgacaaggaatgtgaaataggatttcctataactgcaaatttcatttttttaatcaccttataaaatagaatttcttaatacaacatcaacatttttaggaacacgaacgattactttagcccctggtcctatagttataaagcctagaccagagatcataacatcgcgtttctct

SEQ ID NO: 5169 - DNA, 147 bp, Staphylococcus aureus
aatcggcatatcaacaactacaaatgtatttggtgcgcctcttcttactgcacgaccgtgatgaatcatatctgctaacgtcacttgtacggtactttcataacctaatacagtcataccaagtgaatccccaacaagaatcatatc

SEQ ID NO: 5170 - DNA, 302 bp, Staphylococcus aureus; identical to SEQ ID NO: 4699

SEQ ID NO: 5171 - DNA, 245 bp, Staphylococcus aureus
tgttgatgtgctaccagattctgatgtactgtctgataatgacgtactctcacttgtcgaactactcactgactctgatgttgattcagacgtactttcacttaatgattcacttaaaaaggcagatgcactttgtgattctgaatcgctagtactatttgattcacttaatgatataaacgtgctctctgaagcagatattgcttcacttatagagtcgctcgttgacgttgattcacttattg

SEQ ID NO: 5172 - DNA, 214 bp, Staphylococcus aureus
aaacctgtttggaaaatccctgaatcaggaatgtttgtattcacatagcctcttaaaatacctgcaacttttggtaatttaacaactgttctaaaattaaccatttcttttttcaatgtttgcatcacttgttgctgacgtcgcacgcgtccgaagtcaccttcagggtcgtgacggaatcttgcataaccaagtaattctttaccattcaacc

SEQ ID NO: 5173 - DNA, 181 bp, Staphylococcus aureus
aatggttcaatcatttctgtaccttctttaatatcagaaactaataaacctctatcagtaccacagtcttcttcacgaacaataacatcttgtgccacgtcaacaagacgacgagtaagatatcctgagtcagctgttttaagtgctgtatcggcaagacctttacgtgcaccgtgagttg

SEQ ID NO: 5174 - DNA, 109 bp, Staphylococcus aureus; identical to SEQ ID NO: 4318

SEQ ID NO: 5175 - DNA, 126 bp, Staphylococcus aureus; identical to SEQ ID NO: 4556

SEQ ID NO: 5176 - DNA, 266 bp, Staphylococcus aureus
catggcgtttcaatgcacgtcctgcgcttaatgcgtagttgcctcctgatccaatagcgataaggtcatcatctggagcaataacttcgccagttccactgacaactaaaatagcatctttatccattacaattagcatagcttctaattgacgtaattgtttatcgcctcgccattcttgtgccaattcaacagcagctctttctaagttaccactaaactgttgtaattttgtttcgaatttttcaaataacgtaaacgcatct

SEQ ID NO: 5177 - DNA, 214 bp, Staphylococcus aureus
aaatttttaaattcttctcttagaggttcatgatatgctgattgaatatattgaataagtgatgaaacatttaaaaatttaggatttaacgaacctggtgtattcgtttgttcaacgtcgttgagacgctgtaataattcgttcaaatctacatttttcttttctaaggctgctgcttctatacttacttgtccgccacaacaaaaatctattc

SEQ ID NO: 5178 - DNA, 247 bp, Staphylococcus aureus
cacttcgtaacctttaagtttgtatacacgacctttgttagtaaagaacaatacatggtcatgtgtacttaaagttaccaattgactgacaaaatcttcttccaatgtattcataccttgaacaccacgaccaccacggttttgagcacgatatgtagataccggcaaacgtttaatgtagttattatggcttagtgtaattactatttgttcttctggaattaagtcttcgtcctctaagtcttca

SEQ ID NO: 5179 - DNA, 186 bp, Staphylococcus aureus
tgttaaaccttcacggaatgaagatgtgattggtaattcgataatcttaccagatggtgcggccatcaatccacgcatacctgctaactgtgtaaagttagatgcgttaccacgggcacctgaatcactcatcatgaagattgggttagttttatcaagtgattgcatcaattcaccttgaatttg

SEQ ID NO: 5180 - DNA, 299 bp, Staphylococcus aureus
agttgaacgtttatgaagttcagatgcaagtttcacacgttgagcctcaccacctgataacgttgtagcttgttgacctaatgtgacgtatccaagaccaacatcaactagtgtttgtaacttgcgcttaatcttaggaatattttcaaaaaattgtgttgcttcttcaacagtcatttctaaaatgtcagcaatatttttacctttgtaagtaacctctagtgtctcacgattatatcgtttaccatcacacacttcacaaggaacataaacatcaggtaaaaaatgcatttcaattt

SEQ ID NO: 5181 - DNA, 152 bp, Staphylococcus aureus; identical to SEQ ID NO: 4642

SEQ ID NO: 5182 - DNA, 226 bp, Staphylococcus aureus
taaatattgtgataaaaatgttttaaagtttttttcgccgataaaacaaatgcctgtagaatcttttttcttagcagtaacaagtccttgttcttcagcaattcgacgcacttcactcttttcgatgtcgccaattgggaacatcacttttgaaagttgttgttgagataattgattcaagaagtatgtttgatctttattattatctacaccacgtaacatttca

SEQ ID NO: 5183 - DNA, 98 bp, Staphylococcus aureus
accgccaccttgagccatatctggacgaccgccacctttaccaccaacgattggtgccatttgtttgataagatcaccggctttaacgttatttgtta

SEQ ID NO: 5184 - DNA, 126 bp, Staphylococcus aureus
gctggaatattttgatctacttctaatgcaatgtcacgagacatgcctgggaatctcggaattggctggtaattaatgtaacctaccgacacagccattaatgcatcaaaattcaactcaaaaaca

SEQ ID NO: 5185 - DNA, 181 bp, Staphylococcus aureus
tggtaaatagcccaatttcattgcactatttcctaatccttttccaaatacgccaccgttacctatcgcaagcaatgaattggaaatatggtatccagttcctgattcgaattggaatggatctgttagcgtactaaatctggcagttaaataacttggtaaccaaccagccattaatgca

SEQ ID NO: 5186 - DNA, 185 bp, Staphylococcus aureus
aatgtttagcattgcttaatgacagaagtcatctcgtactaaatattggctagtatttttttaattaaattgtcttcttatatcaactttttgttgttgtttctttcgttgctggtctactttgatttgtttacctacaatcagaagtaaacccatagcaatacttaaactaatcattgatgatc

SEQ ID NO: 5187 - DNA, 185 bp, Staphylococcus aureus; identical to SEQ ID NO: 5186

SEQ ID NO: 5188 - DNA, 284 bp, Staphylococcus aureus
tattttcttttggatccaactttactaaaaatagttcagcatctccatcttcatgcaacgcatcataaatattttcaaagtaactaatatcacgcgttaagaagccatcgcgttccccagtgattttcattaactcagcaaatgtttttaaaccttctctatcagatcgttctactgtcgtacctcgctttaaagccaagcgcacttttgaacgatttcggcgttcaaaactatttaataactcatcatcatttttatcaattggtgtaatcatagtcatacgt

SEQ ID NO: 5189 - DNA, 289 bp, Staphylococcus aureus
ctgtacctgactcacttactattttgaataagccaatttcagaagtattgcggacatgaataccaccacataattcaattgaaaatggtgccatatttactacacgcacaacatcaccatatttttcaccgaataatgccattgcgcccatttctttagctgaagcaatatccatttcttgaatgttaacgtcaatacctttccaaatttcttcatttactaagcgttcaacttgatcaatttcatcattagtcattggaccaaaatgagagaaatcaaaacgtaaacg

SEQ ID NO: 5190 - DNA, 220 bp, Staphylococcus aureus
tagttagtagcgtgaatttcttcgctttaaccgataattcgccagtatttgttttgaacattacaccttcaacaccaacgatatcgcctaaatcagcatttttccataaatcaaattcgtcatcgccaacttgatctttacgaacgtaaatttgaatttgtccagctaagtcctgaacgtgtgcaaatcctgctttacctttaccacgcttagtcattaa

SEQ ID NO: 5191 - DNA, 166 bp, Staphylococcus aureus
tgaacggtctacttttgtaggatccttaccactgaagcatccgccaccatgacgtgcatagccaccgtacgtatcaacaatgattttacgtcctgttaatcctgcatcaccttgaggtccaccgattacaaagcgtcctgtaggattgatgtagaatttagtttgt

SEQ ID NO: 5192 - DNA, 273 bp, Staphylococcus aureus
gcaacatattttttttggttgtataacttatgtgcaatcaaatgactccaaactgcatgtaaacctgcatacgttgtaatgacttctaatgttgaacgtgccgctggatcctgctcaaataccatttttatatcgtctctcattctttttaacaagatcatttcctcctcaatgattgaactacgtaaatacataattgaagtacctgcgaaattaaatatcaaaaaagcaccactaacatacaaattgtattgttagaggcgcttccgcacg

SEQ ID NO: 5193 - DNA, 166 bp, Staphylococcus aureus; identical to SEQ ID NO: 5191

SEQ ID NO: 5194 - DNA, 952 bp, Staphylococcus aureus
caccaataaaaccaacaactttattctctaataagatttcagcagtacgacctggatgtaatccatcaatatcagcacaggcgataacctaaattcaagatttaacttttcagatactcgatccacgacaccttttgctaaatagaaatcaaccgtttctttcttaccttgccattgattgactacataatctccagttaaaataccacttaaatattcaacttgatctggtagttcaccttctccattagcaaagaagacattgccgatttcaaataattttacatctttatttttgcgtgccacattatatgatgccgcttcgattaaatgtggtaataaactttgacgtaatgacgcatgcgcttcactcattggcatcaataaatcaattgtttgacgctgttgcatcgaaaatgcagtagcatcttctttagaaactaacgaatacgtaatagcttggtctaatccagcaccttctaacacttctttaaccattctagttttatattggcgatcagttagctgaccactagtaactttatcgaagacaggtaacgttgatggaatatcgtcgtatccatatatacgtgcaacttcttcaattaaatcttctttaattgtaatatctttacgacgtgatggtactagcactgtaataacatcatcatttatttctgtatcaaaccctagttgattaaaaatagtaacaatatcattttgtgacaaatcaaatccaatagtgcgattaattttatcagcagtgatgtcgattggtgtaataaatgcaccaagttctcctgaagacactctatcttttagcacttttccgtttgcataagtttgtaataaataacatgcacggtcgactgcttcatctacaaattcagtagctattcctttttcaaaacgactagatgattcactgcgtaaatttaaacgtcttgatgta

SEQ ID NO: 5195 - DNA, 112 bp, Staphylococcus aureus
tgtaataactaaagccaatataatcaaccgtgccctgctgtaaaatactgtcgtccccttcttgccatccaacatcatatccttttcgtgccaacatttttttagcatagct

SEQ ID NO: 5196 - DNA, 951 bp, Staphylococcus aureus
caccaataaaaccaacaactttattctctaataagatttcagcagtacgacctggatgtaatccatcaatatcagcacggcgataactaaattcaagatttaacttttcagatactcgatccacgacaccttttgctaaatagaaatcaaccgtttctttcttaccttgccattgattgactacataatctccagttaaaataccacttaaatattcaacttgatctggtagttcaccttctccattagcaaagaagacattgccgatttcaaataattttacatctttatttttgcgtgccacattatatgatgccgcttcgattaaatgtggtaataaactttgacgtaatgacgcatgcgcttcactcattggcatcaataaatcaattgtttgacgctgttgcatcgaaaatgcagtagcatcttctttagaaactaacgaatacgtaatagcttggtctaatccagcaccttctaacacttctttaaccattctagttttatattggcgatcagttagctgaccactagtaactttatcgaagacaggtaacgttgatggaatatcgtcgtatccatatatacgtgcaacttcttcaattaaatcttctttaattgtaatatctttacgacgtgatggtactagcactgtaataacatcatcatttatttctgtatcaaaccctagttgattaaaaatagtaacaatatcattttgtgacaaatcaaatccaatagtgcgattaattttatcagcagtgatgtcgattggtgtaataaatgcaccaagttctcctgaagacactctatcttttagcacttttcctgtttgcataagtttgtaataaataacatgcacggtcgactgcttcatctacaaattcagtagctattcctttttcaaaacgactagatgattcactgcgtaaatttaaacgtcttgatgta

SEQ ID NO: 5197 - DNA, 272 bp, Staphylococcus aureus
gcagtggtaaaccaattaaatcggcatcattaaatttaacacctgcacgttcctgacgatcatcgtacaacacatcaaatttagtattaaattcagcatatagtgcatctgctagttctcgttgatcatctttcttaggattaatagaaattaaatgtaaatcaaacggagtaactgatttaggccaaacaattccattatcatcgtgattttgttcaacaatcgcacttagcgttctagaaattccaattccgtaacaacccataattaaa

SEQ ID NO: 5198 - DNA, 950 bp, Staphylococcus aureus
caccaataaaaccaacaactttattctctaataagatttcagcagtacgacctggatgtaatccatcaatatcagcacggcgataactaaattcaagatttaacttttcagatactcgatccacgacaccttttgctaaatagaaatcaaccgtttctttcttaccttgccattgattgactacataatctccagttaaaataccacttaaatattcaacttgatctggtagttcaccttctccattagcaaagaagacattgccgatttcaaataattttacatctttatttttgcgtgccacattatatgatgccgcttcgattaaatgtggtaataaactttgacgtaatgacgcatgcgcttcactcattggcatcaataaatcaattgtttgacgctgttgcatcgaaaatgcagtagcatcttctttagaaactaacgaatacgtaatagcttggtctaatccagcaccttctaacacttctttaaccattctagttttatattggcgatcagttagctgaccactagtaactttatcgaagacaggtaacgttgatggaatatcgtcgtatccatatatacgtgcaacttcttcaattaaatcttctttaattgtaatatctttacgacgtgatggtactagcactgtaataacatcatcatttatttctgtatcaaaccctagttgattaaaaatagtaacaatatcattttgtgacaaatcaaatccaatagtgcgattaattttatcagcagtgatgtcgattggtgtaataaatgcaccaagttctcctgaagacactctatcttttagcacttttccgtttgcataagtttgtaataaataacatgcacggtcgactgcttcatctacaaattcagtagctattcctttttcaaaacgactagatgattcactgcgtaaatttaaacgtcttgatgta

SEQ ID NO: 5199 - DNA, 140 bp, Staphylococcus aureus
tattgagcttataacataaatttctatttattcttaatttaaacgaaaaaaaagatcactgatgagtcagtgatcttatgcagataaaactttacggcctttacgacgacggcgcgctaaaactttacggccattttttg

SEQ ID NO: 5200 - DNA, 614 bp, Staphylococcus aureus; identical to SEQ ID NO: 4785

SEQ ID NO: 5201 - DNA, 115 bp, Staphylococcus aureus
catatctcctggttcgtcagcacaggcaaagtgtgtaaacacgccttcaaatacaagttgctcatattgttgaatgatttcaatcacttcttgatacgttttagtatctttaata

SEQ ID NO: 5202 - DNA, 813 bp, Staphylococcus aureus
  misc_feature (794)..(794): n=g, a, t or c
gctatagttgaaacatattgtgataattgtaatggtgtataggtatcatattgaccaattgataaatctagataattacctggattatttgttaatggttcgatttgacctcttgtttcatttggtaaatctatccctgttttcacacctaagcctacttgatttaatcctcttcttagcttttgggcaggtgaacttatgtctgaaggtaaagccataccagaataataagggtctcccgctaattttaatgctgttttaaacatatatacgtttgatgaatgcatcaaagcttgcttatcattaatagttacatgcccgtttttattgaagtatgatcgttttgtcaaaccaccttggaaatgtaatggttcatcgaccattgtttctccaactttgatagctttattctgataaccggctaataatgttccaccttttacagaagatccaaccgcaaattgagaagtaaacgtaccaatgtcataatcagtcattttaccactcttattaatctgctttccggcaagcgcaagaatgtctccatttttaggattttgtacaaccatcattgcattatccatatctttggcaccttgactgcgaagcttcttaatttgtttatctaataatgcttctacttctttttgaagatctatatcgatcgttaatttcaaatcttgaccgcgagcgccaggatttaacacttctgaagatgtaactttaccagatttgtccgttgtgtatttcatttctttcttcttaccacgcaatacatcttcatattgatattntaggtaagattttccaaca

SEQ ID NO: 5203 - DNA, 310 bp, Staphylococcus aureus
ttttaaataatacaaccgcgttatttttttcgcaatatcttgctaaacgttcaaaatcaattttgaaaaatgggtaatgtgctgtaccatgaccactacctctaaatgttggtgcgaaaagaatgactttcttacctttaataattggtaattcatcttccatctcttgtttgatctgtgtcgcataagcttcatcaaatagtacatcagtacgtggaacacctgtaggcactacatttttctctttaataccaaatgcttcagcgtagaatggaatatcggtttcagatgatacataagcttttgtata

SEQ ID NO: 5204 - DNA, 119 bp, Staphylococcus aureus
aatccttcgatttgtgtaaattgatgactatgtgtcgcatcatcagagtcacgacgatacactttaccagggcaaataattttaactggaccttgaccatgacgtgattccatcgtacg

SEQ ID NO: 5205 - DNA, 155 bp, Staphylococcus aureus; identical to SEQ ID NO: 5032

SEQ ID NO: 5206 - DNA, 152 bp, Staphylococcus aureus
aaagctgataaatggcaatggcacaccagttaatggaattgttgccgaaataccgccaatgtttacaaacgtttgacttccaaagtatgtggcaatcccaacacacacaagtttataaaaatatgatgatgttttatttgcaaactggaagg

SEQ ID NO: 5207 - DNA, 173 bp, Staphylococcus aureus
taagtattaaaagcaaaataaaaagcccttattcagggctttttaagtaaaattattttacagcatcttttaatgctttaccagctttgaatgctggaactttacttgctgggatatcaatttctttaccagtttgagggttacgacctttacgtgcagcacgttcacgtacc

SEQ ID NO: 5208 - DNA, 186 bp, Staphylococcus aureus
gcaaatcgtccaccatctaattgaaccattggacgaatttctggtgggatgattggaagtacatctaaaatcatccatgaaggtttgttacctgaattacggaatgattcaacaacttctaaacgtttaattgcacgagtaagtctttgaccagtagctgattccaactcatcgcgtaacaattta

SEQ ID NO: 5209 - DNA, 174 bp, Staphylococcus aureus
caggattttcaacgctattcacaaaccatggttttaacatattaccatcattaaagaacgctgattgcgcttgtaacatttgaacaggtgttactgttgtcgattgaccaaatgatgacgttttttgttgcaactcattactccatccaatttgaccaggtgcttctccatcaa

SEQ ID NO: 5210 - DNA, 254 bp, Staphylococcus aureus
catgctctgaagcgagtttaaatacaacaggtgaaaagcgaccattattacgtggttgattttgtttagcagtagatgtctgttccactgttgcactagcttttttagtagatttctgagtatgctcatccacttttgcttgtatctcttcagttgtttcatttgtcttttcatcagcagtttcaattttacagataattgtatcaatagctactgtctgccccgcttcaactaaaatttctgtaattgttcct

SEQ ID NO: 5211 - DNA, 99 bp, Staphylococcus aureus
acactgccggaatgagtcgtttcaatcgtcgcttccaaaactctagcaaatcgattttttgcgtccgataatactcacttatcaacaaacttgttatta

SEQ ID NO: 5212 - DNA, 254 bp, Staphylococcus aureus; identical to SEQ ID NO: 5210

SEQ ID NO: 5213 - DNA, 173 bp, Staphylococcus aureus; identical to SEQ ID NO: 5207

SEQ ID NO: 5214 - DNA, 223 bp, Staphylococcus aureus
tatagcgccaacctactaaatcgccgataaccgttccaattggtacaccaaaaacattagcaccactaaaccctgtatagacaagtccaatcattttaccacgatttttaggtgctgataacatcgctgtaatagctaatacttttacgataattagtgctgctgctgcagatgagataattctaccaactactaatattgaaaaatttggcgctacagcaat

SEQ ID NO: 5215 - DNA, 155 bp, Staphylococcus aureus; identical to SEQ ID NO: 5032

SEQ ID NO: 5216 - DNA, 283 bp, Staphylococcus aureus
catcaccataaataaaaccttccatatctgttcctgtgccaataaagccatattgcgtttggcctgtcgtgccagtgcaagatttccaacgataatttctaggcgtcactgctggcgaaccatctaatggataatcataatccatcgtgcgtccaagaagtacttgattatttaaagtttgtattgtgaatcctgtgcacattgttctcactcctctgtaccttcatttactttaatcactttcaaataaagctgtttcacttaaacatactataaaaaatca

SEQ ID NO: 5217 - DNA, 173 bp, Staphylococcus aureus; identical to SEQ ID NO: 5207

SEQ ID NO: 5218 - DNA, 150 bp, Staphylococcus aureus
ggctcgtctataacgctaccatgcaattcaaacacttcgctgtttgcatttgattcaagtacatccatgatttcgtcgattttacgacgatcaagcactgtaccttcttcaactacaatttcaccagtttcagtatttacaattggctca

SEQ ID NO: 5219 - DNA, 256 bp, Staphylococcus aureus; identical to SEQ ID NO: 4732

SEQ ID NO: 5220 - DNA, 178 bp, Staphylococcus aureus
tgtttaggattggctgctttttcaacaatttcctccatttgattccaagcgccacaattaggacatttccccatccatttaggagattgataaccacaagccatacattcaaaaatcacttttttcttggccaaaattgcacctccactttcctttgaacaaatctattttaaacgca

SEQ ID NO: 5221 - DNA, 163 bp, Staphylococcus aureus; identical to SEQ ID NO: 5011

SEQ ID NO: 5222 - DNA, 101 bp, Staphylococcus aureus
ccttctaagattgcatctgccattttagcagttaataatttaaccgcacggatagcatcgtcgtttgctgggataacgtagtcaatttcgtcaggatcaca

SEQ ID NO: 5223 - DNA, 178 bp, Staphylococcus aureus; identical to SEQ ID NO: 5220

SEQ ID NO: 5224 - DNA, 424 bp, Staphylococcus aureus
gtctacttatattaggaactacaccctcgaaaaccattgttcgttttctagtaccaccttgacgttgtgtaaatgtaaattcaatttctttgtcaccagaaccatacaataaaatatcacgttgacgttctgttaactttttaaaaggtttatccatattgattttataaacttcacaaacacgttttaacaatgttggataaaaatcagaactcgtcggtatccaaggttctattgcaccttcgtttagcgtcttatctttgtcgggaacaaccaagtctacatcgactgttaacttttggcctaagccatcacatgtcggacaagcaccaaaaggactgttaaagctaaacattcttggttctaactctccgattgaaaatccacatataggacaagcatggctttctgaaaacttaaggtc

SEQ ID NO: 5225 - DNA, 708 bp, Staphylococcus aureus
tgaagtgttttgattcgttaaattaagtaatgctttggcagtcgcattatccaacgaaacaaagtaatgaataatcaataatattgagaatacgattgatgcagttgcaataaagcgtcctgttttaatttctttattcgttctatcagccatttgtttactcctcatatatttaaatacgttctataaaacctttatttaattttaccttttaataaaagtgaataccctgtcatacaatattcatttcaacataaatttattataccagtttaagaatacaagttaaatatgtgttattagttacctcatgattattagtctgttatgattaatacttcaaaataaaaaacctaccacagtctcaactctgtggcaggctataaatttaagcgtgaacttatttaagcgtgaactcaaaatctttatttaatttataccgtcataataatcctcaactaaaattatgtcagcatttgattataaagaaaattatttatctaagttatagaatgatttgataccgtcatatttagcagtttcaaataattcatcttcgatacgtaataattgattgtatttagcaatacggtcagtacgtgataatgaaccagttttaatttgaccagcgtttgtagcaacagcaatatcagcaattgttgtatcttctgtttcacctgaacggtgagaaactactgctgtgtaacc

SEQ ID NO: 5226 - DNA, 208 bp, Staphylococcus aureus
catcatgtgattgatctaagtcatttactaaacattcgaatgggtattcttgatgctcgtatgcctccaaactcatttccttaacctcttgtaaaaactgtgtccacattttatcaggtgacggttgccctctatataccaacgtattagcaaacatgcctagcatttgctccgtgcctttatgcatacgcgcactcatcacactacc

SEQ ID NO: 5227 - DNA, 164 bp, Staphylococcus aureus
ccttgcatagctgtaccgatagctaataacagaccagctgctggtaaaatcgcaacaggtaacattagcgctttaccaatacgttgcaattgaccgaaaagtttcttcctcacttgtccaacctccaaagttgtatttattatttaagattcaataaaaaaaga

SEQ ID NO: 5228 - DNA, 161 bp, Staphylococcus aureus
gcttttttagctgctttagcaatacctttttcacgtaggtagtcaatcgctttatcgatgtcaccatcagtttcagttagcgcttttttacaatccatcatacccgcgccagttttttcactaattctttaacaagttttgctgaaatagttgccattcat

SEQ ID NO: 5229 - DNA, 181 bp, Staphylococcus aureus
tattaacatcctcgcctgtatgtccatcggaagtccaccctgtataagatttatcatttactggcttctgaatagcagtgttgtagggcttttgtttgcgtttctacttctgcggatttttcgtctttttcttttttaagtagtctttttagctttttattctcttttttaacctttttca

SEQ ID NO: 5230 - DNA, 164 bp, Staphylococcus aureus; identical to SEQ ID NO: 5227

SEQ ID NO: 5231 - DNA, 197 bp, Staphylococcus aureus
ctttccatcttgaacgtccggctttaccaacgttaactaattcgtgttgtaggttaccaacttgaccgattgtagcacggcaagtagataagatcatacgaacttcaccagatcttaatctgattaatacgtatttaccttctttaccaagtacttgagcacttgcaccagctgaacgagcgatttgtccaccttta

SEQ ID NO: 5232 - DNA, 340 bp, Staphylococcus aureus
aatacattgtaattcaccacgtgctaatgccggcttcaaaatattcgaagcatcgatagcaccttcagcaccaccagcaccaactaaagtatgcaactcatcaataaataggatgacattacctgcttgttggatttcttccataacctttttcagacgctcttcaaattcaccacgatatttagtacctgcaactactgttcccatatctaaagacataacacgcttatcttttaatgtctctggtacctcattattcactatggcttgcgctaaaccttcagcaatagcagttttaccaacacctggctctccaataagcacaggattgtttttcgta

SEQ ID NO: 5233 - DNA, 154 bp, Staphylococcus aureus
actgacacaacataacacaacccatacactaactatcgtgtcatgtaatcttgcatccgatcttgcaacgctgtaaatgtttcgaagccatcctcttctaagaagtgccctccatcttccacgatttgcaagttcccctctaatgcattcatta

SEQ ID NO: 5234 - DNA, 349 bp, Staphylococcus aureus; identical to SEQ ID NO: 4486

SEQ ID NO: 5235 - DNA, 218 bp, Staphylococcus aureus
accttttttaattgaagttctgatttctactaaaccttttttaggtccaggtacgttaccttttactaagataactttgttttctgtgtcaacttgaactacttctaagttttgaacagttacagtgtttccacccatacgtcctggcattttttggcctttaaatactctagaagcatctgaagccatacctacagaacctggtgctctgtggaaat

SEQ ID NO: 5236 - DNA, 436 bp, Staphylococcus aureus; identical to SEQ ID NO: 4463

SEQ ID NO: 5237 - DNA, 316 bp, Staphylococcus aureus
tactgagcgatgttgacgtacttgctgatcctgagttacttgtacttgttgagtcactgagtgatgttgacgcactttctgatgttgactcacttgcacttgttgagatactttgtgaatcagattcactctctgaaccacttaatgacgctgatgtgcttaccgaacctgattgactcgtacttttagatatacttgttgaatcgcttagtgacgttgatgtcgatgtggattcactttggcttgttgactgacttgtatatgatgatgtgctttgtgaatcggattcgctcgtgcttgtacttgttgagtttga

SEQ ID NO: 5238 - DNA, 145 bp, Staphylococcus aureus
gccatacctaagtgtagctctaatacttgtccgatgttcatacgagatggtacaccaagaggatttaacatgatatcgatcggacgtccatctggtaagtaaggcatatcttcttcaggaacaatcttagaaatgacacctttgt

SEQ ID NO: 5239 - DNA, 225 bp, Staphylococcus aureus; identical to SEQ ID NO: 4255

SEQ ID NO: 5240 - DNA, 437 bp, Staphylococcus aureus
catgtccacaacttggacaatgggttggcatatgatatgtgacagcatcctcaggtctacgttctggaatactacgtacaacttcaggtatgatgtcacctgcttttttcactacaacactatcaccaattcgaatatctctgtcatgaattaaatcctcattgtgcaaagatgctcttgatacagttgtaccagctacttttactggttctaaaatagcagtaggtgtgactacacctgttcgtccaatacttaattcaatatctaataatttagttactacttcctcagctggaaatttataagcaatggcccatctaggagatttttgtgtgaatcccatctcatcctgttgatctaaatcattaaccttaataacaatcccatcaatatcataaggtaatgactctctttggcttgtccatttttcaatatac

SEQ ID NO: 5241 - DNA, 145 bp, Staphylococcus aureus; identical to SEQ ID NO: 5238

SEQ ID NO: 5242 - DNA, 203 bp, Staphylococcus aureus; identical to SEQ ID NO: 4399

SEQ ID NO: 5243 - DNA, 324 bp, Staphylococcus aureus
tcatttaaactttctaacttaatttgttcttctgatttttctaagcgtctaattttagaagatattctctcagccattatttatccacctgatttcccgggaaaacataatctgaacgttcccattttttctgtacttgaacactgtactgcggttgacgttttttattgacacggaaattattagggttcaacggtgacttaccacgtttcgtaattacctccaaacgacagctagtacgtttataagatggtgtatccgtgtattgatcaacatcactattagttaataagttaattgcacctagatctccattttccatcg

SEQ ID NO: 5244 - DNA, 209 bp, Staphylococcus aureus
tgattatcatttttagtattgtcttcttgatttagttgctgcatatcaactttatcactcgattgattatcacttgctgaagttgtcgcttcgttcaattctttattagtactttctgcagcctttgcttcttggttccccagaccaaaaattaatgttgtacctactaaaattgatgcttttcccactgtgtactttctaatcgaaaa

SEQ ID NO: 5245 - DNA, 485 bp, Staphylococcus aureus
tattagactattcagcttctctaatttcttctgccacatctttatagtctattttcgctttaacaaacgtctcgttatttaccgggaaatgttgttggaatgtttcaaagttttgtatctcaacgacaacgtcatccacttcaaagtcaagaacatgtccaccataagctctttcatcatccgcaaaatgtatatgaaaaccagcagaccctacgccatgaaataattctggtgtaaaaaatccaacaatggcaccacgaatatcttgtcttttttcctcaggttgtctgcgtgctgaatcaatcaaacgtgtatatggcggttgctgagcaggcatcattcgtacatgcatatgtttaaatgtgccataaattttaacagccgaaaataaattctcacttaacatttcatttttaatttgtgcaaatacatcatcttgtgataattgttgcaatggaaatgtcttactcgctttaaaattagta

SEQ ID NO: 5246 - DNA, 234 bp, Staphylococcus aureus
taaagatagatgtaccttgaccttctacactgtttgcccaaatacgaccattgtgcgcttccacaatctctttcgaaatggctagtcctaatccagtaccacccattttacgcgtacgtgccttatctacacgatagaatcggtcgaatatcttatcgactttattgataggaataccaatgccattatctttaatacgaatcgtcattcgattataaagtggattttgtttca

SEQ ID NO: 5247 - DNA, 234 bp, Staphylococcus aureus; identical to SEQ ID NO: 5246

SEQ ID NO: 5248 - DNA, 384 bp, Staphylococcus aureus
ctcacttgtcgaactactcactgactctgatgttgattcagacgtactttcacttaatgattcacttaaaaaggcagatgcactttgtgattctgaatcgctagtactatttgattcacttaatgatataaacgtgctctctgaagcagatattgcttcacttatagagtcgctcgttgacgttgattcacttattgaatcagactctgatgtacttaagcttgtggaatcactcatagatgttgatgtacgttctgaattacttgtacttaacgatgtcgaagtacttaccgaaccagatgtgctcgtagaagcactttgtgatattgattcacttgatgcagttgatgctgatttgctatcactcgttgaatcactaaacga

SEQ ID NO: 5249 - DNA, 209 bp, Staphylococcus aureus
ccttcaacaccaacgatatcgcctaaatcagcatttttccataaatcaaattcgtcatcgccaacttgatctttacgaacgtaaatttgaatttgtccagctaagtcctgaacgtgtgcaaatcctgctttacctttaccacgcttagtcattaatcgtccagctatagcgacatgactatccgcttctttttctaccaattcttcttt

SEQ ID NO: 5250 - DNA, 209 bp, Staphylococcus aureus; identical to SEQ ID NO: 5249

SEQ ID NO: 5251 - DNA, 171 bp, Staphylococcus aureus
ttcaacaatctctactaaacgaaaacgttttgttgctgataaaggacgagtttcttgaattttaacaatgtctcctaatttagctgaattgttttcatcatgagttttgtattttttagagtattttactcgtttaccgtataatttgtgtgttttgtaagtttcaacaag

SEQ ID NO: 5252 - DNA, 203 bp, Staphylococcus aureus
tcattagaagtcgtttcattacttgtttgattcactaattcctccgcatttgtattgcttgattgagttgttgccggtgtattagcttgattcgttgtcgtagtagtagcttcaccagttaccggcgtttcttccgtagttgcatttgttgatgatgattgtgtcgtttcctgttgtgctggattttgcgccacactcgtttc

SEQ ID NO: 5253 - DNA, 373 bp, Staphylococcus aureus
caacgcttcttatatgaaaatgaccaccattgtcgtcataattgatatctggtctctcagatgtcaatcctataatcgcattaacactaccaaacaatacagctgaagctccagcacaaacgatatcatgaccatattcaccatggtcagcatggccatccataataacgtctgttactttgccttcatcattaactgtaatatcaacagtaatcataataattacgcgttgattttatcgattgttaatttagtgtatggttgacgatggccttttttacgttttgaatttttacgacgtttgtatgtgaatacagtgatttttttaccgcgaccttgtttattaacagtagcagtaactgttgcaccttca

SEQ ID NO: 5254 - DNA, 260 bp, Staphylococcus aureus; identical to SEQ ID NO: 4345

SEQ ID NO: 5255 - DNA, 98 bp, Staphylococcus aureus
cggataccttttccgccaccgccagcagtagctttaatgatgaccggatagccaatttttttggcgattttcttagcttctgagacgtctttcattaa

SEQ ID NO: 5256 - DNA, 138 bp, Staphylococcus aureus; identical to SEQ ID NO: 4990

SEQ ID NO: 5257 - DNA, 94 bp, Staphylococcus aureus
gatccatcactttgtcgtcaccaattggttgtgtatctttaccagacttactacctttgctaccttgttgtcctttagctggttgttcacttac

SEQ ID NO: 5258 - DNA, 155 bp, Staphylococcus aureus
acgtttgaaatcgataacacggtattgacgtttgtgtccaccaccatggtgtcttacagtcaatttaccttggttgttacgtcccgcttttttcggtagcggttttaataatgacttttcaggtgtagttttcgtgatttctgcgaaatctaacg

SEQ ID NO: 5259 - DNA, 267 bp, Staphylococcus aureus
ctttcaatttatacactgaagtagtctagctgaatgtggtttaatgttattaattctaactcatatttaatttaagtcacacgttagaagaaaaaattaaattaggattttggccacgtgtatcttgtatatgcaagttcacgtttgtgtgcatttcgtatataatgattttcaattactttttgttcttctggcgtaactggcttaccttctaaataattatcaatcgcctcataagttacacctaatgcatcttcatctggaagc

SEQ ID NO: 5260 - DNA, 349 bp, Staphylococcus aureus; identical to SEQ ID NO: 4486

SEQ ID NO: 5261 - DNA, 170 bp, Staphylococcus aureus
tgataagttagtacgaacacgagcatgtctttttaaacgcactttatttttatcaattttactgatcatttcaatactcctttctttagagtttatctattatttaccagttttaccttctttacggcgaacgtattcaccttggtaacgaatacctttacctttgtaag

SEQ ID NO: 5262 - DNA, 312 bp, Staphylococcus aureus
tcatttgattttgaatataatgtatattgactatgttcacctgtcactacatgtgcagctacaatacgatgtggatttttctttaattcttttaataaagttattccacgttgtgctcttttagcaacttgtaagattttaaaactaatacgttttaacgagccgcgttgtgtggccatcaatatagtatcattttcagaaacaccttctgtcataacaacgaaatcttcagctttaagatttattgatttaacaccagctgcccttaatccggtatctgatagttcacttgtattatacgttaatgacata

SEQ ID NO: 5263 - DNA, 219 bp, Staphylococcus aureus
accttttttaattgaagttctgatttctactaaaccttttttaggtccaggtacagttaccttttactaagataactttgttttctgtgtcaacttgaactacttctaagttttgaacagttacagtgtttccacccatacgtcctggcattttttggcctttaaatactctagaagcatctgaagccatacctacagaacctggtgctctgtggaaat

SEQ ID NO: 5264 - DNA, 695 bp, Staphylococcus aureus
gctcaaaatctaaatttaaataatcgtgatttgtcttaccttgtagtactggataatttaatgatgttcctgataattttatccatccaacaatgtctttatttattttttcaagtgattcaaattgtggtctcacatgttcttgatgtttgctcatcagcatttgaaatttttgttgtaatttctcataatttgcgcgttcttgcttgtcttcaatatatgtttgaacaattttgtaaccaaaaatgataataattacaaccaataaaatttgtacaatagttaaaaatcgcttcattctcataaaaatcctcttttattaacgacgtttcttcagtcatcactaaaccagttgttgtaccgttttagattcgatttcgttgactttgacaaattaagtaaattagcattggaccaccgacaatcattaaaatagcattggctggaatttctaaaggaggctgtatcactcgtcctaataaatcagccactaacaatagccatgcaccaataactgtagaaaacggaataagtactctgtaattgcccccaactagctttctaaccacatgtgcacaataatacctaaaaaggctagttgtccaacaatcgcaacagttgcacttgctaaaaatactgctaataaacctgttaaccatctgtaacgatcaatattaaaaccgatacttcgcgct

SEQ ID NO: 5265 - DNA, 138 bp, Staphylococcus aureus; identical to SEQ ID NO: 4990

SEQ ID NO: 5266 - DNA, 292 bp, Staphylococcus aureus
aattcaacgacaacttgaattgttttagatttcatacgtttaccagtacgaatatagaatggtacaccagcccatctaaagttatcaattgttaatttacctgaaacaaaggtaggtgtgttagagtcatctgcaacgcgatcttcatcacggtatgctttaacttgtttaccatcgatatagccttcgccatattgaccacgaacaaagttctttttaacatcttcagattggaaatgacgcagtgatttaagtacttttactttctcagcacggatatcttcactattta

SEQ ID NO: 5267 - DNA, 328 bp, Staphylococcus aureus
cattttcatgagtagcagataatgattgaccattttgtgaattttgagaattttgtacttgagattctcgattctcagtctgttcattattactttgttgtttctgtttaaccacgcttgctggttgatttgtttcagcagcatgtgcttgtgatgtattgaatcctaaaaataccaatgtcgcaatgacagttgaaaatgtaccaactgtatatttacgaatactaaacttttgaattttatcacgataattcacagctattgttcactccttatcttgttgttatgtctctgttgtgttgtgaatgtatttacttttgattgcttg

SEQ ID NO: 5268 - DNA, 255 bp, Staphylococcus aureus
caaacttcatcatccatacgttcgattttactcttcgcatttttaatgttagttgcaatttcacgttgaactaattctttcattacgaatggtttaaatagttcaagtgccatttcttttggtaaaccacattggtacattttcaagcttggacctactgcaataactgaacgtcctgaatagtcaacacgtttaccaagtaagttttgacggaaacgaccttgtttaccttttaacatatgagataaagatttt

SEQ ID NO: 5269 - DNA, 468 bp, Staphylococcus aureus
taaatttaatagcaataatatcttcttcggtaaaataatggcgacagcgtgtttcagtatcgattaatgaaccataaactttaggcatagacaaagctccttaacttacgattcctttggatgttcaccaataatgcgaacttcacgatttaattcaatgccaaatttttctttgacggtcttttgtacataatgaataaggttttcataatctgtagcagttccattgtctacatttaccataaaaccagcgtgtttggttgaaacttcaacgccgccaatacggtgaccttgcaaattagaatcttgtatcaatttacctgcaaaatgaccaggcggtctttggaatacactaccacatgaaggatactctaaaggttgtttagattctctacgttctgttaaatcatccattttagcttgtatttcagtcattttaccaggagctaaagtaaatgcagcttctaa

SEQ ID NO: 5270 - DNA, 119 bp, Staphylococcus aureus
tcaggtgtttcaattggacacatacggccatagtgagagtagtgaacgtcacgtacttccatttgagcacgttcacgtgttaaaccaccaggtcctaatgctgatagacgacgtttatg

SEQ ID NO: 5271 - DNA, 183 bp, Staphylococcus aureus
cgcctctaaataagataatttagccattagttaagactcccttcttcgtacacaaatgcataggcttcttcgacacttggatatggcgcgtcttcagcagcctttgtcgctttattgatgatgtctttatgctccgcttctatttctgccaaccaagcatcatcgataatgccagctgaaagc

SEQ ID NO: 5272 - DNA, 319 bp, Staphylococcus aureus
accagctaaggtcccaaaatatatgttaagtggaaaaggatgtggcgttgcccagacaactaggatgttggcttagaagcagccatcatttaaagagtgcgtaatagctcactagtcgagtgacactgcgccgaaaatgtaccggggctaaacatattaccgaagctgtggattgtcctttggacaatggtaggagagcgttctaagggcgttgaagcatgatcgtaaggacatgtggagcgcttagaagtgagaatgccggtgtgagtagcgaaagacgggtgagaatcccgtccaccgattgactaaggtttccaga

SEQ ID NO: 5273 - DNA, 215 bp, Staphylococcus aureus
gtgagcgtagtgacgtttgtcagtttggtactcaatgtgagaagtattgattgtgataccacgttctttttcttctggagcgttgtcaatcatgtcatatgattgtgcaactgagtcaccattttttgctaatacagtagcgattgctgctgttaatgttgttttaccatggtcaacgtgaccgatagtaccgatattggcatgttctttagaac

SEQ ID NO: 5274 - DNA, 244 bp, Staphylococcus aureus
cccaacaatttggatttcaatatggcggaagttttcgatgaatttctccatataaagtccaccattaccaaatgcagtttgagcttcttgttctgtcattcggaagccagtttcaagttctttttcatcacgagcaacacggataccttttccgccaccgccagcagtagctttaatgatgaccggatagccaatttttttggcgattttcttagcttctgagacgtctttcattaaaccgtca

SEQ ID NO: 5275 - DNA, 215 bp, Staphylococcus aureus; identical to SEQ ID NO: 5273

SEQ ID NO: 5276 - DNA, 301 bp, Staphylococcus aureus
ggatttgcttgacctcgcggtttcgctgccctttgtattgtccattgtagcacgtgtgtagcccaaatcataaggggcatgatgatttgacgtcatccccaccttcctccggtttgtcaccggcagtcaacttagagtgcccaacttaatgatggcaactaagcttaagggttgcgctcgttgcgggacttaacccaacatctcacgacacgagctgacgacaaccatgcaccacctgtcactttgtcccccgaaggggaaggctctatctctagagttgtcaaaggatgtcaagatttgg

SEQ ID NO: 5277 - DNA, 363 bp, Staphylococcus aureus
tattctggatctgttgtattaacttcacgatcccaatcataactgaaccctaattctttaatttgtcgtttaaaagtttggatatttttctttgtaaattcacgtgggtcgttgccagtgtctaaagcatattgctctgctggtaatccgaatgcatcccaccccatcggatgtaatacattatatccttgcattcttttatatcttgaaatgatatctgttgctgtatagccctcaggatgtccaacatgtaaaccagcacctgatggatatggaaacatgtctaaagcataaaatttcttttgacctaagttatcatttgttttaaatgttttattttcgtcccaatagtcttgccatttc

SEQ ID NO: 5278 - DNA, 378 bp, Staphylococcus aureus; identical to SEQ ID NO: 4968

SEQ ID NO: 5279 - DNA, 123 bp, Staphylococcus aureus
taagacgtctcgaatgtctttaaagccatcgctttcacgagaagatgatagctctaaaattcgacgttctgcatcacttaaaatcgcatctagttcaagttcatcattatatccatcattggc

SEQ ID NO: 5280 - DNA, 129 bp, Staphylococcus aureus
ctcatttatcttaattgctttactacaatcaactgtgccatccttaccttcttttgtatagttcaactcgcaaagtgctgaatgccctgtaccggcattattccatacatttgaactctcttcgccagg

SEQ ID NO: 5281 - DNA, 190 bp, Staphylococcus aureus
tcttaggtcaaagtgttttctaactgcttcgacaagttgcccttcagaaactttacctgttccaaatgtatcaattgcaattgacactggttctgcaacaccaatcgcatatgccaattgtacttcacattgatctgctaaacctgctgcaacaatatttttagccacataacgtgcagcgtatgcagct

SEQ ID NO: 5282 - DNA, 185 bp, Staphylococcus aureus; identical to SEQ ID NO: 4877

SEQ ID NO: 5283 - DNA, 441 bp, Staphylococcus aureus
aatttcttcgttagcaccttccatacgcggtgtgtataattcatctttaataggaacaacacgttcaattcgatctgctaattcgtttgtatttttcacaacaatttcatgcgctttttcttcacctaaaaaatgaaactcgtttaacatttcatctgtagttctaaaatgtgcttccggtaaagttgagcgattaagtggattgccgggttgtgatgctattaaaattttacgtgcgataccatcatgttcaaacaaatagtgtgcatttcctgtcgcaataacaggtatacccgctgtgtcacctgcatgtattaaacgttgataaatttcatgtaatgtttcagtatctctaataagctctctatcaattaaatcttgataaagtgccggtggttgaatttcaataaaatcataatatttggcaattttttcaacttg

SEQ ID NO: 5284 - DNA, 381 bp, Staphylococcus aureus
caattggtaaaccatgtgtatcccaacctggtacgtatggtgcatagaacccttgcatagttttataacgtacaataaagtcttttaaaattttgttcaaggcatgtcccatatgtaagttaccattcgcgtatggtgggccatcatgtaaaatgaatgtttcgttacctttatttttttctaacgctttatggtattgatcttctgcatcccatttttcttgaatttgcggttccttgtttggtaaaccacctcgcattgggaaatctgttttaggcattaataacgtttctttgtaatccatttttttcactccttaaaaatttaaaaaactctaagttaaattaaaagggacgattgctcgcggtaccacccttatta

SEQ ID NO: 5285 - DNA, 208 bp, Staphylococcus aureus; identical to SEQ ID NO: 4432

SEQ ID NO: 5286 - DNA, 247 bp, Staphylococcus aureus; identical to SEQ ID NO: 5178

SEQ ID NO: 5287 - DNA, 327 bp, Staphylococcus aureus
cctttttataattgagacactaatgcttcaacagtttgacttgatgatacagctgctttttctaaaaatgcttcgaagctcatttccgcttctccatttgctaagtctgaaactgcacgaactacaacaaatggtacattaaattgataacatgtttgtgcaattgcagttgcttccatttcaaccgccatcgcatttggaaatgcttttttaattttttggcgttgttcaacactaccgataaagctatcaccacttacaattaagcctactttagctgttaattgttgttgttgtacaacttgagatactttttctattaaaggt

SEQ ID NO: 5288 - DNA, 259 bp, Staphylococcus aureus
acctgaaacaactgtttcagaaccgtctaactcttggtggttagtgttgaatacgattgtttttaagtcaccagtagctggtgctgagattaatacttttttagcgcctgcttcaatatgagcttgtgctttatctttatcagtgtagaaaccagtacattctaatactacatcgatatttaagtctttccaaggtaatttgcttgcatctggttcactgaatgatttaacttctttaccatttacgcggaaaccacca

SEQ ID NO: 5289 - DNA, 164 bp, Staphylococcus aureus
acaatcgatcctgatgtactcgttgatgcactttgtgagtcagctttacttgttgacacactttgagattgttgtgtacttcctgatgttgatacggaatcactcatgctatttcttgttacttcatatttaaaagttgtcgtcgttttgttaccgctcgcatc

SEQ ID NO: 5290 - DNA, 189 bp, Staphylococcus aureus
gctggtgcttcggccacagctaaactcgctgcatgtggaaagcggttaccgggtccgattacaaaagtgtcaaatgtgttatgggcattgaattgctctctaccaagcacatgattatcctcagttgtttcagtagaaggttttgttgtttcttttggagtagcagtttcattattactataatttgct

SEQ ID NO: 5291 - DNA, 278 bp, Staphylococcus aureus
tcataatctaatgtgtaattttcaaatgttctaagtgaaatcgcatctaagaaaataatttctggaaataagtttcgcaactcgtataacatcatttgtgatactgacgtgccttgtgtacacacgataatagcttttatcttgccatcgaagttttcatcttgacgtctcaaactacctccgaacaacatggttaaatatgctatttcattatcaggcaacgattttccgaaatattcagttaacgattgacatgattgtttcaccatatgaaataa

SEQ ID NO: 5292 - DNA, 319 bp, Staphylococcus aureus
tacgataaacgtttcataaccttcgtttgtagccaactgttttaaagcacctttttctttatccgttgttgcaaatatacgtttttgtgcttcttctttaccgtatctttcttcaactaattgtttgaacaatctaaatgcaactgctggttctgtagttgtaccagatttagaaataacgtttacagagaaatctttgtctgctaaataatcaactaactctttcgtatatgttgatgataagtgattaccaacaaatacaatttcagggtattcattgctgtttctaaatgatgacgttaacatttcgattgctgca

SEQ ID NO: 5293 - DNA, 141 bp, Staphylococcus aureus
agacgttacattcgaaaccgtaacttcatcatctgacaattgttttgttgtcgatacttgattcaaactaacttcctcataattgtatggactttcatctacatgagtgtcattagtgtcttcattttgtattgacgcttg

SEQ ID NO: 5294 - DNA, 165 bp, Staphylococcus aureus
tatttcaggaggaatgttagcaaaagtacctactgcaccactcattttccctacttcaatttcttctcttacttgtttgaaacgttgtaagttacgttgcatttccgtgtaccacaatgccattttgacaccaaatgtagttggttctgcatgcactccatgtgt

SEQ ID NO: 5295 - DNA, 124 bp, Staphylococcus aureus
taatttctccatctacttctccaattgttccatttgaactaatgatgccattaaccgcaaaatcttgaggtacaagttgatgtatttcagaatgcgaacgtcctgttgccaaaaatactttata

SEQ ID NO: 5296 - DNA, 348 bp, Staphylococcus aureus
tgctcatatggaattggattagcaacaacaatgccaccttcaagatttaactgctgttttgttaaatgaatgtcagcaagtcgttctggcgtttcaaccgaacttgttaacttaacaccgctttcgcgagtgaagaatgctggcaattcattcgtttgatatccaataactggaacgccttttgtttctaaatactccatcgtcttaggtaagtctaaaattgatttggcacctgcacagataacagtgacatttgttttagacagttcttctaagtctgctgaaatgtccatcgtatgttctgcacctttatggacgcccccaatacctcctgtaacaaaaaattga

SEQ ID NO: 5297 - DNA, 287 bp, Staphylococcus aureus
agtttctttttcactcaaagtttgtcgacttttgtcactcgtataaccatcatttttttcaaattcgaattcttcatgatcattttttatttgtgtttcttgtgtagttaatctatcgagctccatttcaaaatgatgcacttgctctttaagtgtattatgcttttgacttttttcaaaatacagttcacttaattgatcactttttatcttcaactctttaaattgttgttcaaatgattctgtttgacgcaagtaatcttctaattggtgtctcattgttgtca

SEQ ID NO: 5298 - DNA, 319 bp, Staphylococcus aureus; identical to SEQ ID NO: 5292

SEQ ID NO: 5299 - DNA, 320 bp, Staphylococcus aureus
tatcacccggttgtgcaggtaaatattgtgataaaaatgttttaaagtttttttcgccgataaaacaaatgcctgtagaatcttttttcttagcagtaacaagtccttgttcttcagcaattcgacgcacttcactcttttcgatgtcgccaattgggaacatcacttttgaaagttgttgttgagataattgattcaagaagtatgtttgatctttattattatctacaccacgtaacatttcaacatgaccatcttcatgacgatgtatgcgtgcgtaatgtcctgttgctacataatctgcacctaaattcatcgca

SEQ ID NO: 5300 - DNA, 141 bp, Staphylococcus aureus; identical to SEQ ID NO: 5293

SEQ ID NO: 5301 - DNA, 299 bp, Staphylococcus aureus
tacaggaataaagtattcaggtttcataatattaatcatcatttttaattcttccatgcaaccatgacttgaagcatgaatctttttgttatttggaataatatgtgcgccagcacgtacaagctcatttaatgtattcgcaatgataacttccatattagcagaagccgtaattgctaaaaatacagaatcgccttcttcgatattcataattttatgcttatgttgcgccatttgacttaaggcttctacaggttctccttgcataccagtagctataattatcacttcatttttag

SEQ ID NO: 5302 - DNA, 278 bp, Staphylococcus aureus; identical to SEQ ID NO: 5291

SEQ ID NO: 5303 - DNA, 165 bp, Staphylococcus aureus
tgatgttgaatcactaacactatcagataatgacgttgaatcactcatacttgttgatgtacttgtcgaaagcgacatactttgtgaatcactagtacttgtacgcatcgaagtactagttgaagctgatgtactacgagagtcacttgttgatgttgatgtact

SEQ ID NO: 5304 - DNA, 305 bp, Staphylococcus aureus
gaaaaaatgaaaactttgaagggagcattttacaatgtccaagactcaacaattttatttaaacagtattatcagttataagttttattagtcagtctttcatcaattattgttcttctaaaatcgaatagccattacaaaatttacacattaaaaaaagacccctcgattgagggatcttctttttatataaaatctaagaaattagaaattatttaatgatttcagtaacaacgcctgatcctacagtacgtccaccttcacggattgagaaacgagtaccgtcttcaatcgcgattggagcg

SEQ ID NO: 5305 - DNA, 306 bp, Staphylococcus aureus; identical to SEQ ID NO: 5034

SEQ ID NO: 5306 - DNA, 374 bp, Staphylococcus aureus
tattttggtttgatttcaaaggtacttaatactgaatcaagcatttctctatgctgtgctgtaacaacaacaattggctcgagcattttttcttgttccaaagctttaactaaaggagccatctttatggcttcgggtcttgttccaaatatggtcataatctttttcatcaaactacttatctccgattcttctatttagtaccaaacaatctatctccagcgtcgcctaaccctggtgtgatatatgctttgtcatttagcttttcatcaagtgcagcaatataaatatctacatctggatgtgcttcatgcatcttttctacgccttctggtgctgcaattaaacacatgaagcgaatatttttagcgcca

SEQ ID NO: 5307 - DNA, 249 bp, Staphylococcus aureus
aaagttagcaaatgctgtacctaattctgatccaatgtatcctccaccaactacaactaatttacctggtacttcttgtaagtttaaagcacctgttgagtcgataacacgtttaccgaatttgaaattaggaatttcaattggtcttgaacctgttgcaatgattgcatttttaaagttgtatgtttgtgcgctcttttcgtccataacacgtaagctattgttatctacgaaatatgcttcaccttt

SEQ ID NO: 5308 - DNA, 347 bp, Staphylococcus aureus
tgcatatctcttttaaattttttcacacttcttctattagctattgcttgttgtaattccatctaaaatcgctcctccacgaacaatgataatacttctcaattataagacagcacttacacaaaagcaacctaattcattttattagtataaagtcacttgtgcttttaaatcagtaacatcaatctgtcctggagcttgtggtactccgatacaaccataagtcaacgcaccaccaaaaacgccttgagccgttctacttattagtccaagtttagacattgaaataccaacaactttgcagtccatagtatctgaaaatgtagacattgcctgcaataaattta

SEQ ID NO: 5309 - DNA, 276 bp, Staphylococcus aureus; identical to SEQ ID NO: 4716

SEQ ID NO: 5310 - DNA, 196 bp, Staphylococcus aureus
tccaattgttttaaccttatggacaatttgaccttgtgtatcaaaataataaccaaatgcctctccgacagcttgatgatgttgaagttgttcaatgaccttttcaggtgattgacgtcgatgcgccatcttcagcgcatcaccaatgccgtgtaatataacgtttgcttgtttaattttgtctaaagtgtttatg

SEQ ID NO: 5311 - DNA, 478 bp, Staphylococcus aureus
aattttccaattgttgttgttttaccaacaccattcacaccaaccattaaaatgacatttaaacgaccatcttctaagttcatagcttctgaattatcatcttcttgatggtaaatctctacgatcttttcaacaatgacttcacgcaaatcttcagtatcttgaatattacgtcgttgtgcttccatacgtaattcttcagttaacgtcatcactgtattaaaaccgacgtctgcagtgattaacatttcttctaaagcttcaaaaaagtcttcatctactttacgatatctcgctatcaaattatttaattgttcttggaaattttgacgagatttttcgagtcctgctttaaatttagcacccattttttgagcttcaatttcttcaaaatcttcaattgatattaagccatcgtcatcaaaatccgcttcactcaacttgcgtggcttctttttcacttcagcattttctgcta

SEQ ID NO: 5312 - DNA, 180 bp, Staphylococcus aureus
tccttatttgtattggttgttattaattaaagtacttctggtgctaatgatacgattttcatgaagttaccttcacgtaattcacgagcaacaggtccgaagatacgagtaccacgtgggcctttgtcatcacggatgataacacatgcattttcatcaaatttgatgtatgaaccgtca

SEQ ID NO: 5313 - DNA, 330 bp, Staphylococcus aureus
cgtacaccagcatttcgcgtaattttaccttcagtaacataacatccagcaatagtaccaactttagaaactttgaatgtttgacgaacttcagcttgtccgataacttgttcttcaaattctggatcaagtaaacctttcatcgctgattcaatttcttcgataacattataaataactctgtgtaaacgcatatcaacattttcagcttctgcagcacgttttgcaccactgtctggacgaacattgaaaccaatgataataccatttgaggcattagcaagtgtcacgtctgactcattaattgcaccaaccgctgtatgaatgata

SEQ ID NO: 5314 - DNA, 196 bp, Staphylococcus aureus; identical to SEQ ID NO: 5310

SEQ ID NO: 5315 - DNA, 75 bp, Staphylococcus aureus
cgcattttcataatttacagctttcgctgcacgaactgcggcatttcccatttcacgacgtgtttcatcatctaa

SEQ ID NO: 5316 - DNA, 175 bp, Staphylococcus aureus
cattagcaaagaagacattgccgatttcaaataattttacatctttatttttgcgtgccacattatatgatgccgcttcgattaaatgtggtaataaactttgacgtaatgacgcatgcgcttcactcattggcatcaataaatcaattgtttgacgctgttgcatcgaaaatgc

SEQ ID NO: 5317 - DNA, 218 bp, Staphylococcus aureus
tgtttggcaaatgctaatttttgttcttcaaaagtggctaatgtctgaatctcatttataattagttgacgttgttgctttctatggtcaaatttcccgctaactataaacaagtcattatgtgataacaactcttcgtactttttaaactgattagggaaaatcacaccatctaaagtttcaatgccatcatttaatgtgacgaatgccatattttg

SEQ ID NO: 5318 - DNA, 135 bp, Staphylococcus aureus
catatcttgatacgtttgatctaatgatgcctcgtcagcatggaatgaatatgcatctttcataataaattcacgcccacgaagtaaaccaaaacgtggtctcttttcatcacggaatttagattgaatttggaa

SEQ ID NO: 5319 - DNA, 296 bp, Staphylococcus aureus
gacttgtccaccatcttctgaaacttgtttcaagaagttgtatgcctcgtctacttttttcactgttttttgtaagtcgatgatataaataccatttctctcagtgaagatatattttttcatttttgggttccaacgacgtgtttggtgaccgaagtgaacacccgcttctagtaattgtttcattgaaattactgccattataaattcctcctattggttaattacctccatagcaaactattgtaaagacaatatataaatattgcaccctttacacaatcacgtttgatatg

SEQ ID NO: 5320 - DNA, 263 bp, Staphylococcus aureus
cataactacttttgtacctttattaaacacacctttactgtcaaatacgacctcaccaacaccttcatgaattaaagacattggcaatttctgagataagacattctcatcacggctaccagtataatatctttgatcggcagcacaaattgacatatataaaggacgtacaatgacatagtcactgtaaatatctacgttgttatacgtaacttcaaattgtctaggtgcaactaattgatatacttgattaatcatcggca

SEQ ID NO: 5321 - DNA, 343 bp, Staphylococcus aureus
cctgctgcttcgatatgtctacgaaatggttctgaacgaacatctatacaaaatgcaatttgcgctttcgttgatgtgcccatctgatttagctcgctattattttcatcaactgcttgtgtgtcatttaacaatactgaatgtggctgattagcgttatcattttctgagacatttacttggtttacatctaatgcgcccgccacactttcatgacctgctttaattttttgttttaactgagattcgtatgtcatttcccaggcaattagccataaatttttaaatacatttttattcatagttgctgcaaaatgaataaacgtttgaatttcattgacgt

SEQ ID NO: 5322 - DNA, 415 bp, Staphylococcus aureus
catttctggaattgttgacatcattagtgcaggtaaaattgcaaagtattttgctacgtcattagccaaactaaatgtcgttaatgcacctctcgtcattaataattgtttgcctatttttacaacctctattaactttgtaggattcgaatctaaatcaattagattagctgcctctttagcactaattgtccctgagttcatagctaatcctatattcgcttgtgctagcgcaggtgcatcatttgtaccatctcctgtcatcgcaacaatatggcctttcgcttgttcatctttgatgactttaattttatcttcgggtttacactctgcaacaaatctatcaaccccggcttcttttgcaattgtagctgctgttaaagcattatcacctgtacacataactgtttcaatc

SEQ ID NO: 5323 - DNA, 252 bp, Staphylococcus aureus
caaaactgaatacaatatgtcacgttattccgcatcttctgaagaagatgttccgaatatatccttagaaaggaggtgatccagccgcaccttccgatacggctaccttgttacgacttcaccccaatcatttgtcccaccttcgacggctagctcctaaaaggttactccaccggcttcgggtgttacaaactctcgtggtgtgacgggcggtgtgtacaagacccgggaacgtattcaccgtagcatgct

SEQ ID NO: 5324 - DNA, 203 bp, Staphylococcus aureus
cagctgcacttttatctgtttctgcttgtgcttcttttttagcttcttgaatctcttgtgcctcttgtgatgtatcactcaaattatttgcacttgcttcttcttttatcgctgcttgttgtgctttcaatgccactgcttttgattctttatttgatacagccacacttttatccgcttctgcttgtgcttctcttttagct

SEQ ID NO: 5325 - DNA, 140 bp, Staphylococcus aureus
tgcaactgctgctgcagatccacctgatgaaccacctggcactgctttatggtcaaatgggttaactgtttttttgaaataagatgtttctgttgaaccacccattgcaaactcatccatatttaatttaccgattaaaa

SEQ ID NO: 5326 - DNA, 86 bp, Staphylococcus aureus
atacaataactttaggatttttcttcggcgcgtcacccataaaacttacaaaatatgggtttggacctttaacgtatccaccacca

SEQ ID NO: 5327 - DNA, 164 bp, Staphylococcus aureus
tacctgtgcggtcatccgtaccatccacataattaaaggctctacgtaaaattgacgtatttgcttctttcgctagcctcgtatgggcatctttatcaataatatactcgccatgactatctttcgcttttaagtcaatttcatcaaactctttcccacctgtt

SEQ ID NO: 5328 - DNA, 198 bp, Staphylococcus aureus
tcatcatctacaagtagtgcttcgtcataagttggccaaggttggtacgtaatagactcttcatgtcctaattttgaccataattcttcaccgatatgtggtgcaataggtgctaacattttaacgaagccttcaatgtaaggtttataaacttcatcaactttataacactcattaataaataccattaattgacta

SEQ ID NO: 5329 - DNA, 148 bp, Staphylococcus aureus
agcttttatcttaccaacggtagtgagcaaatgctttgtttgcttcagccattttgtgagtgtcctcacgtttcttaacggcaccacctgtattatttgctgcatctaaaatttcgttagctaaacgatcttccatcgttttttcacc

SEQ ID NO: 5330 - DNA, 214 bp, Staphylococcus aureus
tactttatcgtttcgtcatttaatgtttcggatggtaggtcattatcaattttacgaacgactttacaagggtttccaaccgctaagctgtgtggcggaatatctttagtgacaacactaccagcaccaatcacactgccttctccaatcgtcacccctggtaacacggctacatgaccgccaaaccaagtattactgccaatatgaatgggtc

SEQ ID NO: 5331 - DNA, 241 bp, Staphylococcus aureus
ttcatcatagcataactttctgcaattaattgcatgtcagcatattcgataccattgtgtaccattttcacatagtgtccagcaccattaggtccaatataagtaacacatgaagcaccgtcttttgcctttgcagcaattgcatcaagaatatctgcaactttgttataagcttcttcttgtccacccggcattaatgacggaccagttaacgctccaatttcaccaccagaaacgccca

SEQ ID NO: 5332 - DNA, 101 bp, Staphylococcus aureus
ttgttgaagtcgaaccacttgttgattttgaatcacttaatgaatcagattcactcacgctttctgaacttcttagtgacgtcgatacacttaatgatgac

SEQ ID NO: 5333 - DNA, 238 bp, Staphylococcus aureus
tctggtacctcttgagctttaccagtaccgaaacctacacgaccatttttgtctccaactacaactaatgcagtgaaacggaaacgacgaccaccttttacaacttttgctacacggttgattgtaacaacgcgttcttcaaattctttcgtctcttcttctctacgagccatgtatttgtccctcctttaaattaaaattctaatccgctttctcttgctgcttcagctaatgcttt

SEQ ID NO: 5334 - DNA, 286 bp, Staphylococcus aureus
gtgcaataccaccaacacctatcacaccaacttttaattttgtcatgatgtgcctccttaccgtatgatgttattcaaagtaaattgctttgcctgattttgcagactgataaatcgcttcaagaatttttgtaactaccattgcttgttccggtttcacaactggttcagtatcatttacaactgcatcaatccaagcttttgcttcttcttcagcttcatccacttcattaccttcataaaagtcgacgcctttgttttccaattcaacgtgtttggtataaag

SEQ ID NO: 5335 - DNA, 217 bp, Staphylococcus aureus
tacacctaaactatctgcatattcaattttttcaataatgtcgtcttttgctttttcaccttgaaccaaagtactaatttgtatttgttcagctaatggaaaacgactatttatcgttgaatggatatctcgaattgcggcacctgtactcgctgttaaaactgcaatttttttaggaaacttaggtattgatttcttattcgctttatcaaaacaa

SEQ ID NO: 5336 - DNA, 301 bp, Staphylococcus aureus
caccttcctccggtttgtcaccggcagtcaacttagagtgcccaacttaatgatggcaactaagcttaagggttgcgctcgttgcgggacttaacccaacatctcacgacacgagctgacgacaaccatgcaccacctgtcactttgtcccccgaaggggaaagctctatctctagagttgtcaaaggatgtcaagatttggtaaggttcttcgcgttgcttcgaattaaaccacatgctccaccgcttgtgcgggtccccgtcaattcctttgagtttcaaccttgcggtcgtactcccc

SEQ ID NO: 5337 - DNA, 231 bp, Staphylococcus aureus
tgcaaatctttcagcatcttcatcagttgctgcttcaaccatgacacgaactaatggttctgttccagaaggtcttactaaaattcgaccttctccattcatttctacttctactttagtcataacttctttaacgtcaacattttcttcaacacgatatttatctgttacgcgtacgttaattaatgattgtggatattttttcatttgtccagctaattcacttagtga

SEQ ID NO: 5338 - DNA, 374 bp, Staphylococcus aureus
caccttcatgctcaacgccgttctcttcaactagacgacgaacaagaatttcattagattcaacatgttcaacacgacctctgtgcttagctgtaatagccgcaccagaatcacgtgctgcaacgtgttccatacctgtaccaacaaatggtgcttctggattcatcaaaggcactgcttgacgttgcatgttcgcacccatcaatgcacggtttgagtcatcattttctaagaatggaatacatgctgtcgctgctgaaacaacttgcttcggcgatacatccatataatccattttttctttagccataactgtattgttaccacggaaacgacatacaacttcatcatccatgaaacgaccattttcatct

SEQ ID NO: 5339 - DNA, 787 bp, Staphylococcus aureus
tgtaataggatcaactactgtgaagtttagtgtttctccattttgtaatctaaatccagcatgatctacatcaaagctgaattcacctttttcatcgacttgcaaatcagggaattcttgaccttcacctagttcagagtctaccttcacaactgcatttgcgaatttagtcttacctttaattactttagtaccttctttatcaagaatacctttacctttttctgtatgatataagcttccgtaaatttcatctacatgtaaatcttctttaacatctttcaatacttttactttttccactttagtatggtcatatttagtttctgctttatcaatatcttctaaactcgttaccttagttttgaaaattaatgacttcaatgcctcatcttcgtcatcaggtgcaaatgttaatgagatctcatcatttttctttaactctaaatcatcgaaacgtttcgttttgaagtcaaaattaaagtatcctttgtcatcaataggcatccagattccttctgatccagatttcgcttcttctttatttggaccaccattagcatttgtctcaaagttaataaatttattattaatagatagagcaactttaccttttacagaggtatggcctttaataatacctgaaccttcagtaataggttcgataaaaacttggtgatgtccatctttttcttttagctgttctttcggtatttcatacgctttttcatatcgcggtgttgtatatgtagctttagcttctgtactttcttcctcagcaccaact

SEQ ID NO: 5340 - DNA, 162 bp, Staphylococcus aureus
actggcatcatgaatggtttgtcagaatcacgttctggagttggaatgtaagtatctacagcttccattaattctaagattttttcttcgtattgagcatcgccttctaaagcttttaatgctgaaccagcgattacaggtacatcgtcacctgggaagtca

SEQ ID NO: 5341 - DNA, 505 bp, Staphylococcus aureus; identical to SEQ ID NO: 4390

SEQ ID NO: 5342 - DNA, 298 bp, Staphylococcus aureus
aaacttgatttacctacgtttggtcgtccaataatggatagtcgaattgtatcttcatcataaggatcttcttcctcttcaccaaaatgagaaacaactgcatctaacaagtcaccaagacctaaaccatgtgaccctgatatcggatacggttcaccaaatcctaatgaatagaaatcatacacgtctgtacgcatttccatattatctactttgttaaccgctaatacgaccggttttttagatttgtataaaatttgagcgaccatttcatcgctttgtgtcaatccttcacgca

SEQ ID NO: 5343 - DNA, 149 bp, Staphylococcus aureus
agtacgtccaccttcacggattgagaaacgagtaccgtcttcaatcgcgattggagcgattaattctactgtcatttcaacgttatcaccaggcattaccatttcagtaccttctggtaagtgaacaacaccagttacgtcagtagtac

SEQ ID NO: 5344 - DNA, 284 bp, Staphylococcus aureus
gatttaatctgatgccattgaatatctttattttgatttaacttactaataacatcagttttgattttgcgttgtgcatcataaattaattgacctgattccctcatatatacaaatcctcgagaaataatgtctggaccagaaagtaatttatttgtattaaaatcaatactaacaacaacgataactaaaccttcttcagataatagcttacggtctcttattacaacattaccgatatcaccgataccactaccatcaacaagtacattaccagatggaat

SEQ ID NO: 5345 - DNA, 341 bp, Staphylococcus aureus
cctttaccaccgtcaccgccagctggtccaccaaatggtacatatttttctcttctgtatgcggtaataccattaccaccatcaccggctttaagagatattttgacttgatcgacaaacatatatctcacctcttttacatataattttcattttcccaataattatagcatattagagccccttatatattgtaaataattaggggctcttatgcagttacttttataaatctttgctttaaaatacttatatttctcagcaccaattgtggtacagtttattctttaaacgctgcaactgtattcctttgtcccccttatagtttagtgattaggggc

SEQ ID NO: 5346 - DNA, 185 bp, Staphylococcus aureus
ctatatagttattgccatcaaattttgagtttgtaatatacgccaagcgatgaatcttaacattcgattctttagaggactggtttttcagcaaaccaattatcttttcaatcgctatcctcatcgtcatttcctccaagtatttcgattgataatatctttatagctttgaataattttaacta

SEQ ID NO: 5347 - DNA, 221 bp, Staphylococcus aureus
tatcatcgtgattttgttcaacaatcgcacttagcgttctagaaattccaattccgtaacaacccataattaaagattgagcttttccttggttatctaagaatgtagcattcattgattctgaatacttagtacccaatttgaatacttgaccaacttcaataccttcagcaaaatgtgcaacgcctgaaccatcacttaacttttcgccttctaaaata

SEQ ID NO: 5348 - DNA, 435 bp, Staphylococcus aureus
taagaagaacggcgtatgtttaactttatcgagtgactcgccattatttagcgaatctttttcttcaacagtaacatcttcttcatcttcttttctgcgacgtttcgcaaataaaagtggtaaatgttttgtatcgtctaaagtctcttttattgaatctttattattatctcttatttctaattcttcctcttcatcttctttacgacgacgtttggcaatgaagaaccagaaactagctagtaaaccagagatacccaccacaccaatagcgtttttaataacattaccgaaattattactaaagtgacgcatatgaagtggatcaatgtcatcatcttcatcaagtttctttttatgtccaatagtcgaactgttaaatggatgatttgcagttccataaccaattgttaaatggctattagattcatttcc

SEQ ID NO: 5349 - DNA, 212 bp, Staphylococcus aureus
tcctcaactggcatcatgaatggtttgtcagaatcacgttctggagttggaatgtaagtatctacagcttccattaattctaagattttttcttcgtattgagcatcgccttctaaagcttttaatgctgaaccagcgattacaggtacatcgtcacctgggaagtcatattcgcttaataagtcacgaacttccatttctactaattctaa

SEQ ID NO: 5350 - DNA, 186 bp, Staphylococcus aureus
tacattttctttcaaagatacgatcacatcatacaatttttctaacgtaccacttggtgcatctacttttttattatgatgtgcctcagtcaattcgatgtcgaaatcatcaagtaggggaacagcagctgctaaaattttagtcaatgcatgaacgccataactcatgttcgcgctgaaaaacac

SEQ ID NO: 5351 - DNA, 166 bp, Staphylococcus aureus
tgttcaatatctgatctatttaaatacaacatctctctattcattctgatttaactccttgtcttgatttcattttttctaaccatgtatctgaataaactaaatctaagtaacgatcgcctcgatctggtaaaatcgtgacaattgttgcaccttcttcaattgt

SEQ ID NO: 5352 - DNA, 505 bp, Staphylococcus aureus; identical to SEQ ID NO: 4390

SEQ ID NO: 5353 - DNA, 160 bp, Staphylococcus aureus
gatcatacgtacggtagtctcccataacacctactgattgaatgtttggtaacactgtgaagtattgccaaatttctctttcaagaccttcttctctaatcacttggcgtaaaatcgcgtctgattctctaacgatttctagtttatcttcagtaatttc

SEQ ID NO: 5354 - DNA, 176 bp, Staphylococcus aureus; identical to SEQ ID NO: 4845

SEQ ID NO: 5355 - DNA, 214 bp, Staphylococcus aureus
actaataatttctccagttaatggattttttagtgttggcgtcgttattgtcttctcacctttttgtccttctcttgttactttttctgtccctggtgctaaatcaggattaaatttacgttctttctcgaatggaatttcttctttttctacaatcgagtctccttttacaggtccatattttgttacgctatcgaccggtggtctaactaca

SEQ ID NO: 5356 - DNA, 147 bp, Staphylococcus aureus; identical to SEQ ID NO: 4280

SEQ ID NO: 5357 - DNA, 166 bp, Staphylococcus aureus; identical to SEQ ID NO: 5351

SEQ ID NO: 5358 - DNA, 288 bp, Staphylococcus aureus
tgtccatccgcctatattatttttaggaataattacacgtttgaaacctagttttgcagcctcttgcacgcgttgttctatccgagatacacgacgtacctcacccgttaaaccaacttctccaatatagcaatctaatccgtcgacagctttatctttaaagctagatgcagttgctacaattacacttaaatcaactgctggctccgttaactttacaccgccagctactttgatataagcatcttgttgttgtaatagataattttctttcttttccaaaacagc

SEQ ID NO: 5359 - DNA, 171 bp, Staphylococcus aureus
aaattctccgccaagaattctaacgatatcaccatttttacaaccacgttctctaagcgcatcatcaatacccatcgaacgcatttgacgagcaaatcgacgtactgctggatcactgttaaagtcagtcattttaaacattctttcaatagcattaccacttaccacata

SEQ ID NO: 5360 - DNA, 79 bp, Staphylococcus aureus
caacgcattcaacctcaataccgtgagcccgtaacgtctcatcaccatgtgtgtctaacgaattgtcttttgttgcgta

SEQ ID NO: 5361 - DNA, 703 bp, Staphylococcus aureus
tacaccatctttttcagcagataatatcataccttcagatttttgtcccattaatttagctggtttcaggttagtaacaactgctacttttttaccaataatatcatctggtgtatagaatttggcaattcctgatacaatttgtctttgttcagaatctaagtctacttgaatttttaaaagcttatctgacttcttaacatgttcagcatcaataatcgttgctgccttaatttcaactttatcaaagtctttaatatcaatttgaggtttgctaggaatctcttctttttcctctttagtagcaggcggttgcattgattctttgatatatgcaatttccgcttcgctatccaatcttgggaaaataggtttaggttgcccagtaaccataattgactcattaagcacaccatattgctctaaactactaaattccataaattgaggattgttaatgttcaattgttcaaaaatctctttcggcgcatgtgttaagaatggacgtaataatacagctgcataacgaatattttcaactaagtgagccattacattgcctaacatatctttttggctatcgtccttagctaatacccaaggcgttgtttctgtcaatatacttattcgttctacataataaacttccataccgtagataatgccacagaaaattgcaaactttccatgctttcagtgtagc

SEQ ID NO: 5362 - DNA, 998 bp, Staphylococcus aureus
taacagattcaacaccagctaagtttgtagcttgtgaaatttgatttgttaaatcattacgttgagcctgtagtgatatgcgttaaagtacctaaatgttgtttcgctgcgttttgagctgcaattaattttgcatcaccattcaatgcatctttcgcattattaacacgttgtaatgctgcttcaactgcattttgcgcagtgtttggacctgtcgatttatttaaaatcgctttcgctgcagtaatagcattatcatactcttgttgtttatttgtatcagcatcacgatatttctcagatgatttcacttgagattcgttgttaataccattctgtaagctagccatagcttggtctagatgttgcgcattttgttttacagtatcaacaccactcactcttgtcgcactagtaatttgactaatcaaattgttcttttgagcatctgtaatacttgtcaatgtgtttaagtacgttttcgcattttgttttgcagcagctaagttttcatcaccgttaagtgccgttttagaactattcacttgctctgcttttttgtgtaatcgtacttggattcatttctggattactattagcattaataatcgtttcagcagcagctactgcgttgttatatgctgtttgcttatcattattagcatctacgtaatcttcacttgctttagtcgcatctttgttggcaatactttgtcttaacgtattcatggcttgatctaatgtattggcatttgattgaaccgtttgaacaccagcgacagtagtaccactattaatttggtttgttaaattcgttttttgtgcaggttgttaaatgcgtcatattatttaactgctgttttgctgtttgcttcgcttgatctaataaacgcgtaccatctaagttatttttagcagaattcacttgattcatcgcttcagtaacttgatctttcgttttattttgaccatttgatttatttaaaatatctttcgca

SEQ ID NO: 5363 - DNA, 259 bp, Staphylococcus aureus
ttatataaaagtagttagtgtatttatataaattcttatactaattcgataattactgattcagcaccgtcaccgcgacgagggccttgtttaaggatacgagtgtaaccaccttgacgttctgtgtaacgctctgcgatttcaccaaataatttttgaagtgcagtttgtgtagtttcatcttcgtttaagatttcaacattacgtaaagttttagctgcattacgacgagaagctaaatctccttttttacctaaag

SEQ ID NO: 5364 - DNA, 217 bp, Staphylococcus aureus
  misc_feature (53)..(53): n=g, a, t or c
  misc_feature (119)..(119): n=g, a, t or c
  misc_feature (191)..(191): n=g, a, t or c
tgtctcagcagtttcttgcgaccattcaccagactcaaacgcacgtcttgcanctaagattgcacgttctgcatcctcttttgtcccttcagaaaccgcaaatatcacttcttgattgnaaggattgataatatctcttggctttttattcgcgctttcaacccactcaccatcaatatattgacgctganataaatgttttaaaagttccattcaa

SEQ ID NO: 5365 - DNA, 250 bp, Staphylococcus aureus
tgcatacgttgctctaatacagcacttttttctttctcttttcgtggcaaaaatcctaaaaatgtatatacatatgaaggtaatccactagccatcaaagccgtcagcccagcattaggtccaggcacagtctctactttaatattagcttctctggctgccactactaattcgtatccaggatcactaattaagggcaatccagcatcagatacgagcgcaacgtcaagacctaattctaactgttcaa

SEQ ID NO: 5366 - DNA, 149 bp, Staphylococcus aureus; identical to SEQ ID NO: 5343

SEQ ID NO: 5367 - DNA, 177 bp, Staphylococcus aureus
ttgcatgttcgcacccatcaatgcacggtttgagtcatcattttctaagaatggaatacatgctgtcgctgctgaaacaacttgcttcggcgatacatccatataatccattttttctttagccataactgtattgttaccacggaaacgacatacaacttcatcatccatgaaacg

SEQ ID NO: 5368 - DNA, 188 bp, Staphylococcus aureus
ctaatacataatcagcttcgattgttttctcttcgcctttagcttcataagtaactttaactccgttatctgtttcttcagctgatttagccatagcttcagtaacgatttcaacacctttttctttcataccttttttaacaggttgtgtcatttgtttttcgaagccacctaagatatctttagca

SEQ ID NO: 5369 - DNA, 234 bp, Staphylococcus aureus
cctttttcatgagcgtattcaacaacttttttagttgttgctacgttttcttcgaatgggctgtgtgaagcatcgatcattactgatgtgaaaccagcatcgatagcttctttacatttttcaaagcttgaaccatggtctaaatggattgctacaggaatagtgatgtttaagtcatgcattaacccttcaaccattttaacaattgtgtagaaaccgctcatgtaacgagca

SEQ ID NO: 5370 - DNA, 215 bp, Staphylococcus aureus
aaactacctttagataaatagttatttacattatctgcttgtcttctaaaaacaacacagttaataaaatctgcttcgcgctccccttgagcattcgtgaacgtacgatttactgcaagagtgaatgtcgctacactcacacctgagggagtggttctgtattccggatctttcgttaaacgacctactaatacaactctatttagcatttaaac

SEQ ID NO: 5371 - DNA, 106 bp, Staphylococcus aureus
tattttatttaattatttcccatgttctgctaaatgacgcatcacttttacttcatgaggcgtcaatacacgtccttcaccagcattcaaaccgacaacatttaaa

SEQ ID NO: 5372 - DNA, 223 bp, Staphylococcus aureus
ccaatattcaccttttgtttcaggatctttaccatatgtagcaataccgccatgaagttgagctacatcttcgaaaccttcttttaaaagccatccagaaaatttttcgcatcgaatgccaccagtacagtacgtaaccacttttttatctgcaaataacgctttattctctttaatccagtcaggcaaatctctaaaacgtgtgatatttggacgaattgca

SEQ ID NO: 5373 - DNA, 118 bp, Staphylococcus aureus
aatacgaacttgctcgccaacttcgagttcaacatcgatagtcttttctttaagacccatttgttttaagatgaagcgaacttcttctggtaacaatggatttggcttagaccctgca

SEQ ID NO: 5374 - DNA, 218 bp, Staphylococcus aureus; identical to SEQ ID NO: 5317

SEQ ID NO: 5375 - DNA, 383 bp, Staphylococcus aureus
cgttgtaaattgacaagtgtcgcacggcggtttttaagctcatcagcaatatcttgtgtatctgaaaaaacacgtggttcgaataaacacatttttgaactttcttgtgatgcattgtttggtgtagcattgttcatagttacaacattacgtgaattattttttgaataattagacatacggttattcctttcttctgacgttgttgtatatcttgatgcagatttttgagggactgatttgattgcgttttgttttgttgtttgttgtgactgctcttttgctggcgcttcatttacctgttgttgtttgtcaggtacttctacttcctcttcatcatctattacaaaaaatccactaaataaatcttttaaagccaagtg

SEQ ID NO: 5376 - DNA, 239 bp, Staphylococcus aureus
caacgatatcggcatcttgctcaatcgaaccagattcacgaatatcactcatcattggacgtttatcttgtcgttgttcaacaccacgagataactgacttaatgcgataactggacattttaattcacgggctaatgcttttaatgtacgagagatttcagaaacttcctgttgtctgttatcggacgcacgtgaaccactaccttgaatcaactgtaagtagtcaatcacaatcatg

SEQ ID NO: 5377 - DNA, 114 bp, Staphylococcus aureus
tttgctgatttcacacgctcatcatgacgaacgattgctttttcaattgaaactttttctacaaagcggttgtttttatcacgtaaatctttaggtaattttgagttagcttca

SEQ ID NO: 5378 - DNA, 207 bp, Staphylococcus aureus
gattctaagtccgctagtactaattccatattaataacttcaatatcatcaatagggtctactcgaccagcaacatgagttacgttatcatcatcaaatgcacgaacgacctgacaaatcgcatctacttctctaatatgtgataagaatttattacctaacccttctccctttgaagcacctttcacaataccagcgatatctgta

SEQ ID NO: 5379 - DNA, 207 bp, Staphylococcus aureus; identical to SEQ ID NO: 5378

SEQ ID NO: 5380 - DNA, 181 bp, Staphylococcus aureus
ccatcaacgccattattttagcgcctttaattaatgcttcatcaccatgtacactcgcagccgcttctctaaatctatgcgtatgtcctactaaattacgtgatcctattttaatatgaggatgtattgttggcacaacatgacttacgttccctgtatccgtagagccataaccaaaatc

SEQ ID NO: 5381 - DNA, 266 bp, Staphylococcus aureus
tatatgctttatcttctgctagtaactgatctattaatggttggtagatatgttgacgttcagattgacgatatggtccgtagccattgtctttatctacagactcatcccaatctaatcctaaccatttaagattatcaaattgtgatgtttctccatcttctaaattacgttttttatcagtatcttcaattcgaatcacaaaatctccgttgtaatgtttagcatacaagtaattgaataatgctgttcttgcattaccaata

SEQ ID NO: 5382 - DNA, 168 bp, Staphylococcus aureus
tgtttgattttagtcgtcgaaatgccttctgtacgttttaaataaatgacttcacatttatcctttaagaagtcgaattcaccttcccagtcatgtcccataacaaaaacatctacatcaaatttttcgacatcgtcttctttttgtccccagcccttttctggaatg

SEQ ID NO: 5383 - DNA, 267 bp, Staphylococcus aureus
gtcagcatggaatgaatatgcatctttcataataaattcacgcccacgaagtaaaccaaaacgtggtctcttttcatcacggaatttagattgaatttggaataatgtcatcggtaattgtttgtatgatttcaattcatttcttactattgatgtaactaattcttcatgtgttggacctaatgcaaattgtcttccatgtctatcttgtaaacgcattaattctgggccatatgcaccccaacgtcctgattcttcccataattc

SEQ ID NO: 5384 - DNA, 87 bp, Staphylococcus aureus
tgcatccgatcttgcaacgctgtaaatgtttcgaagccatcctcttctaagaagtgccctccatcttccacgatttgcaagttcccc

SEQ ID NO: 5385 - DNA, 192 bp, Staphylococcus aureus
ggtaatggtcgcaatgatttagttagtagcgtgaatttcttcgctttaaccgataattcgccagtatttgttttgaacattacaccttcaacaccaacgatatcgcctaaatcagcatttttccataaatcaaattcgtcatcgccaacttgatctttacgaacgtaaatttgaatttgtccagctaagtcc

SEQ ID NO: 5386 - DNA, 149 bp, Staphylococcus aureus
tcactctaatttgacttggcttttccaaattaaaaggtgctacaaattggcgcatgatttcttgttcatccgtaaaatgcgtgttaacttcttcaaagtcaactgcaacatctgccacaatacgttgtcgaacctcatcatctacaaca

SEQ ID NO: 5387 - DNA, 275 bp, Staphylococcus aureus
tgtctttcggaacatgcacaactctccatggttccctcattccgtgatttggagcatcagcagctttctcaattgcttgatatagcaatgcgtcatctatgtgcatatctcttttaaattttttcacacttcttctattagctattgcttgttgtaattccatctaaaatcgctcctccacgaacaatgataatacttctcaattataagacagcacttacacaaaagcaacctaattcattttattagtataaagtcacttgtgcttttaaatc

SEQ ID NO: 5388 - DNA, 276 bp, Staphylococcus aureus; identical to SEQ ID NO: 4716

SEQ ID NO: 5389 - DNA, 247 bp, Staphylococcus aureus
caccaatacgacgagcttgtttttcatcactaaatacaacaaagcgatccccagcttgtggcacatcattaatacctgtaatttcaacaggcgttgatggaccagccgttttgattctttgacctaagtcattaaccattgcacggatacggccgtaagtattaccaactacaatcgcatcaccaacatttaatgtaccgttttgtactaataatgatgcagaaggaccacgtgatttatctaattc

SEQ ID NO: 5390 - DNA, 413 bp, Staphylococcus aureus
tctgctgcactcataaccgcaaaagttaataatgctcctgtttttgttttgtgtatcatttccaaagtttcaagatcaattggttggccttcgctttgcatatctaacatttgaccgccgaccattccaacatgaccacttgctattgacagccgttgtagaacttttatttttacttcatcagttaatctatcatcacttgaaataagttcaaatgctttagttaataaagcatcacctgctaatatcgcagtccactcaccatatactttatgatttgttaattttcctcgtcgataatcatcattatccatcgctggtaggtcatcatgaataagtgaatatgtatgaatcatttctagtgcaattgcgctcttcatacctaactcatactcggtatttagtgaatctaa

SEQ ID NO: 5391 - DNA, 211 bp, Staphylococcus aureus
gaagttcattcaattcttgatttactttcgctatattttcttttggatccaactttactaaaaatagttcagcatctccatcttcatgcaacgcatcataaatattttcaaagtaactaatatcacgcgttaagaagccatcgcgttccccagtgattttcattaactcagcaaatgtttttaaaccttctctatcagatcgttctactgt

SEQ ID NO: 5392 - DNA, 201 bp, Staphylococcus aureus
gcccaaatcataaggggcatgatgatttgacgtcatccccaccttcctccggtttgtcaccggcagtcaacttagagtgcccaacttaatgatggcaactaagcttaagggttgcgctcgttgcgggacttaacccaacatctcacgacacgagctgacgacaaccatgcaccacctgtcactttgtcccccgaaggggaa

SEQ ID NO: 5393 - DNA, 211 bp, Staphylococcus aureus; identical to SEQ ID NO: 5391

SEQ ID NO: 5394 - DNA, 290 bp, Staphylococcus aureus
agttaaactcaacttcttaccgacttcttcatcttcaaatttaggccaaagtatccctggtgtgtctaatagttgtaatgcattaccaactttaatccattgttgttgtttggtcacacctggtttattaccagtctgcgcaatactacgctttgccagtttatttattaatgtggatttaccaacatttggaattccaacgatcattgctcttatcgctctaggtttaagtcctttcgctttttcgcgttcaaatttttcagcagtcgccttaattgctgcagcttcca

SEQ ID NO: 5395 - DNA, 145 bp, Staphylococcus aureus
cagtcataatacgcaccgcttcgtgatccccaactaatttatcagaaactgaacctgcaccaatatgatcaatcactttaaactcaatgcgattctgaccacttgccccttgtgaatcaacactgcgaattgcaaaaccatcata

SEQ ID NO: 5396 - DNA, 156 bp, Staphylococcus aureus
caatgacttcacatggaagtgtgataaagatagatgtaccttgaccttctacactgtttgcccaaatacgaccattgtgcgcttccacaatctctttcgaaatggctagtcctaatccagtaccacccattttacgcgtacgtgccttatctacac

SEQ ID NO: 5397 - DNA, 539 bp, Staphylococcus aureus
caattgctctatcacttttaaataaggaactaaatgtgaagattgaaaaataaaaccaatatcttccaatcgtaaatcactaggacgatgctgtttatcaaacaatggcgcatcattgtaaagcactgtaccactcgtttgacttaacaatccgcctaatatcgttagcaatgttgttttcccagaaccagaggcaccatttaaaatgacaaattccccttgttccacttcaaaattaataccttttaaaacttttgtttcagacaaaccttctccgaaatttttgacgatatcttcaacgactaatgccattattctgcacctccaattgcttcgataggatccactttaaataatttgataaatgatagtgaggcacctaaaatcgctactaatataaatatccccaccattaataaaatattttgcgttgttaagtaaaaaggcatcgttaccggcatcataaatgatagtcctactatgatgatcacagcaatacctaccccaattattgttagtgttaaaatttgtaaaactaa

SEQ ID NO: 5398 - DNA, 341 bp, Staphylococcus aureus
tattgtgtaatacatcaaaccactatgtttacccattttcttaccatcaagtgttatcatatcacccggttgtgcaggtaaatattgtgataaaaatgttttaaagtttttttcgccgataaaacaaatgcctgtagaatcttttttcttagcagtaacaagtccttgttcttcagcaattcgacgcacttcactcttttcgatgtcgccaattgggaacatcacttttgaaagttgttgttgagataattgattcaagaagtatgtttgatctttattattatctacaccacgtaacatttcaacatgaccatcttcatgacgatgtatgcgtgcgtaat

SEQ ID NO: 5399 - DNA, 412 bp, Staphylococcus aureus
tccaatacgattggcatttgatcccgaacccactgtggcactttacaatctataaacaggcgattcactttcttataaccatcgcgcccattcagtttaaatgtatcgccactttgtcgtgttctcactgtaagcggaaataaacattttggtaaattagaatgtatctctaatcgatatttgttaaaaatataattacctggctttttaattgtttgaactctaaaatatgtatcgccattatttttagccattattattaatttaccatatgcgatttgaattatccatttatccgtgagattaatactgaattgtgctttcttactactaaattgtttaaaccactcttcgtatgttttagcactaatattaaacaactcataatactttgataataggcagtccaaca

SEQ ID NO: 5400 - DNA, 260 bp, Staphylococcus aureus; identical to SEQ ID NO: 4345

SEQ ID NO: 5401 - DNA, 154 bp, Staphylococcus aureus
gtgatgttgaaacactctcgctcttaaacgttgacgttgattcactgatacttgtcgatgttgaaatggacgtactaccacttgttgaattacttaatgatgttgatgtgctaccagattctgatgtactgtctgataatgacgtactctcact

SEQ ID NO: 5402 - DNA, 225 bp, Staphylococcus aureus
tcttcgctttaaccgataattcgccagtatttgttttgaacattacaccttcaacaccaacgatatcgcctaaatcagcatttttccataaatcaaattcgtcatcgccaacttgatctttacgaacgtaaatttgaatttgtccagctaagtcctgaacgtgtgcaaatcctgctttacctttaccacgcttagtcattaatcgtccagctatagcgacatgac

SEQ ID NO: 5403 - DNA, 181 bp, Staphylococcus aureus
tatcaacaattagcccccattcaaagcgtgaacgtaatcggtcttctaattgtgcaatttcctttggtggtcgatcactcgaaataactatttgcttgttattctgatgcaattcattaaaagtatagaaaaattcttcttgtgtttgtaccttgttttgtatgaactgaatatcatcgat

SEQ ID NO: 5404 - DNA, 257 bp, Staphylococcus aureus
ttcattttcttgttgattcaaactaatgaaggcgtcaatatcagattgtttaactggctctaattgagtcgcttcttctttaagttgagctaaacgctcatttcttaaaccaatatctctttctaacgattgcttatgcgctcgtgctttttcgtaacgatccacacctttttctgggaatgtgattggctcaatatttaactgttgttctagagacttccattcttgtgaatgatcatgtaaagcaacctcttttt

SEQ ID NO: 5405 - DNA, 168 bp, Staphylococcus aureus; identical to SEQ ID NO: 4245

SEQ ID NO: 5406 - DNA, 183 bp, Staphylococcus aureus
actaatttagcacctgtctgtgctgtaatttgtgcaatttgcgcatacgcatcgcttggaatactacttggtacacttccagcaacaataactatatcttcgcttgttgtatttttaatttgttgtaacagttgttcaaattgtgttgacgttatatgaggacccggtgcattgatttctgtt

SEQ ID NO: 5407 - DNA, 193 bp, Staphylococcus aureus
taacatcgcgtttctctttgcctgtttcaagtctaacagcctttacctcattaagatcaaaattttgtggatttccaggtggcgttaataaatcgccaagttgattacgccataaatcattagccttctccgttttagtacgatgtatattcaagtcattagaaaagaaacaaactaacggacgtttaccacc

SEQ ID NO: 5408 - DNA, 193 bp, Staphylococcus aureus; identical to SEQ ID NO: 5407

SEQ ID NO: 5409 - DNA, 491 bp, Staphylococcus aureus
tgcaccagcttgttctacatttttcgcgtctaaaataagttgctccgctgcttctttcgttgcaccttgtaatttataccccataacgccaacactttgaggtgttaatcctaaatgtgcaacaacaggaataccaattgccgttgctttttcaataaatggtgtaatatgcgctccttctgctttaattgcatttgcattcgtctcctgataaagctttagagcatgatttaagtcttgtgtcatagagatgcctactgcaccaatcggcatatcaacaactacaaatgtatttggtgcgcctcttcttactgcacgaccgtgatgaatcatatctgctaacgtcacttgtacggtactttcataacctaatacagtcataccaagtgaatccccaacaagaatcatatcaatacccgctgcttccacttgtttagcacttggaaaatcataagctgttaccatagaaattttagtttgcttttgtttca

SEQ ID NO: 5410 - DNA, 86 bp, Staphylococcus aureus; identical to SEQ ID NO: 5326

SEQ ID NO: 5411 - DNA, 471 bp, Staphylococcus aureus
tccatttcatgcgcttcatcattaccttgcgctttttcaacaagttgcgcttcaaaacgacctttttgatcaataggatcatttaattcagtaaatgcatttgcatgctctctacctacaatgaacaattcgaaacgatcagtaaatctaggatcttcaggatttttcttcgctaaaggtgaaatttcagtcggatgaccatagataaacgttggctgaataagtgtttcttcaactttttgctcaaagaattcatttaaaatatgaccatatttcattgtatctttaatttcaataccatgttctttagctaaagctttagcttcttcatcacttttaacttcataaaaatctacaccagtagcttcttttacagcatcaacaatatgcaaacgagtccaagcagattctaaatcaatcgtttccccattgtattgtacttttgcagaacctaacacttcattggcaata

SEQ ID NO: 5412 - DNA, 215 bp, Staphylococcus aureus; identical to SEQ ID NO: 5273

SEQ ID NO: 5413 - DNA, 374 bp, Staphylococcus aureus
tgttttactattttgtgttgattgatgcttcgatgattgaagcgtatctttaccttctgtcactgttccacttttaccattctctttatgcatatcgtctaattgctttcctgactgcatttgatgtgacgttatcgcattcccttgttctcccggttgatttagtgtttctttttgtgccgctgcattagttgatgttttttccgaggcttgtgcttcatgtgatgacacaacaaacattgtagccgctaacactgacaccacgcctattgaatactttctaatactatactttctttcttcttgtcctcttaacatataatcacctcaaaagtatttttttgaccccctcttgagaatgaaaaacaactgca

SEQ ID NO: 5414 - DNA, 135 bp, Staphylococcus aureus
agttaaatggtttttaatgccgcttgaaccattcgtttctactttaattttaatacccattttatccgcttgctttttcaatgcatcacgtgccatatatgtgtgtgcaatacctgttggacaagcagttactgc

SEQ ID NO: 5415 - DNA, 238 bp, Staphylococcus aureus
taagataatttagccattagttaagactcccttcttcgtacacaaatgcataggcttcttcgacacttggatatggcgcgtcttcagcagcctttgtcgctttattgatgatgtctttatgctccgcttctatttctgccaaccaagcatcatcgataatgccagctgaaagcaactcttttttgaacttttcattgcagtctgcttttttaagcgtttcacgctcttctttcgtacg

SEQ ID NO: 5416 - DNA, 166 bp, Staphylococcus aureus
tgtctttgtagtcgatatgtgtaataccatttgctgtgaaatagcatacttttttacgacgacgtccgcctcttcttggtccacctgccatgattgtgtgcctcctttgataattttttcgctttaatttcgttaatttttattagaatggtaagtcatcatcact

SEQ ID NO: 5417 - DNA, 257 bp, Staphylococcus aureus
cgtttgaaatcgataacacggtattgacgtttgtgtccaccaccatggtgtcttacagtcaatttaccttggttgttacgtcccgcttttttcggtagcggttttaataatgacttttcaggtgtagttttcgtgatttctgcgaaatctaacgaagtcatattacgacgaccatttgttattggcttatactttttaatagccattgtcgcttacctccttaatggtaattgttttattagttaaataagtcgatt

SEQ ID NO: 5418 - DNA, 450 bp, Staphylococcus aureus
tgtaggatcaataaatagatttaaagataattcagcagttaaatctttcttttcttgtacatattctttaaacgtatatctaacttttctttctccaattatttctcctgtcgccataacttgaccatctgtactttttatctccggaactttacgcagtgttgagataccatgagtttcaacattatcgcttaatgtgaaatcaaaataatctcccgccttaattccttctccaaatttccatttatatttcaaggttactctttctgcgttatgaggatttacaacattcgtatcttgtttatgtcctacaatttcactaccttcttctacttccactttatttgttacatctgtacctgtcgctttagtttcttccactacttctttctctgcaactgctgtaacgtcagttgatcttttcattcttggtttaatttctgagacgtt

SEQ ID NO: 5419 - DNA, 298 bp, Staphylococcus aureus; identical to SEQ ID NO: 4707

SEQ ID NO: 5420 - DNA, 330 bp, Staphylococcus aureus
tgaataatcgctgctgaatatacacccaatgcacattgaactaacataaagcccatttgactcatcgtagagcccactaattggcgtttatagtcaacttgaactaagctaatacccgatcctaacaatacagaaatactagaaaggataagtaataatgataacgcaaatccattatcaaatatcggcgcaaaacgagttagaataacaccacctgcattcacaattcctgcatgcataattgccgatactggcgttggtgccgttacagattcaatcaaccatcgatgaaaaggaaattgtgctgccggtatcatgacagctaataca

SEQ ID NO: 5421 - DNA, 114 bp, Staphylococcus aureus
gattgtgcaactgagtcaccattttttgctaatacagtagcgattgctgctgttaatgttgttttaccatggtcaacgtgaccgatagtaccgatattggcatgttctttagaa

SEQ ID NO: 5422 - DNA, 261 bp, Staphylococcus aureus
actagtggttgatgttcgacttctatgataccttctaaacctgcattttcaaaagcttggtttacttcttctgcagttacttctttttctaaatcaacaactaaatcaacgagcgatacattctttgttggtacacgtaatgccatgccgtgtaatttaccttctaattctggtaatacttcttttaaagctttcgccgcaccagtagaagtaggaataatgctttcattacatgaacgtgcacgtcttaaatctttatgt

SEQ ID NO: 5423 - DNA, 330 bp, Staphylococcus aureus; identical to SEQ ID NO: 5420

SEQ ID NO: 5424 - DNA, 162 bp, Staphylococcus aureus; identical to SEQ ID NO: 4246

SEQ ID NO: 5425 - DNA, 400 bp, Staphylococcus aureus
tccatttcaaacgcttggacgatatcttgcatcgtacatacattaatttcatgtccttttaataatgctaacttttcaactatgtctgggtacttacgatataaatcaacaacttgctcaaaatctttagagccgcttcgactactaccaatcaacgttaatcctttttcaagtactaatcgtgtattcacttccacgggtaattcacttacgcctaacaaagcaatactgccttctggtgaaatatgttcaactatttgttgaagtgcaacttgacttcctttacctccaacacattcaaatgcatgatcaattttaagatcatctggtatttgatttactgtaaagatgtcatctacaaatgaaaaatgacttaatttatagtctgtcttaccaaata

SEQ ID NO: 5426 - DNA, 131 bp, Staphylococcus aureus
caccagccgcttttgttaattcactcgcttttacaatttcgtcatggtccaacaataccgtctcaataatcacttttactgtgtgacctttcgcagctttcaccactgcttcaatgtcttgttgtacatca

SEQ ID NO: 5427 - DNA, 131 bp, Staphylococcus aureus; identical to SEQ ID NO: 5426

SEQ ID NO: 5428 - DNA, 624 bp, Staphylococcus aureus
tgccattctgttgacaatatctgttattttacctagttcagtgtataaacttttaatatattttaaacgtgctggtgtattataaaataatgattctacaagtatatctgttccttttttcgcttttgcaggcttatgatttaatatttcaccattttctacatatatttcatttccattagcattatccgtgcaagtcttcaatgttactttagcaactgatgaaatactggctagtgcttcaccacggaatcctaatgtcctaatatgaaataaatcttcatcttgatctaatttactagtcgcatgtctatgaaatactaatcctaagtcttccgcttcaattccgcttccattatcgactacgcgaatagattggacgccagattcctctacttcaatgcttatttctgtagcgcctgcatctatagcattttccaacagttctttcacaacagaactcggtctttcaactacttcacctgctgcgattttatttgctaatgaggtttggagttctttaattttccccattttgcaacacctctattttaattgattttgtaattcacttaacttcaccaatgcctcaattggtgtcatattagataaattcaaattttt

SEQ ID NO: 5429 - DNA, 236 bp, Staphylococcus aureus
gtccgcatagtttaaaaaattagtttttgatttatcaatattttctccaaccatttgtgaattaccagaactgtcatttttcacaaaagctccgtatcctctataaccttgtccagcttgcttttcagttttgtccatggaacttgtataaatgtatccagtatcaattttaaatccgcctgaatttaccagacctttatccccaaggattccaccattagttaaatattcttctg

SEQ ID NO: 5430 - DNA, 253 bp, Staphylococcus aureus
tgaataaatacacttaggcatcatgttatagtttactgggattgggttcccctcaaacatatgatcaacagccacaacaccttcttttgatccaacatgtgccaattgtaattttcctatacaatcaccagctgcataaatatgtttatcttcagtttgttgaaattcgttcgttaaaatatgtcctgatgttgaaagttttattttagtgttgtttaaaccaatatctgatgtgttaggttttctaccaatc

SEQ ID NO: 5431 - DNA, 1000 bp, Staphylococcus aureus
tcaaaaccaggtttacctaataatgcgaacatgttttgtttatatgcttctacaccaggttggttaaatggatttacgcctaattggtatccactcattgcacaagcaagttcgaagaagtatacgacgtaaccgaaagtttcttcatctaattgtggaatgttcactaccatgttaggaacaccaccatcagtatgcgctaataatgtaccttcgaatgcttttgtgttaacttcgtcgattgttttaccagctaaataatttaatccgtctagatcatcactatctttttcaatagtaatatcatatttaggatgatttacttttacaactgtttcgaataagaagcgacggccttcttgtacatattgacctaaagaatgtaaatcagttgtgtagttggcacttgaaggatagatacctttgaagtctttaccttctgattcaccaaataattgtttccaccattcattaaagtattgcatagatggttcatagttaatcaacatttctgttgtataaccttttgcatataaaatgtttcgaattgtcgcatattggtatgcaatgttttcttctaatttatctgaagataattcttcacgtgcttttgcagcaccaatcatcatagcttcgatgttaattccagctgttgcaattggtaataatcctactgctgttaaaacagaatatcttccacctacatcatcaggtacgataaacgtttcataaccttcgtttgtagccaactgttttaaagcacctttttctttatccgttgttgcaaatatacgtttttgtgcttcttctttaccgtatctttcttcaactaattgtttgaacaatctaaatgcaactgctggttctgtagttgtaccagatttagaaataactgtttacagagaaatctttgtctgctaaataatcaactaactctttcgtatatgttgatgataagtgattaccaacaaatacaatttcagggtattcattgctgttt

SEQ ID NO: 5432 - DNA, 105 bp, Staphylococcus aureus
acggcccattgcttcaatgataaatgttcgtgcgtgacttgacgcagtatctctaattttgtcgactaagccaataatcgtatttaatgctgtgtcaaatccaat

SEQ ID NO: 5433 - DNA, 186 bp, Staphylococcus aureus
tgatgaccaaaatgttcgaacattcttctgacttggcgattacgaccttctgtaattgtaatttcaaccaatgttgtgtttttatctttatcttgtttcttaactttcacttcagccggttgcgtcataccatcttctaattcaatacctttttctagcgctttcacttcttctctcattaaataa

SEQ ID NO: 5434 - DNA, 117 bp, Staphylococcus aureus
cttgaattcttgctgtttccattttagggtgtaagttcgacatatccatacgacgaatatatttaattacaccagcaccttgtctcatatctacgacacgcccttcgtcatcataga

SEQ ID NO: 5435 - DNA, 87 bp, Staphylococcus aureus; identical to SEQ ID NO: 5384

SEQ ID NO: 5436 - DNA, 108 bp, Staphylococcus aureus
tccttaacctcttgtaaaaactgtgtccacattttatcaggtgacggttgccctctatataccaacgtattagcaaacatgcctagcatttgctccgtgcctttatgc

SEQ ID NO: 5437 - DNA, 178 bp, Staphylococcus aureus
cattgcacaagcaagttcgaagaagtatacgacgtaaccgaaagtttcttcatctaattgtggaatgttcactaccatgttaggaacaccaccatcagtatgcgctaataatgtaccttcgaatgcttttgtgttaacttcgtcgattgttttaccagctaaataatttaatccgtct

SEQ ID NO: 5438 - DNA, 177 bp, Staphylococcus aureus
gccccatttgcaaccaattcatataactatttccggatttttggcgatacttctatttctttcaggatgtgcaatgattggtatgtaacctctcgattgtatttcaaaaaacaattgttttgtataatgtggtacttcgcccgttggaaattcaattaataaatatttcgaacgatt

SEQ ID NO: 5439 - DNA, 230 bp, Staphylococcus aureus
tattgtctgttcaataactcgacgacctgcaaaacctatcaacgcttttggctcacttaaatttatatcaccaactgatgcaaaacttgcagatacaccaccagtagttggatgtgttaaatatgatatatataatagtccagcgtcagaatgacgttttaaagatacactggttttacccatttgcatcaaggaaataataccttcttgcatacgtgcaccaccacttg

SEQ ID NO: 5440 - DNA, 305 bp, Staphylococcus aureus
tgctttttagtatctaattctgtatatgcagcttgtttttcttctgtagttgaagcattgctattttgaatttcttgtttacgtgtattatatgcgttttctacttccgtatcagctgcaggtttaacttttgcttgtgtttgaattgcattgattttatctaatacttttgattttgtatcagcaacttcctgttttgatttaacaacttggatgtcatgtaaaccttgcttttgagctgcatctactgctgcatcagcttctgctacttcttcatttgttgcatttgaaactgtagcattttg

SEQ ID NO: 5441 - DNA, 268 bp, Staphylococcus aureus
ctaaagccgttgtcggctcatcagcaatgattaactttggtttcaaagctaacgctaaagcaatcatcaatcgctgtaacattcctcctgataacatgtaagggtatgattttaatatacgtttaggatctttcaaacttaaataatccatatattcaatcaatgtcttttcaatttcttgtgtagacattgacgtatgtactttcatagtctcaaacatttgtttaccgacagtagttgatgggtcaaaggcacgactaccttgttg

SEQ ID NO: 5442 - DNA, 159 bp, Staphylococcus aureus
tatctccagagtatacagtatcgatttcttgacgtgagttagcgtgcatttgtaataaacgacctacacgttcacgtttacctttagtagagttcttaacgtatgaaccagatgtcattgtacctgaatacacacggaagaatgttaatttaccaacat

SEQ ID NO: 5443 - DNA, 544 bp, Staphylococcus aureus
aacatctctacaaagtctgaaccactaatagagaagaatggtgcagccagcttcacctgcaaccgctctagcaagtaatgttttaccagtacctggaggtccaacaagtaagacacctttaggaatcctagatcccatttctttgaattttttattatctttcaagaaatcaacaatttcaattaattcttgtttttcttcatctgcccctgctacatcagagaaacgaacacgacgtttattattatcgtacatttttgctttagatttaccaaagttcatcatacgaccgccactaccgccaccttgtgcttggcttaggaagaaaataaataataacgctatgactacaactggaattaatgttgaaagtatactcacaaagacactttgtttttcttcttctttaatcgttaattttacaccgttttgctttttagcagcatcagtaattttttgtaattctttttcgttgttatataaaatagttgatgaatagtcttcatcatttttcgttttaccacttaccatatagacattttgt

SEQ ID NO: 5444 - DNA, 177 bp, Staphylococcus aureus
actatattagttgtttgatttaagaccaaactttttgttgaaacgttccacacgtccatccgcagcagcgaatttttgacgtccagtgtagaatggatgtgaatcagatgaaatatctaaacgaataactgggtattcttttccatcttcccactccatcatttctgaagatgtttt

SEQ ID NO: 5445 - DNA, 605 bp, Staphylococcus aureus
tctaacatgtcttttgtatgtgcagctgtaggcatatttcttacacgtcctgtacctcttggtactgttgggaaaacgatagatttcacatagacaccttcgtcttttaaacgcttactaaattcttgagttgttttttcatcaccaataattactggtgtaattggagtttctgactcacctgtatcatatcctaattttgacaatccattttttaaatattgtgcattgttccataatttatcatgtaattcagttgaatccattaactttttaactgcttcagttattgctttggtatccccaggtgctaatgatgtagagaataagaatggtcgtgattgtgcttttaaccaatctattaactcttttgtacctgctacataaccgccaacgacaccaattgctttagaaagcgtacctatttggaaatcgattttatcttgtaaaccaaaatgtttaaccgtaccagcgcctttacccataacacctgaaccatgagcgtcgtcaacataagttaataaaccaaattcttctgcaatttctacaatttcaggtaatttagccacatcaccatccatactaaaaacgccatcagtgatata

SEQ ID NO: 5446 - DNA, 693 bp, Staphylococcus aureus
tttttcagctaatttttcaggatgtgtagagccacatttctcattgatattatatccatcaggactacatccaattgtttcagtatctgcttctaagtcaccaaataagaatggcgctagtgatgatgttgaaccatttgcaccatctaaagcaattttcaaaccttcaaagttaacatctactgttgattttaaatagctcaaatatttttgtgccccttcaaagtaatctgaataatgtacaatatcattgccaactggtcttggtaattctgggttttcttgatccaataatgcttcaatttcattttcttgttcatctgatagtttaaaaccatctgatccaaagaatttaataccattatctgcaactggattatgagaggctgaaatcattacacctaactctgcacccatatcgcgtgttaaatatgcaacacctggtgttgaaataatacctaatcgcatcacttctgcaccaattgaaatcaaaccagctattaatgctgattctaacatttcacctgaaactctagtatcgcgacctacaagtacacgtgggtgtttttcacctttattatgtgctagaacatagccaccgtatcttcctaatttaaatgccaattcaggtgttagttcttggtttgcgacacctcttactccgtctgtaccaaaatattttcccattgttta

SEQ ID NO: 5447 - DNA, 244 bp, Staphylococcus aureus
gaaccatcattgaaaaattcactcgttttacagttcggacaaatatagtgtggcggtaacgggtttacttcagtaatctcagtcattgtcgctacaaaactagaacctactgaaccacgggaaccaactaagtatccatcatctaatgattttttaactaaacgttgcgaaattaagtaaattaccgcaaatccattaccgataatactttttaattctttttctaatcgatcaattacgattt

SEQ ID NO: 5448 - DNA, 405 bp, Staphylococcus aureus
catagcaccatctaattgttgcgctttggctttaactgtattaacaccttcaacatttgttgcttgtgtaatttcattgtctaacgctgtacgttgtgcattattaatgtgtgttaatgtacctaacgtttgtttcgcagctgctttagcttcatttaatttcgcatcaccgttcaacgccgtcttcgtactgttcacattttgcaatgcttgttcaactgctgctttgtctacattttgaccactagcttttgttaaaattgctttcgctgcatttactgcttgatcataagctgatttcttacttggctctgcatctaggtatttctgagtttgttttgtttgtgtctcatcattgataccattttgtaaactatgcattgcgttatttaattctgttgcttt

SEQ ID NO: 5449 - DNA, 214 bp, Staphylococcus aureus
gtcatcacggatgataacacatgcattttcatcaaatttgatgtatgaaccgtcattacgacgaacacctgacttagtacgtacgattacagctttgacaacgtcaccttttttaacaacgccacctggtgttgcatttttaacagtacatacgataacatcgccgatgtttgctgttttacgaccagatccacctaatactttgattgtaaga

SEQ ID NO: 5450 - DNA, 1033 bp, Staphylococcus aureus
tatcaccagcaccaatgataatgacattcttatcttttgcagttattgttatatcatcaatttctccatttaacaactgcgtttgttcagttaaataatccatagcgaaatgtataccatcacccatgcgtccttctaaaggtaaatctctacctttttgtgcaccagtacataatataatggcatcatactcagattctaacgttgctttatcaatatcaacaccgacttcaacaccattaatgaaagtaatgcccgcttcttccattaacttaatacgacgtcgaaccacatctttatcaagtttcatattcggaataccatacattaataaaccgcctgattctctagcacgttcataaatagttacttgatatcctagtagattaagttcttcagcagcagctaatcctgctggaccgcttccaacgattgccactttttcatctctacggcgactcggaactttcggcgctacccaaccattttcaaaagcttcatcaataattgtgcgttcaatacctttaatcgcaatcgattctctattaatcttcatcacacaagcactttcgcatggtgcaggacatacacgccctgtaaagtcaggaaagttatttgtttcgcttaagcgttcataagcagttttaaaatcttgatgatacactaagtcgttccattcaggaatgtagtttccaattggacaacctattgtttccctaccatactgttgtccggtttgacaaaacggcgttccacaatccatacatcgtgcaccttggatagaggcatcttctttagtaaatcgttgttgatatgctttatgatgcttcaaacggtctaccagtgataattcacctaagtactgtttgtcatacttcataaatcctttaaattcacccatcgtatctccccctttccttaatacacaacggctggtttatgtttagcatcgattgttttactgtcatcgtaaaatgcagctaacatcgcttcatcttcattgtcatgtaatgatttgtgcaaatgaattttt

SEQ ID NO: 5451 - DNA, 332 bp, Staphylococcus aureus
tgtcgacttgattgaagtttgtcgataaaggtttggataatgtcgttatcaataaattcaccagtttgttgaatgatttgttgatgatatttatgaattctttgaataattgggctattttcaataactgtctctgtcatttcttgttgaatattaaattttaaatcttggaaattctcataatccagcttatgactaaagcgtgtcatcgttgctggtgatgtaccaatcgcatgggctaaggagttaatcgttgaaaaggcatcgctataaccattttgtcttatataattgacgatgcgtttatcagtttttgtaaataaatgttgata

SEQ ID NO: 5452 - DNA, 299 bp, Staphylococcus aureus
cattatgtcggatatgtgttgaaaccagtcttgccattatatttctcagttgatgtatattctttgttgtggtcgcatctgttaagtgaaaatatagacaatgcacatcatcaaacttgtctgctaaatatttcatttggaattggatataacatatgatgccatcttgttgaagttgaaatcgatacaagtcgcggtggttaatgatgaaaatgtcgccactgttgcattgcgtcatattattttcatcataaatgtgtgcctcacctttaataacaaaaccaatcattaaactattg

SEQ ID NO: 5453 - DNA, 289 bp, Staphylococcus aureus
tgtgcttttcgcttttctaatttttctttaagctttctatcttgttcttctttacgacgtttacgttcttcatgtcgttttcttaaacgctcttcttcttcaggatcacgtggtttctttaattgttgagaaactttttcgattaattcttcttcagtaagcgcagccagtgggcggttattaacaaaagtgaatgtttttcggcgtccaggtccacaataagattgacaacctatcacgatttcagcatcgggatctaatttttccaacttcttttgtaacgttctta

SEQ ID NO: 5454 - DNA, 101 bp, Staphylococcus aureus
gactgcgataaatctgcggcaccttcgactatcatgtctaaaccttcgacttgtgctatatcgtcaatggccataaccccttcaacatcttctatcatggc

SEQ ID NO: 5455 - DNA, 685 bp, Staphylococcus aureus
caaatataaatttaataatataaagataaggttgtgtttgtattaatgtgatttgtaaaatgaaagtactaatattttttgtggataatcattgatatgtatgtatacgattgcagtttaatgtagtatgaataaaaaatgccacaagcatatgtttaacatatgactgtggcatagtattatgcttgtggaattttacgatgcttaattttataaataatgaagccgataatgaaaccaatcaaactgagaacaacccagcccataccaatgtctgataatggtaaatatttttggctgaaattaatcaaagtttgtgagaatgatgtgcttgaaatgaactctggactagcttttaatccatctactaatgcagcaatcattgtaaagaaaatggtacattgataaataagttttgaatgatggaatttgctactaaataatgttagtacaatcaaggcaattgctaatggatataagaacattaacactgggactgagtacataataatcttagttaaaccaacattcgcgaataagaacgaaataaagcttacaactgttgcaatcgctaggtaattcattttagggaaaaggtgttcgaatgtttctgaaaatgccgtaatcaaaccgatggctgtttttaaacaagcacaccataacgataagtgacaacaggacgata

SEQ ID NO: 5456 - DNA, 292 bp, Staphylococcus aureus
aataactttaacgacgacatcttcaatgcgatcaaaatgttttaacacatgaatcgctctcgtactattcgtgtgtgacacatgttcttccagcatttgcttaatgaatgctttttcttcttggtgtttaatctttgtaaacgaaagcgtatctagttgattattttcaacaaaagcttctacatcagacgggataacgtaagcaataccaccactcataccttgaccgaagttcttacctacatcacctaaattaatgacatgtccaccagtcatatactctaatccatgg

SEQ ID NO: 5457 - DNA, 292 bp, Staphylococcus aureus; identical to SEQ ID NO: 5456

SEQ ID NO: 5458 - DNA, 385 bp, Staphylococcus aureus
ccataaatatggtataactgaggattttatgttgagtggattagttgaatatacctgttaatccaccgctgtttctagattgttgagatctagtattgttatttgattgtgcagtaccactgctgtttgctgatgtgtcactaccaccgtgtgtactacgatttgtagtgttgttatcttgactaccagaaacattgattgatgggatactaccacttactgagctaggacgtttaaagtcttcgccatctctagatgaaatttttgacatcacattttcatataagaactgtggatattcttgttggctatgtcccacaaatgagttttcaccatattgtttaactttactgaagcccatccacactgacatagtgtattgagg

SEQ ID NO: 5459 - DNA, 349 bp, Staphylococcus aureus
gtcgataaacattcatatcgtagcggtctgcaaattctttaatgcgatatgccggcggtaccatgacaggtaatgaatcatgtttgaattgttcgtctacggcatctttttgaataggtaatccaaagaagcctgcaataccaatcgtttcaaagggccctgctgcttcgatatgtctacgaaatggttctgaacgaacatctatacaaaatgcaatttgcgctttcgttgatgtgcccatctgatttagctcgctattattttcatcaactgcttgtgtgtcatttaacaatactgaatgtggctgattagcgttatcattttctgagacatttacttggtttacatc

SEQ ID NO: 5460 - DNA, 174 bp, Staphylococcus aureus
tcagcttcagcaattttgtcacctttagcgaatactaatacactttgtgatttaccagttccgtttggtaatacaactgcaccacggatttgttggtcatttttacgtgtatcaattcctaaacggaatgcaacttcaacagaagcgtcaaagttagcaatgcttgtttcttta

SEQ ID NO: 5461 - DNA, 115 bp, Staphylococcus aureus; identical to SEQ ID NO: 5201

SEQ ID NO: 5462 - DNA, 89 bp, Staphylococcus aureus
gatcactcgcattaccttgcatgacaccaacacctgacgtgacggtttgtgtcgctttattcccacttccgtaaaaatgcggcgcaaca

SEQ ID NO: 5463 - DNA, 149 bp, Staphylococcus aureus
ggtttaaactgatgttgtgtcacgtcaatccattgatactctaaatcttgcaaagcgaattttgttaattgtgcagtattaccgtttggtctactcccaccaaacaaaacagtaatcattttagcctaacctcacttttgattaataaa

SEQ ID NO: 5464 - DNA, 102 bp, Staphylococcus aureus
atgaacaacaacttgcttgtcttcaacttgttgtacctcgccagtgactttgtcaccttctttaatatcgttaatcattgattcattgaattcttcagtcat

SEQ ID NO: 5465 - DNA, 342 bp, Staphylococcus aureus
tattcaagtcattagaaaagaaacaaactaacggacgtttaccacctgatacataatctatgcgcgctagaccgccgaagaataatgtctgcgcctcatttaattgatatacgcgttgttttatttctttcttaggcataataattttcaattctttttcactaactaaatgcgtcatttggtgatcttgaataatacctggtgtatcatacataaatgatgtttcatctaaaggaatatctatcatatctaaagttgttccagggaatcttgaagttgttactacatctttttcaccaacactagcttcaatcagtttattaatcaatgtagatttcccaa

SEQ ID NO: 5466 - DNA, 492 bp, Staphylococcus aureus
tacataacgtttcatcaataattgttaagcttaattgctcgttaacaaaatctaaatgtgaataactatactccaatatatctttgatattttgaccactaattgtcatatccattggcttatctggatatgggtatgcatgatacaaatcttcatttcgaatctgtccactcaaccccttctctccgttcataggcacgtggacacatgttatatcattatcaaatgcaaggtgaattgcatcatgtaataattgcgaaaatggatgtgtttgacagactaaatcttgtaacccatttactgataacatcaaacctttatcacttatgatttcctgtgaccaataagccactgcttttctatcatagaatgttaaatctaataattcttgatcctcttcatactcatttaagtcaatcactttagaatcaatgctttcaacatcataagttgttgttctctttttaaaattaatcgaaagatgtacaagct

SEQ ID NO: 5467 - DNA, 88 bp, Staphylococcus aureus
gcttgtgcctcttttgataaaggaacgtgaaccgccatttggtcaccgtcaaagtcagcgttataagctgttgttacaagtggatgta

SEQ ID NO: 5468 - DNA, 151 bp, Staphylococcus aureus
gaaacgatcagtaaatctaggatcttcaggatttttcttcgctaaaggtgaaatttcagtcggatgaccatagataaacgttggctgaataagtgtttcttcaactttttgctcaaagaattcatttaaaatatgaccatatttcattgta

SEQ ID NO: 5469 - DNA, 108 bp, Staphylococcus aureus
tctttagcttcttctttaccgtcacttacgacgattgtaatgtggcttgtacgtttgttaatcgcacttgcacgaccttgcgcacgtggacggaaacgttttaatgtt

SEQ ID NO: 5470 - DNA, 155 bp, Staphylococcus aureus
tgttggacttaactcgacattagcctgctgttcaaagtatttcttttcttcatctgtaatcaagcttgacgcagttactggttgtggcatcgttccatcattcatacctactaagtaaacatgttgcttattatcgactttagccaaatccatcg

SEQ ID NO: 5471 - DNA, 128 bp, Staphylococcus aureus
acggcctttacgacgacggcgcgctaaaactttacggccattttttgtgctcatgcgttttctgaaaccatgaactttactatgtttacgtttatttggttgataagtacgttttaccatgcaaaaca

SEQ ID NO: 5472 - DNA, 117 bp, Staphylococcus aureus
cccagtactgatttcaacgctgcatgtaataaatgtgttgcactatggttcttttgaatgtcacgtcgatcattttggttcacttcagcagacactgtagcgccaacatttacttgg

SEQ ID NO: 5473 - DNA, 158 bp, Staphylococcus aureus
tcattttcaacgttgaaacttcaaataagtaatttattgttgccattgtttatacaacataatttaattgaccttcatttttgaacacatcgtcaattgttgcaccaccaagacacacatcaccttgataaaaaacaactgcttgtccaggtgtgatt

SEQ ID NO: 5474 - DNA, 138 bp, Staphylococcus aureus
actaattgttctaagtagtcaacttgttctgcagctgtacgttttgcaccgtgttcgccttcgaacttactgtagtcatatacaccattttcatagaattctgatgatgcacagtcaaatcctaagaatacttcttca

SEQ ID NO: 5475 - DNA, 273 bp, Staphylococcus aureus
tgtaattgtgctatcgcctcttcgactgtcacacctttaagttgtgttgccgcattggttaaatgtccaccgccaccaagtgcttccattgttaactggacatttactgaaccgagtgaacgcgcagatataccaatcagattatcttcacgtctcgcaacaacatatgatgcttcaataccttctaaacttaacagttcatctgctgcttgtgcaactgttactggatgataaattttatcgtctgaaccatgcgcaatggctatgccatta

SEQ ID NO: 5476 - DNA, 319 bp, Staphylococcus aureus
gcaattgcctctgtaacttcatttaaactttctaacttaatttgttcttctgatttttctaagcgtctaattttagaagatattctctcagccattatttatccacctgatttcccgggaaaacataatctgaacgttcccattttttctgtacttgaacactgtactgcggttgacgttttttattgacacggaaattattagggttcaacggtgacttaccacgtttcgtaattacctccaaacgacagctagtacgtttataagatggtgtatccgtgtattgatcaacatcactattagttaataagttaattgc

SEQ ID NO: 5477 - DNA, 291 bp, Staphylococcus aureus
gatacgttctgtaagttgtttccaaccatcccagtcgttttcgtccataccgtcttcaattgtaatgataggatatttgtctactaattgttctaagtagtcaacttgttctgcagctgtacgttttgcaccgtgttcgccttcgaacttactgtagtcatatacaccattttcatagaattctgatgatgcacagtcaaatcctaagaatacttcttcacctggtttgtaaccagctgcttcgattgcttggataattgtttcaacagcatcttcagtaccttcaaattt

SEQ ID NO: 5478 - DNA, 102 bp, Staphylococcus aureus
atgagtaagaactaatgtcttgagctaacaagaagccttcacagtgaagtttcagaaaagcgtccgcgtaagtcttccatattagcaaatgcgattgaatga

SEQ ID NO: 5479 - DNA, 94 bp, Staphylococcus aureus
attgtaccaactgcttcaccaacttcaactttttcaccagtagcaaggtttttaccgtaacatttttcacaaacaccatgtcgtgcgttacaag

SEQ ID NO: 5480 - DNA, 162 bp, Staphylococcus aureus
gtaaagcttgatttttatttccattaaacggataaatttgacgtgcaaccggcgcggcattttgtccataatatggtgcaacgtaacttgatttttgattattattcgcttggttattacttgattggttattatttgtttggttttggtcattgtttgttg

SEQ ID NO: 5481 - DNA, 193 bp, Staphylococcus aureus
cgataacacgtttaccgaatttgaaattaggaatttcaattggtcttgaacctgttgcaatgattgcatttttaaagttgtatgtttgtgcgctcttttcgtccataacacgtaagctattgttatctacgaaatatgcttcacctttaacgatgttaactttgttacctttaagtaagctttcaacaccacc

SEQ ID NO: 5482 - DNA, 439 bp, Staphylococcus aureus
agtaattagcaacggctgattagctttcacagtttcacctacactaaccttgacttcagttactgaacctggcatttgagcaccgatatgacttggattactcttatctgcttttggcttaacgttcgcatttgtatgcacattttcatctttaatgtaaatacgtctcgcttgaccattcatcgcatagtaaatcgttctattaccattttcatctggttcactaatcgtttctagtttaataattaatcgtttacctttatcgatttcgatttctactgtttcaccattacgcattccaaagaagaatgtaggcgtatcaagtaacgataagtttccgtattgatttctagtttgaatatattgttcatatacttttggatatagtacataactaataatatcttgctccgtaacaggaccttgttgctcttcttca

SEQ ID NO: 5483 - DNA, 186 bp, Staphylococcus aureus
catcaacagcaccaagatcctctgaatagttccaacatctttcacatttttcaccatctgcatgttcgatgacaatatcaccatgttcataagctgttgcctgatcgtctaacttatctacaactttaacttgtgacacgataaataattgatgtaatgcatcaaatgaagttaagaattcagatg

SEQ ID NO: 5484 - DNA, 548 bp, Staphylococcus aureus; identical to SEQ ID NO: 5131

SEQ ID NO: 5485 - DNA, 553 bp, Staphylococcus aureus; identical to SEQ ID NO: 4458

SEQ ID NO: 5486 - DNA, 335 bp, Staphylococcus aureus
taccagcaggttttgcggcaacaaagtcatctcctaaggtgtgctgcaatatttgagcaatttgcggtttacatttaccacatgaattccccgcttttgttttagccgttacttcttcaactgttgtaaagccattttccgtaatcgcatttactatagtacctttatcaacaccattacaaccacaaattgtttcatcatcagccatatcagcaattgatagcgatgcctcttctccacctttagtaagcaatgatacaagtgtgtaatcttcagtggattcaccttttttcatcatgttataaaagcgtgaaccatcatcgatatcaccatat

SEQ ID NO: 5487 - DNA, 159 bp, Staphylococcus aureus
accttcgacggctagctcctaaaaggttactccaccggcttcgggtgttacaaactctcgtggtgtgacgggcggtgtgtacaagacccgggaacgtattcaccgtagcatgctgatctacgattactagcgattccagcttcatgtagtcgagttgca

SEQ ID NO: 5488 - DNA, 325 bp, Staphylococcus aureus
cacgtaataatgcacgtagctgtggtctgaaaatatcttgttgcgcaaggcataaacgaatcgcacggtaacctaagaatggattcatttcttcaggcaagtttaagtatgataattctttatctccacctatatctaaagtacgtacaacaacacgtttaccgcccattgcttctaatacttctttataagcttcaaattgttcttcttctgtaggcatttggtcacgacccatatataaaaactcagttctatataagccgataccttgtgcaccattttcaataacacctggcaaatcattaggtgtaccaatatttgcagc

SEQ ID NO: 5489 - DNA, 919 bp, Staphylococcus aureus
tttaattccataatttcttcagcactatcgatacagctttttcactttcatttcttgtacaataacagtcttgtaatttactcattatcttcttccatctccttaacgtgttccgcaaccttcaaaaatacgtttatgtttattatcccaacatgccttgcttaaatcgactggatattcttgtggattcaggaaacgcttattttcatcccaaatagattgtaatcctagtgctaaatattcacgtgattcatcttctgttggcatttgatatactaatttaccattttcataaatattatgatgcaaatcaatggcttcgaaagattttataaatttcattttataagtatgcactggatggaataattttaaaggttgttcatcgtatggattttcattttccaaagtaatataatcgccttctgccttacctgttttcttgtttataatgcgatatacatttttcttacctggcgtcgtaaccttttcagcgttatttgataatttaatacgatcactatatgaaccatcttcattttcaatagctacaagtttatatactgcacctaatgctggttgatcgtatcctgtaatcagctttgtaccaacgccccaagaatctacttttgcaccttgtgctttcaaactcgtaatcgtttcttcatccaaatcattagacgcgataattttagtttcagtaaatcctgcttcatcaagcatacgtcttgcctctttagataaataagcgatatctccagaatctaatcgaatacctacaaagttaattttgtcacctaattcttttgcaacttttattgcatttggcactgccagattttaaagtatggaatgtatctactaggaacacacaatttttatgtctttcagcatattttttgaaggcaacatattcgtc

SEQ ID NO: 5490 - DNA, 179 bp, Staphylococcus aureus
ttttgcacctaagtcaattgatacttgcccagttgccatatcaggaattaacattggtacgaaaaatggactcacacgtcttgggcctttatccattaattgtttatgtgcaatttcaaatgtttccataccaccgataccagaaccaatccatacaccgattcgatctgcagtatttt

SEQ ID NO: 5491 - DNA, 265 bp, Staphylococcus aureus
ggatgatatggtaaaacgctttcagccaattctttttcagcgtcgactactaatttagcacctgtctgtgctgtaatttgtgcaatttgcgcatacgcatcgcttggaatactacttggtacacttccagcaacaataactatatcttcgcttgttgtatttttaatttgttgtaacagttgttcaaattgtgttgacgttatatgaggacccggtgcattgatttctgtttcttgtcctgtttttaatttcacattaatacgtg

SEQ ID NO: 5492 - DNA, 80 bp, Staphylococcus aureus; identical to SEQ ID NO: 5039

SEQ ID NO: 5493 - DNA, 79 bp, Staphylococcus aureus
gtacctttgaccggccattgtttctacagcaatctttttgtttctagctaaacttgctacgacagattctttatccata

SEQ ID NO: 5494 - DNA, 288 bp, Staphylococcus aureus; identical to SEQ ID NO: 4789

SEQ ID NO: 5495 - DNA, 80 bp, Staphylococcus aureus; identical to SEQ ID NO: 5039

SEQ ID NO: 5496 - DNA, 192 bp, Staphylococcus aureus
cttccttatattaaatattttaagtttaagatttaattaaaaactaaattcttagtttttaggtttcttagttccgtataatgaacgaccttgtctacgtccgtcaacacctgaagtatcaagtgctccacgtacaatatggtaacgcacacctggtaagtcttttacacgtccaccacgtacaagtacaac

SEQ ID NO: 5497 - DNA, 192 bp, Staphylococcus aureus; identical to SEQ ID NO: 5496

SEQ ID NO: 5498 - DNA, 192 bp, Staphylococcus aureus; identical to SEQ ID NO: 5496

SEQ ID NO: 5499 - DNA, 145 bp, Staphylococcus aureus; identical to SEQ ID NO: 5238

SEQ ID NO: 5500 - DNA, 257 bp, Staphylococcus aureus
gacacttcaagaatttccgcaatattatcaataccttcttggttttcaattttagggaatactgaaatgttagctttttgttcttctaaaatttcacgaatttctaaaacatcactaggacgacgtacgaaacttgctgcaatgaagtcaacattttctttaataccgaaacggatatcttcagcatctttttctgtaataccaggtaaacttactcttacgccaggtaagttaacaccttttttgtttttaagctc

SEQ ID NO: 5501 - DNA, 257 bp, Staphylococcus aureus; identical to SEQ ID NO: 5500

SEQ ID NO: 5502 - DNA, 586 bp, Staphylococcus aureus
tttgtcttcttctgtgtcttcctcgaatgactggttaccgctattttggccaccttcataacctaattcactcttaatatcaacgtggctattttcttcgatttcttcaatcacgtcataattcccgtgaccattttcagttcctaaaccagaatgagaaatatgatgattgtttttagtaatttcctcgactggtccttgtgcttgaccatgctcttcaggtaattcatccactaattcaatcagattactttcagttgtatattctttcgtatcttcaactgttgtatgatcgctcactgcgccagttacaataccttttgtagactcttcgtcaaattcaactaagttagactcagtagtaacctgaccaccacctgggtttgtatcttcttcatattcaacaacatcagcgtgatgttttgaattttcatgtgtagattcttcaaagtcaattggatttgattcctcagaggactcagtgtatcctccaacgtgacctgcttcgctatccacagcagtatggtaatcgatatcaatagctgatgaatccgtttcttctattgtttcaatgtatccatcaaca

SEQ ID NO: 5503 - DNA, 257 bp, Staphylococcus aureus
tgccatcaccaattaaaaatgaagtctttttatcaccattcataacatgtgataataaacctgttgtagaagttttaccatgtgcaccagttacagctactgaagtatattgatcaataatctgtcctaaaaaatcattataacttacaacatctaatttcaattgatgtgcacgtactatttcttcatggctactcgcgaatgcattaccttgtataactaccatatcttcttttatgttattagcatcaaatggt

SEQ ID NO: 5504 - DNA, 171 bp, Staphylococcus aureus
acttacccaaagtctcgcaatatcagcacctttttgtttaaccacttggtcaggtacaatcacattacctaaagatttactcattttcttaccttcaccgtccataacaaaaccatgagaaagtaagaatttataaggtgatactcctcttgtagcaactgaagttgtgat

SEQ ID NO: 5505 - DNA, 215 bp, Staphylococcus aureus; identical to SEQ ID NO: 4998

SEQ ID NO: 5506 - DNA, 155 bp, Staphylococcus aureus
ttttccaggaggtgctgtttgtccaccgataaagcctacaactggttttgtcatattcgctttaatccattcagctgcttcttcttcagccgtaccaccgatttcaccaatcataacaactgctttcgtttcgtcatcttcattgaatgctttta

SEQ ID NO: 5507 - DNA, 182 bp, Staphylococcus aureus
tttctgggaaaattaattgttctttaacacctaaagtgtagttaccgcgtccgtcaaatgcttttttagaaacaccttggaagtcacgtacacgtggtaatgatactgaaattaatttgtctaagaattcatacattctttcaccgcgaagtgttactttcgcaccgattggcataccttca

SEQ ID NO: 5508 - DNA, 204 bp, Staphylococcus aureus; identical to SEQ ID NO: 4603

SEQ ID NO: 5509 - DNA, 143 bp, Staphylococcus aureus
agcttcttgttctgtcattcggaagccagtttcaagttctttttcatcacgagcaacacggataccttttccgccaccgccagcagtagctttaatgatgaccggatagccaatttttttggcgattttcttagcttctgaga

SEQ ID NO: 5510 - DNA, 197 bp, Staphylococcus aureus
cacacacgttgacgagaaataacccattcgccacggtcacgaaccatattgtaaatacgtgttttaccccaatttactttgaagtttgtattttcgattgcatctaaaatatcttgtcttactttactgattgaggcaaaccattgtggtgtagcacggaagattacaggtttttttgttctccagtcgtgtggata

SEQ ID NO: 5511 - DNA, 229 bp, Staphylococcus aureus
aaacgacttgctaataagatcatgaagttttcaccgtgtacaccgaattttttaccagcgatgtcaaatgtgttacggaattgtctttcagtcattccatataagtaacgtaatttttgtttttcacgtaattgtaaaccatattctgataattttttacgttggtttggaccatgttgtcctggtgcgtaaggacgtttttctaattctttaccagtaccgcttaaag

SEQ ID NO: 5512 - DNA, 319 bp, Staphylococcus aureus; identical to SEQ ID NO: 4714

SEQ ID NO: 5513 - DNA, 383 bp, Staphylococcus aureus
atattgatcccaactcgcacaagcaggtgacaataatacaacatcatttggttctataatatcttgtactttatcaacagcgtcttcgacattgttcgcttcaatgaccgatttcccttgactattacctagtttagcaaacttagctttcgtttgtccgaatacaaccatcgcgcgaacattttccatataaggaatgagttcgtcaaattcattccctcgatccaaaccaccacataaccaaatgattggttgattaaatgaatttaaggcaaactgtgttgctagcgtgtttgttgctttggaatcattataatatttattagttctattagtaccaacatattgcaatctatgctctattcctgaaaatgtagttaaac

SEQ ID NO: 5514 - DNA, 162 bp, Staphylococcus aureus
gcttttttagctgctttagcaatacctttttcacgtaggtagtcaatcgctttatcgatgtcaccatcagtttcagttagcgcttttttacaatccatcatacccgcgccagttttttcacgtaattctttaacaagttttgctgaaatagttgccattcat

SEQ ID NO: 5515 - DNA, 401 bp, Staphylococcus aureus
tacgtactgaaggcattgctttaacagttctgttttcatctacttcttcagtttgagtagctacaggtgcttgctctgctggcgcttcctctttcgcaggttcttctttagatgatgaatcatcatcatgacctttaaattgcatatcttctgcatcaggtgcatcgattttaacaataacgtcaccaactacagctactgtaccttcttctaccataacttcttctacagtaccagatgctggtgatgggatttctactactgatttatcgttttgtacctcagctaaaacatcgtcttcttcaatagtatctccagctttaacaaaccattttacaatttcaccttcgtggataccttccccgatatcgggtaatctaaattcaaatgccacgtttttg

SEQ ID NO: 5516 - DNA, 723 bp, Staphylococcus aureus
  misc_feature (648)..(648): n=g, a, t or c
  misc_feature (673)..(673): n=g, a, t or c
  misc_feature (675)..(675): n=g, a, t or c
  misc_feature (713)..(713): n=g, a, t or c
taagtaacgaaagctagatctctataataaggcgctgtaatatcaccttcttctaatgcgtatgccatcccaatctgagttgcttcttgtccttgaccacttacaacaaatggaattttacctgcacggttcaataaccacagtctttcatctatttttctacctaaatccatccatttatatattacttttaggtcttcttcgctaaggcctaatgatttataatcaatcatgttaaatcctcctatttatacgtgaatagctctactttctgctttcaatcctaattccatcaacacttcagagatggaaggatgtgcgtgtgttgttagtcctaattctaatgccgagccattcatgaactgtaacagtgatgcctcattaatcaattctgttacatgtggaccaatcatattaatacccacaatttcttcagttgattgatcaatcaccatttcgctatacccttcgtttgtgtcatggctatcaatcactgctttaccaattgctttaaatggtactttaaaacttttaactttcattccctctgcctttgcttgttcaatgtttaaaccgatagaagcaatttcaggttgtgaataaatacacttaggcatcatgttatagtttactgggattgggttcccntcaaacatatgatcaacagcctcancnccttcttttgatccaacatgtgccgattgtaattttcntatacaatca

SEQ ID NO: 5517 - DNA, 115 bp, Staphylococcus aureus
aataatggattgtacagctttggctggtgcttcggccacagcctaaactcgctgcatgtggaaagcaggttaccagggtccgattacaaaagtgtcaaatgtgttatgggcattg

SEQ ID NO: 5518 - DNA, 162 bp, Staphylococcus aureus; identical to SEQ ID NO: 5514

SEQ ID NO: 5519 - DNA, 280 bp, Staphylococcus aureus
caacgttgatttaccactacccgtttgtccaacgatggcgtaatatttaccttgttcaaattctgtattaacatcatgaatagcttgatgctgatatggtgtccctttttgataggtataacttacattgtcaaaccgtatagtcatagttgatccaccagcccttcataagttaagaatgatgtttggtgtcccagcatttgatttattttgattgggaatggcaaatctagacctattcttgttaactcttctgcattgtcgaaaatttcagtcgctg

SEQ ID NO: 5520 - DNA, 234 bp, Staphylococcus aureus
cgttttgttacgcttgatggaataactgattctttatattcttcagattgttgttcaaatgcattccagttaggcattgaaacaacacgtactgatttaccttgtttttcaagatctttagcagcttcaactgcaagactaacttctgaacctgaagctaataataggaattctggtgtctcttcagagccataaactgtataggcaccttttcgaacgccttcttcaactaca

SEQ ID NO: 5521 - DNA, 265 bp, Staphylococcus aureus
tgtataattcttctactgttttgccacgtaatttcgcaacatcttcagcatttttaaggttttgtaaaccatcgattgtagcacgaaccatgttgattggtgtgtttgatcctaatgatttacttaagatatcagtgatacctgctaattcaagtacggcacgaacaggaccaccagcgataactcctgtaccaggtgcagccggtttcataaatacgcttcctgaaccgtaacggccagtaattgtgtgtggagttgtaccttc

SEQ ID NO: 5522 - DNA, 153 bp, Staphylococcus aureus
tatgcaggtaaacctaattcatttacatacttagctttacgttcatctggtaattcaggaattgtctgacgaacacgctctttccaagcatcatcaatatataaaggtacaatgtcaggctctgggaagtaacggtaatcatcagaaccttct

SEQ ID NO: 5523 - DNA, 157 bp, Staphylococcus aureus
ataagggtcagtcataactttgaacgctaatgcagcgaattcagctgaatcgtctgctttcgcgattacttcttcttcagggttgctagcacggtgaccaataattggtttaacgtctagtggtgaaggtaagtaatcaattacagcgtcaagcatt

SEQ ID NO: 5524 - DNA, 231 bp, Staphylococcus aureus
catacaaggttactgtaaataaggcattaggtaatcctttttcagctgcttcgcgcgtctttggactcatacctgcgttaatccttaatgcgcaataatcctcgcaagtcggaatatcatatgtcactttaaccattatttaccccacttttcatcacacaatatatcaacctagtataaatgtttatttacaatagtcttattcgcttctttaaacacttcatgatgact

SEQ ID NO: 5525 - DNA, 167 bp, Staphylococcus aureus; identical to SEQ ID NO: 4261

SEQ ID NO: 5526 - DNA, 229 bp, Staphylococcus aureus; identical to SEQ ID NO: 5511

SEQ ID NO: 5527 - DNA, 217 bp, Staphylococcus aureus; identical to SEQ ID NO: 4843

SEQ ID NO: 5528 - DNA, 502 bp, Staphylococcus aureus
tgctaatacgactctcgtcatgtcatattcatctccttatgatatatacaattttattactaatacagtctaatgaaccaatacgccacctaacatccaatttatgaaaccaattgctacagtatgttacattttcattcttgttatgcatttaacaaatcatattatacaatgatgtaatttgtttgggcaatcggaaacgtaaacggtttcactttaacatttcaccctcttaaatatgctctatcatcctcatctatagtacaaaattatgctttgatttaccacaaattatcattaatcatttcgcgtaatgactctaattaaattctatctatcattgcatcgctattcacagctggtttcaccatcaatttctcatcaattttttattaccatgacgtctccagtcaaatattaaatcgctgatgattgttaattccgcaattaccttgcagtcacctctccttccacttcatcgccaaatctgcccctattcact

SEQ ID NO: 5529 - DNA, 379 bp, Staphylococcus aureus
tgcctttacctttttccaatttataaagtggaggtaaagcaataaatacacgacctgcttgaacaagcggtttcatatatttgaagaagaatgttaacaatagcacttgaatatgcgcaccatcagtatcagcatcagtcataataattacacgattataattactatcttcaattttaaagtcagtaccaacgcctgccccgattgtgtggataattgtattaatttcttcatttttaaaaatatcttctagacgtgctttctctgtattaattaccttaccacgtaatggtaatatcgcttggaatttgcggtctcgtccaagttttgctgaacctcccgcagaatcaccttcgactaaatacaattcatttttttc

SEQ ID NO: 5530 - DNA, 349 bp, Staphylococcus aureus; identical to SEQ ID NO: 4486

SEQ ID NO: 5531 - DNA, 236 bp, Staphylococcus aureus
ttcaccacgttgaactggttgaccgatttctacaataattcttgaagtacctgaagcaaggtatgatcttgtttcattagcacctttaacaacaatttcttgttgtctatcttttgctaatttaatatcttctacgacaccttcgatttccgtaattaccgcttgacctttagggttacgtgcttcgaaaatctcttgaatacgaggaagaccttgtgtgatatcgctacctgcta

SEQ ID NO: 5532 - DNA, 426 bp, Staphylococcus aureus; identical to SEQ ID NO: 4999

SEQ ID NO: 5533 - DNA, 377 bp, Staphylococcus aureus
tctgtgatagttgctacaatatcttttctttcacggttaaaatgttcaacttgttctgctaaaaatgcagcttcttcttcgacgtcagtcatcaacaattcgcaagctaatgatgcgtcatctaaacgacctacagcattaagtctaggtccaataataaaaccaattgtttcttcatcaatattgtcattgtatcccgcttcttttagcaatgctttaacagaggtcggacattgatcatttaagacttttaatccttgtttcactaatgatcgattttcatcagttaaggatactaaatccgcaatggtacctatcgcaactaatgctttaaaataatcaggtacattttcaatcaatgcttgtgctaatttgta

SEQ ID NO: 5534 - DNA, 328 bp, Staphylococcus aureus
aattttactgctcattgttccgtcttcgataagtttaatcatacctgctaaattttctggtgttaatttagtatctaataattctacttgatttttatttaaatattcgtttacgccacccattaaccagttagatgttaatttaacatctgcaccgtgttcaattgttgattcaaagaaatctgacatttctttagtcaatgttaatacgtgtgcatcgtatgcaggtaaacctaattcatttacatacttagctttacgttcatctggtaattcaggaattgtctgacgaacacgctctttccaagcatcatcaatatataaaggt

SEQ ID NO: 5535 - DNA, 130 bp, Staphylococcus aureus
ttacgtgataaaagaatgtgttcacgagtttgtggcattggaccgtcagcagcagatactactaagataccgccgtccatttgagcagcaccagtgatcatgtttttaacgtagtcagcgtgtcctgggc

SEQ ID NO: 5536 - DNA, 236 bp, Staphylococcus aureus; identical to SEQ ID NO: 5123

SEQ ID NO: 5537 - DNA, 296 bp, Staphylococcus aureus
gcaggcacctaagcatgaactttcataactttcaggaaccactaactctgtgtcaaatatatctgacatcatttgacgccatacttcacttttcgcaaaaccacctgttgcttttatcatcttaggtgtttcattcattacttcaataagcgcaagatagacggtatacaaattgtaaagaacaccttctaatgcagcgcgaatcatatgttcttttttatgagataaagttaaaccgaagaatgaacctcttgcatttgcgttccaaagcggcgcacgttctcctgctaaatagg

SEQ ID NO: 5538 - DNA, 205 bp, Staphylococcus aureus; identical to SEQ ID NO: 4230

SEQ ID NO: 5539 - DNA, 257 bp, Staphylococcus aureus; identical to SEQ ID NO: 4210

SEQ ID NO: 5540 - DNA, 142 bp, Staphylococcus aureus
tgatgtactcgttgatgcactttgtgagtcagctttacttgttgacacactttgagattgttgtgtacttcctgatgttgatacggaatcactcatgctatttcttgttacttcatatttaaaagttgtcgtcgttttgtta

SEQ ID NO: 5541 - DNA, 225 bp, Staphylococcus aureus
acagcttgtgtcaattgttcaacttgtgctttatcaagcgttggattgttagtttgattaattaaatcttttgcattttgaactgctgcttggtaagcatctttttgtggtttatcttcattgataaacttgctacccgcttccgtttgctgttgatcttgaatgctattacgtaaagcttccattgcttggttaagtgcttgtgcttcagttaatttttgtgct

SEQ ID NO: 5542 - DNA, 174 bp, Staphylococcus aureus
tgtaatcatgtcgcctttttcaataattttatcacttgcaacaccatgtggtaatgcacctctatgaccagatgctacaatcgtatcgaatgatggtccatctgctcctaattctagcattttgctttctaatattgcctttaattctttttcagtcatgcctgcttttacaac

SEQ ID NO: 5543 - DNA, 248 bp, Staphylococcus aureus
gtaagtttaagcccattaaagcgtcaactgtttttggtgttgggtttacaatatcgattaaacgtttgtgtgtacgttgttcgaattgttcacgtgaatctttatacttatgcacggcacggatgattgtgtaaactgatttctcagttggtaacggaattggtccagaaacatctgcaccagaacgtttcgctgtttctacaatcttctctgctgattgatcaattacgcggtgatcataagctttt

SEQ ID NO: 5544 - DNA, 756 bp, Staphylococcus aureus
  misc_feature (613)..(613): n=g, a, t or c
  misc_feature (662)..(662): n=g, a, t or c
tacacttggatcttcatcgtaataatgactcattattccacctcatcttcactttgtaactcgtcattataattataacatttcactcagtctttaaatgaataaaaccccgttatcaaaataacggggttttaacttctcaaagaatcattatattatagcaatacttgctataaaactttgattattaagtttaagatacttgaattattttaattctacagtagctccaacttcttctaattgttctttaagtttttcagcttcttctttaggtaaagcttctttgattactttaggagctccgtctactaattctttagcatcttttaatcctaaaccagttgcttctttaacagctttaacaactttgattttagatgaaccagctgaagttaactcaacgtcaaattcagttttttctgctgcagcgtcagcgccaccagctgcacctgctactgctactggagcagctgcagttacaccaaattcttcttcaattgcttttactaagtcgtttaattctaatactgacatttctttaatcgcttcaatgatttgttcatgattagccattttataattcctccattatttttaatttttttactgntaaaaattattcaggctgttatcttctttttgttctccaatagctttancctgcataagcgaacgttgcgtacaggagcttgtaatactgataaaagcatagatacaagaccatcgtgtgaaggtaatgaacctacagtttta

SEQ ID NO: 5545 - DNA, 187 bp, Staphylococcus aureus
accgaatccttgaccgtaatcttggaattcattttgttgacgttggccaccattttgttgcgcatttttaggttcaaggaattgaacgctatcacacacaacttcagtaacaaacacacgacgaccttcttgattttcataattacgggattgtaagcgaccatctacaccagctaaactaccttta

SEQ ID NO: 5546 - DNA, 160 bp, Staphylococcus aureus
tatctggcgctgctgcaccgcatgcaccacatgcaatacaagtatccatatcaacgattgtatattttgccaatgtcttcgcctcctttgataaaaatgctaaaatagtaatgtgactaaaattttagacagcatcatttttattttcaaattatccgtt

SEQ ID NO: 5547 - DNA, 401 bp, Staphylococcus aureus
catgtgtatcccaacctggtacgtatggtgcatagaacccttgcatagttttataacgtacaataaagtcttttaaaattttgttcaaggcatgtcccatatgtaagttaccattcgcgtatggtgggccatcatgtaaaatgaatgtttcgttacctttatttttttctaacgctttatggtattgatcttctgcatcccatttttcttgaatttgcggttccttgtttggtaaaccacctcgcattgggaaatctgttttaggcattaataacgtttctttgtaatccatttttttcactccttaaaaatttaaaaaactctaagttaaattaaaagggacgattgctcgcggtaccacccttattaactcaacttagagttctctcattacattattt

SEQ ID NO: 5548 - DNA, 363 bp, Staphylococcus aureus; identical to SEQ ID NO: 5277

SEQ ID NO: 5549 - DNA, 903 bp, Staphylococcus aureus
tgtgcttcagcttctgcctcttcttcttttgtcacttcatcatcagcctcatctatgatcgctagtacttcttcaggtgatgaagcatgtaataatttctcacgtacattttcatccattaaaataccagacaacttagctaaagcatctagatgtgtttgggcgccaccttctggcgctgcaatcataaagaataagtgtgctggttgcatatccaaactttgataatctacgcctgctttagatttaccaaacgcaatagctggtgacttaactgcggccactttggcatgtggaatggcaataccttcgccgataccagttgtactttgtgattctcgattgtgaatcgcttccttaaatgacgcgacatcacttaatttacctgctttgtctaattgatttactaactcatcaataacaccatttttgtcatttgccattaaatccattgctattgtatcttttgttaataactctgttactctcattattttcactccccatcaagtacgctaatcgtaacttgtgattttattttttctatagcgtcccgtgttgctaagtcctcatcaaatgccgtggcagtaccgcatgcgactgcttgttggaatgctttttcaatcgttaaacctgaagcaattccagccaccatgcctgcaactgtactatcaccagagccaactgtattaaccactttcccttgtggattaactgctttaatactgatttctttatcaatataaatagcaccatcaccgccaagcgagacaataacagattgcgcacctttatcaactaacaaactgaccatatttaataacatctgtgtctgagttcactgttgtattaaacatcacttctaattcatctttattaggtttaataaatagtggatgatat

SEQ ID NO: 5550 - DNA, 188 bp, Staphylococcus aureus
taccgcatatccacctaaacgtgatgctaaaactctatccgcacctgttgggctaccaccacgttgaacgtgacctaacacagacactctattatcaacattgatgtattgtgataattctttttgacaatcttgcgcagtcatacaaccttctgctacaagaacgattgagtgtttcttaccacgtt

SEQ ID NO: 5551 - DNA, 140 bp, Staphylococcus aureus
cagtttgttgattttcccaggtaatcacaccatttttcacaaatactttccaagaacatgagcctgtacagttaacaccatgtgttgttcttacttctttatcgtggctccaacgttctctgtacattttttcccattct

SEQ ID NO: 5552 - DNA, 303 bp, Staphylococcus aureus
tacatttgaattcccaaatttaacatgatgtttcatgcgtgctattaattcggtgtttccattcgattcattacttccacctgaagatacgccgtttttatataatttttcaggattcatattataatcaactgcactcggtctcccgtgaaaatatcgtgtctctgtccagtgctgtccaatcaattttgatccaactatacgattgtcatacgtaattaaactgccatttgcttgttgataaaaaaatatttgaccaattaacgtgatagctaacgggaataaaaatccacataataccat

SEQ ID NO: 5553 - DNA, 121 bp, Staphylococcus aureus
tacatacttagctttacgttcatctggtaattcaggaattgtctgacgaacacgctctttccaagcatcatcaatatataaaggtacaatgtcaggctctgggaagtaacggtaatcatca

SEQ ID NO: 5554 - DNA, 152 bp, Staphylococcus aureus
taaataactctgtgtaaacgcatatcaacattttcagcttctgcagcacgttttgcaccactgtctggacgaacattgaaaccaatgataataccatttgaggcattagcaagtgtcacgtctgactcattaattgcaccaaccgctgtatg

SEQ ID NO: 5555 - DNA, 138 bp, Staphylococcus aureus; identical to SEQ ID NO: 4990

SEQ ID NO: 5556 - DNA, 171 bp, Staphylococcus aureus; identical to SEQ ID NO: 5504

SEQ ID NO: 5557 - DNA, 146 bp, Staphylococcus aureus
tacgttcatcgtaaccttcataatgtccgcatatgaaaacgatgtggtcggccttgcttaattcaacagctttctgatgtgaaaatggctcgccttgtggacacattaaaataacgcgtgtttgttctgtgacatctaagtcttcc

SEQ ID NO: 5558 - DNA, 340 bp, Staphylococcus aureus
tgctgtgcatgccatgacaaccgtttcgtattcacccttaacgtttttaacatctttatacaaacgattaatttcaaacttaccttccagatgttgatgcgcctcgttttgtattttgacttcaaattgtttctcttttttatacgcttgatataagcgttttgatttttctgatgttgaggcacgtccaaccatatcaatctcataatctgattttaaatagcaaatattcgctaattggattgcgaccggaccagtgcctatcattaataatttagacatccgtaatacctacctttatagctgcttttttataaagtgctatatcaaaaatttgctg

SEQ ID NO: 5559 - DNA, 305 bp, Staphylococcus aureus
agtctactgcacgcttattaacaactggtaagacacctggatatgctaagtcgataacatttgtatttgagttaggttctgctccaaaatgcgctggtgatggagaaaacatttttgagtccgtttttaactctacgtgaacttcaagtcctataactgtttcaaaatgcatgatttccactccttataatttttcataaacgtcatgtaaattgtattgtgtttcatattgataagcgacacgatataacgttttttcatcgaatggtttaccaatgaactgtaaaccgattggtcggccattt

SEQ ID NO: 5560 - DNA, 175 bp, Staphylococcus aureus
tttacctttaacatcttgtgtaaaaattactttcatgcatcttcactcctacttaattgttctgtaattgcttgttgtaattgtgctatcgcctcttcgactgtcacacctttaagttgtgttgccgcattggttaaatgtccaccgccaccaagtgcttccattgttaactgga

SEQ ID NO: 5561 - DNA, 209 bp, Staphylococcus aureus
tcctgctgttgctggattcacatatgtttggccgcttccattggcatttgcattttttggataacagttataaaaataatgcgtatgtccttgagcatctacgaatgtatagctatattctttattatcaaacattgcttgattccagttaccatcaggtgtgtgatgataatccccattagaatcaattgtataataagtaccataag

SEQ ID NO: 5562 - DNA, 229 bp, Staphylococcus aureus
tgcttcaattctatctggaatgatagcatgttctacaccatgtaatgattctacaccattgattgtaattgtgtctgtaccagcaccagtaattctaccacccatttcattaatgtagtttgctaaatcgacaatttcaggttctttagctgcattttcaattaaagtcttacccttagctaatgatgctgccataataatattttgtgttgctcctacacttggaaaa

SEQ ID NO: 5563 - DNA, 176 bp, Staphylococcus aureus
taccattaaacgccatacgcgatctaagaatcgacgagacccatctaatcctttttcactccatgcaattgcagcatctaaaggtcccataaacatttcgtaaagacgcaaagtatctgcaccatgagactgtactatatcatcaggattgattacatttcctttagatttactca

SEQ ID NO: 5564 - DNA, 505 bp, Staphylococcus aureus; identical to SEQ ID NO: 4390

SEQ ID NO: 5565 - DNA, 515 bp, Staphylococcus aureus
ggttgaattctgctgaatctgttaacactctcggcgttgtttcatgtttaatactatttaatttttgtactttacctgctaattccttggttttaactccatgtttaggattggctgctttttcaacaatttcctccatttgattccaagcgccacaattaggacatttccccatccatttaggagattgataaccacaagccatacattcaaaaatcacttttttcttggccaaaattgcacctccactttcctttgaacaaatctattttaaacgcacattcccattatgacaaattaaatgtgagttacatttgtttgtattttaacatgactactaacgcaaactgttttaccagatttattttttatgaatattataaaataaacttacatcatgttgatagtcggtatctttcaaagataaaatcttaataatttcttagtaaactcttttctctagatttatcacaatattatatagacctattttattttgacgtaagttgctagta

SEQ ID NO: 5566 - DNA, 216 bp, Staphylococcus aureus
gctgctactactaaaatagtaatatctgttacttgtgcaccacgcgcacgcatcgttgtaaatgcagcatgtcccggtgtatctaagaaagtgatttttttgccatcgttttcaatttgatatgcaccaatatgttgagtgattccgcctgcttcacctgctgtaacttttgtatgacgaattgaatctaataaagtcgttttaccatggtcaaca

SEQ ID NO: 5567 - DNA, 151 bp, Staphylococcus aureus
tcattaataattgtttgcctatttttacaacctctattaactttgtaggattcgaatctaaatcaattagattagctgcctctttagcactaattgtccctgagttcatagctaatcctatattcgcttgtgctagcgcaggtgcatcatt

SEQ ID NO: 5568 - DNA, 257 bp, Staphylococcus aureus; identical to SEQ ID NO: 5500

SEQ ID NO: 5569 - DNA, 324 bp, Staphylococcus aureus; identical to SEQ ID NO: 4224

SEQ ID NO: 5570 - DNA, 141 bp, Staphylococcus aureus
cctgaagttacttctccaataatatttccatctaaatccataacttcataaccagttcttgcaattcctttttcaagtaattctaatcccactgttcttcttggtgcaccattttctttttgatcttttaatacagattta

SEQ ID NO: 5571 - DNA, 232 bp, Staphylococcus aureus
gtaaacgtttcagaaacgccaccgccacgacgtttaattacaacgccttcgaatacttggatacgctcacgagtaccctcaatgatacgtacgtgtacacgtaaagtatcaccaggacggaaacttggtaagtctgtacgtaattgtgatttagttactgcttcgattaatttgtgatttgtcattataaattctcctcttcaacctatgttcttgcctcgacaaatatata

SEQ ID NO: 5572 - DNA, 258 bp, Staphylococcus aureus
gcagcaattgcatcaagaatatctgcaactttgttataagcttcttcttgtccacccggcattaatgacggaccagttaacgctccaatttcaccaccagaaacgcccataccaataaagttgattgcactttgtgctaatgctttattacgtctgatagtatcttgatagtttgtattaccaccatcaattaaaatatctccatcatctaataaaggtaacaaactatcaatcgttgcgtccgtagctttacctgct

SEQ ID NO: 5573 - DNA, 166 bp, Staphylococcus aureus; identical to SEQ ID NO: 5416

SEQ ID NO: 5574 - DNA, 94 bp, Staphylococcus aureus
ttcagctttctctttgctgcctgcatagtttactgctacattatatccttcttctgctaattgtaacgcaatactacgtccaattcctcttgat

SEQ ID NO: 5575 - DNA, 101 bp, Staphylococcus aureus
atgagtaagaactaatgtcttgagctaacaagaagccttcacgtgaagtttcagaaaagcgtccgcgtaagtcttccatattagcaaatgcgattgaatga

SEQ ID NO: 5576 - DNA, 215 bp, Staphylococcus aureus
cgtaaggagtttcctagtgtagtaccgtagccacgttctagtggttcaacaacgaacttaccgaatttagcatcttcactaatttcaattgtctcaattctaggtttttcgatttctatcatttaaatatcctccttatatacgtcgacttaatttaaaatgtttgctcagtgacctgtaacaataccatcataaattatacacgacgacgtttt

SEQ ID NO: 5577 - DNA, 203 bp, Staphylococcus aureus; identical to SEQ ID NO: 4399

SEQ ID NO: 5578 - DNA, 203 bp, Staphylococcus aureus; identical to SEQ ID NO: 4399

SEQ ID NO: 5579 - DNA, 371 bp, Staphylococcus aureus; identical to SEQ ID NO: 5027

SEQ ID NO: 5580 - DNA, 330 bp, Staphylococcus aureus
gcaattttactgctcattgttccgtcttcgataagtttaatcatacctgctaaattttctggtgttaatttagtatctaataattctacttgatttttatttaaatattcgtttacgccacccattaaccagttagatgttaatttaacatctgcaccgtgttcaattgttgattcaaagaaatctgacatttctttagtcaatgttaatacgtgtgcatcgtatgcaggtaaacctaattcatttacatacttagctttacgttcatctggtaattcaggaattgtctgacgaacacgctctttccaagcatcatcaatatataaaggt

SEQ ID NO: 5581 - DNA, 183 bp, Staphylococcus aureus
tggctcccagccaaatgcttcataaatcataatttgtttaggcgtgtttgaaatatgatcatcaccacgaattacatctgaaatttgcatgtaatgatcatctatagctactgcaaaattgtacgttggaatgccatctttttttacgataacccagtcaccaataccatttgaatcaaatga

SEQ ID NO: 5582 - DNA, 80 bp, Staphylococcus aureus
ttcttctaatttcataccacgtgatcctttaactaatacacggtcatgcgcttttaaatcgtttattaaaacttctatca

SEQ ID NO: 5583 - DNA, 368 bp, Staphylococcus aureus
tgctttctgcagcttgtaacgcttgatctactgcttcttttttatcagttgacgcttcagtgtaatttggttgagccttatctgtattcacttgatcaactttatttttcaatgtttccatcgcgtgatcaagttcagtagcagtttgaacatgttgtgcaacctctgttcttgtaggcgctgcatttatagcatcagttaatgcttgttgttgtgcatgatttaagtttggcaatgcatttacagttgttactgcttgttgttgatcacgagcaagtttttgatcaccatgtagattatcttttgcagttgttactgcttgtgtcaattgttctacttgtgatttgtcgagtgttggattacctgtt

SEQ ID NO: 5584 - DNA, 261 bp, Staphylococcus aureus
tgtttcaggagcatcattttgttgtaaatctactttgcgttctacaacatcatcgtcatcaacgtctgtcatttcgatttcattatcttgctcatccataacttttacatctaaacctaaactttgtaattctttcatcaatactcggaatgattctggaacacttggtctagagatgttttcacctttaacaatagcctcgtatgttttcacacgtcctactgtatcatcggatttgtaagttaagatttcttgtaatgt

SEQ ID NO: 5585 - DNA, 517 bp, Staphylococcus aureus
tacctgttaatacacctattgccatacctaaatttgcattacttgctgtcttcatatcattagcagtgtctcctactatagctactttctgaggatctacattatattgctcaaataaaggcgataatactttaggatttggcttctcataggcatccgcttcggtagaaatgatcaaatcgaacaacgaggtagcattggtatgtgctaaaaattgttctacaccttttttagtatcactcgtaacaataccaagttgatagccttttgctttcaaatcgataagtgcttctttaacaccttctacccaattaatttcaggaatacgttcatctaccagcttttgacttgttgacttggaccagtcggttgtatcttgtcccgtcacatcattaaatgcctggataatttgttgtaaagatcctgaacccatcactgattttggatcaatagattctttaatgacaccgagttgtcttaaagcagcttctttattatgtactgggaaagtctcaag

SEQ ID NO: 5586 - DNA, 147 bp, Staphylococcus aureus
cttgggttatctaattgtcctgttttaactaaatatgcccaaaactgttttgaaatttggtactgctcatttatcttaattgctttactacaatcaactgtgccatccttaccttcttttgtatagttcaactcgcaaagtgctgaa

SEQ ID NO: 5587 - DNA, 144 bp, Staphylococcus aureus
ctatcagatcgttctactgtcgtacctcgctttaaagccaagcgcacttttgaacgatttcggcgttcaaaactatttaataactcatcatcatttttatcaattggtgtaatcatagtcatacgtggttggatgtagtctttt

SEQ ID NO: 5588 - DNA, 313 bp, Staphylococcus aureus
tgctaatggatcattaccatctacttgttcaccatgtataccgtaaccaagtgctctatccgataatttttcagctgcgtattgtaatgaatcaggtactgaaattgcatatttattatttataatgacacatacaaaaggaagtttgtgtacacccgcgaagtttaaaccttcatggaagtcaccttggtttgagctaccttcaccaacagttgctgttgcaattttcttcttaccatccatttttaaagctaaagcagcaccaacagcatggggtatttgagttgctaccggtgaactttgagacaaaata

SEQ ID NO: 5589 - DNA, 187 bp, Staphylococcus aureus
taaattaatgagtaaatcacactcagttaatgccatgttactagcataagaaccatgcattcctcccatacctaaaaatagtgtatcctcataaggtacagcacctagacctagtaaagtagtaactgttgggatttgatgtttattaacaaactgtgttaataattgatttgattttgattgatta

SEQ ID NO: 5590 - DNA, 497 bp, Staphylococcus aureus
gccaaatttctctttcaagaccttcttctctaatcacttggcgtaaaatcgcgtctgattctctaacgatttctagtttatcttcagtaatttctccaagtacacgaataccaagaccaggtcctgggaatggttgtctccatactaaatgttctggaatacctaactcaatacctaatttacgtacttcatctttaaacaatgtattgattggttcgattaattcgaattccatgtcttctggtaatccaccaacattgtggtgtgatttgattgtttgtgctgttttagtacctgattcgatgacgtctgtatatagtgttccttgcgcaaggaagtctacacctttcagttttgatgcttcatcatcaaatacgtatacaaattcattaccaatgattttacgtttttgttcaggatctgaaacaccttttaatttattcataaagcgatctttcgcattaacacgaataatattcatgttgaaaccttcaccg

SEQ ID NO: 5591 - DNA, 166 bp, Staphylococcus aureus
ccgaattgcgctttaccgccaagtggttgttgtgtaacaagtgaatatggtcctgttgaacgcgcatgtaatttatcatcaaccatgtgcgcaagtttcaacatgtacattacacctactgaaatacggttatcgaatggttcacctgtacgtccatcataaagta

SEQ ID NO: 5592 - DNA, 170 bp, Staphylococcus aureus
gcttcagcagcatttttacctctgattaagtcaagaactagtcttactttacgaggtgcgattcttattgttctagcaaccgcttttgcttccattaggatgtcctcctctacttaatagatattatcttcttgttttcttgtcgtctgcaacgtgtcctttgaatgtac

SEQ ID NO: 5593 - DNA, 247 bp, Staphylococcus aureus
tttttttaacttgtcattcggtagtggcttcgttggtatgattttattatgttccatttttaccggataccttttttcatcatcctttggtctgccgttactgtcatctgtcatttcacttataaaataatacccttttgtggttctagtattgcgattgatatagagcaccattcctctcgtttccatatccttaccttttggctcgattaccatttcagaattaactatccaagtacctttatca

SEQ ID NO: 5594 - DNA, 173 bp, Staphylococcus aureus
gcccagttgccatatcaggaattaacattggtacgaaaaatggactcacacgtcttgggcctttatccattaattgtttatgtgcaatttcaaatgtttccataccaccgataccagaaccaatccatacaccgattcgatctgcagtattttcattgatatctaattgcgca

SEQ ID NO: 5595 - DNA, 194 bp, Staphylococcus aureus
cacgaacaataacatcttgtgccacgtcaacaagacgacgagtaagatatcctgagtcagctgttttaagtgctgtatcggcaagacctttacgtgcaccgtgagttgagatgaagtattcaagtactgttaaaccttcacggaatgaagatgtgattggtaattcgataatcttaccagatggtgcggccatc

SEQ ID NO: 5596 - DNA, 361 bp, Staphylococcus aureus
tgctgatcttgtcacacgtggcttactttctgatgccgttcttggctgtgccacttcaacttgtgtttctgcgacttgattttgtgtagcctttttaggtgttaaatctacttgtctttgatctccgctattgtcttgagattgtgttgtttccttaacttgaggtttcgcttcttccttaactacctcttctttaactgtttctatatttgctggttgtgcagtttgtggtgcttgtactgcttttggtgcttcttcagttgttacttgtgttgcgtttgacggttgttctgttactgttgcgttatatgattgagtttcttctatatgattaacgttagttgcagttgtttgtgtttca

SEQ ID NO: 5597 - DNA, 194 bp, Staphylococcus aureus; identical to SEQ ID NO: 4189

SEQ ID NO: 5598 - DNA, 260 bp, Staphylococcus aureus
ccttcgaacttactgtagtcatatacaccattttcatagaattctgatgatgcacagtcaaatcctaagaatacttcttcacctggtttgtaaccagctgcttcgattgcttggataattgtttcaacagcatcttcagtaccttcaaatttaggagcgaaaccaccttcgtcacctactgcagtttctaaaccacgtttgcttaaaattgattttaagttgtggaaaatttcagtaccccaacgtaatgattctttgaa

SEQ ID NO: 5599 - DNA, 236 bp, Staphylococcus aureus; identical to SEQ ID NO: 4505

SEQ ID NO: 5600 - DNA, 148 bp, Staphylococcus aureus
actagaaatcttttgtaagacttcccaatcgatgcgtgcgaagtcacttgtcataccgtcgatagatgttactgcacgaatacctactgtgtgatcatacgtacggtagtctcccataacacctactgattgaatgtttggtaacact

SEQ ID NO: 5601 - DNA, 107 bp, Staphylococcus aureus
tctttaccgtcacttacgacgattgtaatgtggcttgtacgtttgttaatcgcacttgcacgaccttgcgcacgtggacggaaacgttttaatgttggtccttcgtt

SEQ ID NO: 5602 - DNA, 197 bp, Staphylococcus aureus
tattttacctccaaattttacatcttcatttttaatttgtattgattattttctttcttcaagcgggatatacttacgattcgtttcgccaatatatttcgctctaggacgcataattctattatctttatattgttctaaaatatgagcaatccatcctgcagaacgacttacagcaaagattggcgtgaataagt

SEQ ID NO: 5603 - DNA, 193 bp, Staphylococcus aureus; identical to SEQ ID NO: 5155

SEQ ID NO: 5604 - DNA, 799 bp, Staphylococcus aureus
  misc_feature (712)..(712): n=g, a, t or c
  misc_feature (787)..(787): n=g, a, t or c
  misc_feature (797)..(797): n=g, a, t or c
ttgatacgttttgaaattattttctaacgcttctccaaaagcaacctgcttttgctgcaataacatgctcaagaggtccaccttgaataccagggaaaattgttttatctatgtcttttttatattcttccttacataaaatcataccaccacgtggtccgcgtaatgttttgtgtgttgtagttgttacaaaatcagcatattctactggatttggatgtaaacctgccgctactaatcctgcaatatgtgccatgtctaccattaacttagcgtttacttcatctgcgatttctttaaactttttgaagtcaattgttcttgaatatgctgatgctcctgccacaataagcttaggcttatgctctaacgctaatttacgaacttcatcataattgattcgttctgtgtctttatctactccatattcaacgaaattgtagaatttaccactaaaattaacaggcgctccatgtgtcaagtgaccaccatgactcaaattcatacctaaaactgtgtcgcccatttctaatgcaactaagtaaacagccatgttcgcttgtgaacctgaatgtggttgaacattgacatgttcagctccaaacaatgctttagcacgatcaattgcgatgctttcaggtaacatctacaaactcacagccaccataatatcggcgtcctggatagccttcagcatacttattagtcaacnctgaaccttgtgcttccataaccgcttccgatacaaaattttccgatgcgattaactctatgttgctattttgtntctgaaattntc

SEQ ID NO: 5605 - DNA, 390 bp, Staphylococcus aureus
attatcgtaagcatctttgatcttttgtaagaattgtgcacggataatgcaaccttctctccaaatcatagctaaatcaccaagttttaaattccattcattatcttcacttgctttacgcatttgcgcgaaaccttgtgcataagaacaaattttactcatatataatgctttacgaattttttctaaaaagtctttcttgtcaccatcaaatgatgcttttggaccatttaattctttagaagcatttacgcgctcttctttgattgaagagataaaacgtgcaaatacagattcagtaatgattgttaatggaatacctaattctaatgcgttaattgaagtccattttcctgtacctttttgacctgcagtatcaagaattttttc

SEQ ID NO: 5606 - DNA, 399 bp, Staphylococcus aureus
ctaaaggttgtttagattctctacgttctgttaaatcatccattttagcttgtatttcagtcattttaccaggagctaaagtaaatgcagcttctaatacaactaagtgttctttttgaataatgctattacgataatctaactctaattcttttgttgtaagtttaattaacgagccttgttcgtttacgcaaagcgcatagtctatacaatctttaacttcgccaccataagcgccagcattcatatacactgcaccaccaattgaacctggaataccacatgcaaattcaaggccagtaagtgcgtaatcacgagcaacacgtgagacatcaataattgcagcgccgctaccggctattatcgcatcatcagatacttcgatatgatctagtgata

SEQ ID NO: 5607 - DNA, 270 bp, Staphylococcus aureus
tcttttgtatatatatcatttgtaataacgccgatactcatttcttttgaaagacgttttacaactttttcaattaattgtgttttacctgcacctacaggaccaccaataccaattttaatcggatttgccacaattataacctcctatgatatgaaaattctaacattgacgttctcatgcgccatttgatttagttctaaaccaggcgctgtcatgccaaaatctgcttcttttaattcgaaaatctgctttcttgttccttctata

SEQ ID NO: 5608 - DNA, 363 bp, Staphylococcus aureus
tgacctacttccgcttcacgtgtaatttcctcaatgatttcacgagcacgatttatcatagcttgatcaacagcaccaataaagatagtaccatcttgttcaatatctaatttaacacctgtttcatcaataatttcgttaatttttttaccaccaggtccgataacatctctaatcttatctggtttaattgtcatagttacaacttttggcgcgtaagcacttaattcagtacgtggttgatcaattgtttgtaacatatgattcattatttctaaacgaccacgtctcgcttgttctagagcctcttcgataatttcacgcgttaaaccgtcaattttaatatccatttggattgctgta

SEQ ID NO: 5609 - DNA, 579 bp, Staphylococcus aureus
tcatcattttcttctgaatcaatcacttcagtatgaattgcatttcctggtgtttcatcatttacaaccgcttcacgttgttgttcagtaccatcttcagatacagttgaagtagattgctcatcttcattcgtttcatcttctgcatcttcttttactttagcaaccgttgaaacaaattgatcatcacctaagcgaattaagcgaacaccttgtgctgcacgaccattttgagaaatatctgcaacatctagtcgaataatgacacctgcattagtaacaatcattaaatcttcttcaccagttactgtagtgatacatacaacattaccattacgctcagtaatcgtagctgttttaatacctttaccaccacgatttgataagcgatagtcattaactggcgtacgtttaccataaccattttcagtaactactaatacttcatcaacactgtttgcatgagctacatcaagccctacaacttcgtcaccttcacgaagtgtaatacctttcacacccgttgctgtacggcctaaaggacgtaatgttgattcagggaatcgaattaatgatgca

SEQ ID NO: 5610 - DNA, 143 bp, Staphylococcus aureus
tgctttacttaaactttctgcaaattcatttaaaaatgcctgtgttctagagaaagtgtgtggttgaaatactgcaacaacttctttatgtggatatttctttcgtgctgtttcaattgtagcactaatttctcttggatggt

SEQ ID NO: 5611 - DNA, 360 bp, Staphylococcus aureus
tcttggtaaacagtgacattttcttcaatcggcgtatgattgtttgtggcaccgaccatcgatgaaacgattgaaaaatcttcaatgtcacctacagctttaagtccgagcacgcaggcacctaagcatgaactttcataactttcaggaaccactaactctgtgtcaaatatatctgacatcatttgacgccatacttcacttttcgcaaaaccacctgttgcttttatcatcttaggtgtttcattcattacttcaataagcgcaagatagacggtatacaaattgtaaagaacaccttctaatgcagcgcgaatcatatgttcttttttatgagataaagttaaaccgaagaatgaa

SEQ ID NO: 5612 - DNA, 147 bp, Staphylococcus aureus; identical to SEQ ID NO: 4280

SEQ ID NO: 5613 - DNA, 91 bp, Staphylococcus aureus
cgttgttctatccgagatacacgacgtacctcacccgttaaaccaacttctccaatatagcaatctaatccgtcgacagctttatctttaa

SEQ ID NO: 5614 - DNA, 250 bp, Staphylococcus aureus
accagatcttaatctgattaatacgtatttaccttctttaccaagtacttgagcacttgcaccagctgaacgagcgatttgtccacctttaccaggtttaagctcgatgttgtgtactactgtaccaactggaatgttttgtaatggtaatgcgttaccaactttgatgtcagcttcagcaccactttcaacgatttgacctacttctaatcctttaggagcaatgatatatcgtttttcaccgtctgca

SEQ ID NO: 5615 - DNA, 140 bp, Staphylococcus aureus
actaattcagcgatatcaagtgagtcagcgcctaaatcatctttgaaagatgcatcttcagttactttatcagcgtctacacctaaacggtcaacgatgatatcttttactttatcgaaattttccacgtcgattcacct

SEQ ID NO: 5616 - DNA, 307 bp, Staphylococcus aureus
gaaataccaggtaatccagctaagtttactggtgttgttaataaatcattggcatacattgttaatggatcatcaatttcttcacctaaattaaacgcagttgtaggcgctgttggaccaactactacatcataattttcgaatactttatcaaagtcatttttaatcaatgttctaactttttgagattttttatagtaagcatcatagtaacctgaacttaatgcaaatgtacctaagaaaatacgacgttttacttctttaccgaaaccttcagatcttgacattttatataattcttctaatg

SEQ ID NO: 5617 - DNA, 150 bp, Staphylococcus aureus
tctaattaaccacgtaattcgtagttttctggttgttgtgcagcgtgtggatgttcagcgccaccatatacaaataattttttaccttgtttttcgcctaaacgagtgcttggtaacatacctttaattgagttttcaattaaacgttct

SEQ ID NO: 5618 - DNA, 99 bp, Staphylococcus aureus; identical to SEQ ID NO: 4779

SEQ ID NO: 5619 - DNA, 343 bp, Staphylococcus aureus
tactaattcaccgcgttcataaaaagcaacttgcgtaacgtcttcaccaatatcaatgacacatgcacctaactctttttcagtagctgttaggattgaaccatagttatatgcatcagagtaaacatctaatacatcaacaccacatgcttctacgcatttaatcatattaattaaaatcgatttttgaatagcaattacgcctgcttcaacctttaatgaatgtctggcaattaattctttagggtctgaaacctcattttctttatcgactataaaacgaatcgggaacacattaattacttctgtttcttgcacatcatttttttctctaataccttct

SEQ ID NO: 5620 - DNA, 278 bp, Staphylococcus aureus; identical to SEQ ID NO: 5023

SEQ ID NO: 5621 - DNA, 278 bp, Staphylococcus aureus; identical to SEQ ID NO: 5023

SEQ ID NO: 5622 - DNA, 158 bp, Staphylococcus aureus; identical to SEQ ID NO: 5473

SEQ ID NO: 5623 - DNA, 186 bp, Staphylococcus aureus
ccttcctccggtttgtcaccggcagtcaacttagagtgcccaacttaatgatggcaactaagcttaagggttgcgctcgttgcgggacttaacccaacatctcacgacacgagctgacgacaaccatgcaccacctgtcactttgtcccccgaaggggaaagctctatctctagagttgtcaaagg

SEQ ID NO: 5624 - DNA, 181 bp, Staphylococcus aureus; identical to SEQ ID NO: 5173

SEQ ID NO: 5625 - DNA, 134 bp, Staphylococcus aureus; identical to SEQ ID NO: 4580

SEQ ID NO: 5626 - DNA, 140 bp, Staphylococcus aureus
caatgattgcttcgaattcgtcttccgcaccaattggtaattggattggagcagcgttagcttgtaaacgatcatgtaatgtacttacagagtattcgaagttagcacctaatttgtccattttgtttacaaatacgata

SEQ ID NO: 5627 - DNA, 92 bp, Staphylococcus aureus
gttgtaccttcaacacgtggaacaactactaaatcttttttagctgcttcaacagcttttttgattgcttctggtacctcttgagctttacc

SEQ ID NO: 5628 - DNA, 278 bp, Staphylococcus aureus
tcattggttacaaccatagtaattggactacctaatgtataaccatttctaacgcctgatactatttctactgtatctttctcaatttgcatacgacgtccacgtccgtaaccgccttgacgcttaaacatttctttattaatatcctcaaccttaatttctatatttgcaggtacaccttcaacaataactgttaattgaggtccatgtgattctcctgatgttaggtatctcatacacactcgctcctttcatacttccacgataacattataata

SEQ ID NO: 5629 - DNA, 279 bp, Staphylococcus aureus
caaatgtaaaagtatctccttcgtttacgtctaatttttcaacgaagatttcttgaccttcttctactttgatttgttttccacctgtttcaataatagcaaacatactttgcacctcctgtataataagtcacgccatacataggtgacatttcgttattgagtcaagcgtttgcactctgtgggaaaatcgctttcttcattaaaaatgttcttgaacctatatttgagcggttgtatgtagctacttataactactcaactattgcatcttaccat

SEQ ID NO: 5630 - DNA, 329 bp, Staphylococcus aureus
tgtggatgatttataatacccattgatgatactgaaccaaatgtaccagtattatttaccgtaaatgtaccgccctgcatatcttcagctgtcaattgcttattacgcgctttcgttgctaaagtattaatttctctagctatacctttgattgacttttcgtctgcatgcttaatcacaggtacgtataatttattttcatcagcaacagcaattgaaatattaatgtctttatgtaagacaatttcatttccttgccagctactatttaataaaggatatgcttttaaagcatctgctacagcttttacaaagaaagcaaagaacgt

SEQ ID NO: 5631 - DNA, 1126 bp, Staphylococcus aureus
  misc_feature (946)..(946): n=g, a, t or c
  misc_feature (961)..(961): n=g, a, t or c
  misc_feature (988)..(988): n=g, a, t or c
  misc_feature (1083)..(1083): n=g, a, t or c
  misc_feature (1097)..(1097): n=g, a, t or c
aacggcatcataaatggacaatgtcggatcacctttttaaggcatctttaatcttcaatgttttaaccacggattcaggcaagacatcttctctaattaaataaaactttttataatctttattgtccatcatgtttcgctcctattcaacgaattcaaattctccgccaagaattctaacgatatcaccatttttacaaccacgttctctaagcgcatcatcaatacccatcgaacgcatttgacgagcaaatcgacgtactgctggatcactgttaaagtcagtcattttaaacattctttcaatagcattaccacttaccacataagcaccatcatcatctcttgaaattgtaaatttatcttgtgacggtgtatgtttatataatactcggttaatgccaactgactcctcttcttcaactgtgaagtcaacatctttatattcttctaatttatctgctattgcatataataattgatcaatattatcacgcgttattgttgaaactggaataactggcacatcttcgccaatttcttctttaaacaagtttaaattatcttgtgattcaggtaaatccatcttgttagctactacgatttgaggtctatcttctaaacgttgctcgtacgcagctaattcttgattaatgactttataatcttcaataggttctctaccttcagaaccgctcatatcaatcatgtgaacaataacttttgttctctctacatgtcttaaaaattgatgtcctaatccaacgccatcagatgcaccttcaattaaacctggtaaatctgccataacaaaactacgttgatcaggcgttgaaacaacacctagatttggtttaatcgttgtaaaatgatatgccccaattttaggcttagcttttgaaacgatagataataaagtcgatttacccacactagggaaacctantaatcctacatcagntaataatttcaattctaaagatacatntaattcctcacctggttcacctttttcactgaagtcaggtgcagggtttctaggtgttgcaaaacgtgaattacctcggccacctcgacctgccnttcgctactacagntctttgaccatcttcaacaagatctgata

SEQ ID NO: 5632 - DNA, 279 bp, Staphylococcus aureus
ataatgtatggtttatcaacattgcctctcactgtttgcgctacttcaaaggcatcaccgataactcgtttcatatcatcgtaatgccctcttgttgattcatcaatattaataccatgtcctcgatgattatgacgtatcacatcgaagccatgctttgaaagtgcatgtgctaatttatcgtaacgttccatatgttcagccataccatgaaatatatgaataattccttttgaatctacatctgtaaaattcactttaacttcaatattcgtatta

SEQ ID NO: 5633 - DNA, 414 bp, Staphylococcus aureus
tcacctttatgtgttgacttaccagcatcttcttccatgtgaagacgagtaataccgattcgttttgtttcaccgtcgacttcgatatcgatatatccattttcaccaattggttgatcaaattgagaaatttgatatgcttttggattatctggatagaaatagttcttacggtcaaacttagattctgttgcgatttccatatttagtgccattgcagcacgcattgcccagtctactgcacgcttattaacaactggtaagacacctggatatgctaagtcgataacatttgtatttgagttaggttctgctccaaaatgcgctggtgatggagaaaacatttttgagtccgtttttaactctacgtgaacttcaagtcctataactgtttcaaaatgcatgatttccact

SEQ ID NO: 5634 - DNA, 153 bp, Staphylococcus aureus; identical to SEQ ID NO: 5522

SEQ ID NO: 5635 - DNA, 301 bp, Staphylococcus aureus; identical to SEQ ID NO: 5336

SEQ ID NO: 5636 - DNA, 468 bp, Staphylococcus aureus
aatgattacaaagtctaaatgttcttctttagcatgttttaatgcattagttacaatttgttgtggctttacttgatctccttcactgtatacaggaatatcaatttgtttccctactgtttgtaattgatttatcgctgctggacgataaatatctgctgcaactaacataggttttttgttgtattttttacgcatcaataatgctaatttacctgcagttgttgttttaccagcaccttgtaaaccaaccatcataacaacagtaggtggtttatttgacatattaatcgacgtattttctccacccatcaactgcgttaattcatcttgaactattttaataacttgttgccctggtgttaatgattgcattacatcggaacctaatgcgcgttctgatactgttttaataaattcttttaccactttaaagtttacgtcagcctcaagtaacgctaatcttac

SEQ ID NO: 5637 - DNA, 245 bp, Staphylococcus aureus
tcaattgggaattctcttaatcccctagccataactgataagccagtgccaccaccgataagtacaacttttatttgtctcattttttctcgccactttcaatatgtgcgtccctatgatgcacataaacattatattcaaatacttcatttagataattacctagtcgttctgctaatgctacagatcgatgttgtccacccgtacaaccgatggcaattactaattgagatttcccttctttt

SEQ ID NO: 5638 - DNA, 176 bp, Staphylococcus aureus; identical to SEQ ID NO: 4845

SEQ ID NO: 5639 - DNA, 176 bp, Staphylococcus aureus; identical to SEQ ID NO: 4845

SEQ ID NO: 5640 - DNA, 226 bp, Staphylococcus aureus; identical to SEQ ID NO: 4357

SEQ ID NO: 5641 - DNA, 131 bp, Staphylococcus aureus
gattgtacgctttggctggtgcttcggccacagctaaactcgctgcatgtggaaagcggttaccgggtccgattacaaaagtgtcaaatgtgttatgggcattgaattgctctctaccaagcacatgatta

SEQ ID NO: 5642 - DNA, 308 bp, Staphylococcus aureus
aaataccaggtaatccagctaagtttacctggtgttgttaataaatcattggcatacattgttaatggatcatcaatttcttcacctaaattaaacgcagttgtaggcgctgttggaccaactactacatcataattttcgaatactttatcaaagtcatttttaatcaatgttctaactttttgagattttttataggtaagcatcatagtaacctgaacttaatgcaaatgtacctaagaaaatacgacgttttacttctttaccgaaaccttcagatcttgacattttatataattcttctaatg

SEQ ID NO: 5643 - DNA, 174 bp, Staphylococcus aureus; identical to SEQ ID NO: 5460

SEQ ID NO: 5644 - DNA, 195 bp, Staphylococcus aureus; identical to SEQ ID NO: 4313

SEQ ID NO: 5645 - DNA, 193 bp, Staphylococcus aureus
agtagtgcttcgtcataagttggccaaggttggtacgtaatagactcttcatgtcctaattttgaccataattcttcaccgatatgtggtgcaataggtgctaacattttaacgaagccttcaatgtaaggtttataaacttcatcaactttataacactcattaataaataccattaattgactaatagcag

SEQ ID NO: 5646 - DNA, 311 bp, Staphylococcus aureus
tgcatgagtttacctgctaattcataattgtgctgtgctaatgcacaaatcattgtattactaattgcactacttttaaccgcttcactatgtgttaatttttgtggtaaagcacgtcttgatgcttctgtttttagttcataagttggtatcgttacaatcacatccacgtctggtatgtcgatatgtgcaactgacgtttctttcgagacatcattataatatccagcgattaaaccaccataaatggtcggcgcaacattatcaggatgtccttcgatttcagtcgctaattgtaatacctcatgttt

SEQ ID NO: 5647 - DNA, 443 bp, Staphylococcus aureus
tcaaatgcttctggtaatgttgatgaagtcataaattgacgacgactaacgatttcattcgtaattaaagggctaaatccttcaaactgattcaataattgtttagcaatattacctgcgttaaaatcgatatatttcaacacctctgcacctgtaatatcatacggatttattttgtgctgagtaggtggtgcttcataattaaatcctggcattactgtacgatagtgattcgtatttggtgttaagtgtttaaatccttcaattattttgcgattttcatctactaaaattaagttactatgtttacccataatctcaaggatgacagtgcggtaaatagtatcgccaatttcatctttactctttatatcgatttcaatgcgacgatcattaccaatttgcttaatcgattcgataataccaccttctaagtgttttct

SEQ ID NO: 5648 - DNA, 380 bp, Staphylococcus aureus; identical to SEQ ID NO: 5022

SEQ ID NO: 5649 - DNA, 456 bp, Staphylococcus aureus
ccaatataaacgataccacgatcgtctaagttcttaagtgcactttcagaaacattaggaatatctcttgtgatttcttcaggtcctaacttagtatcacgtgcttctgattcatactcttcaatatgaatagaagtatacacgtcatctttcacaagtctttcactcatgataacggcatcctcatagttgtaaccgtcccaagtcatgaaaccaactactacgtttctacctaatgccatttctcctaattccatagatggtccatctgctaaaatctcgttatactcaacaacatctccaactgcaacgattggacgttggttgtaacatgtacctgagtttgaacgtttaaatttagctaatggatagcgatctaattcaccttcatgctcaacgccgttctcttcaactagacgacgaacaagaatttcattagattcaacatgttcaaca

SEQ ID NO: 5650 - DNA, 168 bp, Staphylococcus aureus
tacaacaacataagaagcaaagtaaataacttcttctaatgctcttggtgacatgtcaagtaataatcccatacgacttggtatacctttgaaataccaaatgtgagaaactggagcagcaagttcaatgtgacccattctttcacgacgtactttagatttagttac

SEQ ID NO: 5651 - DNA, 268 bp, Staphylococcus aureus
caaatcaattctagcttctgtaatattcgctacataatctacacccatgaccttgggtacatcgccttgaatatacgctttgatatcatcaacacgtttcatcggtaaacctgttaattctgcttcaatattcatatactcatgttcgctgtcgtaaataatttgaccatcatgatatgtaagaacgaaaaagcctctatctcgacaataatctacaatttcatcgaaatcttgcttaccaatcgatttacttacttctacttcttca

SEQ ID NO: 5652 - DNA, 135 bp, Staphylococcus aureus
gtccgtttttaactctacgtgaacttcaagtcctataactgtttcaaaatgcatgatttccactccttataatttttcataaacgtcatgtaaattgtattgtgtttcatattgataagcgacacgatataacgt

SEQ ID NO: 5653 - DNA, 109 bp, Staphylococcus aureus; identical to SEQ ID NO: 4318

SEQ ID NO: 5654 - DNA, 199 bp, Staphylococcus aureus
ctgcttctggaaataatgctacgattttcatatccatctctcctaaatgataaattttgacttccttaaagtacgtgttgcatgttgcttgttttaaaaatatgacaaaaaaacggcaccgtttgacataccacccccttgaattattgttaaattcaaagcgaagttagcaaacagcaccgtgtaccttacaccagca

SEQ ID NO: 5655 - DNA, 310 bp, Staphylococcus aureus; identical to SEQ ID NO: 4235

SEQ ID NO: 5656 - DNA, 223 bp, Staphylococcus aureus
aatttaaaattgcatcaccgataataaatgggataattggttcattaggtacgtttaatccttcagttccttgagtaattttttctgcagtcatagttattttacctccaaattttacatcttcatttttaatttgtattgattattttctttcttcaagcgggatatacttacgattcgtttcgccaatatatttcgctctaggacgcataattctattatc

SEQ ID NO: 5657 - DNA, 266 bp, Staphylococcus aureus
tttaacaattcttcttcttggcgtttttcttcatattctaaacctttacgtacatagttaaatgagtttaagtttttcaattcggctttagtaccaaatttttcttgaccatatggacgtaaagagatgttagcatcacaacgtaaagatccctcttccatcttaacgtctgatacaccagtgtattgaataattgaacgcaatttttctaaatatgcatatgcttctttaggtgaacgaatatctggttcagatacgatttcaat

SEQ ID NO: 5658 - DNA, 206 bp, Staphylococcus aureus
tgtcgttggattttggttcggaacttcaataccaacacgactagttcctggaataggcgcttctatacgaatatctttcgctgccaatgccattttaatgtcatcttgtaatgccgtaattcttgaaactttaacacctttttcaactgataattcaaatcttgtaacacttggaccttcagttacatcttgtacttctgcaggta

SEQ ID NO: 5659 - DNA, 265 bp, Staphylococcus aureus; identical to SEQ ID NO: 5491

SEQ ID NO: 5660 - DNA, 407 bp, Staphylococcus aureus; identical to SEQ ID NO: 4443

SEQ ID NO: 5661 - DNA, 147 bp, Staphylococcus aureus
gtaccttgacgagcacgacctgttcctttttgcttccatggtttacgtccgccaccgcttactgctgaacgattcttaacagcatgcgtaccttgacgtaatgaagcacgttgtaaattaatagcttcgaataaaacgctattattt

SEQ ID NO: 5662 - DNA, 407 bp, Staphylococcus aureus; identical to SEQ ID NO: 4443

SEQ ID NO: 5663 - DNA, 299 bp, Staphylococcus aureus; identical to SEQ ID NO: 4510

SEQ ID NO: 5664 - DNA, 148 bp, Staphylococcus aureus
taattcatgtgatacattagcaatgaaatctttcttcatttgatctagattgtgctcattagtcatatcacgaactgtcacaacaacaccacttttacctccctgttcaatcttgtcgatatagcttgtggtcacaacaaagaatcgt

SEQ ID NO: 5665 - DNA, 672 bp, Staphylococcus aureus
  misc_feature (652)..(652): n=g, a, t or c
tgcctgcatccatggcaccatctgttttaccagcacctacaagcatatggatttcatcaataaataatataattctaccatcagactctttaacttcttttaggactgcttttaatctctcttcaaattcaccacgatatttagcgcccgctactaatgcgcttaaatctaactcaaaaacagttttatctaataatgattctggcacatctttcttaactatacgttgcgctaatccttcaacaattgcagttttaccaacacctggttcaccaatgagcacagggttgtttttagttttacgacttaaaatacgaatcgtatttcgaatttcttcatctcttcctataacaggatccattttaccttgtctaacttcttctactaagtcgcggccatatttagctaatgcttcgtaattaacttctggattttgtgatgtcacgtgatttccccctcttacttttttaataatttctttgataacttctactttattatttatataatgttttgttgtttgatcaatgtccattgccgaacgtaaaatatgctccattgaaatatattcatcttcatattctttcatgtatgattcagccttagttatcaattggtttgcttgttggctaatatattgaccatattgtanattgtcaccttctacagatg

SEQ ID NO: 5666 - DNA, 592 bp, Staphylococcus aureus
tatgcgttcaaaatcttgcgggttctgttgcatacgttgtcgcatggatgttaaaacgagtgccatcattactggttttaaatgactccaaaatgagtttaaatattgatgattagatgctttgattaatgtttcatgaaattcaaagtcatgcttcgtaaatgattctgcatcctcaaattttactgccactttcatcatttcaagttgtttcttcatttcttttacgataggtagtcgctcttgatttttaactcttgaaaatgcaaatgactctaacatcagtcgcaaatcatacatttctttcttttcttgttccccaaacggcaacacatgtgcacccattctttctaattggatgagttgattttgttgcaataatttaaatgcatctcgaattggcgaacgactcacattaaattgctttgccatttgattttcagtgagtaacgtaccttcagctatgtgaccattcacaatgcctaagcgtaattctgccgcgataccttctccagttgtcataccttccaaccatttctctggatatccatacatcatcaaagtcactccttcattacacgacatacttgta

SEQ ID NO: 5667 - DNA, 153 bp, Staphylococcus aureus
actttgttgatttgcccacgaatagcagggttatcttcaacaactactgaactgttagtctttttaagacctaaagcttcaacagttttacgttgtgtttcaggacgaccaataacactacgagtgagggtaatttgtaatttagccataact

SEQ ID NO: 5668 - DNA, 332 bp, Staphylococcus aureus
tctctgattttataacccattttttcattacggtcatcaatacttacacgaacgccttgagatttcaattcatcttgtaattggcgcgcataatcataatgtaaatcaacgttaactggaatgatttgaacttgttttggcgctaaccaagttgggaatgcacctttagtttcttcagttaaaaatgctacaaatcgttccattgttgatacaacaccacgatgaataacaactggacgatgatgttcaccatcttgaccaatataagttaaatcaaaacgttctggtaataagaaatcaagttgtgctgttgataatgtctcttctttacc

SEQ ID NO: 5669 - DNA, 113 bp, Staphylococcus aureus
gtagcaattactttaccttctttacctttgtctttacctgcgataactttaacgttgtcaccttttttgatatgcatgtgggcacctccttatttgtattggttgttattaat

SEQ ID NO: 5670 - DNA, 685 bp, Staphylococcus aureus
tatgaagttttgtcattatacttgaatgataagaatttcattcattctcaactcctcatctttatcttaattcacattataacttttttcgttatcaaataacaaataaataagtaagacaattttgaaaatgagttgtgttcattctgctacaaggactttgcacttaatcgaaattattttttattcttttgaaaatcaaaatactatagttgcaatgtaccaaatttgaagaagtataaataacctttaacttctttattaagaatcgtttgaagcgtattttgataatatttcatctgtatcttatatttattttttaattgtgtaccaatttcttcatctgtcatcccacggcgacgattaaatgcatcggttttatagtctacaaaataatgcacaccatctttaacaaagattaagtcaatcataccttgaataattgagacgtcttcgtctccttgtggcaattggtcaactaatgcttggttaactacaaacggtaattcacgataaacttgctctgcttcagcaataatcgaatataactcactattgataaatgtcattatttcatccatacggatatcttttttcgcatctgcttcgataatatgtttatcgattaatccatcgatatactgatgtaactcaacttcagatatgcgttcttttttgaatggta

SEQ ID NO: 5671 - DNA, 193 bp, Staphylococcus aureus
caaaatttcgcttcaatttcaccacttttatcttgcaaatgtaatgtcatataatctttaccttgtgctgttacaccctgtgtagctttatgcactaagaaaaagtgatcaactgaatctccgggatttagattctctatatttctcatcgtttcccgccttcctctattttgtttaatgtaatcacttcttt

SEQ ID NO: 5672 - DNA, 304 bp, Staphylococcus aureus
accatgaacaatttccaaggattttaagaatgccaatggaatatttgtccataatgacccaaatctgatatctaaaatatcaatgcttcctgtaacagaatcctcattttttgtcacttctcttatttctaatgcctcaatactatcaacattaattgcctgaccgagacgttcaaacgctatcttatttgcagctaatctcgcaccattgtatgcataaacatctctaccatgaaaagtatgactttcttccgaatgaggcaatcggcttttcacttcatcaatttcgataacttttttaata

SEQ ID NO: 5673 - DNA, 158 bp, Staphylococcus aureus; identical to SEQ ID NO: 4333

SEQ ID NO: 5674 - DNA, 206 bp, Staphylococcus aureus
cttgtactagtagaatcactcattgatattgaatcacttagcgaggtagactcgcttacgctttctgaaccacttaatgatgttgaggtactcaatgaaccagatgtacttgttgaagtcgaaccacttgttgattttgaatcacttaatgaatcagattcactcacgctttctgaacttcttagtgacgtcgatacacttaatga

SEQ ID NO: 5675 - DNA, 120 bp, Staphylococcus aureus
aataccatctggtactgcttgtgctaacgcttctgcaaaatcctctttcttataatcaataccagcgtcaaagcccagtgtctctgttaaataatttacttttttgtcgccacccgcaat

SEQ ID NO: 5676 - DNA, 306 bp, Staphylococcus aureus
tgtgcttgatcaggacgatggtgtcttgcaacatcgaaaataatgttgtgtaagaacgttgttctaccatatcctggacttccgattaacgcgatgtgcccagcttttttcaattgcaataccatcggtccttgatattgttcttctggtacgtctttaagtcctaatgttaattccacttcttttgcatcatctgaccataattttctgaaatctgtttctactaaatcttcttgatatacattttctggcaatggtggtagccatggacgcttaacttcttcgatttctaatcgtgttgtaata

SEQ ID NO: 5677 - DNA, 159 bp, Staphylococcus aureus
caattggatttgattcctcagaggactcagtgtatcctccaacgtgacctgcttcgctatccacagcagtatggtaatcgatatcaatagctgatgaatccgtttcttctattgtttcaatgtatccatcaacatatccacctccaccatctatagctg

SEQ ID NO: 5678 - DNA, 199 bp, Staphylococcus aureus
tcgagtcgcgccagttgtagcattgatatttgttatcgcctctcgcgctttatcatttacaacattgcgagtatccgttttaacttgtgttgccggttgaatcactactatattttgtgtgccctgatcttttgcttgtgcaacttcttgattcgtatctgctgcattaatattttgcttcgctgtggctacagcttga

SEQ ID NO: 5679 - DNA, 302 bp, Staphylococcus aureus
cacgaatcgttgaaataatttcatcgatatggtcaagtgcgatacgtaatccttctaaaatgtgggcacgatctttagctttacgtaagttgtattgcgtacgtcttctaacaactgtcttttgatgctctaaataatgtaccaacgcttcttttaaattaataagcttcggtctaccatttacaagtgcaatcatattcacaccaaatgatgtttgaagaggtgtttgtttgtataagttatttaaaatgacactagcatttgcatccttacgcacatcaataacgacacgcacaccagta

SEQ ID NO: 5680 - DNA, 435 bp, Staphylococcus aureus; identical to SEQ ID NO: 5348

SEQ ID NO: 5681 - DNA, 130 bp, Staphylococcus aureus
cacgcgcaacttcttcagaaacgccagcaacttcgaataaaattctacctggtttaacaactgcgatccagccttcaaccgcacctttaccagcacccatacgtacttctaaaggttttttagtatatgg

SEQ ID NO: 5682 - DNA, 153 bp, Staphylococcus aureus; identical to SEQ ID NO: 5522

SEQ ID NO: 5683 - DNA, 548 bp, Staphylococcus aureus; identical to SEQ ID NO: 5131

SEQ ID NO: 5684 - DNA, 207 bp, Staphylococcus aureus
cttgtggttgaatttgattgtgaatacctaaatctacaattcgatcaacgccgaagttagatacaccgattgctttaattttaccattttcttttaactcttctaatgcacgccatgagccatatacgtcattgtaaggttggtgaataagcactagatcaagatagtccaaatttaatcgttgtaatgatcgttcgattgatttga

SEQ ID NO: 5685 - DNA, 252 bp, Staphylococcus aureus
gacctaaaaaagcacccttctagtcgattaatctaaaagggtgccatatactttaattttaatacatgattgattctaaaaaagtgaattattccacagtaactgatttagcaaggttacgtggtttatcaacatctaaatctctgtgtaatgctgcatagtatgaaattaattgtaatgcaaccactgatactaatggcgttaacaattcatgtacatgaggaatgacataagtgtcgccttctttttcaa

SEQ ID NO: 5686 - DNA, 372 bp, Staphylococcus aureus
tatttaaaatggcttaaagtactaaactgaatcatcaataaaattcagcttagtatctttttgcctgttttgtaaattgcgtattaatcagtaacttctttttgtgtttcaggagcatcattttgttgtaaatctactttgcgttctacaacatcatcgtcatcaacgtctgtcatttcgatttcattatcttgctcatccataacttttacatctaaacctaaactttgtaattctttcatcaatactcggaatgattctggaacacttggtctagagatgttttcacctttaacaatagcctcgtatgttttcacacgtcctactgtatcatcggatttgtaagttaagatttcttgtaatgtgtatgca

SEQ ID NO: 5687 - DNA, 169 bp, Staphylococcus aureus
gattcaggcaagacatcttctctaattaaataaaactttttataatctttattgtccatcatgtttcgctcctattcaacgaattcaaattctccgccaagaattctaacgatatcaccatttttacaaccacgttctctaagcgcatcatcaatacccatcgaacgca

SEQ ID NO: 5688 - DNA, 174 bp, Staphylococcus aureus
gttttaaagatgctttaatactttctagataagtttctttttcactcaaagtttgtcgacttttgtcactcgtataaccatcatttttttcaaattcgaattcttcatgatcattttttatttgtgtttcttgtgtagttaatctatcgagctccatttcaaaatgatgcactt

SEQ ID NO: 5689 - DNA, 248 bp, Staphylococcus aureus
actacttaagttatatgcgcaattatcgtgatatatcttatatattgaatgaacgtggatttaatgtccaccatttaacaccctccaaattattatctcctcatacagaattttttagttttacttatgatacgcctctcctcgcataatcttaaatgctctgtacacttgttcaattaacacaacccgcatcatttgatgtgggaatgtcattttgctgaatgatagtgcgtagttactgcgttgta

SEQ ID NO: 5690 - DNA, 244 bp, Staphylococcus aureus; identical to SEQ ID NO: 4296

SEQ ID NO: 5691 - DNA, 189 bp, Staphylococcus aureus; identical to SEQ ID NO: 4589

SEQ ID NO: 5692 - DNA, 153 bp, Staphylococcus aureus
tgatgaaattttacgaactgtaaacgtttcagaaacgccaccgccacgacgtttaattacaacgccttcgaatacttggatacgctcacgagtaccctcaatgatacgtacgtgtacacgtaaagtatcaccaggacggaaacttggtaagtc

SEQ ID NO: 5693 - DNA, 164 bp, Staphylococcus aureus
tatcgtcggaatcataaatcctgttggcccttttggaccattatatgaagctttattagtcgttgctggacctgcaatatcgaaatgaatgtgaggtgtttgaccactaaaatgtgttacaaaacttgccgcaaatagcgctttaccttgtccattcgtatggt

SEQ ID NO: 5694 - DNA, 590 bp, Staphylococcus aureus
ctgatcctactgaaccatcattgaaaaattcactcgttttacagttcggacaaatatagtgtggcggtaacgggtttacttcagtaatctcagtcattgtcgctacaaaactagaacctactgaaccacgggaaccaactaagtatccatcatctaatgattttttaactaaacgttgcgaaattaagtaaattaccgcaaatccattaccgataatactttttaattctttttctaatcgatcaattacgatttgaggcaggtcttcaccatacagtttacgcgcatttgcataacttagttctctaatttcttcgttagcaccttccatacgcggtgtgtataattcatctttaataggaacaacacgttcaattcgatctgctaattcgtttgtatttttcacaacaatttcatgcgctttttcttcacctaaaaaatgaaactcgtttaacatttcatctgtagttctaaaatgtgcttccggtaaagttgagcgattaagtggattgccgggttgtgatgctattaaaattttacgtgcgataccatcatgttcaaacaaatagtgtgcatttcctgtcgcaata

SEQ ID NO: 5695 - DNA, 98 bp, Staphylococcus aureus
gaatcagcatctactaattcaccgcgttcataaaaagcaacttgcgtaacgtcttcaccaatatcaatgacacatgcacctaactctttttcagtagc

SEQ ID NO: 5696 - DNA, 99 bp, Staphylococcus aureus; identical to SEQ ID NO: 5211

SEQ ID NO: 5697 - DNA, 754 bp, Staphylococcus aureus
  misc_feature (587)..(587): n=g, a, t or c
agatatttgtgcttgatgaattttgatgcgttggtttttcaagtgtgcatttgcaggatcagcaatcgatgcctcttgaatacgttggtctacacgatgcttcatttcacgtgcgcttaagtttgtaaacgttacgactaaaagtcgatcgacatcaatgccatcacgtaaaatcttttggataatacgctcaactagtacagctgttttacctgaacctgccgcggctgcaacaagtacatcttgtccagttgcgtaaatactttgccattgcgcgtcagtccaaatcacgccttgtggtttctctggaattgtcatctattgctcacccccaaattcatcattaatgttaatattttgaattgcttcaattggatttattgtttcatctacagttcgatatcgcttactatcaatcatgccatctacatgacataccgattgataactacaaaaagcacatggcaatttttgtttgtactttaatggtgcaacttcagtatgtccatccataatatttgaagctgtttctataaaattctctttgttatgttggatgaatttataaatcgttgcttcatctgccncaaggctgcctcgtttactcaaagagccatctttattcaaaccaactggtacaatatctgaagtgaatttaggttctaaacgaatatccaatgcatcaataacagtttggtctgcattaactaaaccactcaacttaaactttttaattaaatcttgttctagttta

SEQ ID NO: 5698 - DNA, 320 bp, Staphylococcus aureus
tattttcttttggatccaactttactaaaaatagttcagcatctccatcttcatgcaacgcatcataaatattttcaaagtaactaatatcacgcgttaagaagccatcgcgttccccagtgattttcattaactcagcaaatgtttttaaaccttctctatcagatcgttctactgtcgtacctcgctttaaagccaagcgcacttttgaacgatttcggcgttcaaaactatttaataactcatcatcatttttatcaattggtgtaatcatagtcatacgtggttggatgtagtcttttgataaaccttctttaaat

SEQ ID NO: 5699 - DNA, 233 bp, Staphylococcus aureus
aataactataagacttctcagtttcaagttgtcttctagataagatgtaagctccagtttcattttcttcatcaaactcaactttagtgacatatgcttcaacttcgtcgccctcttttacaacttcacttgggctatcaatatgatgcgtagatagttgactaataggaataatcccattaaatttaccaccgttgatatgaacaacaacttgcttgtcttcaacttgttgt

SEQ ID NO: 5700 - DNA, 179 bp, Staphylococcus aureus; identical to SEQ ID NO: 4942

SEQ ID NO: 5701 - DNA, 598 bp, Staphylococcus aureus
tcatctaatattagtaattctggtttatgtaacatacttgctaacagctgaattttttgttgattcccttttgatagactatcaattcgttttttgcggttttcagtaatatcaaaacgctcaagccaatacgatatttgctgttgtatttctgtttttgacattccctttaaagttgccaaatatttcaattcttcttcaactgtcaatttcccatgtaaaccgcgttcttccggtaaataaccaatacgattgtacattgttttatctagttttttaccgttatacgtaatgtgtccttcagttggttcacttaagcctaaaatcatacgaaatgtcgttgttttacctgcaccatttcttcctagaaaacctaacattttacctgattctaactttaatgaaatatcatttactgccgtcatcttgccaaaacgtttcgtaacatgttcaattacaagtcccatactttgcctcctaaaaaaatatgtatttatcttaatataacatttccattctctataaatgcaatatttttaaaatgaatttatttttaaaatttctgaaattgaaaaatttaaatagtgccatttttgca

SEQ ID NO: 5702 - DNA, 185 bp, Staphylococcus aureus; identical to SEQ ID NO: 4877

SEQ ID NO: 5703 - DNA, 140 bp, Staphylococcus aureus
caacgcaacgtatatgcatcttgtacacgtatttctgattgtcgcgtcgttaatgttgatccttctaaccaatcacgcatacgcgctgccacattaatctgttcttgaaaattacgaactgcgtgcacatcatgtcgata

SEQ ID NO: 5704 - DNA, 220 bp, Staphylococcus aureus; identical to SEQ ID NO: 5190

SEQ ID NO: 5705 - DNA, 208 bp, Staphylococcus aureus
tacgtcttctaatctattggcttgtcccacttgttcttttaatttagctttttgaggtgtatttaattgtgttaatgcatcaatagcagtattggcgttttgttttgcttcacgtaatctttcgtcaccatttaattcttgtttcgcgctgtttacttgattagctgcagctgttacttctgaaggtgtcgtaacaaccgttggcgta

SEQ ID NO: 5706 - DNA, 560 bp, Staphylococcus aureus
tgcccgtttttattgaagtatgatcgttttgtcaaaccaccttggaaatgtaatggttcatcgaccattgtttctccaactttgatagctttattctgataaccggctaataatgttccaccttttacagaagatccaaccgcaaattgagaagtaaacgtaccaatgtcataatcagtcattttaccactcttattaatctgctttccggcaagcgcaagaatgtctccatttttaggattttgtacaaccatcattgcattatccatatctttggcaccttgactgcgaagcttcttaatttgtttatctaataatgcttctacttctttttgaagatctatatcgatcgttaatttcaaatcttgaccgcgagcgccaggatttaacacttctgaagatgtaactttaccagatttgtccgttgtgtatttcatttctttcttcttaccacgcaatacatcttcatattgatattctaggtaagattttccaacacgatcattgcgtgaatatcctttggataagtaatgttctgtcaattcttttggaataccttc

SEQ ID NO: 5707 - DNA, 266 bp, Staphylococcus aureus
cctgcgctcgcaccaatacgtgtcgcacctgcttcaaccattttattgaaatcttctaaattacgtacgccacctgatgcttttacttctacatcagcacctactgtatctttcattaatttaacgtcttctgcagtcgcaccgccacctgcaaaacctgttgaagttttaacgaagtccgcaccagccgcttttgttaattcactcgcttttacaatttcgtcatggtccaacaataccgtctcaataatcacttttactgtgtg

SEQ ID NO: 5708 - DNA, 115 bp, Staphylococcus aureus
gtaaatctactttgcgttctacaacatcatcgtcatcaacgtctgtcatttcgatttcattatcttgctcatccataacttttacatctaaacctaaactttgtaattctttcat

SEQ ID NO: 5709 - DNA, 186 bp, Staphylococcus aureus; identical to SEQ ID NO: 4838

SEQ ID NO: 5710 - DNA, 159 bp, Staphylococcus aureus
cgttattatgaactccatcaataatacgtgctaactcttcaaatgagcagaccaatctctgtacctttacctgccatcgtttcaagcgcaatacgtacattattgtcattcgttaaaacttcatttaatccttcaataatcttattaattccggcatca

SEQ ID NO: 5711 - DNA, 191 bp, Staphylococcus aureus
tgctgatcttctttattcatcgtaattaaagcctcttccacagtcatttcatcaagatgcatcgtcgcttcattacgcgcttcggtcgtactattttccatcacttcttacactccctagttttttgaaaatcaaatgtatcattcggctcgatacaacttaacagtggtaagtcttctttaataatttgt

SEQ ID NO: 5712 - DNA, 416 bp, Staphylococcus aureus; identical to SEQ ID NO: 4719

SEQ ID NO: 5713 - DNA, 171 bp, Staphylococcus aureus; identical to SEQ ID NO: 5024

SEQ ID NO: 5714 - DNA, 478 bp, Staphylococcus aureus; identical to SEQ ID NO: 5311

SEQ ID NO: 5715 - DNA, 98 bp, Staphylococcus aureus; identical to SEQ ID NO: 5695

SEQ ID NO: 5716 - DNA, 343 bp, Staphylococcus aureus
ctcattcaatatttgttttgcaatatcatcaccttcttcagctgcttcaaacaatactggcacatgtgtgcttctcgtaaatcctccggcaatcatgcgctttttcaatgcactcgttgcagcacgttgctcaaacgttgtattttcagttggacgatacaataaatacccaacttcatttgccttatgaagctcaccattatcaatatgaccttgattattcttgtacgcacccccaatgcctgtaccaagcgtcatacaaaagatccgttctgcttgatattgatgtaatttcaattcgcctagtaatgcagcgtttacatcattttttactttgacataa

SEQ ID NO: 5717 - DNA, 520 bp, Staphylococcus aureus; identical to SEQ ID NO: 4865

SEQ ID NO: 5718 - DNA, 148 bp, Staphylococcus aureus
cgctaattttttgtgatcttccgcaccttctacagccatcgtcatagcatgttgtccaccagcaataatacctataatttcatgagggtcagtattgaatgtaggtacacactccgctgcatctaagacacccaaccttccacttgta

SEQ ID NO: 5719 - DNA, 181 bp, Staphylococcus aureus
agaatcaatttcggtatcaaatagctcaattctgattggttccccaattagcggaaagatatcgataatacctcctcgcaatgagaattcaccaatatgcgataccacggattcccgtttgtaccccatattaactaatttgttaagaaattggtccacatcgatatcctcaccaacacgc

SEQ ID NO: 5720 - DNA, 206 bp, Staphylococcus aureus
tctttaatgaacgtcaacaattcttgtccacgaaatgccaaatcttcttcatcataaacaccttcaccaagacgtttgaaataacggttcatcccattttctgaaacttgtcctctaatacttaacaagtgataattttcattcaatgcttcgcctaacggtaataaatcgaactcatcaccacctgtaccatgcaataatattag

SEQ ID NO: 5721 - DNA, 371 bp, Staphylococcus aureus; identical to SEQ ID NO: 5027

SEQ ID NO: 5722 - DNA, 185 bp, Staphylococcus aureus
aactttatcgcaacactgtttaacgccgaacgtgtcgctcttatttgcgtaaggacatcatcacaatagacatcttcttcaatcatgcgattaatcgctctcacttgtccttcaattcgatttaaacgtgatttaagattcgtttttatttgttcagaatgatgtgcattatcttgttcagtcat

SEQ ID NO: 5723 - DNA, 307 bp, Staphylococcus aureus
aaaataaaaccgaggaaatccttaaatggagattctcggttttttcggtttatttaataacgaagcgggactcatcgagtttgtttctaaattctttttgttcggctttggatttctttttaaaatcgttaaggaaagcttcatatttaggtaatacatcatcaagttcaccgtaatcttttaactttccgccttcaatccaagcaatcttagtacaaaattgtctcacttgtcctaagttatgactaacgaaaaagatggttttgttttgctctttaaactcgtaaattttatctaaacatttttg

SEQ ID NO: 5724 - DNA, 165 bp, Staphylococcus aureus; identical to SEQ ID NO: 4800

SEQ ID NO: 5725 - DNA, 257 bp, Staphylococcus aureus
cctgctgttttattcaattgattacaccacttaggataaactctaaaagccattttcccttgatacttagatgaagctaagatacctttttctaccaataattccctaggaaatagaaagtagccatttaattcatcatcgataacagcaacaatcaggtaatcagcaaactcttcaattttgtatggccgattataattatcttcgtcttttgtccaacatgtcacgaaatatcccgatttagtcggtgttttctt

SEQ ID NO: 5726 - DNA, 188 bp, Staphylococcus aureus
gatcaaataacgctttaatatcttctgctgttgtttctttgtcaagcgttacatcaatttcaacactatgactatcttgaacaggcacacgtgcgcatgttgctgttacttttaagtctggcgcatttaaaatttttctcgtctcatcaatcattttttgttcttcttttgtatatccgttttctaaa

SEQ ID NO: 5727 - DNA, 198 bp, Staphylococcus aureus
tcacgtaaatgcggtgcttcatttttagattgttctaagcgatcaatttcttcttttcctaagaaagtaaagtattttaagaatttaattacatcttcgtctgattgattaatccagaattgataaaattcataaggacttgttttttcagcatctaaccaaacagcacctgactcagacttaccaaatttcttacca

SEQ ID NO: 5728 - DNA, 511 bp, Staphylococcus aureus
tccaacccagtgtagtcgattccattgattagtatatctatccatttctctttggtaagttactttgattttagatttttttgtatcattttgtttatgagaaagtacgcttataaattctgggttaaagttaccacgcgccaataaaggcatttgatgtgttggcaagaaattttgaccagcatttgaactactttgtctaccacctaaaaacagttcattaccatatgttgggtcataactatctctaccatatggtccccaaccattattcataattttgtgcgcctcaacaccccagccaattgatttatgatttgtttttctatcaatcgtagttctgtaactttcttgtttataatttatcgtttctgaaaatgattttgatccatttaatccacctgataagccattagatatattaatatctccgccataagaataacctaatgtttgttgaacttggaattcttcattttgatttttaggtgcatagtcaacaacatttaca

SEQ ID NO: 5729 - DNA, 118 bp, Staphylococcus aureus
tgatttaagaccaaactttttgttgaaacgttccacacgtccatccgcagcagcgaatttttgacgtccagtgtagaatggatgtgaatcagatgaaatatctaaacgaataactggg

SEQ ID NO: 5730 - DNA, 415 bp, Staphylococcus aureus
tagcgttctcgcatatgtcggcttgctaatttgcaaattttgagcgcatatttgtaactcttcgtgtgccttagtaaactttccattaatattgccgtgtgcaacaaccataactccaacttgttgttcgtcacctgctaatgcgtcacaaatacgttgttcaattaatcgtctcattaaaggatgtgtgccaagtggctcgcttacttctacctttatgtctggataccgtcgtttcatttcatgaacgatattcggtatatccttgagataatgcattgcactaaagattagcaatggtacaattttaaaatggtcaaccccactttgaatcaacgtcgtcattaccgtctctaaatcctgatgctcactttctaaaaacgcaatatcatagtgatgtatatcatcttttact

SEQ ID NO: 5731 - DNA, 518 bp, Staphylococcus aureus
tgcgttctgattgttttactattttgtgttgattgatgcttcgatgattgaagcgtatctttaccttctgtcactgttccacttttaccattctctttatgcatatcgtctaattgctttcctgactgcatttgatgtgacgttatcgcattcccttgttctcccggttgatttagtgtttctttttgtgccgctgcattagttgatgttttttccgaggcttgtgcttcatgtgatgacacaacaaacattgtagccgctaacactgacaccacgcctattgaatactttctaatactatactttctttcttcttgtcctcttaacatataatcacctcaaaagtatttttttgaccccctcttgagaatgaaaaacaactgcaccttcaatataacatgacatatattattttttgattaagactacaaaattaataaaaatttaataatacgatattaaatcgatactaatcatttacaaatatgtgtatttccaaataatttataaacactttt

SEQ ID NO: 5732 - DNA, 239 bp, Staphylococcus aureus; identical to SEQ ID NO: 4767

SEQ ID NO: 5733 - DNA, 214 bp, Staphylococcus aureus
tcccaatcgatgcgtgcgaagtcacttgtcataccgtcgatagatgttactgcacgaatacctactgtgtgatcatacgtacggtagtctcccataacacctactgattgaatgtttggtaacactgtgaagtattgccaaatttctctttcaagaccttcttctctaatcacttggcgtaaaatcgcgtctgattctctaacgatttctagtt

SEQ ID NO: 5734 - DNA, 206 bp, Staphylococcus aureus; identical to SEQ ID NO: 5674

SEQ ID NO: 5735 - DNA, 145 bp, Staphylococcus aureus
agggaataataatacgtctctgattgatggagagtcagttaataacataaccaatctgtcaataccgataccaagaccacctgtcggaggcataccatattctaacgcttcaatgtaatcttcatccatttcatgcgcttcatca

SEQ ID NO: 5736 - DNA, 272 bp, Staphylococcus aureus
tacaggtgatagattgatatcttcacgactcttattttccattattcgtaattctccagccatgtttattcacctacaattaattttaggaattcaccatatgattagcagttaatcttaagcgctcaaataaataatctccaacaccttgtggaaacgcagcgcgattaattgctgtctgcatattttctaaccatgcatctctttcaaattcagtgattgtaaaatctatatgtctttttcttagcataggatgtccgtgttcttcggta

SEQ ID NO: 5737 - DNA, 94 bp, Staphylococcus aureus
atacgcgtctaaccactgtgtcgcctctctaaatatcgctaaagacgtattttcttccctagtaccatcaccttgttgattttcaaacaaaaca

SEQ ID NO: 5738 - DNA, 235 bp, Staphylococcus aureus
tgtttttagtttacccgaactatcccttgataatgattgtgacatctgcggataatatttcattttcttagatatcgtcgaaatatcaccgattacttgaagtccatctgtcgtaaacaattcaattctgctttgtttgtttttacttggggcgtatgtcacttcggcaatatatcgtctaacttcaggtgtcatttcagataacgccttaatcatatcatcttcttttgtacct

SEQ ID NO: 5739 - DNA, 402 bp, Staphylococcus aureus
tatttagtacctgcaactactgttcccatatctaaagacataacacgcttatcttttaatgtctctggtacctcattattcactatggcttgcgctaaaccttcagcaatagcagttttaccaacacctggctctccaataagcacaggattgtttttcgtacgtctacttaatacttcaattacacgtgtaatttctttatcacgtcctataacaggatctaatgtaccgtctttggcaatgactgttaagtcacgagctaaactatctaaagttggagtattatttgacttactagcttgtgcatttttattactcatttcagggtttcctaaagctttcacaacttgtgcacgtgctttagtaatatttaaatctagatttgcaaaaactcttgctgca

SEQ ID NO: 5740 - DNA, 226 bp, Staphylococcus aureus; identical to SEQ ID NO: 4357

SEQ ID NO: 5741 - DNA, 360 bp, Staphylococcus aureus; identical to SEQ ID NO: 5611

SEQ ID NO: 5742 - DNA, 388 bp, Staphylococcus aureus
gccatgagcaaatgcaagcgcattatgtttttctaaatttggttcaatttcgtttttgtatacatcaccttgaatttcatcaggtaatagcaccataattacatcagcttgcttaactgcttctgcaacagggaacacatcaaatccatcttctttagctttgtcaaaagaacgacctgggcgaatgccgatgactacatcatatccattgtcttttaagttttgtgcatgcgcgtgaccttgtgatccataacctactactgcaatttttttgccttgtaaagcgtccgtttttacatcttgatcataataaactgttgtcataataaattcctccaaataattaaatattttgtgtttcgaaaattctgaaatataactttgtaat

SEQ ID NO: 5743 - DNA, 592 bp, Staphylococcus aureus
  misc_feature (180)..(180): n=g, a, t or c
  misc_feature (588)..(588): n=g, a, t or c
  misc_feature (590)..(590): n=g, a, t or c
taaatggtcggatcatctggcaataccttttcatgaaaaacttgttgataattgagataagcattttccgtaaaaaagaaattatgatgtgctaattgcgggtattggcaagcaacacctaaatgcatcacatatcctgagcttgccggctcaaattccctctctaatttgtttaatcgntgagtatcaaggtgaattaaatatttataagtaggtatgacttccatatttgaaataatataatctgcctttacaaactcacctgtattctaatctgacacccgtcacacgtctttgatatgttttaatattgtccacacgtgcacctgtatgaattgtgacaccttcttcacgcgctagcttttccaaggcattggctaaatgatggattccaccttctacataccaaaggccttgctcttgttgcatatggaataacatagataatacagctggcgcatcgtatgatgaagaacctacatatttgataaaatagcctaacatttgtcgcaagtatggattcgagatacgcttgtctatggcctgttgcatagtatgtacataatcatatgaataagagcatttaangncc

SEQ ID NO: 5744 - DNA, 184 bp, Staphylococcus aureus
tgatttgacgtcatccccaccttcctccggtttgtcaccggcagtcaacttagagtgcccaacttaatgatggcaactaagcttaagggttgcgctcgttgcgggacttaacccaacatctcacgacacgagctgacgacaaccatgcaccacctgtcactttgtcccccgaaggggaaggctc

SEQ ID NO: 5745 - DNA, 398 bp, Staphylococcus aureus; identical to SEQ ID NO: 4790

SEQ ID NO: 5746 - DNA, 235 bp, Staphylococcus aureus
cagaatcacttaaagctgcaatcacatttctgatgtctcctggtgctggtatatccatttcatctctgattttccctgtactcccaccattatcagcaactgttacaatcgccgtaatatcaattgggaattctcttaatcccctagccataactgataagccagtgccaccaccgataagtacaacttttatttgtctcattttttctcgccactttcaatatgtgcgtcccta

SEQ ID NO: 5747 - DNA, 200 bp, Staphylococcus aureus
ccatcttctgctaaaagatgacggtctctcaacacgatatttcctacatccccaataccaatgccatctattaaaatatttcctgaatttaccttttcatttaatatcatatctttaccgttgtaattaatgacatctcctttttccacaaggaaaatcttttctggtgcaacacctgcttcagctgctagcttcgcatg

SEQ ID NO: 5748 - DNA, 183 bp, Staphylococcus aureus
gcggcaatgaccggaattgaaacgacatctacaatttgtggcactaaagatattgttccaaccataggtaattgatttttaggttttaaaaatgaaccacgatgtccacctgcttcactaccttgagcaacgatagcatccatacccgctttttcattcgcaatagcttcatcaacacttgtt

SEQ ID NO: 5749 - DNA, 413 bp, Staphylococcus aureus; identical to SEQ ID NO: 5095

SEQ ID NO: 5750 - DNA, 97 bp, Staphylococcus aureus
taggcattttgtatgcataacttcttggagttggtccgaatacgataccaccgccacgccattgtggagcacggattgtaccttgacgagcacgacc

SEQ ID NO: 5751 - DNA, 288 bp, Staphylococcus aureus
acttgagagctgtcttcttcatcaataatactatttctttcgttatagataatttcacgttgtttacgtaatacttcatcgtattctaagatacgtttacgcgcgtcgaagttattaccttctacacgtttttgtgctgattctacagctcttgataccatttttgattcaattggtgtagagtcatctaaacctagtcggctcatcattttctgtaaacgttcagaaccaaaacgaatcattaattcatcttgtaatgataaatagaagcgactatcccctttatca

SEQ ID NO: 5752 - DNA, 100 bp, Staphylococcus aureus
aacttagtaccatcggggaacgtagcctcgatttcgatatctgtaatcatgtgttcgacaccatccatgacatcttctttgtttagaatttgtctaccat

SEQ ID NO: 5753 - DNA, 206 bp, Staphylococcus aureus
caccgattcgatctgcagtattttcattgatatctaattgcgcatctttaacagcctctctagctgctacaattgcatattgagtaaatctatccatacgacgcgcttcttttttgtcgatatgatcttcaatattaaagtttttaagttctcctgctaagtgaacgctataaggttcagtatcgatacgtgtaattttatcgata

SEQ ID NO: 5754 - DNA, 328 bp, Staphylococcus aureus; identical to SEQ ID NO: 4822

SEQ ID NO: 5755 - DNA, 174 bp, Staphylococcus aureus; identical to SEQ ID NO: 5209

SEQ ID NO: 5756 - DNA, 328 bp, Staphylococcus aureus
caataatggttcatcgccatcatatataaacgtaccattatcttttagacctattgtaatttcagatttagctttagcaatcccctcgcgcgaacctaaatcttgcatatgtgactcaccaatattagttataactgcaatatctggttgagcgaggtttgacagaaattcaatttcatggaaacctgacatccccatctccaatattgatatttcagtatcattatctaattccaaaatagttaaaggtaaaccaatttcattattgtaattaccttgcgttttcttaactttaaattcggtatgcaatacactttcaatcatatct

SEQ ID NO: 5757 - DNA, 315 bp, Staphylococcus aureus
tatatcagcacctactgtatctttcattaatttaacgtcttctgcagtcgcaccgccacctgcaaaacctgttgaagttttaacgaagtccgcaccagccgcttttgttaattcactcgcttttacaatttcgtcatggtccaacaataccgtctcaataatcacttttactgtgtgacctttcgcagctttcaccactgcttcaatgtcttgttgtacatcatcaaaacgtccatcttttaatgcgccgatgttgatgaccatgtcaatttcatctgcaccattttgaatcgcatcttctgtttcaaatgcttt

SEQ ID NO: 5758 - DNA, 164 bp, Staphylococcus aureus; identical to SEQ ID NO: 5289

SEQ ID NO: 5759 - DNA, 265 bp, Staphylococcus aureus; identical to SEQ ID NO: 5491

SEQ ID NO: 5760 - DNA, 189 bp, Staphylococcus aureus; identical to SEQ ID NO: 4589

SEQ ID NO: 5761 - DNA, 214 bp, Staphylococcus aureus
  misc_feature (74)..(74): n=g, a, t or c
  misc_feature (176)..(176): n=g, a, t or c
agacaaaccttgaattattctacctataattaaaaatgctggcaaaggtgtaatgatgatgagtaatgaacctncaacatttaatatcaatcctacataagtaattttgacgcgaccaaatttatcagcaacatcaccagcacctacgataaacaaaccagcaaataaggcagatnagctaacagcgatatttatcgttccaacgtcactacta

SEQ ID NO: 5762 - DNA, 174 bp, Staphylococcus aureus
aatagcctcgtatgttttcacacgtcctactgtatcatcggatttgtaagttaagatttcttgtaatgtgtatgcagcaccatatgcttcaagtgcccatacctccatctcaccaaaacgttgtccaccgaattgcgctttaccgccaagtggttgttgtgtaacaagtgaata

SEQ ID NO: 5763 - DNA, 179 bp, Staphylococcus aureus
tgatgatttgacgtcatccccaccttcctccggtttgtcaccggcagtcaacttagagtgcccaacttaatgatggcaactaagcttaagggttgcgctcgttgcgggacttaacccaacatctcacgacacgagctgacgacaaccatgcaccacctgtcactttgtcccccgaaggg

SEQ ID NO: 5764 - DNA, 398 bp, Staphylococcus aureus; identical to SEQ ID NO: 4790

SEQ ID NO: 5765 - DNA, 396 bp, Staphylococcus aureus
tgcatcaatgagtgctgtttgattttcaacaattggacctggcaactcttttttataatccatgtaaaaacctctaagctcatcgccatatttatctaagtcatatgcatagaaaatttgcggacgctttaatacaccgaagtcgaacatgacagatgagtagtcggtaactaacgcatcgctgattaagtataaatccgaaatgtcttcataatctgaaacgtctttcacaaaatcatcatgttcatcaatacgtgtcacaactaaataatgcatgcgtaataaaataacataatcatcatccagcgcttgacgcaaagcttctatatcaaagttaacattaaattgatatgaaccttctcgaatcgcttcatcgtcacgccaagttggcgcgta

SEQ ID NO: 5766 - DNA, 122 bp, Staphylococcus aureus; identical to SEQ ID NO: 4856

SEQ ID NO: 5767 - DNA, 138 bp, Staphylococcus aureus
tctaactacatctcctgtttctggattcttaattcctggtttacctggaacttcctctttctctcctgttggtaacttcggatcaaattcgtctcgatgacctggtgttatcgtttctggtccgtattctgttaattc

SEQ ID NO: 5768 - DNA, 942 bp, Staphylococcus aureus
catctttactgtgcaccccatattctattggacgattatcatcataaaaggctttcttagtattaatagtagggtttccctatttgtattgtgattgtagatttatctggtttattttttaaattatataatttatcacttagttcgattacatcatctactgtattgtctttagtaaagtttttcttagtagaaaaaagtgtagcaacagcatctgtatttgcagcgtaattcaccttcttttcttgctcgttccattccttctttaaattctttatcattttttcgaatcagtggttcataatactttcgatattctttttaaacttctagaagagtatgtaatataaaaatattcatttttatatccgacattttgtgtcttgttaattgcctcttttgtaaagcctgtatattgatatttcttttcattttctttgaagaatttatataagttatcatacttttctttttgcgctcgattttcaaagccactcagcactgtacccaccatcatactcatatcatcaccattgtcattactgcgcattgatcctttttgatggatggcatctttgtacaaaggtagacttgcattaaatacaatgccatgatcttcacaatgcacataaacttctacaccatcatctttacctacaacatttgtagctttaacttttagtccaaagttatctttaaagaattgttcacctactttttcaaattctttacgatgcttcttcgcaaattcaatcggcatttttttctgcaggcggttggaagccttggcctacatattttgaagcttccatttcttctggtacagattaatgtatgcgttgttgtgtctttctttgattcattttccatcgtggaacatccccttaaaattaatgtcgcagctaaaatatgatccaatgtattttttcatatgacacctcg

SEQ ID NO: 5769 - DNA, 193 bp, Staphylococcus aureus; identical to SEQ ID NO: 4823

SEQ ID NO: 5770 - DNA, 547 bp, Staphylococcus aureus
tgataatgacgtactctcacttgtcgaactactcactgactctgatgttgattcagacgtactttcacttaatgattcacttaaaaaggcagatgcactttgtgattctgaatcgctagtactatttgattcacttaatgatataaacgtgctctctgaagcagatattgcttcacttatagagtcgctcgttgacgttgattcacttattgaatcagactctgatgtacttaagcttgtggaatcactcatagatgttgatgtacgttctgaattacttgtacttaacgatgtcgaagtacttaccgaaccagatgtgctcgtagaagcactttgtgatattgattcacttgatgcagttgatgctgatttgctatcactcgttgaatcactaaacgacgttgatatgctcattgaatcggattgacttgcactcattgaaccagacgtactttgtgattccgaagtacgtactgaagcacttgtcgacgttgatgtacttgttgaacctgattgactagtactttgtgataatgacttactatca

SEQ ID NO: 5771 - DNA, 276 bp, Staphylococcus aureus; identical to SEQ ID NO: 4716

SEQ ID NO: 5772 - DNA, 360 bp, Staphylococcus aureus
ccaacattacttgaaggatttgcagcattcgcaatgttttgtgcccattctttatctggatagaacaacgttaatgttctaggcagtaagaagaacgccattgcaaagattacaggaataacaccggctgagttcacttttaaaggtagataagttgcctgtgaacctaatctttgagcagtttgtttcttagcatattgaatcggaattttacgaacggcttcaagtacataaatagcacctacagttaatagtatcagtgacactaaaagtcctaatactttcaaccatgctaatgatgtatcttcttgcccaacgaacgcagtttgtccaaattgaattagactggctggcaacgtt

SEQ ID NO: 5773 - DNA, 135 bp, Staphylococcus aureus; identical to SEQ ID NO: 5414

SEQ ID NO: 5774 - DNA, 212 bp, Staphylococcus aureus
ctgtcgcaataacaggtatacccgctgtgtcacctgcatgtattaaacgttgataaatttcatgtaatgtttcagtatctctaataagctctctatcaattaaatcttgataaagtgccggtggttgaatttcaataaaatcataatatttggcaattttttcaacttgactctggtccttctgcataactgccgtaaataattcaccttca

SEQ ID NO: 5775 - DNA, 235 bp, Staphylococcus aureus; identical to SEQ ID NO: 5738

SEQ ID NO: 5776 - DNA, 307 bp, Staphylococcus aureus; identical to SEQ ID NO: 5723

SEQ ID NO: 5777 - DNA, 450 bp, Staphylococcus aureus
catcccactttttagctagtaaaggcttaataccatctttcgtgttacgtacaagcggctcgtatatcatactttcagcagacattgatccaccgtaaacatgcggattcatatcaccgatatctttaaccgtcgtatacgttaattgcttgttttcttttttctcctctaaacctttattaccgccacaaccagttaaaattagccctgatgcaagtaacattgcactcattttagttagttttctcatttgcttttcctctttctaaattgataagttgcattacttaatcaaatcgtaatgattatttttctcaattatttgcttatttttatgtaaatgtcaaacataattcaataatttttttctattataaaacttcaaacccttattatgaaagcgttctattgatttccaaaaattttgtgacgagtgctttatctccttca

SEQ ID NO: 5778 - DNA, 174 bp, Staphylococcus aureus; identical to SEQ ID NO: 5762

SEQ ID NO: 5779 - DNA, 268 bp, Staphylococcus aureus
  misc_feature (87)..(87): n=g, a, t or c
  misc_feature (93)..(94): n=g, a, t or c
actttcattggcacttttttttgtaaatcaataactaaatctttaataccctcacctaaagatttgtcttttaaaccaagcggtctnaaatgnnacagcaaagcacgcatttctaactgcgaatcttgaaccattttctctaaaataggaatttgttggtctaatggtggttctaacttcgtttctttgatagcagatagcatcatacttgccgcaaaaagttgctgactaacagaatcgtgaagttctcgtgctagtctttgacgtt

SEQ ID NO: 5780 - DNA, 174 bp, Staphylococcus aureus; identical to SEQ ID NO: 5542

SEQ ID NO: 5781 - DNA, 232 bp, Staphylococcus aureus
tgacttaactgcggccactttggcatgtggaatggcaataccttcgccgataccagttgtactttgtgattctcgattgtgaatcgcttccttaaatgacgcgacatcacttaatttacctgctttgtctaattgatttactaactcatcaataacaccatttttgtcatttgccattaaatccattgctattgtatcttttgttaataactctgttactctcattattttc

SEQ ID NO: 5782 - DNA, 497 bp, Staphylococcus aureus; identical to SEQ ID NO: 5590

SEQ ID NO: 5783 - DNA, 196 bp, Staphylococcus aureus
tgtagtacgttaccgatgataacttcatcaatctcacttggattcaaacccgtctctttaataatatgttctattaaagtcgcacctaaatcataggctggcacgtctttaaacgcacctccaaaaacgccaataggtgtcctgtatgctgctgctaatacgactctcgtcatgtcatattcatctccttatgata

SEQ ID NO: 5784 - DNA, 497 bp, Staphylococcus aureus; identical to SEQ ID NO: 5590

SEQ ID NO: 5785 - DNA, 154 bp, Staphylococcus aureus
acttcaccccaatcatttgtcccaccttcgacggctagctcctaaaaggttactccaccggcttcgggtgttacaaactctcgtggtgtgacgggcggtgtgtacaagacccgggaacgtattcaccgtagcatgctgatctacgattactagc

SEQ ID NO: 5786 - DNA, 329 bp, Staphylococcus aureus; identical to SEQ ID NO: 5630

SEQ ID NO: 5787 - DNA, 262 bp, Staphylococcus aureus
tgagtagtaccaaatacgccaccttttctaccaacatcttcaccaagaataaacacatctttattttgttgtaatgctaagtcttgtgcctggcgtatcgcctctaaataagataatttagccattagttaagactcccttcttcgtacacaaatgcataggcttcttcgacacttggatatggcgcgtcttcagcagcctttgtcgctttattgatgatgtctttatgctccgcttctatttctgccaaccaagcatcatc

SEQ ID NO: 5788 - DNA, 256 bp, Staphylococcus aureus
agtaacttctacaccatctgtatgtctgtattcaggatgacctggtgttttagaaccccattgtctaaattgctttaattcttctaattctaaactaccagaaacatgtaacaagctatacaataatgctgaaccatgccctgcagataatacgaaacggtctctattgaagtaatctttagattgtggattaaaattcagatgacgtgtccacaaagtgtaagccattggggcagctcccataggtaatcctgga

SEQ ID NO: 5789 - DNA, 329 bp, Staphylococcus aureus
tcgcaacatcttcagcatttttaaggttttgtaaaccatcgattgtagcacgaaccatgttgattggtgtgtttgatcctaatgatttacttaagatatcagtgatacctgctaattcaagtacggcacgaacaggaccaccagcgataactcctgtaccaggtgcagccggtttcataaatacgcttcctgaaccgtaacggccagtaattgtgtgtggagttgtaccttcaacacgtggaacaactactaaatcttttttagctgcttcaacagcttttttgattgcttctggtacctcttgagctttaccagtaccgaaacctaca

SEQ ID NO: 5790 - DNA, 236 bp, Staphylococcus aureus
cactaattgatgttgagtcggatttgtcttgtgacattgaaacactcgatgaattagattcactcattgatgttgagtcagatacgctcgttgaacctgaaccagacgtacttaatgattcagatatgcttgttgaagttgaaccacttgttgagtccgatgtacttgtcgatgtcgagtctgaatctgatgtactcaatgattctgagtcactgatagaagttgaatcacttgta

SEQ ID NO: 5791 - DNA, 224 bp, Staphylococcus aureus
aagtttgttccgttgactgggtctccaccaataccaacagctgtagtttgaccaataccttcttcagtcaattggtgcactgcttcatatgttaatgtacctgaacgagatactacaccaacatgaccttttttgtgaatatagccaggcataataccaattttacattcatctgctgtaatcacacctggacagttcggaccaactaaacgtgtttttctacc

SEQ ID NO: 5792 - DNA, 450 bp, Staphylococcus aureus; identical to SEQ ID NO: 5418

SEQ ID NO: 5793 - DNA, 194 bp, Staphylococcus aureus
taaaccttcttcagataatagcttacggtctcttattacaacattaccgatatcaccgataccactaccatcaacaagtacattaccagatggaatgcgaccagctttacgtgctgaatcgtgtgttaaagctaagacatctccaatatcaaagatgaagacattatcttcttcaacgccgcattcaacaccag

SEQ ID NO: 5794 - DNA, 289 bp, Staphylococcus aureus
ttgaaatatgatcatcaccacgaattacatctgaaatttgcatgtaatgatcatctatagctactgcaaaattgtacgttggaatgccatctttttttacgataacccagtcaccaataccatttgaatcaaatgaaatatttccttttaccatatcatcaaatgaatacgtttggttttgaggtactcggaaacgaattgatggttggcgtccttctgcttcaaattgttgacgttgttcttcagtcaaatgcgcatgttgaccaccatagcgaggcatttcaccacg

SEQ ID NO: 5795 - DNA, 139 bp, Staphylococcus aureus
cgaagatttttaacatttctgatgctagctttctttttcatctttcaaatgcttaataaaatcaaagccaggtcgccctttagccaatgcttccatcacatcataccaatccgaaccgacttgttgatatatattttgc

SEQ ID NO: 5796 - DNA, 221 bp, Staphylococcus aureus
tgcaagttctgccattttatttttacgttcatgcatagaatcaactaaaattaattcagttaaacgttggcttgtgatttcatgttcatctaacattttaggcatgacgccaatagctttgccgccatgatctaatacaccatcttgaatggcacccataatgccaattgaccctgcaccaaatactaattcataaccttgttcagcaaaatatttaccta

SEQ ID NO: 5797 - DNA, 455 bp, Staphylococcus aureus
gctccatcgcttaactaaataatcatctagtgaaatatatatacaagatgatcccggatccccttgtctaccagaacgaccacgtaattgcctgtctacacggctattttccatatgttcatgaataataacagctaatccacctaatgcttcgacaccttcaccaagtttaatatctgtgcctcgacctgccatactagtcgcaacagtcatggaaccaatttgccctgcttcagctatcatctgcgcttcttttgcaacattttgcgcaatgagtaaattattaggaatatccatttggaataatactttcgaaaagtattcagccgcttcagcagttctcgttatgagtaaaaccggtcgccccgtttcatgaagttcaactatatcatgaatcatcgcgatgtttttctcatcaactgaacgaaacactttatctggttcatcgatacgtt

SEQ ID NO: 5798 - DNA, 721 bp, Staphylococcus aureus
cttaaaccaacttgatgtacgtcattgttcggtcttgcatgtgcaattgcaatttcaggtgcgataacgatataaggtccaagttcattaacgctatcaatcattgcttgaacatagccttgttcaataatttgttcttgtagtaatggctgagaagctatagttatagcttcagtccaatcatttacttgttcttttacaatgatgcgtgttgttgacaaaatgtctaatgacacgttattaagcctcctttgtcatagttaaagcaatgtgttgtttaattttaaaaatattcccatctaagaaatcttgtcgatataagtcgttgcttaagcattcgcttaactgtcccaatgcctttaaatgtgcattggggtggtccgttgctaatgtaattacaaggtgaacgggatcgttagctttactaccaaagataatcccttcagtgaaatatgttagtgcgaaacctacaccattctgtacataatcagtaccagcgtgaataagtgcaatatgtggactaatgaccatatatgacccgaattgttcaaattgttttaaaattgcagctgtataatttgaatagacaatgccatcattgattaaaggttgcacagccactgcaattgcggattcaattgataatggttgtttatttataatgatgcgatgttcaggcaataaatctgcgagtgacttgccatcagttgccattttcatg

SEQ ID NO: 5799 - DNA, 352 bp, Staphylococcus aureus
tagtggtacagctctatcatgatttagcaacacaaaatcttgcataaacccatcatgtccacttgatctgaagtagctcgattttaaatagttttcagcaatgacatcgtctttttctgtcggcgtattcggtaccataactacttttgtacctttattaaacacacctttactgtcaaatacgacctcaccaacaccttcatgaattaaagacattggcaatttctgagataagacattctcatcacggctaccagtataatatctttgatcggcagcacaaattgacatatataaaggacgtacaatgacatagtcactgtaaatatctacgttgttatacgtaacttca

SEQ ID NO: 5800 - DNA, 248 bp, Staphylococcus aureus
ttaactgttactaatttttgaccaaagcgaatcgtcagcacatcttcaactttaacatccgatccagctttagcaacattaccatttattgtaattctaccttgatcacttacttcttttgctagcgtacgtcgctttattaaccgtgatacttttaaatatttatctaatctcatgtattactctcccctttttctagccactgctttaacgcggcctcatcaaatgacttatccttcgtcttctca

SEQ ID NO: 5801 - DNA, 235 bp, Staphylococcus aureus; identical to SEQ ID NO: 5738

SEQ ID NO: 5802 - DNA, 210 bp, Staphylococcus aureus
gtattaaacattaatttatatccaggttgctcttgatacatttttatttcttctgcaataatacctttttctttatcaacagtttcttttgtaaaataaggcgtttcaaccattgtaagtaaacgtttaatgttgttttcaatattatcagttgcactgaacaagtagcttgtacgatcaaagcttgtaaacgcatttgcttgtgcgtta

SEQ ID NO: 5803 - DNA, 379 bp, Staphylococcus aureus
cgcctgcatcaactgcttctttaattttcttagttaaagaaactgtttctggtgtcgtatttgcaccttttgtctttgtttcattaatttggaaaccattagttcctaaatatgcactatttttttgtaactttctttgaattaaatgaatcatcgtcgcaatagaagttttaccatttgtacccgttacaccaaatgtcactaactgatgactcggataatcatataatgtgtgtgctagaatactagctactcttaatgtgtccggcacaaccacttgtgttacgttagctggtaatgattgttctttattgaccactaccaacttacacccttgatcagctacattttgacagaacttatgactgtctacagtata

SEQ ID NO: 5804 - DNA, 276 bp, Staphylococcus aureus
tgctgcgtctaaatcatgtgtttttaaatgtaagtgtccaatcatgccttttgctggcattccttgccaaccttcatcagtacgatgtgttaataaggtttggctatcaacttctaaagtatccattttaactttgccattttgccattcccatgaagatgaaggtctatcgcgatagacttcaataccattaccttcggggtcgttgaaatataaagcttcacttactaaatgatcaccagcgccgatgcccatatttttttgtgccacgaaata

SEQ ID NO: 5805 - DNA, 193 bp, Staphylococcus aureus; identical to SEQ ID NO: 5481

SEQ ID NO: 5806 - DNA, 379 bp, Staphylococcus aureus; identical to SEQ ID NO: 4356

SEQ ID NO: 5807 - DNA, 235 bp, Staphylococcus aureus
tctttagtaaatccaagaacttcgaacattttttcttgtaactcaccatcatgaattctgattgaaccgccacctaattcataaccatttaatactatgtcataagcatttgcctcagcttcttctggcgcagtgccaagcttagcaatatcagcttcttttggagatgtaaatggatgatgtgctgcaacgtaacgtttcgcatcttcatcatattctaataatggccaatctg

SEQ ID NO: 5808 - DNA, 431 bp, Staphylococcus aureus
cgctagataaaattttatcatgatcaaatgataagaatggcaactctgcaggcgaagaaccagttgcaattaatacaaattggttgggtaataagtctgattcaccatcttcatattcgacagaaattgtgccactttgaggtgaaaatatagatgtacctagaatacgtcccgtgccattataaatgtcaatgtgattgtgttgcattaaatgctttacaccttgatacatttgattaataatgtcttcttttcgtgccaacatattttcaaaattaacattagcatctttgacatcaacgccaaacattgctgcctgttttactgtttgaaatacttcagcagatttaagcagcgatttagtaggaatacaacctttatggagacaagtacctcctaatagttgtcgttctactattgccactttttta

SEQ ID NO: 5809 - DNA, 381 bp, Staphylococcus aureus
actgtttctttcgtcatgataatttcgccattttcagcataaaatactggtaacggtacaccccacacacgttgacgagaaataacccattcgccacggtcacgaaccatattgtaaatacgtgttttaccccaatttactttgaagtttgtattttcgattgcatctaaaatatcttgtcttactttactgattgaggcaaaccattgtggtgtagcacggaagattacaggtttttttgttctccagtcgtgtggatagctatgtgtaataaagtctaattttaatagtgcacctttttctgttaataaatcagtaacggctttattagctttatcatagaacatcccttcaaattggccgccttcttcagtaaataca

SEQ ID NO: 5810 - DNA, 310 bp, Staphylococcus aureus
atcaatatttttcaatacacctttttgatcatagaaatctaaaataggcttagattgtttaatattaacactcaaacgattagctaccgtttcaggattatcatcttctcgttgatacaatttaccaccatcgatatcacaaataccttcgaccttcggaggattaaatacaagatgatacgttgtaccacatgactcacagattcgacgacctgtaagacggttcattaattcttcttccggaacttcgatattgatgacagcatcaatgtttctgtcaagctcagacataatattatttaatgcctca

SEQ ID NO: 5811 - DNA, 148 bp, Staphylococcus aureus
cttgaatgcctactgcttcacgttcttcacggttcatttcgtaaatattttggttaactggttctggaacttttaatttatttttaataccatctagtccagcttctaagattgcagctaacgccatgtatgggtttgcagctggatc

SEQ ID NO: 5812 - DNA, 266 bp, Staphylococcus aureus
ttcgtataaaaaggaccaattggtttagttgggttatcaaatcgtggatcatctttatctacttccacacgtgtaacgattgtgcctacagttctatcactattcatttcagttaaaatgcgattgatttcagtttccaaccaatagcctatcataccctgtgacattgcaccacaagtatccaatggcattgccggcgttgtgtcactgttcgatttagcttgttggattaataaacttccaatttgtggaccattaccatgtga

SEQ ID NO: 5813 - DNA, 113 bp, Staphylococcus aureus
ttgaataattgagacgtcttcgtctccttgtggcaattggtcaactaatgcttggttaactacaaacggtaattcacgataaacttgctctgcttcagcaataatcgaatata

SEQ ID NO: 5814 - DNA, 513 bp, Staphylococcus aureus
caatggcgtttgcacatcaatgaccgttttcgatgcttcgatactcacaatttcatcatccactttaacttcatctggacttacgaattcaacataacctactgtcccaatatcatcttgcaattcaggtgtcatactaaacacatacaaatctcctactttttctacccataaataattggctaactttttcatcttatcttcatcctttctcttctatttaaaatgctacaaataaatttccgcgagtaattttaatgttttacaacgctgttcaatacctggaataagcggtgctactaacacctcatcaacttcaaacgtagcaatgaaatcatctaattgtgctttaaccttttcttgtgtacctgcaatgatgcgtgcttgatgtgcttgaatcatctctttgtctcgatcattaagcttatacttttgtgctgtgtctactgaaggaaaatcttcaaattctgcaaattgtaatttacctaataaccaaacatctaaggcatgttg

SEQ ID NO: 5815 - DNA, 224 bp, Staphylococcus aureus; identical to SEQ ID NO: 4863

SEQ ID NO: 5816 - DNA, 516 bp, Staphylococcus aureus
ctttcttctttaacatgtggtgtatgagaccaaacttcttcagctgtatgcactaagattggtgctaacaacttcgtcatatcaactaaaatttgatataacacctgtttgcatactacgacggatatgagaatcacgttgttcaatatataaaatatctttaccgtaatccaaatagaaattacttaactcaacattgataaagttttgaacttcttgataaatatttaagtagtcaaagttttcatagttgttaatcgtacttgcagtaaattcacgtaaacgatttagcaagtaacgatccacttctaataactctgattcaggaatgctatctgtgtcaggattgaaatcgttaatgttacctaacataaatcttaatgtatttctgattttacgataaacatcagatgtttgttttaaaatttcatcagaaattctaacatcagctaaatagtccgtactacttacccaaagtctcgcaatatcagcacctttttgtttaaccacttggtc

SEQ ID NO: 5817 - DNA, 108 bp, Staphylococcus aureus; identical to SEQ ID NO: 5469

SEQ ID NO: 5818 - DNA, 268 bp, Staphylococcus aureus; identical to SEQ ID NO: 5441

SEQ ID NO: 5819 - DNA, 117 bp, Staphylococcus aureus; identical to SEQ ID NO: 5434

SEQ ID NO: 5820 - DNA, 190 bp, Staphylococcus aureus; identical to SEQ ID NO: 5281

SEQ ID NO: 5821 - DNA, 215 bp, Staphylococcus aureus; identical to SEQ ID NO: 5273

SEQ ID NO: 5822 - DNA, 181 bp, Staphylococcus aureus; identical to SEQ ID NO: 5185

SEQ ID NO: 5823 - DNA, 207 bp, Staphylococcus aureus
gtaaaaggtaaactttttcgcttacttctataatctaatatttgctgttcattcatcgcaatatcttgaataattatttgcggtgattgattaccattccattcgttgatttgaacagatcctaatatattaattggctgttcatcttgtaactcaggttctaagtgtccattttgccaaaatagcgcggcgatattactttcacca

SEQ ID NO: 5824 - DNA, 179 bp, Staphylococcus aureus
cttgtgttacgttagctggtaatgattgttctttattgaccactaccaacttacacccttgatcagctacattttgacagaacttatgactgtctacagtatatccaactgaagcgacaaaaatgctaccttctctcgctgtacgtgaatcagtagtgatatcatctatttgttgttct

SEQ ID NO: 5825 - DNA, 176 bp, Staphylococcus aureus
cgtacacaaatgcataggcttcttcgacacttggatatggcgcgtcttcagcagcctttgtcgctttattgatgatgtctttatgctccgcttctatttctgccaaccaagcatcatcgataatgccagctgaaagcaactcttttttgaacttttcattgcagtctgctttttta

SEQ ID NO: 5826 - DNA, 221 bp, Staphylococcus aureus
tgtaaatcactttggcatctggattattatctaaaacatgatgaccaatggcatgcattaaatgggtttttcctaaaccaacacctccatagataaataatggattgtacgctttggctggtgcttcggccacagctaaactcgctgcatgtggaaagcggttaccgggtccgattacaaaagtgtcaaatgtgttatgggcattgaattgctctctacca

SEQ ID NO: 5827 - DNA, 119 bp, Staphylococcus aureus
cagatatgcttgttgaagttgaaccacttgttgagtccgatgtacttgtcgatgtcgagtctgaatctgatgtactcaatgattctgagtcactgatagaagttgaatcacttgtagat

SEQ ID NO: 5828 - DNA, 250 bp, Staphylococcus aureus
taacgttttttcatcgaatggtttaccaatgaactgtaaaccgattggtcggccatttgattgtccacaaggaacagaaataccaggtaatccagctaagtttactggtgttgttaataaatcattggcatacattgttaatggatcatcaatttcttcacctaaattaaacgcagttgtaggcgctgttggaccaactactacatcataattttcgaatactttatcaaagtcatttttaatcaatgtt

SEQ ID NO: 5829 - DNA, 123 bp, Staphylococcus aureus
attgaaaatgcatttttagatttttgtatgcctctcgcaggctttttcgaagatttttgaacaggagcgacactcactccttgtgcttttagtgtttttagttcttgctctaactgttccata

SEQ ID NO: 5830 - DNA, 167 bp, Staphylococcus aureus
agaacgtttgatagctgtagtcaacatacgttgatatttagctgaagtaccagttacacgacgtggtaaaattttaccgcgttctgagataaaacgttttaataattcagtgtctttgtagtcgatatgtgtaataccatttgctgtgaaatagcatacttttttac

SEQ ID NO: 5831 - DNA, 250 bp, Staphylococcus aureus; identical to SEQ ID NO: 5828

SEQ ID NO: 5832 - DNA, 290 bp, Staphylococcus aureus; identical to SEQ ID NO: 4456

SEQ ID NO: 5833 - DNA, 221 bp, Staphylococcus aureus; identical to SEQ ID NO: 5826

SEQ ID NO: 5834 - DNA, 177 bp, Staphylococcus aureus; identical to SEQ ID NO: 5444

SEQ ID NO: 5835 - DNA, 189 bp, Staphylococcus aureus; identical to SEQ ID NO: 4589

SEQ ID NO: 5836 - DNA, 161 bp, Staphylococcus aureus
ccaggaataccgatagtttgaatttctttacattcctcactgatgcgttgtgcaccgcgataactaccgtcaccaccaataactacaaggccctcaatccctcttttacgtaagttttcgattgcaactttacgtacttcttgctccttaaactctggaca

SEQ ID NO: 5837 - DNA, 350 bp, Staphylococcus aureus
tgtcgataaacattcatatcgtagcggtctgcaaattctttaatgcgatatgccggcggtaccatgacaggtaatgaatcatgtttgaattgttcgtctacggcatctttttgaataggtaatccaaagaagcctgcaataccaatcgtttcaaagggccctgctgcttcgatatgtctacgaaatggttctgaacgaacatctatacaaaatgcaatttgcgctttcgttgatgtgcccatctgatttagctcgctattattttcatcaactgcttgtgtgtcatttaacaatactgaatgtggctgattagcgttatcattttctgagacatttacttggtttacatc

SEQ ID NO: 5838 - DNA, 149 bp, Staphylococcus aureus; identical to SEQ ID NO: 4332

SEQ ID NO: 5839 - DNA, 215 bp, Staphylococcus aureus
aatttctgcaaagctctgtaaacaatctagctctgaaataattttagcttgttgttgtaaacgttcagtatattttttaacttcttcacgtagctgaacaaataattgatattctaattcgatggctttgtcttccgcacctaaaatgatatcttctttttctttaagttcatcagttataaaacgttcagcattcgataacgtttgcttcctca

SEQ ID NO: 5840 - DNA, 138 bp, Staphylococcus aureus
gcccagaccaccagctaaggtcccaaaatatatgttaagtggaaaaggatgtggcgttgcccagacaactaggatgttggcttagaagcagccatcatttaaagagtgcgtaatagctcactagtcgagtgacactgc

SEQ ID NO: 5841 - DNA, 337 bp, Staphylococcus aureus
cataaccgcaaaagttaataatgctcctgtttttgttttgtgtatcatttccaaagtttcaagatcaattggttggccttcgctttgcatatctaacatttgaccgccgaccattccaacatgaccacttgctattgacagccgttgtagaacttttatttttacttcatcagttaatctatcatcacttgaaataagttcaaatgctttagttaataaagcatcacctgctaatatcgcagtccactcaccatatactttatgatttgttaattttcctcgtcgataatcatcattatccatcgctggtaggtcatcatgaataagtgaatatgta

SEQ ID NO: 5842 - DNA, 215 bp, Staphylococcus aureus; identical to SEQ ID NO: 5273

SEQ ID NO: 5843 - DNA, 181 bp, Staphylococcus aureus; identical to SEQ ID NO: 5185

SEQ ID NO: 5844 - DNA, 499 bp, Staphylococcus aureus
tgaaccatcaatatttttcaatacacctttttgatcatagaaatctaaaataggcttagattgtttaatattaacactcaaacgattagctaccgtttcaggattatcatcttctcgttgatacaatttaccaccatcgatatcacaaataccttcgaccttcggaggattaaatacaagatgatacgttgtaccacatgactcacagattcgacgacctgtaagacggttcattaattcttcttccggaacttcgatattgatgacagcatcaatgtttctgtcaagctcagacataatattatttaatgcctcagcttgctcgattgttcttgggaagccatctaataaaaagcctttttttgcatcgtcttcagaaattctttccttaacgatacctacagtcacttcatcaggaactaattcgccacggtccatataagacttagcttctttacctaattcagtttcttcttttatagcttttctgaacatgtca

SEQ ID NO: 5845 - DNA, 572 bp, Staphylococcus aureus
cagtataaaaatctaaaatacctaacccttctaattctgtaccatcaggcgtgatatattttttccctaaaaattgatagcctccacaaatcgttaatcccggcataccatcttcaatcgcttctttaagtggtgtcttaattttacttaattcttttgttgctaatgcttgttctctatcacttccaccaccgataaagaaaatatcacattcatcaaaggtaataccttctgtttcattgatttctacgacattaactttaatatttcgttttttagcacgttgtcttaaagcaataatatttcctatatcactgtataaattcaatttatctgacataaaatgataaatagtcaattcatgcatattatgattgacctccttcaaacgaacggtttaattgttcaagcataggcgctaatgatgtatagtttggtattgcaactgtgaaacctttataatccatagtctttgccgttgctttataaatatcacgctcaactataattggtacttcaacctctgctaacttcaatcgcaattgaagttcttctgctcgtgtacctgtcac

SEQ ID NO: 5846 - DNA, 323 bp, Staphylococcus aureus; identical to SEQ ID NO: 4497

SEQ ID NO: 5847 - DNA, 372 bp, Staphylococcus aureus
agcagattcgatttgacgagatgtgatccaagacgttgttgtagcttgtaaaccaaactcaccaaatgttacgtagttaccgcctttagaacgaccagttgttttaggacgatgttgacgacgatattttacacgttttggtagtaacattattattttcctcctccactagtgttcttagtaggaagaacttctccacgataaatccatactttaacgcctaatttaccgtaagtagtgtcagcttcagcgtgtgcataatcgatgtcagcacgtaacgtatgaagtggaacagttccttctgaatattgttcagcacgagcgatgtcagctccgcctaaacgaccagatacttgagttttgataccttta

SEQ ID NO: 5848 - DNA, 152 bp, Staphylococcus aureus; identical to SEQ ID NO: 5206

SEQ ID NO: 5849 - DNA, 80 bp, Staphylococcus aureus; identical to SEQ ID NO: 5039

SEQ ID NO: 5850 - DNA, 109 bp, Staphylococcus aureus
cacccaaataagttgattatattattttttcttacgtccacgaacgataagtttgtctgatgattttttaccacgacgagttttcttaccaagcgtaggtttaccccat

SEQ ID NO: 5851 - DNA, 223 bp, Staphylococcus aureus
accatagaactataatccttatgctcaaaaatatatcctttggcatggaatccagcaatatcagttaatcttacctctacattttttaatttaagtaattctccatacattttaggactattaaaccctaagtaattagatgttaatattttccctttaacacccttattgcttaaatctaatagttgagcctttaagctggctaaaccgctttctgttataa

SEQ ID NO: 5852 - DNA, 104 bp, Staphylococcus aureus
gcttctaataatgcacgagcgattccgtgacggatagcttgagcttgtccagtgaaaccaccaccatgaacgttaactaaaacatcatagttacctttagtttc

SEQ ID NO: 5853 - DNA, 104 bp, Staphylococcus aureus; identical to SEQ ID NO: 5852

SEQ ID NO: 5854 - DNA, 176 bp, Staphylococcus aureus
ctgatcgtcccattgctcgttgtcgtgttctttcattaattcttttgcttcttctactagatttaagatttgatctaaatctgacattttacctagacggatcatgtacgtcactccttatatcattatgttaaacatgtttttcagtacatgttaatcttacacactattaacat

SEQ ID NO: 5855 - DNA, 225 bp, Staphylococcus aureus
gatacaaatagtggccggcaacgcctatcattgcagcattatctgtgcataatttaggacttgggatagttaattgaatgtcattgactttgcattgatccgctaaagattgacgtaatcctttattactcgccacgccaccagcaacaattaatcgctgaacaccatattctttacaagcttgaatagctttaaacgtgagcacctctacaacactgttttgaa

SEQ ID NO: 5856 - DNA, 153 bp, Staphylococcus aureus; identical to SEQ ID NO: 5522

SEQ ID NO: 5857 - DNA, 350 bp, Staphylococcus aureus; identical to SEQ ID NO: 5837

SEQ ID NO: 5858 - DNA, 350 bp, Staphylococcus aureus; identical to SEQ ID NO: 5837

SEQ ID NO: 5859 - DNA, 153 bp, Staphylococcus aureus; identical to SEQ ID NO: 5522

SEQ ID NO: 5860 - DNA, 372 bp, Staphylococcus aureus
ccaaatcctaatgaatagaaatcatacacgtctgtacgcatttccatattatctactttgttaaccgctaatacgaccggttttttagatttgtataaaatttgagcgaccatttcatcgctttgtgtcaatccttcacgcacgttaaccataaaaataataacatccgcttcatctatggcgatttctgcctgcgctctaatttgtgtttggaatggtgcatcaccaatttcaataccacctgtatcaataatattgaaatcatgtgttaaccattcacctgaagaataaatacgatctcgtgttacacctggcgtgtcttccacaatcgaaacacgttctccaactattctattaaaaattgtagattta

SEQ ID NO: 5861 - DNA, 277 bp, Staphylococcus aureus; identical to SEQ ID NO: 4366

SEQ ID NO: 5862 - DNA, 282 bp, Staphylococcus aureus
gaaccgccacctaattcataaccatttaatactatgtcataagcatttgcctcagcttcttctggcgcagtgccaagcttagcaatatcagcttcttttggagatgtaaatggatgatgtgctgcaacgtaacgtttcgcatcttcatcatattctaataatggccaatctgtcacccataagaagtttaattttgtttcatcgattaaacctaattctttagctaatttgacacgtaatgcacctaaactttgtgcaacgacatttggtttgtctgcaaca

SEQ ID NO: 5863 - DNA, 287 bp, Staphylococcus aureus
gcttttttgattgcttctggtacctcttgagctttaccagtaccgaaacctacacgaccatttttgtctccaactacaactaatgcagtgaaacggaaacgacgaccaccttttacaacttttgctacacggttgattgtaacaacgcgttcttcaaattctttcgtctcttcttctctacgagccatgtatttgtccctcctttaaattaaaattctaatccgctttctcttgctgcttcagctaatgctttaacacgtccgtgatataaatatcctccacggtca

SEQ ID NO: 5864 - DNA, 309 bp, Staphylococcus aureus
taattgttaacaatgtatttggtgcaatttcgtcacgtaaatttttaatagcttcgattaattcccaatgtgcatctactttactcatttctttacgtgtacgaagatgaatagataaattggcaatgtcttgttcgaagacgtgcttcaaccaatctttccattcatcgatttcatagtagccaaggcgtgttttaacacttaccggaagcccacctgctttagtcgcttgaataatttcggcagcaacgtcaggtcttaagattaagccggaacccttaccctttttagcaacatttgctacaggac

SEQ ID NO: 5865 - DNA, 287 bp, Staphylococcus aureus; identical to SEQ ID NO: 5863

SEQ ID NO: 5866 - DNA, 132 bp, Staphylococcus aureus
taacttgtcattcggtagtggcttcgttggtatgattttattatgttccatttttaccggataccttttttcatcatcctttggtctgccgttactgtcatctgtcatttcacttataaaataatacccttt

SEQ ID NO: 5867 - DNA, 309 bp, Staphylococcus aureus; identical to SEQ ID NO: 5864

SEQ ID NO: 5868 - DNA, 667 bp, Staphylococcus aureus
  misc_feature (614)..(614): n=g, a, t or c
tattacaacattaccgatatcaccgataccactaccatcaacaagtacattaccagatggaatgcgaccagctttacgtgctgaatcgtgtgttaaagctaagacatctccaatatcaaagatgaagacattatcttcttcaacgccgcattcaacaccagtctcaccatgtgcttttaacatacggtattcaccatgaataggtaagaaatatttcggcttgattaatcgaagcattaattgttgatcaccttgagaaccatgccctgaagtatggatgttagaaatcttgctatggataacatctgcaccagctttatacaaggaattaatagttctgttaatactttttgtattacctgggataggtgatgaactaaatacaacggtatcttcaggtataattttaatttgcttatgagtaccattagcaattctagataatgctgccattggttcaccttgtgaaccagtacatagtatcaataactcatgcttcggtacggtattaattttattaggttcaataaatgtttcaggtggtgctttaatataaccaagttccatacctattttaatattgttttccatcgaacgaccgaacgtaacaattntacggttatttttgatagcagcttcaactgcttgttgaactcggtaaatatta

SEQ ID NO: 5869 - DNA, 361 bp, Staphylococcus aureus; identical to SEQ ID NO: 4821

SEQ ID NO: 5870 - DNA, 266 bp, Staphylococcus aureus
tcacttaagtatgttccccacacttttttaaatgcccataatccataatgttctgagtctttatctggatcattatctgtaccaccgaaatcgtaagttgttgcaccatgttcacgtgcatacttcatcatcgtatactgcatatgatgatttggtaaaaaatctctaaattcattagaagacgcaccatataagtaatatgattttgagccagcaaacattaatagtgcaccagaaagataaataccttcaggatgttccttttc

SEQ ID NO: 5871 - DNA, 231 bp, Staphylococcus aureus; identical to SEQ ID NO: 4678

SEQ ID NO: 5872 - DNA, 290 bp, Staphylococcus aureus; identical to SEQ ID NO: 4456

SEQ ID NO: 5873 - DNA, 297 bp, Staphylococcus aureus; identical to SEQ ID NO: 5154

SEQ ID NO: 5874 - DNA, 189 bp, Staphylococcus aureus
tgtatcagttggtttcgcaccatcatttaaccattttaaagctaacgcttcgtcaactttaatttctggagcattagcgctcgttgggttataagtaccgatttgttcgatgatacgtccgtcacgtggagaacgagcatctgctactacgatacgatagaatggatttctttttgaacctaaacgtgt

SEQ ID NO: 5875 - DNA, 224 bp, Staphylococcus aureus
ccacgacgaccattatcaattaaagcgtcaacggcttcttgtaacatacgtttttcgttttgaacgatgataccaggtgcacctaaatctaataaacgtttcaaacgattatttcgattaattacacgacggtataagtcgtttaagtcacttgttgcaaatcgtccaccatctaattgaaccattggacgaatttctggtgggatgattggaagtacatctaa

SEQ ID NO: 5876 - DNA, 151 bp, Staphylococcus aureus
caagataccggcagtctaaattgttgcgtacctcctcttaatatggcataccaagcaccatgtactttcttaatgtctagcacttctgtcacatagtaaccaatatgtgccacaataaagcgcccacattcaaagttcaatgtcacatctt

SEQ ID NO: 5877 - DNA, 556 bp, Staphylococcus aureus
atatttgattagtttaattgaacttattttttaagtttatcaattgcatcagttattttgtttttagcattttcaacaacttcttttgctttaccagtcgctttatcttgctgaccttctttttctaattctttgttatcagtaacgttacctactgtttctttaacatttcctttaaattgatcgaacttactttcgtctgccatagtgaaacctccttggatgtatatatttatataccactaaggaggttcgctaaacattataatatgaagtttttatgttatagtatagtatttatacgattaaatataaaacatgtatccgtctaaatcttcacttgtatctacatattccgctaaatatttcaatgttgtattatctaaaacatctctcactgcatctctcatgcgaatccatagttgtttttgcgcaggtggttctgattcaatactttcaacaaatgtaattggaccttctaacagtcttataatatcccctgctgagatttcttccgctggcactcttaattggtatccacctttagcaccgcgta

SEQ ID NO: 5878 - DNA, 148 bp, Staphylococcus aureus
tattaacttcgattctactaacagcttcttcttctttaatcgttacatgttggcgttcgatagttgtcactaatgtatcaaccacgtcttgtgctttgttggaaactggaaacatacgcccgtgatcttcttcttttaatttaacacc

SEQ ID NO: 5879 - DNA, 265 bp, Staphylococcus aureus
cacaaaccatggttttaacatattaccatcattaaagaacgctgattgcgcttgtaacatttgaacaggtgttactgttgtcgattgaccaaatgatgacgttttttgttgcaactcattactccatccaatttgaccaggtgcttctccatcaaacatacctttagttgattttccaaatccaaatcgttcataccaagatttcattttgtctgcaccaactaaatcttgtaaatgcatcatcaatgtattagatgaataagta

SEQ ID NO: 5880 - DNA, 207 bp, Staphylococcus aureus
ccccatggtgacattggagatggtctaccgataggagcacgaccttcaccaccaccgtgtgggtgatcgttagggttcattacagaaccacgaactgttggacggatacctttccatcttgaacgtccggctttaccaacgttaactaattcgtgttgtaggttaccaacttgaccgattgtagcacggcaagtagataagatcata

SEQ ID NO: 5881 - DNA, 586 bp, Staphylococcus aureus
gtttggtttagtaactatgatgataaaagcatcttcatacaatacttctagcttacgagcataaggtattaaattaacactcggtatttctcgcggtaaatgaatttctaatatatcatttgtcattaattgcttacgcactgtgactggttcatcattaacaattaaagcgccattatttttaatggcgctcactgtcttcttagaaaaatcatgtcgtgctaaaaaagttttaacagtttcttgttgtgatatatgatacttaaatttcatcgttcttcatcacttgatatgaaagaatcgtgcacacgtttccagaatgggaatggtctaaaacgtgcaaacctcactttttcatttgctacacggtattgtattgaattaacatttttatgtttgatactaacatgatctatcgtcattctaatggtatcatgattaactggtgatattaaacatgtatgatgctttggtaatacaagtggtgatcctaccgttctaaacacacgattatttatcgaggcaatttctgtaatttgcattgcttcaagtgaaggatgtatcagtgcgccacctagcgctttgt

SEQ ID NO: 5882 - DNA, 178 bp, Staphylococcus aureus; identical to SEQ ID NO: 5437

SEQ ID NO: 5883 - DNA, 225 bp, Staphylococcus aureus
attcgatctgcgatgtgtccattttcaggatcctgtcttaaatacggcttaagcggttgtacaaaatcattgtgcgcatgggctgttaatgcttctgttaatgcgtccacataaacttgtgaatgattacctcccgcttgttcaatatctgatctatttaaatacaacatctctctattcattctgatttaactccttgtcttgatttcattttttctaaccatg

SEQ ID NO: 5884 - DNA, 96 bp, Staphylococcus aureus
atacctaagtgtagctctaatacttgtccgatgttcatacgagatggtacaccaagaggatttaacatgatatcgatcggacgtccatctggtaag

SEQ ID NO: 5885 - DNA, 717 bp, Staphylococcus aureus
  misc_feature (706)..(706): n=g, a, t or c
tatgcagtcatattacgcgataaatcttcattgttaatatagtttgtacttgaaataagcggttgtgcttttttattaccataatcgacaatgatttcttcgctatatgtatcattacctaaagttacttccattttataagctgttttatcagttgttgcatttttacgtttcgcaaatgcaacttgttcaaagctacctctaacatttgtatattgatctacatagttcgtaaaagtatatgttgttgtgtttgttgtactatcataaataccttttgcaataatattaccttgggcattatataaattttgagtttgtgaaggtaatcttactgatcctggacggaaatattgaccatatttaaaagtaaatgtatcgccctctttaacagaatcatcgattgtgtaatttgcttttaattttaaaacatcacttgaagttgcccaaaattcagttttaccagtagtctgattaacatgtcctttatcaatcgcaatgtcaatatttgaaaaatgtactttatcattaacatttgttccttgttgtggagctgcaacagtattcactgccatgcgatttaaagttcttggtttaatagtcgttgttttaggtgtagttgaaacatcttttgcttgtgttaaattacttttatcagtttcattactatatgtagttgatgatttatcatttgttgttacattgntagtttttgta

SEQ ID NO: 5886 - DNA, 153 bp, Staphylococcus aureus
tcagcagcttgaccatcaattgcttcagcagcaactttagcttcatagctagctttgtgagcaagtggtaaacctggaacgatatcaccaattgcatagatattgctgatagacgtacggctttgtttatcaacttctaataatccacggtca

SEQ ID NO: 5887 - DNA, 381 bp, Staphylococcus aureus; identical to SEQ ID NO: 5809

SEQ ID NO: 5888 - DNA, 175 bp, Staphylococcus aureus; identical to SEQ ID NO: 5560

SEQ ID NO: 5889 - DNA, 265 bp, Staphylococcus aureus; identical to SEQ ID NO: 5879

SEQ ID NO: 5890 - DNA, 548 bp, Staphylococcus aureus; identical to SEQ ID NO: 5131

SEQ ID NO: 5891 - DNA, 132 bp, Staphylococcus aureus
gaaacttgctgcaatgaagtcaacattttctttaataccgaaacggatatcttcagcatctttttctgtaataccaggtaaacttactcttacgccaggtaagttaacaccttttttgtttttaagctcacc

SEQ ID NO: 5892 - DNA, 132 bp, Staphylococcus aureus; identical to SEQ ID NO: 5891

SEQ ID NO: 5893 - DNA, 298 bp, Staphylococcus aureus; identical to SEQ ID NO: 5342

SEQ ID NO: 5894 - DNA, 226 bp, Staphylococcus aureus
cattgcaaaaatagaaaatcgtttcaaggctccgccaccaaaagtatttaataactcagtggcaccttgagaaccttggggattatcaaaagctgcaggatttactcctggagctggtatataagtccctattttaaaaattactaacattgctagtgtgaagaaaatcttgttacgaacctcttttgttctaaagaagttcacaagggtttgaatcattagatca

SEQ ID NO: 5895 - DNA, 435 bp, Staphylococcus aureus; identical to SEQ ID NO: 5348

SEQ ID NO: 5896 - DNA, 272 bp, Staphylococcus aureus
tgttttcatcatttcacgtagctcttgctcgatttctaaatcaagatctgttttacgataaccattcaaaccttgacgttcatcttcttcaggttgattttgttgctgtgtgtctttgttgtcagaagtcgctactgtttttttattatctgtttctttagtcataacaaacgcctccgttataaaacgctatatttaatgatatgtgatatttaagccattattttgaaaaatggtgataaatatatcttcttgagttatatcataatttt

SEQ ID NO: 5897 - DNA, 278 bp, Staphylococcus aureus
tatacttagcgcaaaaccaatacctgtttcacttggaccatctagcaattctaataaaccattataacggccaccaccacaaagcgttgtaatggcaccatcatagttagggttatccatcattaattcaaatgctgtatgtgtataataatccaatccacgaactaagttaggatcttcaatatatggaatacctaaatcatctaaataagcttttacttgttcataatatgccttagattcctcatttaagaaatcagtgattctaggtgcagtct

SEQ ID NO: 5898 - DNA, 183 bp, Staphylococcus aureus
ccatagtttatcgctttattaatattacgtttacgttgactatcaaatgtctttttcaatgtttcgggtgttttaccttcaaggtttaatacgcccatccatcgtacttggctcgatgtatcatactcagttgtaaagccatgatgctcgtaaccatgtgatttaaacaagtttactagggca

SEQ ID NO: 5899 - DNA, 185 bp, Staphylococcus aureus
tctatacatttttcctttgttacacctgcaaaattaaattcatcctcttctggtggcaatgctttcgatgataaattaactgcttctcttaaatcatacgttgccatattccacacaaaccaacctgtctcttcagcatttttcactgtatctttacgttcgtgatcaccaagaacggattgatt

SEQ ID NO: 5900 - DNA, 123 bp, Staphylococcus aureus
taacatctttaacgcgctcttttctacgttcttctgttaaggcaggtacagcaatacgtatcacttcaccatcacttgttgggttaacacctaagttagctgctattatcgctttttcgatgt

SEQ ID NO: 5901 - DNA, 174 bp, Staphylococcus aureus
ccccaaaaaatcaaactataaagatgatagcttacatttaagctcaccttgtattttaacctaggctagctagtcaaaacaagttatattattcacctttatttttcttgataatatcttcagcgattgattttggaacttcagcatagtgatcgaagtacatagtgtaagtac

SEQ ID NO: 5902 - DNA, 359 bp, Staphylococcus aureus
ttcgaaatgtttgtaagcagctacacttaaaatgcctatcgttgatagtgatgcaaggcgagaaatgtttttattgataaagctagctgagtataaagcagcagtagttgcttctgcaatgccgacgtattttacaagttctttttgcaagccaaaagtatgttcaaacagttcaatcatacccttatcttcttgcaatttaggtttactggcttggtatagctctttcgcaagttttaaattcgttgcgtaacgcaaaatcatatttaattcctcccaatatttgattttttgtgaaagatgattactttatcatttttacccgtttctataaaaatgaatcaattatgtaacgtatg

SEQ ID NO: 5903 - DNA, 278 bp, Staphylococcus aureus; identical to SEQ ID NO: 5897

SEQ ID NO: 5904 - DNA, 169 bp, Staphylococcus aureus
tgtattgtttgtagatttaatgatgctgttttatcaacttgtgcattgctacgatcttgatcaatttgtccaatagcagtgtcataaatattttgtaactgtgctaatatactatttctttcttctaccgttgcttgaatattcgcttcaattgcttgttttttatcgt

SEQ ID NO: 5905 - DNA, 106 bp, Staphylococcus aureus
acttgttgttcgcttgcattatccacattatacgccttcgcattgtcaccattacttttaattttatcgacagtctccgataccgcttcagctatgtctaccgcca

SEQ ID NO: 5906 - DNA, 188 bp, Staphylococcus aureus
caacttcttcaccaactttgatttgaccacgttcaacacggcctgtagcaacagtaccacgaccagtgattgagaatacgtcctcaactggcatcatgaatggtttgtcagaatcacgttctggagttggaatgtaagtatctacagcttccattaattctaagattttttcttcgtattgagcatcg

SEQ ID NO: 5907 - DNA, 138 bp, Staphylococcus aureus
tcaacttgtacacgaattaaagttcgtgtttctgggttcatcgtcgtttcccataattgttcagggttcatttcacccaaacctttgtaacgttgtaacgtgaagcctttaccaagttctttttgcaatttattaagc

SEQ ID NO: 5908 - DNA, 152 bp, Staphylococcus aureus
cgctgctttcgaaatgtctacgtcacaaaatgcgatcatttcaacattttcaactttttgtaaacttggcatgtgcttgccattcgcaataccaccacacccaatgattccaactttaatcgtcatcataacgtcctccttttaatctttat

SEQ ID NO: 5909 - DNA, 788 bp, Staphylococcus aureus
  misc_feature (680)..(680): n=g, a, t or c
tcattttctaaaccatcaagttcaccagaattaatatgtttaccttcaccagtgtatgctgcttcttcaacatttccaccttcgatgacttcaatgattggcaaatcaaactttttagcaaattcataatctctgtcatcatgcgctggtactgccataattgctccagtaccatatgttgataatacataatcagcaatccaaatttgtactttttcaccagataaaggattagttgcatatgcaccagtaaatacacctgatttatcttttgctaaatctgtacgttctaaatctgactttttagaagcttctgtttgataagcttttactttttctttatattcatctgttgtaattgaattaactaatgcatgttcaggacttaagactaagaatgatgcaccatagattgtatctggtctagtcgtaaatacttctacttttccttccgtattatctacatcaaatgaaactttggccccttcagaacgtccaatccaattgcgctgcatatcttttaaagactcaggccaatctaaatcatctaaatctgctaataattgatctgcatattctgtgattttaagtacccattgtttcatcggcttacgataaactggatgtccaccacgttcagagacaccatcaatcacttcttcgttagataaaacagtgcntaatgctggacaccagttaactgcaacttcatcaactgtatgctaaacctttgttatataactgtatgaaaatccactgtgtccatttatagtattctggatctgttg

SEQ ID NO: 5910 - DNA, 278 bp, Staphylococcus aureus
ataattttctgaaatctgtttctactaaatcttcttgatatacattttctggcaatggtggtagccatggacgcttaacttcttcgatttctaatcgtgttgtaatagattcgatatgatctatgaccgcttctaactcagtttgattttctttcgtttcttcatcttcaagtccactcaagtctttgttgattgcttgaagttgaccatagtcattaatcatgtaaatcgtcttatcttcaacttctaatttatcgccttcgatgtcatatgttgca

SEQ ID NO: 5911 - DNA, 141 bp, Staphylococcus aureus
aattggtttacaccaggtgataatgtatcgtcgccttcttcacgattgaatacttttacatcaagaacgataccgccagcgccgtgaggtacacgtaatgaagtatctctaacttcacgtgctttttcaccaaagattgca

SEQ ID NO: 5912 - DNA, 180 bp, Staphylococcus aureus
  misc_feature (36)..(36): n=g, a, t or c
atgatatacctcccttacaacactcgtggaccagangttttctgatctctcacattaacttctaacttacgtactggcatttctagtgaaatattctacattctttttaatatccgaacgaattgcttcagttaaagattgaacttgaacattatttggtacgaaaaagtcagttttaat

SEQ ID NO: 5913 - DNA, 360 bp, Staphylococcus aureus
gcttttttagcgtgaccttcagctggtttattagcatatttattagattttgcatcttttttgtatgcttttttgtcttcaaatccaacttggattgcgttgtatccatcaacttctacagttttcttttgtaatacaacattttctttagcttctactactgttacagggattaattcaccgttttctccgaatacttgtgtcatcccaatttttcttcctaagattcctttggtcatcgaaagtccacctcctaaaattgtctattataatttgatttcgatgtctacaccagatggtaagtttaagcccattaaagcgtcaactgtttttggtgttgggtttacaatatcgattaaa

SEQ ID NO: 5914 - DNA, 261 bp, Staphylococcus aureus
tcagcttcaaacaattctaataatgcggtcgcaagatcccctaccgttgagcttggtgctttttgaaccataatatctcctgtctctgcatgcttaaatgcatgaacaactagttctaccgcatcttctaagctcattaaaaatcttgtcatatcaggatctgtaatcgttaaaggttctccagctttgattttgtcgataaacaaaggtattactgatcctcttgaagccatcacattaccgtatcttgtaccacaaata

SEQ ID NO: 5915 - DNA, 386 bp, Staphylococcus aureus
  misc_feature (48)..(48): n=g, a, t or c
  misc_feature (369)..(369): n=g, a, t or c
acacgatctgtcacgtgaacttgtaataccgcttctcctgtttcaganatcagcttaacttctgcaccttcatgaatgcctctatcttcagcaagctctggagaaatttcaacaaatgcacgtggcactttgtatttaatcattggtgtttgataagtcatattaccttcatggaagtgctctaacaatcgaccattgtttacatgaatatcataaatttcatcttgcttaaagtaattatcaaatgataatgggaataattttgctttaccattatcaaaattgaatccttctaagtatagaataggctcatcagtaccatcaggttgtactggccattgtaaactattgaatccttctaaacgatcntaacttaccccagcata

SEQ ID NO: 5916 - DNA, 235 bp, Staphylococcus aureus
  misc_feature (20)..(20): n=g, a, t or c
gaattgcaaaaccatcatanggtgatttatcaaaccttggtatatcataagtagctacaatatcttctgctaagatatgatttagacttttttcaagtgctaccgtaattgccggcattgaactctgctgattaacgatacgttgaattgcttctttaactgggattgggtttcttttttctactaccattaaaaatcatctccaaaacttttattttttcatgatatactagat

SEQ ID NO: 5917 - DNA, 290 bp, Staphylococcus aureus
aatgctgattaacgaatttcttggattctagcagctttaccacgtaaactacagtaagtaatataatttagcacgacgtacctttaccacgacagtttaacttcgattttttcaatttttggtgtgtgtaatgggaatgtacgttccacgccaacacctgatgaaattttacgaactgtaaacgtttcagaaacgccaccgccacgacgtttaattacaacgccttcgaatacttggatacgctcacgagtaccctcaatgatacgtacgtgtacacgtaaagtatcacc

SEQ ID NO: 5918 - DNA, 170 bp, Staphylococcus aureus
taaatccaacttttaaaacgcccttcctcattaacgctcattaaacgcagccaatgattagacaccttcctagcgaaatgctcattattcgcgagtagtcttgctacaacatagtcgggtgcctgaataacgacaagtaaacgaattggcgaatgatacatcgtccgatc

SEQ ID NO: 5919 - DNA, 264 bp, Staphylococcus aureus
atgattgtgtgcctcctttgataattttttcgctttaatttcgttaatttttattagaatggtaagtcatcatcacttatatcaatcggtccgtttgcatttgcaaatggattatcagattgtttcgtgtttgatgaattattgtacgaattgttttgtcctgattgttgaccaccgaatccttgaccgtaatcttggaattcattttgttgacgttggccaccattttgttgcgcatttttaggttcaaggaattgaacgcta

SEQ ID NO: 5920 - DNA, 215 bp, Staphylococcus aureus; identical to SEQ ID NO: 4710

SEQ ID NO: 5921 - DNA, 215 bp, Staphylococcus aureus; identical to SEQ ID NO: 4710

SEQ ID NO: 5922 - DNA, 156 bp, Staphylococcus aureus
tgtgtagcccaaatcataaggggcatgatgatttgacgtcatccccaccttcctccggtttgtcaccggcagtcaacttagagtgcccaacttaatgatggcaactaagcttaagggttgcgctcgttgcgggacttaacccaacatctcacgaca

SEQ ID NO: 5923 - DNA, 218 bp, Staphylococcus aureus; identical to SEQ ID NO: 4401

SEQ ID NO: 5924 - DNA, 327 bp, Staphylococcus aureus
tgtctctgatacatcattctttttagtaactaattgaggaatttctttcaagtcatttttagcaactggtttttctgcaaataacagcttcagttaattgactctcttttgaacctggtgttaatttagcttgcttctgttttgcagcgtttgctaatctttcagcttgtgactctggttttgataccttctacctttgctgcacttgcatctttagttaatgtgtcactgtctttctctgcttgtgcttcttttttagcttcttgaacctcttgtgcctcttgtgatatatcacttaaattatttgcacttgcttcttcttttatc

SEQ ID NO: 5925 - DNA, 195 bp, Staphylococcus aureus
ccactaccatcaacaagtacattaccagatggaatgcgaccagctttacgtgctgaatcgtgtgttaaagctaagacatctccaatatcaaagatgaagacattatcttcttcaacgccgcattcaacaccagtctcaccatgtgcttttaacatacggtattcaccatgaataggtaagaaatatttcggcttg

SEQ ID NO: 5926 - DNA, 151 bp, Staphylococcus aureus; identical to SEQ ID NO: 4322

SEQ ID NO: 5927 - DNA, 208 bp, Staphylococcus aureus
tacttgaatcttacaattcaattctctattcaaatgaccgaaatcaatagcttgtaaaatcgtgtatgtgaattctgtatatgaaataccatgttctaaacgactttggattgaatctttacctaacatgtaattaacgccgacgtgtttaccatagtcacgtaaaaaactaattaatgagatttgtcctaaccagtctctattatta

SEQ ID NO: 5928 - DNA, 485 bp, Staphylococcus aureus
taaaattttatgttgtaacataaattatttattttgctcttttaaatagtaagaaacaagctcttccataataacatctctatcaatatgacgaatttgatttcttgcttcattttggcgtggaatatacgcagggtcacctgataataaataacctacaatttggtttacggcattatatcctcgttcatctaatgttcgataaacattatttaaaacatctcttacatcttgcgttggaagttcttcatagtcgaatttcattgttttatcaaagttttccatttgcgacactcctttaattacaaatataactcactatcatcatacaatattatggctttaaattatagatttttaatgtaatctttaataaagcttaatgattttgagatattttcaggttgtgtaccgccaccttgagccatatctggacgaccgccacctttaccaccaacgattggtgccatttgtttgataagatc

SEQ ID NO: 5929 - DNA, 307 bp, Staphylococcus aureus; identical to SEQ ID NO: 4559

SEQ ID NO: 5930 - DNA, 118 bp, Staphylococcus aureus
cttttacacgtccaccacgtacaagtacaacactgtgttcttgtaagttatgtccgataccagggatgtatgcgttaatttcgatgttgtttgataaacgcacacgtgcatatttacg

SEQ ID NO: 5931 - DNA, 702 bp, Staphylococcus aureus
taaatggacaatgtcggatcactttttaaggcatctttaatcttcaatgttttaaccacggattcaggcaagacatcttctctaattaaataaaactttttataatctttattgtccatcatgtttcgctcctattcaacgaattcaaattctccgccaagaattctaacgatatcaccatttttacaaccacgttctctaagcgcatcatcaatacccatcgaacgcatttgacgagcaaatcgacgtactgctggatcactgttaaagtcagtcattttaaacattctttcaatagcattaccacttaccacataagcaccatcatcatctcttgaaattgtaaatttatcttgtgacggtgtatgtttatataatactcggttaatgccaactgactcctcttcttcaactgtgaagtcaacatctttatattcttctaatttatctgctattgcatataataattgatcaatattatcacgcgttattgttgaaactggaataactggcacatcttcgccaatttcttctttaaacaagtttaaattatcttgtgattcaggtaaatccatcttgttagctactacgatttgaggtctatcttctaaacgttgctcgtacgcagctaattcttgattaatgactttataatcttcaataggttctctaccttcagaaccgctcatatcaatcatgtga

SEQ ID NO: 5932 - DNA, 702 bp, Staphylococcus aureus; identical to SEQ ID NO: 5931

SEQ ID NO: 5933 - DNA, 163 bp, Staphylococcus aureus
taccaaataaagccttctgacacttcctttagaccgacgaccgtcttagctaatgtcgatttccctgaccctgattcaccgacaatgcctaatgtttcgccttttctaatagccaagttaatatcattaactgctcggtataggctgccactcggtgatgtgt

SEQ ID NO: 5934 - DNA, 137 bp, Staphylococcus aureus
ccagacactagcgctggcatagcttcaggtaaaaggactttacgaattactgtccaagtattagcgcccattgaccaagccgcttcgatgacacctttatcaatttctttaaaagcaatttctacgagccttgcata

SEQ ID NO: 5935 - DNA, 97 bp, Staphylococcus aureus
tcttgcatccgatcttgcaacgctgtaaatgtttcgaagccatcctcttctaagaagtgccctccatcttccacgatttgcaagttcccctctaatg

SEQ ID NO: 5936 - DNA, 166 bp, Staphylococcus aureus; identical to SEQ ID NO: 5591

SEQ ID NO: 5937 - DNA, 86 bp, Staphylococcus aureus
atagcaacgtctcttgctgcttcttcgtcagttgaaccttcaacaactgttaatacaccaatgcgtccacccatgtgtaagtaagc

SEQ ID NO: 5938 - DNA, 552 bp, Staphylococcus aureus; identical to SEQ ID NO: 4663

SEQ ID NO: 5939 - DNA, 165 bp, Staphylococcus aureus; identical to SEQ ID NO: 5294

SEQ ID NO: 5940 - DNA, 249 bp, Staphylococcus aureus
tatttttttaaaatatcctgtgtatgggaaatccactgtgctggcgttgcgataataatctcattaaattcactcactaaaatgaacttctcaattgtatggattaaaatcggtttattatcaatatctaaaaattgttttggtaatggcacgttccccattctcgaaccaatacctcctgctaaaatacctgcataaatcatgttgtcctccattctgtcattacatcatttccatttatacattact

SEQ ID NO: 5941 - DNA, 265 bp, Staphylococcus aureus; identical to SEQ ID NO: 5879

SEQ ID NO: 5942 - DNA, 118 bp, Staphylococcus aureus
gatgcaacgtgtacttcagttggtacgccagcccatttttctaaaaattctttacctactaaacctgcatggtagcttgtacctgctgcaataacgtaaatgcaggtctgcttcttta

SEQ ID NO: 5943 - DNA, 119 bp, Staphylococcus aureus; identical to SEQ ID NO: 4238

SEQ ID NO: 5944 - DNA, 292 bp, Staphylococcus aureus
ttctccacccatcaactgcgttaattcatcttgaactattttaataacttgttgccctggtgttaatgattgcattacatcggaacctaatgcgcgttctgatactgttttaataaattcttttaccactttaaagtttacgtcagcctcaagtaacgctaatcttacttcacgcatcattatctttatatcagcttcagtaagtttacccttaccacgcattttttgcatcgtcgcttgcaagcgttctgataacccttcaaatgccatatcgatgtcctccctcaattta

SEQ ID NO: 5945 - DNA, 215 bp, Staphylococcus aureus
tcttccaaagcgatcacctaaaacatcttcaagtgataaatcttgaattatttcactcactagatttcctcctcatcaaattgatcattttcaagcacttgtacttcagaattatctaaaatactttggtcctcttgcataccaaactcaacatgcttttcaatccattcacgtctaggttgtactttgtcacccattaatgttgttacacgttt

SEQ ID NO: 5946 - DNA, 108 bp, Staphylococcus aureus
agtttcaagttctttttcatcacgagcaacacggataccttttccgccaccgccagcagtagctttaatgatgaccggatagccaatttttttggcgattttcttagc

SEQ ID NO: 5947 - DNA, 256 bp, Staphylococcus aureus; identical to SEQ ID NO: 5788

SEQ ID NO: 5948 - DNA, 319 bp, Staphylococcus aureus; identical to SEQ ID NO: 5476

SEQ ID NO: 5949 - DNA, 319 bp, Staphylococcus aureus; identical to SEQ ID NO: 5476

SEQ ID NO: 5950 - DNA, 269 bp, Staphylococcus aureus
cacaagatttgtagcatctacttcaatcatcatccatgcatgtggaatctctgttacactattaaccatattttgcgcaattgctttacgcacaccatttactggtattgtgctgttttcactattgtcttcagatgattggttacttgatgtatctactgatgttgattttgtttgaacttgtttgtcagattgagctgtggtaccaccattttcaataactgacattatatccttcttagttacacgaccttcaaatccactaccta

SEQ ID NO: 5951 - DNA, 236 bp, Staphylococcus aureus
ctggaatgttttgtaatggtaatgcgttaccaactttgatgtcagcttcagcaccactttcaacgatttgacctacttctaatcctttaggagcaatgatatatcgtttttcaccgtctgcatatacaactaaagcgatgtttgctgagcggtttggatcatattgaatagaatcaacttttgcattgataccatctttgttacgtttgaaatcgataacacggtattgacgtttg

SEQ ID NO: 5952 - DNA, 269 bp, Staphylococcus aureus; identical to SEQ ID NO: 5950

SEQ ID NO: 5953 - DNA, 182 bp, Staphylococcus aureus; identical to SEQ ID NO: 5507

SEQ ID NO: 5954 - DNA, 261 bp, Staphylococcus aureus
  misc_feature (150)..(150): n=g, a, t or c
gagacaaaatattcttagctctactactaaagtgtgatggcatttgttttccaccagagttaacatcgtctttctttccaaacgctgataaaaacgtatcatacagctgagatacccatataagtaacgaaagctagatctctataatanggcgctgtaatatcaccttcttctaatgcgtatgccatcccaatctgagttgcttcttgtccttgaccacttacaacaaatggaattttacctgcacggttcaataaccac

SEQ ID NO: 5955 - DNA, 258 bp, Staphylococcus aureus
acagaaggttcagtgaatgggaagtaacttggacgtaaacgaatttcacgatcagcaccaaataatttcttagctaacaattctaaagtacctttcaaatcactcattttaacgtttttatcaacaactaatccttcgatttgtgtaaattgatgactatgtgtcgcatcatcagagtcacgacgatacactttaccagggcaaataattttaactggaccttgaccatgacgtgattccatcgtacgtgcctgcact

SEQ ID NO: 5956 - DNA, 235 bp, Staphylococcus aureus; identical to SEQ ID NO: 5738

SEQ ID NO: 5957 - DNA, 166 bp, Staphylococcus aureus; identical to SEQ ID NO: 5416

SEQ ID NO: 5958 - DNA, 180 bp, Staphylococcus aureus; identical to SEQ ID NO: 5312

SEQ ID NO: 5959 - DNA, 75 bp, Staphylococcus aureus; identical to SEQ ID NO: 5315

SEQ ID NO: 5960 - DNA, 277 bp, Staphylococcus aureus; identical to SEQ ID NO: 4264

SEQ ID NO: 5961 - DNA, 245 bp, Staphylococcus aureus; identical to SEQ ID NO: 5637

SEQ ID NO: 5962 - DNA, 180 bp, Staphylococcus aureus; identical to SEQ ID NO: 5312

SEQ ID NO: 5963 - DNA, 121 bp, Staphylococcus aureus
taaatatggatgatattcaacttgattaattacaggtttaattgacacttgtgccaacaaagcttccaaatgttcaggttcaaaattgctgacacctatatttttaacattattattttta

SEQ ID NO: 5964 - DNA, 235 bp, Staphylococcus aureus; identical to SEQ ID NO: 5807

SEQ ID NO: 5965 - DNA, 108 bp, Staphylococcus aureus; identical to SEQ ID NO: 5050

SEQ ID NO: 5966 - DNA, 193 bp, Staphylococcus aureus; identical to SEQ ID NO: 5077

SEQ ID NO: 5967 - DNA, 186 bp, Staphylococcus aureus; identical to SEQ ID NO: 5179

SEQ ID NO: 5968 - DNA, 144 bp, Staphylococcus aureus; identical to SEQ ID NO: 4433

SEQ ID NO: 5969 - DNA, 164 bp, Staphylococcus aureus
gccgatacacgctctccagtattacagtgcttgtccattgaccactttcgcaaaataatcatcatctcttaacaagaaataaaatgctttattgtccttattcacagcataatcatgacttaacgaacctttcgttgttaaatgatcattttcatctaataata

SEQ ID NO: 5970 - DNA, 278 bp, Staphylococcus aureus
caacatttccaccttcgatgacttcaatgattggcaaatcaaactttttagcaaattcataatctctgtcatcatgcgctggtacctgccataattgctccagtaccatatgttgataatacataatcagcaatccaaatttgtactttttcaccagataaaggattagttgcatatgcaccagtaaatacacctgatttatcttttgctaaatctgtacgttctaaatctgactttttagaagcttctgtttgataagcttttactttttctttata

SEQ ID NO: 5971 - DNA, 253 bp, Staphylococcus aureus
tcgttgttttagactcatcagctaaaataacatcgtattgatgatcatgagctaaagcattaatgatttcttcattgacgtctgcaaatgttacctttaacattgttgtctgcaagaatataaccaatgaaaccacgacctatgttaccagcaccaaagtgaactgctttcattatgcatctgcctcctcgaatacttgtttaatttcttctgcagattttgcttgaacgatacgatccacattttcttcttc

SEQ ID NO: 5972 - DNA, 443 bp, Staphylococcus aureus; identical to SEQ ID NO: 5647

SEQ ID NO: 5973 - DNA, 196 bp, Staphylococcus aureus; identical to SEQ ID NO: 5310

SEQ ID NO: 5974 - DNA, 330 bp, Staphylococcus aureus; identical to SEQ ID NO: 4368

SEQ ID NO: 5975 - DNA, 564 bp, Staphylococcus aureus
tctatcacatgtacagtttcttcaccgaaaagatcttttgctttttgagcaatatctgtttgttgtgcttgttgctttggcatatcatcgccttcgtttttacgattttgtaaatattccgttcgaactctttgccattgatctgatggtacaccaacaactttaacgtttttattaacgatattacatacaacactttctatactactacgtttctcgtcgtctttattgacgatttcacaatggatctcttcctcaaatttcacaagtacgtgatcttcacttgccgccacaggttccgaattttgcaataaactaacgagtgattttttatcattatttttggcatgatcaatcacttcttgccaatgatctttcaacaatttgatatctgccttattcgctttatctagcacttttgcaatttgttgcattgaaaatgcatttttagatttttgtatgcctctcgcaggctttttcgaagatttttgaacaggagcgacactcactccttgtgcttttagagtttttagttcttgctctaactgttccatacgttgcaac

SEQ ID NO: 5976 - DNA, 229 bp, Staphylococcus aureus; identical to SEQ ID NO: 4728

SEQ ID NO: 5977 - DNA, 180 bp, Staphylococcus aureus
aaataagttgattatattattttttcttacgtccacgaacgataagtttgtctgatgattttttaccacgacgagttttcttaccaagcgtaggtttaccccatggtgacattggagatggtctaccgataggagcacgaccttcaccaccaccgtgtgggtgatcgttagggttcatta

SEQ ID NO: 5978 - DNA, 269 bp, Staphylococcus aureus
tcactttcacgtacatatacaaacccacgagattgaatttcaggtcccgcagctatacgtctatttttaggatctaacagttacaacagcaataaagataccatcttctgctaaaagatgacggtctctcaacacgatatttcctacatccccaataccaatgccatctattaaaatatttcctgaatttaccttttcatttaatatcatatctttaccgttgtagattaatgacatctcctttttccacaaggaaaatcttttctggt

SEQ ID NO: 5979 - DNA, 160 bp, Staphylococcus aureus; identical to SEQ ID NO: 4835

SEQ ID NO: 5980 - DNA, 258 bp, Staphylococcus aureus; identical to SEQ ID NO: 4788

SEQ ID NO: 5981 - DNA, 256 bp, Staphylococcus aureus
gaatacgaatgtaattcattctgattttaccacttacgtgagctaaaatctcatgaccattttctaattctactttaaacattgcgttcggtaaagtatctaatacagtaccttctaattcaattacatcttgtttagccattgattaacttccccctttttgcaatagtaaggtaatcgtcaatagacaactttattgttacgaatctatcagtgattaattttataagttaaacaaaaattacgggaattaatt

SEQ ID NO: 5982 - DNA, 171 bp, Staphylococcus aureus
tctgaagcgagtttaaatacaacaggtgaaaagcgaccattattacgtggttgattttgtttagcagtagatgtctgttccactgttgcactagcttttttagtagatttctgagtatgctcatccacttttgcttgtatctcttcagttgtttcatttgtcttttcatca

SEQ ID NO: 5983 - DNA, 564 bp, Staphylococcus aureus
tctatcacatgtacagtttcttcaccgaaaagatcttttgctttttgagcaatatctgtttgttgtgcttgttgctttggcatatcatcgccttcgtttttacgattttgtaaatattccgttcgaactctttgccattgatctgatggtacaccaacaactttaacgtttttattaacgatattacatacaacactttctatactactacgtttctcgtcgtctttattgacgatttcacaatggatctcttcctcaaatttcacaagtacgtgatcttcacttgccgccacaggttccgaattttgcaataaactaacgagtgattttttatcattatttttggcatgatcaatcacttcttgccaatgatctttcaacaatttgatatctgccttattcgctttatctagcacttttgcaatttgttgcattgaaaatgcatttttagatttttgtatgcctctcgcaggctttttcgaagatttttgaacaggagcgacactcactccttgtgcttttagtgtttttagttcttgctctaactgttccatacgttgcaac

SEQ ID NO: 5984 - DNA, 268 bp, Staphylococcus aureus
tacaaatgaatctttgccgacgatagttttaaatttattttcaccatcatagttaactgtaatcgttccgcaaccaatattagtacgttcgccaattacagcatcgccaatataacttaaatgtgaaaccttggcaccatctttaagatctgcttttttaatttctacaaaatttccaaccttaacatctgcacctaattgcgcgcctggtctcaattgcgcaaacggtccgaccttagtattcgctcctacgctagcatcattaaca

SEQ ID NO: 5985 - DNA, 205 bp, Staphylococcus aureus; identical to SEQ ID NO: 4230

SEQ ID NO: 5986 - DNA, 279 bp, Staphylococcus aureus
tgtgatagaagagttgaaccaaccacgatattggtcactaccttctaaatacatatccgctgggaaacttaattccggtcttgtttccaacacgccacggtgtgatgaaccagaatcaaaccaaacgtccataatgtctgtttctttagtaaatgtaccgttagggctgcctggatgtgtaaatccttctggtagtaagtctttcgcttctctttcaaaccaaatatttgaaccgtgttctgcaaataaatcagcaacatgattcactgtttctttcgt

SEQ ID NO: 5987 - DNA, 350 bp, Staphylococcus aureus
tcataatctaatgataagccatgaatctcagcatataattcaacaatacctttaattactgtcgtttttcctgttcccggtccaccggttaatagcatcaccttagaattgatagccgtttgcaaagcttctttttgtgaagctgcatagttcacttgattcgcatcttctatttcaccaatatgcatttgtaaatctgactgttcaatttctgtaagtttatttgtatgcgtctttattctgaataagttttgaacacttttgatttcagaataatacaaacttggaattgcaacttgttcattgtcaataattagtcgtttttcctcatttaagtattgcaacatttc

SEQ ID NO: 5988 - DNA, 121 bp, Staphylococcus aureus
gttcataaaaagcaacttgcgtaacgtcttcaccaatatcaatgacacatgcacctaactctttttcagtagctgttaggattgaaccatagttatatgcatcagagtaaacatctaatac

SEQ ID NO: 5989 - DNA, 887 bp, Staphylococcus aureus; identical to SEQ ID NO: 4339

SEQ ID NO: 5990 - DNA, 113 bp, Staphylococcus aureus
tcctcataacgatagcctcgtaagtcaagttcagttttaattgtttgacgattttgacgtgtaaccattttcgttggcttaactttttctttttgttttttctctaaatcttc

SEQ ID NO: 5991 - DNA, 183 bp, Staphylococcus aureus
cattttcgcagcttcactaataatttgatttgtcgcaggtaaaataaaatctgcaaattgaatttctgcaattggtcttttacctaccatagctgcaccaatggcagttccaacaatatttgactcagctaatggcgtatcgataactctgtcttcaccatatttttgttgcagtccttgagt

SEQ ID NO: 5992 - DNA, 190 bp, Staphylococcus aureus
tgcgattggatctgtcattgtcattgattgttgcctcctttcagactcttttttattaccagctagctttacgaacgccagggatttggcctttgtaagctaattcacggaaacaaatacggcataatttaaatttacgatatacagaatgtggacggccacaacgttcacaacgagtgtattcacgaac

SEQ ID NO: 5993 - DNA, 176 bp, Staphylococcus aureus
tgatcttttgtaagaattgtgcacggataatgcaaccttctctccaaatcatagctaaatcaccaagttttaaattccattcattatcttcacttgctttacgcatttgcgcgaaaccttgtgcataagaacaaattttactcatatataatgctttacgaattttttctaaaaag

SEQ ID NO: 5994 - DNA, 226 bp, Staphylococcus aureus
tcatcatattctaataatggccaatctgtcacccataagaagtttaattttgtttcatcgattaaacctaattctttagctaatttgacacgtaatgcacctaaactttgtgcaacgacatttggtttgtctgcaacaaacattactaagtcaccagcttcagcaccagttaatgtaagtaatgtttcaacattttctgtttcaaagaaacgtccaattggacctg

SEQ ID NO: 5995 - DNA, 192 bp, Staphylococcus aureus; identical to SEQ ID NO: 5496

SEQ ID NO: 5996 - DNA, 143 bp, Staphylococcus aureus; identical to SEQ ID NO: 5006

SEQ ID NO: 5997 - DNA, 262 bp, Staphylococcus aureus; identical to SEQ ID NO: 4394

SEQ ID NO: 5998 - DNA, 223 bp, Staphylococcus aureus; identical to SEQ ID NO: 5851

SEQ ID NO: 5999 - DNA, 330 bp, Staphylococcus aureus; identical to SEQ ID NO: 4368

SEQ ID NO: 6000 - DNA, 447 bp, Staphylococcus aureus
caaataactgaacgatctctttgcttatcttcacaaatataacatggatcattttcagtaatgtgaccacatacgctacaatatgttaattctctcttaacatctactaatgctttggcaaactgaacaacatcgtcttctttcatatctaaggtatgaaaagccagacgttgggctgtctttggaccaatgcctggcaatttcataaagctatcaataagttttgatataggttctggataatgcatctatgatcacattccagggatgtttaagccttgagtatgtttacctaaacgttcttgagtaagctcatcagctttattcatcgcttcattagtagctgctaacactaagtcttgtagcatttcaatatcgtctgggtctacagcttcttctttgatttcaacgtcgacaacttctttatgaccagttacagtaactgca

SEQ ID NO: 6001 - DNA, 127 bp, Staphylococcus aureus
gtcattgattttgttgagctaacttttaagtgtttagctgcttcaccaaatgtatttttaatagctttaacttcatttaagtcaccaacaggagtacttgtaccatgggcatttaagtattgtacat

SEQ ID NO: 6002 - DNA, 218 bp, Staphylococcus aureus
acttgttggcatcgtggacatagatgcgtcaattcatcaacagcaccaagatcctctgaatagttccaacatctttcacatttttcaccatctgcatgttcgatgacaatatcaccatgttcataagctgttgcctgatcgtctaacttatctacaactttaacttgtgacacgataaataattgatgtaatgcatcaaatgaagttaagaattcaga

SEQ ID NO: 6003 - DNA, 118 bp, Staphylococcus aureus
tttatttttgtctcatataagggaataataatacgtctctgattgatggagagtcagttaataacataaccaatctgtcaataccgataccaagaccacctgtcggaggcataccata

SEQ ID NO: 6004 - DNA, 263 bp, Staphylococcus aureus
tgtgcgtttagaaatttcataaattgtcttatctaaactaccttgattgtatgccatatctcgaatatcatcaactcctgggattgttcttccaggttcgatgtaatctgcaataaaaatcagtttttcagtttttgtcatttgttgacgtccagtagtatggtatttgatagccattaatacttcctcatcattgataccatattcatgttccatgattgctgcacacacagggccatgcaatatttcactaccataactca

SEQ ID NO: 6005 - DNA, 330 bp, Staphylococcus aureus; identical to SEQ ID NO: 4368

SEQ ID NO: 6006 - DNA, 298 bp, Staphylococcus aureus
cacaacgttttaatggtgtgccaactgcatcgcggactagatgttcaacataatattcatgttcattgcttcgttcaagatttgttttataatttaatgtttgatattcattaacgcctcttgctttgtaatcgtttcgaactatatcttcggcttcttgtggtgtcatttgcttttctgtatttgactgtgtagtgttgtcagtttgttgcgtctttttattagtgtcatttgatttactactattttctttatgttgattagcaccacaggcagttaatagtgacaatgataatgt

SEQ ID NO: 6007 - DNA, 180 bp, Staphylococcus aureus
aacctcttttgttctaaagaagttcacaagggtttgaatcattagatcacctcgtgtgctccacctttagcatcaatagcttctgctgctgaagctgagaatttatgagctttcactgtcaatttcttatcaagtgaaccattacctagtattttgataccagatttttcattcttaaca

SEQ ID NO: 6008 - DNA, 437 bp, Staphylococcus aureus
gcattagtgatatctaaaacatttaaaccttgagcagttgtcacttgaacgccagggatgttgcgtgctgataattcaacatttacatcttcgttttcagtaactactaatacttttttaggttgttctaatgtagataatacatttttgaattctttagtttttggagcttcgaagttgaatgcgtcaactacagttaagccattctcttgagctttgaaagataatgctgagcgtaaagctaaacgacgcattttcttaggcattttgtatgcataacttcttggagttggtccgaatacgataccacctgccacgccattgtggagcacggattgtaccttgacgagcacgacctgttcctttttgcttccatggtttacgtccgccaccgcttactgctgaacgattcttaacagcatgcgtaccttgacgta

SEQ ID NO: 6009 - DNA, 121 bp, Staphylococcus aureus
aactgtttttaaaccatgctccatagctgatttagatgcagtttcagaagccatttgtgctgcaaatggtgttgattttttagatcctttgaatcctaatgcaccagctgatgaccatgat

SEQ ID NO: 6010 - DNA, 267 bp, Staphylococcus aureus; identical to SEQ ID NO: 4687

SEQ ID NO: 6011 - DNA, 423 bp, Staphylococcus aureus; identical to SEQ ID NO: 4573

SEQ ID NO: 6012 - DNA, 259 bp, Staphylococcus aureus
aaatacgatacgtggaacaccataagttgtagcctgacgccaaactgtttcagtttgaggttcaacacctgattgtgcatcaagtactgtaactgctccgtcaagtacacgtaatgaacgttcaacttctacagtgaagtctacgtgtccaggtgtatcgataatgtttacacggtgaccttcccaagctgctgttgttgcagcagatgtgatagtaataccacggtcttgttcttgctccatccagtccatttgtgaa

SEQ ID NO: 6013 - DNA, 122 bp, Staphylococcus aureus; identical to SEQ ID NO: 4856

SEQ ID NO: 6014 - DNA, 174 bp, Staphylococcus aureus
tcgttatagataatttcacgttgtttacgtaatacttcatcgtattctaagatacgtttacgcgcgtcgaagttattaccttctacacgtttttgtgctgattctacagctcttgataccatttttgattcaattggtgtagagtcatctaaacctagtcggctcatcattttc

SEQ ID NO: 6015 - DNA, 173 bp, Staphylococcus aureus
tctttaccaggcttgttgttgtcttctttaccaggcttgttgttgtcttctttgccaggcttgttattgtcttctttgccaggcttgttattgtcttcctcttttggtgcttgagcatcgtttagctttttagcttctgctaaaatttctttgctcactgaaggatcgtcttt

SEQ ID NO: 6016 - DNA, 551 bp, Staphylococcus aureus
gcacttggttataaaatgccgctaaaccacctgcaaatgtcgtcatcgtatcaccatgtacaagtaccatgtctggtttttctaattgaatcacttgttctaattgagtgattgatttagaagttatctcagaaagtgtctgtcctgatttcataatattcaaatcgtattttggtttgatttcaaaggtacttaatactgaatcaagcatttctctatgctgtgctgtaacaacaacaattggctcgagcattttttcttgttccaaagctttaactaaaggagccatctttatggcttcgggtcttgttccaaatatggtcataatctttttcatcaaactacttatctccgattcttctatttagtaccaaacaatctatctccagcgtcgcctaaccctggtgtgatatatgctttgtcatttagcttttcatcaagtgcagcaatataaatatctacatctggatgtgcttcatgcatcttttctacgccttctggtgctgcaattaaacacatgaagcgaatatttttagcgccacgtttcttca

SEQ ID NO: 6017 - DNA, 181 bp, Staphylococcus aureus
tatttcattttcatgatgtggaaattgtaaatctgaaccacccgcatgtatatcaattgtaggtcctagctcatgaaatgccattacagaacattctatatgccatcctggtctaccttcaccaaatgggctatcccaactaatctcgccaggcttcgcttttttccacaatgtaaaatca

SEQ ID NO: 6018 - DNA, 216 bp, Staphylococcus aureus
gggtcaataccttgccaccatagatgactaggatctaagttagcaccgatatattcatttgtagcctcacgtaacttcaacattgtatatggtgtatgcactaaaaatcctgcatgcaactctatggcaatttttacatcttgctcttttgcaaactcagctaaatcttgccaatatggtatcaacttttcattccactgataatcataaatttca

SEQ ID NO: 6019 - DNA, 410 bp, Staphylococcus aureus
tgacgtctaatttcgtcagaattatcttgtctagaaggtctatgtttctgctccaccggttctgctttaggcactgtgattggtttctctgtcatcggttttgtttcttgttgttttttaggtgccataggttctacaacaggtttcgatttaggctcttcctttggaagttcatcgaataaaggtggtaacgtatcatcatattttcgtttcgatgatttcttttcttcttcatttaattcttcacttatttctttaaacgttcgctcaatttcttcaaaaaagccacctttttttggttcattatcggtagatgttttttgaggtggcttttgattttgtctatctttatgactattttcgcgcatagtagtaatgatagaaatgatcactgatatgacaaaaattag

SEQ ID NO: 6020 - DNA, 172 bp, Staphylococcus aureus
ctactgttacagggattaattcaccgttttctccgaatacttgtgtcatcccaatttttcttcctaagattcctttggtcatcgaaagtccacctcctaaaattgtctattataatttgatttcgatgtctacaccagatggtaagtttaagcccattaaagcgtcaactgt

SEQ ID NO: 6021 - DNA, 235 bp, Staphylococcus aureus
agcagcctttgtcgctttattgatgatgtctttatgctccgcttctatttctgccaaccaagcatcatcgataatgccagctgaaagcaactcttttttgaacttttcattgcagtctgcttttttaagcgtttcacgctcttctttcgtacgatattggtcgtcatcatctgatgaatgagctgtcatacgacttgttactgcttcaatcaaagttgaaccttgaccagaaata

SEQ ID NO: 6022 - DNA, 288 bp, Staphylococcus aureus
gcaattcatctttatcacgttgtttattcgcaatatccttttcgattgcagtaagttcaaattctttatttttaatttcattttcttgttgattcaaactaatgaaggcgtcaatatcagattgtttaactggctctaattgagtcgcttcttctttaagttgagctaaacgctcatttcttaaaccaatatctctttctaacgattgcttatgcgctcgtgctttttcgtaacgatccacacctttttctgggaatgtgattggctcaatatttaactgttgttcta

SEQ ID NO: 6023 - DNA, 224 bp, Staphylococcus aureus
gttcaaagtatttcttttcttcatctgtaatcaagcttgacgcagttactggttgtggcatcgttccatcattcatacctactaagtaaacatgttgcttattatcgactttagccaaatccatcgtaccaatacttacttggtccaatgtttgcggaatcataacaaattctaattgttctaaaccaatatcaaatacttctaagaaacgttccatcgacatt

SEQ ID NO: 6024 - DNA, 410 bp, Staphylococcus aureus; identical to SEQ ID NO: 6019

SEQ ID NO: 6025 - DNA, 241 bp, Staphylococcus aureus
cgtccatccgcagcagcgaatttttgacgtccagtgtagaatggatgtgaatcagatgaaatatctaaacgaataactgggtattcttttccatcttcccactccatcatttctgaagatgtttttgtagaaccgcttaagaatttgaagtttgtagtagtatctaaaaagattacttggtgatactcaggatgaattccttgtttcattattttcagctcctttgccctgaaccatctgg

SEQ ID NO: 6026 - DNA, 330 bp, Staphylococcus aureus
ctcagaccaacgcttaatggcgtgcttttcaaactcattatggcacttatagcatggatagtatttattacaacatttaaatttaatagcaataatatcttcttcggtaaaataatggcgacagcgtgtttcagtatcgattaatgaaccataaactttaggcatagacaaagctccttaacttacgattcctttggatgttcaccaataatgcgaacttcacgatttaattcaatgccaaatttttctttgacggtcttttgtacataatgaataaggttttcataatctgtagcagttccattgtctacatttaccataaaaccagcg

SEQ ID NO: 6027 - DNA, 170 bp, Staphylococcus aureus; identical to SEQ ID NO: 5261

SEQ ID NO: 6028 - DNA, 287 bp, Staphylococcus aureus; identical to SEQ ID NO: 5297

SEQ ID NO: 6029 - DNA, 190 bp, Staphylococcus aureus
tctaatttttcttcttcaattttcttctgcaaaattgccattcgagtttcataatctggtggcgtaatatcaacaattagcccccattcaaagcgtgaacgtaatcggtcttctaattgtgcaatttcctttggtggtcgatcactcgaaataactatttgcttgttattctgatgcaattcattaaaag

SEQ ID NO: 6030 - DNA, 247 bp, Staphylococcus aureus
ttgttctaaagaagttcacaagggtttgaatcattagatcacctcgtgtgctccacctttagcatcaatagcttctgctgctgaagctgagaatttatgagctttcactgtcaatttcttatcaagtgaaccattacctagtattttgataccagatttttcattcttaacaacaccagattctactaataaagctggagttacttcagtaccatcttcaaatttattaagttggtctaagttaaca

SEQ ID NO: 6031 - DNA, 795 bp, Staphylococcus aureus
tatttttctgatgaaccaccagagaaataattcacttcatatgcatttgcaaaataaacagccagaagcaaggtttagaattgggccgtccgttttgctcaattcacttgcattcaataattcatgctgatcatgatcaatttgcttatctaattctgcaattttcttcatttgcttatctgatttgttttctttcgccatcatttgatcacgacgattttctttgtcattcaattcctgttgcaactttaacacatattcatcaaggtcaatatatgctaatggtactaatactttatctccatatgtgtcaataaagttataaaaataatcatctgtttttgatacaaatccagcacgctcttcagtttcacgatataaatctaagaaaagattgaactcatcacgttcaaggaatctgactttaacaccatagtttatcgctttattaatattacgtttacgttgactatcaaatgtctttttcaatgtttcgggtgttttaccttcaaggtttaatacgcccatccatcgtacttggctcgatgtatcatactcagttgtaaagccatgatgctcgtaaccatgtgatttaaacaagtttactagggcatcatttttctcgcgaccttcaaatggcacgatatctttatcatatagatgatataaccaatacggatctaatttaacatataaacattgatgttgctgtaaatatttatctaactcttttaaataataatcaactaatcctaaatctgaaaaatccattactggaccacgattcgaatagta

SEQ ID NO: 6032 - DNA, 194 bp, Staphylococcus aureus
cctgcgcttaatgcgtagttgcctcctgatccaatagcgataaggtcatcatctggagcaataacttcgccagttccactgacaactaaaatagcatctttatccattacaattagcatagcttctaattgacgtaattgtttatcgcctcgccattcttgtgccaattcaacagcagctctttctaagttacc

SEQ ID NO: 6033 - DNA, 364 bp, Staphylococcus aureus
caatctgatttttaatatctctagccaatcgataagattttaaatcatcaatttcttcaggagatacaatcactcggatttctctacctgcctgaatcgcaaatgctttttctacaccatcataactttctgataacgtttctaaacgttctaatcgacgaatataattctctaatgtttcttttcttgcacctggacgagccgcagacaatgcatctgcagcagcaacaaggatagatataatagatgtaggttcaacatcaccatgatgagaatggattgcattaataactgtttcattttcaccatattttttcgctaattctacaccgatttcaacatgactaccttctacttcatgatc

SEQ ID NO: 6034 - DNA, 180 bp, Staphylococcus aureus; identical to SEQ ID NO: 5977

SEQ ID NO: 6035 - DNA, 187 bp, Staphylococcus aureus
atgccgatgactacatcatatccattgtcttttaagttttgtgcatgcgcgtgaccttgtgatccataacctactactgcaatttttttgccttgtaaagcgtccgtttttacatcttgatcataataaactgttgtcataataaattcctccaaataattaaatattttgtgtttcgaaaattctg

SEQ ID NO: 6036 - DNA, 193 bp, Staphylococcus aureus
ttcagcaacctcacttcgaaatgtatcgactgaaatttttacatcaaaaccgacaatagcttcaacaacaggtaatactctgttcatctcttcttctaatgaaaccatttcatgaccgggtctcgttgaaacacctccaacatctataatgtcagcaccttcatctatcatggctttcactctatttatagct

SEQ ID NO: 6037 - DNA, 368 bp, Staphylococcus aureus; identical to SEQ ID NO: 5583

SEQ ID NO: 6038 - DNA, 210 bp, Staphylococcus aureus
ttaacatggatttgtaacgcttgtgcctcaagtaattcaactgcttccaaagccttttctactggtacgtccgcaccaacattgctaaaaatcatgccttcaggattcatttttcgcgcaatcgtaaacgtctcagccatgcgtggatttctcaatgccgcatgtgttgatccaactgccatcgctaagccagtttctcttgcaactaca

SEQ ID NO: 6039 - DNA, 213 bp, Staphylococcus aureus; identical to SEQ ID NO: 4657

SEQ ID NO: 6040 - DNA, 257 bp, Staphylococcus aureus; identical to SEQ ID NO: 5417

SEQ ID NO: 6041 - DNA, 157 bp, Staphylococcus aureus
atttactaaacttgatttacctacgtttggtcgtccaataatggatagtcgaattgtatcttcatcataaggatcttcttcctcttcaccaaaatgagaaacaactgcatctaacaagtcaccaagacctaaaccatgtgaccctgatatcggatac

SEQ ID NO: 6042 - DNA, 111 bp, Staphylococcus aureus
tccttcgattgttttattcggacttattactggccaaagcttatgtttacccatcattttaccaaacaagtaagcccctgtatctgtaagccaaacaattaaaaagtttaa

SEQ ID NO: 6043 - DNA, 366 bp, Staphylococcus aureus
tcttctttagatgatgaatcatcatcatgacctttaaattgcatatcttctgcatcaggtgcatcgattttaacaataacgtcaccaactacagctactgtaccttcttctaccataacttcttctacagtaccagatgctggtgatgggatttctactactgatttatcgttttgtacctcagctaaaacatcgtcttcttcaatagtatctccagctttaacaaaccattttacaatttcaccttcgtggataccttccccgatatcgggtaatctaaattcaaatgccacgtttttgccctcctaagatttcgtaaattaaacatttcattttaatcaatgagactaaaatacgctaacttcg

SEQ ID NO: 6044 - DNA, 98 bp, Staphylococcus aureus; identical to SEQ ID NO: 5183

SEQ ID NO: 6045 - DNA, 661 bp, Staphylococcus aureus
  misc_feature (643)..(643): n=g, a, t or c
  misc_feature (645)..(645): n=g, a, t or c
agcagctgctccaccagcaatttggtgcatcataggtgtttctacttccaagaaacctttattatttaaataattacgcatttcttgaatgattttactacgattaataaatgtacgagtgctatcttcgttcgtaattaaatctaaatatctttgacgatatctctgttcaatatcctgtaaaccgtggaatttatccggtaatggtcgcaatgatttagttagtagcgtgaatttcttcgctttaaccgataattcgccagtatttgttttgaacattacaccttcaacaccaacgatatcgcctaaatcagcatttttccataaatcaaattcgtcatcgccaacttgatctttacgaacgtaaatttgaatttgtccagctaagtcctgaacgtgtgcaaatcctgctttacctttaccacgcttagtcattaatcgtccagctatagcgacatgactatccgcttctttttctaccaattcttctttagaatactggtcccactcttctttcaaatcactagataaacctgaacggtcaaatttagaaccaaacgggtctataccaagatcatataattcttgtaatttttgacgtcgaaccaacatttggtcattcatttcttctgacataactttntntcctttaacttgttgt

SEQ ID NO: 6046 - DNA, 181 bp, Staphylococcus aureus; identical to SEQ ID NO: 5185

SEQ ID NO: 6047 - DNA, 173 bp, Staphylococcus aureus
ccttcgaatacttggatacgctcacgagtaccctcaatgatacgtacgtgtacacgtaaagtatcaccaggacggaaacttggtaagtctgtacgtaattgtgatttagttactgcttcgattaatttgtgatttgtcattataaattctcctcttcaacctatgttcttgcc

SEQ ID NO: 6048 - DNA, 278 bp, Staphylococcus aureus
cgcctgtgtttaacactttacctgcagcgttaatacctgccatcaatccttgtcctgctgcttcttcataaccagatgtaccattaatttgacctgcagtatataagtttttaatcattttcgtttcaagtgtaggccataactgcgttggcacaatcgcatcatattcaattgcgtagccggcacgcatcatatctgctttttcaagacctggtatcgtctctaacatttgacgttgcacatgttcaggaagacttgtagacaatccttgcacatat

SEQ ID NO: 6049 - DNA, 364 bp, Staphylococcus aureus
tggagaatctgtgttagaaactttcaaagatacatctgtttctaattgttgatttaaacgttcttgaatttgacgtgctgttacaaagtcaccttcacggccagcaaatggagaattgttaactttaaatgtcatttcaagagtaggctcatcaatacgtagaactggcaatgcttcttgatggtcatgtggtgttacagtttcaccaacattaatgtcttccatacctgaaacagcaattaaatctccagcttgtgcttcttcaatttctaaacgttttaatccaaagtaaccaaagattttagttacacggaagtttttcactgtaccgtctaatttaattagtgatacattatctccgaca

SEQ ID NO: 6050 - DNA, 213 bp, Staphylococcus aureus; identical to SEQ ID NO: 4657

SEQ ID NO: 6051 - DNA, 189 bp, Staphylococcus aureus
agaagataattgcaagtattagtaaaagtatcggattgactcccaagacgacacctgcactagttgcaacagctttgccaccttggaattttaaataaacaggataaacgtgtccaagtatagcgaataagccaacaattaaaccatttgtaaaaaaagtactaatagggccatctgcgtgaacttgta

SEQ ID NO: 6052 - DNA, 434 bp, Staphylococcus aureus
caaaccaaaccgctaaatgcctctgtttaataaacagtatgattgtgacgataatggaaatcaacacgacacctttgacatctccaatttccgcactaaacgtcatatagtaattaaacaaattgttaacatactgacgttgtggctcaccgaaataatctgtaaaccatgttaatgatcccatatctatatttttaagccattcttgatttgtcactacactgtaaaacatacctataaatacaatcagcgcgattaaaaataaaggcactgtcattttcggtgatgttaattttttatctatcatcttacaatctcctcgtatcatcattttcattttacaaatgttatccataatatcaatgtgccacaaatttcactttaccgacaatatcaaaattataaagttcatattgttatgtatattgcaaata

SEQ ID NO: 6053 - DNA, 180 bp, Staphylococcus aureus
taatttaggacttgggatagttaattgaatgtcattgactttgcattgatccgctaaagattgacgtaatcctttattactcgccacgccaccagcaacaattaatcgctgaacaccatattctttacaagcttgaatagctttaaacgtgagcacctctacaacactgttttgaaagct

SEQ ID NO: 6054 - DNA, 218 bp, Staphylococcus aureus; identical to SEQ ID NO: 4954

SEQ ID NO: 6055 - DNA, 173 bp, Staphylococcus aureus; identical to SEQ ID NO: 6047

SEQ ID NO: 6056 - DNA, 120 bp, Staphylococcus aureus
caatcataactgaaccctaattctttaatttgtcgtttaaaagtttggatatttttctttgtaaattcacgtgggtcgttgccagtgtctaaagcatattgctctgctggtaatccgaat

SEQ ID NO: 6057 - DNA, 192 bp, Staphylococcus aureus; identical to SEQ ID NO: 5496

SEQ ID NO: 6058 - DNA, 223 bp, Staphylococcus aureus
aacaatttcttgttgtctatcttttgctaatttaatatcttctacgacaccttcgatttccgtaattaccgcttgacctttagggttacgtgcttcgaaaatctcttgaatacgaggaagaccttgtgtgatatcgctacctgctaccccacctgtatggaatgtacgcattgtaagctgtgtacctggttcaccgatagattgggctgcaattgtaccaact

SEQ ID NO: 6059 - DNA, 331 bp, Staphylococcus aureus
agctgaagttaactcaacgtcaaattcagttttttctgctgcagcgtcagcgccaccagctgcacctgctactgctactggagcagctgcagttacaccaaattcttcttcaattgcttttactaagtcgtttaattctaatactgacatttctttaatcgcttcaatgatttgttcatgattagccattttataattcctccattatttttaatttttttacgctaaaaattattcagcgttttcttctttttgttctccaatagctttaaccgcataagcgaagttgcgtacaggagcttgtaatactgataaaagcatagatacaaga

SEQ ID NO: 6060 - DNA, 185 bp, Staphylococcus aureus; identical to SEQ ID NO: 4574

SEQ ID NO: 6061 - DNA, 216 bp, Staphylococcus aureus; identical to SEQ ID NO: 6018

SEQ ID NO: 6062 - DNA, 369 bp, Staphylococcus aureus
tgtgcttgatcaggacgatggtgtcttgcaacatcgaaaataatgttgtgtaagaacgttgttctaccatatcctggacttccgattaacgcgatgtgcccagcttttttcaattgcaataccatcggtccttgatattgttcttctggtacgtctttaagtcctaatgttaattccacttcttttgcatcatctgaccataattttctgaaatctgtttctactaaatcttcttgatatacattttctggcaatggtggtagccatggacgcttaacttcttcgatttctaatcgtgttgtaatagattcgatatgatctatgaccgcttctaactcagtttgattttctttcgtttcttcatcttca

SEQ ID NO: 6063 - DNA, 221 bp, Staphylococcus aureus
tgggtgatttgagtgacggtagtaaactttgtcagtttctttgttaccagtaaattcgatttttgatgcattaataacgattacataatcaccagtatcaacgtgtggtgtgtaagttactttatttttaccgcgtaagatagatgctacttctgatgataaacgacctaatgtttggccttcagcatcgataacataccatttgcgctcaatgtttgatt

SEQ ID NO: 6064 - DNA, 267 bp, Staphylococcus aureus; identical to SEQ ID NO: 4687

SEQ ID NO: 6065 - DNA, 340 bp, Staphylococcus aureus
tttaattatattagactattcagcttctctaatttcttctgccacatctttatagtctattttcgctttaacaaacgtctcgttatttaccgggaaatgttgttggaatgtttcaaagttttgtatctcaacgacaacgtcatccacttcaaagtcaagaacatgtccaccataagctctttcatcatccgcaaaatgtatatgaaaaccagcagaccctacgccatgaaataattctggtgtaaaaaatccaacaatggcaccacgaatatcttgtcttttttcctcaggttgtctgcgtgctgaatcaatcaaacgtgtatatggcggttgctgagca

SEQ ID NO: 6066 - DNA, 369 bp, Staphylococcus aureus; identical to SEQ ID NO: 6062

SEQ ID NO: 6067 - DNA, 259 bp, Staphylococcus aureus
cactatcatcatacaatattatggctttaaattatagatttttaatgtaatctttaataaagcttaatgattttgagatattttcaggttgtgtaccgccaccttgagccatatctggacgaccgccacctttaccaccaacgattggtgccatttgtttgataagatcaccggctttaacgttatttgttaaagatttagggacagttgcaaccatcgatactttatcatcaacattacttgcaagaatgataattgt

SEQ ID NO: 6068 - DNA, 199 bp, Staphylococcus aureus
tcccaaccaatccaatacatttttcattggatctacgaatgtattgtagaaaaacccactacgtttttcaggtttagaatagtcacaaccagccaaaaagaccataatacctaaaaataatggtagtaacgcttttttcttcatttttccacctctatcattatattcacataggatttattctatcacattaatgagt

SEQ ID NO: 6069 - DNA, 111 bp, Staphylococcus aureus
cctcgtctacttttttcactgttttttgtaagtcgatgatataaataccatttctctcagtgaagatatattttttcatttttgggttccaacgacgtgtttggtgaccga

SEQ ID NO: 6070 - DNA, 100 bp, Staphylococcus aureus
attcacctttatttttcttgataatatcttcagcgattgattttggaacttcagcatagtgatcgaagtacatagtgtaagtaccgcgaccttgagtgtt

SEQ ID NO: 6071 - DNA, 160 bp, Staphylococcus aureus
acagataaatgtgccataaaacccctcatttgctgtttataacccaaaccatcttttctgtttataatcttgttgtggcattcgtttaggaatttttttatcatcaacaactaacttcgcattactaataaatccgttcatatcttcataataatcacgt

SEQ ID NO: 6072 - DNA, 97 bp, Staphylococcus aureus
acaacgtcaccttttttaacaacgccacctggtgttgcatttttaacagtacatacgataacatcgccgatgtttgctgttttacgaccagatccac

SEQ ID NO: 6073 - DNA, 71 bp, Staphylococcus aureus
aattgacgtaattgtttatcgcctcgccattcttgtgccaattcaacagcagctctttctaagttaccact

SEQ ID NO: 6074 - DNA, 132 bp, Staphylococcus aureus
tgctgttgacgtgcttgaaccttagcatcttctaaaatcttttgaacttcttcttgtgtttctttaagtttttgtttattttcttcttcaagtttctgtgcatttaacttagcttgttctgcgtcatcgata

SEQ ID NO: 6075 - DNA, 84 bp, Staphylococcus aureus
gttgctggacctgcaatatcgaaatgaatgtgaggtgtttgaccactaaaatgtgttacaaaacttgccgcaaatagcgcttta

SEQ ID NO: 6076 - DNA, 100 bp, Staphylococcus aureus; identical to SEQ ID NO: 6070

SEQ ID NO: 6077 - DNA, 131 bp, Staphylococcus aureus
tcaagatcaacttttttgatttcaattacgttgatgtgtacttttttatcagttaacgcatttaatttgttgcgtaatttttcgatttctgaaccgcctttaccaattaccataccaggtttaccagtatg

SEQ ID NO: 6078 - DNA, 119 bp, Staphylococcus aureus
ctaatactggcataatgttgttgattgcttcttcgaatacttctaatgcatcacgaccactgcgttgttcaactaggtcgaatgctgaataaagaattctttgtgctgttccacgttta

SEQ ID NO: 6079 - DNA, 99 bp, Staphylococcus aureus
acgatatctaataaacggtcatttggtataacgattaatgtatctactgcagctttcatagcttctactccagcagcagcttgagtttgacgtttacgt

SEQ ID NO: 6080 - DNA, 125 bp, Staphylococcus aureus
gatgcacgtttaccaacaacaattcgcagtggtaaaccaattaaatcggcatcattaaatttaacacctgcacgttcctgacgatcatcgtacaacacatcaaatttagtattaaattcagcata

SEQ ID NO: 6081 - DNA, 157 bp, Staphylococcus aureus
taaattaagtcgactgcatcattaccatcgtatgcacagtacacatcgtatccttctttttttaagttaaattctaaaatatcagcaatcggtttttcatcatcaactacaacaacttttctagccatttgcataaacctcttttcttaaatcatta

SEQ ID NO: 6082 - DNA, 130 bp, Staphylococcus aureus
taaggacgtttttctaattctttaccagtaccgcttaaagagatacctaaacgacgagattttttccagtttgaacctctgaatcgagccataataagactcctcctttaattcttttttgttgttatga

SEQ ID NO: 6083 - DNA, 199 bp, Staphylococcus aureus; identical to SEQ ID NO: 6068

SEQ ID NO: 6084 - DNA, 166 bp, Staphylococcus aureus
gttattatggcttagtgtaattactatttgttcttctggaattaagtcttcgtcctctaagtcttcaaatccacctaattgaatttctgtacgacgatcatcaccgaaacgatctctaatttcagtcaattcatctctaactaactgtaataacacttcttcatca

SEQ ID NO: 6085 - DNA, 91 bp, Staphylococcus aureus
ggtgctctacttcctgatccaaatatttttccaccttcttttcttgatttttcaccctgtgttcgttggtcgcctctcaaattaattatgt

SEQ ID NO: 6086 - DNA, 127 bp, Staphylococcus aureus
agtgcttctttaggattagcagttgtacattgatcttcaaatgcgagctctgccattctatcaattgactcatttaattcttcttcagacacaccttgtgatttcaaattcatttcaattccgactg

SEQ ID NO: 6087 - DNA, 138 bp, Staphylococcus aureus
agttagctgaccactagtaactttatcgaagacaggtaacgttgatggaatatcgtcgtatccatatatacgtgcaacttcttcaattaaatcttctttaattgtaatatctttacgacgtgatggtactagcactgt

SEQ ID NO: 6088 - DNA, 119 bp, Staphylococcus aureus; identical to SEQ ID NO: 6078

SEQ ID NO: 6089 - DNA, 155 bp, Staphylococcus aureus
tcttcttcaccaagagctggcatttctttaaagaacatttctgataaaggtacaatttcaccggcataactcatttctttttgataaagcgcaattaatttgcgtccccaagataaatcctcttctgacggcacctcaggaatcaaatttgcttt

SEQ ID NO: 6090 - DNA, 121 bp, Staphylococcus aureus
taaaatagatatagctatcggtgctctacttcctgatccaaatatttttccaccttcttttcttgatttttcaccctgtgttcgttggtcgcctctcaaattaattatgtacagatagtta

SEQ ID NO: 6091 - DNA, 104 bp, Staphylococcus aureus
tcaaggaaataataccttcttgcatacgtgcaccaccacttgcagagaaaagaataaatggtaaacggttctcagtgcagtaatcaatgatgcgacatatcttt

SEQ ID NO: 6092 - DNA, 110 bp, Staphylococcus aureus
taatgcttcctattgtttccatttattttcctcctttgtcaccgtctcaatttcaacattccttcgcatttccaagtcaatcatctcttcttccactttacgaatgccat

SEQ ID NO: 6093 - DNA, 130 bp, Staphylococcus aureus
gtgacggataccacggtatgatgaaatttccattaaacgtttgatatttaagttagtttcacgacgtaagtcaccttcgactttataaccgtctacaacttcacggatgcgacctaattcgtcatcagtt

SEQ ID NO: 6094 - DNA, 135 bp, Staphylococcus aureus
ctttaataagatggtaaatgggcacggaatctttcaataaatttctctccacgctcttcaaaagtactatattgatcccaactcgcacaagcaggtgacaataatacaacatcatttggttctataatatcttgt

SEQ ID NO: 6095 - DNA, 122 bp, Staphylococcus aureus
taccccaaaacacaaaaagccccgtaagcctatgcctacggggtttgacaataaattatatattattgttcttctttaacatatggtaataatgccatatgacgagaacgtttgatagctgt

SEQ ID NO: 6096 - DNA, 138 bp, Staphylococcus aureus; identical to SEQ ID NO: 6087

SEQ ID NO: 6097 - DNA, 175 bp, Staphylococcus aureus
ttaagacctggttttttacgttctttcatacgtgggtcacgagtaagtaatccagcgcgttttaaagaacctctgtattcaggatctgcttctaataatgcacgagcgattccgtgacggatagcttgagcttgtccagtgaaaccaccaccatgaacgttaactaaaacatcat

SEQ ID NO: 6098 - DNA, 176 bp, Staphylococcus aureus
gcttcaatttccgcttgtacttttgaaacgcgctcatctgtcaatgtttcttctgtgtctaaataatttaaacgtattgcaattgattttttacctttttctaaatgttcgccctgatatacatcaaagacaagtgtatcttttaatatattgccaccatgtgcatgaatcgttga

SEQ ID NO: 6099 - DNA, 155 bp, Staphylococcus aureus
tactaaatcactttgcatgtcatttgtttgtgtcataactacaactggcttcatatttaaacgtcactccattatttaatgttgttcatttaagcgttttataatttcataagcaccttgctcttttaatttgttactcactgttttgcctaact

SEQ ID NO: 6100 - DNA, 157 bp, Staphylococcus aureus; identical to SEQ ID NO: 6081

SEQ ID NO: 6101 - DNA, 162 bp, Staphylococcus aureus
gcttcgtcttttgcatgttgaacgttggcattaccatttaatgcttgttttgcagcattaacttgtttgattgcttgttcaacttcagcttgtgttgcattgccgccattagcttttgaaatgatattttcagcatttgtaacagcagtgttatatgcttgt

SEQ ID NO: 6102 - DNA, 87 bp, Staphylococcus aureus
agattcctctgcagcttttttaccgatttcaggattagctcctgctcctaaaccacgtgttaatttttcaccgatttggattttaga

SEQ ID NO: 6103 - DNA, 175 bp, Staphylococcus aureus; identical to SEQ ID NO: 6097

SEQ ID NO: 6104 - DNA, 139 bp, Staphylococcus aureus
gtaacctctacccttgttagcaactagacgaatttttaagtgaccacctttagatactgttgcaattttaagctctgggtttaaaatttcaacatcactatcatgtgtaatgtcgcttgctgttacttcgccttcatca

SEQ ID NO: 6105 - DNA, 185 bp, Staphylococcus aureus
gttaccaagtaccatatcttgtgatggtgtaactacaggtttaccatctttagggttcaagatgttttgtgctgctaacatcaacattcttgcttcagcttgtgcctcttttgataaaggaacgtgaaccgccatttggtcaccgtcaaagtcagcgttataagctgttgttacaagtggatgta

SEQ ID NO: 6106 - DNA, 131 bp, Staphylococcus aureus; identical to SEQ ID NO: 6077

SEQ ID NO: 6107 - DNA, 90 bp, Staphylococcus aureus
gatactgttgcaattttaagctctgggtttaaaatttcaacatcactatcatgtgtaatgtcgcttgctgttacttcgccttcatcacgt

SEQ ID NO: 6108 - DNA, 157 bp, Staphylococcus aureus
taaacgtttgtgtgtacgttgttcgaattgttcacgtgaatctttatacttatgcacggcacggatgattgtgtaaactgatttctcagttggtaacggaattggtccagaaacatctgcaccagaacgtttcgctgtttctacaatcttctctgct

SEQ ID NO: 6109 - DNA, 122 bp, Staphylococcus aureus; identical to SEQ ID NO: 6095

SEQ ID NO: 6110 - DNA, 139 bp, Staphylococcus aureus
gcatatacaactaaagcgatgtttgctgagcggtttggatcatattgaatagaatcaacttttgcattgataccatctttgttacgtttgaaatcgataacacggtattgacgtttgtgtccaccaccatggtgtctta

SEQ ID NO: 6111 - DNA, 116 bp, Staphylococcus aureus
cctgctaattcaagtacggcacgaacaggaccaccagcgataactcctgtaccaggtgcagccggtttcataaatacgcttcctgaaccgtaacggccagtaattgtgtgtggagt

SEQ ID NO: 6112 - DNA, 98 bp, Staphylococcus aureus
aataaacggtcatttggtataacgattaatgtatctactgcagctttcatagcttctactccagcagcagcttgagtttgacgtttacgtccttcaaa

SEQ ID NO: 6113 - DNA, 139 bp, Staphylococcus aureus; identical to SEQ ID NO: 6110

SEQ ID NO: 6114 - DNA, 132 bp, Staphylococcus aureus
ctgattcagcaccgtcaccgcgacgagggccttgtttaaggatacgagtgtaaccaccttgacgttctgtgtaacgctctgcgatttcaccaaataatttttgaagtgcagtttgtgtagtttcatcttcgt

SEQ ID NO: 6115 - DNA, 100 bp, Staphylococcus aureus
taaccaccttgacgttctgtgtaacgctctgcgatttcaccaaataatttttgaagtgcagtttgtgtagtttcatcttcgtttaagatttcaacattac

SEQ ID NO: 6116 - DNA, 110 bp, Staphylococcus aureus; identical to SEQ ID NO: 6092

SEQ ID NO: 6117 - DNA, 130 bp, Staphylococcus aureus; identical to SEQ ID NO: 6082

SEQ ID NO: 6118 - DNA, 96 bp, Staphylococcus aureus
taatagacgccatagttttagattcattttgaatttgaacgccttccttcgcttcaatagcttggtgtaaaccttccgagaaacgacggcctggca

SEQ ID NO: 6119 - DNA, 99 bp, Staphylococcus aureus
actcctgtaccaggtgcagccggtttcataaatacgcttcctgaaccgtaacggccagtaattgtgtgtggagttgtaccttcaacacgtggaacaact

SEQ ID NO: 6120 - DNA, 176 bp, Staphylococcus aureus; identical to SEQ ID NO: 6098

SEQ ID NO: 6121 - DNA, 84 bp, Staphylococcus aureus; identical to SEQ ID NO: 6075

SEQ ID NO: 6122 - DNA, 138 bp, Staphylococcus aureus; identical to SEQ ID NO: 6087

SEQ ID NO: 6123 - DNA, 213 bp, Staphylococcus aureus
tatatgcttttcttctaaataattacctacaccgatatgcatttctttgctattttcacctaattctaaaacatctcctaaaattagaatgcgacgccctgtcaaagtactcagtgtatcaatagctgctctcatacttgtaggacttgcattataggcatcatttatcacagtaatatcattttctaatgtatgttgttccatacgcatacc

SEQ ID NO: 6124 - DNA, 134 bp, Staphylococcus aureus
aactagtaattgatcccatggaaaattcattaatgtccacctccatgatcatcattgtcttgatcttgcgcatcttttgaaattttcttcatttctttcgcatttttcgattcatctttcttgaactcattgtt

SEQ ID NO: 6125 - DNA, 119 bp, Staphylococcus aureus; identical to SEQ ID NO: 6078

SEQ ID NO: 6126 - DNA, 134 bp, Staphylococcus aureus; identical to SEQ ID NO: 6124

SEQ ID NO: 6127 - DNA, 127 bp, Staphylococcus aureus
attgttcttctttaacatatggtaataatgccatatgacgagaacgtttgatagctgtagtcaacatacgttgatatttagctgaagtaccagttacacgacgtggtaaaattttaccgcgttctga

SEQ ID NO: 6128 - DNA, 115 bp, Staphylococcus aureus
acccaacctgattgtggaaaatattgcttaaactcacgttgtgctacccctgcaatttcccctttttgattgaataaaatcgctcttgagcttgttgttccttggtctatagata

SEQ ID NO: 6129 - DNA, 104 bp, Staphylococcus aureus
ccattacaattagcatagcttctaattgacgtaattgtttatcgcctcgccattcttgtgccaattcaacagcagctctttctaagttaccactaaactgttgt

SEQ ID NO: 6130 - DNA, 166 bp, Staphylococcus aureus; identical to SEQ ID NO: 6084

SEQ ID NO: 6131 - DNA, 106 bp, Staphylococcus aureus
aagaccttgtgtgatatcgctacctgctaccccacctgtatggaatgtacgcattgtaagctgtgtacctggttcaccgatagattgggctgcaattgtaccaact

SEQ ID NO: 6132 - DNA, 166 bp, Staphylococcus aureus; identical to SEQ ID NO: 6084

SEQ ID NO: 6133 - DNA, 99 bp, Staphylococcus aureus
cctaacagtgcaatgcttccttctggtgaaatgtaatcgatcatttgatttatggctgattgactaccgcgaccacccacacactcaaatgcatgatca

SEQ ID NO: 6134 - DNA, 123 bp, Staphylococcus aureus
tgtcgcttacgtcttaacttccgcttttcttcaagtgttaatggctttaattgtgttactttactttttcgttcttttttcgttactgtttcctcatcaatcgagtcgctattttgttcttta

SEQ ID NO: 6135 - DNA, 84 bp, Staphylococcus aureus; identical to SEQ ID NO: 6075

SEQ ID NO: 6136 - DNA, 199 bp, Staphylococcus aureus; identical to SEQ ID NO: 6068

SEQ ID NO: 6137 - DNA, 162 bp, Staphylococcus aureus; identical to SEQ ID NO: 6101

SEQ ID NO: 6138 - DNA, 71 bp, Staphylococcus aureus; identical to SEQ ID NO: 6073

SEQ ID NO: 6139 - DNA, 130 bp, Staphylococcus aureus; identical to SEQ ID NO: 6093

SEQ ID NO: 6140 - DNA, 96 bp, Staphylococcus aureus; identical to SEQ ID NO: 6118

SEQ ID NO: 6141 - DNA, 94 bp, Staphylococcus aureus
taaacctgcttgatcttgagtacgtgcattgaactctttacagaatcccatgatgttcacacctgcttgacctaatgctggaccaactggtggt

SEQ ID NO: 6142 - DNA, 125 bp, Staphylococcus aureus; identical to SEQ ID NO: 6080

SEQ ID NO: 6143 - DNA, 125 bp, Staphylococcus aureus; identical to SEQ ID NO: 6080

SEQ ID NO: 6144 - DNA, 102 bp, Staphylococcus aureus
tcttgcatccgatcttgcaacgctgtaaatgtttcgaagccatcctcttctaagaagtgccctccatcttccacgatttgcaagttcccctctaatgcattc

SEQ ID NO: 6145 - DNA, 121 bp, Staphylococcus aureus
ttcaactaaagttggttcaaatgcttgaataccaagtctatgaagtgttggtgcacggttaagtaatacaggatgttctctaattacttcttccaatacgtcccaaacttcatcatccata

SEQ ID NO: 6146 - DNA, 100 bp, Staphylococcus aureus; identical to SEQ ID NO: 6115

SEQ ID NO: 6147 - DNA, 159 bp, Staphylococcus aureus
acgaccaacttgatcgcctttaacgattggtttcggtttcactttttctttaccatcttcagctgaaacgtgcttcgcttcaccaaactctgttgttttttcacgttcaatattatcttcaacttgtactacagattttaaaatgaatttacaagtatc

SEQ ID NO: 6148 - DNA, 110 bp, Staphylococcus aureus
tatacgttgtcgcaacaccataactatctgttgttacaaatgcaccaaacgcacctccaccagctacattagatgggtcagcattcgcctttgcagctgaatttggttta

SEQ ID NO: 6149 - DNA, 149 bp, Staphylococcus aureus
tcaatatcatcaatagggtctactcgaccagcaacatgagttacgttatcatcatcaaatgcacgaacgacctgacaaatcgcatctacttctctaatatgtgataagaatttattacctaacccttctccctttgaagcacctttcac

SEQ ID NO: 6150 - DNA, 158 bp, Staphylococcus aureus
acaataacttgatttgcaattgtagtttcattgaaacgacgtttaacaccaccaaacgtttctaatgcttctttaatatttgtaacatctagcttctctaaataactaatcgcaattacagctaatgcatttaaaactgtatggtcaccatattgtgg

SEQ ID NO: 6151 - DNA, 166 bp, Staphylococcus aureus; identical to SEQ ID NO: 6084

SEQ ID NO: 6152 - DNA, 158 bp, Staphylococcus aureus; identical to SEQ ID NO: 6150

SEQ ID NO: 6153 - DNA, 100 bp, Staphylococcus aureus
tatatgcaatttccgcttcgctatccaatcttgggaaaataggtttaggttgcccagtaaccataattgactcattaagcacaccatattgctctaaact

SEQ ID NO: 6154 - DNA, 146 bp, Staphylococcus aureus
tacagaaataatttctttgtctttgattgctgctggtacatttccttcaacgattgcctgtgctaaaccttcaacaatcgcagttttaccaacaccagcttctccaactaatataggattgtttttagttcgtctacttaaaactt

SEQ ID NO: 6155 - DNA, 96 bp, Staphylococcus aureus; identical to SEQ ID NO: 6118

SEQ ID NO: 6156 - DNA, 132 bp, Staphylococcus aureus; identical to SEQ ID NO: 6074

SEQ ID NO: 6157 - DNA, 105 bp, Staphylococcus aureus
atgacttcacatggaagtgtgataaagatagatgtaccttgaccttctacactgtttgcccaaatacgaccattgtgcgcttccacaatctctttcgaaatggct

SEQ ID NO: 6158 - DNA, 106 bp, Staphylococcus aureus
aacgatagcgttttcgaattcgaaacctgcgcctgtttcgtttggtgtgaattcaatgtgaacatcaccgtattgaccacgaccaccagattgacgagagaattta

SEQ ID NO: 6159 - DNA, 151 bp, Staphylococcus aureus
gttgacgatctgcacgtaaatcttcgtcacggaagcattttacgatttggtagtatttgtcaaatccactaatcatcaataattgcttaaataattgtggtgattgtggtaatgcataaaattcaccatcatgaacacgagatggtactaa

SEQ ID NO: 6160 - DNA, 123 bp, Staphylococcus aureus; identical to SEQ ID NO: 6134

SEQ ID NO: 6161 - DNA, 110 bp, Staphylococcus aureus; identical to SEQ ID NO: 6092

SEQ ID NO: 6162 - DNA, 110 bp, Staphylococcus aureus; identical to SEQ ID NO: 6092

SEQ ID NO: 6163 - DNA, 71 bp, Staphylococcus aureus
tttacgagtacgcgcgttgtttttcgttttttgaccacgaactggtaaaccacgacggtgacggataccac

SEQ ID NO: 6164 - DNA, 121 bp, Staphylococcus aureus; identical to SEQ ID NO: 6145

SEQ ID NO: 6165 - DNA, 175 bp, Staphylococcus aureus; identical to SEQ ID NO: 6097

SEQ ID NO: 6166 - DNA, 135 bp, Staphylococcus aureus; identical to SEQ ID NO: 6094

SEQ ID NO: 6167 - DNA, 139 bp, Staphylococcus aureus; identical to SEQ ID NO: 6110

SEQ ID NO: 6168 - DNA, 110 bp, Staphylococcus aureus; identical to SEQ ID NO: 6092

SEQ ID NO: 6169 - DNA, 125 bp, Staphylococcus aureus; identical to SEQ ID NO: 6080

SEQ ID NO: 6170 - DNA, 159 bp, Staphylococcus aureus; identical to SEQ ID NO: 6147

SEQ ID NO: 6171 - DNA, 139 bp, Staphylococcus aureus
taattctgtaccatcaggcgtgatatattttttccctaaaaattgatagcctccacaaatcgttaatcccggcataccatcttcaatcgcttctttaagtggtgtcttaattttacttaattcttttgttgctaatgct

SEQ ID NO: 6172 - DNA, 123 bp, Staphylococcus aureus; identical to SEQ ID NO: 6134

SEQ ID NO: 6173 - DNA, 139 bp, Staphylococcus aureus
cttgctcatccataacttttacatctaaacctaaactttgtaattctttcatcaatactcggaatgattctggaacacttggtctagagatgttttcacctttaacaatagcctcgtatgttttcacacgtcctactgt

SEQ ID NO: 6174 - DNA, 119 bp, Staphylococcus aureus; identical to SEQ ID NO: 6078

SEQ ID NO: 6175 - DNA, 119 bp, Staphylococcus aureus; identical to SEQ ID NO: 6078

SEQ ID NO: 6176 - DNA, 123 bp, Staphylococcus aureus; identical to SEQ ID NO: 6134

SEQ ID NO: 6177 - DNA, 155 bp, Staphylococcus aureus; identical to SEQ ID NO: 6099

SEQ ID NO: 6178 - DNA, 87 bp, Staphylococcus aureus; identical to SEQ ID NO: 6102

SEQ ID NO: 6179 - DNA, 104 bp, Staphylococcus aureus; identical to SEQ ID NO: 6129

SEQ ID NO: 6180 - DNA, 157 bp, Staphylococcus aureus; identical to SEQ ID NO: 6081

SEQ ID NO: 6181 - DNA, 113 bp, Staphylococcus aureus
aatgcttcagtgatttgaggtacgatttgtttttttcgagaaacgacaccagataagaaggccatgtcatcttctaattgaacattgaatgcttcgccaactttatctttttc

SEQ ID NO: 6182 - DNA, 102 bp, Staphylococcus aureus; identical to SEQ ID NO: 6144

SEQ ID NO: 6183 - DNA, 158 bp, Staphylococcus aureus
tcatgaccacttaattcaatatgtctaatatgttcacgtactgcaccttgtaatgctaatacacctattttcatatcttaccaaccacgctcttgcatacgttcttctaatgataattgattgatatctaaacctttcatagcagtgccaagttcact

SEQ ID NO: 6184 - DNA, 119 bp, Staphylococcus aureus; identical to SEQ ID NO: 6078

SEQ ID NO: 6185 - DNA, 157 bp, Staphylococcus aureus; identical to SEQ ID NO: 6081

SEQ ID NO: 6186 - DNA, 92 bp, Staphylococcus aureus
acattgtctgttgctgttgtcgataaacattcatatcgtagcggtctgcaaattctttaatgcgatatgccggcggtaccatgacaggtaat

SEQ ID NO: 6187 - DNA, 121 bp, Staphylococcus aureus; identical to SEQ ID NO: 6090

SEQ ID NO: 6188 - DNA, 90 bp, Staphylococcus aureus; identical to SEQ ID NO: 6107

SEQ ID NO: 6189 - DNA, 119 bp, Staphylococcus aureus; identical to SEQ ID NO: 6078

SEQ ID NO: 6190 - DNA, 102 bp, Staphylococcus aureus
ttagtaggaagaacttctccacgataaatccatactttaacgcctaatttaccgtaagtagtgtcagcttcagcgtgtgcataatcgatgtcagcacgtaac

SEQ ID NO: 6191 - DNA, 125 bp, Staphylococcus aureus
ttaagtgctaatgatgcagcaattttgaaggccatttcagatgaatcgacatcatggtatgaaccatcatataatttagctttaacatcaattaaaggataacctgctaaaacaccattttccat

SEQ ID NO: 6192 - DNA, 116 bp, Staphylococcus aureus
aataattcttcatcgtcaaccatgtcaactttgtttaagaatactactaatgctggtacaccaacgttacgtgataaaagaatgtgttcacgagtttgtggcattggaccgtcagc

SEQ ID NO: 6193 - DNA, 131 bp, Staphylococcus aureus; identical to SEQ ID NO: 6077

SEQ ID NO: 6194 - DNA, 199 bp, Staphylococcus aureus; identical to SEQ ID NO: 6068

SEQ ID NO: 6195 - DNA, 94 bp, Staphylococcus aureus
cctcctttaaataattatttacggaatggcataccgaagttagctaacaattcacgagcttcttcatcagtgttagcagtcgttacgataacaa

SEQ ID NO: 6196 - DNA, 119 bp, Staphylococcus aureus; identical to SEQ ID NO: 6078

SEQ ID NO: 6197 - DNA, 166 bp, Staphylococcus aureus; identical to SEQ ID NO: 6084

SEQ ID NO: 6198 - DNA, 125 bp, Staphylococcus aureus; identical to SEQ ID NO: 6191

SEQ ID NO: 6199 - DNA, 122 bp, Staphylococcus aureus; identical to SEQ ID NO: 6095

SEQ ID NO: 6200 - DNA, 215 bp, Staphylococcus aureus
ttcgtttcattttctcctgttttcatcatttcacgtagctcttgctcgatttctaaatcaagatctgttttacgataaccattcaaaccttgacgttcatcttcttcaggttgattttgttgctgtgtgtctttgttgtcagaagtcgctactgtttttttattatctgtttctttagtcataacaaacgcctccgttataaaacgctatattta

SEQ ID NO: 6201 - DNA, 215 bp, Staphylococcus aureus; identical to SEQ ID NO: 6200

SEQ ID NO: 6202 - DNA, 94 bp, Staphylococcus aureus; identical to SEQ ID NO: 6195

SEQ ID NO: 6203 - DNA, 97 bp, Staphylococcus aureus; identical to SEQ ID NO: 6072

SEQ ID NO: 6204 - DNA, 139 bp, Staphylococcus aureus; identical to SEQ ID NO: 6104

SEQ ID NO: 6205 - DNA, 175 bp, Staphylococcus aureus; identical to SEQ ID NO: 6097

SEQ ID NO: 6206 - DNA, 199 bp, Staphylococcus aureus; identical to SEQ ID NO: 6068

SEQ ID NO: 6207 - DNA, 108 bp, Staphylococcus aureus
tcttctttttctacaatcgagtctccttttacaggtccatattttgttacgctatcgaccggcggtctaactacgtctcctgtttctggattcttaattcctggttta

SEQ ID NO: 6208 - DNA, 87 bp, Staphylococcus aureus; identical to SEQ ID NO: 6102

SEQ ID NO: 6209 - DNA, 138 bp, Staphylococcus aureus; identical to SEQ ID NO: 6087

SEQ ID NO: 6210 - DNA, 138 bp, Staphylococcus aureus; identical to SEQ ID NO: 6087

SEQ ID NO: 6211 - DNA, 251 bp, Staphylococcus aureus
gatcgctaacagcaccagttacaataccttttgtagaatcttcgtcaaattcaactaggttagactcagtagtaacctgaccaccacctgggtttgtatcttcttcatattcaacaacatcagcatgatgttttgaattttcatgtgtcgattcttcaaagtctacatgaatagaatcttcttcagtttcaatggtaccttctgcatgaccttctgcaccttcaacagctgtatgatattcaaaatcaatt

SEQ ID NO: 6212 - DNA, 163 bp, Staphylococcus aureus
taccgtaaatcttccacgccatataatttcaatgctttcacttgtaaatcacctcaaatttgatttaattcacaacttttttctttttaaaaatacctgtcgcaaaataacctgcaatgacaatggaattacttacgagtaaatgttccatataaaaatcagt

SEQ ID NO: 6213 - DNA, 157 bp, Staphylococcus aureus; identical to SEQ ID NO: 6108

SEQ ID NO: 6214 - DNA, 285 bp, Enterococcus faecalis
gtggaaggaggccaaacgcgtatgactgaagaaagaaatcaacgtaaagtttaccaaggtcgcgtggtatcagacaaaatggataaaacaatcacagttgtcgttgaaacaaagaaaaaccaccctatctatggcaaacgtatgaaatattctaaaaaatataaagcgcatgatgaaaacaacacagcgaaagttggagacatcgtaaaaatcatggaaactcgtccattatcagctacaaaacgtttccgtttactagaggtagtcgaagaagcagttattatc

SEQ ID NO: 6215 - DNA, 186 bp, Enterococcus faecalis
atgaaggttaaagaaatcagagaattaaccactgccgaaatgctagataaagaaaaacaattaaaagaagaattgttcaacttaagattccaattagcaacaggtcaattagaaaacactgcacgtattaaagaagtacgtcaatcgattgcacgcatcaaaacagtattgcgtgaacaagctaac

SEQ ID NO: 6216 - DNA, 216 bp, Enterococcus faecalis
gtggcaaaagaagatatgattgaagtcgaaggtacagtcgtcgaaactttgccgaatgcaatgtttaaagtcgaactagaaaatggacaccaagttcttgctactgtttcaggtaaaatccgtatgcactacatccgtatcttacctggtgacaaagtaacagttgaattatcaccgtatgatttaacgcgtggccgtattacttatcgctttaaa

SEQ ID NO: 6217 - DNA, 363 bp, Enterococcus faecalis
atggctcgtattgcaggagtagacatccctcgtgacaaacgtgtagtagtttctcttacttacatttatggtattggtaacactacagctaaaaaagttttagcaaacgttggcgtatctgaagatgttcgtgtacgtgatttaacaaacgaacaaacagatgcgattcgtgcggaaattgataagttaaaagttgaaggggatcttcgtcgtgaagtgaacttaaacatcaaacgcttgatggaaatcggttcataccgtggaatccgtcaccgtcgtggattaccaactcgtggacaaaacacgaaaaataatgcacgtactcgtaaaggccctactaaaacagtagcaggcaagaaaaaa

SEQ ID NO: 6218 - DNA, 114 bp, Enterococcus faecalis
atgaaagtaagaccatcagtaaaaccaatgtgtgaacattgtaaagtaattcgccgtaaaggacgtgttatggttatttgcccagcaaatccaaaacataaacaacgtcaagga

SEQ ID NO: 6219 - DNA, 687 bp, Enterococcus faecalis
atggctaaaaagagcaaaaaaatgcaagaagcattgaaaaaagttgatgctacaaaagcttactcagttgaagaagcagtagctttagcaaaagatacaaacatcgcgaaatttgacgcaacagttgaagttgcttacaaattgaacgttgaccctaaaaaagcagaccaacaaatccgtggagcagttgtgcttccaaacggaactggtaaaacacaaactgttttagtattcgctaaaggcgaaaaagctaaagaagctgaagctgctggtgcagatttcgtaggcgacgacgacatggttgcaaaaatccaaggtggatggttcgactttgacgtagttgttgcgactcctgacatgatggctacagttggtaaattaggccgtgtcttaggaccaaaaggtttaatgccaaaccctaaaacgggtactgtaacaatggacgttacaaaagctgttgaagaagttaaagctggtaaagtaacttaccgcgttgacaaagctggtaacatccacgtaccaatcggtaaagtttcatttgataacgaaaaattggttgaaaacttcaacacaattaacgacgtattattgaaagctaaaccatcaactgctaaaggtcaatacatcaaaaacatttcagtaacaacaacatttggacctggaatccacgttgaccaagcttctttc

SEQ ID NO: 6220 - DNA, 627 bp, Enterococcus faecalis
atgaccaaaggaatcttagggaaaaaagtgggaatgacacaaatctttactgagtctggtgaattaattccagtaacagtagttgaagctacgccaaacgtagttttacaagtaaaaactgttgaaactgacggatacgaagctatccaagttggttaccaagacaaacgtgaagttttatcaaacaaacctgcgaaaggtcatgttgcaaaagcaaacacggctcctaagcgcttcattaaagaattcaagaatgttgagctaggagaatatgaagtaggtaaagaaatcaaagtagatgttttccaagcaggagacgttgttgatgttacaggtactacgaaaggtaaaggattccaaggggcaatcaaacgtcacggccaaagccgcggacctatgtctcatggttctcgttatcaccgtcgtcctgggtcaatgggtccagtagcgcctaaccgtgtatttaaaaataaacgactagccggccgtatgggtggcgaccgcgtaacaattcaaaaccttgaagttgttaaagtggacgtagaaagaaatgttatcttaatcaaaggaaacattcctggagcgaaaaaatctttaatcacaatcaaatcagctgtgaaagctaaa

SEQ ID NO: 6221 - DNA, 3651 bp, Enterococcus faecalis
ttgatcgatgtaaataaattcgaaagtatgcaaatagggcttgcttcaccagaaaagatcagaagttggtcttatggggaagttaaaaaacccgaaacaattaactaccgtacattaaaacccgaacgtgaagggttattctgtgaacgcatttttggtccaaccaaagactgggaatgtgcttgtggtaaatataaacgtatccgttataaaggtattgtctgtgaccgttgtggcgttgaagtcactcgttcaaaagtacgtcgtgaacgtatgggacatattgaattagccgcaccagtttcacatatctggtactttaaaggaattccatctcggatgggtcttgttttagacatgagccctcgtgcattggaagaagtcatttattttgcttcatacgttgtcatcgaaccaggtgacacaacattagagaaaaaacaattgttaacggaacgcgaatatcgtgaaaaacgtgaacaatatggccaagccttcaaagctgctatgggtgccgaagccgtgaaacaattattagataacgtcgatttagatggcgaagttgcgcaattaaaagaagaattaaaaacagcttctggtcaaaaacggacacgtgccatccgtcgtttagacatcttagaagccttccgtgcttctggtaaccaaccaagctggatggtaatggatgttatcccagttattccaccagatttacgtccgatggttcaattggaaggtggtcgttttgcaacaagtgacttaaacgacttataccgccgtgttatcaaccgtaacaaccgtctaaaacgtttattagacttaaatgcgccaagcatcattgttcaaaacgaaaaacggatgttacaagaagcggtcgatgctttaatcgataatggtcgtcgtggccgtccagttactggaccaggtaaccgtccattgaaatctctttctcacatgttgaaagggaaacaaggtcgtttccgtcaaaacttactaggtaaacgtgttgactattctggtcgttccgtaatcgtcgttggtccgttcttaaaaatgtaccaatgtggtttaccaaaagaaatggcgattgaattattcaaaccatttgtaatgcgtgaattagtacaacgtgaaattgcgacaaacattaaaaatgcgaaacgtaaaatcgaacgtggcgaagatgaagtttgggatatcttagaagaagttatccaagaacacccagttttacttaaccgggcacctacgttgcatagattaggaatccaagctttcgaacctgttcttgttgaaggtcgtgcgattcgtcttcacccattagtatgtgaagcctacaatgccgatttcgatggagaccaaatggcggttcacgtgcctctaaatgaagaagcacaagcagaagctcgtatgttaatgcttgctgcccaaaatatcttgaacccgaaagatggtaaaccagttgttacaccatctcaagatatggtcttaggtaactactacctaacaatggaagaagaaggccgtgaaggggaaggcatgatcttccgcgacatgaacgaagctgttttagcatggcaaaatggctacgtgcatttacactcacggattggggttcaaacaacacttttaggtgacaaaccatttactgattggcaaaaagaacgaatcttaatcaccacagttggtaagatcatctttaacgaaatcatgcctgttgagttcccttacttgaacgaaccaacagactataacttaactgttcaaacaccagataaatacttcgtagaagctggtacagacattcctgcacacattaaagagcaagaattagttttaccattcaagaagaaaaatcttggaaatatcattgctgaagtcttcaagagattccacattacggaaacctctaaaatgcttgaccgcatgaaagacttaggttacaaacactcaacttatgctgggatgacagtagggattgccgatatcatggttcttcatgaaaaacaagcaatcattgatgctgcccacaaacaagttgaaacaattactaaacaattccgtcgtggtttaattactgatgacgaacgttatgaacgtgtaatcggcgtttggaacggtgccaaagacgaaatccaacaaaaactgatcgaaagtatggaagctcgtaacccaatcttcatgatgtctgactctggagcccgtggtaacatctccaactttacacagttagctggtatgcgtggtttgatggccgctccgaatggacgaatcatggaattaccaatcatctcaaacttccgtgaaggactttctgtcttagaaatgtttatctcaactcacggggctcgtaaagggatgaccgatacggccttgaagacagccgattcaggttacttaacacgtcgtttagttgacgttgcccaagacgtaatcattcgtgaagacgactgtggcactgaccgtggtcttgaaatcgaagcaattcgtgaaggtaacgaaattatcgaaccattagacgaacgtctattaggtcgttatacacgtaaatcagttgttcatccagaaactggtgcaatcatcattggtgcggatcaattaatcactgaagatcttgccagagaaatcgtggacgctggtattgaaaaagtaaccatccgttctgtctttacatgtaacacaaaacatggtgtatgtaagcactgttacggacgtaaccttgcaactggttctgacgttgaagtcggagaagcagttggtacaatcgccgctcaatcaatcggggaacctggtacacagttaaccatgcgtacgttccataccggcggggttgccggtgacgatatcactcaaggtttacctcgtatccaagaaatctttgaagcacgtaatccgaaagggcaagcagtgattacagaagtaaccggtgaagttatcgatatttctgaagatcctgccacacgtcaaaaagaagtaaccatcaaaggaaaaacagatacacgtacctatactgtcccttacactgcacgtatgaaagttgctgaaggcgacatcatccaccgtggtgcaccgttgacagaaggttcaatcgatccaaaacaattattacaagttcgtgatgttttatctgttgaaaactacctattacgtgaagtacaacgtgtttaccgtatgcaaggggtagaaatcggcgacaaacatatcgaagtaatggttcgtcaaatgttacgtaaaatccgcgtaatggatccaggtgacactgaaatccttccaggaacattaatggacatcgcagaatttaaagaccgtaactacgacacattagttgctggtggcgtccctgctactagtcgtccagtcttacttggtattaccaaagcgtcattggaaacaaacagcttcttatctgctgcatccttccaagaaacaacacgcgtgttaacagatgctgctatccgtggcaaaaaagatccattacttggattgaaagaaaatgttatcattggtaaaatcatcccagctggtactggtatggctcgttaccgtaacatggaaccaaaagaagttggcgtagctagcgaaaacgtttatagtatttcagatattgaagcacaaatggctgctgaagatgcgatgaaaaacatcaataaa

SEQ ID NO: 6222 - DNA, 442 bp, Enterococcus faecalis
cgtacaacatatatggccaaagctggcgaagtagaacgtaaatggtacgtagtagatgcaacagatgttcctttaggacgtctatcagcagttgttgcttctgtactacgctggtaaaaataaaccaacattcacaccacatgtggatactggagatttcgtaatcgtaattaacgctgataaagtaaaattaacaggtaaaaaagctacagacaaaatttactaccgtcactcaatgtatcctggaggattaaaatcagtgactgctggtgaattacgcgacaaaaactctcgccgtcttatcgaaacttctgtaaaaggtatgctacctaaaaacactttaggacgtaaacaatttactaaattgaacgtatacggtggagctgagcatccacatgctgcacaacaaccagaagtattagatatcacgaacttaatttaa

SEQ ID NO: 6223 - DNA, 432 bp, Enterococcus faecalis
atgttagtacctaaacgtgtaaaacaccgtcgtgaattccgcggaaaaatgcgcggtgaagctaaaggcggaaaagaagtagcatttggtgaatggggtttacaagcaactgaatctcactggattactaaccgtcaaatcgaagcagcccgtattgcaatgactcgttacatgaaacgtggcgggaaagtatggattaaaattttccctcacaagtcttacacaagtaaagctatcggcgtacgtatgggtaaaggtaaaggggcaccagaaggctgggtatcaccagttaaacgtggtaaaatcatgtttgaaatcgcaggcgttcctgaagaagtagctcgtgaagctcttcgtcttgcatctcacaaattgccggtaaaaactaagatcgtaaaacgtgaggaaatgggtggtgaatcgaatgaaggt

SEQ ID NO: 6224 - DNA, 438 bp, Enterococcus faecalis
atgaaacttcatgaattaaaacctgctgagggctcacgccaagtacgtaaccgtgttggacgtggtacttcatctggtaatggtaaaacagctggccgtggacaaaaagggcaaaaagcccgttcaggcggtggtgttcgtttaggatttgaagggggtcaaactccattattccgtcgtttaccaaaacgtgggtttacaaacattaatcgtaaagattacgctgttgtaaacttagatactttaaaccgttttgaagatggaacagaagtaactcctgttgtcctaaaagaagcaggaatcgttaaaaacgaaaaagcgggaatcaaagttcttgcagatggtgagttaacgaaaaaattaactgtgaaagcagctaaattctcgaaatcagcacaagaagctatcgaagctgctggtggttcaatcgaggtgatc

SEQ ID NO: 6225 - DNA, 498 bp, Enterococcus faecalis
atggtttatattgatccaaaacatttggaattagaagaccgcgttgtagcgatcaaccgtgtaacaaaagttgttaaaggtggacgtcgtttacgtttcgcagctttagttgttgtcggtgacaaaaacggacacgttggtttcggtactggtaaagcacaagaagtacctgaagctatccgtaaagcaatcgaagacgcgaagaaaaacttagttgaagtgcctatggttggttctactatcccgcacgaagtaattggcgtattcggtggcggccgtatccttatgaaacctgcagtagaaggttctggggtagctgctggtggaccagttcgtgccgtattggaattagctggtgtagcagatattacatctaaatcactaggttcaaacacacctattaacgttgttcgcgcaactgttgaaggtctaaaacaattaaaacgtgccgaagaagtggcagcacttcgcggtaaatctgtagaagaaattatcggt

SEQ ID NO: 6226 - DNA, 177 bp, Enterococcus faecalis
atggctgaattaaaaattactttaaaacgcagtgttatcggacgtcctcaaaaccaacgtgctacagttaaagcgttaggtttaggtaaagtgaatagtactgttacaaaacctgccaatgaagcaatcaaaggtatggttaacactatttcacatttagtggacgtagaagaagtt

SEQ ID NO: 6227 - DNA, 1428 bp, Enterococcus faecalis
atgaactttgaaactgtcattggattagaagtccacgtagaattgaaaaccaactctaaaattttctcctctgcgccagcgcatttcggagcagaaccaaacagcaacacaaacgtggttgactggagttacccaggtgttttacctgtgatgaataaaggtgctttagaatttggcatgaaagcagcacttgccttgaactgtgaaatttcaaaagaaacacattttgaccgtaaaaactatttttacccagataacccgaaagcataccaaatttctcaatttgatcaaccaatcggacatgatggttggattgaaattgaagtcgaaggcaaaaagaaaaaaattcgcattgaacgtgtgcatttagaagaagatgctgggaaaaatattcacggcacagatggctattcttatgtagacttgaatcgtcaaggcacgcctttaattgaaatcgtttctgaagcagacatgcgttcaccagaagaagcgtatgcttatttagaagcgttgcgttcaattatccaatttacagaagtttctgatgtgaaaatggaagaaggttctatgcgttgtgatgccaatatttctttacgtccgtatggtcaagaagaatttggtactaaagcggaattaaagaacttgaactctatgaactttgtaaaaaaaggtttagcttatgaagaaaaacgccaggccaaagtcctattatctggtggcgaaattcaacaagaaacacgccgctttgatgaagcaactagtacaacgttgcttatgcgtgttaaagaaggctcaagtgactaccgttacttcccagagccagatgttcctcgtttttcaattgatgatgaatggattgaaaaagttcgcgctagtttgccagaaatgccagcctcacgtcgtgcccgttatatcagtgaattagggttacctgaatacgacgcaatggtcttgactttaacgaaagaaatgtcagatttctttgaagcaactttagcaaacggtgcagatgcgaaacaagcatcaaactggttaatgggcgaagtttctgcttacttaaacagtgaaaaagttgaattagccgatactaaactgacaccagaaaatctagcgggtatgattactttgattaacgatggcacaatcagctcgaaaattgcgaagaaagtgttcaaagagttaattgaaaacggtggagatgctaaagaagttgtcgaagcaaaaggccttgttcaattatctgatccagcgcaattattaccaatgattaacgaagttttagacaacaaccaacaatcaattgatgactttaaaaacggaaaagaccgtgcagttggtttccttgttggacaaattatgaaagcaactcgtggacaagcaaacccaggtgtggttaacaagttattgcaagaagagctttcaaaacga

SEQ ID NO: 6228 - DNA, 654 bp, Enterococcus faecalis
gtgggtcaaaaagtacatccaattggaatgcgtgtaggcatcatccgcgactgggatgcgaaatggtatgctgaaaaagagtatgccgaattcttacacgaagatttaagaatccgtaaatttatcgcaacaaaacttgctgatgctgctgtatctacaattgaaatcgaacgcgctgcaaaccgtgttaacatttcaattcacacagctaaaccaggtatggttatcggtaaaggcggatctgaagtcgaaaacctaagaaaagaattaaacaaattaactggcaaacgagttcacatcaacatcgttgaaatcaaaaaaccagatttagatgcaaaattagtaggcgaaggaattgcacgtcaattagaaaaccgtgttgctttccgtcgtgctcaaaaacaagccatccaacgcgcaatgcgtgctggcgctaaaggaatcaaaactcaagtatcaggtcgtctaaacggtgcggatatcgctcgttcagaaggatactctgaaggaactgtaccacttcacacattacgtgcggacattgattacgcatgggaagaagcggacactacttacggaaaactaggagttaaagtgtggatctatcgtggagaaattcttccaacgaaaaaaaacactgagaaaggagggaaa

SEQ ID NO: 6229 - DNA, 381 bp, Enterococcus faecalis
gtgagttaccgtaaattaggacgcacatcaagccaacgtaaagctatgctacgtgatattacaactgatttaatcatcaacgaacgcatcgtaactactgaagctcgtgcgaaagaagtacgttcaactgtagaaaaaatgattactttaggtaaacgtggagatcttcatgcacgtcgtcaagcagctactttcgttcgtaatgaagttgctagtgttcgtgaagaagatgagtctatcgttgttgaatcagctttacaaaagctatttaacgatttaggacctcgtttcgcggaacgccaaggtggttacactcgtatcttgaagacagaaccaagacgcggcgatgcagcaccaatggtagttatcgaatttgttaaa

SEQ ID NO: 6230 - DNA, 936 bp, Enterococcus faecalis
atgattgaatttgaaaaaccaagaatcgaaaaaattgatgaaaatagagattatggtaagttcgtcgttgaaccattagaacgcggttacggaactactttaggtaactctctacgtcgtattttattgtcttctttaccaggagctgcaattacgaatattcaaatcgatggtgttttacacgaattctcaaccattccaggtgtacgagaagacgtaacacaaattattttgaatattaaaggcttagcattgaaattatatgctgaagaagagaaaacccttgagatcgatattacaggacccgctaccgtgactgccggcgatattatcgtggacagtgatgttgagatcctaaataaagatttagttatctgtagtgttgctgaaggagctactttccatgctcgcttaacagtgaaacctggtcgtggctatgttcaagcagacgaaaacaaaaaagaagatatgccaatcggtgtacttccagttgattccatctacacacccgttcttcgtgttaactaccaagtagaaaatacacgtgttggtcgtcgtgatgatttcgacaaattaacaatggaaatatggacagatggttcaatcattcctcaagaagcactaagtttagctgcgaaaatcatgactgagcatttagatatctttgtaaaccttactgacgaagcgaaaaacgctgaaatcatggtggaaaaagaagaaactcaaaaagagaaaatgctagaaatgacgattgaagaacttgatttatcagttcgttcatataactgtttaaaacgtgcaggcattaatactgtacaagaacttacaaacaaatctgaaccagaaatgatcaaagtacgtaatttaggtcgtaaatctcttgaagaagtaaaacttaaattgcatgatctagggttaggattacgtaaggacgat

SEQ ID NO: 6231 - DNA, 621 bp, Enterococcus faecalis
atgccgaatgtagcattattcaaacaagatggaactcaaaacggtgaaatcactttaaatgaagaaatcttcggaatcgaacctaatgaaagtgttgtctatgatgcaatcatcatgcaacgtgcttcattaagacaaggaacacacgcagttaaaaaccgtagcgctgttcgtggcggtggccgcaaaccatggcgtcaaaaaggaactggtcgtgctcgtcaaggttcaatccgttcaccacaatggcgtggaggtggcgtagtctttggaccaacaccgcgttcatacagctacaaatttcctaaaaaagttcgtcgcttagcaatgaaatctgtattatcagacaaagttgctgaaaataacttggtagcagtagaaggtttaagcttcgatgcaccaaaaacaaaagaattcaaacaagttcttgctaacttgtctatcgatactaaagtattagttgttttagaaaatggtaacgactttgcagctttatcagctcgtaacttaccaaacgtttctgtagtaacttctgataacgttagtgtgttagatgttgtgtcagctaacaaagtcttggcaacacaaacagctcttactcaaattgaggaggtgcttgca

SEQ ID NO: 6232 - DNA, 420 bp, Enterococcus faecalis
gtggctaaaaaagtagaaaaaatcgttaaattacaaattcctgcggggaaagcaacaccagctccaccagtaggtccagcgttaggtcaagcaggtatcaacatcatgggattcactaaagaattcaatgctcgtacagctgaccaagcaggcttaattattccagtagtaatctctgtatatgaagatcgttcatttacattcattactaaaacaccacctgctgcagtcttattgaaaaaagctgcaaaaatcgaaaaaggttcaggtgaaccaaacaaaactaaagttgcaacagtttcaagcgatcaagtgaaagaaatcgctgaacttaaaatggcagacctaaacgccgctgacgttgaagcagcaatgcgcatggttgcaggaactgcacgaagcatgggtatcatcgtagaa

SEQ ID NO: 6233 - DNA, 537 bp, Enterococcus faecalis
atgaaccgcctgaaagaaaaatatattaaagaagtaacaccatcattggtggaaaaatttaattacagctcagttatgcaaacacctaaagttgataaaatcgttatcaacatgggtgtgggtgatgcagtatcaaatgctaaaaacttagacaaagctgttgaagaattagcattaatcactggtcaaaaaccacttatcacaaaagctaaaaaatctatcgctggattccgtttacgtgaaggaatgccaatcggtgcgaaagtaacgctacgcggcgaaagaatgtacgaatttttagataaattagtaacagtttctttacctcgtgtacgtgacttccacggtgtcagcaaaaaagctttcgatggtcgtggtaactatactttaggtattaaagaacaattaatcttcccagaagttgattatgatttagtagataaagtacgcggtatggacatcgtaattgttacaacagcgaacactgacgaagagtctcgcgaattgttggcacaattaggtatgccattccaaaaa

SEQ ID NO: 6234 - DNA, 396 bp, Enterococcus faecalis
atggtcatgacagatccaattgcagattttctaactcgcattcgtaatgcgaacatggttaaacatgaaactttagaagtacctgcttcaaaaatcaaacgtgatatcgcagaaatcctgaaacgtgaaggatttatccgcgacgtagaatacatcgaagatgacaaacaaggcgtaatccgtgttttcctaaaatatggtaaaaacgaagaacgtgttatcacaaacttaaaacgtatttctaaaccaggtttacgtgcatacgtaaaagctgacgaagtaccaaaagtattaaacggtctaggaattgcaatcatctctacatcagagggtgtaattactgacaaagaagctagagcgaaaaatatcggcggcgaagtaatcgcctacgtatgg

SEQ ID NO: 6235 - DNA, 183 bp, Enterococcus faecalis
gtggctaaaaaatcaatgattgctaaaaacaaacgtcctgctaaacattcaacacaagcttatactcgttgtgaacgttgtggacgtccacattcagtttatcgtaaatttcatctttgccgtatttgcttccgcgaacttgcctataaaggtcaaattcccggcgtgaagaaagctagctgg

SEQ ID NO: 6236 - DNA, 267 bp, Enterococcus faecalis
atggcaatttcacaagaaagaaaaaacgaaatcattaaagaatacgcacgtcatgaaggagatactggttctccagaagtacaaattgctgtcttaactgaagacattaaccaattgaacgaacatgcgcgtacacacaaaaaagatcaccattcttaccgtggtttaatgaaaaaaatcggtcaccgtcgtaacttgttagcttacttacgtaaaactgacatccaacgttaccgcgaattgatccaacgtttaggattacgtcgt

SEQ ID NO: 6237 - DNA, 2112 bp, Enterococcus faecalis
atgacagaaaaacaagtctttaaaacaacttggggcggccgcccactagaagtagaaatcggccaattagccaaacaagccaatggagctgtcttagtacgttacggcgatacggtcgttttaagtgctgctgttgcctctaaagaagcaaaagatgtagactttttcccattaactgtaaactatgaagaaaaaatgtatgcggtaggaaaaattcctggcggcttcattaaacgtgaaggtcgtccaagtgaacgtgcgacattaaccgctcgtttaatcgaccgtcctattcgtccaatgttctcagaaggcttccgtaacgaagtccaaatcacgaacatcgttatgagtgtggagcaagactgtacaccagaaatggctgcaatgtttgggtcttccttagcgttagcaatttcagatattccgtttgatggaccaattgctggtgttgacgttggtcgtattaatggcgaatatgttttaaatccaacggtagaacaagcggaacaaacagatattgaattaactgttgctggaacaaaagaagccatcaatatggttgaaagtggtgccaaagaagtatcagaagaagatatgttaggtgccttacttttcggttttgatgccattaaagaactagtggcgttccaagaagaaatcgttgccgctgtaggtaaaccaaagatggacgtggacttattacaagtggacgctgatcttaaaaaagaaatttttgatgcgtactacaatacaatgaaaacagccgtaatgacggaagaaaaattagcacgtgaagttgaaattgacaaagtaaaagatacagtcaaagaagtttacgctgaaaaattttcggaacacgaagaagaagcacaattactaaaagaagtgaaacaaattgcggaagatcttgaaaaagatgtcgtacgtgagttaatcacgatcgataagattcgcccggatggccgtaaattagacgaaattcgtcatttatcatcagaagtaagtattttaccacgtgtgcatggttctggcttatttactcggggtcaaacacaagctttatccgtttgtacattagcgcctttaggggaacatcaaattatcgatgggttgggtgtccaagatagcaaacgtttcatccatcattataacttcccgcaattctctgttggttcaacaggacgcgcgggctcaccaggtcgtcgtgaaatcggtcacggtgcgttaggtgaacgtgccttagcacaaattattccatcagaagaagacttcccttacacaatccgcttagtagcagaagtgttagaatcaaatggttcttcttcacaagcaagtatttgcgcgggaacattagcattaatggatgcgggtgtgccaattaaagcgccagttgcaggtattgcaatgggtcttgttagtgatggcgaaaactatacaatcttaacagatattcaaggtttagaagaccaccttggcgatatggactttaaagtagcaggaacgaaagacggaatcactgctttacaaatggacatcaaaatccaaggaattacagaacaaattttaacggaagcattagaccaagcgaagaaagcacggatggaaattctagaagaattaacaacaacgattgctgctcctcgtgaagaattaagtcaatatgcaccgaaaattgaaatgattcaaattaaaccagcgaaaattaaagatgtcattggtaaaggtggcgaaacaatcaacagcattattgatgaaaccggcgttaagattgatatcgatcaagacggtaacgtaagtattgcttcatcagatgctgaaatgattaaaaaagccatcaagattattgaagaattaaccaaagaagttgaagtcggtcaagtttacttagcaaaagttgtccgcattgaaaaatttggtgcgtttgttaacctaattaaaggcaaagatggcttgatccatatttctcaattagcaaacgaacgtgtgaacaacgttgaagatgtcgtgaaattaggcgacgaagtccttgtcaaagtaactgaaattgacaaacaaggccgtgtcaacgtgtcaagaaaagcgttattaaacgaagaaaacaaagaaaaa

SEQ ID NO: 6238 - DNA, 90 bp, Enterococcus faecalis
ttgtcactattgaaggtcctctttggaaagtttttaggaactactaaccaaatgaaagagcagcaacgacttgttactttttcatttgtt

SEQ ID NO: 6239 - DNA, 774 bp, Enterococcus faecalis
atgaaagaaattacatcaacgaaaaataaccaattaaaagaatggaaaaaattacacaaaaagaagtaccgagaagaactgaaccaatatataatagaaggatttcatttagttgaagaagctgtgaaggccaatgccgatgtccagtggattttgtttaaccaaagaggtcaacaagaatggggaacttggttagctgaacaagaaacagaaaaattaatttttgttagtgatgaggttttaaatagcttgtcggagctgccaacttcacaaggaattttggcaattgtcaccttggaaacgcaacaagagcagtcgctttcttttaaaggtggttggttacttttagataatatccaagaccctggtaatgttggtacgatgattcgcacagctgatgcagcgggtttagcaggcgtgattttaggtaagggcacagcagatatttacaatacaaaagtgttgcgctcaatgcagggaagccactatcatttaccagttctccaacgagagttgactgaagtggttcaggcattcaagaagcaaggtctaccagttttcggtacagaactaaatgaagctgcgattgcttattatgaacaagaggcagtggaaaattatgcgttgattttaggcaatgaaggtagcggggtttcgccagaattgttagcagaaaccacgaaaaatctttatattccaatgaaaggtcaagcagaatcattgaatgtcgctatcgcagcgggcgtgttaatgttttattttgaaaataatcaa

SEQ ID NO: 6240 - DNA, 828 bp, Enterococcus faecalis
gtggcgattaaaaagtacaaacctaccacaaatggccgtcgtaacatgacgagttctgatttcgctgaaatcacaacttcaacaccagaaaaatcattgttacagccattaaaaaacaatgccggtcgtaacaacaacggtcgcattacggttcgtcaccaaggtggcggtcacaaacgtcaataccgtgtgattgacttcaaacgtaataaagataacgtcgcagcggttgttaaaacgatcgagtacgatccaaaccgttctgctaacatcgcgttagttcattacgaagacggggttaaggcatacatcttagcaccaaaaggattagaagtaggcatgcgcctagtatctggtccagaagcagatattaaagtaggtaacgcattaccattggaaaacattccagttggtacagttatccacaacattgaaatgaaacctggtaaaggtggacaattaatccgttcagctggaacaagcgcgcaagtacttggtaaagaaggcaaatacgtattaatccgcttaaactctggcgaagttcgtatgatcttagcaacttgccgtgcaacaatcggttcagttggtaacgaacaacacgaattaatcaacattggtaaagctggccgctctcgttggatgcgtaaacgcccaactgttcgtggtagcgtaatgaaccctaacgatcacccacacggtggtggtgaaggtaaaacaccaattggacgtaaagcgccagtatctccatggggtcaaccagcaattggatacaaaacacgtaataaaaaagctaaatcagacaaacttatcgttcgtcgtcgtactaaa

SEQ ID NO: 6241 - DNA, 276 bp, Enterococcus faecalis
atgggtcgtagtttaaaaaaaggacctttcgtcgatgatcatttgatgaaaaaggtcgaagcacaacaaggtgccgaaaagaaaaaagtaattaaaacttggtctcgccgctctacaatttttccatcattcgtaggtttcacaatcgctgtatatgatggacggaaacatgtccctgtttacattcaagaagacatggtaggacataaattaggtgaatttgcaccaactagaacttatcgtggccacgttgctgacgataaaaaaactaaacgc

SEQ ID NO: 6242 - DNA, 1197 bp, Enterococcus faecalis
atgagcaaagaaatgttaaatgcattagacgtattagaagctgaaaaagggattcctaaagatacggtgattgaagcgttacaagcagctttagtttctgcatataaaagacattatggacaagcaagcaacgtcgaagttgaatttgaaccaaaaaaaggcaatattcatgtgtatgctgtcaaagaagtaacagaagaagtatttgattcacaattggaagtttcattaaaagatgccgttgcattaaatggtgcatatgaaatcggcgacaaaattcgttttgaagttacgccaaaagactttggccgcattgctgcccaaacagcaaagcaagtaattttacaacgtgtccgtgaagcagaaagaacaattatttataatgaatttagcgaatatgaaaatgacatcatgcaaggaattgttgaacgtcaagatcgtcgttatatttatgtaaacttaggtaaaatcgaagcagtcttatcaaaacaagatcaaatgccaaatgaattttaccaaccgcatgatcggattaaagtttacgtatcacgtgttgaaaacacatcaaaaggcccacaagtttttgtaagccgtagtcatccagatttactaaaacgtctttttgaacaagaaattccagaagtttatgatggaattgttgaaatcgtaagcgtcgctcgtgaagctggcgatcgttcaaaagtagccgttcgttcaacagatcctaatattgacccagtgggtacctgtgttggtccaaaaggccaacgtgtccaagcgattgtgaatgaattaaaaggcgaaaatatggatattgtggaatggaacgaagatccagctatttatattagtaatgccttgaatccagctcaagtattagatgttatttttgatccagaaaatagcaaagcatgtacagttgttgtacctgattatcaattgtcattagcaattggtaaacgtggtcaaaatgcgcgcttagctgctaaattaacgggccataaaattgatatcaaatcagaatctgatatggctgaattttatgaacaacaagccaatcaagaagttgccgaagtggcagaagaaatggatgaagcaattatccattcagatatgacggcagatgattacgaaaacttggctgctgaagaagcagttgttgaagcagaaattacagaagaattacctgaacaagaa

SEQ ID NO: 6243 - DNA, 534 bp, Enterococcus faecalis
gtgagccgtattggtaataaagttgttgttcttcctgctggtgttgaaatcaagcaagacggaaacaacattacagttaaaggacctaaaggtgaattaacacgcgaattttcttctgatatcaaaatgaacatcgaaggaaacgaagtgacattcattcgtccaaacgattcaaaagaaatgaaaacaatccacggaacaactcgtgcaaacttcaacaacatggttgttggtgtttctgaaggtttccaaaaagcacttgaacttatcggggtcggataccgtgcccaagtacaaggcaacaaattaactttaaacgttggttattctcatcctgtcgaaatgacagcaccagaaggcgtaacatttgaagtacctgcgaacacacaagttatcgttaaaggcatcaacaaagaagttgttggtgaattagctgctaacatccgtggcgttcgtcctccagaaccttataaaggcaaagggattcgctatgttggtgaatttgtacgccgtaaagaaggtaaaactggtaaa

SEQ ID NO: 6244 - DNA, 390 bp, Enterococcus faecalis
ttggcacaagtacaatatagcggcacaggccgtcgtaaaaatgcagttgcccgcgtacgcttagtaccaggtactggtaaaattactgtaaacaaaaaagacgtagaagaatatattccacatgctgacttgcgtgaagttatcaaccaaccatttggcgtaactgaaacaaaaggcgcttacgatgtaatcgtaaacgtaaacggtggtggctatgctggacaatcaggagctatccgtcacggaatcgctcgtgcattgttacaagtagatcctgacttccgttctgctttaaaacgcgctgggttacttactcgtgacgcacgtatggttgaacgtaaaaaaccaggtcttaagaaagcccgtaaagcttcacagttctcaaaacgt

SEQ ID NO: 6245 - DNA, 237 bp, Enterococcus faecalis
atggcacaacaaagaagaggcggacgtaaacgtcggaaagtcgactatatcgcagcaaaccacatcgaatacatcgactataaagatactgaattgttaaaacgattcatttcagaacgtggcaaaattttaccacgtcgtgttacaggtactggcgctaaaaaccaacgtaaattaacgattgctattaaacgcgcacgtatcatgggattattaccattcgttagtgacgaacaa

SEQ ID NO: 6246 - DNA, 564 bp, Enterococcus faecalis
atgattaataacgttgtattagtcggaagattgacaaaagatcctgacttacgttacaccgctagtggttcagctgttgcgacctttacacttgctgtaaaccgtaactttacgaatcaaaatggtgatcgtgaagcagactttatcaactgtgtgatttggcgtaaacccgcagaaacaatggctaattatgcccgtaaaggtacattattaggtgttgtcggaagaattcaaactcgtaactacgagaaccaacaaggtcaacgtgtctacgtaactgaagtggtttgtgaaaacttccaattgttagaatctcgttctgcttcagaacaaagaggaactggcggcggtagctttaataacaacgaaaatggttatcaatcacaaaatcgtagctttggtaataacaatgccagttctggatttaataacaacaacaatagtttcaatccatcatcttctcagtcgcaaaacaataacggtatgcctgatttcgataaagattctgatccatttggtggctcaggttcatctatcgacatttcagatgatgatttaccattc

SEQ ID NO: 6247 - DNA, 1389 bp, Enterococcus faecalis
atgtctattttcagaaaaaaagaaatcactgtgcctgtcaatgacagtggtgggatgaaaaaaaatcttaagacgatggacttaatttttctaggaattggggctgtagtaggaacagggatttttgttgtgacaggtgtcgcagcggaacgctatgcaggtccagggctcgtcttatcatttctggtagcagcagccgcgattattttatctggtttatgctatgcagaatttgcatcacgtattccggtcattggtgggccgtatgcctacatgtatgtggtctttggagaaattgtggcttggatgactggttggatgattatttgtgagtttttcttggcggtttcatccgttgcttcaggttggtcaggctatgtccatggctttttggatagcttaggtttttctttgccgcaagcgttaagtggcgcttataatccaacaaatggtacatatattgatttgattgccatgttggtcgttgtagccgtaactttttgggtatctttagaagcgaaaacagcgttacgtttaaataacttaatggttttcgtgaagtttgggattattttattatttgttctcgtgggaatcttttatgtgaaaccaacgaactggcaaccatttattccttatggtttttcaggcgttttcagtggtgctgctttagttttctttgcctttctagggtttgatgcggtcagcatggccgcggaggaagtgaagaatccgaaaaaagatattccaaaagggattattggttccattattatttcaacattgttatatattgttgttacgttagttttaactgggattgttccatttacggatttaggggtcaaggatccggtggcttttgcgatgcgcttcattaatcatggcgcaattgcgacaatcatttcagttggtgctattttaaccttattaacagtgacgattgcgatgatgtacagtttagcccgtgtgatttatgcgattagtaaagatggattattgccgcagtttatgagcaaaatcgatgagaagcggcacacacctaagaatgcaacctatgtagctggatttttagcaatggtttttgctgggattgttccaatggagatgttggctgaacttacaaatatcgtgacactcttttatctgatgtttctcgctttaggaattatcaaattacggacaatgaaaggagaaccgcaagcaggtgaatttaaagtaccacttgtgccggttctaccattaatttcaatcgtggtttgcgccgctctgatgttccaattgtctttagctacttggcaagtatttggcgtagccgtagtgattggtttggctatttatttcttttatggacgtcaccatagtatcgttcgtttcgagacaaaagaa

SEQ ID NO: 6248 - DNA, 354 bp, Enterococcus faecalis
gtgattacaaaaccagataaaaacaaaacacgtcaaaagagacatcgtcgtgtacgtaacaaaatctctggtactgctgagtgcccacgcttgaacattttccgttctaacaaaaacatctacgcgcaagtcattgatgacgtagcgggtgtgacgctagcaagtgcctctgccttggataaagaaatttcaggtggaacaaaaacagaaacagctgcagctgttggtaaactagttgctgaacgtgccgctgaaaaaggcatcaaaaaagtagtcttcgaccgtggtggatacctttaccatggccgcgtgcaagctttagctgaagctgctcgtgaaaatggactagaattt

SEQ ID NO: 6249 - DNA, 294 bp, Enterococcus faecalis
gtgcagactatgttattgactatgaatttacaattatttgcccataaaaaaggtggcggttctacatcaaacggccgtgactctgaatctaaacgattaggcgctaaaagtgctgatggccaaacagttacaggtggttcaattttataccgtcaacgcggaactaaaatttatccaggtgtgaacgttggaatcggtggcgacgatacgttatttgcaaaagttgacggtgtggtacgtttcgaacgtaaaggccgcgacaaaaaacaagtatcagtttatccagtagctaac

SEQ ID NO: 6250 - DNA, 342 bp, Enterococcus faecalis
atgattaaaggttcttttaaacgaacaggctccggccgaatcgtttcattcgaattaaccgggcatgctgaagcaggtccttatggcagcgatgtggtttgcgcggcagtttctgccttagcaattagcacagtcaatgggattgatgccttagcaggttttgaaccgattgtggaagttgatgatgtagaaggtggctacctttatgtcgagatgttaacaactgtcaatcaggaacaaaaaaatattgcccaaattctattagaaaatcttttattaggtttacaatcaatagagaacgaaaatactgaatttattcaaataaaaacaatcactgagaaa

SEQ ID NO: 6251 - DNA, 975 bp, Enterococcus faecalis
atgaaagtttttgattatgaagatgtccaattaattcccaataaatgtatcgtgaatagtcgttctgaatgtgatactacagtaactttaggaaaacattcgtttaaaatgcctgtcgttccagcgaacatgcaaacaattattgatgaaacgattgcggaaacccttgctgaaaatggttatttttatatcatgcatcggtttgatgaagaggcgcgagtgccatttattaaaaaaatgcaacaaaagggcttgatcacgtcaattagtgtgggtgtgaaagaaggggaatacgcttttgttgaaacgttagcccgagaaggtttagttcctgactatgtgacaattgatatcgcccatggtcattcaaatgcggtgattaatatgattcaacacttgaaaaaatctttaccagaaacgttcgttattgctggcaatgttggaacaccagaagccgttcgcgaattagaaaacgctggagccgatgccaccaaagtggggattggaccaggaaaagtttgtattactaagattaagactggctttgggacaggtggctggcagttagcggctttacgttggtgtgccaaagctgctcggaaaccaattattgcagatggtggaattcggacccatggagacattgcaaaatctgtgcgttttggggcaactatggtcatgattggttcattatttgctggacatgaagaatcaccaggtgaaacaaaagtggaagatggtgttgtttacaaagaatactttggtagcgcctctgaattccaaaaaggcgaaaagaaaaacgttgaaggcaaaaaaatctggttacgccataaagggaagttggcagatactttagtcgaaatgcaacaagatttacaatcttccatttcatacgcgggaggtcgcgatttagaagcgattcgtaaagttgattatgtgattgtaaaaaattctatttttaatggtgataccatt

SEQ ID NO: 6252 - DNA, 1245 bp, Enterococcus faecalis
atgaaagtaatgacagaacgaacattgaagcgtcccgaggtgttggctccagccgggacgctagaaaaactaaaagtcgcaattcgttacggtgccgatgccgtttatatcggagggaatgcctacggtctgcgtagccgcgcaggaaatttcacgccagaagaaatggcggaaggcgtagcctttgcccgcgaacataatgcgaaagtttatgtcgctgccaatatggtcactcatgaaggaaaccaggaaggggcaggagcgtttttcagagaattgcgagacatcggaatttcagctgtgattgtttccgatccagctttaatcgaaatttgtgcgacagaagcaccaggtttacccatccatttatcgacacaagcttcagcaaccaactatgaaacattagaattttggaaaaatgaaggcttagaacgtgtggttttagcgcgcgaagtttcaatggaggaagttgcagcgattcgtgaaaatacggacattgaaattgaagcctttattcatggagcaatgtgtatttcatattcaggacgttgtactttatccaaccatatgtcgatgcgggatgccaatcgtggcggttgctctcaatcttgtcgttggaaatacgagttatttgatatgccttttgggacagaacgtcggagcaaaaccagcgaaggggaagttgaagaagagttttcaatgagcgccgtagatatgtctatgattgaacatattccagaattaattgaaaatggtgtcgatagttttaaaattgaaggccgcatgaaatccattcactatgtttcgacagtcgctaatgtgtataaaaaagccgtcgattcttacatggaagaccctgaaaactatgtctgccaacaagagtggattgatgaattatggaaagtagcacaacgtgaattagcaactggtttttattacaatacaccaagtgaaaatgaacaattattcggcgaacgtcgtaaaattccgcaatataaatttgttggtgaagtgattgcgtacaatgaaaagacgcaagtcgcaacgattcgtcaacggaaccttttcagtgtcggcgatgaaattgaattttatggtcctgggtttacccatttccaccaaaccgttaaagagatgtataatgaagacggtgaagcgatcgatcgggcacctaatcccatgatgttattaacaatggaagtgacgcaacctgttgcagtcggcgatatgattcgtaagaaaaaa

SEQ ID NO: 6253 - DNA, 3612 bp, Enterococcus faecalis
ttggctggacacgtagtaaaatacggaaagcatcgcgaacgtagaagtttcgcacgtatcagtgaagtattggaattaccaaatttaattgaaatccaaacagactcttatcaatggtttttagatgagggacttcgtgaaatgtttgaagacattttaccaattgatgatttccaaggaaacttatccttagaatttgttgactatgaattaaaagaaccaaagtacacagtagaagaagcccgcgcacatgatgccaactattctgcgccattacatgtaacattacgtttaaccaaccgtgaaacaggtgaaattaaatcccaagaagtattcttcggcgatttcccattaatgacagaaatgggtaccttcatcatcaacggggcagaacgtgttatcgtttcccaattagttcgttctccaggtgtttatttccatggaaaagtggacaaaaacggcaaagaaggttttggctcaacagtcattcctaaccgtggtgcatggttagaaatggaaacagatgcgaaagacatttcttatgttcggattgaccgcacacgtaaaattcctttaactgtgttagttcgtgctttaggtttcggttcagatgataccatcttcgaaattttcggcgacagcgaaagcttacgcaacacaattgaaaaagatttacacaaaaatgcaagtgattctcgtacagaagaaggcttgaaagacatttatgaacgtcttcgcccaggcgaaccaaaaacagcagatagctcacgtagcttgttaactgcacgtttctttgatccaaaacgttatgatttggcaaacgttggtcgctacaaagttaacaaaaaattagacttaaaaacacgtctattaaacttaaccttagcggaaacgctagttgatccagaaactggtgaaatcattgtcgaaaaaggcacggttttaacacaccaaatcatggaaacattaggcgaatacattgacaacggcttaaacagcgtaacttactatccaagtgaagatgctgtagtaactgaaccaatgacaatccaagtgattcaagttctttcaccaaaagatcctgaacgtatcgtaaatgtgattggtaacggctatccagacgacagcgtaaaaacagttcgtccagcagatatcgttgcttcaatgagctacttcttcaacttaatggaagatatcggcaatgtcgatgacatcgaccacttaggtaatcgtcgtatccgttcagtaggtgaattattacaaaaccaattccgtattggcttagcccgtatggaacgtgtggttcgtgaaagaatgtctattcaagacacagaaacattgacaccacaacaattaatcaacatccgtccagtggtagcaagtatcaaagaattctttggttcttcacagttatcacagttcatggaccaaacaaacccattaggtgagttaacccataaacgtcgtctatcagccttagggcctggtggtttgactcgtgaccgtgccggttatgaagttcgtgacgttcactactctcactatggtcgtatgtgtccaattgaaacgcctgagggaccaaatatcgggttgatcaatagtttatctagttacgcaaaagtgaataaatttggtttcatcgaaacgccttatcgccgtgttgatcgtgcgacaggccgtgttactgatcaagtagattacttaacagcagacatcgaagaccattatatcgtagcgcaagcgaactcacttttaaatgaagatggcacatttgccaatgatgttgttatggcgcgtctacaaagtgaaaacttagaagttgccgtagacaaagttgactacatggacgtttcaccaaaacaagtagtcgcagtcgcaacagcatgtattcctttcttagaaaacgatgactccaaccgtgccttgatgggtgccaacatgcagcgtcaagcggtgccgttaattcaaccacgctctccgtgggtaggtacagggatggaatataaatcagcccatgactcaggtgctgctttactatgtaaacatgacggtgtcgtagaattcgtcgatgcaaaagaaattcgcgttcgtcgcgacaatggcgcattagacaaatatatggttactaaattccgtcgttcaaattcaggaacaagctacaaccaacgcccaattgttcacttaggtgaaaaagttgaaaaaggcgatactttagcggatggaccttctatggaagaaggcgaaatggctttagggcaaaacgtcttagttgccttcatgacatgggaaggttacaactacgaggatgccattatcatgagccgtcgtttagttaaagacgatgtttacacttctgtgcatattgaagaatatgaatcagaagcacgtgatacaaaattaggacctgaagaaattacccgtgaaattccaaacgttggggaagacgcattgaaagacttagacgaaatggggattatccgcattggtgctgaagttcaagatggcgacttactagttggtaaagtcacacctaaaggggtcacagaattatctgcagaagaacgtttattacacgcaatcttcggggaaaaagcccgcgaagttcgtgacacgtctctccgtgtacctcacggtggcggcggtatcgttcacgatgtgaaaatctttactcgtgaagctggcgatgaattatcaccaggtgtcaacatgttagttcgtgtctatatcgttcaaaaacgtaaaattcacgaaggagataaaatggcgggacgtcacggaaataaaggggttgtttcccgtattatgccggaagaagatatgccattcttacctgacggaacacctgttgatatcatgttgaacccattaggggtaccttctcgtatgaatatcggacaagtacttgaattacacttaggtatggctgctcgccaattaggcattcacgtcgcaacacctgttttcgatggggcaaccgatgaagacgtttgggaaactgttcgtgaagctggtatggctagcgatgctaaaacagttctttacgatggacgtacaggtgaaccatttgataaccgtatttccgttggtgtcatgtatatgattaaattagcccacatggttgatgacaaattgcatgctcgttcaatcggaccttactctcttgttacgcaacaaccgttgggtggtaaagctcaattcggtggacaacgtttcggggaaatggaagtttgggcactggaagcttacggtgctgcttacacattacaagaaatcttaacttacaaatctgatgacgttgtcggacgtgtgaaaacatacgaagccatcgttaaaggtgaaccaattccaaaaccaggtgtgcctgaatcattccgagtattagtgaaagaattacaatcacttggtttagacatgcgtgtcttggacattgaggaagctgagattgagttacgcgatatggacgatgacgatgatgatttaatcaccgttgacgcactaaccaaatttgcggaacaacaatcagcgaaacagctggaaaaagaagcagaatcagtcgtgaaagaagaagcacaagacgttgttcaagaaattgaaacagccgaagacagagac

SEQ ID NO: 6254 - DNA, 2571 bp, Enterococcus faecalis
atgtattcaattattgtaaatggtcaaagtgaaacctgtgaaacaaacaaaaaattaatggactttttgcgggaggatctgggcctaactggaacaaaagatggctgtaaccaaggctcttgcggtgcatgtacggtgttagtaaatggaaaggcttccaaagcatgtttgtttactctagaaaaattagctggtaaagaagtcacgacaatcgaaggtttaagccaacggcaaaaagatgtctatgcctatgcgtttgcaaaaacgggtgcagttcagtgcgggtattgcatccctgggatggttatttcggcacaaggattattgaacaagaaacccgaacccacaaaagaagacattcagaaagctatacgaggaaacatttgtcgttgtacaggatatgtgaaaataatagaagccattcagttagctgctaaaatgttttgtgaagaagcgagcattccagaagaacattcaaatggtaaattaggggaagacttccaacgggtcgatgcagtggagaaaaccttaggaacagggatttatgtagatgacattgacatagaaggaatgcttcatgcatctgctttgcggagtgcctatcctcgcgcaaaagttctatcaatcgatagtacccaagcattggcgcatcctgactgtgtggctgtgttcacagctaaagacgttccaggaaataataaaattggtcatttagaatttatttccgattgggatgtaatgattccagaaggagaaataacacggtatgttggggatgcagtagcactcgttgtttcaaaaagaaaagaaaccttaccagagataaaaaatttagtggaagttgattacgaagaaatgataccgcttacttcttgtgaagctgctttagcagaaggtgcaccagctattcatgaaaagggcaatatcttgtctcatgaacacttggtacgtggcaatgcagaggaagtgttagaaaattctgcgtttgtagtgacagaacattattccgtaccaattaatgaacatgcctttatggagcccgaatgtgcgattgcacaacctgaaggtgagggcattttactctttagtgcgggtcaaagtatctatgatgaacaacgggaagtggctcggatgctagggctagacaaggaaaaaattcatgttcaatcaaaacttgttggtggtggttttggtggaaaagaagacatgagtgttcagcatcatgcatccttagccgcttggttattgaagaaaccagtaaaagtactgctaagccgtgaagaaagtttgatggttcatcccaaacgccatggcatggaaatggactttacgaccggctgtgatgaagaaggcaatttaactgcaatgaaagcagtgatttatgcggatactggggcctatgcttctttaggaggaccggtattgcaacgggcttgtacacatgcggcaggtccctacaagtatcaaacgattgatgtggaagggtttgctgtatatactaataatccgccagcaggtgcatttcgcggatttggtgtttgccaaacggcttttgcaattgaaagtaatttaaacttgttagcagaaaaagtcggactatcaccatgggaaatacgctttaaaaatgccgtcgccccaggagatactttaccgaatggacaattggtctcgaaaaatgcagcgttaaaagaagccttgttagcggttaaagacgtctatgaacaagcggaagttgctggaatttctagtttctttaaaaatagtggcgtgggtgtggggctacctgatacagggcgttgtattatttctgttgaagaaggaaaaatacatgtccgcacaagtgctgcttgtatcggtcaagggatggcaaccgttacgacgcaaattgcctgtgaaacattaaatttaccaccagaaatgattgttgcggaagcccctgatacaagaagaacaccgaattcaggaacgacaacggcttcgaggcagtcactcttcacaggagaagcaactagaagagcggcaatgcaattacggtatgagcttgatatgggacgtgctttaagcgatttggaaggcgaagaattttatggggaatattcagcgaaaacggatccattaattaatgataaaaaaagtccagttagtcatgctggttatggttatgctgctgaagtagctattctagatgacaaaggaaaagtagctaaatttgtggctgcgtatgatatggggcaagtggtgaatccacgagctgctgaaggtcaaattgaaggtgggattgcaatgggcatggggtatgctttaactgaaaaatttgccttagaagaaggctatgttaaagcaaaatatgcaacgctaggattagtgaacgccactcaagtaccaccaatcgaaacaattttggttcatgctgacaatcttcacgaaggtttagcttatggaattaaaggcgtaggtgagttagcaacgatccctaccgcaccagctttagcaggcgcatattttgccttggatggtcagctccgaccaagtctgcctttagaaaataccccttatcaaaagaaaaaaaga

SEQ ID NO: 6255 - DNA, 366 bp, Enterococcus faecalis
gtgatccaacaagaaagtcgtttaagagtcgctgacaattctggcgcacgtgaaattttaacgatcaaagtcctaggcggatctggtcgtaaaactgctaacatcggtgacgttattgttgctactgtcaaacaagcaacgccaggtggggttgttaaaaaaggtgaagtagttaaagccgttatcgttcgtacaaaatctggcgctcgtcgtgctgacggttcttacatcaaatttgatgaaaatgctgcggtaattatccgtgacgataaaagcccacgcggaacacgtatcttcggaccagttgcacgtgaattacgtgaaaacaacttcatgaagatcgtttctctagcaccagaagtatta

SEQ ID NO: 6256 - DNA, 309 bp, Enterococcus faecalis
atgtttgttaaaaaaggcgataaagtaaaagttatcactggtaaagataaaaacaaagaaggcgttgtcttagcagcgtttcctaaacaagataaagttatcgttgaaggtgtcaacgtcgttaaaaaacaccaaaaaccaaaccaagcagccccacaaggtggaatccttgaagtggaagcgccaattcatgtttctaatgtaatggtgattgatccttcaaacggagaagctactaaagttgcgtttaaagaagtcgacggcaaaaaagtccgcgtttctaaaaaaacaggtgaagttttagataaa

SEQ ID NO: 6257 - DNA, 1782 bp, Enterococcus faecalis
gacaagaaaaagaatcaagttattttagaagaaaccgctccgctatcctttaaaaatgataaagctacacaaacgttaaaacaaagtagtcaagaaaattattttggcggaggaactcaaaatggtcgatttacgcataaaggaacagctatccagattgtcaatacgaacaattgggtagatggcggagtagcatcgcctaacccattttattggtcaactgcagggtatggcgttgttcgaaatacatggaaacctggcaactatgattttggaagtcatgatccacaaaaaaccacaacaacgcacgaaggaacagattttgatgctttttatttctttaatgattcctcagcaggtattttaaaagattactatgaattaactgggaaaccagctttgatgccagaatacgggttctatgaagcgcatttaaacgcgtataatcgggactattgggtgaaagtagcagaaggaaccgcgggagcagttaagtttgaagatggtaatttttacaaagaataccaaccaggcgatctaggaaacttaaatggcacgctagaatctttaaatggagaaaaagagaattatcaattttctgcacgcgcagttattgatcgatataagaaaaacgatatgccgttagggtggttcttgccaaatgacggctacggtgctggctatggccaaacagattcattggacggcgatgtacaaaacttaaaagaatttacagagtatgctcaagccaatggtgttgaagtggggctgtggactcaatctaatctccatccagcggatcctaaaaatcctaaaaaaggagaacgggatattgcgaaagaagttagtgtcgctggtgttaaagctctcaaaactgacgtggcgtgggtcgggtatgggtattcctttggcttaaatggtgtagaagatgccgcgaatgtttttgtaaaagaaacagacggcgcagttcgtccgatgattgtttcattagatggttgggccggaacccaacggcacgctggtatttggacaggcgatcaaacgggtggtcaatgggaatatattcgcttccatatcccaacatatatcgggacttcgttgtctggacaaccaaatgtcggttcagatatggatggaatttttggtggaaaaaataaagagatcaacatacgtgatttccaatggaaaacttttacaccagtgcagctaaatatggacggctggggctccaatccaaaaacgccatttgcttttgatcaagaagccacagatttgaaccgagcgtatctaaaattaaaatcaatgatgatgccttataactacagtattgccaaggaatcagttgatggactaccaatggtacgggccatggctttagaatttcctaatgaaggaacagcatatacaaaagattctcaataccaatatatgtggggaccaaatttactcgttgccccaatttataatggcaatcaagatgaggcaggaaattcaatccgtgatggaatctacttaccagatgaaaaacaagtctgggttgacttatttacaggcgaaaaatatcaaggtggccgtgtcttaaatggagtaaaaacaccgctgtggaaggtgcccgttttcgtcaaagatggcagtattatcccaatgacgaatccaaacaacaatccaaaggaaatccaacgagatcaacgatctttcttgatttatccaaatggcaccacttcttttaatatgtatgaagatgacggaatttcaactagttatgaagctgggcaatcagct

SEQ ID NO: 6258 - DNA, 132 bp, Enterococcus faecalis
atgattaaaggttcttttaaacgaacaggctccggccgaatcgtttcattcgaattaaccgggcatgctgaagcaggtccttatggcagcgatgtggtttgcgcggcagttactgccttaaaatttaccaag

SEQ ID NO: 6259 - DNA, 387 bp, Enterococcus faecalis
atggcagcaaaaaaagttagtcgtaaacgccgtgtcaaaaagaatatagaatcaggtgtagcacatatccattctacattcaacaatacaatcgtaatgattactgatacacatggtaatgcattagcatggtcatcagcaggatcattaggctttaaaggaagcaaaaaatcaactccttttgccgctcaaatggctgcagaagccgcaactaaagtggcaatggaacatggacttaaaactgtagacgtaacagttaaaggacctggttctggacgtgaagcagcaattcgttcattacaagcaacaggtttagaagtgactgcaattcgtgacgtgactccagttcctcataatggatgccgccctccaaaacgccgtcgtgtt

SEQ ID NO: 6260 - DNA, 2742 bp, Enterococcus faecalis
atgtctatacaagttcacaaggaggcgccaaacatgaccattttagaattaacattcgcaacgaaccaactaacgacgactttttttaaccataaattggaaccgcttcaccaaaaaacattcccttttgaagccttgactatcgaagaaacggttcctgaactgtgccaattgattttggcagaggcggcaccgattctgggggggattgtggctgatttcccagcggacttcttttcgccagaggaaacgttggcgctggttccgcaagcggtgattcaagcattcgcggaacagttgaacacgccacttttaacggcagccgaacaagcggcggcaccgaatctgctagaagcatttgaagaaaaacggcagtatctggcttggcatttggactattatggctacgtgcctgggaaaaatgaatatgcggtggagtccctgttaactgtcggcaatggctttttaggcttgcgcggcacgacacctgagatgacgatttctgatgatcattatccagcgacctacattgcggggctttataatacagcggcttcggaagttgcgggtcaagtagtggaaaatgaagatttcgtcaatgctcctgacaaccaacacatcgctttaaaaattggcgatgccactgactggttaacgatttctccagacacgctacaacaattacatcgtcaattgaacttgaaaacggggttgtttgtcgcagaaatgattttgaaagatgcggacaatcagcaaattaaattaacgacgaaaaaaatcgccaatatggcacagccgaatgactatcatctgcaatatacgtttgagccgttaaacttttcagccccgattactttgaaaaccgtcacggatggcagtgtctacaactataacgtggcgcggtatcgcaacttaacagcgaaacattttcaggtgacagcattaagcgcgcaggaaaacaaaaccgtgattgaggtttgtaccaatcaatccaacttaagcgtccgagaaacgtctttgataaccggtgatttttttgaaaaagaagccattacgattcaagaagaagcggagaaaatcgcccaagtggtgaccgtgatggcgcaccaaggaacgcgctatacgctagaaaaacaagtctttgtacaagccagccacgccgaacaaagttggcaggtaccgtttacgccgaaggactcttttgcggccgccgctcaggaaagcgcccgcgcttggcaaactctttggcaacaagccaacattaccgtgacaggcgatttgatgtctcaaaaacttttacggattcacagttatcacttgctggcttcggcttcgccttttagtaaccaagcgcaagcattggacgtctcgattaccgcccgaggcttgcatggtgaagcgtatcgtggacatattttctgggatgaaatttttattttacctttttatattcaacattatcctgacacagcgaaacaattgttgctgtaccgctaccaccgattagagaaggcgaaggaaaatgcggcggccagccagtatcgtggcgcaatgtatccgtggcaatcagggcgtgatgggcgtgaaaccacgcaaaaacttcacttaaatccgttgaatggacattggggcgaagatcatagtattttgcaacggcatgtttccttggcgattgcttacaatgcttggttgtattggcatagtacacaggatcatgaatttatgaaacaatatggcggcgaaatgttgttagaaatcgctcaattttggaacagcgctgcgacgttagatgacgcaacaggacggttctttattgataaagtgatgggacctgatgagtttcacgagggctatccagaccaagcggaaagcggcttgaaaaacaacgcctatacgaatttgatggtggtttggctattcgaagaattaaccaacattttggcacttttctctgaggaagaacaggcacaactttttgccaaaacgcagaccacttcggctgatttagcccgcatgcagcaaattcaaaattcactggaaattgaagttaattctgacggtattattgcgcaatatgaagggtatttcggcttaaaagagattgactggacagcgatgaaagagaaatacggcaatatttaccgcatggatcgaattttaaaagccgaaggagaatcccccgatgattacaaagtggcgaaacaagccgacacgttaatgttgttctacaacttagacaaaactcgggtggatcaaattttagaagatttagggtatcaattgcctgcggattatttggaaaaaaatcttttgtattatctaaaacggacgtctcatggttcgactttgtcacgaattgttcatgcccaattggcagaaatggcgcaattccatgagctatcttggcaactttatcaagaagcgttgtattccgattatcgtgacattcaaggtggcacgaccgctgaagggattcatacaggggtcatggctgcgacgatccacgttactttagcgacgtatgcaggcgttgacacgcgccagaacgagttatcaatttgtccaaacttacctgaacattggcaagcgctggccttccagtttattcatcaaggcgtgacgtatcaattttcattaacacaaaccagtgtcacgattacagcagatagagacacacaattattggttcagggcgcgttgattccgttaaccgccgaacgaccaaaagaagtacattatcaa

SEQ ID NO: 6261 - DNA, 609 bp, Enterococcus faecalis
atgtctcgttatactggaccatcatggaaagtatctcgtcgtctaggtatctctttatcaggtactggtaaagaactagctcgtcgcccttacaaaccaggacaacacggacctaacagccgtggtaaagtttctgaatacggaatgcaattaactgaaaaacaaaaattacgtcatatgtatggcatgaacgaacgtcaattccgtacgttgttcattaaagcaagcaaaatcaaagaaggtaaacacggtgttaacttcatggttttactagaacaacgcttagataacgttgtttaccgtttaggtcttgcaactactcgtcgtcaagcacgtcaattagttaaccatggccacatcactgtagacggcaaacgtgttgatattccatcataccacgttgaagttggtcaagtgatcggtgttcgtgaaaaatctcaaaacatctcaacaattaaagaagcggttgaagcaactgttggacgtccagcattcgtaagctttgacactgaaaaattagaaggtagcttcactcgtttaccagaacgtgatgaactttacccagaaatcgacgaagcacttgtcgttgaatactacaaccaaaaactt

SEQ ID NO: 6262 - DNA, 2079 bp, Enterococcus faecalis
atggcaagagaattttcacttgaaaaaactcgtaacattggtatcatggcccacgttgatgctggtaaaacaacaacaactgagcgtatcttgtactacactggtaaaatccataaaatcggtgaaacccatgaaggtgcttcacaaatggactggatggaacaagaacaagaacgtggtatcacgattacatccgctgcgacaactgcacagtggaaaggctaccgtgtaaatatcatcgatactccaggacacgtggacttcacaattgaagtacaacgttctctacgcgtattagatggtgcggtaacagttcttgactctcaatcaggtgtagaacctcaaacagaaactgtttggcgtcaagcgactgaatataaagttcctcgtattgtattctgtaacaaaatggataaaatcggtgcggacttcttctattcagtagaatcattacatgatcgtttacaagcaaacgctcatccaattcaaattccaatcggagctgaagaagacttcactggaatcattgacttgattaaaatgaaagctgaaatctacacaaatgatttgggaacagatattcaagaaactgatattcctgaagattatttagaaaaagcgcaagaatggcgcgaaaaattagttgaagctgttgctgaaactgacgaagacttaatgatgaaatatcttgaaggtgaagaaatcactgaagaagaattagtcgctggtatccgtcaagcaacaatcaacgttgagttcttccctgtattagctggttcagcattcaagaataaaggggttcaattaatgttggacgctgttcttgattacttaccatctccattagatatcgatgctatcaaagggatcgatactaaaacagacgaagaaacaactcgtccagctgatgacgaagcacctttcgcttcattagcatttaaagttatgactgacccattcgtaggtcgtttaactttcttccgtgtttattctggtgtccttgaaagtggttcatacgtattgaacgcttcaaaaggcaaaaaagaacgtatcggtcgtatcctacaaatgcacgccaacactcgtcaagaaattgacaaagtgtactctggtgatatcgctgctgctgttggtctaaaagacacaacaactggtgatacattatgtgcattagatgcaccagttattcttgaatctattgaattccctgacccagttatccaagtcgctgttgaacctaaatcaaaagctgaccaagataaaatgggcgtggctctacaaaaacttgctgaagaagatccatcattccgcgttgaaacaaacgttgaaactggtgaaacagttatctctggtatgggtgaattgcacttagacgttttagtagaccgtatgaaacgtgaattcaaagttgaagctaacgtaggtgctcctcaagtatcttaccgcgaaacattccgtgctgcgactaaagcagaaggtaaattcgttcgtcagtctggtggtaaaggacaatacggtcacgtatgggttgaatttacaccaaatgaagaaggtaaaggcttcgagtttgaaaacgcaattgtcggtggtgtggttcctcgtgaatacatcccagcagttgaaaaagggttagaagactctatgaacaacggtgttcttgctggttatccattagttgatatcaaagcaaaactttacgatggttcataccacgatgtcgattcaaatgaaacggccttccgtgtagctgcttctatggcattgaaagctgcggctaaaaatgcaaacccagttattttagaaccaatgatgaaagttacaattactgttcctgaagattacttaggtgatatcatgggacacgtaacaagtcgtcgtggacgtgttgaaggtatggaagcacacggtaactctcaaatcgttaatgcgatggtacctttagctgaaatgtttggttatgctacaacattacgttcagcaacacaaggacgtggtacatttatgatggtatttgaccactatgaagacgtacctaagtctgttcaagaagaaatcatcaagaaaaacggcggcaacgca

SEQ ID NO: 6263 - DNA, 1767 bp, Enterococcus faecalis
atgagtgcattacaagaattattaaaagatacatttggctatgatgattttcggccaggacaagaaacgattattcgtcatgtattgcgacaagaaaatgtcttaggcattatgccaacaggtggaggcaaatcgatttgttatcagttgccagccttacttctggataatttaacattggtgatttcaccattaatttctttaatgaaagatcaagtagacgccctgaatttaatggggattccagctacatatatcaatagtaccatttcctatcaagagatgaatcatcgtattcaattagcggttaacaaagaagtcaagctattgtatgttgcgccagagcgattagaatcttatgattttcaacagatgctgacacatgtaccgattgatttattggcagtagatgaggcacactgtatttcacaatgggggcatgattttcgtccaagctatttgcgtttagcagagattatcgatcaatttcaacagcaaccaactgtgattgcactaacagcaacagcaacgccacaagtagcggaggatattgtcaagcaattaagaattccatcagaaaatgaaatcaaaacaggattcgctcgagaaaatttatcttttcaagtcgtgaaagatcaaaatagagacgtttttcttttggaatatttaaagatgaatactggacaatcaggtattatttatgcaagcacgcggaaggaagttgaacgaatttatcatttattagaaagtaaaaaaattgcagctgggatgtatcatgggggcatgagtgaacagttacgtagtgaaaatcaagaagcattcttgtatgatcaagtgcaagtgatggtagcaacaaatgcctttggtatggggattaataagagtaatgttcgttttgtcattcacgcacaagtaccagggaatattgaatcttattaccaagaagccggccgagctggtcgtgacggtctgcctagtgatgctgtgttaatgtttgctccacaagacttgcaaattcaacaatactttattgaacaatctgaaatgaccattgattataagcagaaagagtacttgaaattacgggaaatgtcacaatatgcgaatgcacaaatgtgtttacaaaaatatattttacgctattttggtgaagaagggacggactgcggtcgctgctcgaattgtctggataatcgagaattagtcgatattacggtcgatgcccaaaaagttttgtcttgtgtaaaacgtatgggagaacgtttcggtaagggcttagttggtaaagtcttgactggctcaaaagatcaaaaaattgatcaatggcattttgatcgtttgccaacatacggactaatgaaaggtcgcacgcaaaaagaagtcacacaactgattgattatttgacagcagaacgttatttaattccttctgatgggcaatttccgttgttatcagtctcgacagaaggtgttcaggtgcttttaggggaacggaaagtcttccgaaaagaagaccaaaaagttcgaaaagtagcagtagatgatgccttgtttgaacgattacgcgaattacgtatggacatggctcaagaggcaggcgtgccgccatatgtagtcttttccgatagtacacttaaagaaatgtgtgaaaaattaccgcaaacaacgattcaattattgcaaataaaaggggtcggccaaaataaattagataaatatggcaccgcctttttagaagtaattaaagaatatcaagagacaaaaaaa

SEQ ID NO: 6264 - DNA, 1236 bp, Enterococcus faecalis
atgaaaagagtggtcataaccggcatgggtgccgtaacaccattaggcaataccgtaaaagaattttggcataatctagtggatggcaagctaggaattggcaaaattactaaatttgattctgaagatactggggtggctttggctggtgaagtgaaagagtttgacccaagtgctgttttagaacgcaaagagcaaaaaagaatggacttattttctcaatatggcttggtcgctgctttagaagcgtgggaaatgagtggtttaacagaagcaacgattgacccgactcgtttaggtgtgattgtcggtagtgggattggcgggatgactaccttacaagaccaagtacgggtaatggataaaaaaggcgcaaaacgcgtaacaccatttttcgtgcccatggtaattgctaatatggcagcgggaaatatttcgattcgtctaggtgcaaaaggaccttctcaaactatcgtgactgcttgtgcttctgcgacgaatgcgattggtgaagcttttcgcacgattaaatatggtttagcggacatgatggtaactggggggacagaagccacagtatgtgaaattgggattgcaggctttgcagcattgaatgctttaaatacaacagaagatgcgactcgggcttcgattccttttgataaagaacgaaaaggttttgtgatgggtgaaggcgcaggaatgctggttttagaagaactcgagcatgcacagaaacgtggcgcaactatctacggcgaaattgttggatatggcagcaactgtgatgctagccacatgaccgctcctttaaaagacggtagtggcgcggcagctgcgatggaaatggcgattgcagaagcagggattacaccggaacaaattgggtatatcaatgctcatggtacgtcaaccccagcgaatgacgctgcggaaacaacggccatcaaacgtgtctttggtgagcgagcatcgcaaattccaatttcaagtacaaagagtatgactggacatttattgggcgcggctggcggtatcgaagcgatcgcttgtgtgcaaacattgcaagaaggaaaagctcatccgacagtaggctaccaagttgctgatccagattgtgatttagattatgtcacagaaggtgcacgtgacattacagcggactatacaattagtaattcgtttggctttggtggccataatggtgtaatttgcttgaagaaatgggaggaaaac

SEQ ID NO: 6265 - DNA, 288 bp, Enterococcus faecalis
atggaattactagacgtaatcaaacgcccagtgatcactgaaaaatccatgttagctatggacgaaaagaaatatactttcgaagtggacactcgcgcaaacaaaactttagtaaaacaagctgttgaatcagcattcgatgttaaagtagcaaacgtaaacatcttaaacgtgcgtccaaaattcaaacgcatgggtaaatatgcaggttatacaaaaaaacgtcgcaaagcgatcgttacattaactgaagattcaaaagaaattcaattattcgaagctgctgaa

SEQ ID NO: 6266 - DNA, 366 bp, Enterococcus faecalis
atggcattaaacattgaaaacatcgttgctgagttagaaacagcaactatcttagaactaagcgaattagttaaagctatcgaagaaaaatttgacgtatcagcagcagctcctgtagcagtagctggaccagcagcaggtggagcagcagaagaacaaactgaattcactgttgaattaacagcagctggcgatcaaaaagttaaagttatcaaagcagttcgtgaagcaactggcttaggcttgaaagaagctaaagctgtagttgatggcgctcctgcaccagttaaagaagctgtttctaaagaagaagcagaagctttaaaagctgctttagaagaagttggcgcttcagtaacagtaaaa

SEQ ID NO: 6267 - DNA, 732 bp, Enterococcus faecalis
atgcgtttagataaatttttagccgatgttggtatcggtagtcgtaaagaaatcaaacaattgttaaagaaaaaagtcgttacggtgaatggtgacgtcgtaaaagaagccaaaacacaagtaaatgaagaaacagatcaaattgccttgatgggagaaattcttacgtatcagaaattcttttattacatgttgcataaaccacaaggtgtcatttctgcgacggaagatcagcgagatgaaacggtaattgacttgttaactgatcaggattaccgtgccgacttgttcccagttggtcgcttggataaagataccgaaggcttgcttctattaacaaatgatggccagttagcgcatcaattattatcacccaaaaagcatgtggataaagaatatttagctgaagttgaaggacttgtgacagcggaagattgtcaactgtttgcgcaaggatttgccttgaaagatggagaaatggttaaaccaagtcgtttagtcattgagacgatcaatgaggaagaagggacttccgtagtccgtttagtgattcaagaggggaaatttcatcaagtcaaacggatgttagccactgtaggcaaacctgtgacgtatttaaaacgattacgaatgggcgaactatggttggatgaaacgttagaactaggggaatatcggcccttaacagaagccgaattgcaacaactacaacctaaacaatcatacctcaat

SEQ ID NO: 6268 - DNA, 1299 bp, Enterococcus faecalis
atggaacaaattattgttcatggtggtaatacaaaattagaaggaactgtaaaaattgaaggcgccaaaaacgctgttttaccaattttagcagctactcttttagctgaagaaggcgttactactttaaaaaatgtaccaattttatctgatgtatttacaatgaatcaagtaattaagcatttgaatgtagccattgattttgatgaagacgcgaatgaagtaacaatagacgcaacacaacctttagggatcgaagcaaactatgagtacgttagtaaaatgcgtgcttctatcgttgtaatgggacctttattggctcgtaatggtcatgccaaagtggcaatgccaggtggctgtgccattgggaaacgaccaattgatttacacttaaaaggcttccaagcattaggtgcaaaaatcatccaaaaaaatggttatattgaagcaattgcggatgaactaatcggtaacactatttacttagacttcccaagtgtcggcgctacgcaaaacattatgatggctgctgttcgtgcgaaaggaacaactatcattgaaaacgttgctcgtgaacctgaaatcgttgacttagcaaacattttaaacaaaatgggtgccaatgttatcggtgctgggacagaaacgatgcgtatcgaaggcgtcgataaattacatgccgtagagcattcaatcgttcaagatcgaattgaagcaggtacgttcatggtagctgcagcaatgactgagggcaatgttttaattgaagaagcaatttctgaacataatcgtccgctaatttctaaattaactgaaatgggtgcaatcattgaagaagaagaaaacggcatccgtgtaattggtccaaaacatctaaaaccaacagatgttaagacaatgccgcatcctggtttcccaacagacatgcaagcacaaatgacagcgatccaaatgtttgctgaaggaacaagcatcgtgacagaaacagtctttgaaaatcgttaccaacacttagaggaaatgcgtcgaatgaacgctgacttaaaaattgacggcaacattgccgttattaatggtggcaacgagttacaaggagcagcagtggaagccactgatttacgggcagctgccgcattgattttagtagggttacgtgcaaatggcattacacgtgtctctaatttgaaatatttagatcgtggctattatgagttccataaaaaacttcaaaaattaggcgcgaacgttgaacgtgtcaatgatgaaaaaattgaagaaaaacaagcaacgacagtaatc

SEQ ID NO: 6269 - DNA, 3567 bp, Enterococcus faecalis
atggaaaatagcagaaaggagggcccttgtttgaatattatcgaacgaattagccaaacagaaattgctaaatcatggcgcagtcaactaatgacaacaggaacgcgccaactaattactgggttatcaggctctgctaaaacattactgatggcaggcgctttacaaaagacgcatcaaaaaattgttattgcggtcccaaacctatactatgccaatcaattagtagatgattttttaaatattttaccttcagaacaagttcatctatttccagtagatgaagtgttatccgccgaaatggccttttcttcaccagaagcgcgcgcagatcgagtgagtgcgttaaatttcctgatgacagcgaatgcaggaatcgtggtcgtaccagtagctggactacgaaaatatttgccaacgaaagaaacgtggcaaaatgcgcaactttattgggaaatcgggacagaagtagaacctgagatcctcgcgcaacgcttagtgttaatgggctatgaacgccaagcaatggtcggaaagcctggcgaatttagtattcgcggaagcattgttgatgtctatccgctaaatgccgaataccctgttcgggtggaactgtttgatgttgaaattgactcaatccgttattttgaagcagatacccaacgttcattagaaaatcttgaagaagtaacgatttcaccaatgactgatttagtattctcaaaggcagatatgaatcatggcatgacgaggttacaagatgctctagaaaaacgtttagcgacagctaaagatcaaacggagaccgattttttagaagaatattttggtcagttgctgtcttcttgggaacaagggattcctacagaaaatgctcactattatacagattttctgtaccaacaaaaaactacgctgttagattatttaccagaaaatagtttgctttttgtggatgattattctcgtatgatggaaacggagcgagaaatcgctagagaggaagcggaatggcaaaccctgaaaattgaagaaatgcgcgtgttttctgaacaaacttttggcgtagactttcatgatcaattgcgaaaaactgcacgaaatacgaccttcttttcactttttcaaaaaggaatggggaatcttcgtttccaagaagtccataatttccaatatcgttcaatgcaacaattcttcggtcaaatgccgttgctaaaagcggaagtggaccgttggcaaaagcaaaaccaaacggtcgttgtttttgttcctacgaaagaacggattcaaaaagtcgaagagctatttcaggactttgacatacctagcgtagtaagcaattgggatcagttgttagatgggcatgtccaaattgtccaaggggcattacaaacagggtttgaattgcctaaaaacaagctcgtggcgattacggaaaaagaaatttttcatacaacgaccaaaaaacgggcacgtcgtcaaacaatctctaatgcggaacgtttgaaaagttatagcgacttaaaaacgggcgattatgtcgttcatgcgaatcacgggattggtaaatatattggtatggaaaccttagaagttgatggggtccatcaagattacatgactatcttgtaccaaaatgatgacaagttatttattccagtaacacaattgaacttgattcaaaagttcgttgcttccgagtctaaaacgccgaaaattaacaagctaggcggcagtgaatggacgaaaactaaacgaaaagttgcttcgaaaattgaagatatcgcggatgatttaatcttactttatgcgacaagagagtcggaaaaaggctatgcttttccgccagatgatgcgtatcaaaaagaatttgaagaggcttttccgtattctgaaacagatgatcaattacgtagtgccgccgaaattaaacacgacatggaaaaatctcgaccaatggatcgtttgttagttggcgatgtagggtttggtaaaacagaagtggctttacgagcggctttcaaagctgttagcaacaataaacaggttgcctttttagtgccaacaactattttagcgcaacaacattatgaaacgattcaagagcggtttgagggctttcctgtagaaattggtttattaagtcgtttccgcacgaaaaaacagcaaaatgaaacaattgaaaaaattaaacatggccaagtagatattgtgattggtacccatcgtttattgtcgcaagatattaattttagtgatttaggcttgttgattattgatgaggaacaacggtttggagtgaaacataaagaacgactaaaacaattgcgttcacaagtggatgtcttgacgttaacagcaacgccaatcccaaggacccttcatatgtcgatgttaggtgtccgtgatttatccgtcatcgaaaccccaccagagaatcgttatccgatccaaacgtatgtcatggaaaataatcctggggcgattcgggaagcgattgagcgagaaatggcccgagatggtcaagtcttttatttatacaatcgagtagatacgattgaacgaaaagttgaagagttacaagcactagttccagatgcacgaattgcgtatgcacatgggcaaatgacagaagtacaactggagaatactttgtttgattttattgaaggacaatatgatatattagtcactacaacaattattgaaacaggagtagatattcctaatgctaataccttgtttgtagaaaatgcggactacatgggcttatctacgttgtatcaattacgtggtcgtgtggggcgtagcaatcgagtggcctatgcttattttatgtacgaacagcaaaaaatcctaaacgaagttagtgagaaacgtttagaagcaattaaagactttacggaattaggttctgggttcaaaattgcgatgcgtgacctttccattcgaggggccgggaaccttcttggtgcccaacaacacggcttcattgattcggttgggtttgatatgtactcgcagatgttatctgaggcagttgctcgtaaacaaggaaaaaatatccaagaccaaaaaacgtctgttgaaattgatttgggcattgatgcttatattccaggaacgtacattacagacgaacgacaaaaaattgaaatttataaacggattcgtcaattagaaaatatggatatgtacgaagaattagaagcggacttgttagaccgctttggagagtatcctgacgaagtggcgcatttattaaccactggccgtatcaaaatggatggcgaccgtgccttgttagaaagtattcgtaaacgcgatcaaaaagtcaagtttgtgttaagtaaaattggcacaaaaacatactctgtggagcagttgtttgaagcgttatcggcaaccagcttaaaagcggatctagcagttgagaaagaacaaatgactatttccttgaagttgccgaaagattgtaaagaagctgtttggattcaagaaattgctgcttttacaaccgcattgcgacaagaaaaatacaaacattcgcaaggaacggattccctt

SEQ ID NO: 6270 - DNA, 969 bp, Enterococcus faecalis
atgtcgaaacattattttgatccaagattgaaaatcttttctttgaactctaatcgtcccttagcagaaaaaattgcggatgctgtgggtgtggagctaggaaagtgctctgtaacacaatttagtgatggcgaaattcaagtgaatattgaagaaagtattcgtggtgcacatgtttacgtcattcaatcaacaagtagccctgttaacgataacttaatggaactattaatcatgattgatgcgttaaaacgtgcgagtgctaaaacaattaacgtggttatgccttattatgggtatgcacgtcaagaccgtaaagcacgtgcccgggaaccaatcactgctaaacttgttgcaaacatgattgaaaaagctggtgcaacaagaatgttgacattggacttacatgcggtccaaattcaaggattctttgatattccagtggatcatttgatgggtgcaccattaattgccgattacttcatcgaacacggcattcaaggcgatgacgtcgttgttgtttcccctgaccatggtggtgtaacgcgtgcgcgtaaattggcagaattcttaaaagcaccaattgcgatcattgacaaacgtcgtccaaaagcgaacgtagcagaagtaatgaatatcattggtcatgtggaaggcaaaacatgtgtcttaattgatgacatgattgacacagcggggacaatttctcttgctgcaaacgcattgaaagaagccggagcaaaagacgtttacgcttcttgtacacatcccgttttatcaggaccagccttacaacgtattgaagattcagcaattgaacgcttagttgtaacagactctatttacctatctgatgatcgtaaaattgttaaaattgacgaagtcagcgttggtgaattaatcggagatgcgattaaacgtatccacgaaaacaaaccagttagtccgttatttgaaacaaaaaataaa

SEQ ID NO: 6271 - DNA, 306 bp, Enterococcus faecalis
atggcaaaacaaaaaattcgtatccgtttaaaagcgtatgaacaccgtattttagatcaatcagcggataaaattgtggaaacagcaaaaagaactggagctgacgtatcaggtccgattccattaccaacagaacgctcactttacacagttattcgtgcgactcataaatacaaagattctcgcgaacaattcgaaatgcgtactcacaaacgtctaattgacattgtgaacccaacaccaaaaacagttgacgctctaatgaagcttgacttaccgtctggtgttaatattgaaatcaaacta

SEQ ID NO: 6272 - DNA, 129 bp, Enterococcus faecalis
atgaaaagaattgaaaaacaaaacaaatgcttttcaaaacaagaaaaaattctttcaaaaaaacgcagaaaatccttgctaacactatcctttcatagtataatcaaaaaggtgctgtttacaggagtg

SEQ ID NO: 6273 - DNA, 648 bp, Enterococcus faecalis
atgaaaaacaaactttattatcaatttgcaggtagttgttttcttttagtatttatgtttttaggctatgttgttcgtttttatccaacctggctcaaaggctttgatcaaacgattacttcttttgttcgtcgtccttttccacagctaaataacttttttatttggtacaccaaatttgccaattcattgacgattatcatcttagcaatcgttgtcattgctctgtttattgtttggaaatattatgctgaagcattatggctctttattaatactgccttaattgctggcgtaggtaattctttattaaaattattctttatgcgccaacgtcctactttggagcatttagtaactgaacatacgtatagttttcctagcggacatgctgtaggaagtaccttgttctacggcactattttattgattctgccaattttcattaaaaataaaacggtccgcctttgtgtgcaaattttactaggtattgggattttcatgattggggttagtcgaatctatttaggtgtccatttccctagcgatatcttaggtggtttttgtcttggtttagcttggttgttattaagttaccctatttatttagaaaaacgctttgtttggcgatttcaaagcaaacaacgc

SEQ ID NO: 6274 - DNA, 2292 bp, Enterococcus faecalis
atgaagcgaagtaaatggaaagaattgatagtaacgggcatctgccatatattagtattccccatactaatacagacaactgtttttgcagaaacattaccaagtacaaaacaagtaagagaaggaaccaatcattcattaacagcagaaaaagccgaaagtgaacaaccacagacaaaggataaactacatgatgaagaaacactggcattgtcaaaaagtgagttaatcgataatgaggctaatgttacaagtcaaacgattagagaaagaattgagacgcctaacctaacttatcgttatggatttattaatgaagaggggcagccagtaaacgccaatgagatccttctacagtatcatagttggcaaggcaattccccagatggcataaatgtgtgggaaggtgaaagtcaaccagtgacagcatctacagtggctaatttaaaagaagtggtaattccaagtgagaaagtagccgtctattccgacatgtcaacggtgcttgcagcgagtaatcaaacattttttttaccaagatattatacttctttaagcttatacaataagaaaggggaaattgatcccaattatccgctgccaactatttccgacgcatcaggaaaccaatatccaacaacaatttcgcaatttgaattggaaaaaatgtctgcacaacaatatagtcagaaaacaggagtaacgtttaacattagcgagagtcaaaaactaatcgttcctttgtacaaccaagtgaaggttgattcatcgaatcaatctgggctattgaattactttaaattttcagggccggtttattatcatgttaccaatcgcaaagtgacagaacattttgtggatactcaagggaaaccaatccctccaccaccggggtttagacaaggaaagcaaacacttattgagcgtgacccttacacctttaaacagaaagatcttttgccaagtagctatgaaattgactcaaaaacgtatcaatttcaaggatggtataaagggaaaacgaaacctgaaaatttagaaaaaagcgtaacgcccagttatgatattacctatgacgacaatgatgatttaactgttgtctataaggagatacctcaaaaaaattatacatttgaggatgtcaatggtgttgaaattgcaccaccatctgattttattcaggatcaccaacaaccaataactacggatggctttcgctatttagctggaaaaaaactgccacaacaatacagcgttaacggtaaaacttatttatatcaaggttggtatcaagataaaacaaaacaagagagcttagaaaaaacgaagcgacccataaactcccctgtttttaatgaaatgaacgctattacagcagtgtataaggaaataactgcaaaagctgaaatgcaaatagaaggactagtcaaagtcatgccaagtggttatatacaaatttggcagattatgcttacaaatgtgggagaagtaccgttaaaaaaaataaacttaaagccagcaagtggttggtcaccaggtctagctcggccaatccaagtcacgattcgtgttggatctgaaccaaacaaaattgttcctattactgatgaaaattggcgagttggcattactttaaatacggaagtgcctattggtcagacagcaactattatgatgacaacaattgctacaggtgaaccagatcaagtgttacaagcggctgttgaaatgaatggaaatttttctgctgttcacgcagctgatactgtcagaatccaacctaaaaatcaagaaattgtggcaccagatgaggaaggttttatcagcacaccaacttttgattttggcaaagtcgccatttctagcaacacgcagcaacatggtttaaagcaggcagcagattattatgaaaatggtcaggaaaatccatatttacgtttgaaaaaatcacaacccaattgggcactaactgcagaactatccccctttgaaggaagagtggatcaactatcatcaatgacaaagttattgttaggaacaaccaatgtttcaggttttattcagtacaatcaaccaacggaaactaaagttgctcttggcaaaacaaccgctattcaattagttgccaacggtgtagctagccatattgttgccaatggtcagtttgacgaaagtgatgtttatcaatttgatttttcttttgatcaaatcaaattagaaattccagcaaatcaaggtagaaaagatcaaacttatcaagcaatggtgacttggaatttagtgacaggccca

SEQ ID NO: 6275 - DNA, 1185 bp, Enterococcus faecalis
atggcaaaagaaaaatttgaccgttctaaatcccatgttaacattggtactatcggacacgttgaccatggtaaaactacattaacagctgcaattgctactgtattatcaaaacacggtggcggggaagcacaaagctacgattctatcgataacgctccagaagaaaaagaacgtggaatcacaatcaacacttctcatatcgaatatgaaactgaaactcgtcactatgcacacgttgactgcccaggacatgcggactacgttaaaaacatgatcactggtgctgctcaaatggacggagctatcttagtagtttctgctgctgatggtcctatgcctcaaacacgtgaacatatcttattatcacgtaacgttggtgtaccatacatcgttgtattcttaaacaaaatggatatggttgatgacgaagaattattagaattagtagaaatggaagttcgtgacttattatcagaatacgatttcccaggcgatgatgttccagttatcgcaggttctgctttgaaagctttagaaggcgacgagtcttatgaagaaaaaatcttagaattaatggctgcagttgacgaatatatcccaactccagaacgtgatactgacaaaccattcatgatgccagtcgaagacgtattctcaatcactggacgtggtactgttgctacaggccgtgttgaacgtggtgaagttcgcgttggtgacgaagttgaaatcgttggtattaaagacgaaacatctaaaacaactgttacaggtgttgaaatgttccgtaaattattagactacgctgaagcaggcgacaacatcggtgctttattacgtggtgtagcacgtgaagatatcgaacgtggacaagtattagctaaaccagctacaatcactccacacacaaaattcaaagctgaagtatacgtattatcaaaagaagaaggcggacgtcacactccattcttcactaactaccgtcctcaattctacttccgtacaacagacgttactggtgttgtagaattgccagaaggtactgaaatggtaatgcctggtgataacgttgctatggacgttgaattaattcacccaatcgctatcgaagacggaactcgtttctctattcgtgaaggcggacgtactgtaggttcaggcgttgttactgaaatcgttaaa

SEQ ID NO: 6276 - DNA, 345 bp, Enterococcus faecalis
atgaatccattaattcaagaattaacacaagaacaattacgtacggatattcctgcgttccgccctggtgacactgttcgcgttcatgcgaaagtagtcgaaggtactcgtgaacgtatccagttattcgaaggtgttgtaattaaacgccgtggtgctggaatcagcgaaacttacacagtacgtaaagtttcaaatggtgttggtgtggaacgtacattcccattacacacaccacgtgttgctcaaattgaagtggttcgctacggtaaagtacgtcgtgcaaaactttactacttacgcgcattacacggaaaagcagctcgtatcaaagaaatcagaaga

SEQ ID NO: 6277 - DNA, 1758 bp, Enterococcus faecalis
atggcttatcaagcactttatcgggtctggcgttcacaacgtttcgatgacgtagtaggacaaaaagcaattactcagacactgaaaaatgcgatagtgcaaaagaaaacatctcatgcctatttatttactggccctcgtggtacaggtaaaaccagtgccgcaaaaattttcgctaaagcgattaactgtaaacatagtcaagatggtgaaccttgtaatgtttgtgaaacctgtgtagccattacggaaggtcgtttaaatgatgtcattgaaattgatgcggcgagtaataatggcgtggaagaaatccgtgatattcgtgataaagcaaagtatgcaccgacacaagccgagtacaaagtttatattattgatgaagttcatatgctatcaacaggcgcgttcaatgcacttttaaaaaccttggaagaaccgccacaaaatgttatttttatcttagcaacgactgaaccacacaagattccgttaacgattatctcacggacgcaacgctttgattttaagcgaattagtacgcaagatatcgtcgatcatatggcccatatcatgcaggaaatggctctcgattatgaggaacaagccctttatgtgattgggcgtgctgcggaaggtgggatgcgagatgccttgagtatcttggatcaaacgatttcctttagtgatgaaaaagtaacactggaagatgcaatgcaagtgacaggcagcctaacctatgaaatgatggatcattatattcagtgctgtgtcgccggtgatgttgaacgagcattagaaggcttggaaagtattttaggcgaaggcaaagaagcgcgccgtttcttagaagatttgttattatattgtcgagatttgctgatgtatcagcaagcaccgaagttattagcagaaaaagcaggaactttgacagaagcatttaaggaactagctacacaaacgcctgctgaaaaaatctaccaactaatccaaattttaagtgacacacaaaatgagatccgctttaccaacaatgcgaatatctatctggaagtagccactgtcaaattagctaaaacggtgcaacccaataaacacaacacgccagaaacagctaatcaagatggtagtgcagagggaaatccagaattagcagatttacaaaatcaaatcgggcaactgaagaaagaactggctgaattaaagaaacacggtgtagctgccaaagaagcagatgcgccacgtcaacaagcacgaccacaagcgccaaaaagttcgttccgtgtacccacagaacgcgtatatcaagtcctaaacgaagcgactagaacacatttaatgaatgtgaaaaatgtctgggaagacttactgcaaacattatctgtgactcaacgagcgatgctcaaggctagtgaacctgtcgcagcgagtcctaagggcatcgtggtggcatttgactatgagattgtttgtgctcgtgcaacagacgatgaagagatgcagttagctttcaataataatttaagccgtttgatggactatacaccagagatggtctgcattactagagaaagctggccaaaactaagacaaagttttattaaccaaaatcagggcagtttgaatcattctgaacctgaaaatgaaatggctcgtctagcggacgaaccgcctgtaacaaatgaacattcacaagaaaatccagtagtagatgaagcaatcgctatgtttggtgaagagcttgtcgaagtactagatgat

SEQ ID NO: 6278 - DNA, 300 bp, Enterococcus faecalis
atgagtcaagatacgaagtacgaaatcatgtacattattcgtccgaacattgatgaagaagcaaaaactgctttagtagaacgtttcgacacaatcttaaaagataacggagcagaagttatcgaatctaaagattgggaaaaacgccgcttagcatatgaaatgaacggattccgtgaaggcatctatcatatcgttaatgttacttctccatcaacagctggcgcaatcaacgagtttgatcgtttagcaaaaatcaatgacgatattatccgtcatatgatcgtgaaggtagaagca

SEQ ID NO: 6279 - DNA, 318 bp, Enterococcus faecalis
gtgctgtatagcatgtacgcaattatcaaaactggtggtaaacaagtgaaagttgaagtaggtcaagcaatctacgttgaaaaattaaacgttgaggctggcgagaaagttgtttttgacgaagttatcttagtaggtggcgaatctacaaaagttggtgcgccaactgttgcaggcgcaactgttgaaggaactgttgaaaaacacggcaaacaaaagaaagtcgtgactttccaatacaaacctaaaaaacactctcaccgtaaacaaggtcaccgtcaaccgtatacaaaagttatgatcgaagcaatcaacgct

SEQ ID NO: 6280 - DNA, 1218 bp, Enterococcus faecalis
atgaaattgacaactattccaaacgaatttaaagaagccgctcccgttattcgtgaaatcaatgcacagggctttgaagcgtattttgtcgggggcagcgtccgtgatgctttattaaataaaccaatccatgatgtcgatattgcgacaagtgcctatccagaagaaattaagcaaatttttaaacgaaccgttgatgtgggcatcgaacatggcacagtccttgtattgatggaagaccaacagtatgaagtaacaacctttcgtaccgagtcaacttatcaagactttcgccgaccagatgaagtcacctttgttcgctccttgaaagaagatttaaaacggcgagattttacgattaatgccttggcgctcgacagcacaggtgaaatcattgatttatttgatggtatcgaagatttaactaatcaaaccattcgtgcagtcggtaatccccatgagcggtttcatgaagatgctctgcgaatgatgcggggcttacgctttgctagccaattagattttaaaattgaagaaaaaaccttagccgctatcgctgaatttcatcctttattggaaaaaatttcagtagaacgcattacaattgaatttgtaaaaatgcttttaggggttaatcgacaaggtggcttagctccgtttattgaaacagaatgctatcaatactgtccaaaattacgagaacaaggggctggactttttcgtttaatggacttgcctgctcgtcaaattgaaacagaagcagaagcgtggacgttacttatccaatcgttgaatttaccagaagcagaaattcgctccttcttaaaggcttggaaactttcaaatcaattaatccaaaacgtttcacaattagtacgcggtttgcgttttcgcttgagtaacgactggcagccaatgatgctttatgaattaggcgaagaatcagcagtacttgttgaaaggcttttatattattaccaacaagagagtcaagtacaagtaacaaaagagttagttaaggcattacccatccatcaaagacatgaattggccataacaggaaaagaccttttagccgtcttagaagaaacaccaggcaaatggttaggggaactgattgctgaaatcgagcaacacgttgttgaaggtagcttagagaataaacaagaagttctgctttcgtttgccaaaaaacaacgttcaaaaggagagaaagca

SEQ ID NO: 6281 - DNA, 528 bp, Enterococcus faecalis
atgagcttactcgttctaagtaccttattaagtgcttgttcaactgtaagtggcagcccagcaagtcaaagtgcgcccgcacctgatgaagtgttggcgacaagtattgggacgtatgaaaatcgaacattgttggttccagatgggcgtttagccttaactgccttgcataaaggaaaagattatcaaggcaaaccaatgttttatgtcctgtttgaattaaccaatacaaccgaaaaaacacaaaatattcagctaatgattcaaagttttatggaagttagtcaaactgtccacggaaaagcccaaaatttacaatatgcagtcttaacagattcacctttccaagacaaattagatcgtttagcagatgaaatcaatcctggtgaaacaatccaaggcgcttacccgtatgaatttattaatgagaacaagccggtccattttaaatttagagatcgccttctcagtctggatgaacccattgcatcagaagaaattaccattacagaaaaaagtttggtccgc

SEQ ID NO: 6282 - DNA, 672 bp, Enterococcus faecalis
atggaacgagagtgggagctgtttttagcgccatatgaacaggcggtcagcgaattaaaagtaaaactacgaggtattcgtaaacaatttcgggagcaagataaacacataccaattgaattcgttacaggacgtgtgaaaccagtagatagtattttgacaaagacggctattcggcatattcctttaaatcggattgaagaagaaatgcaagacattgctggtttgcggattatgtgccaatttgtggaagacatttaccaggtagtcgcacttttaagaaatcgtaaagacttaaaaattgtggaagaacgggactacattgaaaataaaaaagaaagtggctatcgttcgtaccatgtggtagtggaatatcctgtgcaattagtcaccggggaaaagattattttggccgaaatccaaattcggacactctccatgaatttttgggcaacgattgaacattctttgaattataaatatcaaggtgtctttcctgaagaaatgaaagaacgccttcagcgagcggcagaggcagcctatttattagatgaagaaatgtcatctattcgtgaagaaattcaagaagcacaacattacttctctcatggccgtggattgctagaaaacgaatactataagcaaattaaaaacgaaacaccagaaaatcag

SEQ ID NO: 6283 - DNA, 510 bp, Enterococcus faecalis
atgggagaagttatgcaaggaaaagaccgtattttattagttcgtcgcttggatgaagcagcgacaaagaaagcaatgaaacccttatttcaaattgaacatgaatgggaattctcacgtgaatcgagcggtacgcaaacaaaagatggcgtcgcgaatgctgtttctggtttagaagttacgttatcgttaagcggtttagcctctcgagatgatgaaaatttatacatgaaagacgcagtcgaagatggcatcttaatggaattttgggatgttgatttaaaaggtgaaaaaaatgcggaaggtaaatatccagcaatttatgcccaaggttatgtaaattcatggagtttaccagccaatgtagaagaattagtagaaatcgaaacagaagcctctattaatggcaagccacaagatggctttgcaacagtagaagcagatattattgcagaagcacaatatgcgttccaagataccgttccagataaagcaccacaacctggcgaa

SEQ ID NO: 6284 - DNA, 675 bp, Enterococcus faecalis
atgatagctgaaaacttaacaaatattaataatcaacttcagctagcatgcaaaagctcacagcgctctgttgctgatgtgacaatgattggcgtcactaaatcagtaggaattgaggaagcagcagagcttgttcagcttggtgtccagaatttagctgaaaaccgagtagataagttactagaaaagaaagctggattggaaaaatttaatgatattcagtggcatttaattggtaatttacaacgtaggaaggtaaaattaattattaatgagatagattattttcatgcattagatagtctgagtctagccaaagaaattcaaaaaagagcaacgaaagttattcgttgttttgttgaagtgaatataactggggaagaaagcaagcacggctttcgtaaagaagacgtcttacctttcattcaagaacttgctgatttggacaaaattcaaatcgtcggtctaatgactatggcaccttttggggcaagtgaagaagtattacatgcaacatttagagaattaaaagagctgcaaatgaccgtaaatgagaaacatttatcttttgctccttgtacagaacttagcatgggaatgagtaacgatttcccaatcgcagttgaagaaggtgcaacttttatacgaatcggaacagcgttattcagagatgcg

SEQ ID NO: 6285 - DNA, 1230 bp, Enterococcus faecalis
atggaattttcattagacaataacattaacaacggtgcagtcattaaagttatcggtgtaggtggcggcggcggaaacgctgtaaaccgtatgatcgaagaaaacgttaaaggcgtggaatttatcacagccaatacagacgttcaagcattaaaacattcaaaagcagaaacagtgattcaattaggccctaaatacactcgtggtttaggtgccggttcacaacctgaagttggccaaaaagctgcagaagaaagtgaacaagtgatttcagaatcattacaaggcgcggatatgattttcattactgctggtatgggtggcggaactggtacaggtgctgcgccagtagttgcaaaaatcgctaaagaattaggcgctttaacagttggtgtagtaactcgtccatttagttttgaaggtccaaaacgtggtcgttttgctgctgaaggaattgccttattaaaagaaaacgttgatacactattaattatctcaaataaccgcttattagaagtcgttgacaagaaaacgccaatgcttgaagcatttagagaagctgataatgtattacgtcaaggtgttcaagggatttcagatttaatcactgcaccaggttacgtaaacttggactttgctgacgtgaaaacagtgatggaaaaccaaggaacagctttaatgggaattggtgtagcgagcggcgaagaacgtgtaattgaagcaacgaaaaaagctatttcttcaccattgttagaaacatcaatcgatggtgcggaacaagtcttattaaacattactggtggcttagatatgaccttgtttgaagcgcaagatgcttcagatatcgttacaaatgctgcttcaggtgatgtgaacatcatcctaggtacatcaattaacgaagatttaggcgacgaaattcgtgtaacagtaatcgctacaggtattgatgaatcaaaaaaggatagaaaaccgcaccgtcaaacaagacaagcggttcaaccaatgcaacaaacaactcaatctgtggaaatggatcaaccaaaatcacaagaagaagcaagtgcttttggcgattgggatattcgcagagaacaaaatacacgtccaaaagttgatgaatcttcattagaacaagtagacaaaaaagaatttgacacattccaccgtgaagaaccaaatcacaatgatgacgaattaagtacgccaccatttttccgcagaaaacga

SEQ ID NO: 6286 - DNA, 264 bp, Enterococcus faecalis
atggaaaagaaagaatttcacattgtagcagaaacaggaattcacgcacgtccagctactttattagtacaaactgcaagcaaatttaactcagatattaacttagaatacaaaggtaaatctgttaacttaaaatcaatcatgggcgttatgtctttaggcgttggtcaaggttctgacgtaacaatcactgttgatggtgctgacgaagctgaaggaatggcagcaatcgttgaaacattacaaaaagaaggattggctgaa

SEQ ID NO: 6287 - DNA, 1725 bp, Enterococcus faecalis
atgtctgagatgctaaaagggattgccgcaagtgatggcgttgctgttgctaaagcttacctgctagttcaacctgacttgtctttcaacaaaacttccgtagaagatactgatgcagaagcaactcgcttagacgatgctttagcaaaatctactgaagagttgcaagcaattcgcgacaaagcagctcaaagccttggtgaagcagaagcgcaagttttcgatgctcatttaatggttttatctgacccagaaatggttggtcaaatcaaacaaaatatccaagacaacaaagtcaatgcagaagctgccttgaaagaagttacggatatgtatattggtatgtttgaagcaatggacgacaatgcttacatgcaagagcgtgcagcagatattcgtgacgttgccaaacgtatcttagcacatttattaggtgtgactcttccaaatccttcaatgattaacgaagaagtaatcgtggttgcccatgacttaacacctagtgatactgcacaattagaccgtacgtatgttaaagcctttgtgacagacatcggcggacgtacttctcactcagccatcatggctcgttcgttagaaatccctgcaatcgttggtacaaaagaaattactgacaaagtaaaagcaggcgatattttagcagtgaacggaatcattggggatgttattattgacccaacagatgctgaaaaatctgaatttgaagcagaagcaaaagcttatgcagatcaaaaagcagaatgggataaactaaaaaatgcagaaacagtgacagctgacggcaaacatgttgagttagctgcaaacattggtacaccaaaagatttagaaggcgtacacaaaaacggcggcgaagctgttggtttatatcgtacagaattcttatacatggattcatctgactttccaactgaagaggaccaataccaagcgtataaagcagttcttgaaggaatggaaggaaaaccagttgtggttcgtacaatggatattggtggggacaaagagcttccttacctaacattaccacacgaaatgaacccattcttaggttaccgtgcattacgtattagcttatcagaactaggtgacggcatgttccgtacacaaatgcgtgcattattacgtgcgtctgttcatggtaacttacgtatcatgttcccaatggttgctactttgaaagaatttagagcagcgaaagcaatctttgaagacgaaaaacaaaaattagtcaacgaaggtgttgaagtttcaaacgatatccaagtaggtattatgattgaaattccagcagctgccgtattagctgataaatttgccaaagaagttgacttctttagtgttggaactaacgacttaatccaatacacaatggcggcagaccgtatgaacgaacgcgtttcttacttataccaaccatacaacccatcaatcttacgtttaattaaaaatgtaattgatgcagcacacgctgaaggtaaatgggctggtatgtgtggtgaaatggcgggcgatcaaacagctgttccattactattgggtatgggcttagatgagttctcaatgagtgctacatctatccttaaaacacgtagcttgatgaaacgtctagacacaactaaaatggctgaacttgctgaccgcgcattaaaagaatgcgacacgatggaagaagtctttgcattagttgaagaatatacaaaa

SEQ ID NO: 6288 - DNA, 273 bp, Enterococcus faecalis
atggcaaataaagcagaattaatcgaaaacgttgcatcttcaactggtttaactaaaaaagatgctactgcagcagtagacgctgtcttttcaacaattcaagaaactcttgctaaaggtgaaaaagttcaattaatcggttttggtaactttgaagttcgcgaacgcgcagctcgtaaaggacgtaacccacaaactggacaagaaattcaaatcgctgcaagcaaagtacctgcattcaaaccaggtaaagcattgaaagatgcagtgaaa

SEQ ID NO: 6289 - DNA, 888 bp, Enterococcus faecalis
atggaagaacaattagtcgattatttacactatttacaaatagagcggggcttatcaaataacacacggcggagttacgaacgagatttaaaaaaatacgtagcctttttacaagaacaaggcctgcattcttgggacgaagttgaccgttacatgattacagaatttttgcaatcccttcacgaagaacagcaagcttcagcaagtgtgattcggatgatttctagtttgagaggatttcatcaatttttacgtcaagaacgcttaagcgaacataatccgatgcaacatattgactcccccaagaaagttcaaaaattgccaagtacattatctgttgacgaagtgactcgattaattgaaacgcctgatacaagtaaaccactaggtatgcggaatcgtgctattttagaagtgatgtatgcaacgggcctgcgagttagtgaactaattgaaataaaattaggggatctgcatttatccattggtttattgcaaacaatcggaaaaggggacaaagaacgaattattcctttaggcgattatgcgattcaatggattgagcgctatatgaacgaagccagacctcaattgattaaaaaccatccgaatgaaacacacctgttcgttaatcatcatggcgaaccgttatctagacagggcatttggaaaaatttaaaacagattgttcgagaagcccagatagagaaaaatattaccccgcatacattgcggcatagctttgcgacacatttgttggaaaatggcgcagatcttagaatcgtgcaagaattattaggacatgcagatatctccacgacacaaatttatacacatattaccaaacaacgaatggcagatgtttataaggaacattttcctcgggct

SEQ ID NO: 6290 - DNA, 411 bp, Enterococcus faecalis
atgcctacaattaaccaattagtacgtaaacctcgtaaatctaaagtagaaaaatctgattcaccagccttaaacaaaggatataacagttttaagaaaactcaaacaaacgttaactctccgcaaaaacgtggagtttgtacacgtgtgggtacgatgacacctaaaaaaccgaactcagctttacgtaaatatgcccgtgttcgtttgtcaaacttaatcgaagttacagcttatatcccaggtatcggtcacaacttacaagaacacagcgtggtattattacgtggtggacgtgtaaaagacttaccaggggtacgttaccatatcgttcgtggtgcgcttgatactgccggtgttaacgaccgtaaacaaagccgctctaaatacggtacaaaacgtcctaaagct

SEQ ID NO: 6291 - DNA, 2031 bp, Enterococcus faecalis
atgactaaaggaggttttttctgtatgtcacagaaagaaacattttatattaccaccccaatttattacccaagtgggaagttacatattgggaattcatatacaacaatcgcctgcgatgcaatggcccgttacaagcgtttaatgggttttgatgtattttatttaacaggtgtggatgaacacggccaaaaaattgaaaaaaaagctgctgagttgaatgtgacaccaaaagagtacgttgataaaatggcagcagatgttcaaaaattatggaaaacattagatatcagctatgataaatttattcggacaacggatgattatcacatggcagccgtgcaacaaatttttgatcgtttagtagaacaaggagatatctaccttggagaatatgaaggttggtattcagtttctgatgaagaatttttcactgaaacacaattagctgaagtatatcgtgacgatgaaggcaatgtcattggtgggaaagcaccaagtggtcacgaagtcgaattagttaaagaagaatcctatttcttccgcatgagtaaatatgcggatcgcttggtacaatattacgaagaacatccagaatttattcaaccagaatctcgtaaaaatgagatgctaaataacttcatcaaaccaggattggaagatttagccgtttcaagaacgactttctcttggggaattccattaaaaaatgatccaaaacatgtggtttacgtatggattgatgcgttatcaaactatattacagcactaggttatggctcagaagatgattcattattccaaaaatattggcctgcgaacgtgcaaatggttgggaaagaaatcgtgcgtttccatacgatttattggccaattatgttaatggccttggatttaccattaccgaaaaaagtctttggacatggttggttattgatgaaagacggaaaaatgtctaaatctaaaggaaatgttgtttaccctgaaatgttagtagaacgctacggtctagatgcgttacgttattatttattacgagcaattccatttggtagtgatggcgtctttacaccagaagatttcgtttctcgcttaaattatgatttagctaatgacttaggaaacttgttgaatcgaacaattgcgatgattaataaatattgtgatggcaaagtaccagcctatgcttcaaaagttaccccatttgatagtgaactatcgacaactgcggcgaatgttattggaaaatatcatgaagcaatggaaaaaatggaatttaacacggccattgcagaaatctggacgctagtttctcgtgccaataaatatattgatgaaacagcgccttgggtattggctaaagaagaagagaaacgcaacgaattagaaagtgtcatgatccatttagcggaaagcttacgaattgtggcaatcttattgcaaccagtcatgacagaaacaccagggaaaattttcgaacaattaggcttagatccagaaacaatgaacatggaaaatattcattttggtgagttcccaacagacgtaacagtaacaagtaaaggaacacctattttcccacgtttagaaattgaaacagaagtaacgtatattcaaaagaaaatgtcccaaagcgaaagtgctacagaagaggatattaaatggaatccagaagaaacaacgttggtttcaacgaaagaaaaacaaattaagtacgatgatttcgataaagtggaattaaaagttgccgaagttattgactgtaaaaaagtcaaaggagcagataaattattgcaattccgtttagatgctggagatgaaaaccatcgtcaaattctttcaggtattgctgaattttatccagatccagctgcgctaattggcaaaaaagtagtcattgtggctaacttaaaaccaagaaaaatgcgtggtcaaattagccaaggaatgattctttcagctgaatcaccagaagggaaacttcaaattgttgaagcaccaaaagaaatgccaaatggtgcaggaatcgca

SEQ ID NO: 6292 - DNA, 1203 bp, Enterococcus faecalis
atgtacacatttaaaatcggtattccggcagaagtacacgatacatttgttaaaaatcacccattatgtaatttactacagtcatcttcatgggcaaaagtcaaggataactggggttctgaaattgttggggtttatgaaaaggatacattagttgcatcaagtttagttttaatcaaaccattaccagccggttttacgatgttatatacaccaagaggtccagtaatggactatacaaatgaacgtttggtcagctactttatggctgaattgaaaaaatttggcaagaaaaaacgagctttatttataaaaatggatccagcggttcattatcaagattttcatttgggagaagaacaccaaccgcatgctgaagcgacatctattattgagaccttgaaagaagcaggtgccaaatatcaaggactgacaatggatatgggggccaccatccagcctcgcttccaagcgaatatttatcgtgaagattttagtgaggaacaattgtcaaaaagtaccaagaaaatgattaaaacagctgaaaaaaaaggggtcgttgtgcagcaagggcatgttgactttgttgatgaatttgaaaaagtcattcaatcaaccatggaacgccaacatatttctttgcggaatagtgattactttaagaagctgttgaacatttacccagaagactcctttattatgctggcgcaagtcaatttaaaggaacgcttagatagcacgcgacaacgctatgacaaaaatcaaaaagacttgagtaatttgaaagaaaatcaagtgaaaaagcgccataatttagaagaattagatgcttccttgactcgggaactaaaagaattagaagaaaatatcgcagaagctggtgaaatcgtcacggttgctggcgctttggctgtgacatttggtccaacaagtgaaatcctttatgctggcttagatgatcgttataaacgctacatgccaacatatgtgacttggcgagatgccattcaagaatgttttaaccgtggctgcgaaagctgtaatatgggcggcttagaaggtagtttaaatgatggcttaattaagtttaaagcgaacttcaacccaacgattaatgaatttattggggaattcgatttaccggttaataaattattatttaaagccagtgaatatgcctataaattacgaaaacaaaaaaaa

SEQ ID NO: 6293 - DNA, 2640 bp, Enterococcus faecalis
atgtcagaagaaaaaaacttaccaacgaaatatcaaccgacagaaatcgaagctggccgttatcaaaaatggctagatcaagatttatttaaacctagtggcgacaaaaaagcgaagccctattcaattgttattccaccacccaatgtaacagggaaactacacttagggcatgcttgggatacaacattacaagatatgattatccgccaaaaaagaatgcaaggctttgatacgttatggctgccaggaatggaccatgccggaattgccacgcaagcaaaagtagaagagaaactagcacaacaaggaatttcacgttacgacttaggtcgtgaaaaatttgttgatcaagtgtgggaatggaaagaagaatatgcttctcacattcgtgaacagtgggcaaaaatgggtctttctttagattacagccgtgaacgttttactttagatgaagggctatctgaggccgttcgtaaagtgtttgtctctctttacgagaaagatttgatttaccgtggtgaatatatcattaactgggatccaaaagcgaaaacagcattgtctgatattgaagtaatccataaagatattgaaggagctttttaccacatgagctatccattatcagatggttctggcgttgttgaaattgcgacaacgcgtcctgaaacaatgttgggagatacggcgattgcggtccatccagaagatgaacggtatcaagaacttattggtaagacagttgtcttgccattagtcgataaagaaattccaattattgcagatgactatgtagatatggaatttggaacaggggttgtaaaaatcacacctgcccatgatccaaatgactttgaagtcggtaatcgtcatgacttacctcgagtaaatgttatgaacgaagacggcacgatgaatgaactggctggaaaatacgaaggaatggatcgttttgctgcacgtaaagcgattgtctctgacttgaaagaactaggtcgcttaattaagatcgaaacaatgaatcacagcgtgggccattcagaacgaacaggcgttgtcgtggaacctcgtttatcgacccaatggtttgtaaaaatgggaccattagctgaaaaagcaatgaaaaatcaagaaacagaagacgctgttgaattttatccaccacgcttcaatcaaacatttttacgttggatggaaaatgtacatgactgggttatttcgcgacaattatggtggggccaccaaattcctgcttggtatcacaaagaaacgggcgagatgtatgttgggatggaagagccagccgacagtgaaaactgggttcaagatagtgacgtcttagatacatggtttagttctgctttatggccattttcaacgatgggttggccgaatgaagcaagcgaagattaccaacgttacttcccaacaagcacattagttactggctatgacatcatcttcttctgggtaagtcgcatgattttccaaagcttagagtttacaggtgaacgtcccttccaaaatgtcttaattcacggcttaattcgtgatgagcaaggacgcaaaatgagtaaatcattggggaacgggattgatccaatggatgtcatcgaaaaatatggcgcagatgcgttacgttggttcttatcaaatggttcagcacctggtcaagatgttcgttttagttatgaaaaaatggatgcttcttggaactttatcaataagatctggaatgcaagtcgtttcgttatcatgaatgtagaaggtatgactgctgcagatattgactttagtggtgaaaagactgtcgctgatcgttggattttaacgcgcttaaacgaaacagtcgcccgtgtgacagaattatttgatcgctttgaattcggtgaagcaggtcgccaattatacaacttcatctgggatgatttctgtgattggtatattgaaatgagtaaagaaattctttacggagacaatgaagcagctaaacaaacaacacggagcatcttggtgtacacattggatcaaatcttacgcttattgcatccaattatgccgtttgtaacagaagaaatttgggaaaaaattccgcatcaaggtgagtcattggttgtggcagagtacccagttgttcatgaagaatttaacgatgaagcagcagctcgaggaatggaagttctgaaagaagttattcgttcggttcggaatattcgagcagaagtgaatacaccactttctaaaccaattaccttgttaattaaaacaaacgatacagaagtagaagaatttttaacagctaatactagctacttggaacgcttctgtaacccagaggaattagtcatcagtcgtgaaatagaagcgccagaattagccatgtccgctgttttaacaggcgcagaactattcctaccattagctgggttgattaatatcgaggaagaaattgctcgcttagaaaaagaattagacaaatggacaaaagaagtcaaacgtgtgcaaggcaaactttcaaatgaacgttttgtgtcaaatgcaccagatgaggtcgtggaagcagaacgtgcaaaagaaaaggactaccttgaaaaacaagaggctgtcaaagaacggattgcccaattacgttcaatc

SEQ ID NO: 6294 - DNA, 357 bp, Enterococcus faecalis
atggcacgtgttaaaggtggaacagtaacccgtaaacgtcgtaaaaaagtccttaagttagcgaaaggctactacggatcaaaacatactttatttaaatcagcaaaagaacaagtaatgaactcttattactatgcattcagagaccgtcgtcaaaagaaacgtgacttccgtaaattatggattgcacgtatcaacgcggcagctcgcatgaatggcttaagctattctaaattaatgcacggtttgaaattggcagagattgatatcaaccgcaaaatgttagctgacttagccgttaacgatgcagcagcatttacagcgttagctgaacaagcaaaagacgctttaagcaaa

SEQ ID NO: 6295 - DNA, 1695 bp, Enterococcus faecalis
gtgaaaagagtgagtacaataaaaatcgttccattaggcggcgttcgtgaaaatggaaaaaatatgtacgttgctgaagtggaagatgaaatttttgtactggattgtggattacaatatccagagaacgaacttttaggaattgacgtcgtcattccggattttacgtatttagaagaaaatagtgaacgaattgcaggggtctttttaacacatggccatgctgatgcaattggggccttaccgtatttgctttcaaaaattcaagtgcctgtttttgggacagaattaacgattgaactagcaaaactaagtgtcaacagtcatgcggaaacgaagaaatttaaagatttccatgtgattgacccgcatacagaaattgattttggtcaagcaacggtgagcttctttaaaacaacgcacaccattccagattcgattggcgttagcatcaaaacaaaagaaggcaacattgtttatactggtgattttaaatttgatcaaagtgcgattgagatgtatcaaaccgattatggccgcttggctgaaattgggaaagaaggcgtcttggcgctacttagtgattcatcaaatgctgaaaacccagcccaagttgcatcggaagcccaaatcgctgatgaagtgttcgacacgattcgctattgggaaggacgaatcatcgtggcatgtgtggcaagtaatttgcaacgggtccaacaagtattgaatgcagcggatcgttctggtcgtaaagtcgttttgacaggccaagattttgaacggattattcggacggcgatgaaattggaaaaattacaattgccaagtgaagatctattagtgaaaccaaaagaaatgaaaaaatatgcacccgaacagttattaattttagaaacaggccggatgggagaacctattaagtcacttcaaaaaatggctaataatacacatggtgtcgttcgaattgaagaaggcgatttagtttatattacgacaacgccgacaacggccatggaaacaacggttgccaaaacagaggatattgtctatcgggccggtgctacggtgaagcaaatttccgacaatttacgtgtgtctggtcacgctaatccgaatgacttgcaattgatgctgaacttaatgaaaccaaaatatttcattcctgtccaaggtgaataccgccagttagctgcgcatgcggacttagcacacgaaattggcatgccttataaagatatctttattacaggtcgtggggacattctagagtatacaaaaggtagaatgtcggtagctggcagcacaacggccgaaaatattatgattgacgggattggtgtcggcgatattggtaatatcgttttacgggatcgtcgtattctttccgaagatggtatttttgtggctgttgtgacaattaatcgtcgagaaaaacgaattgtttcaccagctaaaattacttctagaggttttgtttacgttaaaacaagtaaagacctaatgaaagaaagtagcaatattgttacagaaattgttgaaaagcatttagaaagtgacgatttcgaatggagcaaactgaaacaagaaatccgcgaaaacttaagccgttatttatttgaacaaaccaaacgtcgtcctgtgatcttaccagttatcatggaagcgacgcaacgcaagcgtcccaaaaataacgca

SEQ ID NO: 6296 - DNA, 1380 bp, Enterococcus faecalis
gtggaagagattgtgttgttccataccaatgatcttcattctcactttgaaaattggcccaaaatacggcgtctggttaaagccaaacgttcgctgtaccaaaaagagggcaaaacagtcgtaaccattgatttaggtgacttttcagatcggtgtcatcctttgaccgaagcaacagatggtcgagcaaatgtagctataatgaatacattagcgtatgacctggttacaattggaaataatgaaggaatcggcaattcaaagaaacaattagagcatttatatgatcaggcaacatttgaagtggtcttagctaatttagaagaaccaaaaacccaaacgttaccagatttttgtcaagcatataaaattatgacaactaaagaaggcacaaagttagggtttattggcttaaccgcaccatttcctttaacgtataatcccaatggctggacaatcaaacaagtggaagcagtccttcctcaactgattacagaagttgcgcctcaatgtgatgttctcattttgcttagtcacttggggatagatactgattttatgattgcggcgaattatcctgaaattcaagtgattttaggttcccatacacatcatttatttaaagatggtgaaaaaattaatcatgtgcaactagcagctgctggcaaatatggacagtatattggtgaagtgcatctgtttgtggatgccgacacgaagcaagtcacaagttatgcgaaaaccattgaaacagcaagtttagaagagcaagcaacggatgccaaggaaattgcgggttacttaacggaaggtcatcgactattgcaagcgcagcaaattgcacaaatccctgaaaccttgtcaacggacttacggcaaccgcatgcctttataactgttgccttgaaggcgttaaaagaagcggggcagaccgaagcggctgtgttgaacaacgggttatttttagcagatttaccagaaggaataatcaatgcagaccaattacatgaggccttgcctcatccaatgcatttaatcaaggttaccttgaaagggtcagacatgagccgtttgattcgtgaaatggaaaaaagtcgtcaatttctgcggaaatttccgattcgcgggatgggcttccgcgggaaaatttttggcgaattatgttatgatgggattcgttttgagccaaatagccagaccgttttttggcaagggaaacctattcagccagagcagaagtatacgctgacaacagtggatcactttcaatttgttccgtttttcccaacgattgagttagttggagaagtcgaatttttatttccagacgttttaagaactgtcgtggcgaactatctgcatgcccactatccaatcaaa

SEQ ID NO: 6297 - DNA, 1608 bp, Enterococcus faecalis
atgacaaaatacatctttgttacaggtggcgtggtttcttctatcggaaaagggattgtcgcagcatctttaggacgattattaaaaaatcgtggattaaaagtaacgattcaaaaattcgatccatatattaatgtggatccggggacaatgagtccttaccaacatggagaggtttttgtcacagatgatggtgccgaaacagatttggacttaggtcactatgaacgttttattgatattaacttaaataaatactcaaacgtaaccactgggaaaatttattcagaagtcttacgtaaagaacgtaaaggggaatacttaggtgcaacagtgcaagttattccacacattaccaatgaaatcaaagaaaaaattatgcgtgcagcgaaaatgacggatgccgatgtgattatcacagaagtaggtggtactgtcggcgacatcgaatcattacctttcctagaagcattgcgtcaaatgaaagctgatatgggtagtgacaacgtaatgtacatccatacaaccttgattccttacttaaaagcggctggcgaaatgaaaactaaaccaacacaacatagtgtcaaagaattaagaagtttagggattcaaccaaatattttagtggtccgtacagaattacctgtttctcaaaacactaaaaacaaattagcacaattctgtgatgttaatccagaagcggtaattgaatctcgtgatgttgaaacattgtactccattccattagcacttcaagcacaaaacatggatcaaattgtttgtgatcatttaaaattggacgcaccggctgcagacatgactgagtggcgtgcattagaagaaaaagttcttaacttgaaaaagaaaacaaaaattgcgctggttggtaaatatgttgaattaccagatgcctatatttctgttgtagaagcattaaaacatgctgggtttgattttgattcagatatcgaaattgattgggttgattcacaagaattaactgctgaaaatgtcgctgaaagaattggttcagcagatggtattttggttcctggtggttttggtgatcgtggaattgaaggaaaaattgaagcgattcgttttgctcgcgaaaatgacgtaccattccttggcatttgcttaggtatgcaaatggcctgtgtagaatttggtcgtaacgttgtgggcttagaagatgctggttctgcagaaactaatcctgacgtgacaaataacattattgatttaatggcagatcaagaaaacattgagaatttaggtggcacactacgtttaggtttatatccatgtaaattgaaaaaaggaacgaaaactgcggcagcatacggaaatgaagatgttgtccaagaacgtcaccgtcatcgttatgaatttaacaacaaatatcgtcaattatttgaagaaaatggcttagttttctctggagtttcaccagataatcgtttagttgagattgttgaaattcctgaaaaacaattttttgtggcttgtcaattccacccagaattaatttctcgtccaaatcgcccacaacgcttaatcaaaggatttgttggtgcagctttggcaaataaagaaagtaaa

SEQ ID NO: 6298 - DNA, 273 bp, Enterococcus faecalis
atggcagttaaaattcgtttaaaacgtatgggttctaaaaagagtcctttttaccgtattgtagtagctgattctcgttctcctcgtgatggacgtttcatcgaaactgtaggtacttacaaccctttgaaagaccctgcagaagtagttttaaaagaagatttagttttagattggttatctaaaggtgcgcaaccttctgatacagttcgtaacatcctttcaaaagaaggcgttatgaaaaaacatcatgaagctaaaaacgttaagaaa

SEQ ID NO: 6299 - DNA, 2778 bp, Enterococcus faecalis
atgaaaatgaaagaaacattgcaattaggaaaaacagcttttccaatgcgtgggaacttgccaaaccgtgaagcagaatggcaaaaagactgggaagaaaaaggcttatatgaacaacgtcaaaaattaaacgaaggaaaaccaacctttgttttacatgatggccctccgtatgcaaacggaaatattcatttaggacattctttgaataaaatcagtaaagatattattattcgttcaaaatcaatgtctggtttccgttctccttatgtgcctggttgggatactcatggtttaccaattgagcaagtgttaaccaataaaggggttaaacgtaaagaaatgactgtcgctgagtatcgcgaaaaatgtaaagagtatgccttatcacaagtcgataaacaacgtaacgattttaaacgtttaggtgtgtcaggcgattgggaacatccatacattacgttagatccagagtatgaagcagcagaaattcgtgtttttggtaagatggcagaaaaaggctatatttataaaggtttaaaaccaatttattggtctccttcaagtgaatcttctttagcagaagcagaaattgaatacaaagatgtaaaatcaccttctatttacgtagcttttaatgtggccgatggtaaaggtcttttagataacgagacagccttcgtcatctggacgacaaccccttggacattaccagccaacttaggtatttcagttaatcctgattttacgtatgttgaagtgaaggcagacggtcgtaaatttgtaattgctaaagatttattaacaacagttaaagaagcgattggttgggaagaagtagaagtcttgcgagaattttctggtgaaaaattagatcgtatgacagctcaacatccattctatgatcgaacatcacttgttatgctaggcgaccacgtgacgctagatgccgggactggcttagttcataccgcaccaggacatggtgaagatgactatatcgttagccgtaaatatgatttacctgttatttctcctgttgacagccgtggggtctttacagatgaagcacctggttttgaaggaattttctatgacaaagcgaatccaatgattactgagttattagaagaaaaaggcgcgttattaaaattagatttctttacgcatagttatccacatgattggcgtaccaaaaaaccagttatctaccgtgcaacgccacaatggtttgcttcaatctctaaattccgtcaagatattttagatgaagttgagaaagttgactggctaattccttggggaaaaacacgtttatataatatgattcgtgaccgtggtgattgggtaatctctcgccaaagagcgtggggtgtaccattaccgatcttctatgctgaaaatggggaagccatcattacgccagaaacaattgaacatgtagcgaatttatttgcagaacatggatcaaatatctggtttatgcgtgaagcaaaagagttactaccagcaggctttacacatccaggttcaccaaatggcgagtttaccaaagaaacagatatcatggacgtttggtttgactcaggttcttcacatgaaggagttttacgagaaagagaagagttaactttcccagcagatatgtatttagaaggttctgaccaatatcgtggttggtttaactcaagtattacaacaagtgtcgctatcaatggagtagcgccttataaatcaattatttctcaagggatggttctcgatggcgaaggccgtaagatgagtaaatcgttaggcaatactatcttacctgaaaaagttatcaatcaaatgggggcagatatcttacgcttgtgggtaagtagtgttgacgcggaagccgatgtgcgtgtctcaatggatatcttaaaccaagtatctgaagtgtaccggaaaatccgtaatactatgcgtttcttgttagcgaatacgagtgattttaatccagctgagcatactgtagcttatgccgatttacgttctgtagataaatacatgacggttcgtttaaatcaagtcattcaagaaatccgtgaaaatggttatgaaaaatataatttcatgcatatttatcggacagttatgaacttcttaactgtagatttatcttctttctatttagactttgcgaaagatgtcgtttatattgaagctgaaaacgattatcaacgtcgttgtatgcagactgttttctatcaaacattggtttcgttaacaaaattattgacaccaattattccacatacagcggaagaaatttggagtttcttacaagaagaagaagagtatgtgcaattagctgaattcccaggttacgaaacgtttactaatgaagaagaattgatggatacatgggcagcctttatggatttccgtgacaatgtcttaaaagcgttggaagaagctcgtcattctaaattaatcggtaaatcgttagaagccaaagtgaccgtttatccaaatgaacaaattcgtcaattaatgacagctgttgatgcagatattgctcaattactaattgtttccgactttgaagtatcaaaagaagtagcacctagtgaagctgttcaatttgaagacatggctattttagttgaaaaagcagaaggcgaaacgtgtgaccgttgtcgttccgttcgtcaagatgtcggctcagatgaaaaattaccaacactttgtggccgttgtgcacacattgttgaagaaaattatccagaagcggttgctgaaggattcgaa

SEQ ID NO: 6300 - DNA, 4353 bp, Enterococcus faecalis
gtgacagaaaaagcacgcgatttatttgataaactgatgacgcaaattcagttagatgacacagcgaaagaacatcccttaattcaaaatggccggattgacaaggtcattgttcaccaacaaagtcgcttatgggaatttcatttaagttttgatgaattgatgccagtgatgctatatcaaacatttatgcaacaattggaactagcttttcaacaaattgcgcaggtttccgttcaaataaccacaaatcagacaacatttacagaggaacaattaacggattattggcaattggccttgttaaatagtcaatgcaatacgccgttagttcagaaagtcttaaaaacacagacaccacaatttgaagatcggaaaattatcttacctgttgataatgaagcagttattccttatttgaagcaacaatatttaccaattattgaggaactttatttctcttacgggtttcctaaatttcatattgaaccaaaaatggatcaacagcaagctgcagaagtgctgaaaaaatttgaagagcaaaaattagaacaagccgcagcctttcaacaacaagctgctgaatcgcttgttaaacatgaacaaatgaaaaaagaaaaacaacaacaagcgcctgcgtttgatggtccaattcgtttaggtcggaatattcccaatgatgaacccattatgccaatgggaaacatactggaagaagaacgtcggataacgattgaaggctttatttttgataaagaagtgcgtgaattgcgttctaaacgaaaaattttaattttgaaaattactgattatacttcctctttcgtggtgaagaaattttcgaatggggaaaaagatgaacaagtttttgatgcgattcaaccgcaaagttggattcgtgttcgtggtagtgtacaagaagataccttcatgcgtgatttagtcatgaatgctcaagatttgatggaagtcgcccatgcgccaagaaaagactacgcgccagaaggtgaaaaacgtgtagaattacacatgcatagtaacatgagtacaatggatgcgaccaataaagtcggtgacttggtggcgcaagcggggaaatggggtcataaggccatcgcaattacggatcatggcggcgcccaagcgtttcctgatgcccatgctgcaggtaaaaaagcaggcgttaaaattttatacggcgtggaagccaatattgttgatgatggtgtacccattgcttacaacgaagaacatattgaattaacagatgctacctatgtggtctttgacgtggaaacaacggggctttccgctgtttatgatacaattattgaattggccgctgtcaaaatgcacaaaggaaatgtcattgagacttttgagcaatttattgatcctggccatccattatctcaaacaacgatcaatttaactgggattacagatgaaatggtgcgcggttcaaaatccgaagaagaagttttacgcatgtttaaagagttttcagaaggaactattttagtggcccacaacgcttcttttgatatggggttcttaaatacaagttatggcaaacatggaatacctgaagcggctaatcccgtcatcgatacattagaattatccagattcttgtatccacatttcaaaagccatcgtctaaataccttatcgaaaaaatttggcgtcaacttagaacaacatcaccgcgccatctatgactcggaatcaacaggtcatttgtgctggattttcttaaaagaagcgaaagagaatcatgatatgcatttccatgatgatttgaatcgtcatattggcgaaggagactcatacaaacgagctcgacctttccatgcaacgattttagcaacaactcaagcaggattaaaaaatctttttaaattgatttccatgtccaatgtagattattttttccgagtaccacggattcctcgttcgcaattatcgaagttaagagaaggacttttaatcggttccgcatgttcaaacggcgaaatttttgaagcaatgatgcaaaaaggtgtcgaagaagcaaaaaatcgtgccaaattctacgattatattgaagttatgcccaaaccagtttacgcgccattaattgaacaagaattggtgaaaaatgaagcagatttggaagaaattattagtaatctggtgaaaatcggtgacgaacttggtaagctggttgtcgccactggaaatgttcattatttaaatgaagaagatgccatctatcggaaaattttagtcgggtctatgggcggcgctaatccgttaaatcgccatagtttaccaaaggttcatttcagaaccaccgatgaaatgttaacggaatttcaatttttaggacaagacatcgctaagcgaattgtagtagaaaatcccaacaaagtcgctgatttatgtgaagaagttattccagtaaaagacgatttgtatacgccgaaaattcctgggtctgaacaagagatcactgatttaagctacaatcgtgcgcgcgaattgtatggcgatcctttaccagaaattgtcgaaaaacggttagaaaaggaactgaattcgattaacgggaatggtttctcggtcatttatttaatttctcaaaaactggtgcataaaagtaatgaagatggctatttagttggttcacggggctctgtcggttcgagttttgttgcgacaatgacagggattactgaagtaaatcctttagcgccacattattattgtcctgagtgtcaatattctgagttctatgaagatggttcctatggttcagggtttgatatgcctgaaaaagcctgtccaaaatgtggcgctcgattgtttaaagatggtcacgatattccttttgaaacgttcttagggttccatggcgacaaagttcccgatatcgatttgaacttttctggcgattatcaagccgaagcccataactacacgaaagttctttttggtgaagaatatgtctaccgggcaggaaccattggtacagtagccgacaaaacagcgtatggctttgttaaaggatatgaaagagatcataatttacatttgcgtggtgctgaaattgatcgcttagccaaaggttcaacaggggttaaacggacgactgggcagcatcccggcggtattattgtaattcctgattacatggatgtttatgactttacgccaattcaataccctgctgatgatcaagaggcagaatggaaaacgacgcactttgatttccattccattcacgataatattttaaaacttgatattctaggacatgatgatccgaccgtgattcggatgttacaagatttatctgggattgagccaaaaaccatcccaacagacgatccagaagtgatgcgtatttttgaaggacctgatgttctaggtgtggatgcagagcaaatttattctaaaacaggaactttaggaattcctgaatttgggacacgtttcgttcgaggtatgttagaacagacccatccatcaacttttgcagaattacttcaaatttctggactgtctcacggaaccgatgtgtggctagggaatgcagaagaattgattcgtcgtggcgaagccaatcttgctgaagtaattggttgtcgggatgatatcatggtttatttaattcatgctggtttggacagtgggatggcctttaagattatggaaacggtacgtaaaggacaatggaataagattcctgatgaactacgggatacgtatttaaatgcgatgaaagaaaacaacgtccctgactggtatattgattcttgttctaaaattaaatatatgttcccgaaagcccatgcggcagcatacgtattaatggcgttgcgggtcgcttactttaaagtttatttcccaatcttatattactgtgcgtttttctccgttcgggcggatgacttcgacttagtggcaatgtcacaaggaaaagaagctgtgaaagcacgaatgaaagaaattacggacaaagggatggacgcctccactaaagagaaaaacttattaacggttttagaattatgtaatgaaatgttggaacggggctataaatttggcatgattgatttgtacaaatcagatgctgaaaattttgtgattgaaggggataccttgattgcacctttccgagcagtgccaagtttaggcctcaacgtagcgaaagccattgttgctgcgcgagaagagcaaccgttcttatcgaaagaagatttggcaacacgaggcaaagtttctaaaacgttaattgaatacatgaatgaaaatggtgtcttaaaagacttgccagatgaaaaccaattatcattatttgatatgtta

SEQ ID NO: 6301 - DNA, 963 bp, Enterococcus faecalis
atggagtggacacagatttttattcccatagtggtgagttttgccattacagtgagcgtaatgccactattcattggctattttcaaatgaaaaaacaagggcaggttactcgtgaagatggcccgacttggcatagcgtgaaaacaggtacccctacaatggggggagtcgttttccttgtagccagcttgattacttcattagcaatggggttgttcttccaccaatttacgccgtctctactaattattctatttattttagtattatacggtttgttaggttatttagatgatttcattaaagtctttaaaaaacggaacatgggcttgaattctcgtcaaaaattaattggtcaaatttttggtgggttggttttctactttgtttatcgaagtgaaggcttttcagacaccttagatttgtttggagtagcagaagttccgttaggtattttttatggtgtgtttattattttttggttagtcggtttttctaatgccgtgaatttgacagatgggattgatggcttagttgctggtttaggaacaatttcatttggtacttatgcaattattgcctggaaacaacaacaatttgatgttgtgattatctgcctaagtgtgattggtgggctgattggctttttcccttataacagaaaaccagcaaaaattttcatgggtgatgttggttcattagcattaggtggattgttagcagcaatttcaattattttgcatcaagaatggacgctacttttaattggacttgtctacgtttgtgaaacagcaagtgttattttacaagttgcttcatttaaattatttggtcgacggatttttaaaatgtcaccaattcatcaccattttgaaatgtgtggttggtctgaatggaaaattgattttgtcttttggtctgtcggtttaatctgttcaggaatcacattatggattcttttc

SEQ ID NO: 6302 - DNA, 1368 bp, Enterococcus faecalis
atgaaaaaaataacaacctatcaaaacaaaaaagtgttggttttaggactagctaaaagtggtgtcagcgcagcgaaactcttacatgagttaggtgcgctcgttaccgttaatgacgcaaaacaatttgatcaaaaccctgacgcccaagatttattaaccttgggtattcgtgttgttacaggggggcatccaattgaattgttggatgaagaatttgaactaatcgttaaaaatcctggtattccttatacaaatccacttgtggcagaagcactaactcggaaaattcctatcataactgaggtggaattagcaggtcaaattgccgaatgtccaattgtcggcattacgggcaccaatggtaaaacaaccacgaccacgatgattggtttactgctaaacgctgacagaacggctggtgaggcacgtttggcgggaaatattggttttccagcgagtacggtggctcaagaagcaacggccaaggataatcttgtgatggaactttctagttttcagttaatgggaattgagacgtttcacccacaaattgcagtaattacaaatatttttgaggcacacttggattatcatggttcgcggaaagaatatgttgctgcaaaatgggccattcaaaaaaacatgaccgcagaggacaccttgattttaaattggaatcaagtagagcttcaaacgttagccaaaaccacagctgccaacgtattgcctttttcaacgaaagaagcagtagaaggggcttatcttttagatgggaaattatatttcaatgaagaatatattatgcccgccgatgagctagggattcctggcagtcacaatattgaaaatgcactcgcagcgatttgtgtagctaaattaaaaaatgtatcgaatgctcagattagacaaactttgacaaacttttcaggcgttcctcatcgaacgcaatttgttggcgaagttcagcaaagacgtttttataacgattcaaaagcaaccaatattttagctacagagatggcgttaagtgggtttgacaaccaaaagctacttttacttgcgggtggcttggatcgcggtaactcatttgatgaattggttcctgccctgttgggactcaaagcaattgttttgtttggagaaaccaaagaaaaattggcggaagctgctaaaaaagcgaacattgaaacaattttatttgctgaaaatgttcaaacggcggttaccattgcctttgattattcggaaaaagatgatactattttactatcacctgcttgcgcaagttgggaccaatacccgaattttgaagtacgcggggaagcctttatgcaagctgttcaacaattaaaagaaagtgaaatg

SEQ ID NO: 6303 - DNA, 1182 bp, Enterococcus faecalis
atgacagaaagacatttatttacatcagaatccgtttcagaaggacatccagataaggtagctgaccaagtcagtgatgcaattttagatgcgattttggagaaagatccgatggcccgcgtggcatgtgaaacatccgtaacaactggtttagtcctagtatttggagaaatttctacaacagcttatgtagatatccaaaaaattgttcgtcaaactgtgaaagatattggttatacacgagcaaaatatggatttgatggagagactgtcgcagttcttgtagcaatcgatgagcaatcacctgatatcgctcaaggggttgacgcagccttagaagtgcgtgatcaagatgaaaaagacgatattggcgctggtgaccaaggcttaatgtttggttttgctgttgacgaaacaccggaattaatgccattaccgatcgcgttaagtcatcgtttggttcgccgtttagcagaattgcggaaggaaaaagtcttaccttacttacgtcctgatgcaaaatctcaagtaacagtggaatatgatgatcaaggtcaaccacaacgtgtggatacgatcgtcatcagtacacaacatgatgatgaaacaaccttagaacaaatcgaaaaagatattaaagaacaagtaatcaatgaggtgattcctcatgaacttttagatgatgaaacaaaatactttatcaacccaactggtcgctttgtaatcggtggccctcaaggagatgccggcttaactggtcgtaaaattatcgttgatacttatggcggttatgctcgtcatggcggcggtgctttttctggaaaagatgcaaccaaagttgaccgctctgctagttatgctgcgcgttatatcgcgaaaaacattgttgctgctggtttggcgaaaaaagtagaagtccaattagcttatgcaattggtgtggcgcaaccagtgtctatttctattaatacgtttggtacgagtgatcttccagaaagtaaattaatcgaagcagttcgtaaaaactttgatttacgtccagcaggcattattgaaatgctagatttacgtcgcccaatttataaacaaactgcggcttatggtcattttggtcgaacagatattgatttaccttgggaacaaacagataaagttgaagcgttaaaagctagtttagctgaa

SEQ ID NO: 6304 - DNA, 1473 bp, Enterococcus faecalis
atggaaagaggaatgaacatgacgaaagttcgtgtgcgttacgcaccaagtccaactggacacttgcacattgggaatgcaagaacagcattatttaactacttatttgcccgccacaatgacggagaatttatcattcgtatcgaggataccgaccaaaaacggaacatcgaagacggcgagaaaagtcagttggaaaacttagcatggttagggatggaatgggatgaatcacctgctcatccgggagaatatggtccatatcgtcaatcagaacgtaaagaaatttaccaaccattgattgatcaattattaagtagcaatcgtgcgtataagtgttattgtacgccagaagaattagaagcagaacgtgaagcacaacaagctcgtggggaaatgcctcactacgcaggcacttgtgcgaatttaacaccttctgaacaagcagccaaagaagcggctggtctagaaccagtgattcgtttccgtgtgccacgtaatacagaatacaaatttgatgacatcgtgaaaggtgaaattacttttgagtcagataacattggtggcgattttgtcatccaaaaacgcgatgggatgccaacgtataactttgccgttgcagtagatgatcacttaatgaaaatttctcatgttttacgtggcgatgatcacattgcgaacacaccaaaacaattaatgatttacgaagcgtttgaatggacaccacctgtctttggccatatgaccttaatcattaattcagaaactggcaaaaaattgagcaaacgtgatgaaacaattttacaatttattgaacaataccgtgaattaggttacttaccagaagccatgttcaactttattgctttactaggatggtctcctgttggcgaagaagaaatcttctcacaagaagacttgattaaattgtttgatgaacaacgcttaagcaagtcaccagcggcctttgatgcgaaaaaattagaatggattaacaatcaatacatgaaacaaatggacttaagtgaactaacagatatgtgtattccttatttagtcgctgacggtcgtgttgaagaaaatccatctcctgaaaaaatcgaatggttaaaacaattagttagcttgtatcaaccacaaatgagttatgcagctgaaattgtggaactatcaaacttgttctttaatgaacatccagttttagatgatgctgcgaaagaattcttgcaaggagaaacagtgccaactgtgttacatgcgtttaaagaacaattagaagccttggacgttttcgatgtcccaagtattaaagcagcgattaaagccgtccaaaaagaaaccggcgttaaaggcaaaaacttgtttatgccaattcgaattgctgtttctggacaaatgcatggccctgaattaggcgaaaccatcgaattattaggcaaagaaaaagcattagatcatttaaataaagtgtta

SEQ ID NO: 6305 - DNA, 2226 bp, Enterococcus faecalis
atgagtaaaagacataaatttaaacaattcatgaaaaagaaaaacttaaatccgatgaacaatcgtaaaaaagtaggcatcattttattcgctacgagtattggattgttctttttatttgcctttagaacgacatacattgtggcaacaggcaaagtagccggtgtatcactaaaggaaaaaacagcttctctatatgaaggaagccaagtggtaaaagctaagcgaggatcaattttagatcgatatggtaatccaattgcagaagatgctacttcctattcgttatatgtcgtattatcaaaaaaatatacgggacaaaataatgaaaagctatatgcggagaaaaaagacttcgatgatattgctgaaattttagcgaaatataccaaactagacaaaaaaacagcattgaaatacttgaataatgggatccatgaagatgggtcaacacaatatcaagtggaatttggtacgggtggtcaaaacattaccttggaaacacgccaaaaaattgaagcagatttgaaaaagaaaaaaatttcaggtgtttatttcaatgaacatccagccagattatatcccaatggtcagtttgcttctcactttattggctatacaaaagcagccaatccagatgatgataaagaaggcttagtaggcgcaatgggactagaacagacctataatgatattttaagtggaaccgatggccgtgtgtattttgaaaaagatatttatggcaatgccttaccaggaactgtggcggaagagaaaaaagcagtggatggtcaagatatttacacgacgctagatagtcgcttgcaaaataccttagaagatttaatgacgcaagttaatgaaaaatatgaaccagtttctatgactgccatgttaatggaagcaaaaacaggcgaaattgttgccatgtctcaacggccaacatttaatcctgaaacgaaacaagggttagacgataatggcacgtggcagaacctattagttgaaagtccttatgaaccaggctcaacaatcaaattatttacaacagctgcttctatggaacaaggacagtttaatcctaatgaattattcaatcgtgttggtggaattcaggttggggatgtaactgtgaatgaccatgactacactcggttgaacggcaaagaatatttgaattatcgtcaagccatttcttggtctagtaatattggtatggtaaaactagaacaaaaaatgggtgatgaaaaatggatggaatatttgaaaaaatttggttttggtacgagcacgcattcaggtttaagtggtgaatctgctggtaaattgccaggaacaaactttgtagatagagcaatgtcggcatttggtcaagcaattacggttactaatttccaaatgatgaaaggtttctcagctattgcaaatgacggttcaatgttgcaacctcattacatcagcaaaattgttgacaaaaatacaggaaaagaaacgattacggaaccacaaatcgtaggaaccccaatcaaagcgcaaacagctcaacagattcgtacgtacatgattgataccgttgaagacccaacttatgggattgcgtatgatatttataaagtaccaggctatcatgttgctgccaaaacaggaactgcccagatttcagatggtaaagggtacgttgatggagcaagtcaagtcttgtcttctgtagtggaaatggtcccagcggataatcctgaatatgttttgtatattacacttagacaagcaaaatcaggttcgccttcagaagcaatggcggcaattgcaaatccattaatgaaattagcgttagacattaaagagacagatccggaaacaacgaaagtagcttctgataaagtcacagttgctgattataaaaatatgacaccagcggaagcgttggccaatgccaaagtgaacggggtggatcctgtgattatcggtgatggtgaaaaaatcaagaaacaatcaacgccgtctggtcaaacattaatgcctaatcaaaaattgattttgatcacaaatggaacgaactatatgcctgatttaaccggctggtcgaagagcgatgttaccaagtttggtgatctattaggtttgactgtcgagtttaaaggtgaaggctatgtgacgaaacaaagtatcgctgctgaaactgaaattacggagaaaaaattaaccgtgactttagaaggcacagaa

SEQ ID NO: 6306 - DNA, 1806 bp, Enterococcus faecalis
atgtgtggaattgtcggaatgattggaaaagaaaatgtcacggaaagtttgattcaaggattaacaaaattggaatatagaggttatgattctgctgggatttgtgtgaatgatcaaagccaacagccccatgtagttaaggcagttgggggcattgccgatttagcagcaaaattaacgccagaaatcgatggaacagttggtattggtcatactcgttgggccactcatggcgaaccaactgtcgccaatgcacatccccatgtttcaagcgatcaacgctttgcattagtgcataatggtgtcattgaaaactttgaagaattaaaagaacaatttttaagtggtgctcacttaattggtgatacagatactgaaatcgtcgttcaattaattgctcattttgctgaaaatggtttttcaacaaaagatgcttttaaagcggctttagccgaaattaaaggttcatacgcttttgcattaatggataaaatggaccccaatattatctatgtagcgaaaaataaaagcccgttacttatcggtctaggtgaaggctttaatgttatttgtagtgatgcgatggcgatgattaaagaaaccaatcaatttgttgagattgttgatggtgagattgtaactgttacagcggacaaagtagtaatcgaaacgccagaaggacaagtaatcaaccgagaaccttttgaagcgcaattagatttaaatgacattgaaaaaggaacatatccgttttatatgctcaaagaaattgatgaacaacctgcagtgatgcgcaaaattgttcaagcgtatactcaaggtgaaaaagtgactttagatgaggcgttactggaaaaaattaatcaatgtaaccgaatttacattattgcttgtgggacaagttataatgcaggttgggtcggaaaatctttaattgaaacgattgccagtattcctgtggaagttcatttatcaagcgaatttggctacaacatgcctattttatctgaaaaaccgttcttcattttcttaagtcaaagtggtgaaacggcagatagtcgccaagtactggtacaggttaatgaattagggcatccatcacttacattaacaaatgttgctggctcaacattatcacgtgaagcggacgataccttgttattacacgctggaccagaaattgctgtcgcttccaccaaagcttatactgctcaaatcgctgtcttagctattttagcaaaagcaattggcgaagaacgccaaacattagcagccgtctcatttgatgtggctcacgaattgagcgtggtagcagctgtcatggaaaccttgattgatgaaaaacaacaaatgaaagccttggtggaagattatctgacgtatactcgaaatgccttctatatcgggcgaggagtcgactattatgtgtcgatggaagcggccttgaagttgaaagaaatttcctacattcaagcagaaggctttgcggcaggtgaattgaagcatggaacgattgccttaattgaagaaggaacacctgtgattgggattgtgacagatgccaaagtcgctgcccatacaagaggcaatttaaaggaagtcgaaagtcgtagagcaagaaatattgtgattgctttggaatccttggcaaaaccacaggaccaactgattattccagatgttcatccgttactttctgccttagttagcattgttccaggtcaattattagcgtactatgcaaccttacaaagaggctacgatgttgataaaccaaggaacttagccaaaagtgtaactgttgaa

SEQ ID NO: 6307 - DNA, 486 bp, Enterococcus faecalis
atgcagttagaagaagtaaaagcactattaacacaatttgatcaatcaactttaaccgaatttgatttacgagaaggctcgtttgaattatatatgaataaaaatacagtttctgggcgaagtgccgtagaaccagtggcgcaaccacaagaaacaccagtagccgctagtggtgtgtcagtgcctgttgaaacagtttctgtcgttgaagaaacgccaactaatacaccgacagccaatgaaaagacagaagaaattacgtcacctattgtaggaatcgtttatttacaaccagcaccagataaagagaactttgtcaaagtaggagacactgttaaaacgggtgacgttgtgtgtatcgttgaagcgatgaaattaatgaatgaaattacggcgacagttgacggtgtgattactgaaatattagtcaacaatgaagatgtggttgaatttggtcagccgctattccgagttgctaaaggagaa

SEQ ID NO: 6308 - DNA, 2640 bp, Enterococcus faecalis
atgaaagaattaacaagtagtcaagttcgccaaatgtatttagacttctttaagtctaaaggacattcagtagaaccaagcgcttctttagtaccagtaaacgatccaacattattatggattaactctggtgttgcaaccttgaaaaaatattttgatggctctgttgtgccagaaaatccaagaattacgaatgctcaaaaatctattcgtacaaatgatattgagaatgttgggaaaacggctcgtcatcatacaatgtttgaaatgttagggaacttctcaattggagattattttaaaaatgaagcgattcactgggcttgggaatttttaactggtgctgaatggcttgcttttgacccagaaaaattatatgtgactgtttatccgaaagatacagaagcaaaacgcatttggcgtgatgaagttggtttatctgaagatcatattattgatgtagaagataacttctgggatatcggtgctggtccaagtggtccggatacggaaatcttttatgatcgcggcgaagaatttttagatattccagaagatgatccagaaaattatcctggtggcgaaaatgaacgctatttagaaatttggaacttagtgttctctgaatttaatcatacaccagaagatacgtacgaaccattaccacataaaaacattgatacgggcatgggcttggaacgtgttgtatctatcattcaagatgcaccaacaaattttgaaactgatttatttatgccaatcattcatgcggtagaagctttaggaactaacgtgaaatatggagatgcaccacaaacggatgtttcctttaaagtgattgctgaccatattcgtgctttatcctttgcaattggtgatggtgcgcttccttcaaatgaaggtcgtggctatgtgttacgtcgtttattacgtcgtgcggtaatgcacgggaaaaaattaggcattaatgaagcctttttatacaaattagtgcctgttgttggcgaaatcatggtaagctactatccagaagtattacaacaaaaagacttcatcgaaaaagtggttcggacagaggaagaacgtttccatgaaaccatcaatgaaggtttaagcatgttaaatgaggttattaaagaagttaaagatgcaaaaggcgatacattagatggaaaaattatcttcaaactttatgatacttttggcttccccgtagaattaacggaagaagttgcagaagatgaaggcttgaaagtcgaccatgctgggtttgaaacagaaatggaagcacagcgtgaacgtgctcgttctgcccgcagtaaagaaacttcaatgggtgttcaatctgctttattaacagatattaaagtagaaagtaaatttgttggctatacagaattaacacatgatagtgaattatttgttattattcaaggtgacgcactagtaaatgaagcatctgcaggaacagccgaattaatttttgctgaaacaccattttatgctgaaatgggtggacaaattgctgaccgcggctatgtaaaaaataccgcaggggaagtcgttgccaacgtggtggatgtgaaaaaagcaccaaacggtcaatttttacacaaagtagaagttttggcgccattagcagaaggtcaaatttatcaattgcaagtggacgaacggatgcggacacgtattttgaaaaatcatacggcaacccatttattgcatcgtgctttaaaagatgtgttaggggagcatgccaaccaagcaggctcattagttgcaccaggacatctacgttttgactttactcattttgggcaagttacatcagaagaactagcgcggatggaagccatcgttaacgaaaaaatctgggaagctattcctgttgtcacaattgaaacagatattgatacagcgaaaaacatgggcgcaatggcgttatttggcgaaaaatatggcaaagaagtccgtgtagttaatattggggattactctatcgaattatgtggtggaacacacgttgctaatacagaagatatcgggattttcaaaattgtttctgaatctggaattggtgcaggagtacgccgtattgaagcagtgacgagtaaagaagcgtatcaacttttacaagaagaagaacgtcaattgaaagagattgctacattagttaaatcacctcaattaaaagaagtggttacgaaaacagagcaattgcaacaacaattacgtgatctacaaaaagaaaacgaacaattggcaggcaaattagcgaaccaacaagctggtgacatttttaaagatgtcaaagacatcaatggtgttcgttatattgccgctcaagtcaatgttaaagacatgaatcaattacgccaattggctgaccaatggaaacaaaaagaattgtctgatgtactagttctagcaactgcacaagatgaaaaagtaagcttgttagcggctatgacaaaagacatgaacggaaaaggcttaaaagccggtgacttaatcaaagcaattgcgccaaaagttggcggtggcggcggtggtcgtcctgatatggctcaagctggtgggaaaaatccagcagggattgcggatgccttagcagaagttgaaaactggttggcaaatgcc

SEQ ID NO: 6309 - DNA, 468 bp, Enterococcus faecalis
atgcctcgtaaaggtcctgttgcaaaacgtgatgttttaccagatccaatttataactcaaaattagtaactcgcttaatcaaccgtgtaatggttgacggtaaacgcgggattgctgctaacattatctataattcatttgatatcatcaaagaatctacaggtaacgatccattggaagtttttgaacaagcaatgaaaaacgttatgcctgttcttgaagttaaagcacgtcgtgttgggggttctaactaccaagttccagttgaagttcgtccagaacgtcgtacaactttaggtttacgttgggtagttaactacgcacgtctacgtggtgaacacacaatggaagaacgtctagcgaaagaaatcatggatgctgctaacaacactggcgcttctgttaaaaaacgcgaagacacacacaaaatggcagacgcaaaccgcgcatttgctcattatcgttgg

SEQ ID NO: 6310 - DNA, 1344 bp, Enterococcus faecalis
atgacgcaacagtatttaacagtaacagccttaacgaagtatttaaaacgtaaatttgatgcagacccttacttaggacgtgtctatttaacaggtgaaatttcgaactttcgcttccgagcgaacgcgcatcagtacttcagtttaaaagatgatcatgcgaagatttctgcaattatgtttaaatcagcctttcaaaaattgaagtttcaaccaaaagaaggcatgaaagtcatggtggtggggcgtatttcgctttatgaaaacagcggctcctatcaaatttatattgaacatatggaaccagatggtgtaggtgcactttatcaagcattggcagaattaagagaaaaactaggaaaagaaggactttttgaagggcctaaacaacagttgcctcgttatcccaaacgaatcgctgtggttacaagtcctagtggtgctgttattcgggatatcattacgacagtcaaaagacggtatccgattgcacaactggtcctttttccaaccttggtccaaggcgagcaggcggcggatgacattgtgcggaacattcagcgagccgatgcgcaaagcgattttgatacgatgatcatcggccgtggcggtggttcaatcgaggatttatggccatttaatgaagaaaaagtggctcgagccattcatgctgccaccacaccgattatttcatcggttggtcacgaaacagatgtgacaattgccgatatggtagcagatgttcgtgcagcaacgccaacggcagcagcggaactagcggtaccagttttaaatgaagaactattaagaattagtgaacggcgtagtcgtttagaacaaagctttttatatctcttacaacaacgaacagaacgtttccaacgactacaaaattcttatgtgtttaagcaacctgagcgactttatgaaggtcaaacgattaaattagatcgaatgacgcaacgtcttttccaagcaatgacaacaattcatcaccaaaaacaacgtcaagcccaaggaattatcgctcaattgcaacaacagacaccaaagggacaattaagagaaagtcagcaacaattggcatttttacaacgaaacttgcaaacacaaatgacacaattgttcctaaacaaacaaaagcaattcacgtctgctgttcaacaactagacttactcagcccactcaaaattatgggtcgaggatatagttatactacaaaagaggaccgtgtcgttaaaactgttaccgagttacagccagcagatcaattaacgattcattatgctgacggtacagttcaagcaaacgtcgaaacaataacagcgaaaaaagaggagttt

SEQ ID NO: 6311 - DNA, 699 bp, Enterococcus faecalis
atgaaccagcgaactatttattatggtagtatcggcacagccttatttctttcttcaggaatgttgattgcttcagtgaatagctatgcaaacgaagcgacaacaccaggcaaatacaccgtgacttatgaagtggatggcaaaattgaaacagcaaccattacggtcaaagaaaatcaaacggaacttaaattaaaagacacgtttttaggagttaatcaagcatggtcaccattagacaatgtcgtttttctaaaagataaagagggtcgccctttaaatttagaaaatgtaattatagaaaataatgtaaatactcaaaaagtaggcctttattttgtaaccttccgttacgagtcatacctttctattgcgaaggtgtatgtcaaccctactaattttgctgcagaggggaatatgcttgcagagcttccttatagtcaagcaatgattggcccagaaagatcaattattgcctcgagacaggacaaggagcaacaaacaaaacaggagaaaaagaaaaataaaattgaacaggaacgagtaaataaaaaggtgctgttaaatgatgagttgttgaaaaaaatagatacgatagccccagtggaaattactggaggagcggcaagtgggtcctctcaatttggcaccactttaagcttcctgtcaggctcacttttgtatggaacaaggagagtt

SEQ ID NO: 6312 - DNA, 1434 bp, Enterococcus faecalis
atggaattcttgttattagatgatcgggaaaatttaaaattagcgattattagaaagttagagcaacaatattcattttctgaacgaaaagatcgtttatgtaagcaattagctatttctccttatttgctagaacggaacataacagaaatcaatgcagatttgcaacgctttggtctgattaatgagatggaaatcagtgaaaaaaataatgaaattttgttatctcaaagccttcgtatttcttcaagtattattgaagaatattatttaaaagactcgttagaatttaatctattaaaaacgattttctttcatcagtttacctcaatcaaaaaatacggtgaaaagcacgggatgagtcgaacggttgtatataaaattgttgaccatatccggaaagaattaggtcaatacggtattaagttatccaaaaatttacaacttagcggcaatgaaatggcgattagacaatattttactatgctttattaccgaatttacaaagattctgaagaattatataatcaaacagatcttcgcgcagtgaaccaattattggctcaattgaaaggctcttatgaaaatatcactaattttcatttatttaaacattatgtattggtggcgttagaacgaacgcaaagaaaagctaattattttttatcccaagaagaaaatccattcgcttttgatgaagaaagttcgatttatcaagaaattcaaagttggatcaacgaagtgatgaaggcgactcatgcagagaaaaacgcagaaattcaaggaattatcggcaatttatcggtctatcaaagtgaacttatttcggaacatttgctgagttctcacaatgaggcaattacggctacgaaaacattattcttttcttatatgccgtttacaatttcggacgaagaattttatcaagaaattgttccgattatttatcaacatcgttttattacgccgttcatcgatatcaccttacgaattatggatttagaattttttcaggaacgctacccaattgtttttaatagctgtcgtcagtttttatttgcgttggattgctcggcgtttgagtttagtaagctttctttattttttgatttgctattagtgttatcccgtctttatgaccaaaggaatgaaaaaagcacgatcaatctttatgtgaattttacgcaaggagaaaaatatactcagtttatcaaagaacaaatcaaaatattcgaatctttcagcattcactttcattcagcgattcgaccagatactgatttagtagtttcggattatttaccaaaaacgttattttcagtaaaatgtttaatttggctagcgcccccgcgagccagtgactggcaaaattttggcaacgaaattgtccgaattaataaagagctacaacaaacgaaacaaagaaaaagcgaa

SEQ ID NO: 6313 - DNA, 1494 bp, Enterococcus faecalis
gtggcagaagaacaacaagcgcatttagaggatttaaatgatcaaatgctcgtgcgccgcgaaaaaatggaagctttacgtgaagaagggattgatcctttcggtaaacgtttcgatcgcactcataattcagcagaacttcatgaacaatatgataatcatacaaaagaagaacttagtgaaatgaatacagaagtcagcgttgctggacgtatgatgacaaaacgtggtaaaggaaaagctggtttcgcccatttgcaagaccgtgaaggccaaattcaaatttatgttcggaaggaccaagttggagacgaagcctatgaactatttaaacatgctgacttaggcgacttctttggtgtgacaggtcaagtaatgaaaaccaatacgggggaagttactgttaaagctcaaacaattacgttattaactaaagctttgcgtccattgccagataaataccatggattaacgaatgtggaacaacgctatcgtcaacgctatttggatttaatcagtaacaaagaaagctttgatcgtttcatgaaacgcagtcaaattattagcgaaatccgtcgttatctagatggcaatggctatgtcgaagtagaaacgcctgtcttgcataacgaagcaggaggagctgctgctcgtccatttatcacacaccataatgcgttagatatggacttatacttacgcattgccctagagttacatttaaaacgtttaattgtcggtggcatggaaaaagtatatgaaattggtcgtgtcttccgtaatgaaggaatcgataccactcataacccagaatttacaatgctagaagcttatactgcttatactgattatcaagatgtgatggatttaacagagggaattattcgtaatgctgcggaaaaagtcttaggaactactgatatcacgtacgatggtcaagcggttgacttaggaagtcctttcaaacgtctacacatggtagatgcggtcaaagaacaaacgggcgtagatttttggcaagagatgacgatagaagaagcccgtgcgttggctaaagaacataatgttgaaattacagatgccatgacagtcggtcatatcattaatgaatttttcgaaacatttgtagaagatacgttgcaacaaccaacatttatttatggtcacccagtcgctgtttcaccattagcgaagaaaaatccagaagatggtcgtttcactgaccgctttgaactatttattatcggaaaagagtttgctaatgcatttacagaattaaatgatccaattgaccaacgtgaacgttttgaagaacaagaaaaagaacgggaacaaggaaatgatgaagcacacggagtagatgaagatttcatcgaagccttagaatatggcttgccaccaaccggaggattaggtattgggattgatcgactagttatgttattaaccgatgcacaatcaattcgtgatgtcttgctattcccaacaatgaga

SEQ ID NO: 6314 - DNA, 3813 bp, Enterococcus faecalis
atgaggaaggagcaaccgaagatgagtaaaacaattccactacgtccagccaatgagcaattcaccgacagtcaatggcaagcggtgtttgatggcgatgaaaatatcttagtttctgcttcggctggctcaggaaaaaccaccgttttagtccgccgtgtcattgaaaaagtcaaaagcggcgtcgatatcgatcgtctcttgattgtgacgtacactgaagccgccgcccgtgagatgaaagaacgtatccaagtggctttacaaaaggcaatgaatgaagaacaagatccagaaagaagacggcatttttctcgtcaaattgctcttttgccaacagccaatatcagcacgttacatgccttttgtttaactgttattcgtcgtttttattatttaattgacatagatccagtttttcggatgttaacagatgaaacagaaacattgttattaaaagaagatgtttgggatgcattacgtgaacaattttatgcggaaaatcaagaagcgttttaccaattaacagcgaatttttccaatgaccgtagtgatgacggactcactaacttaattttttctttttatgaatttgccaaagccaatcctgatccagaggcgtggattaatggcttaacacaagcctacgaagtaggggatcagctaggcgaatcaaagttatttcagacgtatttaaaaccgctagccgttgagacgttacaacgaactcttcagcgttacgaagaaatggtgaccttaacagagggcgaagagaaacttcaaaagatttggtatttagctcaaaatgaaaaggaacaaacaaaacaatttttacaatttttagagagaaatgatttagagagcgcctataatttgactgaattgttgagctttgaccgctacccaacggttcgtgccgaagagttgaaaccaaccgcggaacaagccaaacagttacgagaacaaaataaaaaagcgttaaatgatttgaaaaagcaactgtttacactttccccagatgccatgaaacaagtcttgaaagaggccacgcccattgttcaagaaatggctcacgtggggaaacaatttatggaggcctatggcgcagaaaaacggcttaaaaatttagtggattttaacgatttagaacattatacgttagctattttagcgaaaaatcaggcagatggctggcatgcatcagaagcctcggtttactatcgcgaaaaatttgatgaagtgttagtcgatgaataccaggatatcaatcaattacaagaatctattttgtattggttgcgccgtccgcttagcacagaaggaaacctttttatggtaggagatgtgaaacagtctatttattctttccgcttggcagatcctacattgtttattgaaaaatacaatcagtatgggcaaggcaaagagggcaaacgaattattctagctgaaaattttcgttctcgcaaagacgttttagactttacgaatttagtatttagtcaattaatggatgagcgagtgggccaaattgcttacgatgagtcagctgctttggttcatggttttgatcaattttcggaggcggctgattattcaactgaattgctaatttatgaaaaaaaagcaacagaatcagttgaatttccagaattacaatcccctgagttgttgattgaagataagacagaaggggaactttacgttactgctttgaaaattcgtgaattaattgaccaaaatttcttaatttatgataaaaagctgaaaacggatcgaccgattacttatcaagatattgtcttattaacgcctacgaagaaaaataatttaactattttagatgtttttaaatcattagaaattccagttcaagtcaatgatgctcaaaattatttccaagcaacggaaattcgtacaatgattgccttgcttcaattgattgataatccttatcaagacattcctttggcagctgtgttacgttcaccaattgttggattaaaagaaaacgaattagtgcttattcgtttggctaataaggaaaccagttactacgaagcatttttaacgtttaatcaaaagatggaaccaaccatggaggaagcagttgttcaggaaaaaactatacgttttgctgaatcattagaaaaatggcgggaacaggctcgacgcaaccagattagcaacttgctgtggacgatttatcgggaaacggcctatcttgattatgttggcgggttgcctgttggcaaacaacgccaagccaatttatatgcgttggtcgatcgggccgcggcgtatgaaaaaacaaccttccgcggattatttcaatttgttcgcttcatcgaaaaaatgcaagaaaaagacaaagatttagcagaaccagtcgttttaagtgaagagaatgccgtacgcgtcatgacgattcacgctagtaaagggttagaatttccggtggtattcgttttagatatgaccaaagaatttaatgtcagtgatttgaatgaacgctatatctttgaagaaaatttaggggtaggcattcgttatttacaacctgaagaacgagttatgtacgatactttaccatttttggcgattaaacaagtacgattaagaaaattactatccgaagaaatgcggaagttatatgtggcgttgacacgtgcagaacagaaactttttctggtaggctcctataaagaccaagcggcgatgtggaaagagtggctgaaagttggcgatgtagaaacactggtgctaccagctgaaaatcgcttgcaaagtaaaagtagtttaatgaattgggttgggatgacattggtacgtcatcaaaaagccgatgaatatcagcaagaagtagtagtaagtaacgttccgcaagtcaaaaagcacccagctaattttcatattcagtggttcaacgaagaacaactacgagcagccattcagcaattacaattgccagaaagacaagcagaggatttagccgaaaaagcgcaattatctgctgacaaaatcaatcgtggccttgcacggttaagtttcaattatccgtttgaagtggctactcggaccaccagttatcagtctgtttctgaaatcaagcgagtatttgatgaccccgataacaaagaaattggtaaaattgaggttcgggaagacaatactattcaagcgcaaccgttgattgtcaatcgaatgattgaaggagatttaagtaagcctaaatttttagatacggttcaagcgccctcagcagctgaaattgggacagcaacccattatttattacaactaattgatttaagtaagcaaccttcttacgaggaagtgcgagctgttcaagaacgcttagtggaaaataaattgattttaccagcaattgctgaaaaaatgaatctggaacaaatcgtggccttctttgacaccgccttaggaaaacaattgattcaacaccatcaaaccgttagaagggaacaacctttttctatgctgattgaagcagaagagctcattcaaaattatccagaaacgacacaagatgatttattaattcatgggattattgatggctatatcgaattagacaatcaatgcattttgtatgactataaaaccgatcatgtaaaaggcacctctccccaagcaatttctgaaattgtcgaacggtatcgcggacagatgaatctttatcgtagagcgctacaagaggcaacgcataaagaggtgtcgcacgtctatttaattttattaaatggaggagtaattattgacatgcagacaggaaatgttgtagattttataaag

SEQ ID NO: 6315 - DNA, 2412 bp, Enterococcus faecalis
atgagctacaatcacaaagagattgagaaaaaatggcaaaaatattgggctaagaacaattgtttcaatacattggacgacccaaataaagaaaaattttatgcactagatatgtttccctatccatctggacaaggcttacacgtaggtcacccggaaggctatacagcaaccgatattctttcacgtatgaaacgtgcgcaaggctataatgtgttgcatccaatgggctgggatgcgtttggtttgccagcagagcaatatgcgttagatacaggaaatgacccagctgaatttactaagaaaaatatcgaaacattccgtcgccaaattaattcactaggattcagctatgattggaatcgtgaaattaataccactgatcctgaatattacaaatggacacaatggatatttacaaaattatatgaaaaagggttagcttatgaagcagaagttgcggttaactgggtccctgaattaggaactgttatttcaaatgaagaagtcattgatggaaaaagtgaacgtggcggttatgatgtggttcgccgaccaatgcgtcaatggatgctgaaaattactgcttatgcagatcgcttattagaagatttagagcttgttgattggccagagagtattaaagatatgcaacgaaattggattggacgttctgaaggagccaatgtgacctttaaagtcgctggcacagaagaaagtttcacggtgtttacaacccgtcctgataccttgtttggtgcaacctatactgttctagctcctgaactagaactagtgaaaaaaattacgacacctgaacaaacagcagctgtagaagcatatattgaagaaacctcaaaaaaatctgatttaaatagaacggatttagcaaaagaaaaaacaggtgttttcacaggtgcgtatgctataaatccagtcaatggccaagaaattccaatttggattggcgattatgttttagcaagctatggcacaggcgcaatcatggcggtcccagcacatgatgaacgggattacgaatttgcgaaaacatttggcattgatatcctaccagtaatcgcaggtggcgacattacaacagaagcctatacaggggatggaccgcatatcaattctgatttcttaaatggattaaacaaagcagaagccatcgctaaaatgaatgagtggctagaagaaaatcacgtagggaaaaaagaagtatcttatcgtttacgtgactggttattctctcgtcaacgctactggggtgaaccaattcctgtgatccattgggaagatggaacaaccacaacggttcctgaatctgagttacctctacgtttaccagtaacatcggatattcgcccaagtggaactggggaatcgccattagcaaacattgatgaatgggtcaatgtcgtcgaccctgaaactggcatgaagggaaaacgtgaaacgaatactatgccacaatgggctggaagctcttggtattacttacgattcattgatcctcataataaaaatgaaattgctgattttgaaaaattaaaacgttggttaccagttgatatctatattggtggtgccgaacatgcggtgctgcatttactttatgctcgtttttggcataaattcttatatgatattggtgtggttcctaccaaagaacctttccaaaaattatacaaccaaggtatgattttaggagaaaacaacgaaaaaatgtctaaatcacgtggcaatgttgtaaatcccgatgatgtggtggctaaatatggtgcggatacgttacgtctttatgaaatgttcatgggcccattagatgcttccattgcttggaatgaaaatggattagaaggaagtcgtaaattcttagatcgcgtttggcgtctgattgttgatgaagaaggcaaaatgcgtgaccgaattaccacaattaatgatggccgtttaacgaaagtttatcatcaaacggttaaaaaagtgacagaagatatggcaaacttgcactttaatacagcgatttctcaattaatggtttttgtgaatgaagccaataaagtggatgccttaccttatgaatatgtggaaggatttgtccaattacttgcgccaatcgcgccacatattggtgaagaactatggcaaattttaggtaacgaggaaagtttaacttatgtcccttggccaacctatgatgaaacggccttagtagaagatgaagtggaagtagttttccaagtgaacggaaaattacgtggcaaacaaaatgtcgctcgtgggttaagcaaagaagaattagaacaaattgcaatgaaccatgaagctgttaaagaatttattgaaggaaaaacagtgcgcaaagtgattgctgttccagataaattagtaaatattgttgcaaat

SEQ ID NO: 6316 - DNA, 372 bp, Enterococcus faecalis
atgccaacagaaatgtttacaaaagaattcttggtgaaagaatcacaaacggctaaaatgctcggttctggtgacttagaagttttaggaacccctgctttagctgccatgattgaacaaacagccaaagaagctgtgaaggaccaattatcagttggggaaacaactgtcggaacggtgttagaattgcgccacttatttccatccgcggtaggggcgacaatcgttgttacgatgaccagcattgaacagactgcacacaaaatacgctatgaatttgttgcttatgaaggagaacgacaaattgccaaaggttctcaccaacgtgcagtagttgagattgattcttttttaaaaagaataacaaaagat

SEQ ID NO: 6317 - DNA, 1368 bp, Enterococcus faecalis
atgttttcgaaagtattaatcgcaaaccgcggagaaatcgctgttcgtattattcgtgcctgtcgcgaattaggcgttcaaacagttgctgtttactctgaagcggatcaagaagcgttacacacacagttagcagatgaagccatttgtattggaccggcgaaagcaactgattcttatttaaatgttcaagctgttttaagtgcagcgattgttaccaatgctgaagcgattcatccagggtttggtttcttatctgaaaatagtcaatttgcttcaatgtgcgaagaatgtaacattacttttatcggtcctaaagcagaaacgattgatgcaatgggcaataaaataaacgcacgtcaactgatgcaaaaagccaaggtacctgttattcctgggagtgatggcgtcattgattctgtcgaagaagcgttgacgattgctgaagaaattggttacccagtgatgttaaaggcagctgctggtggtggcggaaaaggaatccgaaaagttctttcaaaagaagagttaccgaaacactttacttcagcgcagcaagaagccaaagccgcatttggtaatgatgatatgtatttagaaaaaattatttatccagcacgtcatatcgaagtgcaaattttaggtgatcaatatgggcatgtgattcacttaggggaacgtgattgctcactacaaagaaataatcaaaaagtgttagaagaatcaccatcgattgctatttctgaagaaaagcgtcagatgttaggcgaaacggccgttcgagcggcacaagctgtgcattatgaaaatgccggaaccattgaatttttgatggatccagctggcgacttttatttcatggaaatgaatacccgcatccaagtcgaacatccagttacggaaatggtaacagggattgatttagtcaaagcacaattagaaattgcttcaggtgaacctttaggctatacccaagaggatgttatcatgagtgggcatgcgattgagtgccgaattaacgctgaaaatcctgcctttaattttgctccttcaccaggtaaaattcaaaatctcttgttgcctagtggtggaatgggcttgcgtgtagacagcgctatgtattcagggtattcaattccgccttattatgattcaatgattgcaaaagtcatcgtacatggtgaaaatcgttttgatgccttgatgaaaatgcaaagggctttaaatgaaattgtaacagaaggtattattacgaatgccgaattccaattagatttaattacacatgacaatgttttgacaggtgactatgacacaagctttttacaagaaacatttctaccaaattgggagccagaaagcaatcat

SEQ ID NO: 6318 - DNA, 864 bp, Enterococcus faecalis
atggcattatttaaaaagaaaaattacattcgcattaatccaaatcgtgctcatgcaaatgatgcatcaaagaagccttctgttccagataatatgtgggcaaaatgcccttcttgtaagcgaacactgtatacaaaagaaatgggtgcagaaaaaatctgtccgcattgtggctatagttttcggattggtgcatgggaacgattagcgataaccgttgatgaaaaaagtttccacaattgggacagtgaattagtgacaaaagatccactaaattttcctggttatcttgaaaaaattgaaaaaatgcaagaaaaaactgggctagatgaagctgtcttaacgggagaagcaacaattgaaggacaagctgttgcaattggaatcatggacgctaattttatcatgggcagtatgggaacgattgttggtgaaaaaatcacacgcttgtttgagcgggcgacagaaaagcatttaccagtagtgattttcactgcatctggtggtgcccgtatgcaagaaggaattttttcattgatgcaaatggcgaaaatttcggccgctttgcaacggcataacaaagcaggcttgctgtatcttacggtattgactgatccaacgactggcggtgttaccgcaagttttgcgatggatggcgatattattttggcagagcctcagagtttaatcggttttgctggccgccgtgtaattgaacaaacgattcgtcaagagttgccagatgattttcaaaaggccgagtttcttttagaacatggttttgtagatcagattgtgccaagaaatcttttgcgtcaacgattgagcgacttgttacgtttacattctttggaagggtggcgc

SEQ ID NO: 6319 - DNA, 1371 bp, Enterococcus faecalis
atgaaattaaccttctgggaagtagcgcaagcggttgaagccagtaatgattggcaacaatggcctgattttcctttaacaggcattgaatttgatagtcgtaaaattgtgaaaggaaatctctttgttcctttacaaggtgaaaatgatggtcatcgttttattgagagtgccatggctaatggctgtcaggccgctttttggggacaggatttagtcgatgcgccgcaacaattgcctgttttgcatgttactgatccactggttgctatgcaaaaattagctacctattatttaaataaaatgcaaccgaatgtcatcgctgtgactggcagtaatggaaaaactaccactaaagatttaattgctgctgtgttatctgaaaagtttgtgacttacaaaacgcaaggcaattacaataatcaaattggcttaccctatactattttacacatgcctgatgaaacagaaaaactgattttagaaatgggcatggatcatgctcaggaaatttctttcctttccaatctggctcagccagaagttgctgccatcacaatgattggcgaagcccatgtggaaaatttaggctcacgagcaggcattgcacaagcaaaaatggaaatcgtagatggtttagccaaagacggtagtttatttgtgccaagcgatgaacctttgctagaaccattggtggaaaaagtcacgcaacaagtgattacttttggttttagccaggaaagtcaacttcaaggaatcgtcacaaatgaagccaaagagcaaacctcattcaaaatcagtgatacacaaatgacgtttacgattccagtgccaggaacctataatgtcaccaatgcattaatcgcaattggcattggtcgttatttccaattaacggatagtgagattcaaaaaggcttggctacagcggaactaacaaagaatcggacagaatggctgaaagcagcgaatggtgccgaaattttaagtgatgtgtacaatgccaatccgacagctatgggtcttgttctggacagttttagcaaaatgtccaaagtaggaaaacgaattgctgttttaggagacatgctggaattaggtcctgattctgctgccatgcatcaagcaatggcgcagcatttagccccagatgcgattgaagaagtctttttatatggttctgaaatggcttatttagctgataaattgcaagaaacctatgcaccagctaacattcattcttttaaaaaagaagaaaaaaatgagttgattgaagctgtcaaaaaagtcttacagccagaagacatggtggttttaaagggaagtaacgggatgggacttcgtgaagtcatcgatgcacttttggaaaag

SEQ ID NO: 6320 - DNA, 408 bp, Enterococcus faecalis
atggcaaatttagtatatagtcctaaagacattttacaaaaagaatttaaaacgaaaatgatgaacgggtatgacccaattgaagtagacgaatttttagacaatgttattaaagactacgaagcttataataaagaattattaagcttgcaagaagaaaacagccgcttaatggcaaaattagaccaattatcaaaagcccaaccaacgcctcgtgttgctcaagaagtaccaaaaagtgcagcagtgaccaactttgatattttaaaacgtttatcaaacttagagcgtgaagtttttggtaaaaagttagatgaaacaccttcaacacctgtaacgccttctgcaccgtcaatgcctgcagaaccagcgaatcatgatgttgataatgcacaaacacgtcaattt

SEQ ID NO: 6321 - DNA, 879 bp, Enterococcus faecalis
atggcagacgttacagctaaaatggtaaaagaattacgcgatatgactggcgttggaatgatggacgctaaaaaagcattagtaaaagtagaaggcgacatggaaaaagccgtagactttttacgtgaaaatggtatggctaaagcagcgaagaaaaatgaccgcattgcggctgaaggtttagcaaacgtagcaactgtgggtaacgttgcagcaatcgttgaagtaaactcagaaactgacttcgtttctaaaaacgaaatgttccaagatttagttaaagacattgcgactaaagttgctgaaaacaaaccagctacgatggaagaagcaatggctattaaaactgaaaaaggcacaattgaatctgatttaatcgaagcaacaactgttatcggtgaaaaaatcagcttccgtcgttttgaagttgtcgaaaaagctgacaatgctgcatttggcgcttacttacacatgggtggccgtattgctgtattaacagttatcgatggcacaactgacgaagaagtagcgaaagatgttgctatgcacatcgcggcaatcaaccctcgctatgtcaacgaatctcaaattcctcaagaagaattagaacacgaaaaagctgtgttaactgaacaagcattaaacgaaggtaaaccagcaaatatcgttgaaaaaatggttgttggtcgtctacaaaaattcaaagcagaaatcgctttggttgaccaaccatttgttaaagatccagatatgactgtcgaaaaatttgttgcttctaaaggcggcgaagtgaaatcattcgtacgttttgaagttggcgaaggtatcgaaaaacgtgaagataactttgcggatgaagtaatgagccaaatgaaaaac

SEQ ID NO: 6322 - DNA, 1716 bp, Enterococcus faecalis
atgaaacagtcaaaaatgttaattccaacgttaagagaagtaccaaatgatgcagaagtcttaagtcatcaaattctgttgcgcgcaggctatattcgtcaagtcgctgcagggatctattcttatttacctttagccaatcgtgttttagaaaaattaaaaacgattatgcgagaagaatttgagaaaattgatgcagttgaaatgttaatgcctgcgttattacccgcagaactttggaaagaatcaggccgttatgaaacttatggacctaacttgtatcgcttaaaagatcgcaatgaccgtgactatatcttaggcccaacgcatgaagaaaccttcacagaattaattcgtgatgaaattaattcttacaaacgattacctttgaatttataccaaattcaaacaaaatatcgtgatgaaaaacgctcacgttctggcttattaagaggccgtgaatttatcatgaaagatggctattctttccatgccgatgaagctagtttagatcaatcataccgtgattacgaaaaagcttactcacgcatttttgaacgctgtggactagaattccgtgccattattggggacggtggtgccatgggtggtaaagattctaaagaatttatggcgatttctgaaattggggaagatactatttgttattcaacagaaagtgattatgctgccaatttagaaatggcaacaagtctttatacgccgaaaaaatcacatgaaacacaattagatttagaaaaaattgcaacaccagaagtgggtacaattgccgaagtggcaaacttctttgaagttgagccacaacgaattattaaatcagtactatttattgccgatgaagagccagtaatggtcttggttcgtggcgatcatgatgtcaatgatgtcaaattgaaaaacttcttaggcgctgatttcttagatgaagcaacagaagaagatgctcgccgtgtcttaggagcgggctttggttcaattggtccagtcaatgtttccgaagatgttaaaatttatgcagatttagctgttcaagatttagccaacgccattgttggagctaacgaagatggctatcatttgacaaatgtaaatccagatcgtgatttccaaccaattagttacgaagatttacgctttgttcaagaaggcgatccttctcctgatggcaatggtgtcttagcctttactaaaggaatcgaaattggtcatatctttaaattaggaacgcgttatagtgatgctatgggcgcaacagttttagatgaaaacggtcgtgaaaaatcagtgatcatgggttgctatggcatcggcgttagtcgtttactttcagcaatcgttgaacaaaatgcagacgagcgtggtattaattggccaacaggaattgcgccatttgatttacacgtggtccaaatgaatgtgaaagatgagtaccaaacaaaactatcacaagaagttgaagcaatgatgaccgaagcgggctacgaagtattagttgatgaccgcaacgagcgcgcaggcgtaaaatttgctgatgctgatttaattggttgtccaatccgtatcacagtcgggaaaaaagcagtcgatggtgtggtagaagtcaaaatcaaacgtactggtgaaatgttggaagtacgcaaagaagaattagaaagtacactttctattttgatgaacacaacatcagaagtggaa

SEQ ID NO: 6323 - DNA, 405 bp, Enterococcus faecalis
atggctgaattgaagaaagtaaatgatttccattatgaagcaccagaaatggatcagccaactgtggcaacagagcaagacagaaaaatgcaagaggaaacactacctgtccccactctattacccaaaaagaaactaaaaaatgtctctttactagaaaaattaatcggtgttgtattagtttgtgcaacgattggtattgcaattgcgacaattcaagtaagaacgacaattgtccaaaccatgaacgatattacagaaacacaagcagtcattaaagaaaaggaagataacgctttgaaattggaacaagaaagaagcgaactttctaaatcagatcgaatcaaagatgtcgctaaaaagcaaggactagaaaataacggcgacaatgttaggactgttaaa

SEQ ID NO: 6324 - DNA, 1068 bp, Enterococcus faecalis
atgaaaactaaaaagatagttgtcgggttattttgttcaatgattgttttaatggggtgccaaccagatcaacgaactgaaaaaatgaaagaaagtactgaagcagaagcagtccaagtaacgagtggtgcctcggcagccactaatgccacttctgtaaagcgggaggagcagacaaacacgaatgatcaaccgaaggagagtgctgccaaagtgagttatgagcgtaatggacatacctttgaagttgatgctgtttctggcgctacagtagaagctaataatggacaatcaggaattagtccagaagaaaaagctcaaaagatgtattggtcaggtcgtccagaaatcggggaagttcaaggggattattatcatcatgaagtcgtgtttgatggcggctatacggctttaattgatgtcgttgttaaggatcaacaaattcagttagtggaatttgatgaacgtggacctaaaaactattattctgaagaatgggcaggagtgacaaaacgtttatccggctatgcaaattttcaagcgaacaacgcccgaactgatcaatcgttagtgaccgttgttaatacgatgacttttctagaaaatcaaatggttgctgaaaatcgcctagatggcgccttccagacagccaaaggtcaatccaatagcgctaataatggctatcttcctgctgctagggctttagccaaggaaatcaaagaaccttcaaaagaacattatacaagtctaacagaagattttgaggaggggctttctggacgtttaactgttattacgttaaaagattcagggaaaataaccgatcttcgttatgatgaatattttgcagatacagaagaagagattaaagatgcgaaactgaaggcttattctcgccaatcaaaatatttttctaaagattatgctcaaaaatcgggggaaaatttcaaaaaagaagtggatgacttaagaaaaaaagcaatcgaggaaaataaattagtcagtccgacaaatgaggaagcctggtcggaaaattatcaaagtcttgtaaaaaaaataacgtcacaa

SEQ ID NO: 6325 - DNA, 225 bp, Enterococcus faecalis
atggtatttgaaaaaattcaagcaattatcgtagaagaattaggaaaagatgctgaagaggtacaattaactacaaacattcaagaagaattagacgcggacagcttagatttattccaaatcattaacgaaatcgaagatgaatttgatgtgaaaatcgaaacagaagatggcatccaaaccgttcaagatttagtaacatatgtagaaaaacaacaagcaaac

SEQ ID NO: 6326 - DNA, 1308 bp, Enterococcus faecalis
atggcaaatccaactattgcgattgtcggtagaccgaatgtcggtaaatcgactatttttaaccgcattgccggtgtgcgtatctcgattgtagaagatactcctggcgtaacacgcgaccgtatttatacaactggagaatggttagggcgtgaatttagtattattgatacaggtgggattgatttaggtgacgaaccatttatggatcaaatcaaacaccaagcagaaattgcgattgatgaagcagatgtgattatctttgttgctagtggccgtgaaggaattactgatgcagatgagttagtagcaaaaattttatatcgtagtaataaaccagtgatcttagctgttaataaagttgacaatcctgaaatgcgtaatgatatttatgaattttatgctttaggactaggggatcctttcccagtttctggtagtcatggtttaggcattggcgatgtgttagacgaagcagttaaacattttcctaacacttcagaagaagaggacgaagatacaattaaatttagtttaatcgggcgtccaaatgtcggtaaatcatcattgattaatgctattcttggtgaagatcgtgtgattgtttcagatattgaaggaacaacgcgagacgcaatcgatacgtattttgaatctgaagaaggtcaaaagttcttaatgattgatactgctggtatgcgtaaacgtgggaaagtatacgaatcaactgaaaaatatagcgtcatgcgcgcaatgcgggccattgaacgctcagacattgttttaatggtcttgaatgcagaagaaggtattcgtgagcaagacaagcgtgtggcgggctatgcccatgaagcaggtcgtggtattattatcgtggtcaacaaatgggatacagtcaaaaaagatacaaatacaatgcgtgattttgaagcggaaattcgtgatgaattccaatatttagattatgcacctattatttttgtgtctgcattaaccaaacaacgtttaaataaactgcctgaactaattgaaacagtaagtatgaatcaaaacttacggattccttcagcgttgttaaatgacgttgtaatggatgctgtagcaattaatccgacaccaaccgataaaggaaaacgtttgaagattttttatgcaacacaagtggcagtcaaaccacctacatttgttatttttgtcaacgaagaagaactaatgcacttttcttatgcccggtttttagaaaatcaaatcagaaaagcatttacgtttgagggtacaccgattaaaatcattccgcgacgccgaaaa

SEQ ID NO: 6327 - DNA, 1341 bp, Enterococcus faecalis
atgcccgacgtggaaagtttttggcatagccttgaagaagcctatcaagcgattttgtcggcgccaagttttgatgcttggattaaaaccacacgccctttgaaattagacaacaatcaattgtggctagaagtcccttctgcagttcatcgtgattactgggaaaaaaatctttcggcaaaaattgtcgaaactggatttaaattgaccggtgcagaagtgatgccccattttgttgttgccgatgaaaaagacgcagcactggcacaagaactcgaagaacctgccgaagaagaagttgtttttagtgaacaaagtaaaaaagcgatgcttaatcctaagtacactttcgacaccttcgttattggtaaaggaaaccaaatggctcatgctgcagcgcttgttgttgccgaggatccaggttcgatttacaatccccttttcttctatggtggtgtagggttagggaaaacccatttgatgcatgctattggtcatcaaatgttagtgaatcaaccagatgccaaagtcaaatatgttagtagcgaaacgtttacgaatgaatttatcaactcaattcaaacaaagacatccgaacaatttcggaaagaatatcgcaatgttgacttattattagtcgatgatattcaatttttggcggaaaaagaagcaacattggaagaatttttccataccttcaacgatctttacaatgaaaataaacaaattgttttaacaagtgatcgcccgccgaatgatattccaaaattacctgaacgattagtttctcgctttgcttggggtttgtctgtcgatatcaccccgcctgatttagaaacacggattgcaattttgcgcaaaaaagcagatgccgagcgtttagaaattccggatgatacactaagttatatcgctggtcaaattgattccaacatccgtgaattagagggtgctttggtccgtgttcaagcctttgcaactattaatggagaagatattaccactagtttagcggcggacgccttgaaatctctaaaatcagttggtagtaaaaatcaattgtccattttacaaattcaagaagaagtatccaaatattatcatgtgcctcttaaagatttaaaagggaaaaaacgggtgaaaacaattgtggttcctcgtcaaatctcaatgtatcttgctagagaaatgaccgacaattccttgccaaaaattggtgccgaatttggcggcaaagatcatacaacggtgattcatgcgcacgaaaagattcagcaattattggaaaaagatccagcgattcaaaaagaagtcagtgaaattaaaaatttattgaactct

SEQ ID NO: 6328 - DNA, 783 bp, Enterococcus faecalis
atggcagtaatttctatgaaacaattactagaagccggcgtacactttggtcaccaaactcgtcgctggaacccaaaaatgaagaaatatatcttcacagaaagaaacggtatctacatcattgacttacaaaaaacagtgaaattagtagatgcagcttacgattacatgaaaaacgttgcagaagaaggcggcgttgctttattcgtaggaactaaaaaacaagcacaagaagcaatcaaagatgaagcaatccgcgctggtcaatactatgtaaaccatcgttggttaggtggtacgttaactaactgggatacaatccaaaaacgtattgctcgcttgaaaaaaatcaatgcaatggaagaagacggcactttcgaagttttacctaagaaagaagttgctggcttaaacaaagaacgtgaacgtttagaaaaattcttaggtggtatcgctgatatgccaagaattccagatgtaatgtacatcgttgacccgcgtaaagaacgcattgctgttcaagaagcacacaaattaaacattcctatcgttgcaatggttgatacaaactgtgatcctgatgagatcgatgttgtaatcccttcaaatgatgatgcaatccgcgctgtgaaattaatcactgctaaaatggctgacgctttcatcgaaggtaaccaaggggaagaccaagcaactgaagagttattcgttgaagaaacaccagaagcaacttcaatcgaagaaatcgttgatgttgttgaaggaaacaacgaatcagctgaa

SEQ ID NO: 6329 - DNA, 1314 bp, Enterococcus faecalis
atgtccatgtttttagatcaagtgacgattgatgtcaaagctggtaaaggcggcgacggaatggttgctttccgtagagaaaaatatgtaccagacgggggtcccgctggtggtgatggcggtcgcggtggcgacgttgttttagttgttgaagaaggattacgcacattaatggatttccggtttaatcgtcattttaaggcgacacctggagaaaatggtatgagtaaaggaatgcacggtcgtggttcagaagatttacttgtcaaagttccaccaggtacaacagttcgtgatgcagaaactggagccttaattggggatttaattgagaatggtcagaccttagtagtagcgaaaggcggacgcggtggtcgtgggaatattcgctttgcttccccaagaaaccctgcaccagaaattgccgaaaacggcgaaccgggtcaagaacgtaaaatcgaattagaattaaaagtcttagcagatgttggtttagttgggtttccttctgtagggaaatcaacgttactctctgttatctcgtccgctcgtccgaaaattggtgcctatcattttacgacgttagttccaaacttagggatggtgactactagtgacggtcgaagcttcgctgcagcagatttgccaggcttaattgaaggagcttctcaaggtgtcggcttaggaacacagttcttacgccacattgaacggacgcgtgttattttacatgtcattgatatgagtggcatggaaggacgcgatccttatgaagattatttggcaatcaataaagaattggcttcacacaatttacgtttgatggagcgacctcaaattattgttgccaataaaatggacatgcctgaagcagaagagaatttagcgaaatttaaagagcaacttgcgaaggaacgcaccgatgagtatgctgatgagctacctattttcccaatctctggggttactcgcaaaggtattgaacctttattaaatgcaacagctgacttgttggaagtaacgcctgaattcccattatatgaagatgaagtggtagaggaagaaaccgttcgttatggcttccaaccagaaggtccagaatttacgattgatcgtgaaccagatgcttcatgggttttatctggtgaaaaattagaaaaattatttgaaatgacgaatttcgatcatgatgaaacagtaatgcgttttgcacgtcaattacgtggtatgggtgtcgatgaggcattacgagcacgtggcgcgaaagatggcgacattgttcggattggtaattttgaatttgaatttgtcgaa

SEQ ID NO: 6330 - DNA, 1383 bp, Enterococcus faecalis
atgtttcattttgtaataaaaggaacaggtttttctagtaaaaatttgcaagagattaaagtttatgaagagacacttttttgtatagatgaggccggagtaattcaggaaataattgaaccagatgctgaagcgtatgaaactgtgctagcagaacaaaaagaggcacaacgttttcaagaattgccccaagattcttatcttttacccggctttgttgatttacatgtccatgcacctcagtgggcacaatcagggaccgccttggatattccattgtatgaatggctgaatacgtacacgtttcctttggagtccaagtttgcagatttagcatttgcccaacaagtctatgatgaattggtaacccaattgttagctaatgggacaacaacagccctttattttgcaaccattcattatgaagctagccgtcgtttggcagagatttgtgcggaaaaagggcagcgtggcttaattggtaaagttgtaatggatgatcttaatgagaatccagaatactatcgtgatcaaacaacgcaacaagcattagaagaaacggaacggtttattcaagaaattcaaacattagcgcagcaaacaaaacaaggcgtgtatcccgttgtaactccgcgtttcattccaagttgtacagaggaagcacttaaaggattaggagaattagcagcgaaatatcaagtccatgttcaaagtcattgtagtgagagtgattgggaacatcaatttgttcaagaacgttttgaaaaaaatgatgctcaagcattgaatgattttggtttattgacagaaaaagcagtgatggcacatgcaggctttttagaagaagcagatatgaatttattccatgaaacagggacggctgtggcgcactgcccaatctctaatgcttattttggtaatgcagtaacaccgattgcaaaattagtacatcaacatcaagtagaagttggtttaggtagtgatctttcaggtggtttttcaccaagtctttttgacaatttaaagcaagcggttatttcttctagaatgttagaagatggcgtcgatgctacaaaaaaaccagaagtacgaggtgttaaaacagcacggattaccgtaaatgaagcgttttatttagctactgctggtggtggtcaagcgctaagtttaccaattggaaaattagaaaaagggtatgcttgggatgttcaaattattaatacaagcttgtcacaagcacgaattcctaaaaatccaggggaatcattgcttgatattttccaaaaaatcttatatttagcacgaccagaaaatattcgagaagtctgggtacaaggtgaaaaagtacatgataaaaatttaatgtcagcaactaaaggagta

SEQ ID NO: 6331 - DNA, 1329 bp, Enterococcus faecalis
atgagtgaaaagaaacaaaataatcttcatttaacagtggggccagaagattcagtatcttttgggcaggccactatgttagggattcagcatgtcttagcaatggacgtgtacgtcgtacctgtgatcattgcttcaattattgggattagcacagcacaaacgtcttctttaatccaagcaacatttatagcagcaggacttgccacgattattcaatctcatttttgtatgagattaccagttgcgcaaggcccttcatttattccaatcggggcaattgcaggaatttattttgccaataaccaacaaggaaatggctggggcgcagttttaggtgctagtttagtgggggcaattgttgttattatattaggatttactggtatttttaatcgtttaatcactaaatttgttccaccaattgtgggaggaacaattatttttgtggtggggctttcgttaatgccagtcgctttatcggataatatttaccacgcaaaaggggaattaggacaaaatattttattagcatttatagcagcgggtacgttgatcttctttgcgctcttaggttctgctttgaaaaaagggcggattttccgcgtttcttctgtcattttggcattattatttgggagcatcgcggcacaattattaggggtacttgatttatcagccgttagtaaagcggcttggtttagtttgcctcagttaccattagttaacttttctttccaatttgattggtcagctattgccacgatgttagttatttatctggttttaatggcggaaacaacaggcacttggtttgctgtgagtcatgttgtcgctgaacctttgaccgaagaaaaaattaatcgcggcgtaattggtgaaggcttaggttgcttagtttcttcattcattggcggcacgccagtaactagttactctacaaatgctgggattatttcaatcactggagttgctagtcgcaaggtttttgtggctgcaggtgcgtggtttgtcttatttggcttatctggaaaactttccaccttgatttcggccattccggcaccagttatcggcggtgtttttgtggttgtttgtggcatcatttctgtaagtggaatgaaagtcatgagtgatgtaacaattcatgaaaaagagatgtatgtaattgccgttccgattattatgacattagcgttgacattgttaccaaaagagtttttggaaactctaccacaatttttacaatatttatttagttcacccgtggcaactgcctcaattgttgctattttattgcaggccattttaccaaacgttcaagaaggg

SEQ ID NO: 6332 - DNA, 1467 bp, Enterococcus faecalis
atggaaaaattatacgacaaatcgttaacagagttacatgatttattggtctcaaaagaaatcactgcagttgatttaaccgaagaaacattaaatcgtattcaagatacagaagaacaactaggttcttttatcacagttagtgaagaaaaagcaatggcattagccaaagcgattgacttaaaaggcatcactgaaagtaatccattagctgggattcctattgggattaaagacaacattgtcacaaaagatattttaacaacagctggctcaaaaatgttacacaattttgacccaatttatgatgcgaccgtgatggataaagtctatcaagcagatatgattcctgtcggaaaattgaacatggatgaatttgccatgggcggaagtacggaaacgtcttacttcaagaaaacaaaaaatgcttgggatcaaaccaaagttcctggcggttcttctggtggttcagcttctgctgtcgcagccggacaagtcccagtttctttagggagcgatacaggaggtagtatccgccaaccagccgcattcaacggtattgtgggcttgaaaccaacttatggacgtgtgtctcgttttggtttgattgcttttgcttcaagtttagaccaaattggtccattgacacgaaatgttaaagacaatgccttagctttaaatgcaattagtggttatgacgaaaaagacggcacttctgcaggcgtttctgttcctgattttacggcagatttaactggcgacatcaaaggcatgaaaattgctttaccaaaagaatacttaggtgaaggggtacaacctgatgttcgtgaagcggtattaaaagcagcagaaacgttcaaagctttaggcgcaacagtggaagaagttagcttaccacattctaaatatgggattgccgcttactatattattgcctcttcagaagcaagttcaaacttacaacgctttgatggcattcgttatggttaccgttccgaaaatgtccaaaatctagaagacgtctatgttaattcgcgttccgaaggctttggtactgaagtcaaacgtcggattatgttaggaaccttctctttaagtgctggttattatgatgcgcactttaaaaaggctggtcaagtccgtacactaatcaaacaagattttgagaatgtctttgcggattatgacttaatcattggcccatcaacaccaactgttgcttttggtttgggtgaaaatatcaatgacccaatcacgatgtatatgtatgatattttaactgttcctgttaacttagctgggttaccaggcatgtcaattccagcaggcttctcagaaggattgccagttggtttacaaattattggaaaacattttgacgaacatacaatgtataaagcagcctatgcttttgaacaagcgacagatttccatacgaaaaaaccagtcattttaggggggaacgat

SEQ ID NO: 6333 - DNA, 2460 bp, Enterococcus faecalis
ttggaaaaacgccaagaagttcaagaattaacccttgaagaagtaatgggcgatcgttttggaagatattccaaatacatcattcaagaacgggccctaccagatattcgagatgggctaaaaccagtacaacgccgcattctcttttcaatgaataaagacggcaatacctttgataaaggctttcgtaaatcagcaaaatctgtcggaaacattatggggaattatcatccccatggcgacagcagtatttatgaagcgatggtgcgtctaagtcaagactggaaattacgggaagtactaattgaaatgcacggaaacaacggaagtatggatggcgacccaccagcggcgatgcgttatacagaagctcgtttatcacagttaagtggtgagttgttaaaagatatcgacaaaaataccgtcgatttcgtctggaattttgacgatacagaaaaagaacccactgttttaccagccaaatatcctaatttattggtaaacggctcaacggggatttcagcaggctatgcaacagaaattcctacgcataatttagcggaaatcattgatggaactgtgtatttaattgatcatcctaatgcaagtttagagaaattaatggaatacattccaggaccagatttcccaacaggtgggattctacaaggaaaagcagaaattaaaaaagcctacgaaaccggccgtggtaaagtaattttacgtgcgaagacaaagattgagcctttaaaaggcggcaaacaacaaattgtcatttctgaaattccttatgaagtcaacaaagcaacgctagtgaagaagatggatgaaatccgtttaaataaaaaagtagacggcattgccgaagttcgtgacgaaagtgacagaactggcttgcaaattgttgttgaactaaaaaaagatgtcaatgcagaaggtattttaaattatctatttaaaaacactgaattgcaaatcaattacaactttaacatggtagccatcgacaacatgaccccgcaacaagtgggcctaaaacggattttagaaagttacattacgcatcgcaaatcagttatcattaaccgttgtcaatttgagttggacaaagctcgcaaacgtgagcacattgttgctggtttaattaaagcattgtctatcttagataaagtgattgcaacaatccgtggcagtaaagataaaaaagatgcgaagaagaacttagtatccgactatgcgtttactgaagaacaagctgaagcaatcgttactttacagctataccgtttaaccaatacggatattactgatttacaagaagaagcgaaaactttagaacaacaaattgctgagttattgaacattttaaacaatgaaaaagaactattctcagtcatgaaaaaagaacttcgcgaagttaaaaagcaatatggcaatccgcgcttaactcaaattgaagaggaaatccaagaaatcaagattgaaacagccgtgttagttgcgcaggaagacgtggtcgtaaccgtgacgcacgaaggctatatcaagcggagtagtattcgttcttatacagcatcaaaaccagaagaaatcggcatgaaagaaggcgactttttattatatgctggcgaagtcaatacattagatcatcttttactagtaacaaataaagggaatatgatctatcgccccgtccatgagttgccagatttacgctggaaagaaattggcgaacatatttctcaaaccattttaaatcttgctatcgatgaatcgattattgctgtatatccttataaagagttaagtccgacaaaaacctttgttttcattacaaaagctggcatgattaaacaaaccaaaatggctgattttgagccttggcgcacttataagagccgcccgacatcttgtatgaaattaaaatcagaccaagatgaaattaccaatgtttatttaacaaatgatcaagacttattggatgttttcctcgttagcaatcgcggttttggcttacgttatccattatatgaagtaccagtcgtgggtagtaaagcggctggagttaaatcaatgaacctcaaagaagacgattatgtcgttaatggtttactggttcattctgaaggggatacaccgattgtcatcgttacccaacgtggcggtgttaaacgcatgttagcccaagaattaacacaattaggacgagcaaaacgtggactaatggtcttgcgggaattgaagaaaaatccacatcgtgttgtctttatgtctgaaagtaccgatttagatttattagttactacgcaaaagggcacacaagaagttattcagtcgaaaaactatccaatcagtgaacgaacatccaacggttcctttgtcatcgatgaacaaaaagatggccaagtaatggaagtccacgagatgcattctgcagtgattgaagaagaacaaacaaac

SEQ ID NO: 6334 - DNA, 3882 bp, Enterococcus faecalis
atgaagagaattaactggcaacgcttagcaaccattggcttgtgtagttctttagtgattaacgccttttttggcgtaacagccattgcggaaacagtcacgagtgaaagtagcccgacagtggcaaatagtattaaggaagcaacaccagcaagtagcgcaaggcaagaaagtacggaaagcagtcaagaaacgactgaaacgagtcgggaaaaagtaacacaggaaacagcgaaacaagcagagacaaaagcgccactggaaacaccagagataaaaacaaacacaacagcacaacctgcagaaaatagtagtgaaaatgaccgacaaacgagtatttcgccacgttgggtgccgaataatcaagtgatttatccgagaataaccttggctttcactaatgaatcagggcaagcttttgctgatgaaaacttaacgttatcagggacgtatactaaatttggatatgaagacgcaactagtttatggcgaccatatgcggttaattatccaattacttcttctaatgcaggtggtggtcaatatcgagtagctgtcaatgcaacggttcctttaccatacgattttttcacagatttaccagcaaattataggatgaatatatacgcggttgaacaattaaagattgataacacgctaaagtatgtcgacagtattgttgctgtgcccgattctacactgaggatgaccagatatagtgcgcaacaaacaactgagttaccgcagtttggaaatcatatgactccttttgtattacgcacaagagatagcatattttctaaaagcagtgaaaatgttttctctctaaacacggatggtaatgaatttttaagaatcctgagtgtcgcccccattggcactccagtagaaccagtattatacggatttgatggcactgcaacgtaccgagaaacacttaattacgtagtcactcggaaacaagtcaccgagaagttcgtagatgctaacggcgtagctatcacgccgccaacaggttttacccaaaacaagaaaacaccaatgaccagcaatgacttcaccttcaaacaagctagtactttgccggacacctatcaagcagacggcaaaacctacaaattcaaaggctggtacaaaggcaaaaccaagccaaataccttgaccaccaccaaagcgccaagctatgcggtgacctatgatgggaatgacgatttgacggtggtgtatgaggcgattcaagaaggaaaaggaatgtcatctgttcaggtgatgaataaggcgattcagaatccagtgactttgcctgatcgcatgtatcgtgtcctatttatcaatgaaacaggggggctgacatttgctgatcgttatggctttactggagaattagttgaggttgcggatggcaaagtgacgccaattggcccagtcccgactaacaataatagcgcagtaaaagaaatcactataccaggtcgggttttcgatacagaaagacctacgccgttgcaatatggagttcgcaatgcaacctttacgttgcccaaaatgtataaaaccgtaacgtatcaacctggcccaaattatacaggtacagcctactctattccagaaacgtatcgtcttagtttaagaagtggtgtcaaaagtgacatcgatacaactggatggcgaattggtcttgacccgacaacagatccacaaaagtttacgatgagcggtatatactggtcatcaatgcctataaatgttagacttgcaacactattaagtgcgactattactggtaaaggagtagaaccgagtgtctatacactagatgaaaatgcacgtatgtatctttacctagaaaatcgtcgtgttacggaaaacttcgtagataccaatggtactaaaatcaccgcaccgtcaggtttcgcccaagggaaaaaaacagtaattactagtgattcgtacacctttaagcaaagcggagatttgccagatacctataaagtcggcacgaaaacctatcagttcaaaggctggtacaaaggtaaaaacaaaccagacaccttgacgacgactaaagctcccagttatccagtcacttataatgatgatgatgatttgacggttgtctatgaagaagtcgtgatgaaaacgtataatttaccagccaaagatgtgtactttggttatgttgatgaggcagataacctattgaatacagcaggcttttctgtagaagccgaattaggtgaaagtgacgaaactgaatcaacagtattagggaaaatccaaggaactgatgaagtgatgagtaaattaaaaaaattatcgattcctggcaagtcatatgatttcccgatagataagcttaagacatacggtgcaaggtctgttaatcatacaattcctaaacaatataagacaatgtcgattacaccgctagctacttatacgggagacaaaacaaagtatcctatgagcaaagagatccggaaaaatatagaagcgccatatacggttgtttctcaagctgacggagcagaagccttcaaattaactgacgctggaactttttttagaaccagacgagctttttggacatgggacccgaataacacgttgtatgctatgggaatttattcagggacagtcggaaaaaactataacctagcttctccagagggaacaatctactattatttagaaaatcgccgagtcactgaaaactttgtggatccaagcggcgctaaaattacaccgccaacaggcttcacgcaaggaaaacaaacagtgattgatagtgataatttcacttacgctagtacgaaagccttaccagacacttatacaacaggagacaaattctataagttcagaggctggtacaaaggtaaaaccaaaccaggcaccttgacaacgactaaaacaccaagttacgccgtgacttacgacgataaagatgacatgacagcggtctatgaggaagtccaaccaacagcagaaatgacggttagtcggttactagaagtgatcccaaatgaagcttctatggtttggacagttagactaaaaaacaccagtgaagttccattgaccaacgttaaactagccccaactgccaaatgggcggcaggtatttcaccaccaacacaattagctgttcgcattggtaatacaccaaataaaattattctagtgacggcagaacaatggcaagcaggagttaacttagatatagagattcctgtgaacggcgaagccttagtgacagtgaacacagcgaaaattacgggagaaccaagacaacttttaaccgcagaaatgacagctagtggaaatttttctgcagtgacagctagtaactttgtacgtattcaaggagaagatcaaacgattacgccaacaccagtagaagaaggtttcattagtacaccaatgtttgattttgggaaaattacgattaacagtagcactaagcagtacggactgaaaaaagcagctgattactatggcagcggcacacgtaatccatatctacgaataaagacaagccaacctaattggcagttaacagcacaattgtcacagttaacagcgtcagctgatagtttgccaactagtacgcgtttattattaggaagtgcggatgttatagcaatcgaaaactataatcaagtcacagagttaacaaataaagttggggttacgaaagccttaactttgacgagtgacggtacatctacaccagtaattcttaataaccaatttacaggtaatgatgtctatcaattagattttgattttgccaatgtgaaattagaagtccctgccaatcaagggaaaataaatgagaaatatcaaggaacggtgacgtggaacttagtcactggacct

SEQ ID NO: 6335 - DNA, 432 bp, Enterococcus faecalis
atgaaaaaagtaatgactgcaacagaaattatggaaatgattcctaatcgctatccgatttgttatattgattatgtggatgaaattattccaaatgaaaagattattgcaacaaaaaatgtgacaattaacgaagaatttttccaaggacatttccctggaaatccaacaatgccaggcgttttgattattgaagcattggcacaagtaggttcgattttaatcttaaaaatggatcaatttgaaggtgaaacagcctatattggcggtatcaacaaagccaaattccgtcaaaaagtggtccctggtgatgtcttgaaattacattttgaaatcgtcaaattacgtgactttgtcggcatcggcaaagcgactgcttacgtggaagataaaaaggtctgcgaatgtgaattgacgtttattgtgggacga

SEQ ID NO: 6336 - DNA, 1947 bp, Enterococcus faecalis
atgacagaagaagaaaaaaacatgagagaacgtgcgcaagaatatgacgctagtcagattcaagttttggagggcttagaagctgtccggaaacgtcctggtatgtacataggttctactagtggcgaagggttacaccacttagtatgggaaatcgttgacaactctatcgacgaagccttagcaggatttgctaaatcaattcaagtaattatcgaaccagacgatagtattactgttatcgatgatggtcgtggaattccagtcgggattcaagccaaaacaggtcgcccagctgtggaaacagtgtttacagtgctacatgccggcgggaaatttggcggtggcggctataaagtatcaggtggcttgcacggtgttggttcctctgttgttaatgctttatcgaccagtttagatgttcgtgtttataaagatggcaaagtgtattaccaagaatatcgtcgtggtgcggttgttgatgacctaaaagttatcgaagaaacggatcgtcacggaaccactgttcactttattccagatcctgaaatttttacagaaacaaccgtttatgattttgataaattagcaacacgggttcgtgaattagcctttttaaatcgaggcttacacatttcaattgaagaccgtcgtgaaggacaagaagataaaaaagagtatcactatgaaggcgggattaagagttatgttgagcatttaaatgccaataaagacgttattttcccagagccaatcttcattgaaggagagcaacaagatattacagtggaagtgtcaatgcagtatacagatggctaccactcaaatattttaagttttgccaacaatattcatacttatgaaggcggaacgcatgaatctggttttaaaacttctttaacacgtgtgattaatgactatgcacgtaaacaaaaattgatgaaagaaaacgatgaaaaattaactggggaagatgttcgtgaaggcttaaccgcagtggtttccatcaaacatcccgatcctcaatttgaaggacaaacgaaaacgaaattagggaactcagaagtacggaccgttacggatcgtctattctcagaatactttacaaaatttttaatggaaaacccaacagtcggcaaacaaattgtcgaaaaaggcatgttggcttcaaaagctcgtttagccgctaaaagagcccgtgaagtcacccgtcgtaaaggcgctttagaaattagcaacttgccagggaagctggctgattgctcaagtaaagatccggaaaaatgcgaattatttatcgtcgaaggagactcggccggcggttcagcaaaacaaggacgtagccgtgaattccaagccattttgccaattcgtgggaaaatcttgaatgttgagaaagccagcatggataaaattttagccaatgaagaaattcgatcattatttacagctatgggaacaggcttcggcgaagatttcgatgtttctaaagcacgctatcacaaactagtaattatgaccgatgccgatgtcgatggtgcgcatattcgaacgttgttattaaccttgttctatcgcttcatgcggccaattgttgaagctggttatgtgtatattgcccaaccaccactatatggtgtgaaacaagggaaaaacatcacctacgttcaaccgggcaaacatgctgaagaagaactagcaaaagtgttagaagaattacctgcttcaccaaaaccaagtgttcaacgttacaaagggttgggtgaaatggatgatcaccaactttgggaaacaacaatggacccagaaaaacgattaatggcgcgagtgagtgtcgatgatgccattgaagctgaccaaatttttgaaatgctaatgggcgatcgtgtggaaccacgtcgtgcgtttatcgaagaaaatgcccattacgtgaaaaacttggatatt

SEQ ID NO: 6337 - DNA, 1419 bp, Enterococcus faecalis
atgacaaaacaacaatttggcgtagtcggcatggctgtcatgggaaaaaatcttgctttaaacattgaaagcagaggctatacagttgcgctgtataaccgtacaggatcaaaaacaacagaagtggttgaagaacatcctgacaaaaactttcaagcaacatactcaattgaggaatttgtgaatgcaattgaaaaacctcgtcgaattatgttgatggttaaagctggacctgcaacagatgcgacaatccaagaattgttaccacaccttgataaaggcgacatcttaattgatggcggtaatacgttcttcaaagacacaatgcgacgtaatgaagaactagcaaactcaggaattaactttattggtactggcgtttctggcggagaagaaggagccttgaaaggaccatctatcatgcctggcggacaaaaagaagcgtatgagttagttgcgccaattcttgaaaaaatttcagctaaagcagaagacggtgaaccatgtgtgacttacattggcccaaatggtgctggacattatgtaaaaatggttcataatgggattgaatatggggacatgcaattaattgctgaatcctacgatttaatgaaacaaatcttaggcttatctgttgatgaaatggcagagattttcaaagaatggaacgaaggcgaattagacagttaccttatcgagatcacggctgacattttgacacgtaaagatgatgaaggaaccgaccaaccaatcgttgatgttattcttgatgcagcaggcaacaaaggaacaggtaaatggacaagccaaagtgcgttagatcttggcgtaccattaccattaattacagaatcagtatttgcacgttttatttcggcttacaaagaagaacgcgtaaaagcaagtggcattttatcaaaacctgcagcctttaactttgcaggcgataaaaaagaattgattgaaaaaattcgcgaagcattatactttagtaaattaatgagttatgcgcaaggttttgcacaactccgtgcagcttctgaagaatacggatgggatttaccatttggtgaaattgcaaaaatctggcgagcaggttgtattatccgtgcacaattcttacaaaaaattaccgatgcatatgaaaaaaatccagcacttgaaaacttgttgttagatgaatacttcgtagaaattacgaaaaaatatcaacaagccgttcgtgaagttgttgcgattgctgttcaagcaggtgttcctgtaccaacattctcatctgcaattgcttattacgattcttatcgttcagatcgcttaccagcgaatttaattcaagcacaacgtgattacttcggtgctcatacgtacgaacgcacagacaaagaaggaatctaccattacagctggtacaacgaagaa

SEQ ID NO: 6338 - DNA, 1020 bp, Enterococcus faecalis
atgaaacaaaaagtcgctgttttaggtccaggttcctgggggacagctttagctcaagtattagccgaaaatggacacgaggtctgtatttggggaaataaaccagagcaaatcgatgaaataaatacaaaacacaccaacaaacattatttaccagaattaatcttacctacttcaattcaggcaaccactgatttagccactgctttagtagatgttgatgcggtactgtttgtggtaccaactaaagccattcgttcagtagcacaagaagtggcccaacatttaaaaacaaaaccaattattattcatgcaagtaaagggctcgaacaaggtacacataagcggatttcagaagtgatagcggaagagattccagcagaaaaacggcaagggattgtggttttatctggtccaagccatgcagaagaagtcgctgttcatgacattacaaccattacagcagcaagcgaaaatttagcagacgctgtgtatgtgcaagagttgtttatgaatgattactttagaatttatacgaatgatgatgtgattggtgtagaaacaggggcggccttaaaaaatattattgctttgggcgccggagcgattcatggcttaggctttggtgataatgccaaagcggcaattatgactcgtggtttagcagaaattagtcgtttaggggttgcgatgggagcaaacccattaacatttattggtttaagtggtgttggggatttaattgttacttgtacaagtgtccattctcgaaattggcgtgcgggtaatttattaggaaaaggccataagttagatgaagtcttagaaaacatgggcatgattgtggaaggtgtttcaacaactaaagcagcctatgaattggcacaacaactagaagtcgaaatgccaatcacagaaacaatctacaatgtcttgtacaatgacgaagatgtacaacaagcagcaaaagaaatcatgttgcgcgatggcaaaaccgaaaacgaatttacacttgatttt

SEQ ID NO: 6339 - DNA, 777 bp, Enterococcus faecalis
atgattaaaataattgtcgctgggtttaaaggacggatgggcagtactgctacacaaatggtcttagaaaccgcagactttgaattagtaggtgtgtatgatcctcatgaagcacaagaaactgtttctttcaatgatgaaacagcaattcccgtttttcagcgcttagaagaagtcctagctgtcaaaccagatgtttggattgattttacggttcctgaagccgcctatccaaatacgcgttttgcgttggaacacggtatggcgcctgttgttgggacgacaggctttacggaggaacaaatcaacgaattgacaaacctatctcgagaaaaagccatcggcggcttgattgcgccaaattttgcaattggggcagttttaatgatgcaatttgcccaaaaagcggcgcagtattttccagatgtggaaatcattgaattacatcatgataacaaattggatgcaccgagcggaacggctataaaaactgcagaaatgattcaagaagttcggccagcaaaaaaacaagggaatccgcaagaggtagaatcaataccaggggcacgcggggctgatttcgagggtctgcgaatccatagtgtccgcttacctggtttagtggcacaccaacaagtccaatttggcagtgtaggtgaagggctcactattcggcatgattcttatgatcggcgttcattcatgacaggagtagcgttagcttgtcggcaagtggtacagagaacagaactactttacggattggaacagatgcta

SEQ ID NO: 6340 - DNA, 1524 bp, Enterococcus faecalis
gtgacgatttcattattcgcaattcgcgattgcttagaaaaagaagatttattaaaagaatttatttcaccagaaggctggcacttgactctttccgacacgttaggtcaacgagaagtaacggctctttcttacgattcgagagacgtaacagcagaaacactctttttttgtaaaggattaaactttaaagaaatctatttagaaaatgctgtaaaagacggcctagaaatctatgtttctgaggtgccttatgaggttccggcgcaactaggaattatcgtgactgacattaaaaaagcaatggctgtgttaagcatggctttttatgattatccacaaaataaattaaaactgattggctttactggaaccaagggtaaaacaacagcggcttatttcaccaaatatattttagatgttgctacacaacaaaaaacagccttgctttctaccatgaattcgacattagatggcaaaacattctttaaatctgccttgactacacccgaatctttggacttgtatcgaatgatggcaaccgctgttgctaacgggatgactcattttattatggaagtttcttcccaagcctacaaaactaatcgtgtctacaagttattttttgatgtcggcatttttttaaacattacccccgaccatatcagtccaattgaacatccaacctttgacgattacttttattgcaaacgtcaattgattacacattctaaagtcattgtgttgaatcacgaagctgattattttccattacttaaagaaactgcacaacagcaaaaagtcccagccattgtctatggcagtcagccggctccagaagtagactattcattcgctgtttcttcagaggattccttacgttttatcgttgaaagtcctgcagatgcgttaggattggccggctcttatcaccttcgtttaggtggtgattttaacaaaggtaatgcgttaagtgcggcgattgctagtgtccttgtgggagcttcaaaagaagagtgtcaacaaggaatcgcagcaaccaccgtccctggccggatggaatctttaacgaataccaacggtgcaaccgtctatgttgattacgctcataactatgacagtttgaagaatcttttaacctttgtccgtgaagaacatcctgacggccgcttaattgttcttgtcggtagcacgggagacaaagcgatttctcgccgcaaagactttggtagggttctttctgaattggctgatgttgcagtcctaacaaccgatgacccagccagtgaagatccagcaaaaatttgccaagaaattcaagcccatattaccaaagaaatgcctgtttacaccgttttagatcgtggcgaagcaattgctcacgcattatctttaagcacaacggctgatgatgcgattgtcttagctggtaaaggcgccgacctttatcaaaaagtaaacggcgtagatgaaccttacgcaggagactttgcccttgcggaagctttcattaataaaaagaac

SEQ ID NO: 6341 - DNA, 738 bp, Enterococcus faecalis
atgagaattgatgtattaactctttttcctagaatgtttgaaggaccaatgggggaatcaattattgggaaagctcgggaaaagcagttattagaattgaatgtctctaattttcgcgatttttcagataacaaacaccaaacggtcgatgattatccgtatggcggtggcgcggggatgcttttaaaagtacaaccgatctatgataacctaaaggcaattgaagaagagacaaaccagcaaccaaaacgggtcatcttattagatccagcaggaaaaccgtttaatcagaaaatggccgaggaattttcacaagaagaacatttagtttttatttgtggacattatgaaggctatgatgagcgaattcgcacgatggtcacagatgaagtttcattgggggattacgttttaacagggggcgaattaggcgcaatggtcatgattgatgcgacagtccgtttattacctgatgtcttaggtaacaatctttctgcacaaacggattcacattccactggcctattagagcatccacaatataccagacctgctattttcaacgatatggaagtccctgccgtgctaacgaatggtaaccataaattaattgcagaatggcaactaaaagaatcattacgacggacctttttacgtcgacctgacatgttggaatcagtagaaatgacgcctgaaatgttgaagttattagaggaaattaaacaagaagagcaaaaa

SEQ ID NO: 6342 - DNA, 2139 bp, Enterococcus faecalis
atgaatgaagacattaaggtgatctttgatagtatctatcgcgacaaaacaacaaataatttaaccattacaggttgggcgttagatacaatcactaaagaaagcccaactttcacaattaataatgaaaaccaagtgtccgcttataacattcagcgcgttttacgtgaagatgttaatcaaatttatcaaacagagcctgcgattgaagctggctttgttgttacacttgaaggaattaaacaaaaaaaagtactcccttttcattttcaatcatcagcacatgttataacggtggattttcccttgaataaaaaatatccagtgattccagggacagaagataaagtaactcgtctttggataaaagccaaaaaaggatttaagtatatggctaaaaatggtatttctcataccattcaacgagcgaaaattgagaaactaagaaatcaagcttcgtatcctaactggttagctagaaatgaagtactagacatagaagcgatgacgcaagaaatcgcaacatttcattatcagcctaaaatttccattgcgatgccagtgtataatgttgaagaaaaatggcttcggttgtgcattgattctattttgaatcaagtctatactaactgggaattatgtatggccgatgacgcctcaacagatcctaatgtcaaaaagattttaacagagtaccagcaattggatgagcgaattcgggtcgtctttcgtgaacaaaatggtcatatttccgaagcaaccaactctgctttagcgattgctaccggagaatttgtcgccttactagacaacgatgatgaattagcgatcaatgctttttatgaagtggttaaagtgctgaatgaaaacccagaactggatttaatttatagtgatgaagataagattgacatggatggaaatcgttctgatccagcctttaaaccagattggtcacctgatttacttttaggaacgaattacatttcgcatttaggcgtgtatcgtcggagtattctagaagaaattggcggctttcgaaaaggttacgaaggttctcaagactacgatttagtcttaagatttactgaaaaaacgacaaaagaacgcatcaaacatattccaaaagttctttactattggcggatgctgccaacctcaacagcagtggatcaaggctccaaaggttatgcttttgaagcggggctaagagccgtgcaagatgcgctcgttcgtcgaggaattaatggtcatgcaacgcatggggcggcgaatggcttatacgatgtttattatgacattgaatctgaaaagttagtctcaattattattccaactaaaaatggctataaagacgtacaacgttgtgtttcatcgattattgaaaaaacaacctaccaaaattacgagattattatggctgacaatggaagtacagatccaaaaatgcacgaattatatgcagaatttgaacaacaattacctggtcgctttttcgttgaatcaatcgatattccattcaatttctcaactattaacaatcgtgcagcgaaaaaagcgcacggagagtatttattatttttaaataatgataccgaagtgattacagagaattggttaaccttgatggtttcatttgctcagcaagaacggattggctgtgtaggtgcgaaattattgtatccaaataatacggtccaacacgcaggcgttattttaggattaggtggtgtcgctggacatggtcattatggttatccccatggtgacttaggctattttggtcggttagctattaatgttaattattcagcagtaactgccgcatgcttacttatgaaaaaagcagattttgatgcagttggtggttttgaagaagcgtttaccgtagctttcaatgatgttgatttatgcttgaaagtccaagctttaggacgtgacaatgtctggcttcatgaagcagagctttatcattttgaatctcaaactcgtggatatgatgataaaggcaaaaagaaaaaacgttttgaacaagaaaaagtgatgatggaagaaaaatggggacctttaattgaaaatgatccattttataatcctaatctgacaagggatattcccaacttttcattacgaattgac

SEQ ID NO: 6343 - DNA, 1206 bp, Enterococcus faecalis
ttgccaaacaaagtaaagaaacggcatttgctagactatagtatttttattccatatttaattttaagtatcgtgggattgattatggtatatagttccacatccgcattacaagtaatgaaaggtttttcacctacctcattcgttattaaccaggttgccttttgggtagtagggttagttgcaatgttttttatttataagatgaaaacatccgtttttcagaatcgaagttttatcatgtttgccattgcggtaattacggttatggttttagccgttcggattcctggtatcgggaaagaaattaacggcgcacgtggttggattgagattggtggattttcgatgcaaccagctgagtatttaaaaattatggttgtctggtatctgtcttatattttagcacggcgacaaaagacaattaatggaggcatggatcaatttaaacaagctgccgggcgcccgttgatgctcgtttttgtattaattgctctagttgcaatccagcctgacttcgggaatgcggccattctaacattaattaccatcgtgatggttttagcaagtgggattaattatatgtatacctacttggtcggtggcttgggcattttaggtagtatcacggctattcagttattaattatgtctaaaggaaaaattttcccagcgcgttatcaatatatttataatcgttttgctgtttttaaaaatccatttttagatgaacggaacttaggacatcagttagctaattcttattatgcaatcagtaatggcggctggtttggcaaaggtctagggaatagtgttcagaaaaaaggctttttaccagaagcacatacggactttatctttgcgattactttagaagagttaggcattatcggcggtctagcgattttaggattgttgatgtttatgattgcgcgaattattttagtcggtgtacgctcgaagaaaccttttaattcactaatgtgtattggaattggtacaatgttattaattcaagtctttattaatgttggtgggattactgggattattccattaacaggaattactttcccgttcttgagtcaaggtgggaatagtttgctgattatttcgattgctgtggcctttgtcctgaatatcagtgcagatgaaacacgtcagaaattagaaaatgagtactatttatctttagaacagaaccaa

SEQ ID NO: 6344 - DNA, 3426 bp, Enterococcus faecalis
atgaaaaaggtattagttgccaatcgtggcgaaattgcgattcgaatttttagagcttgtacagaattagatatccgtacagtagcgatttatgctgcagaagatgagtattctgttcatcgtttcaaagcagatgaagcgtatttagttggtaaggggaaaaaaccaattgaagcctatttagacattgaaaatattatccaaattgccaaaaaatcgggagcagatgccattcatcctggttatggctttttatcagagaacttacgcttcgccgaacgttgtgaagaagaaggaatcatttttgtcggacctaaaacacatcatttagatatttttggcgataaaattaaagcgaaagaagcagctgtagctgcggggattgcttcgattccaggctcagacgggccagtagcaacggtggaagaggttgtagcttttggtgaaacacatggctttcctatcatgattaaagctgctttaggtggcggcggtcgcgggatgcgcgttgcccacgatgccaaagaagcacgagaaggttacgaaagagcaaaaagtgaagcgaaagcagcctttggttctgacgaggtttatgttgaaaagtatatttctaatcctaaacatatcgaagtacaaattttaggcgatcatcatgggaacgtcttgcatttatttgaacgtgattgttccgttcaacggcgccaccaaaaagtggtagaagtcgcaccatgtgtatcaatgaatgaagaacaacgagcagccatttgttcggctgctgtgcagttaatggcacatgtcggctacgtgaatgcgggaacggttgagtttttagtagaaggggatcagttttattttattgaagtgaatcctcgtgttcaggtagaacatactatcacagaaatgattacagatattgatattgtgatctctcaattacaaattgcgcaagggcttgatttgcataaagatatgcatttgccaaaacaaaacgaattgacattaaaaggcgcggctattcaatgtcggattacgactgaagatcccctgaaccagtttatgccagacacagggaaaatcgatacgtatcgttcaccaggtggttttggtgtgcgtttagatgtagggaatgcttattctggctacgctgtgactccctactttgattctttattggttaaagtctgtacgcatggtttctcttttgaacaggcaatcagtaaaatgcaacgctgcttaaaagaatttcggattcgtggcgtgaaaacaaatattccgtttttacaaaatgttgtgagctatccagcgtttcaatctggcgaagccaaaacaacctttattgataatacacctgaattatttgaatttcctcgtatgcgcgatcgtggcaataaaacgatgaaatacattggagaagtaacggtcaatgggttccctggcattgaaagaacggagaaaaaatattttgaagccccgcgcgtgccgacagatattgaagttccagaaaaagtgattacagctaaaaatattctagacgctcaaggagcaaccgccgtcatcgattgggttaagaatcaagaaagtgtgttaatgacagataccacgttccgtgatgcgcaccaaagtttattagctactcgtgtgagaacacaagattttaaagcaattgctggtctaactgatgcagccctgcctgagctgttttctagtgaaatgtggggtggcgctacgttcgatgttgcctatcgcttcttaaccgaagacccatggcaacgtttaagaaaaattcgtcagttgatgccaaacacacttttacaaatgctgttcagaggatctaatgcggtaggctatcaaaattatcctgataatgttattgaagaatttattaaagaatccgctcgccaaggagtcgatgttttccgaatttttgatagcttaaactggattcctcaaatggaaaaaagtattcaagtcgttcgggataccggaaaaattgcggaagcagcaatttgttatactggggacatcaatgatccagcccgagcaaaatataatgttcaatattaccttgatatggctaaagaattggaaaatttaggtgcacaaatcattgcgattaaagatatggctggcttattgaaaccacaagctgcttatcgtttaattagtgaattaaaggcagccacggatttaccaattcatctccacactcacgacactagtggcaatgggatcatcacatattcagcagctactaaagcgggcgttgatattgttgacgtcgcaatgagtgcgatgagtggcgcaactagccagccaagtatgaacagtctatattatgctttagtcaatggtgaacggacgccaactattaacattgataatgcacagaaaatcaatcattattgggaagatgtgcgcatgtattatcaaccatttgaaaatgggttaaatgccccgcaaacagaagtctatatgcatgaaatgcctggtgggcaatactctaatctacagcagcaagcaaaagcggtaggcttagggcaccgttgggatgaaatcaaaaaaatatatcacacagtgaatttgatgtttggcgatattgtaaaagtgacgccatcttcaaaagtcgtgggagacatggcactcttcatggttcaaaataatctgacagaacaagatgtttatgcgcgtggtgaagaactaagttttcctgaatcagttgtgacttttttccaaggtgatttaggtcaaccagttggtgggttcccgaaagagctgcaacgaattattctaaaaggtcgaccagccttcacagagcggccaggtgacttagcagcacctgttgattttgcgaaagtacaagaagaattagccgaaaaaattgggtatcaacctaaattggaagaagttttaagttatttaatgtatccacaagtatttttagagtatcgtcaaaaatacgaaacctttggagatataaccttattagatacgccaacattctttaatggtattcgtcaaggagagacattggaagttcaaattgaacgaggaaaaacgttaattattcgtttagatgaaattggcgaacctgatattgacggaaaccgtgtcttgttcttcaatttgaatgggcaacgtcgtgaggttttagttaaagatgcctctattaagtctgctgttcaagtaaaacaaaaggcggaaccaactaataaagaacaaatcggcgcaacgatgtctggttctgttctacaagtattggtcaaacgtggcgataaagtagaaaaaggtcagccgttgctgattacagaagccatgaaaatggaaacgactatcgaagcacgttttgcgggcacggtagatcacatttatgttgaagaaggcgaagcaatcagctcaggtgatttgttattagaagtgaaagaaaaa

SEQ ID NO: 6345 - DNA, 885 bp, Enterococcus faecalis
atgccagaaaatttacaactggttattattacaggaatgagtggcgctggaaaaacagtcgctgttcaaagctttgaagacatgggctatttctgtatcgacaatttaccaccaagcttaatcccaaaattttgggaattaattaaagaatctggaaaagttaccaagattgcgttagtgattgatttacgttcacggaccttctttagagaaattcaggatatgttagtcgaacttgaaaatactaattttattgatacaacgattttatttttagatgccaccgatgaagagttggtttctcgttataaagagacacggcgtgcgcatccaatggcgatggatggtttagtgacagaaggtattcgtaaagaacgtgcaatgctggaagaaatcaaggcggatgctcagttggttattgacactacggacttgtcccctcgtcaattgcgggaacgtttgaataaagaactagcaacgagagagacacacgaatttcgagtggaaatggtgtccttcggctttaaatatggcttgccgattgatgcagatatcgttatggatgttcgctttttacctaacccccattatattgatgaactacgaccgttaactggaatggatcaacctgtttatgattatgtgatgggcttcccagaaacagatgaattttatacaaaatttatcgatttactgcgaacagtcttacctggatataaaaaagaaggtaaaagtagcgtcaccattgcaattggctgtactggcggacaacatcgctctgttgcattgacagaacgtgttggcgctgaattaaaagaggaagattaccatgtaaatattacccaccgcgaccgcttaaaaagaaaagaaacggttaatcgctct

SEQ ID NO: 6346 - DNA, 2421 bp, Enterococcus faecalis
atgttagtttcttataaatggttaaatgaatatgttaatctttcaaacgttactccgcaagaattagcggacaaaatgtctgtgacaggtatcgaagttgagggcgttgctgtacctgaagaaggattaaagaaaattgttgtcggcgaagtaaaagaatgtgttcctcatccaaactctgaccacttatcaatttgccaagtagacatcggtgaagaagaattgtcacaaattgtttgtggagcaccaaatgtaaaagccggaattaaagtcatcgtagcattacctggttcaagaattgcaggaaatcaaaaaattaaaaaaggtaaaatgcgtggcgaagtctctaacggaatgatttgttcgttagaagagctaggatattcagataatgtcgtaccaaaagcctatgctgaagggatttattatttacctcaagaagcagtgaatgggacacctgttttcccttatttagacatggatgatgcgattattgaattatcaattacaccaaaccgtgcagatgcactaagtatgagaggggtagcctatgaagttggcgcaatttatcgtcaaacacctcagtttaatgatcccgaactcaaagaagatgcttcagataacgtggaaaattacgtaacagtgactgttgaagattcacaagatgcgccagcgtatcaaattcgtgttattaaagatgtgacgattgcagaaagtcctcagtggttgcaaaaccgattgatgaatgaaggaatccgtccgattaacaatgtggtggacgtgacaaattatattttattattatttggtcaaccattgcatgcatttgattaccaaaaattagatagcaaagaaatcttggttcgtcgagcaacagcaacagaagaactaattacattagatggtgaaacacgtcaattaacagaagaaaatatcgtcattacgaatggaaaaacgcctgtcggcttagccggagtaatgggtggggctaattctgaaatcagtcaagaaacaacaactgtggctttagaagcggcattgttcaatccattgtctattcgcaaaacgtctaaacaattcaatttacggagtgaatcttcaagtagatttgaaaaaggcatcaaccaagcgacagttgggctagcttgtgatgtggcagccgcgatgattgcagagttagccaacggaacagtggtctcaggcactgcagttggttctgaagtggccgttaaagaagcgcaggtagctgtgactttagagcgaatcaaccaatatttaggcactgcattagatgaagcaacggtgaatgaaatttttgaagcactcggttttgcttatgaagtaaatcaaggcgcatatgaaattacgattccaccaagacgttgggatattgcgattgaagcagatattattgaagaagtggcgcgcatttatggatatgatcatttaccttcaacattgccaagtggagaaacagttgctggaagtctaaccaaagcacaacatgttacgcgccaattaaagagcttactggaaggtcatggtacgagtgaagccatcagctatgcgttgacaacagaagaaaaatcccgtcaatttatgatgaaagaaagtcaaacaacacgtttgcaatggccaatgagtgaagagcgttctgtgttacgtatgaacttaatttctggtttattagatgatgtcgcatacaatgtggcacgtaaaaataataatatcgccttctacgaagtaggacgcgttttctaccaaacagaagatccaacaaaaaatttacctacagaagaaaatcacttagcacttgctttaactggtaatacaatggttaaagattggcaaacaaaagcaacagccgttgatttttatacagtaaaaggcttagtggaaagtattgtagctgttttaggattaacagaaaaaatcagttatcaagcgacaacggcgattccagaaatgcatccaggccggacagcatggatttatttagaaggtgaagtggttggttttgtcggacaagttcacccaacgacagcgaaagcgtacgatattccagaaacatatgttgctgaattaaacttgcaacaattagtagccatagaagcaggcggggttacttatgaagcagtttctaaattcccagcagtttctcgagacattgctttattagtcgatgaaacagttaccaatcaagaactagttaaaactatttcagataacgcaggtaaatatttgaaagagattcatttatttgatgtatatcaaggtgaaaaactaggcgctggcaaaaaatcaatggcgtatagtttaactttcgttaatgcagaagcgacattagtggatgaagaaattaaccgttcaatggaaaaagttgaaaaagcgctaattgaaaaacatcaagtagaagtaaga

SEQ ID NO: 6347 - DNA, 825 bp, Enterococcus faecalis
atgagaatgagcaatcaagaagccattggattaattgattctggcgttggtggattaactgttttaaaggaagcgctaaaacaattaccaaatgaacgattaatttatttaggagatacagcccgttgcccatatggtccacgaccagccgaacaagtcgttcagtttacttgggaaatggccgattttttattgaaaaaacgaataaaaatgctagtaatcgcatgtaataccgcgacggctgtcgcattagaagaaattaaagctgccttgccaattccagttgtcggtgttattttacctggcgcacgagcagccgttaaagtcacaaaaaataacaagattggtgtcataggtacgttagggacaatcaaaagtgcttcctatgaaatcgccattaaaagtaaggcaccaacaattgaggtgactagtttagattgccctaaatttgtccccattgttgaaagtaatcaatatcgttcttccgtagcaaaaaaaattgtggcagaaacacttcaagcactacaattaaaaggacttgatacgttgattttaggttgtacccattacccgttgttacgtccggtgattcaaaatgtgatggggagtcatgtgacattaattgactcaggagccgaaacagttggcgaagtcagcatgcttctcgattattttgacattgcccacacgcctgaagcgcctacacagccccatgaattttatacaactggttctgcaaaaatgtttgaagagattgcaagcagttggcttggtatagagaacttaaaagcacaacagattcacttaggaggaaacgaaaatgat

SEQ ID NO: 6348 - DNA, 885 bp, Enterococcus faecalis
atggaacgtttaagaagaacaatgatgtttgtccctggagcgaacgcggcaatgctaagagatgcacctttgtatggggcagattcaatcatgtttgatttagaagatgcagtttcattaaaagaaaaagactctgcccgtgttttagtccattctgctttgaaaactttcgattatggcaatattgaaattgttgttcggatcaatgctttagatgctggtggtgcagaagatattgaagcaatggtcttagctggtgtcgatgtgattcgtttaccaaaaacagaaacagcccaagatatcattgatgtcgaggcagtcattacagaagtagaacagcaaaatgacattcccgtaggaacaacgaaaatgatggctgccatcgaatcggccgaaggtgttctaaatgcgcccgcgattgccaaaagttcaactcgcttgattggcatcgcgttaggcgccgaagactatgttaccaatatgaaaacacggcgccatccagatggccaagaactattctttgctcgtagcatgattttacatgccgctcgagcagctgggattgcggctattgatacggtctattcagatgtagacaatacggaaggctttgaagccgaagttcgtttgattaaacagctaggtttcgatggaaaatcggtgattaaccctcgtcaaatcccattagttaatactatttatgcgccaacagaaaaagaaatccagaatgctaaggaagtaatctggggcattcgggaagccgaagcaaaaggttccggtgttatctccgtaaatggaaaaatggttgataaaccaattgttgaacgagctgaacgggtcattgcgttagcattggcggctaaattaattaccgaggaggaaata

SEQ ID NO: 6349 - DNA, 1530 bp, Enterococcus faecalis
atggtagtaaataaagtaggcaaagacattcctcaatcttatgcagagcaatacggcatttatgaaggagaattagcacacattggtgcttatcaagaagcgagccgagcaattaaaccagtgaaacctcgggagacaaaacttttaggaagtattcgtgaagcaattgaaaaaacagggttgaaagatggcatgaccatctctttccatcaccatttccgtgaaggagactatgtgatgaatttagttttagccgagattgccgccatggggctgaaaaacatttcgattgcacctagttcaattgcaaatgttcatgaacctctgattgaacacattaaaaatggagtagtcaccaacattacttcttctggtttgagagataaagtaggagccgctatttcagcaggtatcatggaaaatcctgtggtgattcgttcacatggtggccgggcacgggcagtagcagcaggcgatatccatattgatgtagctttcttaggtgcaccaagttcagacgcttatggaaatgcgaatggaaccaaaggaaaagctacctgtggttctcttggatatgcgatggtcgatgcaaaatatgcggatcaagtggtcatcattactgacacattagtaccatatcctaatacccctatcagtattccacaaacagatgttgattatgtggtagaaattgatgcaattggtgatccagatggaattgccaaaggcgcgacacgttttacaaagaatcctaaagaattattgattgctgaatatgccgcaaaaataattacacattctccttactacaaagaaggcttctcattccaaacaggaacaggtggctcttcactagcagttacgcggttcatgagagaacaaatgcttaaagatggcattaaagcaagtttcgctttaggcggaattacgaatgcaatggtggaacttttggaagaaggcttagtagaaaaaattattgacgtccaagactttgatcatccatcagctatttctttaggggaaaatgccaatcattatgaaattgatgccaatatgtatgcctcaccgcttagcaaaggggcggttattaatcaattagacacagctattttatctgctttagaagtggacacagattttaatgtaaatgtcattactggttcagatggtgtcatccgtggtgcttctggcggacattccgatacaagtatggcttgtaaaatgagtctagtgattgcaccacttgttcgtggacggattccaacaatcgttgagcaagtaaatacagtcgttacaccaggtacgagtgtcgatgtcgtagtaacagaagtcggcattgcaatcaatccaaaaagaacagacttaattgattgttttaaaaccttagatgttcctcagtttacgttagaagagttgaaagacaaagcctacaacattgttggcaccccggaaccaattaaatatggagacaaagtcgttgcgttaattgaataccgagatggtagtctaattgatgtggtacgcaatgtt

SEQ ID NO: 6350 - DNA, 648 bp, Enterococcus faecalis
atgaacctcattttaatgggattacctggagcaggtaaaggcacccaagcagaaaaaatcattgatacgtatggcattccacatatttctactggagatatgttccgtgcagcaatgaaaaatgaaactgccttgggcctagaagcgaaatcttatatcgataaaggtgaactggttcctgacgaagtaacaaacggaattgttaaagaacgccttgctgaaccagatacagacaaaggattcctattagatggtttcccacgtacactggatcaagcaaaagcattagatacaatgcttaaagaattaaacaaaaaaattgatgctgtcattgacatccatgtagaagaagatgtattaatcgagcgtttagctggacgattcatctgtcgcacatgtggcgcaacgtatcataaattattcaacccgccaaaagttgaaggcacttgtgatcgctgtggcggacatgaattctaccaaagagaagatgataagcccgaaacggttaaaaatcgtttggcagtcaacattgaaagtagcgcaccaatcttagctttctataaagaacaaggcttgatgcatacaatcgatggcaatcgcgaaatcgatactgttttttctgatgtgaaaaaaatcattgacgaaaac

SEQ ID NO: 6351 - DNA, 1332 bp, Enterococcus faecalis
gtgaccatggatgttacggttgtcaatgtggcgttaccatccattcaaagtgattttcacacgaatctgtctacattacagtgggtaacagatggctacactttaatggtagcatccttattattgttgtctgggtctacagcagatcgaattggccgtaaacgagtccttcaattgggcttagcctgttttggtttagcgtctttcctatgtgggatttcgcaaaccccagggcaattgatcgcgtttcgcatgttgcaagggattggtggttctatgttaaatccggtagcaatgtctattattacacaggtatttaccgaaaagttagaaagagcgaaagcaattggcttgtggggctctgttacagggatttccttaggcatgggcccgattattggtggactgattgtttcttattttagctggcggtatgtcttttttgtaaatgtaccgatcattgctgcggcaatcatccttacacaaaagtttgtacctgagtcaaaagtagagaagacggtgaaaaatgattttgttggtcaagcattgatgattctttttctatttagttctatctattccattatcggactacctagaaaagggcttttcgcgccagatattttaagtactgggataatcggctgcttagccattgttattttctttatttatgaatataacattgacaatccgttaatcaacccgcgtttctttttatctattccatttacatcggcttcttttttagctatttttggctttatcatatataacggctatttatttttaaacacgctatatttgcaagagatgagaggcttcagcccgttggaagctggcttatcaaccattcctttggcttttgttagttttcttgttgcaccgagagccggcgaaatggtagggagaatagggacgaaacgtcctattatgctttgtggtatttcaatgttggctgttagctttttacaattatttgtaactaaaacaacgcctatgattattttatttattatttatatctttttaggcattgggtttgggatgttaaattcaccgattaccattacagcgattgaaggaatgccactttctcagtcaggaactgcagcagccattgcggtgacatgtaagcaaattggcaattctttaggggtggcgctaccaagtcttttaattacaaagcctattactagttcgcttactcgaacaccttttacaaacgtatggcttttatttggatgttgcgccattgcgattatctttttaagttatttatccaattctccgctagcgaaaaagtcattgcgcagagttaggttttatttt

SEQ ID NO: 6352 - DNA, 1416 bp, Enterococcus faecalis
atggcttttgagagtttaacaaaccgcctacagcaggcaatgagtaaaatccgtcgtaagggaaaagtttccgaagccgacgtaaaagaaatgatgcgagaaatccgtttggctttattagaagccgacgttaatttacaagtggtcaaagatttcacaaaacgtgtcagagaacgggcagtaggagtcgaagtattagaaagcttatcaccagcccaacaaattgtaaaaattgttgatgaagaattaacgaaaacgttaggttcagaaacggttgaactgaataaatctccaaaaatcccgacagtgattatgatgacagggttacaaggggctggtaaaacaacttttactggtaaattagcaaaacacttaatgaaaactgaaaacgctcgtccgcttttaatcgctggtgacgtttatcgtccagcagcgattgatcagttgaaggttttaggtcaacaattagaagttcccgtttttgatatgggaacagatgctaatccagtggaaattgttcgtcaagggttagcattagcaaaagaaaagaaaaatgattatgtcttaattgatacggccggccgtttacacattgacgaagctttaatggacgaattgaaacaaattaaagagttggctgatcccaatgaaattctgttagttgttgatgcgatgacggggcaagatgctgtcaacgttgcagatagttttaatgaacagcttggaattactggggttgttattaccaaaatggatggcgatactcgtgggggggctgcgctgtcaattcgggcagtaacgggtgctccgattaaatttgtcggttctggtgaaaaattaaccgatttagaaattttccatcccgatcgtatgtcgagtcgtatcctaggtatgggggacatgttgacgctaattgaaaaagcgcaacaagattacgatgagaaaaaagcagaagaacttgctcaaaaaatgaaagaaaacagttttgactttaacgatttcattgagcaattggatcaagttatgggcatgggaccgattgaagacttattaaaaatgatccctggaatgagtaacatgcctggtattgaaaatgtcaaagtcgatccaaaagatgtggcacggaaacgggcgatggtcttatcaatgacccctgcagaacgtgaaaatcctgatctattaaatcctagtcgccgccgcagaattgcagctggttcaggaaatagtgtggttgaagtcaatcgtatgattaaacaatttaaagaatccaaaaaaatgatgcaacaaatgtccaaaggggatatgaacattcctggtatggatcaaatgttaggtggcggcgttaaaggcaagctaggtaaaatggccatgaatcgtatgatgaagaaaaacaaaaagaagaaaaagaaaaaaaga

SEQ ID NO: 6353 - DNA, 1767 bp, Enterococcus faecalis
atggaaaaacgcacaacctattgcggcaatgtatctgccgaatttattgaaaaagaagttgtattaaaaggatgggttcaaaaacgtcgtgacttaggaggcgttatctttattgatttacgtgaccgtgaaggaatcgtccaagtggtctttaacccagaaaagtcaaaagaagcatgggaaattgctgataaatgtcgtagtgaatacgtcatcgaagttaaaggtcaagtcgtttatcgtgataaagaagcgattaatcccaaaatgaaaactggcgagtttgaagtgatggcgactgacattacgattttaaatactgcgaaaacaacgccatttaccattgaagatgacaataacgttaatgacgaattgcgcatgaaatatcgttatttagatttacgtcgtccatcaatgacaaacaacattaaattacgtcaccaagtaacgaaaacaatccgtcactatttagataatcatgactttttagacattgaaactccttatttaggcaaatcaacaccagaaggcgctcgcgattatttggttccttctcgtgtccatgccggtcatttttatgctttaccacaatcaccacaactctttaaacaattattaatgggggcaggcttcgatcgctattaccaaatcgttcgttgtttccgtgatgaagatttacgaggcgaccgtcagccagaatttacacaaatcgatattgaaacgacctttttaacaccagaagaaattcaaacatatacagaaaatatgttggctgaagtgatgaaagagacaaaaggaattgagatttctgttccgtttccacgaatgagctatgacgaagcaatggcacgctatggtagcgataaacccgacactcgttttgctatggaattaattgatgttgcagaggtagtgaaagacgtagacttcaaagttttccaagcagcgttggaaaatggtggacatgtgaaggctttgaatgcaaaaggcgccgcagataagtattctcgtaaagatatggataacttaggtaagtatgtgagtcaatttggcgcaaaaggcttagcttggttaaaagttgaagaagatggcttaaaaggaccgattgctaaattcttaacagaagttagtgatgaattaattgctgctaccaatgcagaagtcggtgatattttaatgtttggtgccgataaacctgaaatcgtagccgctgctttaggtgcggtacgtacacgtttaggtaaagaattaggtttaattgatgaatcgaaattcaatttcttgtggattgtggattggccgttgtttgaatatgatgaagaagctggtcgctatgtttctgctcatcatccatttacacaaccaaaagcagaggatgtggaccgcttagcaacagacccagcctctgtgtatgctgaagcttacgatgttgtcttaaacggctacgaattaggcggcggctcattacggatccatacacgagaattacaagaaaaaatgtttgaaacgttaggttttacaaaagaagaagcacaagaccaatttggtttcttgctagacgcattagattacggcttcccgccacatggagggattgctttagggctagaccgcttagcaatgctattggctggggaagaaaatattcgtgaagtgattgccttccctaaaaacggcaaagcaattgacccaatgaacaacgcaccaagtttagtttctccattacaattgtttgaattaaacattgatgtaacagccattgacgaa

SEQ ID NO: 6354 - DNA, 948 bp, Enterococcus faecalis
atgaatgaagcacaacagctacagcaaatgcaacctttgctgtacaagcaactccaaaaaagttttgagcatggtcgtcttgcccatgcttatctttttgaaggagatacaggaactggaaaacaagaatttggcttatggatggcgaaacatgtcttttgtacgaatttagtaaatcaacagccttgtaacgaatgccataattgtgtgcggattaatgaaaatgaacatccagatgttttaagaattgcgccagatgggcaaaccatcaaagtgaaccaaatccgtgaattaaaagcggagttttctaaaagtggggtcgagactgctaaaaaagttttcttaattcaagaagcagataaaatgagtaccggcgcagctaatagtctcttaaaatttttagaagaaccagaaggacaaattttagctattttagaaaccacttcgctttctcgaattttaccaacgattcaatcacgatgccaaaccttacattttcaaccattagtcaaaaaaacattaattgatcgcttaatcaaacaggggattggtgaaaagactgcaacccttttagctgaactgacaaatagttttgagaaagcagttgaaatctctcaagatgaatggtttaatgaagctagggaaatcattttgcaatggtttaattatctaaaaagtaatgatttacaggcatttatctacgttcagaagaaaatggtcaaagtatttaaggaaaaagaacaacaagcgcttagctttgacttgctcatggtttattaccgtcaattattggaagaaagtgttgcgacacagcaagccaaaaaagtaacggaagagcaggcggaacggttggcgctaattttgaaagcacgccaaaaatggactgccaatgttagttggcaaaatgtttgtgaacaattagttatccaaatgattcaccctaaatca

SEQ ID NO: 6355 - DNA, 2046 bp, Enterococcus faecalis
atgaggaggagttctacgatggaacaacaaccattaacattaacggcggcgacaactcgtgcgcaagaattaagaaaacaactcaatcaatattcccatgaatattatgtcaaagatcaaccatccgtagaagattatgtttacgatcgtttgtataaagagttagtcgatattgaaacggagtttcctgatttaatcacgccagattcgccgacacaacgtgtaggtggcaaagttttatctggttttgaaaaagctccgcatgacattccaatgtatagtttaaatgatgggtttagcaaggaagacatttttgcttttgatgaacgtgttcgtaaggcgattggtaaacccgttgcttactgttgtgagttaaaaattgatgggttagcaatttcattacgttatgaaaacggggtgtttgtacgcggagcaacacgaggcgatggaacggttggtgaaaacattacagagaacttacgaacggttcgctctgtaccgatgcgtttaacggagcccatttcagtggaagttcgtggcgagtgctacatgcctaaacaatcctttgtcgcattgaatgaagaacgtgaagaaaatggccaagatatttttgccaatcctcggaatgcagcggcgggaagcttgcgccaactagatacaaaaattgtggctaaacggaacttaaatacgtttttatacacagttgctgactttggaccaatgaaagcgaagacgcagtttgaggcattagaagagctttctgcaattggttttagaaccaatcccgaacggcaattatgtcagtcaattgatgaagtttgggcctacattgaagaataccatgaaaagcggagcactttgccatacgaaatcgatggaattgtgattaaagtgaacgaatttgcgttgcaagatgaattaggtttcactgtcaaagcacctcgctgggcgattgcctacaaatttccaccagaagaagcagaaacagtagtggaagatattgaatggacaattgggcgcacgggggtggtcactcctactgcggtcatggctcctgtacgagtcgcgggaaccacggttagtcgggcaagtttgcataatgcagattttattcaaatgaaagatatccgtttaaatgatcatgttattatttacaaagccggcgatattatcccagaagtagcgcaagtgctagttgaaaaacgtgcagccgatagtcagccttatgaaatgccgacacattgtccaatttgtcatagtgagttggtgcatttagatgaggaagtggcgttacgttgtattaatccaaaatgccctgcgcaaattaaagaagggctgaatcactttgtctcacgaaacgcaatgaacattgatggcttggggccacgagtgttagcacaaatgtatgacaaaggattagtgaaagacgtagcggatctgtatttcttaacagaagaacaattaatgactttggataaaatcaaagaaaaatcagcaaacaacatttatactgccattcaagggagtaaagaaaactctgtcgaacgtttgatttttggcttagggattcgccatgtgggggcgaaagcggcgaaaattttagcggagcattttggtgatttaccaaccttaagtcgtgcaaccgcggaagaaattgtggctttggattcaattggcgaaacaatcgcagacagcgttgtgacgtattttgaaaatgaggaagttcatgaattaatggctgaactggaaaaagcccaagtgaacttgacatataaaggtctccggacagaacaattagcagaagtggagtcacctttcaaagacaaaacagttgttttaacaggaaaattagcgcagtacactcgcgaagaagccaaagaaaaaattgaaaatcttggtggaaaagttacagggagtgtttcgaaaaaaactgacattgtggttgctggcgaagatgcaggcagtaaattaaccaaagctgaaagcttaggcgtgaccgtttggaatgaacaagaaatggtcgatgcgttagatgcaagtcatttt

SEQ ID NO: 6356 - DNA, 1296 bp, Enterococcus faecalis
ttgttcaagctattaaagaacgcctttaaagtcaaagacattagatcaaaaatcttatttacagttttaatcttgtttgtatttcgcctaggtgcgcacattactgtgcccggggtgaatgcaaagggattgtctgatttaagtagcttaccctttttgaatatgttgaatatggtgagtggtagtgccatgcaaaacttctctatcttctcgatgggggtttcgccatacattacagcctctattattattcaactattgcaaatggatattgtacctagatttgtagaatggtcaaaacaaggggaagttgggcgtaagaaattaaatcaagcaacaagatatctaacgattgtcttgggtgtggctcagtcaatggggatcactgctggttttaatagcttaagtcaaactgggattgtcaacaatccaaccttaggtacctttgtgatgattgcagttattttaactgctgggacgatgtttgtgacttggatgggtgaacaaattacagaaaaaggaatcggaaatggtgtttcaatgattatctttgccgggattatttcccgtttgccaggagcagtcaaagaaatctatgaagattacttcgtcaatatcgagtcttctcgtatttggcaatctgttattttcattgcaatcttagttattgctattttggtgattgttacagtcgtaacgttcttccaacaagcagaacgtaagattccaatccaatatacaaaacgtgtttctggtgcaccaacaagtagttatttaccgttaaaagtaaatgctgctggggttattccagttatctttgccagctcgttaattgcaacaccaaatgccattttacaagctttctcatcaaaattcgctggtgaaaattggtatgacattatgacaaaaatcttcagttataacacagttccaggggcaatcatctatactgtcctaatcgttgcgtttacgttcttctatgcatttgttcaagtaaaccctgagaaattagcggaaaacttacaaaaacaaggaagctacattccaagcgtgcggccaggtaaaggtacagaagaatatgtatctggcgtgttaatgagattaagtgttgtcggctcaattttcctaggacttgttgctttacttccaatcattgcgcaaatggtttggaacttacctcaatcaatcggtttaggtggaacaagtttactaatcgttatcggggttgcattagaaacaacgaaacaattagaaggattaatgatgaaacgtcaatatgtcggctttatcaataag

SEQ ID NO: 6357 - DNA, 1086 bp, Enterococcus faecalis
atgaaaaaagctagagtgatttataatccaacgtcaggaaaagagttaatcaaaaagaacttagccgatattttatctattttagaagaatgtggttatgaagccagtgcatttgcgaccacaccagaagaaaattcagcacgcaatgaagcacatcgtgctgcgcgggcaggatttgatttactagtagctgcaggtggagatgggaccattaatgaagtcgtgaatgggattgctccgttgaagcggcgccctaaaatggctattattcctgctggaacgacgaatgactatgcacgggccttgaagattcctcgtgataatatcgttaaggcagcagaagtgattaaaaaaaatcaaactgtcaaaatggatattggccaagccggcaaaaattactttatcaatattgcggcgggtggtcatttaacggaactgacttatgaagttccgtcagagttgaaaagtatttttggttacttagcgtacttagccaaaggagccgaaatgttgccgcgagtgaagccgattaaaatgcgcatgacgtatgatgaaggtgtgtacgaaggcaatgcatcaatgtttttcctagggctgactaactcggtgggtggttttgagcaaatcgtaccagatgctaaattagacgatggtaagttttcattaatcattgtaaaaacagccaatatttttgagattcttcatttagttgcgttaatgttaaatggtggaaagcatgttgaagatcatcgactgatctatacaaagaccagctatttacatgcagaaacgttagaaaagaacaataaaatgatgattaatttagatggtgaatatggaggcgatgctccaatgacctttaaaaatatgcatcaacacattgaaatttttgcaaatggtgatgcactgccgtccaatgcaattatgggttctgtcttaactggtagcgatgagattgtcgtagaatcagaagacgaagaggaagaagcatataacgaagccagcaaagaatttgtcaaagaagttgaacgactaacagacgaagatattgatggcgatggaaagattgcggaaaaagaaaagcac

SEQ ID NO: 6358 - DNA, 498 bp, Enterococcus faecalis
atgagtgaagcagcaatcgctaaaaaagaaaccctagttcaagcagccgctgagaaatttgaatcagcagcatcagttgtaatcgtggactaccgtggtttaacagttgaagaagtcactaacttacgtaaacaattacgtgatgcaggcgtagaaatgaaagtcatcaaaaactcaatcctttctcgtgcagctaaaaaagttggtttagacggcttagacgaagtctttacaggcccaactgctgtcgcattcagcaacgacgatgtagtagcaccagctaaaatcatcgacgaatttgctaaagatgcaaaagcattagaaatcaaaggtggcgtcatcgaaggaaaagtttcttcagtggaacaaattactgcgttggcaaaactaccaaaccgcgaaggtttactatctatgctattatctgtattacaagcgccagtccgcaacgtggcttacgctgtcaaagcagtggcagagaaaaacgaagaagttgct

SEQ ID NO: 6359 - DNA, 795 bp, Enterococcus faecalis
atgatgaataaattgatttttgggcgttatattccaggcgattcttttatccatcgtttagatccgcgtgcaaaattattagctagtttttattttattggaattatctttttagcaaataattggcagagttatgttttaatagcagcctttactgcttttgctatttcattatcaaaaatcagcgcccgcttctttatccgcggtgttcggccattattatggctaattctgtttactgtggctcttcaaaccttgtttacacaagggggggaagtgtactttcagtggggaattatttccataacccagtttggtgtgacgaatgggctatttattttctgtcgttttgttttaattattttcatgtcaacgttattaactttaacgacggcaccattagagttatcagatgcgattgaatatttgctacgcccacttcatgtagtgaaatttccagttcatgaagtttcattgatgttatcaattgccttacgttttgtcccaacattaatggatgaaacggaaaagattatgaatgctcaacgtgcccgtggtgttgattttggtgaaggaaacttacttcaaaaaatgaaagctattgttccacttttgattccgcttttcgtaagtagttttaatcgtgcggaagacttagcgactgccatggaagcaagaggttatcaaggtggtgaaggacggacaaaataccgcattcttcattggcacctacgagatacaatagtaatgtttggctttgtcttgttaaccattggcttatttgtattaagaact

SEQ ID NO: 6360 - DNA, 2370 bp, Enterococcus faecalis
aaaagaatttatgaactagcaaaagaaatgaataaagcaagcaaagacgttgtcgataaagcgcatcaattaggtatggatgttaaaaaccatatgggcgcaattagttccgagcaagaaacaaagcttcgtcaagcattcggaggaggaagtaccgtaaatactcaatcaaaagcaacaaacaaccaaaagcaacaaacaacacaaaataaaccagccaataagaaaccaatgaacaataaacctggtgaacaaagaaataaccaaaatcgtccaaacaatcaatcaacgaatggacaacaaagaaacaacaacaaccaaaatcgtcacggccaaagcaacacacaaaaccgtagcaatcaaacaaatacaaacaatcaaaaccgcaatacccaaaacaataacggttctacaacgaatcaaaatcggaccagccaaaataacaatggcgggaacaaccaaaaccgtggcggccaaaaccgtaacaacaattttggtggcggtcaaaatcgtaataaccggaataactttaataaccaaaaccgcaatcgtttcaacaaaaaagggaaaaaaggcaaacatcaacaagaatcagcgaagccagcagtaccagcacgtaaattccgtgaattaccagatgttttagaatatacagaaggtatgaacgtggcggatattgcgaaaaaaatccaccgcgaaccagcggaaatcatcaaaaaattatttatgatgggtgtcatggttaaccaaaaccaagccttagataaagatacaattgaattattagctgtggactatggcatggaaccgcaagaaaaagttcaagttgatattgcggacattgataaattcttcgaaccagaagcagttgttgaagaaaacttaactacacgtccccctgttgtcacaatcatgggacacgtagaccacgggaaaacaacattattagatacattgcgccattctcgtgtgacttcaggtgaagcaggcggtatcacgcagcatattggtgcctatcagttagatattgatggcaaaccaattacgttcttagatacaccaggacatgcggcctttacaagtatgcgcgcgcgtggtgccagcatcactgatattaccatcttagttgttgcagcggacgatggagtaatgccacaaacaatcgaggcgattaaccatgccaaagcggcaaaagtgccgattattgtagcagttaacaaaattgataagcctggtgcaaatcctgatcatgtgaaacaagaattaagtgaacatgaattaattcctgaagaatggggcggagatacgattttcgtcaatatttcagcgaaattcaatcaaaacattgatgagctattggaaaatattttattgattgctgaagtagaagacttaaaagctgatccaacgcaaaaagcaattggaacagtgattgaagcgcgcttagataaaggtaaaggtccggttgcgacattactcgttcaacaaggaactttacatgttggtgatccaatcgttgttggtaatacttacggacgtgttcgtgtgatgaccaatgacatgggccgccgtgataaagaagcaggacccgcaactcctgtagaaattaccggattaaatgatgttcctcaagcgggtgatcgttttgtggtctttgaagatgaaaaaacagcacgtcaagcaggggaagaacgggctaaacgtgcgttgcttgaacaacgttcagcaagtagccgtgtgacattggataacttatttgaaagtctaaaagaaggcgaattaaaagaagttaatatcattgtcaaagcagacgtacaaggatctgccgaagccgtttcagcaagtttacaaaaaattgatgtagaaggcgttcgtgtgaaaattgttcacgcggcagttggggccatcaatgaaagcgacgtaactttagccgcagcaagtaatgcgattattatcggctttaacgttcgcccaacaccacaagcgaaacaacaagcagaacaagaagaagttgatattcgtttacaccgtattatctataaagccctagaagaaatcgaaacagcgatgaaagggttattagatccagaatttgaagaaaaaattacgggtcaaatgacggttcgtgaattgtacaaagtatctaaagttggcacaatcgctggctgttatgttacagaaggctttattcgccgcgatagtggcgtgcgtgtcattcgtgatggtattgttatttatgaaggtaaattagcaagcttgaaacgctttaaagatgacgtgaaagaagtcaaacttggttttgaatgtggcgctatgattgaaaacttcaatgatttacgtgtagatgatgcgattgaaggcttcattatg

SEQ ID NO: 6361 - DNA, 1320 bp, Enterococcus faecalis
atggcaaaaacaggaatgtatgtaggcctcgatattggtacaacttctgtcaaagtagttgtcgctgaatatattgaaggtcaaatgaacatcatcggcgttggaaatgcaaaatcagacggtttgaatcgagggattgtcgtcgatattgatcaaacagttcaagcaatccaacgggccgttcgacaagccgaagaaaaagccggcattcaaattaaaagcgtaaatgttggattaccagcgaatttattagaagtagaaagctgtcaaggaatgatagctgttagcagtgaatcaaaagaaattacagatgaggatgtgcgcaacgtcgcatctgcagctttggttcgttcaactcctcctgaacgtcaaattgttgcaatcttaccgcaagactttaccgtcgacggctttgaaggcatcaaagacccacgtggaatgcttggcgttcgcatggagatgtttggcgttgtctatactggaccaaaaacaatcatccataacatccgtaaatgtgttgaaaaagctggcttaggaattaacgaattagtgattacaccgcttgctttaacggaaacaattttaacagatggcgaaaaagactttggaacaattgtcattgatatgggtggcggtcaaacaacgacatctgttatccacgacaaacaattgaaatttactcatgttaaccaagaaggcggcgagttcatcacgaaagatatctcaatcgtattgaatacttcttttaacaacgccgaagccttaaaaattaattatggggatgcttatccagaaagaacttcagcaaacgaagagtttcctgttgatgttatcggtaagtcagagcctgtaagagtggacgaacgttacctttcagaaattattgaagcgcgtgtggaacaaattttgagaaaatcaaaagaagttctggatgaaattgatgcgtttgaattacctggaggcgttgtgttaactggtggcgccgctagtatgccaggtattgtcgatttggcgcaagagatttttgaagccaacgtaaaactatacgtaccaaatcacatgggcttacgtaacccagtctttgctaatgtcattagcattgtggaatattcagcgcaactaaacgatatttatcacattgccaaatatgcaatccctggtgaaaaatcgaaaccagcacaatcagtcgctgtccaacaagaagttcgctatgacacatatgctgaacagcctcaagaagaatacgaagaattcaacgaacgtgagtctggtgaaaaagtgacaggcaaaatcaaagacttcttctcgaacattttcgac

SEQ ID NO: 6362 - DNA, 1326 bp, Enterococcus faecalis
atgggattttttgataaaattaaaaaagctttttccgctgaaaaaaaggaagaagaaaaacaagagattgttgaagaaacagtagacgaaacaccaagtgatgaatcagcgcctgctgaatcaaaagaaaccgcaacagaagaggcgcaaataacgccagaaacgacagcggaagaagtcacagaaacagccgatttaacagataacgctgaaatggaaaaattagttgatgtagaagaagcgttagaagaagagccagaagaaatcctgacagaggaaacacaagaagttgttgtggaagcgcctgaggaagaaagtagcgtcgtgactcctttggcagaaccaacagacacgcaggtttcagaagaaattgaagagtcaaaagaagagcaggtccaagaaaaatatgaaaaaggcttggaaaaaacgcgtaaaacatttggtcaacggttgaacgaattgtttgctaatttccgaagcgtcgatgaagatttctttgaagaattagaagaaacgttaattggtgcagatgtaggctttgatacatccttaaaaattacagaagccttgcgacaagaagtgaaactgcgaaatgtgaaaaaaccagctcaagttcaaaataccatcattgaaaaaatggttgatttgtatgaagaagcaggaattaatgaaaataatgcgattaacttacagccaaatggcttaaccgtgattttatttgtcggtgttaatggagtcggtaaaacaaccagcattggtaaattagcccatcaatacaagttggaaggaaagaaagttttaatggcagctgccgatacgttccgagcgggcgccatcgatcaattagttgtttggggcgaacgggctggcgttgaagttgtacgtgggaatgctggcggcgatccagcagcggtcgttttcgatgcagtggaacgtgccaaagcagaacaggccgatgttttgctagtggatacagcaggtcgtttacaaaataaagtcaacttaatgaaggaattagaaaaaattaaacgagtcattcaacgagaaattccagatgcgcctcacgaagttctcttagtcgtggacgcaactactgggcaaaatgcgatgacacaagccaaacagttcaaagaaacaaccgatgtcactggcttagttttaaccaaactagacggaacagccaaaggtggtattgtcattgctattcggaatgaattacacttgccagtgaaattagttggtctaggtgaaggcattaacgatttagaaccattcaatgccaacgatttcgcaatgggcttatttaaaggcttattaaaagatgtt

SEQ ID NO: 6363 - DNA, 243 bp, Enterococcus faecalis
atggcagatgtgaaagagttaattttaactattgtccgtccgttagtcagtcaacctgaagcagtctcattagaaattgaggaatcaactgatttcctcgagtataatttgactgtggccaaagaagatattggacgtatcattggtaaacaagggcgtgttgcaaaagcaattcggacaattgtttatagtgtacgtatcgatggtccgaaaaaggtccgtttaaatattcttgatggtaaa

SEQ ID NO: 6364 - DNA, 963 bp, Enterococcus faecalis
atgaagaattatgcacgaattagttgtacaagccgttatgttccagagaattgtgtcacgaatcaccaactgagtgaaatgatggatacctctgatgaatggatacattcgcgaacaggcattagtgaacgtcgcatcgttacgcaagaaaatacgtctgatttatgtcatcaagtcgcaaaacagttattggaaaaatctggaaagcaagcaagtgagattgactttattttagttgcaacagtgacaccagatttcaatatgccttctgttgcttgccaagtgcaaggcgcaattggcgccactgaggcctttgcttttgacatcagtgcagcgtgttctggttttgtctatgccttaagcatggcagaaaaactagtcttaagtggtcgttatcaaacaggtctagtaattggtggcgaaacattttccaaaatgttggattggaccgatcgctccacagcggtgcttttcggtgatggggctgccggcgtcttgattgaagcggctgagacaccgcattttctaaatgaaaaattacaagcagatggacaacggtgggcggctttaacgtcaggctacacgatcaacgaaagtcctttttatcaggggcataagcaggcgagtaagacgctacagatggaaggacgtagtatttttgattttgcgattaaagatgtttcacaaaatattttatcactcgtgacggacgaaaccgtggattatcttctactacatcaagcaaatgtgcgcattatcgataaaattgcacgtaagacgaagatttcccgcgagaagtttttaacgaatatggataaatatggcaatacctcagctgctagtattcctattttgttggatgaagcagttgaaaatgggaccttaattttaggttcccaacaacgcgtggtgctaacaggatttggcggcggcttaacatggggctcactgctcctaacgctg

SEQ ID NO: 6365 - DNA, 795 bp, Enterococcus faecalis
ttgcgtatattatttataggagatgttgtcggttctttaggaagagaagccttagcaacgtatgtccctaaattaaagaaaaaatatcgtccacaagtgaccattgccaatggtgaaaatgcggcatctggtcggggaattactggcaagatttataagaaatttttgcaagatggtgtcgatgttgttacgatgggtaaccatacgtgggacaacaaggatatctttgaattcattgatgatgcgaagaaaatggttcgtccagcgaactttccagaagatgtgcctggtcaaggaatggtttttgtgaaagtcaatcaattggaactagcggtgattaatttacaggcccgcacatttatggtgccattggaagatcctttcaagaaagccgccgagttagtagctatcgctcgcaaacggacaccgctcatttttgtggattttcatggcgaaacgacgagtgaaaaacaagccatgagctggtttttagatggccaagtttcagccgttgttggaacacatacgcatgttcaaacaaatgacgctcggattttaccgaaagggacagccttcttaagtgatgtcggtatgaccggtccttatgatgggattttaggaatgaagcgtgaaccgattattgagaagtttatgacagcattgccgaagcgctttgaggtagtcgaaacagggcggacaattttatctgcctgtattttagagattgatgaccaaacgggccaagcgaaaatgattgagccgattcagattagcgaagatcgcccgtttcaagaa

SEQ ID NO: 6366 - DNA, 642 bp, Enterococcus faecalis
atgtcaatttttaacaaggatgcgttatcgagcttttttggcttatctggcgaagaagatgattattatgataactacgaagaatatgaagagcgcaaagcagttaatgaaccaccgcgtcgtgcagctcggcctaaaccacaacgccctgttcaacaacaggaaagttacagtcagccagcttatacacaacaaagtgagcctgtagttgaaaaaccttctgcacgctatcgttctgctgaagcgcatcaagaaagagacacacaacaagctgcttacacagagaaaaaagtggtttctatgcgtagttctaatcaatcagcgactacgaatacaagacgagcacaagaaagcaccgccaatgcaaaaacacataaaattactattattgaaccacgtgtgtattcagaagcaatgagcattgcgaaacatttatttgctgaagaagctgtgctagttaattttacattagtagaagaagaccaagcacgacgcatcgttgatttcttaactggtactgtgtatgctttagacggagatattcagcgcgttggcaatgaaatcttcttatgcacaccagcgaatatggaaattgatagtgcgacagcacaatctttagccaacaaacaattctttgatttc

SEQ ID NO: 6367 - DNA, 93 bp, Enterococcus faecalis
ttggcgaacgaagtgagcgaagtttcatttgattcttctactttacataacgtaaaccaagtccaactccaccatcaaaatcaggaggtgaaa

SEQ ID NO: 6368 - DNA, 2421 bp, Enterococcus faecalis
atggcacaaaaaagagcaacaaataagaaaaaaagtacgacaaagaaaaagaccaaaaaacaacagcaacaacaagaacgtttaaattatatgtttcttggcctgatttttattttattcggtgtctttggactctttcgcttagggtttttaggcacgttattagcgaattgtttacgcttagttgtaggtaatacctttccatttgcagcgattttactaatcctgtatggcttattagtcatgatttatgggaaagattttccgttaaaaagagggcgccctatttttggggctgttctgatttatattagtgttttgttatttttccatgcctttatgtttcgaaatgttagtggcagtcaaccagatattttaggtaacacttgggaatttttgcaaagcgatctaaaagctaaccaagtgacgcaaaacgtagggggcggtatgattggcgcactgctttatcaaggaacgtactttttggtggcacaatttggtagctatttaattgccaccttgctactgttagcgggtattttcttgatgagtatgtgggattttcagcaaattgttgatcatttccaaagtattcaagatcgcctaagtcatgtttcggcaaaatcacaggcgcgacaagaagaaaaagaggcgaagcgagcagcgaagaaagaagccaaagctgcagaacgccaagcaaaaattgaagccgctgcccaacaaaaattacaagagcgggaacgcatggaacaagcggcagccgagcgcttaacaaaaacacctgttgaaacccaccaaccaatggtggaagaaccggccgcaccaacgcctgttcaaattgattcgtttcaacagcaaaatcaggcgatgcctgtaccaccaattgcagcaacaaaaccgcaacgagagcaggaagaagaggcggcagatgaagctggtgttctcgaatttgaaatttctgaagaagcggaagatcgtgattatcaactaccaccaactgatttgttagatacaattcaagcaacggatcaaagtggtgaatatgaaaaaatcgaaaaaaatattggcgtcttagaacaaaccttcaagagttttggtgttgatgctaaagtagtcaaagctagtttaggaccatctgtcacaaaatttgaagttcaacccgctgttggggtaaaagttagcaaaattgttaacttgacggatgacattgctttagcgcttgcggccaaagacgttcgtatggaggctccgattcctgggaaatcactaatcgggattgaagttcctaatagtgcaattagtacagtatcctttagagatattgttgaggcacaaccaagtcatccagataaactattagaagtacctttaggtcgagatatttcagggatggttcaaactgcagatctatcaaaaatgccgcatttattaattgcgggatcgacagggagtgggaaatcggttgctatcaatggcatcatcacaggtattttgatgcaagcgaaacctcatgaagtaaaattaatgatgattgacccgaaaatggtagaattgaatgtgtataacgggattcctcatttattaacgccagtggttactaatccgagaaaagcggcccaagccctgcaaaaagtagttcaagaaatggaatttcgttatgaaaaatttgcagcaacaggcgtccgaaatatcactggttacaatcaactaattcaacagaaaaatgcggaagatggcgaaaatcgtccaattctaccatttattgttgtcattgttgatgagttagctgatttaatgatggtggcaagtaacgaagtagaagatgcgattatccgtttagcccaaatggcacgggcagcaggtattcatatgattttagcgacacaacggccaagtgtggatgtcattacaggaatcatcaaagcaaatgtcccttctcgaatggcttttgcggtctcaagtgggacagactcgcgtaccattattgataccaacggggcggagaaactattaggtcgaggcgatatgctcttcttaccaatgggagaaaataaaccaattcgtatccaaggggcctttatctctgatcaagaagtcgaacgagtggttgcgtttgtaacggatcaacaagaagctgaatatcaagaaagcatgatgccaacagatgaaccgaccacttcaggcggtggcgaagctcctcaagatgagttgtttgaagaagcgaaaaacttggtggttgaaatgcaaacagctagtatttcattgctacaaagacgttttagaattggctataatcgtgcggctcgcttagtagatgaattggaagcacacggagttattggaccatcagaaggtagcaaaccaagaaaagtctttctacaagcggaatcagaagaggcagcaaccgagacgccagaacaa

SEQ ID NO: 6369 - DNA, 2535 bp, Enterococcus faecalis
atggcaaattttttgaaaaaaatgatcgaaaacgataaaaaagaattaagacgattagaaaaaatcgccgataaaattgatgcacatgcaagtgcaatggaacaactaagcgatgaacaattacgtgaaaaaacagatgaatttaaagcccgttatcaaaaaggggaaaccttagacgaactattaccagaagcgtttgcggttgtccgtgaagctgctaaacgagtactaggtttattcccgtaccgtgtccaattaatgggtgggattgtgcttcatgacgggaacattcctgaaatgagaacaggtgaagggaaaaccttgactgccacaatgcctgtatacttgaatgcactatctggcgaaggagtacacgttgttacagttaatgaatacttagcaacccgtgactctaacgaaatgggagaattatataatttcttaggcttaagcgttggcttaaacattaactctaaatcttctgatgaaaaacgtgaagcgtataactgtgatatcacttatagtacaaataacgaattaggatttgactatttgcgtgataacatggttgtttatcgcagccaaatggttcaacgtccattaaactatgcaattgtcgatgaagtggattcaatcttaattgatgaagcaagaaccccattaattatttctggacaagctgaaaaatcgacagcactttatacgcgtgccgataattttgtcaaacgcttaaaagaagatgaagattacaaaattgatattcagtctaaaacaattggtttaacagaagcaggtattgaaaaagctgaacaaacttttggattggataacctttacgatattgaaaatacagcattaacgcaccatttagatcaagcgttacgggcaaactatatcatgttactagacattgattacgtggttcaagacaataaagtcttaattgttgaccaatttactggtcgtatcatggatggtcgtcgttattctgatggcttgcatcaagcgattgaagcaaaagaaggcgtcgaaattgaagatgaaacaaagacaatggcgacgattacgttccaaaactacttccggatgtacaaaaaactagccgggatgactggtactgctaaaacagaagaagaagaattccgtgaaatttacaatattcaagtcattcaaatcccaaccaatcgtccaattatccgtgacgatcgtccagatttactttatccaaccttagaaagtaaatttaatgcagtggtggaagatattaaagaacgttaccacaaagggcaaccagtgttggtggggactgttgcggtagaaacgtcagaattactttctgataaattaaacgcagctaaaattcctcatgaagtattaaatgcgaaaaatcactttaaagaagccgaaatcattatgaatgccggtcaaaaaggcgcagttacaattgcaacaaatatggctggtcgtggaacggatattaaacttggtttaggtgtacttgaactaggtggtctagcagttatcgggacagaacgtcatgagtcacgtcgtattgataatcagttgcgtggacgtgcaggacgtcaaggggatccaggggtttcacaattttatttatctttagaagatgacttaatgaaacgctttggttcagaacgaattaaaacattcttagaacgaatgaatgtgcaagaagaagatgcagttattcaaagtaaaatgtttactcgccaagtagagtctgctcaaaaacgtgtggaaggaaataactatgacacacgtaaaaatgtcttacaatacgatgacgtgatgcgcgagcaacgtgaagttatttatgcgcaacgacaagaagtaattatggaagaaaatgacttgtctgatgtattgatgggcatggtaaaacggacgattggccgagtggtggatagccatacacaattagaaaaagaagaatggaatttagatgggattgtcgattttgcagcctcaacacttgtccatgaagatacgatttctaaaaaagatttagaaaataaatcagctgaagaaatcaaagactacttagtggcacgtgcgcaagaagtatttgaagaaaaatctcaacaattgaatggccaagaacaattgctagaatttgaaaaagtagtcatcttgcgtgttgtcgatactaaatggacagatcacattgatgcaatggatcaattacgccaatctgtcgggttacgtgcgtacggtcaaaacaacccattagtagaatatcaaacagaaggttattctatgtataacaatatggtgggttcaatcgaatatgaagtaacacgtttattcatgaaatcggaaattcgccaaaatgtccaacgtgagcaagtagctcaaggacaagcggaacatccagaaacagaacaagatgcagctgcacaaagcaacacaagtgcgaagcgtcaacctgtgcgtgtagataaaaaagtgggccgtaatgatttatgcccatgcggaagtggcaaaaaattcaaaaattgtcatggaagaaacgct

SEQ ID NO: 6370 - DNA, 1296 bp, Enterococcus faecalis
atgtcaattattactgatatttacgcacgcgaagtcttagactcacgcggtaacccaacaatcgaagtagaagtttacactgaaagcggagctttcggccgtggaatggttccttcaggagcttcaactggtgaatacgaagcagttgaattacgtgatggcgacaaagctcgttacttaggtaaaggtgttactaaagctgtagataacgtaaacaacatcattgctgaagcaatcatcggttacgatgtacgcgatcaaatggctatcgataaagcaatgatcgatttagatggaactcctaacaaaggtaaattaggtgctaacgctattcttggtgtgtctatcgccgtagctcgtgctgctgctgattacctagaagtgcctttatatcactacttaggcggattcaatacaaaagtattaccaactccaatgatgaacatcatcaacggtggatcacatgctgacaacagtattgacttccaagaattcatgattatgcctgtaggtgcgcctacattcaaagaagctttacgtatgggtgcagaagtattccacgcattagcttcaatcttaaaaggtcgcggtttagctacttcagtaggtgacgaaggtggtttcgctcctaacttaggttcaaacgaagaaggtttcgaagtaatcatcgaagctatcgaaaaagctggctatgttcctggtaaagacgttgttcttgctatggatgctgcttcttcagaattctacgacaaagaaaaaggcgtttacgttttagctgactcaggcgaaggcgaaaaaacaactgaagaaatgatcgcgttctacgaagaattagtttctaaatacccaatcatttcaatcgaagacggcttagacgaaaacgactgggacggattcaaaaaattaactgaagtattaggcgacaaagttcaattagttggtgacgatttattcgtaacaaatacaactaaattagctgaaggtatcgaaaaaggtatcgctaactcaatcctaatcaaagttaaccaaatcggtactttaactgaaacatttgaagcaatcgaaatggctaaagaagctggctacactgcagttgtatctcaccgttctggtgaaacagaagattcaacaatctctgatatcgctgttgcaacaaacgctggccaaatcaaaactggttcattaagccgtactgaccgtattgctaaatacaaccaattattacgtattgaagatcaattaggcgatgtagctgaatacaaaggcttaaaatctttctacaacttaaaaaacaaa

SEQ ID NO: 6371 - DNA, 924 bp, Enterococcus faecalis
gtgactatttatacatgtacattaaatttagccattgatttatttatcgaaacagaagagctagttccttttgtcgtgaatcgtacgaaggaagatgatattcaagcaaacgggaaaggagtcaatgtttccctaattttaaagatgttagggattgataataccgctttgggagtcaaagctggtttcactgggaactatgtcgaggactatttaaaagaaaaagaaataaccactgattttatcgaagtcgctggtacaacgagaattaatgtgtttacaaaagttacccaagatcaaaaggaatacaaattagtcaataagggaccaaaattatctgaagaacatgtacaacgttttttgaaaaaaatttcagagttacgtaaaggggattatttgtgcgtatcaggaagtttaccacaaggggtttcgccaagtattttgattgaaattagccgaatttgttttgaaaaacaggtgttcttaatcttagacagtagttatgaagaaattttagattgtttgccttatcaaccatttttattgaaaccaaatgaagaagaacttcaagagtggtttcatacagaagtgcagactaaggacgattacattttttacggacaagaattactgaagcggggagccaaaaatattttactttctttaggtagtgaaggggctttatttatgaataatgaaaaggttctttcaggtaattcaccaactggaatggttgtgaatacagcttgttcaggggatgcaatgttaggtacctttttagctggttggcatcaaggactttcattggaaaaaaatttgaaaagaagtattgcagcaggtagttcaacagcatttcgcaaaggattgacagatttttcagatgttcaggagttagagcaacaaataaagattcaagaggaggaa

SEQ ID NO: 6372 - DNA, 1416 bp, Enterococcus faecalis
atggctacgtatcaattaatagctgctacaggttgtccgacgggaatagcgcacacgtatatggcacaggaggcattggaacaagctgcgaaacgtaaaggtattacgattaaggttgaaacacatggtcagattggtatagaaaacgagttaacacctgcagaaatccaaggagcggaggcagtcattattgccgccgacaaagacgttcaagcagaacgttttgctgggaaacgaatcattgatgtccctgtcagtgtgggaattaaagaagcagatcgcttaattgaagaagcgctcgcaggcaaaggatcgattgcggccgaaaaccaagcagtggatgaacttgaacaggaaacacagatttcttcaggaaatgttggacatagtatttataaaaacttaatgaatggcgtctctcacatgttgccgtttgtagtagcaggcggcgttttaattgctctttcttttgctatttggggcatttattcatttgatccagaaagtagtcagtataatgctaccgctgctatgttaaaaagtattggtgatgcctcaatgggcatgatggtgccaatcttatctgcgtatatcgcagaggggattgccaaacgacctggtttggttgtgggctttgtcggtggtttgattgctaacactggtggcactggctttttaggagggatattatctggttttcttgctgggtatttcattcttttattacaaagagtatttaaaggcttgcctaaatcattagatggtttaaaagcaattttcctttatccagtcattggcgttgcagttattggtatcactatgtctttactagcagatccgatgaaagctgttaacgaaggaatgatgagctttttagctagtttccaaaactccagtccgttggttttaggaattattgtgggttgtatgtgtgcctttgatatgggaggtccagttaataaagcggcctatgttactgggacggcactcttagctcaaggaaatacttcttttatggcaggagtttctgctgcctgcatagcgccacctttaattacaggctttgctacattattctttggaaaatactttgacacaaatgaacgcaatgcggggctagtgaactttattttaggctccacacatattacagaaggcgctattccgtttgcggcaaaagaccccttgaaggttttaccaattatgatgctcggatcttcaattgcggcagtcctaacgtatatgtttggggtacaagtgccagcacctcatggaggatttcttgttctaccagttgttactcacgctgttcaatgggttttggcaattttagctggttcattggtaggtggcttattgctaggttttgtacaaaaaagtagaatcgccaaacaagagcaatcgttatcaaaaaaa

SEQ ID NO: 6373 - DNA, 198 bp, Enterococcus faecalis
atgccaaaacaaaaaacacaccgcggattagcaaaacgtgtaaaacgtactggtggaggcggcttaaaacgtggccgtgcctttacatctcaccgtttccacggtaaaactaaaaaacaacgccgtcaattgcgtaaagcaagcatggttgcaaaaggcgattacaaacgtatccgccaacaattagcaagaatgaaa

SEQ ID NO: 6374 - DNA, 1689 bp, Enterococcus faecalis
atgaacaacaaagaaatcgtagcaaaagcgttacatgatgttttaaatgaagaattaacgatggatcaaatcgaacaattattggaaaatcctaaatctgttgatcatggagatgttgcttttccagccttttcattagctaaaatttatcgtaaagcaccacaacaaattgcagcagaattagcagaaaaaattgatggcacaaattttgaaaaaattgaagtggtgggaccttatttaaacttcttcatgaataaagaagcagtcagtcaagctgtcattggcgaagtagtcaaagaaaaaaataactacggaaacagtacctttggcaataatggcaatgttcctattgatatgtcttcaccaaacattgctaaaccaatttctatggggcacttacgttctacggtaatcgggaattcaattgcctttattttagaaaaaattgggtatcagccaattcggattaaccacttaggtgactggggtacacagtttggtaagttaattgtagcttataaaaaatggggttctgaagaagcagtccgccaacaaccaattaatgaattattgcgcttatatgtgcaatttcatgaagaagcagaagaaaaaccagaattagaagacgaagcacgtgcatggtttaaaaaattagaagaaggagaccaagaagctaatgaattatggaaatggttccgtagcgagtctctaaaagaatttgataaaatctattccatgttagaagttgaatttgattcttataatggcgaagccttttataatgataaaatggatgaaattgttactttattagaagaaaaacatttattaacagaaaatcaaggtgcagaaattgttgatttgacagaatataatttaaatccagcacttattcgtaaatcagatggtgcgacgttatatatcacacgggatttagctgctgcgctttaccgtaaacggacgtatgattttgccaaatcgctttatgtagtcggcaacgaacaaagcaatcacttcaaacaattaaaagcagtcttgaaagaactagggtttgactggtcagatgatatggaacacattccgtttggtttaattactcaaggcggtaaaaaattatccacacgtaaagggaaaatcgttttattagaagaagtattgaatgaagctgttactttagcaggaaatcaaattaacgagaaaaacccagacttagcaaatcgtgaagaagtggcgaaacaagtaggtgtaggtgcagttattttccatgaccttaaaaatgatcgtctaaataatttcgattttgtattagatgaagttgttcgttttgaaggagaaactgggccatatgttcaatatacacatgctcgtgcgatgagtattttacgtaaagcaaactttacaccagacgctacacaacgttatgcactaaatgacaaggatagctgggaagtcgtgaagttgttacaaaaattccctgaaactgtgatgcaagctgctgaaaaatatgaaccatctgttattgcgaaacatagcattcatttagcacaagcgttcaataaatattatgcccatgttcggattttggatgaagatgctcaaaaagaggcacgcttagcgttagtttatgcagtagctactgttctaaaagaagatttacgtttactagggttacatgcaccagaagaaatg

SEQ ID NO: 6375 - DNA, 303 bp, Enterococcus faecalis
atggacgaaggaatttcaaagaaatttgccattcaattattagaagacgatgcagaacgcattaaaatgcttattcgtaatcaaaaaaacagtttgtgcatttctcaatgtaaagcatttgaagaagtggtggatacacaaatgtatggtttttcaagacaagtgacctatgcgacccgtttggggattttaactaatgatgaaggacatcgcttactaagtgatttagaacgcgaattgaatcaattatatacagatgtttatgaagaaacacaagaaaaaaacgagattggcaaggagggt

SEQ ID NO: 6376 - DNA, 702 bp, Enterococcus faecalis
gtgaagaaaattttagtagttgatgacgagaagccaatttcagagatcgttaaatataatttggttaaagaaggatatgaagtatttactgcttatgatggagaagaagcacttgaaaaagtggaagaagtggaaccagacttaattattttagacttaatgctccctaaaatggatggcttagaagtcgcgcgagaagtgcgcaaaacacatgatatgccaatcattatggtgactgccaaagattctgaaattgataaggttttaggattggaattaggagccgatgactatgtaacgaaaccattttcaaatcgtgaattagttgctcgtgtaaaagccaatttacggcgaggtgcaaccaatgcgaaagaagccgaggtgacaacacaatctgaattaacgattggtgatttaaccattcatcctgatgcatacatggtctcaaaacggggtgaaaaaattgaattaacccaccgtgaatttgagttactttattacttagcaaaacatatcggacaagtgatgactcgtgaacatttattacaaaccgtttggggttatgattattttggggatgtgcggacagtggacgtaaccgtacgtcgtttaagagaaaaaattgaagatagtccaagtcatccaacgtatttagttactcgtcgtggggttggttattatctaagaaatcctgaacaggag

SEQ ID NO: 6377 - DNA, 1392 bp, Enterococcus faecalis
atgaaatatcaatttccagaaaatttttggtggggttctgcagccagcggtcctcaaacagaaggcgtttttgaaggtgatggtaaaggtcaaaatatttgggatttttggtatcaagaagcgccagaaaaattttttcaacaagtcggtccagataagacctcacaattttataaaaaataccaagaagatattcagttaatgaaagaaacgggacataactcttttcgaacatccattcaatggagccgtttaattccagatcctacaacagggaaagtcaatcaaacagcagttgatttttataatcaagtcattgatgatttattagaacacgggattgagccctttatgaacttgtatcattttgatatgccgatggtacttcaagaaaaaggcggttgggaaagccgtgaagtagttgatttgtatgttgactttgccaaaacctgttttgaattgtttggcgatcgcgtgaaaaaatggtttacgcacaatgaaccaattgtaccagttgaaggtggttatctctatggctggcattatcctgataaagtgaatctaaaagaagggattcaagtactctatcatgaagctttagctagtgccaaagcgattgccgtctatcactctatgaacttatcaggtgaaattggcattattttaaacttaacgccgacttatcctcgtgatgagcacaacgaagccgatgtaaatgcggctaaatttgtcgatggtttctttaaccgttcgtttttagacccggctgttaaaggtcattttccagaagatatggttgcttgggcgaaagcaaatgacttattgccagaaacaacgccagaagatttagcaataattgctgaaaatactgtggacttattaggagtaaactactatcaaccacgtcgtgccaaagcaaaagaaacacctgttgaaacacgaccagaaggcttacttccagaagatttttatgatgtctacgatatgcctggcaaaaaaatgaatccttaccgtggctgggaaatctacgaaaaaggtatttatgatacattaatgaatttaaaagaaaattatggcaacattcgctgctacatttcagaaaatggcatgggcgtagaaggagaagaacgctttgtcaatgaacaaggagtcattgaagatgattatcggattgaattcgtgcaagatcacttgaaatgggtgcaccaagcgattcaagaaggtagtaatgttcaaggatatcatatgtggacgtgtatggataactggtcttggctcaatgcctataaaaatcgttatggcttcatcgctgtggatttagatgatgatgcgaaacggaccattaagaaaagcggtcgttggttcaaagaaatgacagcaaataacggcttt

SEQ ID NO: 6378 - DNA, 1683 bp, Enterococcus faecalis
atgaaagtaaacataaaaaataacgaaactggcgtttttgcaatcggtggtttaggcgaaattggaaaaaacacatatggggtacaattccaagatgaaattatcattattgatgctgggatcaaattcccagaagatgatttacttgggattgactacgtgattccagattatagctacatcgttcaaaatttgcataaagtcaaagcactcgttattacccacggtcacgaagaccatattggtggcgttccttatcttttacgtcaagcgaatatcccaatctatgcgggaccactagccttggctttaattaccaacaaactagatgaacatggtttattgcgagaagcggaattacacgaaattaatgaagatacggtgattcgttttagaaaaacagcgattagctttttccggacgactcacagtattcctgatgccttgggcgttgtggttaaaacgccttctggtaacattgtcgcaacaggtgactttaagtttgactttacacccgttggtgagccggccaacttacacagaatggcgaaattaggtgaagaaggcgtcctttgtcttctttcagacagtaccaatgctgaaatacccacctttacaaaatccgaaaaaacaattggaacctctattttaaaaatctttgaaaaaattgatggtcggattatctttgccagttttgcttcaaacattttccgtttacaacaagctgctgatgcagccgtgaaaacaggtcgcaaaattgctgtttttggtcgtagcatggaaaatgccattgtcaatggcgaacgcttaggctacatcaaagtgccaaaaggaacgtttgtcgatgcggcggaactgaatcaattgccagcaaatgaaacaatgattttatgtactggctctcaaggagaacctatggccgcgcttagtcggattgctaacggtacacaccgccaaattagtattcaaccaggcgatacggttgttttctcaagttcaccaattcctgggaatacgacaagcgttaaccgtttaatcaacttattatctgaagccggtgcagaagttatccacggaaaaatcaataatatccatacttctggtcacggtggacaagaagagcaaaaattaatgcttcgtttgatgaagcctaaatatttcatgcctgttcatggtgaatttagaatgttaaaaatccatgcttcgctcgctcaagatacaggggttcctgaagaaaattgctttatcatgggcaacggcgatgtcttagctttaacggctgatagcgcacgccctgctggtcacttcaacgctaatgacgtgtacgttgatggaaatggtgtcggtgatatcgggaatgttgttttacgggatcgtcgtatcttatctgaagaaggtttagttttagcggtagcaacagttgatattaaaaataaagaaattatggctggtccagacattctttcccgtggttttgtctacatgcgtgagtctggtgatatgattcatgaaggccaacgtcttttattcaatgctctacgtgaagcaatgaaagataaaaactgtaccgaagcaaaattaggcgaagccatgacgaccgctttacagcctttcttgtttgaacaaacagaacgtcatccaatgattctgccaatgattatgactgccacagttagtgatcaa

SEQ ID NO: 6379 - DNA, 1488 bp, Enterococcus faecalis
atgagtaaaaaagaaataaatcaagtagttgccagtagctatcaattgtatattaatggagagtggacaacaggtagtggtaacaaaatgattgctagttacaatcctagtaatggcgaaaaattagcagaatttgtagatgccacaaatgcagatgtggatcgagctgtagaagcagcccaagaagcgtttcagacatggaaagatgttgacgttgtaacaagaagcaatcttttgttgaaaattgctgatttgattgaagaaaatcaagaacatttggctatggtggagactttagataatggaaaaccgcttcgggaaacgcaatcgattgatgtccctgccagtgcagaccattttcggtattttgctagtgtgattcgtggagaagaaggatctgtcaaagaatttgataaggatacgttatccattgttgtgaaagaacccatcggtgttgtgggtcaaattattccgtggaatttccccttattaatgggtgcttggaaattagcaccagcgttggcagcaggtaacacggttgtgattcatccgtcctcgagcacatcattaagtctgttggaattgtttaaaatttttgatcaagtcttgccgaaaggagtagtgaatttaatcaccggtcgtggttctgattcaggaaattatatgttggcacatccagggtttgataagctagcttttacaggctcaacagaggtggggtacactgtcgctaaagcggcggccgaccgcctaattccagccactttagaacttggcggaaaatcagccaacattatttttgaagatgccaattgggaacgtgcattagaaggcgtgcagttagggattttattcaatcaagggcaagtttgttgtgctgggtctcgtgtgttcgttcagtcaggtatttatgatcaatttgtagaagctttaaaggaaaagtttgaacaagtgaacgttggtttcccgtgggaaaaagatgttgaaatgggcgctcagatcaatgagcatcaattggaagaaattttaaaatatgtcgaaattggtgtgaaggaaggagctacgctgattactggtgggcaacgtttaacagaaaatgggctagacaagggggcgtttttagcacctacgttattagcgaatggtacgaatgcaatgtgtgtggcccaagaagaaatctttggtcctgttgcaacagtgattaaatttgaaacggaagaagaagtcattcgtttagctaatgattctgaatatggtctaggtggtgccgtcttttctcaagatatcaatgtggcattacgggttgctcgtggtgtacggacaggtcgaatgtgggtcaacacatacaatcaattgcctgcgggcgcgccatttggcggttataaaaaatcaggaattggtcgagaaacgcataaatcaatgctagatgcttatacgcaaatgaaaaatatttacattgtgacaaaagaagaagcagatggactgtat

SEQ ID NO: 6380 - DNA, 1089 bp, Enterococcus faecalis
atgaagatactagtaactggtggtggcacaggtgggcatatctatcctgcgttatccttcgtcgaacacgtcaaaaaagaagcacctgcaacagaattcttgtatgtgggaacagaaaatggtctagaaagtcaaattgtgccaaaggcgaaaattccatttaaaacgattaaaattcaaggattcaagcgttcgctaagtcctcaaaattttaaaacaatttatttatttttaacaagcattaataaagcaaaaaaaattattcgtgaatttcaaccagatgtggtcattggtacaggcggttatgtttctggtgcagtggtttatgcggcccaccaattaaaaataccgacaattattcatgaacaaaatagtatccccggaatgacaaataaatttttaagtcgttatgtggataaaattgcgatttgttttccggatgtcgctagttttttcccgaaagaaaaaacaattttaacagggaacccgcggggacaagaagtcgtaacggtggaaaagtcagctattttatcagagtttggcttggatccagcaaagaaaacggtggttttatttggcggaagtcgtggcgccttgaaaatcaatcaagcgtttgaacaggcctttcctttgtttgaagagagagagtatcaagttttatacgcttcaggagaaagatattatcaggaacttcaagaaagtctaaagttttctgaaaagaaattgacaaacataagtgtgcaaccgtatattgataaaatggttgaagtgatggctaataccgatttaatggtgggacgtgcaggagcaacctcaattgcggagttcaccgcattaggattaccagcaattttaattccgagtccttacgtcacgaatgatcatcaaacgaaaaacgcgcaaagcttagtaaaagttggtgctgttgaaatgattccagatgcagaattgaccggcgctcgtttagttgcggcaatagatgatattttattaaacaatgaaaaaagacaacagatggcaacggcgtccaaaggggaaggcatcccagatgcaagtgatcgtttgtatcaagttgtgaaaacgttagtc

SEQ ID NO: 6381 - DNA, 1191 bp, Enterococcus faecalis
atggctaaaaagacaattaaagatgtagatttaaaagacaaaaaagtccttgtccgtgttgactttaacgttccgttaaaagatggcgtgatcacaaacgataatcgtatcgtagcggctttaccaacaatcaaatacgtgattgaaaatggcggaaaagcaattcttttctctcatttaggtcgtgtaaaaacagaagaagacaaagctggcaaatcattaaaaccagtggctgaacgtttaagcgaattactaggtcaaccagttacttttgttccagaaacacgtggtaaagaattagaagacgctgttaacaatatgaaagatggcgacgttttagtatttgaaaacactcgttttgaagatgttgacggcaaaaaagaaagcggcaatgacgctgaattgggtaaatactgggcttctttaggcgatgtatttgtcaatgatgcttttggtactgcacaccgtgcacatgcctcaaacgttggaattgcttcaactggtatcccaacagttgctggtttcttaatggaaaaagaaattaaattcatcggcgaagctgttgaaaatccaaaacgtccattcgtagcaatcttgggtggcgcaaaagtttctgacaaaatcgctgtcattgaaaacctaattgaaaaagccgataaaattttaatcggtggcggtatggcttacacattcatgaaagcacaaggctatagtgttggtttatctttacttgaagaagataaagtggacttagcgaaaagcttaatggaaaaagctggcgacaaattagttttaccggttgatacagttgtctctaaagagttcagcaatgacgctcctttccacacggttccttcaactgaaatcccagatgatgaagaaggcttggatattggtgaaaaaacaattgaattattcgctaacgaattacaaggtgcgaaaacagttgtttggaatggaccaatgggcgtatttgaaatgagtaactttgccaaaggaacaattggtgtttgtgaagcgattgctaatttagaagacgcaacaacaatcatcggtggcggggactctgctgctgcagcaattcaattaggctacgaaaacaaattctctcacatctcaacaggtggcggagcaagtttagaattattagaaggcaaaactttaccaggtttagcttctattaacgataaa

SEQ ID NO: 6382 - DNA, 699 bp, Enterococcus faecalis
ttggacgcatatgagattattcagtatattggcgatgccaaaaagcaaacgcttgttaaagtaacactgaaagggcaattaaaagaagtcacgtttccagaaacaattaaggtctttaataattgtaaaactgggacattgtttggcgattgggctgacgtaaaaccttttttagaagcaaacaaagaaaaaattgaggattatgttgtagaaaacgatgcacgtaactcagcaattccttttcttgatctgaaagacattaatgctcggattgaaccaggtgctttgattcgcgaaaaagttgaaattggcgatcaagcggtgattatgatgggggctattctaaatattggcgccgtcgttggtgcagggactatgattgatatgggcgctgttttgggcggtcgtgcaactgtagggaagcattgtcatattggcgcaggaacggttttagctggtgtcattgaaccaccaagtgccgcacctgtggttattgaaaacgaggttgtcattggagcgaatgcggtcgtactagaaggggttcgtgttggtgaaggtgccgttgtggctgctggggcggtagttgtggaagacgttccagcgcataccgttgttgcaggcgtgccagcaaaagtaattaaacaaattgatgataaaaccaagagtaaaacagagattttagaagaattacgtaaactc

SEQ ID NO: 6383 - DNA, 3327 bp, Enterococcus faecalis
atgtcatttccacaattgcataccgttacttcctattcgcttttatctagtacggttaggattcgttcctatgtaaaacaagcgaaagcgttaggttatcaaacattagcgattaccgatatcaatgtcttgcatggggcggttgaattttatgaagcatgccaagaagcgggaattcaaccaattatcggtttaagattagaatataccccagcagaaaaagaagggcattccgagttgcttttatttgctaaaaatttaaaagggtatcagcaattaatgcaactatctagtagcaaaatgacgacagagggtcccttttacttagcggaacatcaatccttattaagtgatttatttgccgtgactttgtcagctaaaggagaagtcgcccaaacattttttgaagatgaacaacaagcggttcacgctttccaacaacttgcttcatattttgatccccagtcgttatttgttgaacattctttttcaatgaatcaacaacgtaatccagcgctcttttctttttaccaaagagaacaattacctggcgtggctttgcaagaggtacgtcatttaacaagggaagaaggctttgccgtaactgttcttgagagcatcaaagaaaataatcaattgaatattacaagccaaacaccggaaatagaaggtctgaattacttgcgtgaagcagagacgacgatggaacaaatgcttcaaatagctggtgcagaagtggtccagaatacgattcagctagctgaaaattgccgagttgacattcctttacatcaaaaattattaccgcattttcctgtgcctgataatcaaacggctggttcttatttacgcacattgtgtttagaaaaattaccagaaagagtgcctcatctaaatgaagtttaccaaaaacgattagaaaaagagttaaccatcattcacaatatgggctttgatgattactttttaatcgtttgggatgtgatggacttctgtcataacaatcaaattgttacaggcgctggccgaggttcagctgcaggctctttagtgtcctatgtgctatcaattacagatgtagatccaatcaaatatgatttgctctttgaacgttttttgaatccggaacgctacacgatgcccgatattgatttagatattcctgataatcggcgggaggaagttttagcttatgtcagtcaaaaatatggtcattatcacatggcgcaaattgccacgtttggtacgatggctgcgaaaatggttttacgggacgttgcacgtgttttcgggttgtcccagagtgaagcgaatcgttggtcggcagctgtccccaacaagctgaaaattacgttagaagaagcataccaagagtcaaaacggatgcaagaattggtcaatttttcaccaaataatcaattgctctataaaacagctgttcagctagaaggattgcctcgccatgtttctacgcacgcagcaggtgtggtaattagtgatgaaaatcttttgaatttggttccgttacaaccaggatcgaatgaaattttattgacccaatttactatgaatgatgttgaaaaaattggtcttctgaaaatggatttcttgggcttaagaaatttatccatcattgatgataccctcacagctgttaaacgcgtctataatcgaaccattcgtttaaatcagattccattagatgacgaaacaacgctggctttatttagaaaaggggaaacaagtggtgttttccagtttgaatctgctggaattcggaatgtattaagaaaattagggccaactagcattgaagatattgctgctgtcaatgccttgtatcgtcctggtccgatgcaaaatattgatgttttcatccgccggaaaaaaggcttggaacaaattagttatccagagcctagtctcgcccccattttggaaaatacgtacggaattattgtttaccaagagcagattatgcaagttgctgcgaaaatggcaggcttctctttagggcaagctgacattttacgtcgggccattagtaaaaagaaaaaagatgtgctagatgaagaacgaaatcattttgttaatggtgcgttacaacaaggctatccccaagaaacagctaaccaagtgtacgattatatagagcgctttgctaattatggctttaaccgctcgcatgcatttgcctattcctttattggttttcaaatggcttacttgaaggttcattatccgagtgctttttatgtcgcattgttgcattctgttcgtcataatccaacaaaaattaaagaatatattggcgaagctagaaaaaacaagcagacgattttgcagccgtcaattaaccaaagtcactacagcttttacctaaatcagcaacagcaaattttatttggttttagttctttaaaaggaatccgccgagacttcattcaaaatattttaaatgaacgccgagaaaatggaccgtacaaaacgttcgatgagtttcttttgcgaattgaccgtaagtggttgaaagttgaaaatatcgaaccattgattgccatcggtgcatttgacgaaattgcgcctaatcgccgtcaattagcggtaggtttagagagtaatatccaaagtattcttctcagcggtggtagtatggatttgttagaaacgttgaagcccaaggaagaagaaattgccgattatccgctagaagagcgactagaacaagaagaacaatatttaggggtctatttatcaggacatccgacagaagagttcaaaaaaacacgcttagccaagcaaacgcaacttgttcatgaacttgttgaaaatcagcccacgaaattattgatttatgtcaaaaacattcggacgattcggaccaaaaagggagaacaaatggcctttgttgatggggatgatacaacaggaagtatttcactaacgttgttcccaaccgtttttcgccagttaagacagagtgtcgagaaagggcaagtttattatgtggaaggaaaagtggaacgcagtacgtacaatcaagaattgcaaatattggttcaacgaatagaaaaagcgcaacaagtagaaacatcaattagtgacgaaacgtgttttatcagaattacaaaagatgtcgaacaaacggacgtttttcagaaaatgaaagaggtactcagtcgtcacgctggacacattccagtgattgtctattttgaaaaaacaggtaagaaaatagtattaaatgaagaaaattgggtcgctcatacaagcgctagtcagcaacaattagcttacgttttaggcgagcaaaacgtcattttcaaa

SEQ ID NO: 6384 - DNA, 1554 bp, Enterococcus faecalis
atggttttaaatattctcctcgctatcgtcggtttgattgtcggtcttggtttaggatttgttattgcaaagtcacgtcacgataaagcaataaatggtgcaaaaatttcagcgtcgagtattctcgagaacgctcggaaagaatcagaaacactgaaaaaagaagcattgctagaagctaaggaagagaaccagaagtatcgttcagaaattgaaagtgagttgaaagaaagcagattagaacttaaatctcaagaaaatcgtttaattcaacgggaacaaacgttggatcgtaaagatgactctcttgaaaaacgtgaaggctcactggaagaaaaagaagagaaacttggtgctagacagcaattaattgatgagcgagaaaaagaagtagaaaacttaattaatcagcaacatcaagaattagaacgaattgcttccctttcaaaagaagaagcaaaatcgattattatgaagtcaacagaagaagagttgaatcatgaactaaccttgatggtcaaggagtcagaacaacgtgccaaagaagaatctgatcgcaaagcgaagaacttgctttccctagcaattcaacgttgcgccgccgattctgtttctgaaacaactgtttccgtggtcactttaccaaatgatgagatgaaaggtcgcattattggtcgtgaaggacgtaatattcgtacattggaaacattaacagggattgacttaatcattgatgatacgccagaagcggttgtgttatccggatttgatccaatcagacgagaaatcgctcgaatgaccttggaaaaattaatccaagatggtcggattcatcccgctcgtatcgaagaaatggtagaaaaatcacgtaaagaaatggatgaacggattcgtgaatacggagaacaagcagcctttgaagtaggtgctcatacgttacatcctgatttaattaaaattttaggccgtttacgtttcagaacaagttatggtcaaaatgtcttgaaccattcaatcgaagtagcaaaactagctggcgttttagccgccgaattaggcgaagatgttcaattagccaaacgtgcaggtttactacatgatattgggaaagcattggatcatgaaattgaaggttctcacgttgagattggcgcagaattagctgcgaaatataaagaaaattcagtagttattaatgccattgcctcgcatcatggtgatgtggaagcaacctcagttatttctgttttagtggcagccgcagatgcgttatctgcagcccgtccaggtgcacgtagtgaatcgttagaaaactacattcgccgcttagaaaacttagaaaatatttctaatagttttgaaggcgttgattcaagttttgctgttcaagcaggacgtgaagttcgtgtcatggtgaaaccagaagaaatttctgatttagaatctgttcgtttagttcgagacattcggaagaaaattgaagatgacttggattatccaggacatatcaaagtaacggttatccgtgaaacacgtgccgtagactatgcgaaa

SEQ ID NO: 6385 - DNA, 900 bp, Enterococcus faecalis
gtgaacactaaagctatgttagaaacattaaacgaaattactttattagtagatgaaccattaaaaaacgtaacctttaccaaaacaggcggcccagctgatgtgttggccttacccaaaacaaaaaaagaagttgaagagattgtggcgtattgccgagaacaaggactttcatggttagtattaggcaatgctagcaacttgattgttcgtgatggcggtattcgcgatgtcgtgattatgctaacagaaatgaaagaaatcaaagtagccggtaccaccatgattgtggatgctggtgccaagctgattgatacaacctacgaagccttagcagctgatttaactggttttgaatttgcttgtggcattccgggaagtgtcggtggtgctgtttatatgaatgctggagcatacggcggggaaattaaagatgttttccaatctgcagaagtgctgttggcagatggaactatccaaacaatgacgaaagaagacctgaatttccgttatcgtcatagtgaaattcaagaattacattgtattgtcttgcaagcaacgtttgctttagaaaaaggaaaccatgcagaaattaaagcccaaatggatgaattaacggaacttcgtgaactgaagcaaccgctagagtatccctcttgtggcagtgtctttaaacgccctgttggtcattttacagggaaattaatccaagacgctggcttacaaggcttaaaatggggcggtgctcaaatttccgaaaagcatgcgggatttattgttaacatcgatcatgcaaccgcaacagattatgtggaattaattgcacatatccaagaagtgattaaagaaaaatttgatgttgaattgcaaacggaagttcgaattattggtgaagaagtc

SEQ ID NO: 6386 - DNA, 2971 bp, Enterococcus faecalis
accgtacaagaaatgattttaaccttgcaaaaattttggtcatctaatggctgtatgttaatgcaagcctatgatacagaaaagggagccggtaccatgagtccttacacgtttttacgtgccattggacctgaaccatggaatgctgcctacgtagagccttctcgtcgtccagctgatggacgctatggtgaaaatccgaaccgtctataccaacatcatcaattccaagttgtaatgaagccttctcctgaaaatatccaagaactttatctagaaagtttgaaattattaggaattgatccattagaacatgacattcgttttgtagaagataactgggaaaatccctcaatgggttgtgctggtttaggttgggaagtttggttagatggcatggaaattacccaatttacgtatttccaacaagtcgggggcttacaatgtcatcctgtcacttctgaaattacttacgggttagaacgcttggcatcatatatccaagaagtcgaaagtgtctatgatttagaatggacacaaggcgttaaatatggtgaaatttttgttcaacctgaatatgaacattcaaaatattcctttgaaattagtaaccaagaaatgcttttagaaaactttgacaaatttgaaaaagaagctaaacgctgtattgaagaaagtttagttcatccagcctatgattatattttaaaatgtagccatacattcaatttattagatgctcgcggcgctgtctctgtaacggaacgtgcaggatatttagcccgcattcggaatatggctcgttccgtagcgaaaatttttgtggctgaacgtgaaaaattagggttcccattattaaataaagaccaacacgtatccaaggaggcagaataacatggcaaaagatttattattagaaattggcttagaagaaatgcccgcacatgttgtcacaccaagccgtatccaacttgaagaaaaagtaatcaaatttttagatgaacatcatttagactatgaaacagtgcaatcctttgccacacctcgtcgtttagccgtgaaagtaactgcgattcctgaaaaacaagcggatgttgaagaagaagtaaaaggtccagcgaaaaaaattgctttagatgctgaaggaaattggtcaaaagctgcacaaggttttgtacgcggccaaggagttacaactgaggacattgttttcaaagaattaaatggtgtcgaatatgtctatgtgacgaagtttaccaaaggccaaagtgccaaagaggtattaacaaaattaaatgacgtgattacaagtctaactttcccggtaacaatgcactgggcaaactatgatttcgaatatattcgtccaattcactggattgtggcactacttgatgatgaagtaattcctttcaaagtgttagacgtgacaacagggcaaacttctcgtggccaccgtttcttgggagacgatgtgacgttccaacatgctaatgaatatgaagcaaaattaaaagaacaatttgtagtggttcaaccgaatgaacggaaacaaatgattgttgatcaagcgaacgctctcgctgcagaaaaaaattggcagttagctttagatgaagaattattggaagaagttacgaatttagtggaatatccaactgcatttgtaggtagttttgatgaaaaatatttatctgttccagatgaagtattagtgacttctatgaaagaacaccaacgttattttgacgttcgtaacgaccaaggcttattaatgccgcattttatcgctgttcgcaatggggataatgttcaccttgaaaacgtgattaaaggaaatgaaaaagtgttaattgctcgtttagaagatgcagaattcttttacaatgaagataaaaaattaacgattgaagcatgtgttgaaaaactaaaaaatgtgactttccatgaaaagattggctcaatttatgaaaaaatgcaacgggttgctttaattgcacaaatcattggtcgaaaagttggcttatctgaggatgaattggaagatttaaaacgtgcctctgaaatttataaatttgacttagtaacaaatatggttggtgaattcccagaattacaaggaattatgggagaaaaatatgccttattacaaggcgaaaaaccagccgtagcaacggcgattcgagaacattatctaccaacttccagtgaaggtgaattgccagaaacagcaatcggggctgttttagccttagccgataagcttgacagcgtcttttcattcttctcagttggtatgattccaacaggttctaacgatccttatgcacttcgtcgtcaaacctatggcgttatccgaattattgaagataaaggctggaccttcccattagttcaattacaaacagaagttgatgaagcagtgaatcaagatgttgagaaatatggcgttttactaaacgaaggacaagcagaagtcgttgaatttgtgaaagctcgcttacgtcaattattaatgacgaaaaatgttcgccatgacattatcgatgcagtggtgtctgctgagcaagccgatttatcgaaattatttgcttcagcgaatattttaaaaagccgttttgaagatcaagattttaaaccatcaatggaagccttaacgcgtgttattaatttagcgaaaaaaggtcaagaacttttaggtgatactgaagaagggattgatccaagtctgtttgaaaataaggcagaaaaagaactgtatcaagcagttaacgatttatctgaagcatttgcgacacgcacgattgcagaaaactatgaagcactagtaaatctacgtccgttaattgatgcgtacttcaatgaaacgatggttatggttgaggatgaaaaagtcaaacaaaaccgattaaaacaattaatgcaaattgctaaaatggcgttatcaattgctagcttagatttattaatt

SEQ ID NO: 6387 - DNA, 117 bp, Enterococcus faecalis
gtggcggaattggcagacgcactagatttaggatctagcgccgcaaggcgtgggggttcaagtcccttcacccgcatatttagccggcttagctcagttggtagagcatctgatttg

SEQ ID NO: 6388 - DNA, 120 bp, Enterococcus faecalis
gtgggggttcaagtcccttcacccgcatatttagccggcttagctcagttggtagagcatctgatttgtaatcagagggtcgagggttcaagtcctttagccggcaccattttgcggaaa

SEQ ID NO: 6389 - DNA, 786 bp, Enterococcus faecalis
atggaaaagaaaacagccaatgatgttgttaccttggcaagagcccaagatcgtttgacaactttagaatatatagaagcaatttttgaggactttttagaatttcatggggatcgttactttgccgatgatttagctgtagtcggtggtgttgctactttgcaagggaaaccagttacagtggtaggtatccaaaaaggtcgaaatctaccagaaaatattgaacgtaattttggttcacctaatcctgaagggtatcgcaaagcgttacgtttaatgaaacaagcggaaaaatttaatcgcccagtcattacctttgtgaacactgctggtgcctattgtgggattggtgccgaagagcggggagaaggggaagccattgcgcaaaacctgttagagatgtctgatttgaaagtgccaatcatttcagtcatcattggtgagggcggtagtggcggtgctttagctttagcagtcgcagatgaagtttggatgttggaacacacgatttatgcggttctttcgccagaaggtttcgcctctattttgtggaaagatggcagtcgtgcgaaagaagcagcagaattgatgaaaatcacagcgacagagctgaaggaattagctattgtagataaagtaattccagaagttatgaacggtcagcctctggaacaagcaaaaattaatcgcatgttacaaaaagcgttcatttcaaaattaactgaattagctaaattagatacggaaacgttactagaaaaaagataccaacgttttcgcaaatat

SEQ ID NO: 6390 - DNA, 1209 bp, Enterococcus faecalis
atgaataagaaacatgttgttattttaggtgctggttacgcaggcttaaaaacattacgcgaattacaaaaaggcgccaaagacgtcgaaattactttagtggatcgtaacaactatcactacgaagcaacggatttgcatgaagttgctgctggaacacaaccagctgaaaaaatcacatacaatattatggatgttgtcgatgaaaaaatgaccacctttatccaaggaacagttaaaacaattgatgctgcaacacaaacagttgctttagaagatggccaaacaatcaattatgattacttagttgtttctcttgggtttgaatcagaatcatttggtatccctggtgtgcaagaacatgctctacaaatggtagatgtgaaaacggctttaaacgtgtatgaacatatccaagaacaaatgcgtcaatataaagcaactcaaaacgaagaattcttaaaaattgttgtctgcggagcaggctttacagggattgaattattaggttctcttgttgaaaacaaaccaaaatttgctgaaatcgcaggtgtctcagcagatcaaatccaaatttattgtgtcgaagcagttactcgcctattgccgatgtttaacgaaaaacttgcgaactatggtgtgcaattattaaaagattcagctattcatttattattaggtaaaccgattaaagaaatcaaaccaggcgcagttgtttatcaagataacgaagcaggcgacttggcagaactttctgctaaaacaattatttggacaacgggtgttagtgggagccacgttgtaggcgattctggctttgaagctcgtcgtggtcgtgtcatggttcaaccagatttaacagatgcgaaccatagcaacgtctatattattggtgactgctcagcagttatggatacagaaaccaatcgaccttacccaacaacagcacaaatcgccttgaagatgggcgctcatgctgctaaaaatattcaagcacaattgaaaggggaagcaactaaacctttcagctttaaatcacaaggttctgtttgttctgtcggaaatacacgtgctttaggaatcgttggtaaaacagacattaaaggatacccagcttcattcatgaaaaaaattatcatgaacaaagcgctctttgaaacaggtggtaccaaagaaatgatggctaaaggtcgtttcgacttataccat

SEQ ID NO: 6391 - DNA, 174 bp, Enterococcus faecalis
atgtcaaaaacagtcgttcgtaaaaacgaatctcttgatgatgctcttcgtcgcttcaaacgttccgtttcaaaagcgggtactttacaagaatcacgtaaacgtgaattctacgaaaaaccaagtgtaaagcgtaagaaaaaatctgaagcagctagaaaacgtaaaaaattc

SEQ ID NO: 6392 - DNA, 447 bp, Enterococcus faecalis
atgtcattgctaaccacattgaatgacgacattaaaacagcgatgaaagctaaagacaaagaaactttagccgtacttcgtatgttaaagactgccattcaaaatgatcagattaaagcgggccgtgaattgaacggagaagaagaactcactgtattgtctcgtgagatgaaacagagaaaagattctttatcagagtttgaaaaggcgggacgcgacgatcttgttgaaaaagtaaaagttgaaatagcaattgttgaaaaatatatgcctcaacaactaacggaggaagaaattcgtcaactagttcaagaggtaatgacgcaaactggcgccacttcaccaaaagattttggtaaagtgatgggcgctatgatgccgaaagtcaaaggcaaagccgatggcaaccaagttaacgcaattgtgaaagaattattacaagaaaac

SEQ ID NO: 6393 - DNA, 1614 bp, Enterococcus faecalis
atgcaaacatcgaataaaaaatttccactttatgccctaacaacgcttggttttactttcctcactttgttagtggcggctagtccaaattggtttcaacaaatggacgaagctatctatcacatcaaatggcaattaaatgccccacttttaacagcggtcaatctgttagcaaaaactgccacgattggaccaatgctgctattcttcttatcattgatggtgtaccttttacgcaaaaaagaaaaaattctagccttttgggctgtcagtaacctattagctgtcggctttttagggagcgtttttaaacacgtggtgggtcgggctcgaccaaacctaggcgctttagctgaccggagctctgctagctttcccagcggacattcattattagcaatggcgctagtctgtacgattttgatcattttgacctatcttcatgtcgaaaaaaccaaaggcatcaaaattttcttactcacttatttagttttgattgtgttaggtcgcttaatcttacgcgttcattatcctagtgatgtcattgctgggatgctcctaagttatagctggatcaacttttcatttcaaattgtccaacgttatttgccggcacctgaaccagaggaagcagaagtatcgacacaacgccggcgccgccattctcgtaaaagaaaaagtttattcgtggtcttcagtttaacccttttatttttaggtacactttctgtttcggcttacggcgtcagcatgtatcgcaatttgcaaaaaacggcgaacaccatgtataaaccaagaaaatcttcaacgaagagtcccgatttagccaaaggggaaccggttagtttcttaattatggggattgcgaatgactcaaaacgcaaaaccgattaccgctccaacgccttaatggtggttacagtgaataatcaattacaaaaaactaccatcactagcatcccgcgtgactactatgtggaaatggctggcaccaatggcgaatacaataaaatcaatgcggcccacgttttcggtggtgccgatatgcaaattaaaacggttgaaaatgtcttgcacatcccaatcaatcattacttttcaattgatatggatgctatgaaggaccttggcgatgcggtgggcggcgtcactgttgacaatgcctttgcttttgacgctgaagggattcattatccgaaaggcaaacagcatttaggtggctgggaagctttacaatacgcgcgcatgcgttacgaagaccccgaaggcgactatggtcgtcaacgccgccaacgagaagttttaatcgaattaaccaacaagctactttcttttaacagcttgctaaaatatcaagaaattctggacgtaatcggcgaacatggcgaaaccgacttatcctttgaccaaatgatggcaatgctaaaaaaatacacccccgcactaaaaacgattgaaaccgatcaattaaaaggctacgattacactggcgatggcgtgacagggattgaaggtatttcttatcaacttgtggaagagagtgaacgccaacgtgtcgaaaatgccatcaaagaacaaatgaacctctctacaaaagacactgaacaatcgcaa

SEQ ID NO: 6394 - DNA, 1299 bp, Enterococcus faecalis
atgagttatcaaaaaccaaaaggaacaaacgatattttgccaggaacttctgaaaaatggcaatttgtggaagaaacagctcgtttgatttttaaagattatcaataccaagaaatcagaaccccgatttttgaacattatgaagtaatatctcgcagtgttggcgataccacagatattgtttcaaaagaaatgtatgatttttatgataaaggagaccgtcacgtgacgctacgtcctgaggggacagcgccaattgttcgggccttcgttgaaaataaattatatggtccggaatatacgaaaccatataaaacctattacatggggccgatgttccgctatgaacgcccacaagctggtcgtttgcgtcaattccatcaaattggtgtggaagcatttggtagtgaaaacccagcattggatgttgaaatcatggctatggctttggacttcttcaaacaattaggcatccaacaaatcaaattagttattaattccttgggggataaagaaacacgtgctacgtaccgtcaagcattaatcgattatttagagccccatatggcagaattaagcgaggattcacaacgtcgcttacacgaaaacccattgcgggtgttagacagcaaagataaaaaagacaaggtgattgtcgcagaagcgccctccattttggattatttaaatgaaccatctaaagcacattttgaagcagtaactgatatgttagatttactagaaattccttatgaaattgatagtaatatggttcgtggcctggattattatacacacacaatttttgaaattatgagtgaagcgcctaaaatgggtgcgcaatcaactatttgtgcaggaggccgatacaatggtttagttgaagaattaggcggcccagacacaccaggttttggttttggtatgggcattgagcgagtgttgttaacaatggaagctgaagaagttgtgattccagcgttatctgaattagacgcatatgtggttgggattggttcagacaccaacgtcgcagctttgcaacttgttcaaagcattcgtaactttggtttctcagctgatcgtgattacatgaatcgcaaaccaaaagcgcaatttaaaacggccgataaattacaagcaaaattagttttaacaatcggtgaaaatgaattgaatgaaggcattgtcaacgtaaaatcaatggcaacacgcgaagaaaaagccttcccgttaagtgctattcatgattcatttgatgaagtgtatgacgaaatgatgacaaaaatgattgaagaa

SEQ ID NO: 6395 - DNA, 855 bp, Enterococcus faecalis
atgaaggtaggtatttcaatgtttaatattcttcaatcgactcaattatctagtaatacatttgatttttggctggaagcgccaagaatagcgacacatgctcaggctggacagtttgttattttaagaattgacgaaaagggagaacggatccccttaacgattgcggagacaaatccacaagcaggcagtattcgaattattttccaagtaatcggtaagacaacagctgcactttcccaacttaaaacttcagactctttgttggatatcactggacctttaggtatgcccacagaagtgaagcaatatggaacggtgatggttgtcggtggcggggttggtatcgcggctatttatccaattatcaaggctttaaaagaagcaggcaaccgagtgattacgattttgggagcacgaacagctgagttagttctgttacaagaagaatgccgtcgttattcagatgagctaatcattacaacggatgatggttcattaggtaaaaagggcttagtaacagaagcgatggaagaagttattgcacgtgaatctgtagcgtgcagttgggcgattgggcccagcatcatgatgaaattttgtaccttgacagctgaaaaacatcaattaccaatttatgtttccttgaatcctattatgattgacggaacaggcatgtgtggcggttgtcgggtcactgttgatggcaccatgaaatttgcctgtgttgatggacctgagtttaaaggcaatgaagtaaattgggatgaatttattaatcgaatgaagcaatatcaggaagaagaagcagtttgctttacagatcgtttgaaagagcaggtggagaaaaatggc

SEQ ID NO: 6396 - DNA, 1416 bp, Enterococcus faecalis
atggctagaaaaagtcgtataaaaacaccgattgcggaacaagcacctactatcagaaagaataattttgaagaggtttgcttaggctatacattagcagaagggcaagaagaagcgattcgctgtttacaatgtaaaaatgcaccttgtattgctaaatgccccgtgatgattgatattcctggatttattttagctattcgtgaaggaaacatggaacaagcagccgatattttaagtaaatatacgaatttacctgctatttgtggacgcgtttgtccgcaagagaaacaatgtgaacaagtttgtaaattagggaaagccaaaaactttgaaccagtggcaattggcaaattagaacgtttagttgccgattgggcattagaaaatcacaagtttcctaagaaaacagcggaaccaacaaaagggaaaatcgcagtggtcggttctggtccttctgggttaacagttgcgggggatttgtcaaagctaggctacgaagtaattatttttgaagcgcttcatgaagctggtggcgtattaacctatggcatacctgaatttcgattaccgaaaaaaattgttaaacaagaaattgcgagtattgaagccttaggtgtaacaatagaaaccaatgtggtagtaggtaaaacgattacgatggaagaaataatgtcagagtttgatgcctgttatctatcggttggtgcaggggcaccaaattttatgggaatcccaggaactagtttaaatggggtttattcttctagtgaatttttaacacgaatcaatttaatgcatagctatgagtttccagaatatgatacaccgattaaacgtgctaaaaatgttgttgtgattggcggcgggaatgttgcaatggatgccgctcgttcagccaaacgattaggcgctgaaaatgtgaacattgtgtatcgtcgttcgttagaagaattgccagcaagaattgaagaatatcaccattcccttgaagaaggaattaactattattggttaacgaatccaattgcttatttagatgaccaacaaggaaatctagccggtgttgaatgtgtcaaaatggttttaggtgaaccagatgcgtctggaagacgacggccagaaccaattccaaacagcacgtttaccattcctgctgatgcagtaatcgaggcaattggccaaggggcaaatcgagtcttgttatcaacatatccagaaatagaactaaaccaatggggttacattcaagctgatcctaaaacaggagcaacctcaatacctggcgtttttgctgggggcgatatagtcacaggtgctgccaccgttattttagcgatgggcgctgggaaaatcgcagctaatgcaattgatcagtatgtcaaaacacaaaaaacaacagtcacaagcaatgtt

SEQ ID NO: 6397 - DNA, 1056 bp, Enterococcus faecalis
atgactatggaaaaagtattagaagttaaagacttaagaatctcctttgatacatttgcaggtaaagtcaacgccattcgtggtgtgagttttgatctttataaaggtgaaacgttagccatcgtaggtgaatcagggagtggtaaatctgttacaacccgcagtattatgcgtttgttgagcagtaatgccaatattgataacggggaaattttgtttaaaggacaagatattgttcataaaacagaaaaacaaatgcaagccattcgtggtaaagaaatcgcaatgattttccaagatccgatgacttcattagacccaacgatgccaattggcaaacaagtggcggaatcattaatcaaacataataaagtctcaaaaaaagaaggcttagcgcaagcattagaattactaaaattagtcggcattcctaatgctgaaaaacgtttgaaaaactatccacaccaattttctggtgggcaacgtcaacggattgtcattgcaattgctctaatttgttatcccgaagttctaattgcagatgaaccaactacagcgttggatgtaaccatccaagcacaaattttagagttattaaaagatttacaagaaaaaattagcacttcgattattttcattacccatgatttaggggtagtagcaaacgtggctgaccgtgtcgctgtcatgtacggtggacgtctggttgaagtgggaacagcagaagaaattttctataatccacaacatccatatacttggggacttttagggtcaatgccaacgatggaaggaacagaagacaaactttatgcgattccaggttcacctccagatttattagatccaccaactggagatgccttctatccacggaatgagtttgctttaaaaattgatacagaaaaagaaccaccttattttgaagtatcaccaacccacaaagcagcaacgtggttattagcaccacaagcaccaaaagttacgcctccagcagagattgttcgtcgttgggcaatttatgcagagcgtcaaaaaaatccaggaggtagtaat

SEQ ID NO: 6398 - DNA, 1840 bp, Enterococcus faecalis
atgaagaaaaaagttcacttttttcaatctgttaattttaagattgctttatcatttattctgctgttactgattgcgattcaaatcattggtggctatttcattcgtgaattggaagccactacaatttccgattttaaaaaaaatatggattcccaagttgtccaattgtcaaacacgttaagtacgcagatgagcaacaaagatctcgaacgtagtgacgttgatgcaaatttaaaaaaagcgttatctgatttttcaaatgcagatatttctgaagcgagaattgtcgatgataaagggattattcgggcaaccaatgatttaaatcaacaaaatattattgggaaaaagaatgattatcgtgatttaaatgactttacgagtaaaaaatatcaagctttagataatgataaacgcgtgtatgtgaatgtccagccgattcaatcgcctactggagaaacagtgattggcgtcctttatgtgaaaagtaatttagaaaataaataccaagaaattaccaacacagcaagtatctttttcactgcttctattattgccgcagcaatctcgattattgtgactttactgattgcacgatcaatcacgaagccgattggtgaaatgcgcgagcaagccattcgaatcgctcgtggtgattacgctggaaaagtagaagtccatggaaaagatgaattaggccaattagcagaaacatttaatcaattatcagaacggattgaagaagcacaagaaacaatggaagcagaaagaaatcgtttagatagtgtcttaacgcatatgacagatggtgtcattgcgacggatcgccgcggaaaggtgattacgattaatgaaatggccctttcattattaaatgtaaaaaatgaaaatgtgattgggacctcgttattagagttgttagatattgaagaagattacacattgcggaagctgttagaagagccagatgaactgctgattgatcgctcaacgtctgatcgtgaagaagaccaaatgattatccgggtagactttacaatgattcgtcgggaatcaggatttattactggcttagtttgcgtacttcatgacgtcacagaacaggaaaaaaacgaacgggaaagacgggaatttgtttccaatgtttctcatgagttgcgaacgcctttaacaagtatgcgtagttatatagaggctttgagtgaaggagcttgggaaaaccctgagattgcgccgaatttcttaaaagtcacgttagaagaaaccgaccggatgattcgtatgattaatgatttgttaaatttatctcggatggactctgggaatacacatcttcaattagagtatgtgaattttaacgaattgattaattttgtcttggatcgctttgatatgatgattgaaaatgagcaaaaaaattacaaaatttgccgtgaatttactaaacgcgatttatgggtagaattagatacagacaaagtaattcaggttttagacaacattttgaacaatgcgattaagtattcgccagatggcggcgtcattacctgccgactagttgaaacacataataatgtcgtctttagtatctcggaccaaggtttgggcatccctaaaaaagatctcgggaaagtcttcgagcgtttttatcgtgtggataaagcacgtgcgcgagcacaaggtgggactggtttaggtttagcaatttctaaagaagtaattcgggcccataacgggagtatttgggtggaaagtacagaaggtgaaggatcgactttctatatttcactaccatatgaaccttatgaagaggattggtgggaatgatgaaattatc

SEQ ID NO: 6399 - DNA, 168 bp, Enterococcus faecalis
atgctagaaacaacatttgaacaaattttaacacaattatcaaagccagctgttcgtgcgctaacgaatgaaaaaatcgacagtgtggatgaacttacgcacgaggccgaaaagcgttactttcgttgcatggctttggtccaaagtctattcgaactattgaagaga

SEQ ID NO: 6400 - DNA, 747 bp, Enterococcus faecalis
atgccccgctataaagcaatcattgcctatgatggcactcattttcatggctttcaaaagcaacctaatgagcgtaccgttcaagaagaaatagaaaaaacgttagcacgcatgaataatggacgctccgtgacggtttttggttcaggacgaacagatgcaggtgttcatgcaatgggccaagtgattcactttgattatccgcaggaacgtccgttggaaaaaatgcgctttgcgttagatacacaaacacccgaagacattgctgtgcgcagcgtggaacgtgtttcagaagactttcatgcacgttatcatgtgatcgaaaaaacctatcaatttaaagtggatattggcaaaccgcgaagtccatttcgacgtttttatgctagttattttccgtatcccattgatctcgaaaaaatccaacaagctttgcctgatttattaggcacccatgattttacctctttctgtgcctcaggaagttcggtagaagataaagtccgaaccattcatgaagccagtgttcatgtcaatgaaacgggggatgaattaacattcacttttcggggcgatggtttcttgtacaaaatgattcggattttagttggtacgctattgaaaatcggcaatgggcggctggaaccaaccgcgattccagcaattatcgcagccaaagatcgaaatttagcaggtccgactgctcatccagaaggattgtatttagcagaagtgaaatatgaaaac

SEQ ID NO: 6401 - DNA, 867 bp, Enterococcus faecalis
atgccagtagtatcaggagcagaattcttaaaagcagcacgtaaaggcgggtatgcagtaggtggctataacacaaataacttagaatggacacaagcgattttagaagcagcagaagctaaaaaagcaccagttctaatccaaacatcaatgggcgctgctaaatacatgggcggctacaaagtagctaaagacatgattactaatttagtagactcaatgaatatcacagttccagtagcaattcacttagaccacggtgactacgaagctgctttagaatgtatcgaagttggctatacttcaatcatgtttgatggttctcacttaccattcgaagaaaacttaaaattagcgaaagatgtagttgaaaaagcgcacgctaaaggtatttctgtcgaatgtgaagttggttcaatcggtggtgaagaagacggaatcatcggtactggcgaattagctgatatcgaagaatgtaaacaaatggttgctacaggtattgactacttagcatgtggtatcggtaacatccatggtcaatatccagaaaactggaaaggtttagcatttgatcacttacaagcgattgctgaagctgtcggttctgatgtacctctagtattacacggaggttctggtattcctcaagaacaaattgaaaaagcaatttcaatgggtatctcaaaagttaacgtaaatacagaattccaattatcattcgctaaagcaacgcgcgaatatattgaagctggtaaagatttagaaggtaaaggatttgaccctcgtaaattattagcaccaggtaaagctgcaatcatcaaagatgcagaagaacacattgattggttcggttcagctaacaaagct

SEQ ID NO: 6402 - DNA, 1581 bp, Enterococcus faecalis
atgaacaaaaaagttttttcattcagtctactacttgtcacgctattttcgttacttggcatgacaaccaacgcttcggcggaggaaaatggtgaatttcgtgtcggcatggaagctggctacgccccttttaactggtcacagaaaaatgacgcacatggcgcagtgcctattcaaggcaactcttatgcaggcggctatgatgttcaaatttctaaaaaaattgccgatggtttaggtcgtaaattagtaatcgtccaaaccaaatgggatggcttggcgcccgccttacaatctggaaaaattgatgccattatcgccggaatgagcccaaccgctgaacgaaaaaaagaaattgcttttacaaacccttattatgaatcacaatttgtcgtaattgtaaaaaaagatggcaaatacgctaatgcaaaaagcttgaaagatttagctgatgctaaaattacggctcaactaaatacattccactacggattaattgatcaaattccaaatgtcaataaacagcaagcaatggataacttttcagctatgcgaacagcacttgcttctggcatgattgacgggtatgttagtgaacgccctgaaggcataacagcaactagtgtcaataaagaattaaaaatgttagaatttccaaaagaaaagggctttgatgctagcgctgaagactcgcaagtagcagtcggcatgcgtaaaggcgatccagacattgaaaaagtaaacaaaattttagcaggtatttctcaagatgaacggacaaaaattatggaccaagcaatcaaggatcaacctgcagcaacagatagtgatgaacaaaaaacaggacttattaacgatttcaaaaatatttggaatcaatatggcgacatgtttttacgtggtgctggtttaacgctatttatcgcgttaattgggacagttgtcggaacaacccttggtttactaattggtgtcttccgtacaattccagattctgaaaacccagtcgctcgtttcttccaaaaattaggaaatttaattctttctatttatattgaagttttccgtggtacaccaatgatggttcaagcaatggttattttctatggtttagctctagcttttggcatctctttagaccgaacagtggccgcattatttatcgtttctgtgaatactggtgcctatatgtctgaaattgttcgcggaggtattttcgcagtagataaaggacaattcgaggcagcacaagcgattgggatgacccatggacaaacaatgcgtaaagtcgttattccccaagtattacgtaatattttacctgcaacagggaatgaatttgtcattaatatcaaagatacggccgtgttaagtgttatcggtgttgcagatttattcttccaagggaatgctgcttctggcgcaaacttccagttcttccaaacctttacaattgtcggcatcatgtacttggtaatgacttttgtgatcacacgaatcttacgtgttgtggaacgtaaaatggatggcccttctgcttacgttaaagtagaagaattaactgaagaaggaaaagaaagc

SEQ ID NO: 6403 - DNA, 1935 bp, Enterococcus faecalis
atgtctattcacattacttttccagatggcgctgttaaaccgtttgattctggaattacaacatttgatgttgctaaaagtattagcaacagtttagccaaaaaagctttagctggtaaattcaatggtgttttaatcgatttagatcgtcctatcgtagaagatggttcgcttgaaatcgtgacacctgatcatgaagatgctttaggaattttacgtcattcatcagctcatttaatggctaatgccttacgccgtcttttccctaacattaaatttggcgtaggtcctgcgattgattctgggttctattatgatacagataatggagaatcccctgtgacagcggaagatttacctgcaattgaagccgaaatgatgaaaattgtgaaggaaaataacccaatcgttcgtaaagaaatctcacgtgcagaagcgttagaattatttgctgatgatccttacaaagttgaattaattacagatttgccagaagatgaaatcatcactgtctatgatcaaggcgattttgttgatttatgtcgtggtgttcacgtcccttcaacaggacggattcaagtctttaaattactttcagtagctggtgcttattggcgcggaaactctgacaatcatatgatgcaacggatttatggcactgccttttttgataaaaaagatttaaaagagtttatcaaaatgcgcgaggaagccaaagaacgtgaccaccgtaaattaggaaaagaattagatttatttatggtttcacaagaagttggttcagggttacctttctggttaccaaaaggcgcaaccattcgtcgtacaattgaacgttatattgtggacaaagaaattagcttaggttaccaacatgtgtatacaccaattatggcagatgtggaattatacaaaacatctggtcactgggatcattaccatgaagatatgttcccaccaatggatatgggtgatggcgaaatgctggtattacgtccaatgaactgtccacaccatatgatggtttataaaaatgacattcatagttaccgcgaattgccaattcgaatcgctgaattagggatgatgcaccgctatgaaaaatctggcgcattatcagggttacaacgtgttcgtgaaatgactttaaacgatggccatacttttgttcgtcctgaccaaattaaagacgaatttaaacgtactttggagttaatggtggcagtctatgctgactttaacattacggattatcgtttccgcttaagctatcgtgatccaaataatacagacaaatattttgatgatgatgcgatgtgggaaaaagcgcaagcgatgttaaaagctgccatggatgaattagaattagattactttgaagcagaaggcgaagctgccttttacggtccgaagttagatgttcaagtaaaaacagctttaggaatggaagaaacattatcaaccatccaattagacttcttattaccagaacgttttgacttaacttatgttggcgaagatggtgaaaatacacatcgcccagttgttatccaccgtggtattgtctcaacaatggaacgatttgtggcttacttaacagaagtttacaaaggcgctttccctacttggttagcaccaattcaagcaactattatcccagtttctgtagaagcgcattctgagtatgcttatgaaatcaaagaacgtttacaagcacaaggcttacgtgttgaagtcgatgatcgtaacgaaaaaatgggctacaaaattcgggcctctcaaacacaaaaagtaccttatcaattagtggtcggggacaaagaaatggaagacgcaacggtgaacgtccgtcgttatggaagcaaagaaacgtctgtcgaagatttatcaattttcattgacagcatggctgctgaagttcacaattacagccgt

SEQ ID NO: 6404 - DNA, 471 bp, Enterococcus faecalis
atgattcgaatcggtcaaggttttgatgttcatcaattagttccgcaacgacctttaattattggtggggttactcttccttatgaaaaaggtctgttaggtcactcagatgccgatgttttaacacatgcaattattgatgcaatccttggtgccgctggtctgggtgatattgggcaactgtttcccgaaaccgatccgcagttcaaaaatgcgaattctgtaaacttattaaaaaaagtaaatgaaaaagttgggcggtcgggctttactattggcaatattgattgtacaattttagcggaagagccaaagatgagcccatacttggcagagatgaaaaagaatctagccgcgagttgccacttagcggtcacacaagtgaacattaaggcaacgaccatggaaacgatgggctttgttggtaaaaaagaaggaatcggcgcaattgccgttgctttattggaaaaa

SEQ ID NO: 6405 - DNA, 1359 bp, Enterococcus faecalis
atgaatgaaggccaagaaatggaagagcaatttgcccttcttttagaaacgctaaaaaatcaacaaatgaacgaatttcgtgagctatttttagcgttacacatttatgaacaaggacaattttaccaatcgttagatgaaaaagaccgacaacatttatacaattacctatctccgaaagaactagcggatatgtttgatgttatcgaagaagataatgagaatatgaaagattatttagctgaaatgcgcccaagttatgcagccgatatgttagctgagatgtataccgataatgcggtggatttactaaatatgttagataagagtcaaaaggcgaaatatcttagtttgttaagtagtgaagaagcaggcgaaattaaagagttacttcattacgaagatgaaactgctggggcgattatgaccaccgaatttgtttcgattgtggcgaatcaaacagtgcgttctgcgatgtacgtcttaaagaatcaagcggacatggcggaaacaatctattacgtttacgtagtcgaccaagaaaatcatttagtcggcgttatttcgttgcgggatttaattgttaatgatgatgataccttgattgctgatattttgaatgaacgggttatttcagttcatgttggcgatgaccaagaagatgtcgcgcaaacaattcgtgactatgacttcttagctgtgccagttacagattatgatgatcatttgttggggattgtaacagttgatgatattattgatgttatcgatgatgaagccgctagcgactactctggtttagccggggtcgacgttgaagaagttagtgagaaccctttaaaagccgcttctaaacgattaccttggttaattacgctgctgtttttagggatgtctacggcctcgttaatcagtaattatgagtcgttagttagcgaagcgagtattttagccgtttttatttctttaattaccggaacagccggcaatgccgggacacaatcattggcggtcgcggtacgccgtttggctatgaaagatgaaaaggatagtaattttggtcgcttaatcttaagtgaagtgctcacgggactagtgacgggggctgtgacaggtttaaccattatgattgtggttggcgtgtggcaacataatcttccgcttggatttgtgattgggatggcaatgctctgtgcaattactgtggcgaatttagcagggagtttaatcccaatgttaatggataaattagggtttgatcccgcagttgccagtggcccgtttattactaccttaagtgatttaaccagtgtattaatttatttcaatattgccagcatgtttatgcgttattttgtt

SEQ ID NO: 6406 - DNA, 264 bp, Escherichia coli
ttggctaatatcaaatcagctaagaagcgcgccattcagtctgaaaaggctcgtaagcacaacgcaagccgtcgctctatgatgcgtactttcatcaagaaagtatacgcagctatcgaagctggcgacaaagctgctgcacagaaagcatttaacgaaatgcaaccgatcgtggaccgtcaggctgctaaaggtctgatccacaaaaacaaagctgcacgtcataaggctaacctgactgcacagatcaacaaactggcttaa

SEQ ID NO: 6407 - DNA, 567 bp, Escherichia coli
atgtttaaaggacaaaaaacattggccgcactggccgtatctctgctgttcactgcacctgtttatgctgctgatgaaggttctggcgaaattcactttaagggggaggttattgaagcaccttgtgaaattcatccagaagatattgataaaaacatagatcttggacaagtcacgacaacccatataaaccgggagcatcatagcaataaagtggccgtcgacattcgcttgatcaactgtgatctgcctgcttctgacaacggtagcggaatgccggtatccaaagttggcgtaaccttcgatagcacggctaagacaactggtgctacgcctttgttgagcaacaccagtgcaggcgaagcaactggggtcggtgtacgactgatggacaaaaatgacggtaacatcgtattaggttcagccgcgccagatcttgacctggatgcaagctcatcagaacagacgctgaactttttcgcctggatggaacaaattgataatgcagtcgatgtcacggcaggtgaagtaaccgctaacgcaacctacgtgctggattataaataa

SEQ ID NO: 6408 - DNA, 1986 bp, Escherichia coli
atgaaaaccgttagggagtccacaacgttgtacaactttctcggatcgcacaatccatactggcggttgacggaaagcagcgatgttttgcgcttttctaccaccgaaaccacagaacctgatcgtacattgcagttatctgccgaacaggctgctcgcatcagggaaatgacggtcatcacctccagcctgatgatgagtctgaccgtcgatgaaagcgatctttctgtgcatctggtaggacgaaaaatcaataaacgggaatgggctggcaacgcgtctgcatggcatgacacaccggcggttgctcgtgatttatcacacgggctttcctttgctgagcaggtagtttctgaagcacattccgcaatagtgattctcgacagccgggggaatatccaacgcttcaatcggttatgtgaagattacacagggttgaaagaacacgacgtcattgggcaaagcgtgtttaaactgtttatgagccgtcgtgaagctgcggcatccaggcgcaataaccgtgtattttttcgaagcggcaatgcatatgaagtcgaactgtggataccaacatgtaaaggccagcggctgtttctgtttcgcaataaatttgtccacagcggcagtggcaaaaacgagatttttttaatctgttccggcaccgacattaccgaagagcgccgcgctcaggagcgactgcgtattctggcaaataccgacagtatcaccggactgccgaatcgtaacgcaatgcaggatttaatcgatcacgctattaatcatgcagataacaataaagttggggttgtgtatcttgatttggataatttcaaaaaggtcaacgacgcctatgggcatttgtttggtgaccagttattacgcgacgtgtcattggctattttaagctgtctcgaacatgaccaggtgttggcgcgtccaggtggggatgagtttctggtactggcatccaacacctcacaaagcgcgctggaagcaatggcatcacgaattttgacccgcttacggctcccctttcgcattggtttaattgaagtttataccagctgttcagtaggtattgcactctctcccgaacatggttcagacagcacggctattattcgtcacgccgacacagcaatgtacacagcgaaggaaggcggacgaggacaattttgcgtttttaccccagaaatgaatcaacgggtatttgaatatctctggctggataccaacttgcgtaaagcactggaaaacgatcagttggttattcactatcaaccgaaaatcacctggcgtggcgaagtgcgcagtctggaagcactagtacgttggcagtcacctgaacgtgggttgattccaccgttggacttcatttcctacgccgaagagtcagggctaattgtgcctttaggccgttgggtgattctcgatgtcgtacgccaggtggcaaagtggcgggataaaggcataaacctgcgagtggcggtaaatatttctgcacgtcagctcgccgatcaaaccattttcaccgccctgaaacaggttctccaggaactcaattttgaatactgccctatagatgttgaactgacagagagttgtctgattgagaatgatgaactggcactgtctgttattcaacaatttagccaactaggtgcgcaagtgcatctggatgattttggtaccggctactcttcactttcgcaactggcgcgctttccgatcgatgccatcaaacttgaccaggtttttgttcgagatattcacaaacaacctgtctcgcagtcactggtccgggcgatcgtcgctgtggcccaggcattgaatcttcaggtgatcgccgaaggtgtagagagtgcaaaggaagatgcttttttaaccaagaacgggatcaatgagcggcaaggatttttgtttgccaaaccgatgcccgccgtcgccttcgaacgctggtataaacgctatctgaagcgcgcataa

SEQ ID NO: 6409 - DNA, 183 bp, Escherichia coli
atgtccttgatgtctgaatttgatgcccagcgcgttgccgaacgtattgatattgtgttagatatccttgtggcagacgattaccactctgcgatccataatctcgagatacttaaagcagaactcttgcgccaggttgctgaatctacgccagacatcccgaaggcaccgtgggagatttaa

SEQ ID NO: 6410 - DNA, 612 bp, Escherichia coli
atgcgccttcgtgttgtgcccggttttatttcaccacctccgggcttcggtggtctcggctatacccctacagcgagagcttgtgttaacatttcaatacccttacagttgagagttattgatatgttggatgtatttactccattgttgaaactttttgctaacgagccactcgaaagacttatgtatacgattatcatttttggtctcactctctggctgataccgaaagagtttactgtcgcattcaatgcttatactgaaataccttggctctttcagattatcgtttttgccttttctttcgtggtcgccatttccttctcaagattgcgagcacatattcaaaagcattattcattactaccagagcaacgagtattgcttcgtttatctgagaaagaaatcgctgtatttaaagatttccttaaaacaggaaatcttattatcacttctccttgccgtaacccggttatgaaaaaattagaacggaagggcatcattcaacatcagagtgatagcgcaaactgttcttattatctcgtcaccgaaaaatactcccattttatgaagttattctggaacagcaggagtagacgttttaatcgttag

SEQ ID NO: 6411 - DNA, 336 bp, Escherichia coli
ttggcagacaaagcaatattatgggcactaatatcagccagtactaaagagggacgaaaagcgtgttcactaagctattttgcctgtaaggccgcagaggctgaactcggactggcatatatggctgcgaatgataacaaggaatttctcacatccttatctaatataatgagatacaaaatagatgctggactttccgaatcctatacatgctatttattaagtaagggaaagatcataagaccatatctgaaaaatctaaatccactccaacttgccgctgattgcattgaaacagtaaataaaataaaagataagaataaaaaaaatcattga

SEQ ID NO: 6412 - DNA, 1332 bp, Escherichia coli
atgaataaagcaataaaagtatcattgtatatatcttttgttttgattatttgcgccttatctaaaaacataatgatgttaaatacatctgatttcggaagagccattaagccattaattgaagacataccagcatttacatatgacttacctttattgtataaattgaaaggtcatattgattcaattgatagctatgagtatataagttcatatagttatattttgtatacatacgtcctgtttattagcatttttactgaatatcttgatgctagggtgttatcgttatttctaaaagtaatatatatttattcattatatgcgatatttacttcatatataaaaacagaaaggtatgtaactttatttacattctttattttagcttttcttatgtgttcttcatcaacactgtcaatgtttgcatcattctatcaagagcaaatagttataattttccttccatttttggtgtattcattaacatgcaaaaacaataaatctatgcttttgctatttttttcgttgctaataatatctactgctaaaaatcaatttatattaaccccactaatagtgtattcatattatattttttttgatagacacaaactaattattaaatctgtaatatgcgtggtgtgcttgcttgcgtcaatatttgcaatatcttattcaaaaggtgttgttgaattaaataagtaccatgcaacatacttcggtagttatctttatatgaaaaacaacgggtataaaatgccatcgtatgttgatgataagtgtgttgggttagatgcctggggtaataaattcgacatatcatttggcgcaaccccaacagaagttggaacggaatgtttcgaatctcataaagatgaaacgttttcgaatgcactctttttattggttagcaaaccaagcaccatcttcaaacttccatttgatgatggtgtgatgtctcagtataaagaaaattatttccatgtatataaaaaactacacgtaatatatggagaatcaaacatactaacgactattactaacataaaagacaatatatttaaaaacattagatttatatcattgttattattttttattgcttctatttttattagaaataataaaataaaggcatctttatttgtagtatctctttttggaatatctcaattttatgtgtcatttttcggggaaggatatagagatttaagcaagcatttatttggaatgtatttttcgttcgacctttgcttatacataacagtcgtttttttaatttataaaataattcaaagaaatcaagacaatagcgatgtaaagcactaa

SEQ ID NO: 6413 - DNA, 186 bp, Escherichia coli
atgctgattctgactcgtcgagttggtgagaccctcatgattggggatgaggtcaccgtgacagttttaggggtaaagggcaaccaggtacgtattggcgtaaatgccccgaaggaagtttctgttcaccgtgaagagatctaccagcgtatccaggctgaaaaatcccagcagtccagttactaa

SEQ ID NO: 6414 - DNA, 1362 bp, Escherichia coli
atgtttgataatttaaccgatcgtttgtcgcgcacgctgcgcaatatcagtggccgtggacgcctcactgaagacaacgtaaaagatacgctgcgcgaagtgcgcatggcgctgctggaggcggacgtagctctgccggtagtgcgtgagtttatcaatcgcgtaaaagagaaagcggttggtcatgaagttaataagagcctgacgccggggcaggagttcgtcaaaatagtccgtaacgaactggttgcggcgatgggcgaagagaaccagaccctgaacctggctgcgcaaccgcctgcggtcgtactgatggcgggcctgcaaggtgccggtaaaacaaccagcgttggtaaactcggtaagttcctgcgcgagaagcacaagaagaaagtgctggtggtttctgccgacgtttatcgcccggcggcaatcaaacagcttgagacgctggcagagcaggtgggcgttgatttcttcccttctgatgttggtcagaagccggtagatatcgttaacgcggcgctgaaagaagccaaactgaaattctacgacgtgctgctggtggataccgctggtcgtctgcacgttgacgaagcgatgatggacgagatcaaacaagtccatgcgtcgattaacccggttgaaaccctgtttgtggttgacgccatgaccggtcaggatgcggccaatacggcaaaagcattcaatgaagcgttaccgcttaccggcgtagtgttgaccaaagtggacggcgatgcccgcggcggtgcggcgctctctattcgtcacatcactggcaaaccgatcaagttcctcggtgttggcgagaaaactgaggcgctggagccgttccatccggaccgcatcgcgtcgcgtattctcggcatgggcgacgtactgtcgctgatcgaagatatcgaaagcaaagttgaccgcgcgcaggcagagaaattagccagcaagctgaaaaaaggtgacggcttcgatctcaacgactttcttgagcagctgcgccagatgaaaaatatgggcggcatggctagtctgatgggcaagctgccgggcatggggcagatcccggataacgtcaagtcacagatggacgataaagtgctggtgcgtatggaagccatcatcaactcgatgacgatgaaagagcgcgctaagccagaaatcatcaaaggttcgcgtaaacgccgtattgctgccggttgcggtatgcaggtgcaggacgttaaccgtcttctgaaacagttcgacgacatgcagcgcatgatgaagaaaatgaagaagggcggaatggcgaagatgatgagaagcatgaagggtatgatgcccccaggcttccctggtcgctaa

SEQ ID NO: 6415 - DNA, 366 bp, Escherichia coli
atgtctatcactaaagatcaaatcattgaagcagttgcagctatgtctgtaatggacgttgtagaactgatctctgcaatggaagaaaaattcggtgtttccgctgctgctgctgtagctgtagctgctggcccggttgaagctgctgaagaaaaaactgaattcgacgtaattctgaaagctgctggcgctaacaaagttgctgttatcaaagcagtacgtggcgcaactggcctgggtctgaaagaagctaaagacctggtagaatctgcaccggctgctctgaaagaaggcgtgagcaaagacgacgcagaagcactgaaaaaagctctggaagaagctggcgctgaagttgaagttaaataa

SEQ ID NO: 6416 - DNA, 2475 bp, Escherichia coli
atgctacaatgtggcgcgaagaatgttaaccctctggagcgttttgtgtcgtcgttgcccgttgctgccgtcttacctgaattacttaccgctctcgattgtgcgccgcaggtattattaagtgcgccgaccggggccgggaaatcaacctggctgccgctgcaactgctggcgcatcccggcattaacgggaaaattatcctgctggagccgcgtcgtctggcggcgcgtaacgtcgcgcaacggctggcggagctgcttaacgaaaagccaggcgataccgttggctaccggatgcgtgcgcaaaactgcgtcgggccgaatacccgcctggaagtggttaccgaaggcgtgctgacgcgcatgatccagcgtgacccggaactgagcggtgttggactggtgatccttgatgaatttcatgagcgcagcttgcaggcggatttggcgttggcgctgttactcgatgtgcaacaaggtctgcgtgatgaccttaaactgctgattatgtcggctaccctggacaacgaccgcttgcagcaaatgctgccagaagcgcctgtcgtcatctcagaagggcgctcgtttccggttgaacgccgttatttaccgctgcccgcgcatcagcgttttgacgatgccgttgcggtagccaccgctgaaatgctgcgtcaggaaagcggatcattactgttatttttacctggcgtcggagaaattcagcgtgtgcaggaacaactggcttcgcgcatcggcagtgatgtattgctctgcccgctgtatggcgcgttgtcgctgaacgatcagcgaaaagcgatcctcccggcaccgcaagggatgcgcaaagtggtgctggcgaccaatattgctgaaaccagtttaaccattgaaggtattcgtctggtggtggattgtgcccaggagcgtgtggcgcgttttgatccgcgcacggggcttacgcgactgattactcaacgcgttagccaggcatccatgacgcagcgtgccgggcgcgccgggcgtctggagccgggtatcagcctgcatttaatcgccaaagaacaagcagaacgcgccgcggcgcaaagtgaaccggagatcttacaaagcgatctttccggtttgctgatggaattactgcaatggggatgcagcgatccggcgcagatgagctggctggatcaaccgccagtagtgaatctactggccgcgaaacgtctgttacaaatgctgggggcactggagggtgaacggcttagtgcgcaagggcaaaaaatggcagcgctgggtaacgatccgcgtttagcggcaatgctggttagcgcgaagaacgacgacgaagctgctaccgcggcaaaaattgccgccattctcgaagagccgccacggatgggcaatagtgacctgggcgtggcgttttcgcgcaatcaaccagcctggcagcaacgtagtcagcaactgttaaaacgcttaaacgtacgtggcggtgaggcagacagttcgcttatcgcgccgctacttgccggggcgtttgccgatcgcattgctcgtcgccgtgggcaagatggacgctatcaactggcaaacggcatgggagcgatgctcgatgccaacgacgcgctaagccgccacgaatggttgatcgcaccgttattattgcagggcagcgcctcgccggatgcgcggattttactggcgctgctggtcgatattgatgagttagtacaacgctgcccgcagctggtacagcagtctgacactgtggagtgggatgacgcgcaaggtacgctgaaagcctggcgtcggctacaaatcggtcagttgacggtgaaagtgcagccgctggcgaaaccgtcagaagacgagttgcatcaggcgatgcttaatggcatccgtgataaaggtttaagcgtgctcaactggacggcggaagcggaacagctacgcttgcgtttgttatgcgccgcaaagtggttgccggaatatgactggccagcggttgatgatgaaagtttattggcagcgctggaaacgtggctgctgccacatatgactggcgtacattcactacgcggcctgaaatcactcgacatttatcaggcactacgcggattacttgattggggaatgcagcaacgtctggatagtgaattgcctgcgcattacactgtgccgacgggaagccggatcgccattcgttatcatgaagataacccgcccgcgctggcggtgagaatgcaagagatgtttggcgaggccaccaatccgacgatcgcccaggggcgcgtgccgctggtgctggagttgctttcacctgcccaaaggccattacaaatcacacgagatttgagcgacttctggaaaggagcgtaccgtgaggtgcaaaaagagatgaaagggcgttatcccaaacatgtctggccggacgacccggcaaatactgcaccgacgcgacggacgaaaaagtattcgtaa

SEQ ID NO: 6417 - DNA, 822 bp, Escherichia coli
atggcagttgttaaatgtaaaccgacatctccgggtcgtcgccacgtagttaaagtggttaaccctgagctgcacaagggcaaaccttttgctccgttgctggaaaaaaacagcaaatccggtggtcgtaacaacaatggccgtatcaccactcgtcatatcggtggtggccacaagcaggcttaccgtattgttgacttcaaacgcaacaaagacggtatcccggcagttgttgaacgtcttgagtacgatccgaaccgttccgcgaacatcgcgctggttctgtacaaagacggtgaacgccgttacatcctggcccctaaaggcctgaaagctggcgaccagattcagtctggcgttgatgctgcaatcaaaccaggtaacaccctgccgatgcgcaacatcccggttggttctactgttcataacgtagaaatgaaaccaggtaaaggcggtcagctggcacgttccgctggtacttacgttcagatcgttgctcgtgatggtgcttatgtcaccctgcgtctgcgttctggtgaaatgcgtaaagtagaagcagactgccgtgcaactctgggcgaagttggcaatgctgagcatatgctgcgcgttctgggtaaagcaggtgctgcacgctggcgtggtgttcgtccgaccgttcgcggtaccgcgatgaacccggtagaccacccacatggtggtggtgaaggtcgtaactttggtaagcacccggtaactccgtggggcgttcagaccaaaggtaagaagacccgcagcaacaagcgtactgataaattcatcgtacgtcgccgtagcaaataa

SEQ ID NO: 6418 - DNA, 303 bp, Escherichia coli
atgattcgtgaagaacgtctgctgaaggtgctgcgtgcaccgcacgtttctgaaaaagcgtctactgcgatggaaaaatccaacaccatcgtactcaaagttgctaaagacgcgaccaaagcagaaatcaaagctgctgtgcagaaactgtttgaagtcgaagtcgaagtcgttaacaccctggtagttaaagggaaagttaaacgtcacggacagcgtatcggtcgtcgtagcgactggaaaaaagcttacgtcaccctgaaagaaggccagaatctggacttcgttggcggcgctgagtaa

SEQ ID NO: 6419 - DNA, 666 bp, Escherichia coli
atgaacgttttctcgcaaactcaacgctataaggcgttgttctggttatcgttatttcatctgctggtgatcacctccagtaactatctggttcagcttcccgtctccattttgggtttccataccacctggggcgcgtttagctttccgtttatttttcttgctaccgacctgaccgtgcgtatttttggcgcaccgctggcccgacgcattatcttcgcggtaatgatccctgcgttattaatctcctacgtcatctcgtcgctattctatatgggttcctggcagggattcggcgcactcgcccacttcaacctgtttgtcgcccgtatcgccaccgccagtttcatggcctacgcgctggggcaaatcctcgacgtgcacgtttttaaccgcctgcgtcagagtcgccgctggtggctggcaccgacagcgtccacactgttcggtaacgtcagcgacacgctggcctttttcttcattgccttctggcgtagcccggatgcctttatggctgaacactggatggaaatcgcgctggtcgattactgtttcaaagtgttaatcagtatcgttttcttcctgccaatgtatggcgtattactcaatatgctgttgaaaagactggcagataaatccgaaatcaacgctttgcaggcgagttaa

SEQ ID NO: 6420 - DNA, 1029 bp, Escherichia coli
atgctgaagtttattcagaacaaccgtgaaatcacggcactgctggcggtggtgctgctgtttgtattacccggttttctcgaccgccagtatttaagtgtgcaaacgctgaccatggtttatagcagcgcgcaaatcctgatcctgctggcaatgggcgcgacgctggtaatgcttacgcgcaatattgatgtttcagtgggttcgattaccggaatgtgcgcggtgctgttggggatgttactgaacgcaggatattcactacctgttgcttgtgtcgcgactttactgcttggtttgctcgcgggatttttcaacggtgtcctggtcgcgtggctaaagatccctgccattgttgccacccttggcacgttagggttgtacagaggcatcatgttgctgtggactggcggcaaatggattgaagggttacccgccgaactgaaacagctctccgccccgctgctgcttggcgtttcagcaattggttggttgacgataattctggtggcatttatggcctggctgctggcaaagacggcgtttggacgcagtttttatgccacgggcgataatttacagggcgctcgtcaactgggcgttcgtactgaagccattcgcattgtggcattttcgttgaacggctgcatggcggcactggcgggaattgtgtttgcttcgcagattggttttatccccaaccagaccggtaccgggctggagatgaaagcaattgcagcctgcgtgctgggcggcattagtttgctcggtggttccggtgcgatcattggtgcggtactcggcgcatggttcctgacgcagatcgatagcgtactggtgctgttgcgcattccggcatggtggaatgattttatcgcgggtctggttctgctggcggtgctggtgtttgatggacgcctgcgttgtgcgctggaacgtaatctacggcggcaaaaatatgcccgctttatgacgccaccgccatccgttaaacccgcttcgtcaggtaaaaaacgggaggccgcataa

SEQ ID NO: 6421 - DNA, 2145 bp, Escherichia coli
gtgtcccgtattattatgctgatccctaccggaaccagcgtcggtctgaccagcgtcagccttggcgtgatccgtgcaatggaacgcaaaggcgttcgtctgagcgttttcaaacctatcgctcagccgcgtaccggtggcgatgcgcccgatcagactacgactatcgtgcgtgcgaactcttccaccacgacggccgctgaaccgctgaaaatgagctacgttgaaggtctgctttccagcaatcagaaagatgtgctgatggaagagatcgtcgcaaactaccacgctaacaccaaagacgctgaagtcgttctggttgaaggtctggtcccgacacgtaagcaccagtttgcccagtctctgaactacgaaatcgctaaaacgctgaatgcggaaatcgtcttcgttatgtctcagggcactgacaccccggaacagctgaaagagcgtatcgaactgacccgcaacagcttcggcggtgccaaaaacaccaacatcaccggcgttatcgttaacaaactgaacgcaccggttgatgaacagggtcgtactcgcccggatctgtccgagattttcgacgactcttccaaagctaaagtaaacaatgttgatccggcgaagctgcaagaatccagcccgctgccggttctcggcgctgtgccgtggagctttgacctgatcgcgactcgtgcgatcgatatggctcgccacctgaatgcgaccatcatcaacgaaggcgacatcaatactcgccgcgttaaatccgtcactttctgcgcacgcagcattccgcacatgctggagcacttccgtgccggttctctgctggtgacttccgcagaccgtcctgacgtgctggtggccgcttgcctggcagccatgaacggcgtagaaatcggtgccctgctgctgactggcggttacgaaatggacgcgcgcatttctaaactgtgcgaacgtgctttcgctaccggcctgccggtatttatggtgaacaccaacacctggcagacctctctgagcctgcagagcttcaacctggaagttccggttgacgatcacgaacgtatcgagaaagttcaggaatacgttgctaactacatcaacgctgactggatcgaatctctgactgccacttctgagcgcagccgtcgtctgtctccgcctgcgttccgttatcagctgactgaacttgcgcgcaaagcgggcaaacgtatcgtactgccggaaggtgacgaaccgcgtaccgttaaagcagccgctatctgtgctgaacgtggtatcgcaacttgcgtactgctgggtaatccggcagagatcaaccgtgttgcagcgtctcagggtgtagaactgggtgcagggattgaaatcgttgatccagaagtggttcgcgaaagctatgttggtcgtctggtcgaactgcgtaagaacaaaggcatgaccgaaaccgttgcccgcgaacagctggaagacaacgtggtgctcggtacgctgatgctggaacaggatgaagttgatggtctggtttccggtgctgttcacactaccgcaaacaccatccgtccgccgctgcagctgatcaaaactgcaccgggcagctccctggtatcttccgtgttcttcatgctgctgccggaacaggtttacgtttacggtgactgtgcgatcaacccggatccgaccgctgaacagctggcagaaatcgcgattcagtccgctgattccgctgcggccttcggtatcgaaccgcgcgttgctatgctctcctactccaccggtacttctggtgcaggtagcgacgtagaaaaagttcgcgaagcaactcgtctggcgcaggaaaaacgtcctgacctgatgatcgacggtccgctgcagtacgacgctgcggtaatggctgacgttgcgaaatccaaagcgccgaactctccggttgcaggtcgcgctaccgtgttcatcttcccggatctgaacaccggtaacaccacctacaaagcggtacagcgttctgccgacctgatctccatcgggccgatgctgcagggtatgcgcaagccggttaacgacctgtcccgtggcgcactggttgacgatatcgtctacaccatcgcgctgactgcgattcagtctgcacagcagcagtaa

SEQ ID NO: 6422 - DNA, 285 bp, Escherichia coli
atgtttactatcaacgcagaagtacgtaaagagcagggtaagggtgcgagccgccgcctgcgtgccgctaacaagttcccggcaatcatctacggtggcaaagaagcgccgctggctatcgagctggatcacgacaaagtcatgaacatgcaagctaaagctgaattctacagcgaagttctgaccatcgttgttgacggtaaagaaatcaaagttaaagctcaggacgtacagcgtcacccgtacaaaccgaagctgcagcacatcgacttcgttcgcgcttaa

SEQ ID NO: 6423 - DNA, 2187 bp, Escherichia coli
atgattactcgtattcctcgtagttctttctctgcaaatattaataatacagcccagacaaatgaacaccaaaccctgagtgaattgttttataaagaactcgaggataaattttctggcaaggagctggcgacgcctctattaaaaagcttctcagagaactgtagacaaaatggtcgtcatatctttagcaacaaggattttgtcattaaattttccacgtccgtcttacaagctgataagaaagaaattacgataattaataaaaacgaaaacacgacacttactcaaaccattgccccaatatttgaaaaatacctaatggaaattttacctcaacgctcagacactcttgataaacaagaattaaacctaaaatcagatagaaaagaaaaagaattcccaagaattaaacttaatggtcaatgttattttccggggcgaccccaaaaccgtatagtatgccgacacattgctgcacaatatattaatgatatttatcagaatgttgattacaaaccccatcaagatgattactcttcagctgaaaaatttctcacgcacttcaacaaaaaatgcaaaaaccagactttggcgttggtttccagccgtcctgaggggcgttgcgttgctgcctgcggtgatttcgggctagttatgaaagcatattttgacaagatggaatcaaatggcatcagtgttatggcagccatattactggtggataaccatgctttgacggtccggctaagaataaagaacacaactgaaggatgtacccattacgtggtttcggtttatgatcctaatgtaactaacgataaaataagaattatgagcgaaagcaaagagaatattaaacactattctctgatggattttatgaatgtagattatagcctcctgaaatggtcaaatgatcatgttattaatcaatctgttgcaataattccagcacttccgaaagaacagctattgatgttaaaaggatctgtggatgaaataacccctccattatcacctgcaacgatgaatttgctaatggcaattggtcagaatcaccaacttacgcaactgatgattcaactccagaaaatgccagaactacatagaacagaaatgttgactgcctataatagtattaacctgccaggtttatatttggctataaattatggtaatgcggatatcgttgagactattttcaattcattgtcagaaacaggatatgaaggattactctcgaaaaaaaatctcatgcatattctggaggcaaaagataaaaatggtttttctggattatttttagcgatatcacgtaaggataaaaatgttgtaacctcgattctgaacgccttacctaaactggccgcaacacatcatttagataacgaacaagtgtataaattcctgagtgccaaaaatagaacgtccagccatgttttataccatgttatggcgaatggtgatgccgacatgctgaaaattgttttgaacgcgttacctttgttaattcgcacatgtcatttgactaaagaacaggtactcgatctcctgaaggcaaaggatttttatggttgcccaggactatatctggcgatgcaaaatggacatagcgatatcgtgaaagttattcttgaagcattgcccagcctagcccaggaaattaacatttcagcttccgatattgtagatcttctgaccgctaaaagtcttgcgcgcgacacgggtttgtttatggccatgcagcgcggacacatgaacgttattaatactatttttaacgcattacccactctgtttaatacgtttaaattcgataaaaaaaatatgaagcccctcctcctggcaaataattctaatgaatatcccggtttgttttcagcgatacagcataaacaacaaaatgttgtagagacggtttatcttgctttatctgaccatgcacgcctgtttggatttaccgctgaagatattatggatttttggcaacacaaagccccacaaaaatactctgcctttgagttggcttttgaatttggtcaccgggttattgctgaattaatccttaatacattaaataagatggctgaaagctttggctttacggataaccctcgatacattgcggagaaaaattatatggaagctttactcaaaaaagcatctccccataccgtacgctaa

SEQ ID NO: 6424 - DNA, 540 bp, Escherichia coli
atgccacgtcgtcgcgtcattggtcagcgtaaaattctgccggatccgaagttcggatcagaactgctggctaaatttgtaaatatcctgatggtagatggtaaaaaatctactgctgaatctatcgtatacagcgcgctggagaccctggctcagcgctctggtaaatctgaactggaagcattcgaagtagctctcgaaaacgtgcgcccgactgtagaagttaagtctcgccgcgttggtggttctacttatcaggtaccagttgaagtccgtccggttcgtcgtaatgctctggcaatgcgttggatcgttgaagctgctcgtaaacgcggtgataaatccatggctctgcgcctggcgaacgaactttctgatgctgcagaaaacaaaggtactgcagttaagaaacgtgaagacgttcaccgtatggccgaagccaacaaggcgttcgcacactaccgttggttatcccttcggagttttagtcaccaggcgggcgcttccagtaagcagcccgctttgggctacttaaattga

SEQ ID NO: 6425 - DNA, 375 bp, Escherichia coli
atggcaacagttaaccagctggtacgcaaaccacgtgctcgcaaagttgcgaaaagcaacgtgcctgcgctggaagcatgcccgcaaaaacgtggcgtatgtactcgtgtatatactaccactcctaaaaaaccgaactccgcgctgcgtaaagtatgccgtgttcgtctgactaacggtttcgaagtgacttcctacatcggtggtgaaggtcacaacctgcaggagcactccgtgatcctgatccgtggcggtcgtgttaaagacctcccgggtgttcgttaccacaccgtacgtggtgcgcttgactgctccggcgttaaagaccgtaagcaggctcgttccaagtatggcgtgaagcgtcctaaggcttaa

SEQ ID NO: 6426 - DNA, 1104 bp, Escherichia coli
atgtacgattatatcattgttggttctggtttgtttggtgccgtttgtgcgaatgagttaaaaaagctaaacaaaaaagttttagtgattgagaaaagaaatcatatcggtggaaatgcgtacacagaggactgtgagggtatccagattcataaatatggtgcacatatttttcataccaatgataaatatatatgggattacgttaatgatttagtagaatttaatcgttttactaattctccactggcgatttataaagacaaattattcaaccttccttttaatatgaatactttccaccaaatgtggggagttaaagatcctcaagaagctcaaaatatcattaatgctcagaaaaaaaagtatggtgacaaggtacctgaaaatttggaggagcaggcgatttcattagttggggaggacttataccaagcattgataaagggttatacggagaagcagtggggaagaagtgcaaaagaattgcctgcatttattattaagcgaatcccagtgagatttacgtttgataacaattatttttccgatcgctatcaaggtattccggtgggaggctacactaagcttattgaaaaaatgcttgaaggtgtggacgtaaaattaggcattgattttttgaaagacaaagattctctagcgagtaaagcccatagaatcatctacactggacccattgatcagtacttcgactataggtttggagcgttagaatatcgctctttaaaatttgagacggaacgccatgaatttccaaacttccaagggaatgcagtaataaatttcactgatgctaatgtaccatataccagaataattgagcataaacattttgactatgttgagacaaagcatacggttgttacaaaagaatatccattagagtggaaagttggcgacgaaccctactatccagttaatgataataaaaacatggagctttttaagaaatatagagagttagctagcagagaagacaaggttatatttggcgggcgtttggccgagtataaatattatgatatgcatcaagtgatatctgccgctctttatcaagtgaaaaatataatgagtacggattaa

SEQ ID NO: 6427 - DNA, 1371 bp, Escherichia coli
atggaattatcctcactgaccgccgtttcccctgtcgatggacgctacggcgataaagtcagcgcgctgcgcgggattttcagcgaatatggtttgctgaaattccgtgtacaagttgaagtacgttggctgcaaaaactggccgcgcacgcagcgatcaaggaagttcctgcttttgctgccgacgcaatcggttaccttgatgcaatcgtcgccagtttcagcgaagaagatgcggcgcgcatcaaaactatcgagcgtaccactaaccacgacgttaaagcggttgagtatttcctgaaagaaaaagtggcggagatcccggaactgcacgcggtttctgaattcatccactttgcctgtacttcggaagatatcaataacctctcccacgcattaatgctgaaaaccgcgcgtgatgaagtgatcctgccatactggcgtcaactgattgatggcattaaagatctcgccgttcagtatcgcgatatcccgctgctgtctcgtacccacggtcagccagccacgccgtcaaccatcggtaaagagatggcaaacgtcgcctaccgtatggagcgccagtaccgccagcttaaccaggtggagatcctcggcaaaatcaacggcgcggtcggtaactataacgcccacatcgccgcttacccggaagttgactggcatcagttcagcgaagagttcgtcacctcgctgggtattcagtggaacccgtacaccacccagatcgaaccgcacgactacattgccgaactgtttgattgcgttgcgcgcttcaacactattctgatcgactttgaccgtgacgtctggggttatatcgcccttaaccacttcaaacagaaaaccattgctggtgagattggttcttccaccatgccgcataaagttaacccgatcgacttcgaaaactccgaagggaatctgggcctttccaacgcggtattgcagcatctggcaagcaaactgccggtttcccgctggcagcgtgacctgaccgactctaccgtgctgcgtaacctcggcgtgggtatcggttatgccttgattgcatatcaatccaccctgaaaggcgtgagcaaactggaagtgaaccgtgaccatctgctggatgaactggatcacaactgggaagtgctggctgaaccaatccagacagttatgcgtcgctatggcatcgaaaaaccgtacgagaagctgaaagagctgactcgcggtaagcgcgttgacgccgaaggcatgaagcagtttatcgatggtctggcgttgccagaagaagagaaagcccgcctgaaagcgatgacgccggctaactatattggtcgagctatcacgatggttgatgagctgaaataa

SEQ ID NO: 6428 - DNA, 2115 bp, Escherichia coli
atggctcgtacaacacccatcgcacgctaccgtaacatcggtatcagtgcgcacatcgacgccggtaaaaccactactaccgaacgtattctgttctacaccggtgtaaaccataaaatcggtgaagttcatgacggcgctgcaaccatggactggatggagcaggagcaggaacgtggtattaccatcacttccgctgcgactactgcattctggtctggtatggctaagcagtatgagccgcatcgcatcaacatcatcgacaccccggggcacgttgacttcacaatcgaagtagaacgttccatgcgtgttctcgatggtgcggtaatggtttactgcgcagttggtggtgttcagccgcagtctgaaaccgtatggcgtcaggcaaacaaatataaagttccgcgcattgcgttcgttaacaaaatggaccgcatgggtgcgaacttcctgaaagttgttaaccagatcaaaacccgtctgggcgcgaacccggttccgctgcagctggcgattggtgctgaagaacatttcaccggtgttgttgacctggtgaaaatgaaagctatcaactggaacgacgctgaccagggcgtaaccttcgaatacgaagatatcccggcagacatggttgaactggctaacgaatggcaccagaacctgatcgaatccgcagctgaagcttctgaagagctgatggaaaaatacctgggtggtgaagaactgactgaagcagaaatcaaaggtgctctgcgtcagcgcgttctgaacaacgaaatcatcctggtaacctgtggttctgcgttcaagaacaaaggtgttcaggcgatgctggatgcggtaattgattacctgccatccccggttgacgtacctgcgatcaacggtatcctggacgacggtaaagacactccggctgaacgtcacgcaagtgatgacgagccgttctctgcactggcgttcaaaatcgctaccgacccgtttgttggtaacctgaccttcttccgtgtttactccggtgtggttaactctggtgataccgtactgaactccgtgaaagctgcacgtgagcgtttcggtcgtatcgttcagatgcacgctaacaaacgtgaagagatcaaagaagttcgcgcgggcgacatcgctgctgctatcggtctgaaagacgtaaccactggtgacaccctgtgtgacccggatgcgccgatcattctggaacgtatggaattccctgagccggtaatctccatcgcagttgaaccgaaaaccaaagctgaccaggaaaaaatgggtctggctctgggccgtctggctaaagaagacccgtctttccgtgtatggactgacgaagaatctaaccagaccatcatcgcgggtatgggcgaactgcacctcgacatcatcgttgaccgtatgaagcgtgaattcaacgttgaagcgaacgtaggtaaaccgcaggttgcttaccgtgaaactatccgccagaaagttaccgatgttgaaggtaaacacgcgaaacagtctggtggtcgtggtcagtatggtcatgttgttatcgacatgtacccgctggagccgggttcaaacccgaaaggctacgagttcatcaacgacattaaaggtggtgtaatccctggcgaatacatcccggccgttgataaaggtatccaggaacagctgaaagcaggtccgctggcaggctacccggtagtagacatgggtattcgtctgcacttcggttcttaccatgacgttgactcctctgaactggcgtttaaactggctgcttctatcgcctttaaagaaggctttaagaaagcgaaaccagttctgcttgagccgatcatgaaggttgaagtagaaactccggaagagaacaccggtgacgttatcggtgacttgagccgtcgtcgtggtatgctcaaaggtcaggaatctgaagttactggcgttaagatccacgctgaagtaccgctgtctgaaatgttcggatacgcaactcagctgcgttctctgaccaaaggtcgtgcatcatacactatggaattcctgaagtatgatgaagcgccgagtaacgttgctcaggccgtaattgaagcccgtggtaaataa

SEQ ID NO: 6429 - DNA, 1395 bp, Escherichia coli
gtgttattactggatgcgtgctcgcaaatgtgcccgtcattcagacgattccagacagtgtttcataattcctccatttttctcccttattggctggctacactagtatcattccgcgaaacgtttcaggaagagaaactcttaacgatgaaaggtagttataaatcccgttgggtaatcgtaatcgtggtggttatcgccgccatcgccgcattctggttctggcaaggccgcaatgactcccggagtgcagccccaggggcgacgaaacaagcgcagcaatcgccagcgggtggtcgacgtggtatgcgttccggcccattagccccggttcaggcggcgaccgccgtagaacaggcagttccgcgttacctcaccgggcttggcaccattaccgccgctaataccgttacggtgcgcagccgcgtggacggccaactgatagcgttacatttccaggaaggccagcaggtcaaagcaggcgatttactggcagaaattgaccccagccagttcaaagttgcattagcacaagcccagggccaactggcaaaagataaagccacgcttgccaacgcccgccgtgacctggcgcgttatcaacaactggcaaaaaccaatctcgtttcccgccaggagctggatgcccaacaggcgctggtcagtgaaaccgaaggcaccattaaggctgatgaagcaagcgttgccagcgcgcagctgcaactcgactggagccggattaccgcaccagtcgatggtcgcgttggtctcaagcaggttgatgttggtaaccaaatctccagtggtgataccaccgggatcgtggtgatcacccagacgcatcctatcgatttagtctttaccctgccggaaagcgatatcgctaccgtagtgcaggcgcagaaagccggaaaaccgctggtggtagaagcctgggatcgcaccaactcgaagaaattaagtgaaggcacgctgttaagtctagataaccaaatcgatgccactaccggtacgattaaagtgaaagcacgctttaataatcaggatgatgcgctgtttcccaatcagtttgttaacgcgcgcatgttagtcgacaccgaacaaaacgccgtagtgatcccaacagccgccctgcaaatgggcaatgaaggccattttgtctgggtgctgaatagcgaaaacaaggtcagcaaacatctggtgacgccgggcattcaggacagtcagaaagtggtgatccgtgcaggtatttctgcgggcgatcgcgtggtgacagacggcattgatcgcctgaccgaaggggcgaaagtggaagtggtggaagcccagagcgccactactccggaagagaaagccaccagccgcgaatacgcgaaaaaaggagcacgctcctga

SEQ ID NO: 6430 - DNA, 1434 bp, Escherichia coli
atgaaagtaacgctgccagagtttgaacgtgcaggagtgatggtggttggtgatgtgatgctggatcgttactggtacggccccaccagtcgtatctcgccggaagcgccggtgcccgtggttaaagtgaataccatcgaagaacgtccgggcggcgcggctaacgtggcgatgaatatcgcttctctcggtgctaatgcacgcctggtcgggttgacgggcattgacgatgcagcgcgcgcgctgagtaaatctctggccgacgtcaacgtcaaatgcgacttcgtttctgtaccgacgcatccgaccattaccaaattacgggtactttcccgcaaccaacagctgatccgtctggattttgaagaaggtttcgaaggtgttgatccgcagccgctgcacgagcggattaatcaggcgctgagttcgattggcgcgctggtgctttctgactacgccaaaggtgcgctggcaagcgtacagcagatgatccaactggcgcgtaaagcgggtgttccggtgctgattgatccaaaaggtaccgattttgagcgctaccgcggcgctacgctgttaacgccgaatctctcggaatttgaagctgttgtcggtaaatgtaagaccgaagaagagattgttgagcgcggcatgaaactgattgccgattacgaactctcggctctgttagtgacccgttccgaacagggtatgtcgctgctgcaaccgggtaaagcgccgctgcatatgccaacccaagcgcaggaagtgtatgacgttaccggtgcgggcgacacggtgattggcgtcctggcggcaacgctggcagcgggtaattcgctggaagaagcctgcttctttgccaatgcggcggctggcgtggtggtcggcaaactgggaacctccacggtttcgccgatcgagctggaaaatgctgtacgtggacgtgcagatacaggctttggcgtgatgaccgaagaggaactgaagctggccgtagcggcagcgcgtaaacgtggtgaaaaagtggtgatgaccaacggtgtctttgacatcctgcacgccgggcacgtctcttatctggcaaatgcccgcaagctgggtgaccgcttgattgttgccgtcaacagcgatgcctccaccaaacggctgaaaggggattcccgcccggtaaacccactcgaacagcgtatgattgtgctgggcgcactggaagcggtcgactgggtagtgtcgtttgaagaggacacgccgcagcgcttgatcgccgggatcttgccagatctgctggtgaaaggcggcgactataaaccagaagagattgccgggagtaaagaagtctgggccaacggtggcgaagtgttggtgctcaactttgaagacggttgctcgacgaccaacatcatcaagaagatccaacaggataaaaaaggctaa

SEQ ID NO: 6431 - DNA, 879 bp, Escherichia coli
atgaataatcatttcaagtgtattggcattgtgggacacccacggcaccccactgcactgacaacacatgaaatgctctaccgctggctgtgcacaaaaggttacgaggtcatcgttgagcaacaaatcgctcacgaactgcaactgaagaatgtgaaaactggcacgctcgcggagattgggcaactagctgatctcgcggtagtcgttggtggcgacggtaatatgctgggcgcggcacgcacactcgcccgttacgatattaaagttattggaatcaaccgtggcaacctgggtttcctgactgaccttgaccccgataacgcccagcaacagttagccgatgtgctggaaggccactacatcagcgagaaacgttttttgctggaagcgcaagtctgtcagcaagattgccagaaacgcatcagcaccgcgataaatgaagtggtgcttcatccaggcaaagtggcgcatatgattgagttcgaagtgtatatcgacgagatctttgcgttttctcagcgatctgatggactaattatttcgacgccaacaggctccaccgcctattccctctctgcaggcggtcctattctgaccccctctctggatgcgattaccctggtgcccatgttcccgcatacgttgtcagcacgaccactggtcataaacagcagcagcacgatccgtctgcgtttttcgcatcgccgtaacgacctggaaatcagttgcgacagccagatagcactgccgattcaggaaggtgaagatgtcctgattcgtcgctgtgattaccatctgaatctgattcatccgaaagattacagttatttcaacacattaagcaccaagctcggctggtcaaaaaaattattctaa

SEQ ID NO: 6432 - DNA, 891 bp, Escherichia coli
atgatcaagaagacaacggaaattgatgccatcttgttaaatctcaataaggctatcgatgcccactaccagtggctggtgagtatgtttcacagcgtggtcgcgagagatgccagtaagccagaaataacggataaccattcttatggactgtgccagtttggtcggtggattgatcatctggggccactcgataacgatgaattaccttacgttcggctaatggattctgcccatcaacatatgcataactgtggtcgggaattaatgctggctattgttgaaaatcactggcaggacgcgcatttcgacgcctttcaggaggggttgctttcttttactgcggcattaaccgattacaaaatttatttgctgacgatccgtagcaatatggatgttttgacgggattgccgggtcgtcgggttcttgatgaatcctttgatcatcagttacgcaacgctgagcctctgaatctttatttaatgttgttggatattgaccgatttaaattggttaatgatacctacgggcatttaatcggcgatgtagtattacgcaccctggcaacttacttagccagttggacgcgtgattacgaaacggtttatcgctacgggggcgaagaatttatcattattgtcaaagcggctaatgatgaagaagcatgtcgtgcaggtgtcagaatttgccagttagtcgataaccatgccatcacacattctgaagggcatatcaacattaccgtgacagcaggtgtgagtcgcgcatttcctgaagagcctctggatgtggtcattggaagagcggaccgggcaatgtatgagggtaagcaaaccggaagaaatcgctgcatgtttattgacgaacaaaatgtgattaaccgagtttaa

SEQ ID NO: 6433 - DNA, 4281 bp, Escherichia coli
atgagcggaaaaccagcggcgcgtcagggagatatgactcagtatggcggtcccattgtccagggttcggcaggtgtaagaattggcgcgcccaccggcgtggcgtgctcggtgtgtccgggcgggatgacttcgggcaacccggtaaatccgctgctgggggcgaaggtgctgcccggcgagacggaccttgcgctgcccggcccgctgccgttcattctctcccgcacctacagcagctaccggacgaagacgcctgcaccggtgggcgttttcggccccggctggaaagcgccttctgatatccgcttacagctacgtgatgacggactgatactcaacgacaacggcgggcggagcattcactttgagccgctgctgccgggggaggcggtgtacagccgcagtgagtcaatgtggctggtgcgcggtggtaaggcagcacagccggacggccatacgctggcgcggctgtggggggcgctgccgccggatatccggttaagcccgcatctttacctggcgaccaacagcgcacaggggccgtggtggatactggggtggtctgagcgggtgccgggtgctgaggacgtactgccagcgccgctgccgccgtaccgggtgcttaccgggatggcggaccgcttcgggcggacgctgacgtaccggcgtgaggccgccggtgacctggccggggaaatcaccggcgtgacggacggtgccgggcgggagttccgtctggtgctgaccacgcaggcgcagcgtgcggaagaggcccgcacctcttcgctatcttcttctgacagttcccgccctctctcagcctcagcgttccccgacacactgcccggtaccgaatacggccccgacaggggtatccgcctttcggcggtgtggctgatgcacgacccggcatacccggagagcctgcccgctgcgccactggtgcggtacacgtatacggaagccggtgaactgctggcggtatatgaccgcagcaatacgcaggtgcgcgctttcacgtatgacgcgcagcacccgggccggatggtggcgcaccgttacgcgggaaggccggagatgcgctaccgctacgacgatacggggcgggtggtggagcaactgaacccggcagggttaagctaccgctatctttatgagcaggaccgcatcaccgtcaccgacagcctgaaccggcgtgaggtgctgcatacagaaggcggggccgggctgaaacgggtggtgaaaaaagaactggcggacggcagcgtcacgcgcagcgggtatgacgcggcaggaaggctcacggcgcagacggacgcggcgggacggaggacagagtacggtctgaatgtggtgtccggcgatatcacggacatcaccacaccggacgggcgggagacgaaattttactataacgacgggaaccagctgacggcggtggtgtccccggacgggctggagagccgccgggaatatgatgaaccgggcaggctggtatcggagacatcgcgcagcggggagacagtacgctaccgctacgatgacgcgcacagtgagttaccggcgacgacaacggatgcgacgggcagcacccggcagatgacctggagccgctacgggcagttgctggcgttcaccgactgctcgggctaccagacccgttatgaatacgaccgcttcggccagatgacggcggtccaccgcgaggaaggcatcagcctttaccgccgctatgacaaccgtggccggttaacctcggtgaaagacgcacagggccgtgaaacgcggtatgaatacaacgccgcaggcgacctgactgccgttatcaccccggacggcaaccggagcgagacacagtacgatgcgtggggaaaggcggtcagcaccacgcagggcgggctgacgcgcagtatggagtacgatgctgccggacgtgtcatcagcctgaccaacgagaacggcagccacagcgtcttcagttacgatgcgctggaccggctggtacagcagggcggctttgacgggcggacgcaacgttatcattatgacctgaccggaaaactcacacagagtgaggatgagggacttgtcatcctctggtactacgatgaatcggaccgtatcactcaccgcacggtgaacggcgaaccggcagagcagtggcagtatgatggccacggctggctgacagacatcagccacctgagcgaaggccaccgtgttgccgtccactatggctatgacgataaaggccgcctgaccggcgaatgccagacggtggagaacccggagacgggggaactgctgtggcagcatgagacgaaacacgcatacaacgagcaggggctggcaaaccgcgtcacgccggacagcctgccgccggtggagtggctgacgtatggcagcggttacctggcgggaatgaagctgggcgggacgccgctggtcgagtatacgcgggacaggctgcaccgtgagacggtgcgcagcttcggcagcatggcaggcagtaatgccgcatacgaactgaccagcacatacacccccgcaggccagttacagagccagcacctgaacagcctggtatatgaccgtgactacgggtggagtgacaacggcgacctggtgcgcatcagcggcccgcgacagacgcgggaatacggctacagcgccacgggcaggctggagagtgtgcgcaccctcgcaccagacctggacatccgcatcccgtatgccacggacccggcgggcaaccggctgccggacccggagctgcacccggacagtacactcacagtgtggccggataaccgcatcgcggaggatgcgcactatgtctaccgccacgatgaatacggcaggctgacggagaagacggaccgcatcccggcgggtgtgatacggacggacgacgagcggacccaccactaccactacgacagccagcaccgcctggtgttctacacgcggatacagcatggcgagccactggtcgagagccgctacctctacgacccgctgggacggcgaatggcaaaacgggtctggcggcgggagcgtgacctgacggggtggatgtcgctgtcgcgtaaaccggaggtgacgtggtatggctgggacggagacaggctgacgacggtgcagactgacaccacacgtatccagacggtatacgagccgggaagcttcacgccgctcatccgggtcgagacagagaacggcgagcgggaaaaagcgcagcggcgcagcctggcagagacgctccagcaggaagggagtgagaacggccacggcgtggtgttcccggctgaactggtgcggctgctggacaggctggaggaagaaatccgggcagaccgcgtgagcagtgaaagccgggcgtggcttgcgcagtgcgggctgacggtggagcaactggccagacaggtggagccggaatacacaccggcgcgaaaagctcatctttatcactgcgaccaccggggactgccgctggcgcttatcagcgaagacggcaatacggcgtggagcgcggaatatgatgaatggggcaaccagcttaatgaggagaacccgcatcatgtgtatcagccgtaccgtctgccagggcagcagcatgatgaggaatcagggctgtactataaccgtcaccggtactacgatccgttgcaggggcggtatattactcaggacccgatggggttgaaagggggatggaatttatatcagtatcctttaaatccactacaacaaattgaccctatgggattattgcagacttgggatgatgccagatctggagcatgtacggggggagtttgtggtgttctttcacgtataataggaccaagtaaatttgatagtactgcagatgctgcgttagatgctttgaaagaaacgcagaatagatctctatgtaatgatatggaatactctggtattgtctgtaaagatactaatggaaaatattttgcatctaaggcagaaactgataatttaagaaaggagtcatatcctctgaaaagaaaatgtcccacaggtacagatagagttgctgcttatcatactcacggtgcagatagtcatggcgattatgttgatgaatttttttcaagtagcgataaaaatcttgtaagaagtaaagataataatcttgaagcattttatctcgcaacacctgatggacgatttgaggcgcttaataataaaggagaatatatttttatcagaaatagtgtcccgggattgagttcagtatgcataccgtatcatgattaa

SEQ ID NO: 6434 - DNA, 711 bp, Escherichia coli
atgctggcgctgatggatgcggatggaaacattgcgtggagcggggagtatgatgagtggggcaaccagctgaatgaagagaacccgcatcacctgcaccagccgtaccggctgccggggcagcagtatgataaggagtcggggctgtactacaaccggaaccggtactacgatccgttgcaggggcggtatatcactcaggacccgatagggctggaggggggatggagtctgtatgcgtatccgctgaatccggtgaatggtattgatccattagggttaagtcccgcagatgtagcgctaataagaagaaaagatcaactaaaccatcaaagagcatgggatatattatctgatacttatgaagatatgaagagattaaatttaggtgggactgatcaatttttccattgtatggcattttgtcgagtgtctaaattaaatgacgctggtgttagccgatcggcgaaagggctgggttatgaaaaagagattagagattacgggttaaatctgttcggtatgtacggcagaaaagtaaagctatcccattctgaaatgattgaagataataaaaaagacttggctgtaaatgaccatgggttgacatgtccatcaacaacagattgctcagatagatgtagtgattatattaatccagagcataaaaaaacgataaaggctttacaagatgctggctatctcaagtaa

SEQ ID NO: 6435 - DNA, 261 bp, Escherichia coli
atgctggctatctcaagtaatctatcaaagatgataatatttatttttgctattataatcattgttgttttatgcgtaattacttatctttatttatacaaagatgaatctcttgtaagtaaacattacataaactatatggcaataccagaaaatgatggagtttttacatggctcccagatttttttccgcacgtagcggtggatatatcaatatacacaaatgtagaagatgattatttttttcttatttttccctaa

SEQ ID NO: 6436 - DNA, 261 bp, Escherichia coli
atggcgttgttaatcactaaaaaatgcatcaattgtgatatgtgtgaacccgaatgcccgaatgaggcgatttcaatgggagatcatatctacgagattaacagcgataagtgtaccgaatgcgtagggcactacgagacaccaacctgccagaaggtgtgcccgatccccaatactattgtgaaagatccggcgcatgtcgagacagaagaacagttgtgggataaatttgtgctgatgcaccacgcggataaaatttaa

SEQ ID NO: 6437 - DNA, 1404 bp, Escherichia coli
ttggatgtgaacgttgatcagttcgatactgaagctttccgtactgacaaactggaactgaccagcggcaacatcgctgaccataacggtaacgtagtatctggtgtgttcgatatccatagcagcgattacgttctgaacgctgatctggtgaacgaccgtacctgggatacttccaagtctaactacggttacggtattgttgctatgaactctgatggtcacctgactatcaacggtaacggcgacgtagacaacggtactgaactggataacagctctgtagacaatgttgttgctgcaaccggtaactacaaagttcgtatcgacaacgcaactggcgctggcgctatcgctgattacaaagataaagaaattatctacgtaaacgacgtcaacagcaacgcgaccttctctgctgctaacaaagctgacctgggtgcatacacctatcaggctgaacagcgcggtaacaccgttgttctgcaacagatggagctgaccgactacgctaacatggcgctgagcatcccgtctgcgaacaccaatatctggaacctggaacaagacaccgttggtactcgtctgaccaactctcgtcatggcctggctgataacggcggcgcatgggtaagctacttcggtggtaacttcaacggcgacaacggcaccatcaactatgatcaggatgttaacggcatcatggtcggtgttgataccaaaattgacggtaacaacgctaagtggatcgtcggtgcggctgcaggcttcgctaaaggtgacatgaatgaccgttctggtcaggtggatcaagacagccagactgcctacatctactcttctgctcacttcgcgaacaacgtctttgttgatggtagcttgagctactctcacttcaacaacgacctgtctgcaaccatgagcaacggtacttacgttgacggtagcaccaactccgacgcttggggcttcggtttgaaagccggttacgacttcaaactgggtgatgctggttacgtgactccttacggcagcgtttctggtctgttccagtctggtgatgactaccagctgagcaacgacatgaaagttgacggtcagtcttacgacagcatgcgttatgaactgggtgtagatgcaggttataccttcacctacagcgaagatcaggctctgactccgtacttcaaactggcttacgtctacgacgactctaacaacgataacgatgtgaacggcgattccatcgataacggtactgaagggtctgcggtacgtgttggtctgggtactcagtttagcttcaccaagaacttcagcgcctataccgatgctaactacctcggtggtggtgacgtagatcaagactggtccgcgaacgtgggtgttaaatatacctggtaa

SEQ ID NO: 6438 - DNA, 669 bp, Escherichia coli
atgcccgtcaaggatttgacgggcattactgcaaaggacgcgcaaatgttatctgtagttaaacctcttcaggaatttggtaagctcgataaatgtttgtccagatacggtacgcgcttcgagtttaataatgaaaagcaagttatattttccagtgatgtcaataacgaagatactttcgttattttagagggagttatctctctgcgtagagaagaaaacgtacttatcggtattacccaggctccttatattatggggctggctgatggtttaatgaaaaacgatataccatacaaattaatatcagaaggaaattgtacgggatatcatctaccagccaaacaaaccattacgcttattgaacaaaatcaactctggcgagacgctttttactggttagcctggcaaaatagaattctggaattacgcgacgtgcagctcattgggcataattcctacgaacaaatccgcgcaacattattatcaatgattgactggaatgaagaattgcgatcacgtattggtgtgatgaattatatccatcaacgtacacgcatatcgcgttctgtcgtcgcagaagttctcgctgctttgcgtaaaggcggctatatcgaaatgaataaaggcaaactggtcgctatcaaccgtttgccttcagagtattaa

SEQ ID NO: 6439 - DNA, 705 bp, Escherichia coli
gtgaataatatgttcgaaccccccaaaaattataatgaaatgttgcctaaacttcataaagcaactttcttaaatacgctaatatattgcatacttctagttatttacgaatacatccctttaataacattaccaaccaagtatgtcccacctattaaagatcatgagagctttattaattgggcactatcttttggtatattaccttgtgcttttgcgatttttgcatatttaattagcggtgcgttagacctacataacaatgcagccaaactacttcgggtgcgatatctttgggataagcatctaattataaaaccgttatcacggagagctggagtcaacagaaaattaaataaagatgaagctcacaatgtaatgagcaatctatattaccctgaagtaagaaaaattgaagacaaacattatattgaactcttctggaataaagtatactatttttggatattttttgaattttcgataattgcattaatttccttcctaataatctttttttgcaaacaaatggatatttttcatgttgaaggttctttgctgtctttattcttttttgtaattttatcattctcagtgagtggtattatctttgctttgacagttaagcccagaactgaaagtcaagtcggaaaaatcccggacgataaaataaaagaatttttcactaaaaataacattaattga

SEQ ID NO: 6440 - DNA, 531 bp, Escherichia coli
atgaaatacaataacattattttcctcggtttatgtctggggttaaccacctattctgctttatccgcagatagcgttattaaaattagcgggcgcgtcctcgattatggctgcacagtctcatcggattcgcttaattttaccgtagatctccaaaaaaacagtgccagacaatttccaacgaccggtagcacaagtccagccgtcccttttcagattacgttaagtgaatgcagcaaagggacaacgggggttcgggttgcatttaacggtattgaggatgcagaaaataatactttgttgaaactggatgaaggaagcaatacggcctccggtttgggtatagaaatattggacgcaaatatgcgtccggtgaaactgaatgatcttcatgccgggatgcagtggatcccactggtaccagaacagaacaatattttgccttactccgctcgtctgaagtcaactcagaagtccgtcaatccgggactggtgagggcttcggcaacctttacccttgaatttcaataa

SEQ ID NO: 6441 - DNA, 1149 bp, Escherichia coli
atgagtggttacaccgtcaagcctcctaccggagacaccaatgagcagacacaatttattgattattttaatctgttctacagtaagcgtggtcaggaacaaataagcatctctcagcagcttggaaattacggtacgacatttttcagtgccagtcgccaaagttactggaacacgtcacgcagcgaccagcaaatatcatttggattaaatgtgccgtttggtgatattacgacttcgctgaattacagctattccaataatatatggcaaaacgatcgggatcatttactcgcttttacgcttaatgttcccttcagtcattggatgcgtacagacagtcagtcggcatttcgtaattcaaacgccagttacagtatgtcaaacgatttgaaaggcggcatgaccaatctatcgggggtttatggcactctgctgccggataataacctgaattatagcgttcaggtcggtaacacccacggaggtaatacatcgtctggcaccagtggttacagttctcttaattatcgtggagcttatggtaatactaatgtcggttacagtcggagtggtgacagcagccagatttattacggaatgagtggtgggattattgctcatgctgatggcatcacctttggacagccgctgggcgacacaatggttctggttaaggctcctggtgctgataatgtcaaaatagagaaccagaccggaattcataccgactggcgtggctatgccatattaccatttgcgacagaatatagagaaaaccgtgttgctcttaacgcgaattcccttgcagataatgttgaactggatgaaaccgtggtcactgtcatcccaactcacggtgctattgccagagcaacatttaatgcacaaatcggcgggaaagtattaatgacgttgaagtacggtaataagagcgttccattcggtgcaattgtcacacacggagagaataaaaatggcagcattgtcgcggaaaatggtcaggtttatctgactggacttccacagtcagggcaattacaggtttcatggggcaaagataaaaactcaaactgtattgtcgagtacaagcttcctgaagtttctcctggtaccttactgaaccagcagacagcaatctgtcgctaa

SEQ ID NO: 6442 - DNA, 2652 bp, Escherichia coli
atgacagcctttcgtgccgcatttaaggcatatcgtatgcatcaggtgttactactgcctcgctttgcacggcttaccattgcccttagcttagcaactgcggtatttcccgttgacgcagagtattattttaatccacggtttttaagcaatgatcttgctgaatctgtcgatttatccgcctttactaagggacgcgaggcaccacctggtacatatcgggtcgacatttatttgaacgacgaatttatgactagtcgggatattacttttattacagatgataataacgcagatctcatcccatgcctgagtacagatcttcttgtcagtcttggcataaaaaaatctgcgttattagacaataaggaacattcagcagaaaaacatgtgccggacaacagcgcatgcacaccacttcaggatcgtttggtcgacgcatcaactgagtttgatgttggtcagcaacatctgtcactctccgttccgcaaatttatgttggcagaatggctcgcggctatgtttctcctgatctgtgggaagaaggaataaatgctgggcttctaaactatagttttaatggtaattctattaataatcgtagtaaccataatgcaggaaaatccaactatgcatatttgaatttacagagtggcatcaacattggtagttggcgactacgcgataactcaacgtggagttataacagtgggagtagcaattcatctgacagcaataaatggcagcatatcaatacgtcggctgaacgtgacattattcccttacgctcacggttaacggtaggtgatagttataccgatggcgatatttttgatagtgtgaactttcgtggcctcaaaataaattcaacagaagcgatgttgcccgatagccaacatggtttcgctccggtgattcatggtattgcccgtggcaccgcacaagtgagtgtaaaacagaacggatacgatgtttatcagactactgttccacccggcccttttactattgatgatatcaactctgcggccaatggtggtgatctgcaagtaaccataaaagaggcagacggcagtattcagacattatatgttccttattcgtctgttccggttctccaacgtgctggatatacgcgttatgcgcttgccatgggggaatatcgtagtggaaataacctgcaaagctcccccaggttcatacaaggtagcttgatgcatggactggaaggaaactggacaccttatggcggaatgcaaattgcagaagattatcaggccttcaaccttggtattggtaaagatttaggactttttggtgccttttctttcgatatcacgcaggccaatacgacacttgcagatggcacccgtcacagcgggcaatcggttaaatccgtctacagcaaatccttctaccagacaggaaccaatatccaggtcgcaggatatcgctattctacgcaaggtttttataacttatccgacagtgcctacagtcgaatgagtggttacaccgtcaagcctcctaccggagacagcaatgagcagacacaatttattgattattttaatctgttctacagtaagcgtggtcaggaacaaataagcatctctcagcagcttggaaattacggtgcgacatttttcagtgccagtcgccaaagttactggaacacgtcacgcagcgaccagcaaatatcatttggattaaatgtgccgtttggtgatattacgacttcgctgaattacagctattccaataatatatggcaaaacgatcgggatcatttactcgcttttacgcttaatgttcccttcagtcattggatgcgtacagacagtcagtcggcatttcgtaattcaaacgccagttacagtatgtcaaacgatttgaaaggcggcatgaccaatctatcgggggtttatggcactctgctgccggataataacctgaattatagcgttcaggtcggtaacacccacggaggtaatacatcgtctggcaccagtggttacagtactcttaattatcgtggagcttacggcaatactaatgtcggttacagtcggagtggtgacagcagccagatttattacggaatgagtggtgggattattgctcatgctgatggcatcacctttggacagccgctgggcgacacaatggttctggttaaggctcctggcgctgataatgtcaaaatagagaaccagaccggaattcataccgactggcgtggctatgccatattaccatttgcgacagaatatagagaaaatcgtgtcgctcttaacgcgaattcccttgcagataatgttgaactggatgaaaccgtggtcactgtcatcccaactcacggtgctattgccagagcaacatttaatgcacaaatcggcgggaaagtattaatgacgttgaagtacggtaataaaagcgttccattcggtgcaattgtcactcacggagagaataaaaatggcagcattgtcgcggaaaacggtcaggtttatctgactggacttccacagtcagggaaattacaggtttcatggggcaatgataaaaactcaaactgtattgtcgattacaagcttcctgaagtctctcctggaaccttgctgaaccagcagacagcaatctgtcgctaa

SEQ ID NO: 6443 - DNA, 1680 bp, Escherichia coli
atgactcaatttacgcaaaataccgccatgccttcttccctctggcaatactggcgcggcctttccggctggaacttctattttctggttaagttcggcctgttgtgggcgggatatcttaacttccatccgctcctcaatttggtgtttgccgcgtttctgctgatgccccttccgcgctacagcctgcatcgcttgcgccactggattgccctgccgatcggctttgctttgttctggcatgacacctggttgcctggcccggaaagcataatgagccagggttcgcaggtggcggggttcagtaccgattatttaatcgaccttgtcacacgctttattaactggcagatgattggggccatttttgttttattagtggcctggttattcctgtcacaatggattcgcattaccgtttttgtggttgccatactgctatggctgaacgtacttaccctggcgggaccaagtttctccttgtggccagccggacaaccgacgaccactgtaacaacgacgggtggtaacgcagcggcaaccgttgcggcgacgggtggcgcaccggtagtgggtgatatgcccgcacaaactgcaccgccaacaacggcgaaccttaacgcctggctgaataatttctataacgcggaggcgaaacgtaaatcgaccttcccgtcttcgctgcccgctgatgctcagccatttgaactactggtgattaacatctgttcgctttcctggtcggatatagaagccgccgggttgatgtcgcatccactgtggtcgcatttcgatattgagttcaagaactttaactccgccacctcctacagtggcccggcggcgatccgtttactgcgcgccagctgcgggcagacttcgcacactaatctgtatcaaccggcaaataacgactgctatctgtttgataacctttcgaaactgggctttacccagcacctgatgatgggacataacggccagttcggcggttttttgaaagaagttcgcgaaaatggcggcatgcagagcgaattgatggatcaaacaaatctgccggttattttgctgggctttgatggttcgccggtttatgacgataccgctgtgcttaaccgctggctggacgttaccgaaaaagataaaaacagccgtagtgccacgttctacaacacgcttccactgcatgacggcaaccattatccgggggtcagcaaaacagcggattacaaagcgcgggcgcagaaattctttgatgaactggacgccttctttactgaacttgagaaatcgggtcgtaaagtgatggtggtcgtggtgccggaacacggcggcgcgctgaagggcgacagaatgcaggtatctggcctacgtgatatccctagcccgtctatcaccgacgtccccgttggggtgaaattcttcggcatgaaggcaccgcatcagggggcaccgattgtcatcgaacaaccgagcagcttcctggctatctccgatctggtggttcgcgttctcgatggcaagattttcaccgaagacaatgttgactggaaaaaactcaccagtgggttgccacaaacagcaccggtctccgagaactcaaatgcagtagttattcaataccaggataaaccgtacgttcgcctgaacggcggcgactgggtgccttacccgcagtaa

SEQ ID NO: 6444 - DNA, 297 bp, Escherichia coli
atgaaaaaagagaactattcattcaagcaagcttgtgctgttgtcggtgggcaatcagcaatggctaggcttttaggtgtatcacctccaagcgtaaatcaatggatcaaaggggtacgtcaattgcctgccgagagatgtccagcaattgaacgtgcaacaagaggtgaggttctgtgcgaagaacttcgtcctgatattgactggtcatatttacgacgttcggcatgttgttcgcagaatatgtcagtgaagcaactaaatgacagtaacaaatcctcatttgatcatacctga

SEQ ID NO: 6445 - DNA, 423 bp, Escherichia coli
atgaaaatcaagcatgagcacatcgaatcagtgttgtttgccctagcagccgaaaaagggcaggcatgggtagccaatgcaattactgaagaatatctgcgccaggggggcggcgaattgcccctggttccaggcaaggactggaacaatcagcagaatatctatcaccgttggttgaaaggtgaaacgaaaacgcaaagagaaaaaattcagaagctgatcccagcaattctggcaatccttccgcgcgagctgcgtcaccgactctgcatcttcgataccctggaacgccgtgcattactggcggcgcaggaagcgttaagtacggcaattgatgcgcatgatgatgcagtccaagccgtttaccggaaagcgcatttcagcggcggcggttcttccgacgattctgtcattgttcattaa

SEQ ID NO: 6446 - DNA, 1335 bp, Escherichia coli
atgattctggacaccgttgacgaaaaaaagaaaggcgtgcatacccgctatttaatattactgattatttttattgttaccgccgttaactacgccgatcgtgcaacgctgtctattgctggtaccgaagtggcaaaagagttgcagttaagtgcggtttcgatgggttacatcttctccgcttttggctgggcctacttgctgatgcaaatccccggcggctggctgcttgataagtttggctcgaaaaaagtttacacctacagcctctttttctggtcgctattcaccttcctgcaaggctttgttgatatgttcccgctggcctgggcagggatctccatgttctttatgcgctttatgctcggcttctcggaagcgccatcattcccggcgaacgcccgaattgtcgccgcctggttcccgacgaaagaacgtggtactgcctccgccatctttaactcggcgcaatatttctcgctggcgctcttttcgccgctgcttggctggctgactttcgcctggggctgggagcacgtctttaccgttatgggggtgattggttttgtgctgacggcgctgtggatcaagttgattcataacccgacagatcacccacgtatgtctgcggaagagctgaagtttatctctgaaaatggcgcggtggtcgatatggaccacaaaaagccgggcagtgcggcagcaagcggacccaaactgcattacatcaagcaattgctctctaaccgcatgatgctgggcgtatttttcggacaatattttatcaacaccatcacctggttcttcctcacctggttcccgatttatctggtgcaggaaaaaggcatgtcgattctgaaagtgggtctggtcgcctcgattccagcactgtgtggttttgcgggcggcgtgctgggaggtgtcttctcggattatctgatcaaacgcggtttatccctgaccctggcacgtaagctaccgattgtgctgggaatgttgctggcttccaccatcatcttatgtaactacaccaacaacaccacgctggtggtcatgctgatggcgctggctttctttggcaaaggatttggtgcgctgggctggccggtgatttctgacaccgcgccgaaagagattgttggcctctgcggcggcgtctttaacgtctttggcaatgttgcctccattgtcactccactggtgattggctacctggtaagtgaactgcactccttcaatgcagcactggttttcgtgggatgttcagcgctgatggcgatggtctgctacctcttcgtagttggcgacattaaacgtatggaattgcagaaataa

SEQ ID NO: 6447 - DNA, 741 bp, Escherichia coli
gtgaagttcaaagttatcgccctggcggcattaatgggtattagcgggatggcagcgcaggctaacgaattgccggatggaccgcatattgtcacctccggtacggcaagcgtggatgcggtgccagacattgccactcttgcgattgaagttaacgtggccgcgaaggatgccgctactgccaagaaacaggcagatgagcgcgtcgcacaatacatttccttccttgaactcaatcagatcgcgaaaaaagatatcagctcagcgaacttacgcacccagccagattatgattatcaggatggtaaaagtatccttaaaggctaccgcgctgtgagaacggtggaagtcacgctccgtcagttagacaaactgaattccttgctggatggcgcgctgaaggcgggtcttaacgaaattcgttctgtgtcgctgggcgtggcgcagccggatgcctataaagacaaagcgcgtaaggcagcgattgataacgcgattcatcaggcgcaggaactggcgaacggctttcatcgtaaactggggccggtatatagcgtgcgctaccatgtttccaactatcagcccagcccaatggtgcggatgatgaaagccgatgccgcgccggtgtccgcccaggaaacttacgagcaggccgctattcagtttgatgatcaggtcgatgtggtcttccagttagaacctgtggatcaacaacccgctaaaacacctgcagcacaataa

SEQ ID NO: 6448 - DNA, 249 bp, Escherichia coli
atgggcattctgtcatggattatttttgggcttattgccggtattctggcgaagtggatcatgccaggtaaagatggaggtggattctttatgactatcctgctggggatagtcggtgccgtagtcggcggatggatcagcacgctgtttggctttggtaaagtcgatggcttcaattttggcagcttcgtggttgccgttattggtgcgattgtcgtgctatttatctacaggaagattaaaagttaa

SEQ ID NO: 6449 - DNA, 183 bp, Escherichia coli
atgggcaaagcaacgtataccgtgaccgtcaccaataacagcaatggcgtttctgtcgattatgaaacagagacgccgatgactttgctggtgccagaagtggcggctgaagtgataaaagatctggtgaataccgtacgttcttatgacacggaaaacgaacatgatgtttgtggttggtaa

SEQ ID NO: 6450 - DNA, 360 bp, Escherichia coli
atgcttcaaatcccacagaattatattcatacgcgctcaacgcctttctggaataaacaaactgcacctgccggaatattcgaacgtcatcttgataaaggaacgcgcccgggggtttacccacgcctttccgttatgcatggggcggtcaaatatctcggctacgctgatgaacacagtgcagagcctgatcaggtgatccttatcgaagcggggcagtttgcggtgttccctccagaaaagtggcacaacattgaagccatgactgacgatacttatttcaacattgacttcttcgtggctcctgaagtcctgatggaaggtgcgcaacaacggaaagtcattcataacgggaaatga

SEQ ID NO: 6451 - DNA, 1284 bp, Escherichia coli
atggctgatacaaaagcaaaactcaccctcaacggggatacagctgttgaactggatgtgctgaaaggcacgctgggtcaagatgttattgatatccgtactctcggttcaaaaggtgtgttcacctttgacccaggcttcacttcaaccgcatcctgcgaatctaaaattacttttattgatggtgatgaaggtattttgctgcaccgcggtttcccgatcgatcagctggcgaccgattctaactacctggaagtttgttacatcctgctgaatggtgaaaaaccgactcaggaacagtatgacgaatttaaaactacggtgacccgtcataccatgatccacgagcagattacccgtctgttccatgctttccgtcgcgactcgcatccaatggcagtcatgtgtggtattaccggcgcgctggcggcgttctatcacgactcgctggatgttaacaatcctcgtcaccgtgaaattgccgcgttccgcctgctgtcgaaaatgccgaccatggccgcgatgtgttacaagtattccattggtcagccatttgtttacccgcgcaacgatctctcctacgccggtaacttcctgaatatgatgttctccacgccgtgcgaaccgtatgaagttaatccgattctggaacgtgctatggaccgtattctgatcctgcacgctgaccatgaacagaacgcctctacctccaccgtgcgtaccgctggctcttcgggtgcgaacccgtttgcctgtatcgcagcaggtattgcttcactgtggggacctgcgcacggcggtgctaacgaagcggcgctgaaaatgctggaagaaatcagctccgttaaacacattccggaatttgttcgtcgtgcgaaagacaaaaatgattctttccgcctgatgggcttcggtcaccgcgtgtacaaaaattacgacccgcgcgccaccgtaatgcgtgaaacctgccatgaagtgctgaaagagctgggcacgaaggatgacctgctggaagtggctatggagctggaaaacatcgcgctgaacgacccgtactttatcgagaagaaactgtacccgaacgtcgatttctactctggtatcatcctgaaagcgatgggtattccgtcttccatgttcaccgtcattttcgcaatggcacgtaccgttggctggatcgcccactggagcgaaatgcacagtgacggtatgaagattgcccgtccgcgtcagctgtatacaggatatgaaaaacgcgactttaaaagcgatatcaagcgttaa

SEQ ID NO: 6452 - DNA, 1203 bp, Escherichia coli
atgcaaagtgttgatgtagccattgttggcggcggcatggtggggctggcggttgcctgtggcttacaggggagcggcttacgcgttgccgtactggagcagcgcgtacaggaacctctggcggcgaatgcaccaccacaactgcgcgtttcggctatcaatgccgccagcgaaaaattactcacccgtcttggcgtctggcaggacattctctctcgtagggccagctgttatcacggtatggaagtgtgggacaaagacagctttggtcacatttcgtttgacgatcaaagcatgggctatagccatcttgggcatatcgttgaaaattcagtgattcactacgcgctgtggaacaaagcgcatcagtcgtcagatatcactctgttagcccccgcagaattacagcaggtcgcctggggagaaaatgaaaccttcctgacgctgaaagatggcagcatgttaacggcgcgtctggtgattggcgcggacggcgctaattcctggttgcgcaacaaagccgatattccgctgactttctgggattatcagcatcacgcgctggtagcgaccattcgcacggaagaaccgcatgatgcggtggcgcggcaggttttccatggcgaaggcattctggcctttttaccgcttagcgatccgcatctttgctcgattgtctggtcactgtcgccagaggaagcgcagcggatgcagcaggcaagtgaagacgaatttaatcgcgcgttaaatatcgcttttgataatcgcctgggcttatgcaaggttgagagcgcgcgtcaggtgttcccactgacggggcgttatgcgcgccagtttgcctcgcaccgtctggcgctggtgggcgacgccgcacataccattcacccgctggcggggcagggggtaaatctcggctttatggatgctgcagagctgattgccgaactgaaacggttgcatcgtcaggggaaagacatcgggcagtacatttatctgcgtcgctatgagcgtagccgcaagcacagtgcggcgttgatgctggctggtatgcagggattccgcgatctgttttccggtaccaatccggcgaaaaaactgctgcgtgatattggtttgaaactggccgacacgcttcctggcgttaagccgcaacttatccgccaggcaatgggattaaacgatttgcctgaatggctgcgttaa

SEQ ID NO: 6453 - DNA, 1668 bp, Escherichia coli
gtggctcaattcgtttataccatgcatcgtgtcggcaaagttgttccgccgaaacgtcatattttgaaaaacatctctctgagtttcttccctggggcaaaaattggtgtcctgggtctgaatggcgcgggtaagtccaccctgctgcgcattatggcgggcattgataaagacatcgaaggtgaagcgcgtccgcagccagacatcaagattggttatctgccgcaggaaccgcagctgaacccggaacacaccgtgcgtgagtccattgaagaagcggtttcagaagtggttaacgccctgaaacgcctggatgaagtgtatgcgctgtacgccgatccggatgccgattttgacaagctggccgctgaacaaggccgtctggaagagatcattcaggctcacgacggtcataatctgaacgtacagctggagcgtgcggcggatgcgctacgtctgccggactgggacgcgaaaatcgctaacctctccggtggtgaacgtcgtcgcgtagcgttgtgccgcctgctgctggaaaaaccagacatgctgctgctcgacgaaccgaccaaccacctggatgccgaatccgtggcctggctggaacgcttcctgcacgacttcgaaggcaccgttgtggcgattacccacgaccgttacttcctcgataacgttgcaggctggatcctcgaacttgaccgcggtgaaggtattccgtgggaaggtaactactcctcctggctggagcagaaagatcagcgcctggcgcaggaagcttcacaagaagcggcgcgtcgtaagtcgattgagaaagagctggaatgggtacgtcaaggtactaaaggccgtcagtcgaaaggtaaagcacgtctggcgcgctttgaagaactgaacagcaccgaatatcagaaacgtaacgaaaccaacgaactgtttattccacctggaccgcgtctgggcgataaagtgctggaagtcagcaacctgcgtaaatcctatggcgatcgtctgctgattgatgacctgagcttctcgatcccgaaaggagcgatcgtcgggatcatcggtccgaacggtgcgggtaaatcgaccctgttccgtatgatctctggtcaggaacagccggacagcggcaccatcactttgggtgaaacggtgaaactggcgtcggttgatcagttccgtgactcaatggataacagcaaaaccgtttgggaagaagtttccggcgggctggatatcatgaagatcggcaacaccgagatgccaagccgcgcctacgttggccgctttaactttaaaggggttgatcagggtaaacgcgttggtgaactctccggtggtgagcgcggtcgtctgcatctggcgaagctgctgcaggttggcggcaacatgctgctgctcgacgaaccaaccaacgacctggatatcgaaaccctgcgcgcgctggaaaacgccctgctggagttcccgggctgtgcgatggttatctcgcacgaccgttggttcctcgaccgtatcgccacgcacattctggattaccaggatgaaggtaaagttgagttcttcgaaggtaactttaccgagtacgaagagtacaagaaacgcacgctgggcgcagacgcgctggagccgaagcgtatcaagtacaagcgtattgcgaagtaa

SEQ ID NO: 6454 - DNA, 522 bp, Escherichia coli
atgtcaaagccaaaatacccttttgaaaagcgccttgaagtcgtgaatcactacttcacaactgatgatggttacaggatcatctcggcacgttttggtgtcccccgaacccaggtcaggacatgggttgccctctatgaaaaacatggagaaaaaggtttaattcccaaacctaaaggcgttagtgctgatccagagttgcgtattaaggtcgtgaaagctgtgatcgagcagcacatgtcccttaatcaggctgctgctcactttatgcttgctggtagtggttctgtagccaggtggctgaaggtctatgaagagcgcggagaagctggtttacgcgcgctcaagattggcaccaaaagaaacattgcaatatcagttgatccagaaaaagcggcatcagcattggagctgtcaaaagaccgacgcattgaggatcttgaaaggcaagttcgatttcttgaaacgcggcttatgtatctaaaaaagctgaaagccttagctcatcccacgaaaaagtga

SEQ ID NO: 6455 - DNA, 213 bp, Escherichia coli
atgtccggtaaaatgactggtatcgtaaaatggttcaacgctgacaaaggcttcggcttcatcactcctgacgatggctctaaagatgtgttcgtacacttctctgctatccagaacgatggttacaaatctctggacgaaggtcagaaagtgtccttcaccatcgaaagcggcgctaaaggcccggcagctggtaacgtaaccagcctgtaa

SEQ ID NO: 6456 - DNA, 543 bp, Escherichia coli
attaaaggcggaaaacgagttcaaacggcgcgccctaaccgtatcaatggcgaaattcgcgcccaggaagttcgcttaacaggtctggaaggcgagcagcttggtattgtgagtctgagagaagctctggagaaagcagaagaagccggagtagacttagtcgagatcagccctaacgccgagccgccggtttgtcgtataatggattacggcaaattcctctatgaaaagagcaagtcttctaaggaacagaagaaaaagcaaaaagttatccaggttaaggaaattaaattccgtcctggtacagatgaaggcgactatcaggtaaaactccgcagcctgattcgctttctcgaagagggtgataaagccaaaatcacgctgcgtttccgcggtcgtgagatggcgcaccagcaaatcggtatggaagtgcttaatcgcgtgaaagacgatttgcaagaactggcagtggtcgaatccttcccaacgaagatcgaaggccgccagatgatcatggtgctcgctcctaagaagaaacagtaa

SEQ ID NO: 6457 - DNA, 924 bp, Escherichia coli
gtgaaaaaattacgtatcggcgtagtgggattaggtggcattgcgcaaaaagcgtggttaccggtgctggcggcagcgtctgactggacgttacaaggagcctggtcgcctacgcgcgcgaaagccctgccaatttgtgaaagctggcgcattccttatgccgattcgttatccagccttgccgccagttgcgatgcggtttttgtgcattccagcaccgccagccactttgacgtggtcagtacgttactcaatgcgggggtacatgtctgtgtcgataaaccgctggcagaaaatctgcgcgatgctgaacggctggtggaactggcggcgcggaaaaaactgacgttgatggtcggttttaaccgtcgtttcgcaccactctacggtgagttaaaaacgcaactcgccaccgcagcctcgctaagaatggataaacatcgtagcaatagcgtcgggccacacgatctttatttcacgttgctggatgattatctgcatgtggtggataccgcgctgtggttgtcgggcggcaaagcctctctggatggcggtacgctactgactaacgacgctggcgaaatgctgtttgccgagcaccatttttcggctggtcctttgcagatcaccacctgtatgcatcgccgtgccggaagtcagcgtgaaaccgtgcaggccgtgactgacggtgcgctcatcgacattacggatatgcgcgaatggcgtgaggagcgcgggcagggcgtagtgcataaaccgattcctggttggcagagtacgcttgagcaacgtgggtttgtcggctgtgcgcggcacttcattgaatgtgtgcaaaaccagacagttccgcaaaccgccggcgaacaggccgtgctggcgcaacgtatcgttgacaagatctggcgcgatgcgatgagtgaataa

SEQ ID NO: 6458 - DNA, 963 bp, Escherichia coli
gtgatgatcaaaacgcgtttttctcgctggctaacgttttttacgttcgccgctgccgtggcgctggcgctaccggcaaaagccaacacctggccgctgccgccagcgggcagtcgtctggttggcgaaaacaaatttcatgtggtggaaaatgacggtggttctctggaagccatcgccaaaaaatacaacgtcggctttctcgctctgttacaggctaaccccggcgttgatccttacgtaccgcgcgcgggcagcgtgttaacgatcccgttgcaaaccctacttccagatgcgccgcgcgaaggcattgtgatcaacattgcggagctgcgtctctattactacccgccgggtaaaaattcggtaaccgtgtatccaataggtattggtcagttaggtggtgacacgctgacaccgacaatggtgaccaccgtttcagacaaacgtgcaaacccaacctggacgccaacggcaaacatccgcgcccgttataaagcacagggaattgagttgcctgcggtagtgccggctggactggataacccaatgggccatcatgcgattcgtctggcggcctatggcggcgtttatttgcttcatggtacgaacgccgatttcggcattggcatgcgggtaagttctggctgtattcgtctgcgggatgacgatatcaaaacactctttagccaggtcaccccaggcaccaaagtgaatatcatcaacactccgataaaagtctctgccgaaccaaacggtgcgcgtctggttgaagtacatcagccgctgtcagagaagattgatgacgatccgcagctgctgccaattacgctgaatagcgcaatgcaatcatttaaagatgcagcacaaactgacgctgaagtgatgcaacatgtgatggatgtccgttccgggatgccggtggatgtccgccgtcatcaagtgagcccacaaacgctgtaa

SEQ ID NO: 6459 - DNA, 534 bp, Escherichia coli
atgtctcgtgttgctaaagcaccggtcgttgttcctgccggcgttgacgtaaaaatcaacggtcaggttattacgatcaaaggtaaaaacggcgagctgactcgtactctcaacgatgctgttgaagttaaacatgcagataataccctgaccttcggtccgcgtgatggttacgcagacggttgggcacaggctggtaccgcgcgtgccctgctgaactcaatggttatcggtgttaccgaaggcttcactaagaagctgcagctggttggtgtaggttaccgtgcagcggttaaaggcaatgtgattaacctgtctctgggtttctctcatcctgttgaccatcagctgcctgcgggtatcactgctgaatgtccgactcagactgaaatcgtgctgaaaggcgctgataagcaggtgatcggccaggttgcagcggatctgcgcgcctaccgtcgtcctgagccttataaaggcaagggtgttcgttacgccgacgaagtcgtgcgtaccaaagaggctaagaagaagtaa

SEQ ID NO: 6460 - DNA, 951 bp, Escherichia coli
atgagtaaacttgatacttttatccaacatgctgtaaacgctgttccggtcagtggcacatctttgatctcctctctgtatggtgattcgctttcccatcgtggtggtgaaatctggttgggtagtctggctgctttgctggaagggctgggatttggtgagcgtttcgtgcgcaccgctttgtttcgtcttaataaagaaggctggctggatgtttcccgcatcgggcgacgcagtttctatagcctcagtgataaaggcttgcgcctgacgcgacgggcagaaagtaaaatttatcgcgcagagcaacctgcatgggatggtaaatggctcctgttgctctcggaaggtttagataaatcaacgctggctgatgtcaaaaagcagttgatctggcaaggttttggcgcactggcacccagcctgatggcatcgccgtcgcaaaaactggccgatgtacagacacttttgcatgaagcgggtgtggcggataacgtgatttgttttgaagcgcaaataccactggcgctttctcgcgcagcactgcgtgccagagtagaagagtgctggcatttaactgaacaaaatgccatgtacgaaacctttattcagtcattccgcccgctggtgccgcttttaaaagaggcggcagacgagttaaccccggagcgggcatttcatattcagcttttactgatccatttttatcgccgtgtcgtccttaaagacccattgttgccggaggagttgcttccggcacactgggcagggcatacggcgcgtcagctgtgtatcaacatttatcagcgcgtagcgcctgctgctttagcgttcgttagtgaaaaaggtgaaacctcggtcggtgaactgcctgcgccgggaagcctgtattttcaacgttttggcggcttgaatattgaacaggaggcgttatgccaatttatcagatag

SEQ ID NO: 6461 - DNA, 1353 bp, Escherichia coli
atgactaaacactatgattacatcgccatcggcggcggcagcggcggtatcgcctccatcaaccgcgcggctatgtacggccagaaatgtgcgctgattgaagccaaagagctgggcggcacctgcgtaaatgttggctgtgtgccgaaaaaagtgatgtggcacgcggcgcaaatccgtgaagcgatccatatgtacggcccggattatggttttgataccactatcaataaattcaactgggaaacgttgatcgccagccgtaccgcctatatcgaccgtattcatacttcctatgaaaacgtgctcggtaaaaataacgttgatgtaatcaaaggctttgcccgcttcgttgatgccaaaacgctggaggtaaacggcgaaaccatcacggccgatcatattctgatcgccacaggcggtcgtccgagccacccggatattccgggcgtggaatacggtattgattctgatggcttcttcgcccttcctgctttgccagagcgcgtggcggttgttggcgcgggttacatcgccgttgagctggcgggcgtgattaacggcctcggcgcgaaaacgcatctgtttgtgcgtaaacatgcgccgctgcgcagcttcgacccgatgatttccgaaacgctggtcgaagtgatgaacgccgaaggcccgcagctgcacaccaacgccatcccgaaagcggtagtgaaaaataccgatggtagcctgacgctggagctggaagatggtcgcagtgaaacggtggattgcctgatttgggcgattggtcgcgagcctgccaatgacaacatcaacctggaagccgctggcgttaaaactaacgaaaaaggctatatcgtcgtcgataaatatcaaaacaccaatattgaaggtatttacgcggtgggcgataacacgggtgcagtggagctgacaccggtggcagttgcagcgggtcgccgtctctctgaacgcctgtttaataacaagccggatgagcatctggattacagcaacattccgaccgtggtcttcagccatccgccgattggtactgttggtttaacggaaccgcaggcgcgcgagcagtatggcgacgatcaggtgaaagtgtataaatcctctttcaccgcgatgtataccgccgtcaccactcaccgccagccgtgccgcatgaagctggtgtgcgttggatcggaagagaagattgtcggtattcacggcattggctttggtatggacgaaatgttgcagggcttcgcggtggcgctgaagatgggggcaaccaaaaaagacttcgacaataccgtcgccattcacccaacggcggcagaagagttcgtgacaatgcgttaa

SEQ ID NO: 6462 - DNA, 2598 bp, Escherichia coli
gtgactatagaatatactaaaaattatcatcatctgacccgtatcgccacgttttgcgcgctgctgtattgcaatactgctttcagtgctgaactcgttgaatatgaccataccttcctgatggggcagaatgcatctaatattgatctcagccggtacagtgaaggtaaccccgctataccgggtgtttacgacgtcagtgtttatgtaaacgaccaaccaatcattaaccaaagtattacatttgtcgcaattgaaggaaaaaagaacgcccaggcttgtatcacattaaagaatttattgcagtttcatattaattctcccgatataaataacgaaaaagccgttctgcttgccagggatgaaacgctcggcaattgcctcaatttgacggaaattatccctcaggcttctgttcgttatgacgttaacgatcaacgtctggatatagacgttcctcaagcctgggtaatgaaaaattaccaaaactatgttgatccatcgttatgggaaaacggcattaatgcggccatgttgtcatacaacctcaacggatatcatagtgaaacccctggtcgaaaaaatgaaagcatttatgctgcatttaacggtgggatgaatttaggtgcatggcgactgcgtgcctcgggcaactacaactggatgaccgattctggcagtaattatgattttaagaatcggtatgttcagcgtgatatcgcctcgctgcgttctcaactcattcttggtgagtcttatacgacgggcgaaacctttgattccgtcagtatccgaggcattcgtttatacagtgacagccgcatgttgcctccgactttagccagctttgcgcctatcattcatggcgttgccaataccaacgccaaagtcactattacgcaaggtggctataagatttatgaaacgacggtgccgccaggcgctttcgtcattgatgatctgagtccgtcagggtacggcagcgatcttattgttaccatcgaagaatccgatggctcaaagcggacattctcgcaacctttctcatccgttgttcaaatgttacgccctggcgttggacgttgggatattagcggcggtcaggtcttaaaagatgatattcaggatgagcctaatttatttcaagcaagctactactacggcctgaataactatctgacgggttataccggtattcagataaccgataataactataccgctggtttgttaggtcttggtctgaatacttcagttggtgcattttctttcgatgtgactcattccaatgttcgtatcccggatgataaaacataccaggggcaaagttatcgtgtttcctggaacaagttattcgaagaaacaagtacttcactgaatatcgcggcctatcgctattcgacacagaattaccttggtcttaatgatgcactaactctaattgatgaagtgaaacatcccgaacaagatcttgaaccgaaatccatgcgtaattactcacgcatgaaaaatcaggttacggtcagtattaaccaaccgttgaaatttgagaaaaaagattacggttcattttatctttccggaagttggtccgattactgggcttccggacaaaatcgtagcaattactctattggctacagtaacagtacatcctggggcagctacagtgtcagtgcccagcgttcatggaatgaagacggcgacactgacgatagcgtttatcttagtttcaccattccaattgaaaaattacttggcactgaacaacgtacttcaggtttccagagtattgatactcaaataagcagtgactttaagggtaataaccaactcaacgttagcagcagtggctatagcgataacgctcgcgtcagttatagcgtgaatactggctatacgatgaataaagccagcaaagatttgagttatgttgggggttatgccagctatgagtcaccatggggaacgctggcaggttcaatttctgcaaatagcgataacagccgtcaagtttctctcagcaccgacggtggttttgtattgcatagcggtggactgactttcagtaatgatagttttagcgactccgatacactggcggtagttcaggctccaggtgctcaaggagcgcgaataaattatggcaacagtactatcgatcgatggggttatggtgtcaccagcgctctttctccttatcatgaaaaccgtatcgcgctggatatcaacgatcttgagaacgatgttgaattaaaaagtaccagtgcagtagctgtaccgcgtcagggttcagtcgtctttgctgattttgaaaccgtgcaagggcaatcagccattatgaacatcacacgaagtgatggtaaaaatattccatttgctgcagatatttatgatgagcaaggcaatgtcattggtaatgttggacagggtggacaagcatttgttcgtggtattgagcagcagggaaatatcagcattaaatggctcgaacaaagtaaacccgtaagttgtcttgcgcattatcaacaaagcccagaagcagaaaaaatagcacaatctattattctgaatggaattcggtgtcagattcagtaa

SEQ ID NO: 6463 - DNA, 2604 bp, Escherichia coli
atgaaaatacccactactacggatattccgcagaggtatacctggtgtctggccggaatttgttattcatctcttgccattttaccctcctttttaagctatgcggaaagttatttcaacccggcatttttattagagaatggcacatccgttgctgatttatcgcgctttgagagaggtaatcatcaacctgcgggcgtgtatcgggtggatctctggcgtaatgatgagttcattggttcgcaggatatcgtatttgaatcgacaacagaaaatacaggtgataaatcaggtgggttaatgccctgttttaaccaggtacttcttgaacgaattggccttaatagcagtgcatttcccgagttagcccagcagcaaaacaataaatgcatcaatttactgaaagctgtacctgatgccacaattaactttgattttgcagcgatgcgcctgaacatcactattcctcagatagcgttgttgagtagcgctcacggttacattccgcctgaagagtgggatgaaggtattcctgctttactcctgaattataatttcaccggtaacagaggtaatggtaacgatagctatttttttagtgagctcagcgggattaatattggcccgtggcgtttacgcaacaatggttcctggaactattttcgcggaaatggatatcattcagaacagtggaataatattggcacctgggtacagcgcgccattattccgctgaaaagtgaactggtaatgggagacggcaatacaggaagtgatattttcgatggcgttggatttcgtggtgtacggctttattcttctgataatatgtatcctgatagccagcaagggtttgccccaacggtacgtgggattgcccgtacggcggcccagctaacgattcggcaaaatggttttattatctatcaaagctatgtttcccccggcgcttttgaaattacagatttgcacccgacatcttcaaatggcgatctggacgtcaccatcgacgagcgcgatggcaatcagcagaattacacaattccgtattcaacagtgccaattttacaacgcgaagggcgtttcaaatttgacctgacggcgggcgattttcgtagcggtaatagtcagcaatcatcgcctttcttttttcagggtacggcactcggcggtttaccacaggaatttactgcctacggcgggacgcaattatctgccaattacaccgcctttttattagggctggggcgcaatctcgggaactggggcgcagtgtcgctggatgtaacgcatgcgcgcagtcagttagccgacgccagtcgtcatgagggggattctattcgcttcctctatgcgaaatcgatgaacaccttcggcaccaattttcagttaatgggttaccgctattcgacacaaggtttttatacccttgatgatgttgcgtatcgtcgaatggaggggtacgaatatgattacgacggtgagcatcgcgatgaaccgataatcgtgaattaccacaatttacgctttagccgtaaagaccgtttgcagttaaatgtttcacaatcacttaatgactttggctcgctttatatttctggtacccatcaaaaatactggaatacttcggattcagatacgtggtatcaggtggggtataccagcagctgggttggcatcagttattcgctctcattttcgtggaatgaatctgtagggatccccgataacgaacgtattgtcggacttaatgtttcagtgcctttcaatgttttgaccaaacgtcgctacacccgggaaaatgcgctcgaccgcgcttatgcctcctttaacgccaaccgtaacagcaacgggcaaaatagctggctggcaggtgtaggtgggaccttactggaaggccacaacctgagttatcacgtaagccagggtgatacctcgaataatgggtacacgggcagcgccacggcaaactggcaggccgcttacggtacgctggggggcgggtataactacgaccgcgatcaacatgacgttaactggcagctgtctggcggtgtggtcgggcatgaaaatggcataacgctgagccagcctttaggggataccaatgttttgattaaagcgcctggcgcaggcggtgtacgcattgaaaatcaaactggcattttaaccgactggcgcggctatgcggtgatgctgtatgccacggtttatcggtataaccgtatcgcgcttgataccaatacgatggggaattccatcgatgttgaaaaaaatattagcagcgttgtgccgacgcaaggcgcgttggttcgtgccaattttgatacccgcataggcgtgcgggcgctcattaccgttacccagggcggaaaaccggtgccgtttggatcactggtacgggaaaacagtaccggaataaccagtatggtgggtgatgacgggcaagtttatttaagtggtgcgccattgtctggtgaattactggttcagtggggagacggcgcgaactcacgctgcattgcgcactatgtattgccgaagcaaagcttacagcaagccgtcactgttatttcggcagtttgcacacatcctggctcataa

SEQ ID NO: 6464 - DNA, 1099 bp, Escherichia coli
atgtttgaaattaatccggtaaataatcgcattcaggacctcacggaacgctccgacgttcttagggggtatctttgactacgacgccaagaaagagcgtctggaagaagtaaacgccgagctggaacagccggatgtctggaacgaacccgaacgcgcacaggcgctgggtaaagagcgttcctccctcgaagccgttgtcgacaccctcgaccaaatgaaacaggggctggaagatgtttctggtctgctggaactggctgtagaagctgacgacgaagaaacctttaacgaagccgttgctgaactcgacgccctggaagaaaaactggcgcagcttgagttccgccgtatgttctctggcgaatatgacagcgccgactgctacctcgatattcaggcggggtctggcggtacggaagcacaggactgggcgagcatgcttgagcgtatgtatctgcgctgggcagaatcgcgtggtttcaaaactgaaatcatcgaagagtcggaaggtgaagtggcgggtattaaatccgtgacgatcaaaatctccggcgattacgcttacggctggctgcgtacagaaaccggcgttcaccgcctggtgcgtaaaagcccgtttgactccggcggtcgtcgccacacgtcgttcagctccgcgtttgtttatccggaagttgatgatgatattgatatcgaaatcaacccggcggatctgcgcattgacgtttatcgcacgtccggcgcgggcggtcagcacgttaaccgtaccgaatctgcggtgcgtattacccacatcccgaccgggatcgtgacccagtgccagaacgaccgttcccagcacaagaacaaagatcaggccatgaagcagatgaaagcgaagctttatgaactggagatgcagaagaaaaatgccgagaaacaggcgatggaagataacaaatccgacatcggctggggcagccagattcgttcttatgtccttgatgactcccgcattaaagatctgcgcaccggggtagaaacccgcaacacgcaggccgtgctggacggcagcctggatcaatttatcgaagcaagtttgaaagcagggttatga

SEQ ID NO: 6465 - DNA, 1734 bp, Escherichia coli
gtgaaacaacagatacaacttcgtcgccgtgaagtcgatgaaacggcagacttgcccgctgaattgcctcccttgctgcgccgtttatacgccagccggggagtacgcagtgcgcaagaactggaacgcagtgttaaaggtatgctgccctggcagcaactgagcggcgtcgaaaaggccgttgagatcctttacaacgcttttcgcgaaggaacgcggattattgtggtcggtgatttcgacgccgacggcgcgaccagcacggctctaagcgtgctggcgatgcgctcgcttggttgcagcaatatcgactacctggtaccaaaccgtttcgaagacggttacggcttaagcccggaagtggtcgatcaggcccatgcccgtggcgcgcagttaattgtcacggtggataacggtatttcctcccatgcgggggttgagcacgctcgctcgttgggcatcccggttattgttaccgatcaccatttgccaggcgacacattacccgcagcggaagcgatcattaaccctaacttgcgcgactgtaatttcccgtcgaaatcactggcaggcgtgggtgtggcgttttatctgatgctggcgctgcgcacctttttgcgcgatcagggctggtttgatgagcgtaacatcgcaattcctaacctggcagaactgctggatctggtcgcgctggggacagtggcggacgtcgtgccgctggacgctaataatcgcattctgacctggcaggggatgagtcgcatccgagccggaaagtgccgtccggggattaaagcgctgcttgaagtggcaaaccgtgatgcacaaaaactcgccgccagcgatttaggttttgcgctggggccacgtctcaatgctgccggacgactggacgatatgtccgtcggtgtggcgctgttgttgtgcgacaacatcggcgaagcgcgcgtgctggcaaatgaactcgatgcgctaaaccagacgcgaaaagagatcgaacaaggaatgcaaattgaagccctgaccctgtgcgagaaactggagcgcagccgtgacacgctacccggcgggctggcaatgtatcaccccgaatggcatcagggcgttgtcggtattctggcttcgcgcatcaaagagcgttttcaccgtccggttatcgcgtttgcgccagcaggtgacggtacgctgaaaggttccggtcgctccattcaggggctgcatatgcgtgatgcgctggagcgattagacacactctaccctggcatgatgctgaagtttggcggtcatgcgatggcggcgggtttgtcgctggaagaggataaattcaaactctttcaacaacggtttggcgaactggttactgagtggctggacccttcgctattgcaaggcgaagtggtatcagacggtccgttaagcccggccgaaatgaccatggaagtggcgcagctgctgcgcgatgctggcccgtgggggcagatgttcccggagccgctgtttgacggtcatttccgtctgctgcaacagcggctggtgggcgaacgtcatttgaaggtgatggtcgaaccggtcggcggcggtccactgctggatggtattgcttttaatgtcgataccgccctctggccggataacggcgtgcgcgaagtgcaactggcttataagctcgatatcaacgagtttcgcggcaaccgcagcctgcaaattatcatcgacaatatctggccaatttag

SEQ ID NO: 6466 - DNA, 1203 bp, Escherichia coli
atgcgcatccttcacacctcagactggcatctcggccagaacttctacagtaaaagccgcgaagctgaacatcaggcttttcttgactggctgctggagacagcacaaacccatcaggtggatgcgattattgttgccggtgatgttttcgataccggctcgccgcccagttacgcccgcacgttatacaaccgttttgttgtcaatttacagcaaactggctgtcatctggtggtactggcaggaaaccatgactcggtcgccacgctgaatgaatcgcgcgatatcatggcgttcctcaatactaccgtggtcgccagcgccggacatgcgccgcaaatcttgcctcgtcgcgacgggacgccaggcgcagtgctgtgccccattccgtttttacgtccgcgtgacattattaccagccaggcggggcttaacggtattgaaaaacagcagcatttactggcagcgattaccgattattaccaacaacactatgccgatgcctgcaaactgcgcggcgatcagcctctgcccatcatcgccacgggacatttaacgaccgtgggggccagtaaaagtgacgccgtgcgtgacatttatattggcacgctggacgcgtttccggcacaaaactttccaccagccgactacatcgcgctcgggcatattcaccgcgcacagattattggcggcatggaacatgttcgctattgcggctcccccattccactgagttttgatgaatgcggtaagagtaaatatgtccatctggtgacattttcaaacggcaaattagagagcgtggaaaacctgaacgtaccggtaacgcaacccatggcagtgctgaaaggcgatctggcgtcgattaccgcacagctggaacagtggcgcgatgtatcgcaggagccacctgtctggctggatatcgaaatcactactgatgagtatctgcatgatattcagcgcaaaatccaggcattaaccgaatcattgcctgtcgaagtattgctggtacgtcggagtcgtgaacagcgcgagcgtgtgttagccagccaacagcgtgaaaccctcagcgaactcagcgtcgaagaggtgttcaatcgccgtctggcactggaagaactggatgaatcgcagcagcaacgtctgcagcatcttttcaccacgacgttgcataccctcgccggagaacacgaagcatga

SEQ ID NO: 6467 - DNA, 1359 bp, Escherichia coli
atgaaaagactatctataaccgtccgtttaaccttgctttttatattgctactgtctgttgctggcgccggaattgtctggactctctataatggcctggcaagtgagttgaaatggcgcgatgatacaacactcattaaccggacagcgcagatcaagcagttgttaattgatggggtaaatccagatacgttacctgtgtactttaaccggatgatggatgttagtcaggatatcttgattattcatggtgatagcatcaataaaattgttaaccggacaaatgtcagtgatggcatgttaaataacatacctgctagtgagacaatcagcgcagctggcatttacagaagcattattaatgatacagagatagatgctttacgaattaatattgatgaagtttcgccatcattaacggttactgtggctaaattggcttcagccagacataacatgcttgaacagtataaaattaatagcattataatttgcattgtcgccattgtactttgctcagtattaagtccgctgttaatcagaacgggattacgagagatcaaaaagttgagtggtgtaacggaagcgctgaattataacgatagccgagagcctgttgaggttagcgcattaccgagagaactaaaacctcttgggcaggcgttgaataaaatgcatcatgctttagtcaaagattttgagcgtctaagtcagtttgctgacgatctcgctcatgaacttagaacgccaattaatgcattactgggtcagaatcaggttacgctcagtcaaaccagaagtatcgctgaatatcaaaaaacaattgccggaaacattgaagagctggaaaatatttcgcggttaacagagaacatactgtttcttgccagggcagataaaaacaatgttttggtgaaactggactcgctttctctcaataaggaagtcgaaaatttgttggactatcttgaatacctttcagacgagaaagagatttgctttaaggtcgagtgcaatcagcaaatctttgcggataaaattttactacaacgaatgttatcgaatcttattgttaatgccattagatattcgccagaaaaatcgcgtattcatataaccagttttcttgataccaacagctatcttaatattgatatcgccagccctggaacgaaaattaatgagcctgaaaaactcttccgtagattttggcggggagataattcgcgtcattccgtaggtcagggactaggcctttctttagtcaaagcgattgccgaattgcatgggggaagtgctacgtatcactatctcaataagcataatgtgttccggattacgttaccgcaaagaaattaa

SEQ ID NO: 6468 - DNA, 168 bp, Escherichia coli
atgaacaaatttattaaagttgcactggtaggtgcagtactggctacgttaactgcatgtactggtcatattgaaaaccgtgataagaactgctcttacgactacctgctgcacccggcaatttctatttctaaaatcattggcggttgcggtcctactgcacagtaa

SEQ ID NO: 6469 - DNA, 1389 bp, Escherichia coli
atgactgcaaactctcccctacaacgtattggacaagaaaaaggtatcgctatgggaagccaggaactccaacgcaagctcggattttgggccgttcttgcaatcgccgtcgggacaaccgtcggctccggtatttttgtatctgtgggtgaagtggcaaaagcagcgggcacgccgtggcttacggtgctcgcgtttgtcattggcgggttaattgtgatcccgcaaatgtgcgtctatgcggaactatccaccgcttatccggaaaatggcgcagattatgtttatctgaaaaatgccggaagccgaccgctggctttcctctccggctgggccagcttctgggccaacgatgcgccgtcattgtcgattatggcgctggcgattgtcagcaatcttggctttttaacgcctatcgatccgttgctcggtaaatttatcgccgccggattaattatcgcctttatgttgctacacctgcgctccgttgaaggcggcgcagcgtttcagacgctaattaccatcgccaaaattatcccgttcactatcgtcattggccttgggatcttctggtttaaagcggagaattttgccgcccctaccaccactgcgattggcgcaacgggcagctttatggcgctgctggcggggatctctgccaccagttggtcgtataccggcatggcctctatctgttatatgaccggcgaaattaaaaaccccggaaaaaccatgccacgagcgctgattggttcctgtctgctggttctggtgctctacaccctgctggcgctggtgatttccggcctgatgcccttcgacaaactcgccaattctgaaacgccgatttccgacgccctgacctggatccccgcactcggcagcaccgctgggatctttgttgccatcacggcgatgatcgtcattcttggttcgctttccagctgcgtgatgtaccagccgcggctggaatacgcgatggcgaaagacaacctgttctttaaatgcttcggccatgtgcatccgaaatacaacacgccggatgtctccatcatcctgcaaggggcgctggggatcttcttcatcttcgtttccgatctcaccagcctgctgggttatttcaccctggtgatgtgtttcaaaaataccctcaccttcggctccatcatctggtgtcgtaaacgcgacgattacaaaccgctgtggcgtactccggctttcgggctgatgaccaccctcgccattgcgtcaagcctcattctggtcgcctcaacctttgtctgggcaccgattcccggccttatctgcgccgtcatcgttattgctactggtctgcctgcttacgccttctgggcgaagcgtagccgccagctcaacgctttgtcgtaa

SEQ ID NO: 6470 - DNA, 198 bp, Escherichia coli
atgccaaaaattaagaccgtacgcggtgctgctaagcgcttcaaaaaaaccggtaaaggtggttttaagcacaagcacgctaacctgcgtcacattctgaccaaaaaagcgaccaaacgtaaacgtcacctgcgtccgaaagccatggtttccaaaggcgatctgggcctggtaatcgcgtgcctgccgtacgcataa

SEQ ID NO: 6471 - DNA, 2022 bp, Escherichia coli
atgcgtctaaaccccggccaacaacaagctgtcgaattcgttaccggcccctgcctggtgctggcgggcgcgggttccggtaaaactcgtgttatcaccaataaaatcgcccatctgatccgcggttgcggttatcaggcgcggcacattgcggcggtgacctttactaataaagcagcgcgcgagatgaaagagcgtgtagggcagacgctggggcgcaaagaggcgcgtgggctgatgatctccactttccatacgttggggctggatatcatcaaacgcgagtatgcggcgcttgggatgaaagcgaacttctcgttgtttgacgataccgatcagcttgctttgcttaaagagttgaccgaggggctgattgaagatgacaaagttctcctgcaacaactgatttcgaccatctctaactggaagaatgatctcaaaacaccgtcccaggcggcagcaagtgcgattggcgagcgggaccgtatttttgcccattgttatgggctgtatgatgcacacctgaaagcctgtaacgttctcgacttcgatgatctgattttattgccgacgttgctgctgcaagccaatgaagaagtccgcaagcgctggcagaacaaaattcgctatctgctggtggatgagtatcaggacaccaacaccagccagtatgagctggtgaaactgctggtgggcagccgcgcgcgctttaccgtggtgggtgacgatgaccagtcgatctactcctggcgcggtgcacgtccgcaaaacctggtgctgctgagtcaggattttccggcgctgaaggtgattaagcttgagcagaactatcgctcttccgggcgtattctgaaagcggcgaacatcctgatcgccaataacccgcacgtctttgaaaagcgtctgttctccgaactgggttatggcgcggagctaaaagtattaagcgcgaataacgaagaacatgaggctgagcgcgttactggcgagctgatcgcccatcacttcgtcaataaaacgcagtacaaagattacgccattctttatcgcggtaaccatcagtcgcgggtgtttgaaaaattcctgatgcaaaaccgcatcccgtacaaaatatctggtggtacgtcgtttttctctcgtcctgaaatcaaggacttgctggcttatctgcgcgtgctgactaacccggacgatgacagcgcatttctgcgtatcgttaacacgccgaagcgagagattggcccggctacgctgaaaaagctgggtgagtgggcgatgacgcgcaataaaagcatgtttaccgccagctttgatatgggcctgagtcagacgcttagcggacgtggttatgaagcattgacccgcttcactcactggttggcagaaatccagcgtctggcggagcgggagccgattgccgcggtgcgtgatctgatccatggcatggattatgaatcctggctgtacgaaacatcgcccagcccgaaagccgccgaaatgcgcatgaagaacgtcaaccaactgtttagctggatgacggagatgctggaaggcagtgaactggatgagccgatgacgctcacccaggtggtgacgcgctttactttgcgcgacatgatggagcgtggtgagagtgaagaagagctggatcaggtgcaactgatgactctccacgcgtcgaaagggctggagtttccttatgtctacatggtcggtatggaagaagggtttttgccgcaccagagcagcatcgatgaagataatatcgatgaggagcggcggctggcctatgtcggcattacccgcgcccagaaggaattgacctttacgctgtgtaaagaacgccgtcagtacggcgaactggtgcgcccggagccgagccgctttttgctggagctgccgcaggatgatctgatttgggaacaggagcgcaaagtggtcagcgccgaagaacggatgcagaaagggcaaagccatctggcgaatctgaaagcgatgatggcggcaaaacgagggaaataa

SEQ ID NO: 6472 - DNA, 1212 bp, Escherichia coli
atgatggttacagttgtcagcaattattgtcaattatctcaaacgcaactcagtcagacatttgcagaaaaatttactgtgaccgaggaattactgcagtctttaaaaaaaacagcgttatccggagatgaagaaagcattgagttactgcataatattgcgttaggttatgataaatttgggaaagaagctgaagatattctttaccatattgttagaaccccaacaaatgagaccctatcgattatccgacttatcaaaaatgcttgtttaaaattatataatctggcacatatcgcaaccaactcccccctcaaatcacatgattcagatgatctcctgttcaaaaaactattctccccttcgaaattaatgacaattatcggtgatgaaattcctcttatatctgaaaaacagtcgctttcaaaggtgcttttaaatgatgagaataatgaactgagtgatggtacaaacttctgggataaaaatcgtcaattaaccacagatgaaatagcttgctatcttcagaagatcgccgctaatgcaaaaaatactcaagtcaattatcctactggtctctacgtcccctactccaccagaactcacctggaagacgctctcaatgaaaatattaagagcgatccatcatggccgaatgaagtccagttattccccataaatactggcggacactggatattagtttcgctacagaaaatagtaaataaaaaaaataataaactacaaataaaatgcgtcatattcaactcattgcgtgcactaggctatgataaagaaaattcacttaagcgtgtcattaatagttttaattctgaactcatgggagaaatgtcgaataataatataaaagttcatttaaatgaaccagagataatatttttacatgccgatcttcagcaatacttaagccaaagttgcggtgcatttgtgtgcatggcagcccaggaagtgattgaacaaagggaaagcaattctgacagcgccccctatacgttattaaaaaaccatgctgacagatttaaaaaatattcagcagaagagcagtacgaaattgattttcaacatcgactggcaaacagaaattgttatttagataaatatggcgatgcaaatatcaatcattattatagaaacttagaaataaaacactcacaacccaaaaatagagcatccggcaaaagagtgagttaa

SEQ ID NO: 6473 - DNA, 606 bp, Escherichia coli
atggaattagtattgaaagacgcgcagagcgcgctgactgtttccgaaactaccttcggtcgtgatttcaacgaagcgctggttcaccaggttgttgttgcttatgcagctggtgctcgtcagggtactcgtgctcagaagactcgtgctgaagtaactggttccggtaaaaaaccgtggcgccagaaaggcaccggccgtgcgcgttctggttctatcaagagcccgatctggcgttctggtggcgtgacctttgctgctcgtccgcaggaccacagtcaaaaagttaacaagaagatgtaccgcggcgcgctgaaaagcatcctgtccgaactggtacgtcaggatcgtctgatcgttgtcgagaagttctctgtagaagcgccgaaaactaagctgctggcacagaaactgaaagacatggctctggaagatgtgctgatcatcaccggtgagctggacgaaaacctgttcctggctgcgcgcaacctgcacaaggttgacgtacgcgatgcaactggtatcgacccggttagcctgatcgccttcgacaaagtcgtaatgactgctgatgctgttaagcaagttgaggagatgctggcatga

SEQ ID NO: 6474 - DNA, 630 bp, Escherichia coli
atgattggtttagtcggtaaaaaagtgggtatgacccgtatcttcacagaagacggcgtttctatcccagtaaccgtaatcgaagttgaagcaaaccgcgttactcaggttaaagacctggctaacgatggctaccgtgctattcaggtgaccaccggtgctaaaaaagctaaccgtgtgaccaagcctgaagctggccacttcgctaaagctggcgtagaagctggccgtggtctgtgggaattccgcctggctgaaggcgaagagttcactgtaggtcagagcattagcgttgaactgtttgctgacgttaaaaaagttgacgtaactggcacctctaaaggtaaaggtttcgcaggtaccgttaagcgctggaacttccgtacccaggacgctactcacggtaactccttgtctcaccgcgttccgggttctatcggtcagaaccagactccgggcaaagtgttcaaaggcaagaaaatggcaggtcagatgggtaacgaacgtgtaaccgttcagagccttgacgtagtacgcgttgacgctgagcgcaacctgctgctggttaaaggtgctgtcccgggtgcaaccggtagcgacctgatcgttaaaccagctgtgaaggcgtaa

SEQ ID NO: 6475 - DNA, 384 bp, Escherichia coli
atgcgtgatattcagatggttcttgagcgttggggagcgtgggcggctaataatcatgaagatgtgacctggtcgtccattgccgccggttttaagggattaattacttcaaaagtaaaatctcgcccgcaatgttgtgacgatgacgcgatgatcatttgcgggtgcatggcccgtctgaaaaagaacaacagcgatttgcacgatttattagtagattattatgtagtcggtatgacattcatgtcactggcaggtaagcattgctgctctgatggttatatcgggaaaaggttacagaaggctgagggcataattgaagggatgttaatggcattagatatccggttagagatggatatcgttgttaataactctaattaa

SEQ ID NO: 6476 - DNA, 354 bp, Escherichia coli
atggataagaaatctgctcgtatccgtcgtgcgacccgcgcacgccgcaagctccaggagctgggcgcaactcgcctggtggtacatcgtaccccgcgtcacatttacgcacaggtaattgcaccgaacggttctgaagttctggtagctgcttctactgtagaaaaagctatcgctgaacaactgaagtacaccggtaacaaagacgcggctgcagctgtgggtaaagctgtcgctgaacgcgctctggaaaaaggcatcaaagatgtatcctttgaccgttccgggttccaatatcatggtcgtgtccaggcactggcagatgctgcccgtgaagctggccttcagttctaa

SEQ ID NO: 6477 - DNA, 1191 bp, Escherichia coli
atgaaaataaaaacaggtgcacgcatcctcgcattatccgcattaacgacgatgatgttttccgcctcggctctcgccaaaatcgaagaaggtaaactggtaatctggattaacggcgataaaggctataacggtctcgctgaagtcggtaagaaattcgagaaagataccggaattaaagtcaccgttgagcatccggataaactggaagagaaattcccacaggttgcggcaactggcgatggccctgacattatcttctgggcacacgaccgctttggtggctacgctcaatctggcctgttggctgaaatcaccccggacaaagcgttccaggacaagctgtatccgtttacctgggatgccgtacgttacaacggcaagctgattgcttacccgatcgctgttgaagcgttatcgctgatttataacaaagatctgctgccgaacccgccaaaaacctgggaagagatcccggcgctggataaagaactgaaagcgaaaggtaagagcgcgctgatgttcaacctgcaagaaccgtacttcacctggccgctgattgctgctgacgggggttatgcgttcaagtatgaaaacggcaagtacgacattaaagacgtgggcgtggataacgctggcgcgaaagcgggtctgaccttcctggttgacctgattaaaaacaaacacatgaatgcagacaccgattactccatcgcagaagctgcctttaataaaggcgaaacagcgatgaccatcaacggcccgtgggcatggtccaacatcgacaccagcaaagtgaattatggtgtaacggtactgccgaccttcaagggtcaaccatccaaaccgttcgttggcgtgctgagcgcaggtattaacgccgccagtccgaacaaagagctggcgaaagagttcctcgaaaactatctgctgactgatgaaggtctggaagcggttaataaagacaaaccgctgggtgccgtagcgctgaagtcttacgaggaagagttggcgaaagatccacgtattgccgccaccatggaaaacgcccagaaaggtgaaatcatgccgaacatcccgcagatgtccgctttctggtatgccgtgcgtactgcggtgatcaacgccgccagcggtcgtcagactgtcgatgaagccctgaaagacgcgcagactcgtatcaccaagtaa

SEQ ID NO: 6478 - DNA, 333 bp, Escherichia coli
atggaaactatcgctaaacatcgccatgctcgttcttctgctcagaaggttcgccttgttgctgacctgattcgcggtaagaaagtgtcgcaggctctggatattttgacctacaccaacaagaaagcggctgtactggtcaagaaagttctggaatctgccattgctaacgctgaacacaacgatggcgctgacattgacgatctgaaagttacgaaaattttcgtagacgaaggcccgagcatgaagcgcattatgccgcgtgcaaaaggtcgtgcagatcgcatcctgaagcgcaccagccacatcactgtggttgtgtccgatcgctga

SEQ ID NO: 6479 - DNA, 1533 bp, Escherichia coli
atggcgacgatcgattctatgaataaggacaccacacgtttgagcgatggacccgactggacgttcgacctgctggatgtttatctggcagagatagaccgggtggcgaaactctaccggctggatacctacccgcaccagattgaagtgataacctcagaacagatgatggatgcctactccagcgtcggcatgccaattaactatccgcactggtcattcggtaaaaagtttatcgagactgaacggctgtataagcacggtcagcaaggactggcctatgaaatcgtcattaactctaacccgtgtatcgcttacctgatggaagagaacaccattaccatgcaagcgctggtgatggctcatgcctgctatgggcataactctttcttcaaaaacaattacttattccgtagctggaccgacgccagttcgattgtcgattatctgatttttgcccgtaaatatattaccgagtgcgaagagcgttatggcgttgatgaagtagaacggcttctggactcgtgccacgcgctgatgaactacggcgtggaccggtacaaacgcccgcaaaaaatctcgctgcaagaagagaaagcccggcagaaaagtcgcgaagagtatctgcaaagtcaggtcaatatgctctggcgtaccctgccgaagcgcgaggaagagaaaacggttgctgaagcgcgccgctatccgtccgaaccacaagaaaacctgctctattttatggagaaaaatgcgccactgctggaatcatggcagcgtgaaatcctgcgtattgtgcgtaaggtgagccagtatttttatccgcaaaaacagactcaggtgatgaacgaaggctgggcgaccttctggcactacaccatccttaaccatctgtatgatgaagggaaagtaacggaacgttttatgctggagtttttgcacagccacaccaatgtggtcttccagcccccctataacagcccgtggtacagcggcatcaacccgtatgccctcgggttcgccatgttccaggatattaaacggatttgtcagtcgccaacggaagaagacaaatactggttcccggatatcgccggttccgactggctggaaacgctgcatttcgcgatgcgtgatttcaaagatgagagttttatcagccagttcctgtcaccgaaagtgatgcgtgatttccgcttcttcaccgtgctggatgacgatcggcataattatctggagatttccgctattcataatgaagaaggttatcgggagatccgtaaccggttatcgtcgcaatataacttaagtaatctggagccgaatattcagatctggaacgtggatttgcgcggcgaccgttcgctgacgctgcgttatattccacataatcgcgcaccgctggatcgggggcgcaaagaagtcctgaagcatgtgcatcgcctgtggggatttgatgtgatgctcgaacagcaaaacgaagacggcagcatcgagttgctggaacgttgcccgccaagaatgggaaatctgtaa

SEQ ID NO: 6480 - DNA, 240 bp, Escherichia coli
atggatgtacagcagttttttgtcgttgccgtttttttccttatcccgatattttgtttccgcgaagcatggaaaggctggcgcgcaggcgcgattgataaacgggttaaaaatgcaccggaaccggtgtatgtctggcgagcaaaaaatcccggactctttttcgcttatatggtggcatatatcggcttcggaattttatctatcggcatgattgtttatcttattttctatcgttaa

SEQ ID NO: 6481 - DNA, 435 bp, Escherichia coli
atgcgtttaaatactctgtctccggccgaaggctccaaaaaggcgggtaaacgcctgggtcgtggtatcggttctggcctcggtaaaaccggtggtcgtggtcacaaaggtcagaagtctcgttctggcggtggcgtacgtcgcggtttcgagggtggtcagatgcctctgtaccgtcgtctgccgaaattcggcttcacttctcgtaaagcagcgattacagccgaaattcgtctgtctgacctggctaaagtagaaggcggtgtagtagacctgaacacgctgaaagcggctaacattatcggtatccagatcgagttcgcgaaagtgatcctggctggcgaagtaacgactccggtaactgttcgtggcctgcgtgttactaaaggcgctcgtgctgctatcgaagctgctggcggtaaaatcgaggaataa

SEQ ID NO: 6482 - DNA, 732 bp, Escherichia coli
atgaagatgttgcgcgatccgctgttctggctcattgctctgtttgtggcgctgattttctggctgccttacagccagccgctgtttgctgccttgttcccacaactgccacgacccgtttatcagcaagaaagttttgcagctctggcactggctcatttctggctggtgggaatttcgagtttgtttgcggtgatcattggcactggtgccggaattgctgtcactcgcccgtggggcgcggaatttcgcccactggtggaaactattgccgccgttggacagacttttccgcccgtcgcagtgctggcgatcgccgttccggtgatcggctttggtctgcaaccagcgattatcgccttgatcctttacggtgtgctgcccgtcctgcaggcgacacttgccgggctgggagcgattgatgccagcgtgacagaagttgcgaaaggtatgggaatgagtcgtggtcagcgagtgcgtaaggtcgagctaccgctggcggctccggtgattctggcgggcgtgcgaacttcggtgattatcaacattggtacggcgacgatcgcctcaacggtaggggccagcacgctgggtacgcccatcatcatcgggcttagcggatttaataccgcgtatgtgatccagggggcgttactggtggcactggcggcgatcatcgcagaccgcctgtttgaaaggctggtgcaggcgcttagccagcacgcaaaataa

SEQ ID NO: 6483 - DNA, 507 bp, Escherichia coli
gtgaactccgtcattacacaaaaagtgtcatctggcgttacactttatgcggatactaaaacaggaggttttatgaacagaacgattcttgtccctatcgatatttccgattcagaattaactcaacgcgtgattagccacgttgaggaagaggcaaagattgatgatgcagaggttcatttcctgacggtaataccttcactgccctactatgcctctctgggtttagcgtattccgcagaattaccggcaatggatgacctgaaagcggaagccaaatcgcaactggaagagatcattaaaaaatttaaactgccaaccgacagagtgcatgtccatgttgaggaaggctcgcccaaagaccgcattctggaattggcgaagaagatccccgctcatatgatcatcattgcttcccatcgaccggatatcaccacttatctgctcggttccaacgccgcagctgtagtgcgtcacgcagagtgctccgtgctggttgtgcgctga

SEQ ID NO: 6484 - DNA, 1134 bp, Escherichia coli
atgaaaagcaaagtactggcacttttaattcctgccctgctcgccgcaggtgctgcacatgcagccgaagtttataataaagacggcaacaaattagatctgtatggcaaagttgatggcctgcattatttttctgataattcagcgaaagatggcgaccagagctatgcgcgtctgggttttaaaggcgaaacccaaattaacgatcaactcactggctacggtcaatgggaatacaatattcaggcaaacaacactgaatcttcaaaaaaccagtcatggacccgtctggcatttgccgggctgaaatttgcagattacggttctttcgattacggacgtaattatggcgtaatgtacgacatcgaaggctggaccgatatgctgcctgaatttggcggtgactcttataccaatgcagacaactttatgactggtcgagccaatggcgtcgcgacttatcgtaatactgatttcttcggtctggtaaatggtctgaacttcgcggtgcagtatcaaggtaacaacgaaggagccagtaatggtcaggaaggcaccaacaacggacgtgatgttcgccatgaaaacggtgacggctggggtctttccacaacatatgatttaggcatgggctttagcgctggtgcggcatacacctcttctgaccgcaccaatgaccaggttaaccatactgcggcgggtggtgataaagcagacgcgtggactgctgggctaaaatacgatgctaacaatatttacctggcaaccatgtattcagaaacgcgtaatatgaccccgtttggcgacagcgattatgctgtggcaaacaaaacccagaattttgaagtcactgcacagtaccagtttgattttggtctgcgtccggcagtctctttcctgatgtctaaaggccgtgacctgcacgctgcgggtggtgcagacaacccggcaggtgttgatgataaagatctggttaaatacgccgatattggcgcgacttactatttcaataaaaacatgtccacctacgttgactataaaatcaacctgttggatgaagatgacagcttctacgctgccaatggcatctctaccgatgatattgtcgctttaggtctggtttatcagttctaa

SEQ ID NO: 6485 - DNA, 1179 bp, Escherichia coli
atgagtcatgatccacaaccgctgggcggcaaaatcatcagtaaaccggtcatgatttttggaccgttaatcgtcatctgtatgctcctgattgtgaagcgtctggtgttcggtctgggctctgtctctgacctgaacggcggcttcccgtggggcgtgtggatcgcgtttgacctgctgattggcaccggctttgcctgtggcggctgggcgctggcgtgggcggtatacgtctttaaccgtgggcaataccatccgctggtgcgtccggcgctgttggcgagtctgtttggttactcactgggtggcttgtcgatcactatcgacgtgggtcgctactggaacctgccgtacttctacattccgggtcacttcaacgtgaactcggtactgttcgagacggcggtctgtatgaccatctatatcggcgtgatggcactggagtttgctccggcactgtttgaacgtctggggtggaaggtgtcgctacagcgactaaacaaggtgatgttcttcatcatcgcgctcggtgcgctgctgccgaccatgcaccagtcttcaatggggtcgctgatgatctcggcgggctacaaggtgcatccgttgtggcagagctatgaaatgttgccgctgttctcgctgctgacggcgttcatcatgggcttctcgattgtcatctttgaaggttcgctggtgcaggcgggtctgcgtggcaacggtccggatgaaaagagtctgtttgttaagctgaccaacaccatcagtgtgttgctggcgattttcatcgtgctgcgctttggcgagcttatctatcgcgacaagctgtcgttagcgtttgccggtgacttctactccgtgatgttctggattgaagtcctgctgatgctcttcccgctggtcgttctgcgtgtggcgaagctgcgtaatgattcccgcatgctgttcctgtcagcactgagcgcactgttaggttgtgcaacctggcgtctgacctattcgctggtggcattcaacccgggcggcggttacgcctacttcccgacctgggaagaactgttgatttctattggttttgtggctattgagatttgcgcttacatcgtactcattcgtctactgccgatacttcctcctttaaaacaaaacgatcataatcgtcatgaggcgagcaaagcatga

SEQ ID NO: 6486 - DNA, 1704 bp, Escherichia coli
atgagccagagaattactattgatccggtaacccgtattgaggggcatttacgcatcgattgcgaaatcgaaaatggcgtcgtttcgaaagcatgggcttccggtaccatgtggcgcggcatggaagagatcgtgaaaaaccgcgatccgcgcgatgcatggatgattgtgcaacgtatctgtggcgtatgtactaccactcacgcgctgtcttccgttcgtgcggcagaaagtgcgctgaatatcgacgttccggttaacgcgcaatacatccgtaacatcattctggctgcgcacaccacgcatgaccatattgttcatttctatcagctttcggcgctggactgggtggacatcacttctgcactgcaagctgacccaaccaaagcctccgaaatgctgaaaggcgtttcgacctggcacctgaacagtccggaagagttcaccaaagttcagaacaagatcaaagatctggttgccagcggtcagttgggtattttcgctaatggctactggggtcatccggcgatgaaactgccgccggaagtgaacctgattgcggtagcgcactacctgcaagcgttggagtgccagcgtgacgctaaccgcgtcgtggcgctgctgggcggtaaaacgccgcacattcagaacctggcggtaggtggtgtcgcgaacccgatcaacctcgacggtttgggcgtgctgaaccttgagcgcctgatgtacatcaagtctttcatcgacaaactgagcgactttgttgagcaggtttataaggttgataccgcagttattgccgcgttctacccggaatggctgacacgcggtaaaggtgcggtgaactacctgagcgtgccggaattcccgaccgacagtaaaaacggcagcttcctgttcccgggcggctacattgagaatgcggatctgtcctcgtatcgtccgatcacttctcattccgatgaatacctgatcaaaggcattcaggaaagcgcgaagcactcctggtataaagacgaagcgccgcaggcaccgtgggaaggcaccaccattccggcttatgatggttggtctgacgacgggaaatattcctgggtgaaatcaccgactttctacggcaaaacggtagaagtggggccactggctaatatgctggtgaaactggcggcaggtcgcgaatctacccagaacaaactgaatgaaatcgttgcgatttatcagaaactgactggcaacacgctggaagtggcacagctgcactccacgctgggccgtattattggtcgtaccgttcactgctgtgaattgcaggatatcctgcaaaaccaatacagtgcactgatcaccaatatcggcaaaggcgatcacaccacctttgtgaagccgaacattccggcaacgggtgaattcaaaggtgttggcttcctcgaagcgccgcgcggtatgctctctcactggatggttattaaagacggtatcatcagcaactaccaggcggttgttccatcaacctggaactctggtccgcgtaacttcaatgatgacgtcggtccttacgagcagtcgctggtgggtacaccggttgccgatccgaataaaccgctggaagtggtgcgtaccattcactcctttgacccgtgcatggcctgtgcggtacacgtagtggatgctgacggcaacgaagtggtttcagtgaaggttctgtaa

SEQ ID NO: 6487 - DNA, 1278 bp, Escherichia coli
ttgttgaggctccctaatatttactttaagggctatattagaataacacaggaaacaaatatggcaacagcatggtataaacaagttaatccaccacaacggaaagctcttttttccgcatggcttggatatgtatttgatggctttgattttatgatgatattttacattcttcatattataaaagcagatcttggcattacggatattcaggctactttaatagggacagtggccttcatagccagacctattggaggtggtttttttggtgccatggctgataaatatggtcgtaagccaatgatgatgtgggcaattttcatttactcagtcggaacaggccttagcggtattgctacaaacttatatatgctcgcagtttgccgttttattgttggcttagggatgtctggtgaatatgcatgtgcttcaacttatgcggtagaaagttggcctaaaaatcttcaatctaaagctagtgcttttttggtaagtggtttttctgttggaaatattattgcggcacaaataatccctcagtttgctgaagtatatggatggagaaactctttttttataggcctgttaccagttttactagttctttggatcagaaaaagtgctccagaaagtcaggagtggattgaagataaatataaggataaatcaacatttttgtctgtcttcagaaaaccacatctttcaatctctatgatcgttttcctcgtctgtttttgtctatttggtgcaaactggccgataaacggactacttccttcctacctggcagataatggagttaatacagtggtcatttcaactctgatgacaatagcaggtttaggaacactgacaggtacaatattttttggttttgttggtgataagattggtgtaaaaaaagcctttgtagtcggtctaataacttcatttattttcctttgtcctcttttttttatttctgtgaaaaactcttctcttataggattatgtctctttggattaatgtttacaaatttaggtattgcagggttggttccaaaatttatatatgattactttccaacaaaattaagaggattagggaccggtcttatttataacttaggggcaactggaggaatggccgcacctgtattagctacatacatttcaggatattatggcttaggtgtttcattattcattgttacggttgcattctctgccttattaattttgttagttggttttgatattccaggtaaaatttataaactatccgtggctaaatga

SEQ ID NO: 6488 - DNA, 1704 bp, Escherichia coli
atggcttttgtatcagaaagagaaattgtaagaaagatatttagcaaaaaaattgactttacgatcttggcatttttctatatttcctctattttttttcttctttgtagtggcgttctctttcaatattttaccgctgccttcacaaaaggtaattgttatgaatgctcaatgaaacttgattacataaaacaattttatttttcactggaaaccgcatggtacctcatatctgctgttgcagtatttattgcatctgtttttatacagcatagaattaaagcttatttaacattattagctattacatggattgtactaacaataacagatgtggcgttaatacacgccttagacaatatagccatgaataatattttgttaaatatactatataatctttttggggcgattttattgtcactgtttatgtgtttatcaaattccctccttttccaccttaataagataaaacatattccaatgattttatcggcaatgattccattagtttccgcaataataatagccatactcataaccgctgttatatatttattgtttgcccggcaggcggtagagattgagatggatatatctgaaggttcagacatcgcatatgtaggtgtaaaagataatgaggaatcatttgggtttttaaatgataaaaaaacagacacaccaacgtatctggatgtaatcaaaaatggtagtttgatatataatgatacacagggtttaagtggtgctgatatttatattgtctccggttgttatgcccttccagatttacttcgcaatgtaccgcttgatgctaaaaaatcttttctgaatgtaaaaaagctagaaatcacacagaaacttccaatgatggggttcatacaaggtgaatccgctgatgtgatgcctaaagcagcatccaggttaagtttgagcaagcaagatgataaatttatgctagcctcaagtgttactgactctcaaataaaatttaaatcaaacaatgcacaattgatggttgctttcgcatttatgccaataacaacgaatggtattttacatgattatacatacgatataataataaatgataaaaaatataaaattgaaaatcatgttgcacctctatctaggcttgataaaaataagaagatgaagtgtgaataccagcaaatatcggatttaacaaatacgtataacattaatgcaaattacttaacgggttttttacttgtcctaaaaccagatgatattattaattacaacaatagcccttccgtactactcaagactgattttgcgttctataaaaaaacataccagaagcttgataaaatatatgatgacataagcaatggaaaattatcttcactgagagcaacaggtatctcccagtttagtatcaacgggaaacatttgtcgttaaggccagaatcggagattattatttctgaagggagtttgtatggactagttaataaaagcaaaaaaatcaaaatatatggcacagcagatcttgtttttgttgataacaagataatgaaccttcgtaaaataacttatttgcaatctaagctagaaatttttggttcttctattatggatatattaaagtatatatttggtttaggtctgctagcaatttctataaaattcattcattcttactttaagaatgatgtgaatgaaaatttattcttgtaa

SEQ ID NO: 6489 - DNA, 249 bp, Escherichia coli
atggtaactattcgtttagcacgtcacggcgctaaaaagcgtccgttctaccaggttgttgtcgctgacagccgtaatgcacgcaacggtcgcttcatcgagcgcgttggtttcttcaacccaatcgctagcgaaaaagaagaaggcactcgcctggatctggatcgcatcgctcactgggttggccagggcgcaactatttctgatcgcgttgctgcgctgatcaaagaagtaaacaaagcagcttaa

SEQ ID NO: 6490 - DNA, 879 bp, Escherichia coli
atgaaactgggatttattggcttaggcattatgggtacaccgatggccattaatctggcgcgtgccggtcatcaattacatgtcacgaccattggaccggttgctgatgaattactgtcactgggtgccgtcagtgttgaaactgctcgccaggtaacggaagcatcggacatcatttttattatggtgccggacacacctcaggttgaagaagttctgttcggtgaaaatggttgtaccaaagcctcgctgaagggcaaaaccattgttgatatgagctccatttccccgattgaaactaagcgtttcgctcgtcaggtgaatgaactgggcggcgattatctcgatgcgccagtctccggcggtgaaatcggtgcgcgtgaagggacgttgtcgattatggttggcggtgatgaagcggtatttgaacgtgttaaaccgctgtttgaactgctcggtaaaaatatcaccctcgtgggcggtaacggcgatggtcaaacctgcaaagtggcaaatcagattatcgtggcgctcaatattgaagcggtttctgaagccctgctatttgcttcaaaagccggtgcggacccggtacgtgtgcgccaggcgctgatgggcggctttgcttcctcacgtattctggaagttcatggcgagcgtatgattaaacgcacctttaatccgggcttcaaaatcgctctgcaccagaaagatctcaacctggcactgcaaagtgcgaaagcacttgcgctgaacctgccaaacactgcgacctgccaggagttatttaatacctgtgcggcaaacggtggcagccagttggatcactctgcgttagtgcaggcgctggaattaatggctaaccataaactggcctga

SEQ ID NO: 6491 - DNA, 279 bp, Escherichia coli
atgaatcggccagcaatattaaaaaagaaagcagccaaagatgttgcttcagtattaaaaataatatttttattttatttgttcctcatagctagattaaaacaacgttattcgatacgtgaaattaagagggatttatggaacatcagagaaaactattccagcaacgcggctatagcgaagatctattgccgaaaacgcaaagccagcggacctggaaaacatttaactattttaccttatggatgggttcggttcataacgttcccaattatgtga

SEQ ID NO: 6492 - DNA, 762 bp, Escherichia coli
atgaggatttgcagcgaccaaccttgtattgttttattgactgaaaaagatgtctggataagggtgaatgggaaagaacctattagccttaaagctaaccatatggcgttattaaattgtgaaaataatattatcgacgtctcctctcttaacaacactttggttgctcatattagtcacgacatcatcaaagattacctccggtttctgaataaagatctctcgcaaataccagtatggcaacgtagcgctacgcccatactcaccctgccatgcctgacgccagacgtctttcgcgttgccgcgcaacacagcatgatgcccgcagaaactgagtcagaaaaggaacgaacacgcgcattattattcacggtgctatcccgttttctcgacagtaaaaaattcgtttcattaatgatgtatatgttacgtaattgtgtaagtgacagcgtttatcaaattattgaaagcgatattcacaaagactggaatcttagtatggtagccagttgtttatgtcttagcccaagtctgttaaagaaaaagttgaaaagcgaaaacaccagttatagccaaataatcaccacctgccgcatgcgttatgccgtaaatgaattaatgatggacggtaaaaatatctctcaggtatcacagtcctgcggctacaacagtacgtcgtactttatttctgtctttaaagacttctacggtatgacgccgctgcattatgttagtcagcacagagaacgcactgtcgcctga

SEQ ID NO: 6493 - DNA, 306 bp, Escherichia coli
atggctaagcaatcaatgaaagcacgcgaagtaaaacgcgtagctttagctgataaatacttcgcgaaacgcgctgaactgaaagcgatcatctctgatgtgaacgcttccgacgaagatcgttggaacgctgttctcaagctgcagactctgccgcgtgattccagcccgtctcgtcagcgtaaccgctgccgtcaaacaggtcgtccgcatggtttcctgcggaagttcgggttgagccgtattaaggtccgtgaagccgctatgcgcggtgaaatcccgggtctgaaaaaggctagctggtaa

SEQ ID NO: 6494 - DNA, 540 bp, Escherichia coli
atggcgaaactgcatgattactacaaagacgaagtagttaaaaaactcatgactgagtttaactacaattctgtcatgcaagtccctcgggtcgagaagatcaccctgaacatgggtgttggtgaagcgatcgctgacaaaaaactgctggataacgcagcagcagacctggcagcaatctccggtcaaaaaccgctgatcaccaaagcacgcaaatctgttgcaggcttcaaaatccgtcagggctatccgatcggctgtaaagtaactctgcgtggcgaacgcatgtgggagttctttgagcgcctgatcactattgctgtacctcgtatccgtgacttccgtggcctgtccgctaagtctttcgacggtcgtggtaactacagcatgggtgtccgtgagcagatcatcttcccagaaatcgactacgataaagtcgaccgcgttcgtggtttggatattaccattaccactactgcgaaatctgacgaagaaggccgcgctctgctggctgcctttgacttcccgttccgcaagtaa

SEQ ID NO: 6495 - DNA, 384 bp, Escherichia coli
atgcgccatcgtaagagtggtcgtcaactgaaccgcaacagcagccatcgccaggctatgttccgcaatatggcaggttcactggttcgtcatgaaatcatcaagacgactctgcctaaagcgaaagagctgcgccgcgtagttgagccgctgattactcttgccaagactgatagcgttgctaatcgtcgtctggcattcgcccgtactcgtgataacgagatcgtggcaaaactgtttaacgaactgggcccgcgtttcgcgagccgtgccggtggttacactcgtattctgaagtgtggcttccgtgcaggcgacaacgcgccgatggcttacatcgagctggttgatcgttcagagaaagcagaagctgctgcagagtaa

SEQ ID NO: 6496 - DNA, 417 bp, Escherichia coli
gtgattgcgtttgaagtgttgaagtgggcaggcgcggcttacttgatttggctgggaatccagcagtggcgcgccgctggtgcaattgaccttaaatcgctggcctctactcaatcgcgtcgacatttgttccagcgcgcagtttttgtgaatctcaccaatcccaaaagtattgtgtttctggcggcgctatttccgcaattcatcatgccgcaacagccgcaactgatgcagtatatcgtgctcggcgtcaccactattgtggtcgatattattgtgatgatcggttacgccacccttgctcaacggattgctctatggattaaaggaccaaagcagatgaaggcgctgaataagattttcggctcgttgtttatgctggtgggagcgctgttagcatcggcgaggcatgcgtga

SEQ ID NO: 6497 - DNA, 3078 bp, Escherichia coli
gtgaagttttttgccctcttcatttaccgcccggtggcgacgattttactgtcggttgccattaccctgtgcggcatactgggcttccgtatgctgccggtcgccccgctgccgcaggtcgattttccggtgattatcgtcagcgcctcgctgcccggtgcgtcaccagaaacaatggcgtcttccgttgccacgccgctggagcgctcacttgggcgcattgccggagtcagtgaaatgacctccagcagttcgctcggcagcacgcgtattattttgcagtttgattttgaccgggatatcaacggcgcagcgcgtgatgtgcaggcggcgatcaacgctgcacaaagtttgctgcccagtgggatgcccagccgcccgacctatcgcaaagcgaacccgtcggatgcgccaattatgatcctcacgctgacgtccgatacttattcgcagggtgaactgtacgatttcgcctcgacgcagctggctccgacgatttcgcaaatcgacggtgttggtgatgtcgatgtcggaggcagctcactgcccgccgtacgcgtcgggctgaatccgcaggcgctgtttaatcagggcgtgtcgctggacgacgtacgcaccgccgtcagcaatgccaacgtgcgtaaaccgcagggcgcgctggaagatggcactcaccgctggcagatccagaccaatgatgagctaaaaaccgccgctgaatatcagccgttgattattcactacaacaacggcggcgcggttcgtctgggcgatgtggcgacggtgaccgactcagtgcaggatgtgcgcaacgccgggatgaccaacgccaaaccggctattttactgatgatccgcaaactgccggaagccaatattatccagacggttgacagcatccgggcaaaattaccggagttgcaggaaaccattccggcggcgattgatctgcaaattgcccaggatcgctcccccaccattcgcgcctcgctggaagaagtcgagcaaacgctgattatctcggtggcgctggtgattctggtggtgtttttattcctgcgctcgggtcgcgccactattattcccgccgtttcggtgccggtttcgctgattggtacgtttgcggcgatgtacctgtgcggattcagtctcaataacctttcgttaatggcgctcaccatcgctactggtttcgtggtggatgacgccatcgtggtgctggaaaacattgcacgtcatctggaagcgggaatgaaaccgttgcaagccgcactgcaaggtactcgcgaagtcggttttacggtgctgtcgatgagtctgtcactggtggcggtgttcctgccgctgctgttgatgggcggattgccgggccgactgttacgcgaatttgccgtgacgctttctgtcgccattggtatatcgttgctggtttctctgacattaacgccaatgatgtgtggctggatgctgaaagccagcaagccgcgcgagcaaaagcgactgcgtggttttggtcgcatgttggtagccctgcaacaaggctacggcaagtcactaaaatgggtgctcaatcatacccgtctggtgggcgtggtgctgcttggcaccattgcgctgaatatctggctgtatatctcgatcccgaaaaccttcttcccggagcaggacactggcgtgttgatgggcgggattcaggcggatcagagtatttcgtttcaggcgatgcgcggtaagttgcaggatttcatgaaaattatccgtgacgatccggcagtggataatgtcaccggctttacaggcggttcgcgagtgaacagcgggatgatgtttatcaccctcaagccacgcgacgaacgcagcgaaacggcgcagcaaattatcgaccgtctgcgcgtaaaactggcgaaagaaccgggggcgaatctgttcctgatggcggtacaggatattcgcgttggtgggcgtcagtcgaacgccagctaccagtacacgttgttatccgacgacctggcggcactgcgagaatgggagccgaaaatccgcaaaaaactggcgacgttgccggaactggcggacgtgaactccgatcagcaggataacggcgcggagatgaatctggtttacgaccgcgacaccatggcacggctgggaatcgacgtacaagccgccaacagtctgttaaataacgccttcggtcagcggcaaatctcgaccatttaccagccgatgaaccagtataaagtggtgatggaagtggatccgcgctatacccaggacatcagtgcgctggaaaaaatgttcgttatcaataacgaaggcaaagcgatcccgctgtcgtatttcgctaaatggcaaccggcgaatgccccactatcggtgaatcatcagggattatcggcggcctcgaccatttcgtttaacctgccgaccggaaaatcgctctcggacgccagtgcggcgatcgatcgcgcaatgacccagcttggtgtgccttcgacggtgcgcggcagttttgccggcacggcgcaggtgttccaggagacgatgaactcgcaggtgatcctgattatcgccgccatcgccacggtgtatatcgtgctgggtatcctttacgagagttacgtacatccgctgacgattctctccaccctgccctcggcgggcgttggagcgctgttggcgctggagctgttcaatgccccgttcagcctaatcgccctgatagggatcatgctattaatcggcatcgtgaagaaaaacgccattatgatggtcgattttgcgcttgaagcccaacggcacggtaacctgacgccgcaggaagctattttccaggcctgtctgctgcgttttcgcccgattatgatgactaccctggcggcgctgtttggtgcgctgccgctggtattgtcgggcggcgacggctcggagctgcggcaacccctggggatcaccattgtcggcggactggtaatgagccagctccttacgctgtataccacgccggtggtgtatctctttttcgaccgtctgcggctgcgtttttcgcgtaaacctaaacaaacggtaaccgagtaa

SEQ ID NO: 6498 - DNA, 1032 bp, Escherichia coli
atgcaagtgaaaacacagtcctgcgttgttgcgggcaagaaaactgttgccgttaccgagcagacgatagattggaataataatggaacattagtacaaataacccgaggtggaatttgcggttccgatttacattattatcaggaaggaaaagtaggtaatttcatgataaaggcaccgatggtgttaggtcatgaagttatcggtaaagttattcatagcgactcatcagaattacatgaagggcaaacggtagccattaatccgtctaaaccgtgcggtcactgcaaatactgcattgaacataacgagaatcagtgtacagatatgcgtttttttggcagtgccatgtatttccctcatgttgatggtggttttacccgttataaaatggtcgaaacgtcgcaatgtgtcccttatccggccaaagctgacgaaaaggttatggcttttgccgaacctttagccgtcgcgattcatgccgcacatcaggccggcgagttacagggcaagcgagtatttatttccggtgttggacccattggctgcctgattgtcagtgcagtgaaaacactgggggccgcggaaattgtctgtgctgatgtgagtccccgttccctttcgctgggcaaagagatgggggcggatgtgctcgtaaacccacaaaacgacgacatggatcactggaaagcggaaaaaggctatttcgatgtcagctttgaagtgtccggtcatccttcatcagtgaatacctgtctggaggtcactcgtgcacgcggcgtaatggtgcaggtaggtatgggaggcgcgatggcagaattcccaatgatgacgttgattggtaaggagatttcactcagaggctctttccgttttaccagcgaatttaataccgcagtgtcatggctggcgaatggcgttatcaatccactgcctttactgagtgctgaatatcccttcactgacctggaagaggcgctacgtttcgccggtgataaaacccaggcagcaaaagtccagcttgttttctaa

SEQ ID NO: 6499 - DNA, 1485 bp, Escherichia coli
gtggtcgcaatccatcttttgccggttagttacaattctgcgacatccaccgtgaatatcagtgctagaatcatacccctgttgattattcaccaaagatataaaattcctatgccaaaagttcaggccgacggcctgccattgccccagcgatacggtgcgatattaaccattgtgattggtatttcgatggccgtccttgacggcgcaatcgccaacgtcgccctgccaacaatcgccacggaccttcatgccacgccagccagttccatctgggtagtgaacgcctatcaaatcgccattgtcatctccctgctctcgttttcgtttctgggcgatatgtttggctatcgacgtatttataaatgcggtctggtcgtttttctgttgtcttcactgttctgcgccctttctgattcgctgcaaatgctcacccttgcgcgtgtcatacaaggtttcggcggtgcagcgttgatgagcgttaataccgcacttatccgcctgatctatccacaacgttttctgggtagagggatgggcataaactcgtttattgttgccgtctcttctgctgccgggccgacaattgctgcagcaatcctctccatcgcatcctggaaatggttatttttaatcaacgtaccgttaggtattatcgccctgcttctggcgatgcgttttctgccacccaatggttctcgcgccagtaaaccccgtttcgacctgcccagcgccgtgatgaacgcgttaaccttcggcctgcttatcactgcgttgagtggtttcgctcaggggcaatcgctgacgttaattgctgcggaactggtggtaatggttgttgttggtattttctttattcgccgccagctttctcttcccgtaccgctgctaccggtggatttactgcgtatcccgctgttttcactttctatttgcacatctgtttgctctttctgcgcacaaatgctggcaatggtttccctgcccttttacctgcaaaccgtgctcgggcgtagtgaagtcgaaacaggtttacttctgacaccgtggccgttagcaacgatggtgatggctccgctggcaggctatttgattgaacgcgtacatgcaggattgctgggggctttagggttgttcatcatggctgcggggcttttttccctggttctgctgcccgcgtcacctgcggatatcaatattatctggccgatgatcttatgtggtgctggatttggcttattccagtcacccaataaccacaccattattacctccgcgcctcgcgaacgtagcggtggagccagtggcatgttaggaacggctcgtctactgggtcagagtagcggcgcggcgctggtggcgctgatgctaaatcagtttggagataatggtacacacgtctcgctgatggctgcggctattctggcagtgattgctgcctgtgtcagtggtttacgtatcactcagccacgatccagggcataa

SEQ ID NO: 6500 - DNA, 1395 bp, Escherichia coli
atgagtgcggggaaattgccggaggggtgggttatcgccccagtatctacggtcacaactctaatccgaggagtaacgtataaaaaagagcaggcaataaattatctaaaagatgattatttgcctcttatccgtgcgaacaatattcagaatggcaagtttgatactacggacttggtttttgttcctaaaaatcttgttaaagaaagtcaaaaaatatctcctgaagatattgttattgcaatgtcatcagggagcaaatccgtagttggtaaatccgcacatcagcatctaccatttgaatgtagtttcggcgcattttgcggtgtattacgtcctgaaaaacttatattttctggttttattgctcatttcacaaaatcttctctttatcgaaacaaaatttcatcactttctgctggtgcaaatattaataatattaagccggcaagctttgatttgataaatataccaatcccaccacttgccgaacaaaaaatcatcgctgaaaaactcgatacgctgctggcgcaggtagacagcaccaaagcacgttttgagcaaatcccacaaatcctgaaacgttttcgtcaagcggtattggggggcgcagttaatggaaaattgacagaaaaatggcgtaattttgagccgcaacattctgtatttaagaagttaaattttgaatctatcttaactgaattacgtaatggtctttcatcaaagccaaatgaaagtggtgttggtcatccaatactacgcattagttctgtacgtgctggccatgtagatcaaaacgatattcggtttctagaatgttcagaaagtgaactaaaccgccacaaattacaagatggagatcttttatttactcgctataacggaagtttagaatttgttggtgtttgtgggttattgaaaaaattacaacatcaaaatttgctatatcctgataaacttattcgagctcgattaaccaaagatgctttaccagaatatatcgaaatatttttttcatccccctcagcacgaaatgcaatgatgaactgcgtgaaaacaacttctggtcaaaaaggtatttcaggaaaagatatcaaatcccaagttgttttattacctccagtaaaagaacaagccgaaatcgttcgccgcgtcgagcaactcttcgcctacgccgacaccatagaaaaacaggtcaacaacgccttagcccgcgtcaacaacctgacgcaatccatcctggcaaaagcgttccgtggtgaacttaccgcccagtggcgggccgaaaacccggatttgatcagcggagaaaacagcgccgccgcgttgctggaaaaaatcaaagctgaacgcgcagctagcgggggtaaaaaagcctcacgtaaaaaatcctga

SEQ ID NO: 6501 - DNA, 279 bp, Escherichia coli
atgccacgttctctcaagaaaggtccttttattgacctgcacttgctgaagaaggtagagaaagcggtggaaagcggagacaagaagcccctgcgcacttggtcccgtcgttcaacgatctttcctaacatgatcggtttgaccatcgctgtccataatggtcgtcagcacgttccggtatttgtaaccgacgaaatggttggtcacaaactgggtgaattcgcaccgactcgtacttatcgcggccacgctgctgataaaaaagcgaagaagaaataa

SEQ ID NO: 6502 - DNA, 1764 bp, Escherichia coli
atgcagtggcaaactaaactcccgctgatcgccattttgcgcggtattacgcccgacgaggcgctggcgcatgttggcgcggtgattgacgccgggttcgacgcggttgaaatcccgctgaattccccacaatgggagcaaagcattcccgccatcgttgatgcgtacggcgacaaggcgttgattggcgcaggtacggtactgaaacctgaacaggtcgatgcgctcgccaggatgggctgtcagctcatcgttacgcccaatatccatagtgaagtgatccgccgtgcggtgggctacggcatgaccgtctgccccggctgcgcgacggcgaccgaagcctttaccgcgctcgaagcgggcgccgcaggcgctgaaaatatttccgtcatcggcttttggtccgcaatacatcaaagcgttaaaagcggtattgccatcggacatcgcagtctttgccgttggcggcgtgacgcagaaaacctggcgcagtggatagacgcaggttgtgcaggggcgggcttaggcagcgatctctatcgcgccgggcaatccgtagagcgcaccgcgcagcaggcagcagcatttgttaaggcgtatcgagaggcaggtgcaatgaaaatcaccaaaattaccacgtatcgtttacctccccgctggatgttcctgaaaattgaaaccgatgaaggcgtggtcggttggggcgagcccgtgatcgaaggccgcgcccgtacggtggaagcggcagttcacgagctgggtgactatttgattggtcaggatccatcgcgcatcaatgacttatggcaagtgatgtatcgcgccggattctatcgcggcggtccgatcctgatgagcgccatcgccgggattgaccaggcgttatgggatatcaaaggtaaagtgctgaatgcgccggtctggcaactgatgggcggcctggttcgcgacaaaattaaagcctacagttgggttggcggcgatcgtccggcggatgttatcgacggcattaaaacgctacgcgaaatcggcttcgataccttcaaactgaacggttgtgaagaactggggctaattgataactcccgcgcggtagatgcggcggttaacaccgtggcacaaattcgtgaagcttttggcaatcagattgagtttggtcttgatttccacggtcgcgtcagcgcgccgatggcgaaagtgctgattaaagaactggagccgtatcgcccgctgtttattgaggagccggtgctggcggaacaagccgaatactacccgaaactggcggcacaaacgcatattccactggcggcgggtgaacgcatgttctcacgcttcgattttaaacgcgtgctggaggcaggtggtatttcgattctgcaaccggatctctcccacgcgggcggtattaccgaatgctacaaaatcgccggaatggcagaagcctatgacgtgacccttgcgccgcactgtccgctcggaccgattgcactggcggcttgcctgcatatcgactttgtttcctataacgccgtacttcaggaacaaagtatgggaattcattacaacaaaggcgcggagttactcgactttgtgaaaaacaaagaagacttcagcatggtcggcggcttctttaaaccgttaacgaaaccgggcttaggcgtggaaatcgacgaagctaaagtgattgagttcagtaaaaatgccccggactggcgtaatccgctctggcgtcatgaagataacagcgtagcagagtggtaa

SEQ ID NO: 6503 - DNA, 141 bp, Escherichia coli
atgaaacgcacttttcaaccgtctgtactgaagcgcaaccgttctcacggcttccgtgctcgtatggctactaaaaatggtcgtcaggttctggcacgtcgtcgtgctaaaggccgcgctcgtctgaccgtttctaagtaa

SEQ ID NO: 6504 - DNA, 360 bp, Escherichia coli
gtggttaagctcgcatttcccagggagttacgcttgttaactcccagtcaattcacattcgtcttccagcagccacaacgggctggcacgccgcaaattaccattctcggccgcctgaattcgctggggcatccccgtatcggtcttacagtcgccaagaaaaacgttcgacgcgcccatgaacgcaatcggattaaacgtctgacgcgtgaaagcttccgtctgcgccaacatgaactcccggctatggatttcgtggtggtggcgaaaaaaggggttgccgacctcgataaccgtgctctctcggaagcgttggaaaaattatggcgccgccactgtcgcctggctcgcgggtcctga

SEQ ID NO: 6505 - DNA, 1776 bp, Escherichia coli
gtgatcgaaaaattgcgtaatatcgccatcatcgcgcacgtagaccatggtaaaaccaccctggtagacaagctgctccaacaatccggtacgttcgactctcgtgccgaaacccaagagcgcgtgatggactccaacgatttggagaaagagcgtgggattaccatcctcgcgaaaaacaccgctatcaaatggaatgattaccgtatcaacatcgttgataccccggggcacgccgacttcggtggtgaagttgaacgtgtaatgtccatggtagactcagtgctgctggtggttgacgcatttgacggcccgatgccgcaaacgcgcttcgtaaccaaaaaagcgtttgcttacggcctgaagccgattgttgttatcaacaaagttgaccgccctggcgcgcgtcctgattgggttgtggatcaggtattcgatctgttcgttaacctcgacgcgaccgacgagcagctggacttcccgatcgtttacgcttctgcgctgaacggtatcgcgggtctggaccacgaagatatggcggaagacatgaccccgctgtaccaggcgattgttgaccacgttcctgcgccggacgttgaccttgacggtccgttccagatgcagatttctcagctcgattacaacagctatgttggcgttatcggcattggccgcatcaagcgcggtaaagtgaagccgaaccagcaggtcactatcatcgatagcgaaggcaaaacccgcaacgcgaaagtcggtaaagtgctgggccacctcggtctggaacgtatcgaaaccgatctggcggaagctggcgatatcgttgcgatcacgggccttggcgaactgaacatttctgacaccgtttgcgacacgcaaaacgttgaagcgctgccggcactctccgttgatgagccgaccgtttctatgttcttctgcgttaacacctcgccgttctgcggtaaagaaggtaagttcgtaacgtctcgtcagatcctggatcgtctgaacaaagaactggtacacaacgttgcgctgcgcgtagaagaaaccgaagacgccgatgcgttccgcgtttctggtcgtggcgaactgcacctgtctgttctgatcgaaaacatgcgtcgtgaaggtttcgaactggcggtatcccgtccgaaagttatcttccgtgaaatcgacggtcgtaaacaagagccgtatgaaaacgtgactctggacgttgaagaacagcatcagggttctgtaatgcaggcgctgggcgaacgtaaaggcgacctgaaaaacatgaatccagacggtaaaggccgcgtacgtctcgactacgtgatcccaagccgtggtctgattggcttccgttctgagttcatgaccatgacttccggtactggtctgctgtactccaccttcagccactacgacgacgtacgtccgggtgaagtgggtcagcgtcagaacggcgtactgatctctaacggtcagggtaaagcggtcgcgttcgcgctgttcggtctgcaggatcgcggtaagctgttcctcggtcacggtgcagaagtttacgaaggtcagattatcggtattcatagccgctctaacgacctgactgtaaactgcctgaccggtaagaaactgaccaacatgcgtgcttccggtactgacgaagccgttgttctggttccgcctatccgcatgactctggaacaagctctggagttcatcgatgatgacgaactggtagaagtgactccgacctctatccgtattcgtaaacgtcactga

SEQ ID NO: 6506 - DNA, 990 bp, Escherichia coli
atgcagggttctgtgacagagtttctaaaaccgcgcctggttgatatcgagcaagtgagttcgacgcacgccaaggtgacccttgagcctttagagcgtggctttggccatactctgggtaacgcactgcgccgtattctgctctcatcgatgccgggttgcgcggtgaccgaggttgagattgatggtgtactacatgagtacagcaccaaagaaggcgttcaggaagatatcctggaaatcctgctcaacctgaaagggctggcggtgagagttcagggcaaagatgaagttattcttaccttgaataaatctggcattggccctgtgactgcagccgatatcacccacgacggtgatgtcgaaatcgtcaagccgcagcacgtgatctgccacctgaccgatgagaacgcgtctattagcatgcgtatcaaagttcagcgcggtcgtggttatgtgccggcttctacccgaattcattcggaagaagatgagcgcccaatcggccgtctgctggtcgacgcatgctacagccctgtggagcgtattgcctacaatgttgaagcagcgcgtgtagaacagcgtaccgacctggacaagctggtcatcgaaatggaaaccaacggcacaatcgatcctgaagaggcgattcgtcgtgcggcaaccattctggctgaacaactggaagctttcgttgacttacgtgatgtacgtcagcctgaagtgaaagaagagaaaccagagttcgatccgatcctgctgcgccctgttgacgatctggaattgactgtccgctctgctaactgccttaaagcagaagctatccactatatcggtgatctggtacagcgtaccgaggttgagctccttaaaacgcctaaccttggtaaaaaatctcttactgagattaaagacgtgctggcttcccgtggactgtctctgggcatgcgcctggaaaactggccaccggcaagcatcgctgacgagtaa

SEQ ID NO: 6507 - DNA, 405 bp, Escherichia coli
atgttcatgacctgggaatatgcgctaattgggttagtcgtcggcatcattattggtgctgtggccatgcgttttggtaatcgtaaactacgccagcaacaggcgttgcagtacgaactggaaaagaataaagctgaactggacgagtatcgcgaagagctggttagccactttgcccgcagcgcggaattactggataccatggcgcacgactatcgccagctgtatcagcacatggcaaaaagctccagcagcctgctgccggaactgtctgctgaagcaaacccgttccgtaatcgtctggcagagtctgaagccagcaacgatcaggcaccggtgcagatgcctcgcgactattctgaaggcgcatccggcctgctgcgtactggcgcgaagcgcgactaa

SEQ ID NO: 6508 - DNA, 261 bp, Escherichia coli
ttgtcacttaagcgtatggtcaacctgacaacccggtgtcctcaatggggaaggaataaccccgccatacttaccgccgcgccatttcgcggagtgccacaaccggaagcgcacgttcgaagaaatctaacgacaagccttctaagggaaagagcttcgccgtacgctttcgcgttatgcactgacttttcagggaaatatcctttcagtaaactgtcagtaccggattcttatccgtgtccggcgcacgaccacacgtga

SEQ ID NO: 6509 - DNA, 3483 bp, Escherichia coli
atgtctgaaccacgtttcgtacacctgcgggtgcacagcgactactcgatgatcgatggcctggccaaaaccgcaccgttggtaaaaaaggcggcggcgttgggtatgccagcactggcgatcaccgatttcaccaacctttgtggtctggtgaagttctacggagcgggacatggcgcagggattaagcctatcgtcggggcagattttaacgtccagtgcgacctgctgggtgatgagttaacccacctgacggtactggcggcgaacaataccggctatcagaatctgacgttgctgatctcaaaagcgtatcagcgcgggtacggtgccgccgggccgatcatcgatcgcgactggcttatcgaattaaacgaagggttgatccttctttccggcggacgcatgggcgacgtcggacgcagtcttttgcgtggtaacagcgcgctggtagatgagtgtgtcgcgttttatgaagaacacttcccggatcgctattttctcgagctgatccgcaccggcaggccggatgaagaaagctatctgcacgcggcggtggaactggcggaagcgcgcggtttgcccgtcgtggcgaccaacgacgtgcgctttatcgacagcagcgactttgacgcacacgaaatccgcgtcgcgatccacgacggctttaccctcgacgatcctaaacgcccgcgtaactattcgccgcagcaatatatgcgtagcgaagaggagatgtgtgagctgtttgccgacatccccgaagcccttgccaacaccgttgagatcgccaaacgctgtaacgtaaccgtgcgtcttggtgaatacttcctgccgcagttcccgaccggggacatgagcaccgaagattatctggtcaagcgtgcaaaagagggcctggaagagcgtctggcctttttattccctgatgaggaagaacgtcttaagcgccgcccggaatatgacgaacgtctggagactgaacttcaggttatcaaccagatgggcttcccgggctacttcctcatcgttatggaatttatccagtggtcgaaagataacggcgtaccggtagggccaggccgtggctccggtgcgggttcactggtggcctacgcgctgaaaatcaccgacctcgatccgctggaatttgacctgctgttcgaacgtttccttaacccggaacgtgtctccatgcctgacttcgacgttgacttctgtatggagaaacgcgatcaggttatcgagcacgtagcggacatgtacggtcgtgatgcggtatcgcagatcatcaccttcggtacaatggcggcgaaagcggtgatccgcgacgtaggccgcgtgctggggcatccgtacggctttgtcgatcgtatctcgaaactgatcccgcccgatccggggatgacgctggcgaaagcgtttgaagccgagccgcagctgccggaaatctacgaagcggatgaagaagttaaggcgctgatcgacatggcgcgcaaactggaaggggtcacccgtaacgccggtaagcacgccggtggggtggttatcgcgccgaccaaaattaccgattttgcgccgctttactgcgatgaagagggcaaacatccggtcacccagtttgataaaagcgacgttgaatacgccggactggtgaagttcgacttccttggtttgcgtacgctcaccatcatcaactgggcgctggagatgatcaacaagcggcgggcgaagaatggcgagccgccgctggatatcgctgcgatcccgctggatgataagaaaagcttcgacatgctgcaacgctcggaaaccacggcggtattccagcttgaatcgcgcggcatgaaggacctgatcaagcgtctacaacctgactgcttcgaagatatgatcgccctagtggcactgttccgccccggtccgttgcaatcagggatggtggataactttatcgaccgtaaacatggtcgtgaagagatctcctatccggacgtacagtggcagcatgaaagcctgaaaccggtactggagccaacctacggcattatcctgtatcaggaacaggtcatgcagattgcgcaggtgctttctggttataccctcggtggcgcggatatgctgcgtcgtgcgatgggtaagaaaaagccggaagagatggctaagcaacgttctgtatttgctgaaggtgcagaaaagaacggaatcaacgctgaactggcgatgaaaatcttcgacctggtggagaaattcgctggttacggatttaacaaatcgcactctgcggcctatgctttggtgtcatatcaaacgttatggctgaaagcgcactatcctgcggagtttatggcggcggtaatgaccgccgatatggacaacaccgagaaggtggtgggtctggtggatgagtgctggcggatggggctgaaaatcctgccaccagatataaactccggtctttaccatttccacgtcaacgacgacggcgaaatcgtgtatggtattggcgcgatcaaaggggtcggtgaaggtccgattgaggccatcatcgaagcccgtaataaaggcggctacttccgcgaactgtttgatctctgcgcccgtaccgacaccaaaaagttgaaccgtcgcgtgctggaaaaactgatcatgtccggggcgtttgaccgtcttgggccacatcgcgcagcgctgatgaactcgctgggcgatgcgttaaaagcggcagatcaacacgcgaaagcggaagctatcggtcaggccgatatgttcggcgtgctggccgaagagccggaacaaattgaacaatcctacgccagctgccaaccgtggccggagcaggtggtattagatggggaacgtgaaacgttaggcctgtacctgaccggacaccctatcaaccagtatttaaaagagattgagcgttatgtcggaggcgtaaggctgaaagacatgcacccgacagaacgtggtaaagtcatcacggctgcggggctcgttgttgccgcgcgggttatggtcaccaagcgcggcaatcgtatcggtatctgcacgctggatgaccgttccgggcggctggaagtgatgttgtttactgacgccctggataaataccagcaattgctggaaaaagaccgcatacttatcgtcagcggacaggtcagctttgatgacttcagcggtgggcttaaaatgaccgctcgcgaagtgatggatattgacgaagcccgggaaaaatatgctcgcgggcttgctatctcgctgacggacaggcaaattgatgaccagcttttaaaccgactccgtcagtctctggaaccccaccgctctgggacaattccagtacatctctactatcagagggcggatgcacgcgcgcggttgcgttttggcgcgacgtggcgtgtctctccgagcgatcgtttattaaacgatctccgtggcctcattggttcggagcaggtggaactggagtttgactaa

SEQ ID NO: 6510 - DNA, 255 bp, Escherichia coli
atgaccgataaaatccgtactctgcaaggtcgcgttgttagcgacaaaatggagaaatccattgttgttgctatcgaacgttttgtgaaacacccgatctacggtaaattcatcaagcgtacgaccaaactgcacgtacatgacgagaacaacgaatgcggtatcggtgacgtggttgaaatccgcgaatgccgtccgctgtccaagactaaatcctggacgctggttcgcgttgtagagaaagcggttctgtaa

SEQ ID NO: 6511 - DNA, 192 bp, Escherichia coli
atgaaagcaaaagagctgcgtgagaagagcgttgaagagctgaacaccgagctgctgaacctgctgcgtgagcagttcaacctgcgtatgcaggctgcaagtggccagctgcaacagtctcacctgttgaagcaagtgcgtcgcgatgtcgcacgcgttaagactttactgaacgagaaggcgggtgcgtaa

SEQ ID NO: 6512 - DNA, 288 bp, Escherichia coli
atgctgcacacattacatcgctcaccctggctgacggattttgctgcgctgctgcgtctgctcagtgaaggagacgaactgctattattgcaagatggcgtaactgccgcagttgacggtaaccgctaccttgaaagtctgcgtaatgcccccattaaggtctatgccctgaacgaagaccttattgcccgcggtttgactggtcaaatttcgaacgacatcattctcattgactatactgatttcgtcagacttacggttaagcaccccagccagatggcctggtga

SEQ ID NO: 6513 - DNA, 306 bp, Escherichia coli
ttgtcacttaagcgtatggtcaacctgacaacccggtgtcctcaacggggaaagaataaccccgccatacttaccgccgcgccatttcgcggattgccacaaccggaagcgcacggtcgaattaaatttaacgacggctctaagggagaaggacttcgccgtgcactttcgtgttatgccctgacttttcagggatatatcctttcagtaaactgtcagtgccggattcttatctgtgtccggcgcacgaccacacgtagcagcgtgttggtctccatttttaattcagcccttaatggaggataa

SEQ ID NO: 6514 - DNA, 1416 bp, Escherichia coli
ttgcaatctccttctgacgctattttttgtcgccatctgtcattgcaatacgcccttgattcattgagaaatggaaaaggcaaagtcaacctgattaaacattactcctccgttgaatccatacagcagcatgtccccttagtccgggacgcggagttcagagcattacttcgccatcctcctgcagggagtcgcgttatcgcgagtaaggattttggcttcgctttagatattttcttttgtcgaatgatggcaaacaatgtcagtcatatgtccgcgattttatatatagacaatcatactttgtcagtaaggctacgaataaagcagtcagtgtatggacaattaaattatgttgtgtccgtttacgacccgaacgataccaacgttgccgtcagagacacccacaggacagcacggggctttctttcgcttgataagttcatcagttcaggtcccgatgctcagacctgggctgatagatatgttcgcaactgtgcaattgctattctgcccctattacctgtgggagttccaggggctattttcgcgggtattgcatcacgaatgccatttgcccctatacatccatcggcaatgttgttaataatggctacaggccagtctcaacagcttattacattattcaaacagttgcccatactccctgaaaaagaaatcattgaaataataactgcgcagaatagcgttggtacacctgctttatttttggctatgatgaacggacatactgacaacgtgaaaatatttatgcaagaaattcagtcactggtagataatcacatcattcatgaagataatctggttaaattactgcaaactaaaagtgctaacgaaacacctggactttatatctccatgttgtatggattcgatgaaataatcgatatctttctgaatgcattaaccactccaatagcacaagagcttttaaacaaaaaactggtgatgagtattttagccatgaaaatacatgatggtgagccaggattatacgccgcaatggaaaataatcaccctttgtgtgtcacacggttcctctctaaaattaatggcatcgcctttaaatacaagttgagcaaagctaacatcatggatttattaaaaggagctacagcacagggaacccctgcattatacatcgccatgagcaagggtaatgaagacgtcgtgttatcttatatatcgacgctgggtgcttttgcaaaaaaacattcttttagtcaacatcagttatttacactattggccgctaaaaatcatgacaacatgtcagctgttcatatagccattcatcataagcattataaaactgtagaaacatattatgctgctattaatgcaatcagccaaagcctgagttttagtgctgatgaaataaagacgtatttataa

SEQ ID NO: 6515 - DNA, 504 bp, Escherichia coli
atggctcacatcgaaaaacaagctggcgaactgcaggaaaagctgatcgcggtaaaccgcgtatctaaaaccgttaaaggtggtcgtattttctccttcacagctctgactgtagttggcgatggtaacggtcgcgttggttttggttacggtaaagcgcgtgaagttccagcagcgatccagaaagcgatggaaaaagcccgtcgcaatatgattaacgtcgcgctgaataacggcactctgcaacaccctgttaaaggtgttcacacgggttctcgcgtattcatgcagccggcttccgaaggtaccggtatcatcgccggtggtgcaatgcgcgccgttctggaagtcgctggggttcataacgttctggctaaagcctatggttccaccaacccgatcaacgtggttcgtgcaactattgatggcctggaaaatatgaattctccagaaatggtcgctgccaagcgtggtaaatccgttgaagaaattctggggaaataa

SEQ ID NO: 6516 - DNA, 720 bp, Escherichia coli
gtgaatgtcaatttctttgtcacctgtattggtgacgccctgaaatcaagaatggcacgagactccgtgctgctactggaaaaactcggctgtcgcgtaaatttcccggagaaacagggatgctgcggtcagcctgcgatcaatagcggttatatcaaagaagcgattccagggatgaaaaatctgatcgccgcactggaggataacgacgatcccattatttcaccggctggctcttgcacctatgccgtaaaaagttacccgacgtatctggcggatgaacctgaatgggcatcacgtgccgcaaaggttgccgcgcgtatgcaggatctcacctcttttattgttaataaattaggggtagtcgatgtaggtgccagtttgcaagggagagcggtgtatcacccatcttgtagcctggcccgtaagctgggagtgaaggacgagccacttacgctgctgaaaaatgtgcgtggactggagctgttgacctttgctgaacaggatacctgctgcggatttggcggcacgttctcggtcaaaatggccgaaatatccggcgagatggtgaaagaaaaggttgcgcacctgatggaagtccgccctgagtatttaattggtgctgacgtgagttgcctgctaaacatcagtgggcgattacaacgggaagggcagaaagtcaaagtgatgcatattgctgaagtgttgatgagccgctga

SEQ ID NO: 6517 - DNA, 1302 bp, Escherichia coli
gtgttgtgttctggatatctggggcatgacatggaagacgactgcgacattattattattggtgccggtattgcaggcaccgcttgcgcgttacgctgcgcgcgagcgggtttatccgttttgttactggaacgcgctgaaatccccggcagcaaaaatctttccggcgggcggttatatacccatgcactcgcggaactcctcccgcaatttcatctgaccgcgcctcttgaacgacgcatcactcacgaaagcctttccctgttaacgcccgatggcgtaacgacgttttccagcttacagcccggcggtgaatcctggagtgtattacgtgcacgattcgatccgtggctggttgccgaagccgaaaaagaaggtgtcgaatgcatccccggagcgacggtggatgcactgtatgaagaaaacggcagagtctgtggcgttatttgtggtgacgatattctccgcgcccgttatgtggtgctggcagaaggtgccaacagcgtcctggctgaacgtcacgggttagtgactcgtcctgctggcgaagcgatggcgttggggatcaaagaagtgctgtcgctggaaacatccgctattgaagaacgttttcatctggagaataacgaaggcgcagcgttgctgttcagcggcaggatctgtgatgacttacccggcggcgcatttctttatactaatcaacaaacgctctcgttagggattgtttgcccgctctcttcccttacgcaaagtcgtgttccggcaagcgagctgctgactcgctttaaagcgcatccggcagtgcgcccgcttatcaaaaacacggaatcactggagtatggtgcgcatctggtgccagaaggtggcttgcacagtatgccggtgcaatacgccggtaacggctggctgctggtgggcgatgcgttgcgcagttgcgtcaataccggaatttccgtgcgcggcatggatatggcgctgactggcgcgcaggcggcggcacaaacgctgataagcgcctgccagcaccgcgagccgcaaaatctgtttccgctttatcatcacaacgtagagcgcagcctgctgtgggatgttctacagcgttatcagcatgttccggcgcttttgcaacgcccgggatggtaccgtacgtggcctgcgttaatgcaggatatttcccgcgatttatgggatcagggtgataaacctgttccaccgctgcgccagttattctggcatcatttacgtcgtcacggcctgtggcatctggcgggcgatgttatcaggagtctgcgatgtctgtag

SEQ ID NO: 6518 - DNA, 366 bp, Escherichia coli
atgatgtccaccacgttatttaaagatttcaccttcgaagccgctcaccgcttaccacacgtcccggaagggcataaatgtggtcgcctgcacgggcattcctttatggtgcgactggaaattaccggggaagtcgatccgcatacgggctggattatcgatttcgctgaactaaaagcggcgtttaaaccaacctacgagcgcctcgatcaccattatctcaatgatattccaggtctggaaaacccaaccagcgaggttttagcaaaatggatttgggatcaggttaaacccgttgtgccgctgttaagtgcggtgatggtaaaagaaacctgcaccgcaggttgtatctatcgcggcgaatga

SEQ ID NO: 6519 - DNA, 960 bp, Escherichia coli
atgcgggttttgatcgttaaaacatcgtcgatgggcgatgttctccatacgttgcccgcactcactgatgcccagcaggcaatcccagggattaagtttgactgggtggtggaagaagggttcgcacagattccttcctggcacgctgccgttgagcgagttattcctgtggcaatacgtcgctggcgtaaagcctggttctcggcccccataaaagcggaacgcaaagcgtttcgtgaagcgctacaagcagagaactatgacgcagttatcgacgctcaggggctggtaaaaagcgcggcgctggtgacgcgtctggcgcatggcgtaaagcatggcatggactggcaaaccgctcgcgaacctttagccagcctgttttacaatcgtaagcatcatattgcaaaacagcagcacgccgtagaacgcacccgcgaactgtttgccaaaagtttgggctatagcaaaccgcaaacccagggcgattatgctatcgcacagcattttctgacgaacctgcctacagatgctggcgaatatgccgtatttcttcatgcgacgacccgtgatgataaacactggccggaagaacactggcgagaattgattggtttactggctgattcaggaatacggattaaacttccgtggggcgcgccgcatgaggaagaacgggcgaaacgactggcggaaggatttgcttatgttgaagtattgccgaagatgagtctggaaggcgttgcccgcgtgctggccggggctaaatttgtagtgtcggtggatacggggttaagccatttaacggcggcactggatagacccaatatcacggtttatggaccaaccgatccgggattaattggtgggtatgggaagaatcagatggtatgtagggctccaagagaaaatttaattaacctcaacagtcaagcagttttggaaaagttatcatcattataa

SEQ ID NO: 6520 - DNA, 1368 bp, Escherichia coli
atgaaaaaacaaacccagctgttgagtgcattagcgttaagtgtcgggttaactctctcggcgtcatttcaggccgtcgcgtcgattccaggccaggttgccgatcaggcccctctccccagtctggctccaatgctggaaaaagtgcttccggcagtggtgagcgtacgggtggaaggaacggccagtcagggacagaaaatcccggaagaattcaaaaagttttttggtgatgatttaccggatcaacctgcacaacccttcgaaggtttaggctccggtgtcatcatcaacgccagtaaaggctatgtgctgaccaacaaccatgtgattaatcaggcacagaaaatcagtattcagctcaatgatgggcgcgagtttgatgcaaaactgattggtagcgatgaccagagcgatatcgccctgttacaaattcaaaacccgagcaaattaacgcaaatcgctattgccgactccgataaattgcgcgtcggtgattttgccgtagcggtcggtaacccatttggccttgggcaaaccgccacctctggcattgtttccgcattaggccgcagcgggttgaatcttgaaggtctggaaaactttatccagacagatgcttccattaaccgcggtaactccggcggtgcactattaaaccttaacggtgagttaattggcatcaacactgcaatccttgcgcctggcggcgggagcgtcgggattggatttgccatccccagtaatatggcgcgaacactggcgcagcagcttatcgactttggtgaaatcaaacgcggtttgttaggcatcaaaggcaccgagatgagtgccgatatcgccaaagccttcaaccttgacgtgcagcgtggcgcgtttgtcagcgaagtgttgccaggttctggctcggcaaaagcgggcgtcaaagcgggcgatattattaccagcctcaacggcaaaccgctgaatagctttgctgagttgcgctctcgtatcgcgaccaccgagccgggcacgaaagtgaagcttggcctgctgcgtaacggcaaaccactggaagtagaagtgacgctcgataccagcacctcttcgtcggccagcgctgaaatgatcacgccagcgctggaaggtgcaacgttgagcgatggtcagctaaaagatggcggcaaaggtattaaaatcgatgaagttgtcaaaggaagcccagctgctcaggctggcttgcaaaaagacgatgtgatcattggcgtcaaccgcgatcgggtgaactcgattgctgaaatgcgtaaagtgctggcggcaaaaccggccatcatcgccctgcaaattgtacgcggcaatgaaagcatctatctgctgatgcgttaa

SEQ ID NO: 6521 - DNA, 1173 bp, Escherichia coli
ttgagcgagatagcgatgcacgttacagccaagccctccagttttcaatgtaatctcaaatgtgattactgtttttaccttgaaaaagagtcgcagtttactcatgaaaaatggatggatgacagcactctgaaagagttcatcaaacaatatatcgcagcgtctggcaatcaggtctattttacctggcaaggcggtgaacccactctggctggcctggattttttccgtaaagttattcactatcaacaacgctatgcaggccaaaaacgtatttttaatgcattacaaacgaatggcattttattgaataatgaatggtgtgcctttctcaaagaacatgaatttctggttggtatctcgatcgatggcccccaggagttacatgaccgttacagacgcagtaattcaggtaacggtacttttgcaaaagtgatagcagccatcgagcgtctgaaatcatatcaagtagagtttaatacgttaaccgtcattaataacgttaatgtccattaccctcttgaggtttatcattttttaaaatctatcggcagtaaacatatgcaatttatcgaattgctagaaaccgggacgccgaatattgatttcagtggtcatagtgagaacacattccgtatcattgatttttctgtgcctcccacggcttatggcaagtttatgtcaaccatttttatgcaatgggttaaaaacgatgtgggtgaaattttcatccgtcagtttgaaagctttgtcagccgttttttggggaatgggcataccagttgtattttccaggagtcctgcaaggataatctggttgttgaaagtaatggagacatttacgaatgcgaccattttgtctatccacagtacaaaattggaaacattaataaatctgaactcaaaacgatgaacagtgtacaactgacagcgcaaaaaaaacggattccagcgaaatgtcagcaatgtgcatataaacctatctgcaatggcggttgtcctaagcatcgtattactaaagtaaacaatgagactgtttcttatttttgcgaaggttataaaatccttttttcaaccatggtaccttatatgaacgccatggtagagttagctaagaacagagtaccgctttaccacattatggatgttgcaaaacaaatggagaataattaa

SEQ ID NO: 6522 - DNA, 801 bp, Escherichia coli
atggctaagtcactgttcagggcgctggtcgccctgtcttttcttgcgccactgtggctcaacgccgcgccgcgcgtcatcacgctttctcccgccaacactgaacttgcctttgccgccgggatcacgccggttggggtcagcagctattccgactatcctccacaagcgcaaaagattgagcaggtttccacctggcaggggatgaatctggaacgcattgtcgcgctgaaacccgatctggtgattgcctggcgtggaggtaatgccgagcggcaggttgaccagctggcttcgctgggaataaaagtgatgtgggtcgatgcgacaagcattgaacaaattgccaatgcgttacgtcaactggccccctggagtccgcaaccagacaaggccgaacaagccgcgcaatccctgctggatcagtacgcgcaattgaaagcgcaatatgctgataaacctaaaaaacgtgtttttctgcaattcggcattaatccgccatttaccagtggaaaagagtcgattcagaaccaggtactcgaagtttgtggcggagaaaacatctttaaagacagccgggttccctggccgcaagttagccgcgaacaggtgttagcacgctcgccacaggcgattgtcattacaggcggaccggaccaaattcctaaaatcaaacaatactggggtgaacagctcaaaattcccgttattcctctcacgagtgactggtttgaacgtgcaagcccacgtattatcctcgctgcacaacagctctgtaatgcgctttcacaggtagattag

SEQ ID NO: 6523 - DNA, 825 bp, Escherichia coli
atgaccgaatttacaactcttcttcagcaaggaaacgcctggttcttcatccccagcgccatcttacttggtgcgcttcatggcctggaaccagggcactcaaaaacgatgatggcggcgtttatcatcgccatcaaaggcaccattaaacaagcggtgatgctcggactggcagcaactatttcgcataccgcagtggtctggttaattgcctttggcgggatggtgatcagcaagcgctttactgctcaatcagcagaaccgtggctccagctgatttccgcagtgatcattattagcaccgcgttctggatgttctggcgtacctggcgcggcgaacgcaactggctggagaatatgcacgggcatgattatgagcatcatcatcacgatcacgaacatcaccacgaccatggacatcatcaccatcacgaacatggcgagtatcaggatgcccatgcacgagcccatgccaatgacattaaacgacgctttgatggtagagaggtcaccaactggcaaattttgttatttggcttaaccggtggccttatcccctgcccggcagcaattaccgtgctgttgatatgcattcagttgaaagccctgacactgggcgcaacactggtcgtcagtttcagcattggcctggcgttaacgcttgtcaccgtaggcgttggcgcagcaatcagcgttcagcaggtcgcaaaacgctggagcggatttaacactctcgctaaacgcgccccctatttttccagtctgttgattggcttagtcggtgtgtatatgggcgtacatggcttcatgggcataatgcgataa

SEQ ID NO: 6524 - DNA, 1191 bp, Escherichia coli
atgaatgacaccagcttcgaaaactgcattaagtgcaccgtctgcaccaccgcctgcccggtgagccgggtgaatcccggttatccagggccaaaacaagccgggccggatggcgagcgtctgcgtttgaaagatggcgcactgtatgacgaggcgctgaaatattgcatcaactgcaaacgttgtgaagtcgcctgcccgtccgatgtgaagattggcgatattatccagcgcgcgcgggcgaaatatgacaccacgcgcccgtcgctgcgtaattttgtgttgagtcataccgacctgatgggtagcgtttccacgccgttcgcaccaatcgtcaacaccgctacctcgctgaaaccggtgcggcagctgcttgatgcggcgttaaaaatcgatcatcgccgcacgctaccgaaatactccttcggcacgttccgtcgctggtatcgcagcgtggcggctcagcaagcacaatataaagaccaggtcgctttctttcacggctgcttcgttaactacaaccatccgcagttaggtaaagatttaattaaagtgctcaacgcaatgggtaccggtgtacaactgctcagcaaagaaaaatgctgcggcgtaccgctaatcgccaacggctttaccgataaagcacgcaaacaggcaattacgaatgtagagtcgatccgcgaagctgtgggagtaaaaggcattccggtgattgccacctcctcaacctgtacatttgccctgcgcgacgaatacccggaagtgctgaatgtcgacaacaaaggcttgcgcgatcatatcgaactggcaacccgctggctgtggcgcaagctggacgaaggcaaaacgttaccgctgaaaccgctgccgctgaaagtggtttatcacactccgtgccatatggaaaaaatgggctggacgctctacaccctggagctgttgcgtaacatcccggggcttgagttaacggtgctggattcccagtgctgcggtattgcgggtacttacggtttcaaaaaagagaactaccccacctcacaagccatcggcgcaccactgttccgccagatagaagaaagcggcgcagatctggtggtcaccgactgcgaaacctgtaaatggcagattgagatgtccacaagtcttcgctgcgaacatccgattacgctactggcccaggcgctggcttaa

SEQ ID NO: 6525 - DNA, 1647 bp, Escherichia coli
atggattcgcaacgcaatcttttagtcatcgctttgctgttcgtgtctttcatgatctggcaagcctgggagcaggataaaaacccgcaacctcaggcccaacagaccacgcagacaacgaccaccgcagcgggtagcgccgccgaccagggcgtaccggccagtggccaggggaaactgatctcggttaagaccgacgtgcttgatctgaccatcaacacccgtggtggtgatgttgagcaagctctgctgcctgcttacccgaaagagctgaactctacccagccgttccagctgttggaaacttcaccgcagtttatttatcaggcacagagcggtctgaccggtcgtgatggcccggataacccggctaacggcccgcgtccgctgtataacgttgaaaaagacgcttatgtgctggctgaaggtcaaaacgaactgcaggtgccgatgacgtataccgacgcggcaggcaacacgtttaccaaaacgtttgtcctgaaacgtggtgattacgctgtcaacgtcaactacaacgtgcagaacgctggcgagaaaccgctggaaatctcctcgtttggtcagttgaagcaatccatcactctgccaccgcatctcgataccggaagcagcaacttcgcactgcacaccttccgtggcgcggcgtactccacgcctgacgagaagtatgagaaatacaagttcgataccattgccgataacgaaaacctgaacatctcttcgaaaggtggttgggtggcgatgctgcaacagtatttcgcgacggcgtggatcccgcataacgacggtaccaacaacttctataccgctaatctgggtaacggcatcgccgctatcggctataaatctcagccggtactggttcagcctggtcagactggcgcgatgaacagcaccctgtgggttggcccggaaatccaggacaaaatggcagctgttgctccgcacctggatctgaccgttgattacggttggttgtggttcatctctcagccgctgttcaaactgctgaaatggatccatagctttgtgggtaactggggcttctccattatcatcatcacctttatcgttcgtggcatcatgtacccgctgaccaaagcgcagtacacctccatggcgaagatgcgtatgttgcagccgaagattcaggcaatgcgtgagcgtctgggcgatgacaaacagcgtatcagccaggaaatgatggcgctgtacaaagctgagaaggttaacccgctgggcggctgcttcccgctgctgatccagatgccaatcttcctggcgttgtactacatgctgatgggttccgttgaactgcgtcaggcaccgtttgcactgtggatccacgacctgtcggcacaggacccgtactacatcctgccgatcctgatgggcgtaacgatgttcttcattcagaagatgtcgccgaccacagtgaccgacccgatgcagcagaagatcatgacctttatgccggtcatcttcaccgtgttcttcctgtggttcccgtcaggtctggtgctgtactatatcgtcagcaacctggtaaccattattcagcagcagctgatttaccgtggtctggaaaaacgtggcctgcatagccgcgagaagaaaaaatcctga

SEQ ID NO: 6526 - DNA, 909 bp, Escherichia coli
atgcaattacgtaaacctgccacagcaatcctcgccctggcgctttccgcaggactggcacaggcagatgacgccgccccggcagcgggcagtactctggacaaaatcgccaaaaacggtgtgattgtcgtcggtcaccgtgaatcttcagtgcctttctcttattacgacaatcagcaaaaagtggtgggttactcgcaggattactccaacgccattgttgaagcagtgaaaaagaaactcaacaaaccggacttgcaggtaaaactgattccgattacctcacaaaaccgtattccactgctgcaaaacggcactttcgattttgaatgtggttctaccaccaacaacgtcgaacgccaaaaacaggcggctttctctgacactattttcgtggtcggtacgcgcctgttgaccaaaaagggtggcgatatcaaagattttgccaacctgaaagacaaagccgtagtcgtcacttccggcactacctctgaagttttgctcaacaaactgaatgaagagcaaaaaatgaatatgcgcatcatcagcgccaaagatcacggtgactctttccgcaccctggaaagcggtcgtgccgttgcctttatgatggatgacgctctgctggccggtgaacgtgcgaaagcgaagaaaccagacaactgggaaatcgtcggcaagccgcagtctcaggaggcctacggttgtatgttgcgtaaagatgatccgcagttcaaaaagctgatggatgacaccatcgctcaggtgcagacctccggtgaagcggaaaaatggtttgataagtggttcaaaaatccaattccgccgaaaaacctgaacatgaatttcgaactgtcagacgaaatgaaagcactgttcaaagaaccgaatgacaaggcactgaactaa

SEQ ID NO: 6527 - DNA, 987 bp, Escherichia coli
atgaataacagcgcttttactttccagacactacacccggataccatcatggacgctctgtttgagcatgggatccgggtggattccggtcttaccccgcttaacagctatgaaaaccgtgtctatcaatttcaggacgaagatcgtcgacgttttgtcgtcaaattttatcgccctgaacgttggacagccgatcaaatcctcgaagaacatcaatttgcgttgcagctggtaaatgatgaagttccggtcgcagcacctgtggcctttaacggtcagactttattgaatcatcagggattttatttcgctgtttttccaagcgtcggtggtcgccagttcgaagctgataatatcgatcagatggaagcggttgggcgttatttagggcgtatgcaccagacggggcgcaaacagctttttatccatcgcccgaccatcggtttgaacgaatatctcattgagccacgcaagctgtttgaggacgctacactgataccttccgggttgaaagcggcattcctgaaagcgacagatgagctgattgccgccgttacagcacactggcgggaagatttcaccgttctgcggctacatggagactgccacgccgggaatattctctggcgcgatggtccaatgtttgttgatctggatgatgcacgtaatggtccagccgttcaggatttgtggatgttgctcaatggcgataaagccgagcagcggatgcaactggaaactattattgaagcttatgaagaatttagcgagttcgacaccgctgaaatcggactgattgaacctttacgcgccatgcgtttggtttattatcttgcctggctaatgcggcgttgggctgatcccgcgttcccgaaaaatttcccgtggttaaccggggaagattactggctgcgacagacggcgacttttatagaacaggcaaaagttctacaagaaccccctttgcaattaacacctatgtattaa

SEQ ID NO: 6528 - DNA, 756 bp, Escherichia coli
atgactgaagcacaaagacatcaaatcctcctggaaatgctcgcacaattgggctttgtgaccgttgagaaagtcgttgagcgtctgggaatttcgcctgccactgcgcgacgcgatatcaataaacttgacgaaagcggcaaactgaaaaaagtgcgcaatggcgcagaagctattacccaacagcgcccgcgctggacgccgatgaatctgcatcaggcgcagaatcacgatgaaaaagtacgtatcgctaaagcggcctcgcagctggttaatccgggcgaaagcgtagtcatcaactgcggctccaccgcgtttctgcttgggcgggaaatgtgtggcaagccagtgcaaatcatcactaattatctaccgctggcaaattacctgatcgatcaagaacatgacagcgtgatcattatgggcggacagtacaacaaaagtcagtccatcactttaagcccgcagggcagcgaaaacagtctctatgccgggcactggatgtttaccagcggaaaagggctgaccgcagaagggttgtataaaaccgatatgctgacagcaatggcagagcagaagatgctgagcgtggtagggaaactggtggtactggttgatagcagtaagattggcgaacgcgcgggaatgctttttagccgtgccgatcaaatcgatatgcttatcaccggcaaaaatgctaacccggaaatcctgcaacaactggaagcgcaaggggtcagcattctgcgtgtttaa

SEQ ID NO: 6529 - DNA, 372 bp, Escherichia coli
atgatccaagaacagactatgctgaacgtcgccgacaactccggtgcacgtcgcgtaatgtgtatcaaggttctgggtggctcgcaccgtcgctacgcaggcgtaggcgacatcatcaagatcaccatcaaagaagcaattccgcgtggtaaggtcaaaaaaggtgatgtgctgaaggcggtagtggtgcgcaccaagaagggtgttcgtcgcccggacggttctgtcattcgcttcgatggtaatgcttgtgttcttctgaacaacaacagcgagcagcctatcggtacgcgtatttttgggccggtaactcgtgagcttcgtagtgagaagttcatgaaaattatctctctggcaccagaagtactctaa

SEQ ID NO: 6530 - DNA, 1314 bp, Escherichia coli
atggtcggcggcttttttattctcggcttgtctacctttagtattatgctggcaattatcctcagcgcctttttcattgccgcggtaatggtattaaacggtgctgcgggcagtaaatacggtgtgccttttgccatgatcctgcgtgcttcttacggtgtacgtggtgcactgtttcccggattattaaggggcggaattgccgccatcatgtggtttggtttgcaatgttacgcggggtcactggcctgcttgattctgattggcaaaatctggccgggatttttaactctcggtggtgatttcactctgttaggcctttctctaccgggcttaattactttcttaatcttctggctggtcaacgttggtataggttttggcggtggcaaagttttaaataaattcactgccattcttaacccgtgcatctatatcgttttcggcggtatggcgatttgggcgatttcactggtcgggatcggtccaatctttgactacattccgagcggtattcagaaagcagaaaacggtggcttcctgttcctggtggtgattaacgcggtagttgcggtctgggcggcaccggcggtgagcgcatccgactttacgcaaaacgcccactcgtttcgtgagcaggcgctggggcaaacgctgggtttagttgtggcctatattctgtttgcggtcgccggggtatgtattattgccggagccagtattcactacggcgctgatacctggaacgtgctggatattgttcagcgttgggacagcctgttcgcctcgttctttgcggtactggttattctgatgacaactatctccactaacgcgaccggtaatattattccagccggttatcagattgccgccattgcaccgacaaaactgacctataaaaacggcgtactgattgccagtattatcagcttgctgatctgcccgtggaaattaatggaaaatcaggacagcatttatcttttcctcgatattatcggcggaatgcttggtccggtaattggtgtcatgatggcgcattattttgtggtgatgcgcggacaaattaatcttgatgaactgtataccgcacctggcgattataaatattacgataacggttttaacctcactgcgttttcagtaactctggtggccgttattttatctcttggcggtaagtttattcactttatggaaccgttatcgcgtgtttcatggtttgtcggcgtcatcgtcgcctttgcggcctacgccttattaaagaaacgtacaacagcagaaaaaacaggagagcaaaaaaccataggttaa

SEQ ID NO: 6531 - DNA, 1176 bp, Escherichia coli
atgcaaaaactcattaactcagtgcaaaactatgcctggggcagcaaaacggcgttgactgaactttatggtatggaaaatccgtccagccagccgatggccgagctgtggatgggcgcacatccgaaaagcagttcacgagtgcagaatgccgccggagatatcgtttcactgcgtgatgtgattgagagtgataaatcgactctgctcggagaggccgttgccaaacgctttggcgaactgcctttcctgttcaaagtattatgcgcagcacagccactctccattcaggttcatccaaacaaacacaattctgaaatcggttttgccaaagaaaatgccgcaggtatcccgatggatgccgccgagcgtaactataaagatcctaaccacaagccggagctggtttttgcgctgacgcctttccttgcgatgaacgcgtttcgtgaattttccgagattgtctccctactccagccggtcgcaggtgcacatccggcgattgctcactttttacaacagcctgatgccgaacgtttaagcgaactgttcgccagcctgttgaatatgcagggtgaagaaaaatcccgcgcgctggcgattttaaaatcggccctcgatagccagcagggtgaaccgtggcaaacgattcgtttaatttctgaattttacccggaagacagcggtctgttctccccgctattgctgaatgtggtgaaattgaaccctggcgaagcgatgttcctgttcgctgaaacaccgcacgcttacctgcaaggcgtggcgctggaagtgatggcaaactccgataacgtgctgcgtgcgggtctgacgcctaaatacattgatattccggaactggttgccaatgtgaaattcgaagccaaaccggctaaccagttgttgacccagccggtgaaacaaggtgcagaactggacttcccgattccagtggatgattttgccttctcgctgcatgaccttagtgataaagaaaccaccattagccagcagagtgccgccattttgttctgcgtcgaaggcgatgcaacgttgtggaaaggttctcagcagttacagcttaaaccgggtgaatcagcgtttattgccgccaacgaatcaccggtgactgtcaaaggccacggccgtttagcgcgtgtttacaacaagctgtaa

SEQ ID NO: 6532 - DNA, 315 bp, Escherichia coli
atggcagcgaaaatccgtcgtgatgacgaagttatcgtgttaaccggtaaagataaaggtaaacgcggtaaagttaagaatgtcctgtcttccggcaaggtcattgttgaaggtatcaacctggttaagaaacatcagaagccggttccggccctgaaccaaccgggtggcatcgttgaaaaagaagccgctattcaggtttccaacgtagcaatcttcaatgcggcaaccggcaaggctgaccgtgtaggctttagattcgaagacggtaaaaaagtccgtttcttcaagtctaacagcgaaactatcaagtaa

SEQ ID NO: 6533 - DNA, 1659 bp, Escherichia coli
atgattcttgagcgcgttgaaattgtgggttttcgcggtatcaaccgtttgtcgttgatgctggaacaaaacaacgtcctgattggggagaacgcgtggggtaaatccagcttgctggacgccttaactctgctgctatcgccagaatcagatctctaccattttgagcgcgacgatttctggttcccgccgggagatatcaacgggcgagaacatcatctgcatattattttgaccttccgcgaatcgctgccaggccgacatcgggttcgccgttatcggccgctggaagcgtgctggacgccatgcaccgatggctatcaccgtattttttatcgtctggaaggggagagtgcggaagacggcagcgtgatgacactgcgcagttttctcgataaagacggacatccgattgatgtcgaggatattaacgatcaggcacgccatctggtgcgtttaatgccggtgctgcgcttgcgtgatgcccgttttatgcgccgtattcgtaacggcacggtgccaaatgtccctaatgtggaagtcaccgcgcgccagctcgatttcctcgcccgtgagttatcctcacatccgcaaaatctctctgatgggcagattcgtcagggactttccgcaatggtacagctgcttgagcattatttctctgagcagggggccggacaggcgcgatatcgtttaatgcggcggcgagccagcaatgagcaacgaagctggcgctatctggatatcatcaaccggatgattgaccgacctggtgggcgctcgtatcgggttattttgctcggcctatttgctactttgttgcaggcaaaaggcacattgcgactggataaagacgcccgtccattgttgctgatcgaagatccagaaacccgtttacaccccattatgctttcagttgcctggcatctgttgaatcttctgccattgcagcgcattgccaccaccaactcgggtgagttgctttcgttaacgccggtagagcatgtttgccgactggtacgtgagtcctcgcgcgttgccgcctggcgtctggggccgagtggcttgagtaccgaagatagccgacgcatatcctttcacattcgttttaaccgtccgtcatcgctgtttgcacgctgctggttgctggtggaaggggaaacggaaacctgggttatcaatgaactggcgcgtcagtgcggacatcattttgatgccgaagggatcaaggtcattgagtttgcccagtccgggctaaagccactggttaaatttgcccgccgaatggggattgaatggcatgtactggtcgatggcgatgaagcagggaagaaatatgccgctacggtacgcagcctgttgaataacgatcgggaagccgaacgagaacatttaacggcgttaccggcgctggatatggaacattttatgtatcgccagggattttccgatgtgttccaccgcatggcgcaaatcccggaaaatgtaccgatgaatctacgcaaaattatctcgaaagcgatccatcgctcttccaaacccgatcttgccattgaagtggcaatggaggcaggacgtcgtggtgtggactccgtaccgacgctgctgaaaaaaatgttctcacgcgtgctgtggctggcgcgcggtcgcgcggattaa

SEQ ID NO: 6534 - DNA, 1059 bp, Escherichia coli
atgctggaactgaatttttcccagacgttgggcaaccattgcctgactattaatgaaacgctgcccgccaatggcatcactgctatctttggcgtctccggtgccggaaaaacttcgctgattaacgccatcagtggactgacgcgcccgcaaaaagggcggattgtcctcaatgggcgggtactaaatgatgccgaaaaaggtatctgcctgacgccggaaaagcgtcgcgttggctatgtttttcaggatgcgcggctgttcccgcattacaaagtgcgtggcaatctgcgctacggcatgtcgaaaagtatggtcgatcagttcgataagctggtggcgcttttaggcattgaaccgttgcttgaccgtttaccaggcagcctgtccggaggcgaaaaacagcgcgtggcgattggtcgggctttgctgacagcaccggaattgctgttgctggatgaaccgctggcgtcactggatattccgcgtaaacgcgaactgttgccttatctgcaacggctgacacgggaaatcaacattccgatgttgtatgtcagccattcgctggatgagatcctccatctggcagacagagtgatggtactggaaaacggtcaggtgaaagcctttggcgcgctggaggaagtgtggggcagtagcgtgatgaatccgtggctgccgaaagagcaacaaagtagcattctgaaagtgacggtgcttgagcatcatccgcattacgcgatgaccgcgctggcgctgggcgatcagcatttgtgggtcaataagctggacgaaccgctgcaagctgcgctacgtatccgcattcaggcttccgatgtttctctggttttacaaccgccgcagcaaaccagcattcgtaacgtattgcgggcaaaagttgttaatagttatgacgacaacggccaggtggaagtggaactggaagtcggcggtaaaacgctgtgggcgcgtatcagcccgtgggccagggatgaactggcgatcaaacctggcctgtggctgtacgcgcaaattaaaagtgtgtcgataaccgcctga

SEQ ID NO: 6535 - DNA, 471 bp, Escherichia coli
atgaaaacacaacgtggttatacgctgattgaaacgctggtcgcgatgctgattttggtcatgctaagcgcaagtggactctatggctggcaatactggcagcagtcgcaacggctatggcaaaccgccagccaggcgcgggactatttgctctatttacgtgaagatgccaactggcataaccgcgaccacagtatcagcgttatcagggaggggacgttatggtgccttgtgagttccgctgctggggccaatacctgtcatggcagttcaccattggtctttgtgccacgctggcccgaagtcgaaatgagcgacctgacaccttcgcttgctttctttggcctgcgcaataccgcatgggccgggcatattcgcttcaaaaactcaacgggcgagtggtggctggtggtttcgccgtggggaagactccggctttgtcagcaaggagaaacagaaggatgcctgtaa

SEQ ID NO: 6536 - DNA, 1329 bp, Escherichia coli
atgaaaaaaattgaatgcgcttgcaattttctgatggataaagatgcgcaggggtatatcgacctgtctgatttggatttaacaagttgtcattttaaaggtgacgttatatcgaaggtgtcttttttatcatcaaatctacaacatgtaacattcgaatgtaaagaaattggggattgcaattttactactgcaatagttgataatgtcatatttagatgtcgacgtttacacaatgtgatttttatcaaagcgagtggtgaatgtgtcgatttcagcaaaaatattcttgatacagttgacttctcgcagagtcaacttggtcatagtaattttcgcgaatgtcagattagaaattcaaacttcgataattgttatctttacgcttcgcacttcaccagagcagagtttctgtctgccaaagaaatatcatttattaaatcgaatttgacagctgttatgtttgattatgtgcgaatgtcgacagggaattttaaagattgcattacagaacaattggaattaactattgattattcagatatattttggaatgaagatctcgatggttatatcaataacattataaaaatgattgatacattgccagataatgcaatgatattgaaatccgttctggccgtaaaactggtgatgcaattaaaaatacttaatattgttaataaaaactttattgagaatatgaagaaaatatttagccattgtccttatataaaagatcccattatacgcagttatatccattctgatgaagataacaagttcgatgattttatgcgtcaacatcgattcagtgaggtgaatttcgatacccaacagatgatcgattttattaacagatttaatacgaataaatggctaattgataaaaataacaatttttttatccaacttatcgatcaggccttacgatcaacggatgatatgatcaaagcaaatgtttggcatctttataaagagtggattcgtagtgatgatgtttcacctatatttatagaaactgaagataatttaagaacctttaacacgaatgaattaacacgaaacgataatatctttatcctgttctcctcagtcgatgatgggccagttatggtggtaagctcccagcgcttacatgatatgttgaatcctacaaaagataccaattggaattccacgtatatctacaaatccagacatgagatgttgcctgttaatcttactcaggaaacacttttcagctccaaatctcatggtaaatatgcgcttttccccatttttactgcgagttggcgagctcatcgtataatgaataagggtgtttaa

SEQ ID NO: 6537 - DNA, 1287 bp, Escherichia coli
atgaaaacctctctgtttaaaagcctttactttcaggtcctgacagcgatagccattggtattctccttggccatttctatcctgaaataggcgagcaaatgaaaccgcttggcgacggcttcgttaagctcattaagatgatcatcgctcctgtcatcttttgtaccgtcgtaacgggcattgcgggcatggaaagcatgaaggcggtcggtcgtaccggcgcagtcgcactgctttactttgaaattgtcagtaccatcgcgctgattattggtcttatcatcgttaacgtcgtgcagcctggtgccggaatgaacgtcgatccggcaacgcttgatgcgaaagcggtagcggtttacgccgatcaggcgaaagaccagggcattgtcgccttcattatggatgtcatcccggcgagcgtcattggcgcatttgccagcggtaacattctgcaggtgctgctgtttgccgtactgtttggttttgcgctccaccgtctgggcagcaaaggccaactgatttttaacgtcatcgaaagtttctcgcaggtcatcttcggcatcatcaatatgatcatgcgtctggcacctattggtgcgttcggggcaatggcgtttaccatcggtaaatacggcgtcggcacactggtgcaactggggcagctgattatctgtttctacattacctgtatcctgtttgtggtgctggtattgggttcaatcgctaaagcgactggtttcagtatcttcaaatttatccgctacatccgtgaagaactgctgattgtactggggacttcatcttccgagtcggcgctgccgcgtatgctcgacaagatggagaaactcggctgccgtaaatcggtggtggggctggtcatcccgacaggctactcgtttaaccttgatggcacatcgatatacctgacaatggcggcggtgtttatcgcccaggccactaacagtcagatggatatcgtccaccaaatcacgctgttaatcgtgttgctgctttcttctaaaggggcggcaggggtaacgggtagtggctttatcgtgctggcggcgacgctctctgcggtgggccatttgccggtagcgggtctggcgctgatcctcggtatcgaccgctttatgtcagaagctcgtgcgctgactaacctggtcggtaacggcgtagcgaccattgtcgttgctaagtgggtgaaagaactggaccacaaaaaactggacgatgtgctgaataatcgtgcgccggatggcaaaacgcacgaattatcctcttaa

SEQ ID NO: 6538 - DNA, 1191 bp, Escherichia coli
gtgaccacccgacagcattcgtcgtttgctattgtttttatccttggcctgctggccatgttgatgccgctgtcgattgatatgtatctgcccgcgctaccggtaatttcagcgcagtttggcgtaccggcgggcagtacgcagatgaccctcagtacttatattctgggctttgcgttggggcagttaatctacgggccgatggcagacagcttcgggcgtaagccggtggtgctcggcggtacgctggtgtttgccgccgccgcggtggcgtgtgcgttggcaaacaccatcgatcagctgattgtgatgcgtttcttccacgggctggctgcggctgcggccagcgtggtcattaacgccctgatgcgcgatatttacccgaaagaagagttctcgcggatgatgtcgtttgtcatgctggtgacaaccattgcaccgctgatggcaccgatagttggcggctgggtgctggtgtggctgagctggcattacatcttctggatcctggcattagcggcgattctggcttcggcaatgattttcttcctgattaaagaaaccttaccaccggagcgtcgtcagccatttcacattcgtaccactattggtaactttgcggcgctgttccgccataaacgtgtcctgagctacatgcttgccagtggtttcagctttgccgggatgttctcattcttaagcgccggaccgtttgtttatattgaaattaaccacgtcgcgccggaaaactttggttattactttgcgctaaacattgtttttctgttcgtgatgaccatctttaacagccgcttcgtccgccgcattggcgcgttaaatatgttccgctcggggttgtggatacaatttattatggcagcgtggatggtcatcagtgcgctgctggggctgggattttggtcgctggtggttggcgttgcggcgtttgtgggctgcgtgtcgatggtgtcatccaatgcgatggcggtcattcttgatgagtttccccatatggcgggaacggcatcttcgctggcaggaaccttccgttttggcataggggcaattgttggcgcattgctttctcttgcgacctttaactctgcatggccgatgatttggtcaattgcattctgcgcaaccagctccattctcttctgtctgtacgccagtcggccgaaaaaacggtga

SEQ ID NO: 6539 - DNA, 240 bp, Escherichia coli
atggaaaacctgaatatggatctgctgtacatggctgccgctgtgatgatgggtctggcggcaatcggtgctgcgatcggtatcggcatcctcgggggtaaattcctggaaggcgcagcgcgtcaacctgatctgattcctctgctgcgtactcagttctttatcgttatgggtctggtggatgctatcccgatgatcgctgtaggtctgggtctgtacgtgatgttcgctgtcgcgtag

SEQ ID NO: 6540 - DNA, 816 bp, Escherichia coli
atggcttcagaaaatatgacgccgcaggattacataggacaccacctgaataaccttcagctggacctgcgtacattctcgctggtggatccacaaaaccccccagccaccttctggacaatcaatattgactccatgttcttctcggtggtgctgggtctgttgttcctggttttattccgtagcgtagccaaaaaggcgaccagcggtgtgccaggtaagtttcagaccgcgattgagctggtgatcggctttgttaatggtagcgtgaaagacatgtaccatggcaaaagcaagctgattgctccgctggccctgacgatcttcgtctgggtattcctgatgaacctgatggatttactgcctatcgacctgctgccgtacattgctgaacatgtactgggtctgcctgcactgcgtgtggttccgtctgcggacgtgaacgtaacgctgtctatggcactgggcgtatttatcctgattctgttctacagcatcaaaatgaaaggcatcggcggcttcacgaaagagttgacgctgcagccgttcaatcactgggcgttcattcctgtcaacttaatccttgaaggggtaagcctgctgtccaaaccagtttcactcggtttgcgactgttcggtaacatgtatgccggtgagctgattttcattctgattgctggtctgttgccgtggtggtcacagtggatcctgaatgtgccgtgggccattttccacatcctgatcattacgctgcaagccttcatcttcatggttctgacgatcgtctatctgtcgatggcgtctgaagaacattaa

SEQ ID NO: 6541 - DNA, 864 bp, Escherichia coli
atgatccgcagtatgaccgcctacgcccggcgtgaaatcaagggtgaatgggggagcgcaacctgggaaatgcgctcggtaaaccagcgttatctggaaacttactttcgtctgccggagcagttccgtagccttgaacctgtcgttcgcgagcgtattcgttctcgcctgacgcgcggtaaagtggaatgtaccctgcgctatgagccagatgttagcgcgcaaggtgagctgatcctcaacgaaaaactggctaaacagctggtaactgccgcgaactgggtaaaaatgcagagtgacgaaggggaaatcaacccggttgatattctacgctggccgggcgtgatggcagcccaggagcaggatcttgacgccattgccgctgaaattctcgcggcgctggatggtacgctggacgactttattgtcgcgcgcgaaaccgaaggtcaggcactgaaagcattgatcgagcagcgtctggaaggcgtcaccgccgaagtggtcaaagtccgctcccatatgccggaaatcctgcaatggcagcgtgagcgtctggtcgcgaagctggaagatgctcaggtgcaactggaaaacaaccgtctggagcaggaactggttctgctggcacaacgaattgacgttgccgaagaactggatcgcctcgaagcgcatgtcaaagagacctacaacattctgaagaaaaaagaagcggttggtcgtcgtctggattttatgatgcaggagttcaaccgcgagtcgaacactcttgcgtcgaagtctatcaatgccgaagtgacaaactccgccatcgagctgaaagtgttgattgagcagatgcgcgagcagattcagaacatcgaataa

SEQ ID NO: 6542 - DNA, 1947 bp, Escherichia coli
atgaatattttaggttttttccagcgactcggtagggcgttacagctccctatcgcggtgctgccggtggcggcactgttgctgcgattcggtcagccagatttacttaacgttgcgtttattgcccaggcgggcggtgcgatttttgataacctcgcattaatcttcgccatcggtgtggcatccagctggtcgaaagacagcgctggtgcggcggcgctggcgggtgcggtaggttactttgtgttaaccaaagcgatggtgaccatcaacccagaaattaacatgggtgtactggcgggtatcattaccggtctggttggtggcgcagcctataaccgttggtccgatattaaactgccggacttcctgagcttcttcggcggcaaacgctttgtgccgattgccaccggattcttctgcctggtgctggcggccatttttggttacgtctggccgccggtacagcacgctatccatgcaggcggcgagtggatcgtttctgcgggcgcgctgggttccggtatctttggtttcatcaaccgtctgctgatcccaaccggtctgcatcaggtactgaacaccatcgcctggttccagattggtgaattcaccaacgcggcgggtacggttttccacggtgacattaaccgcttctatgccggtgacggcaccgcggggatgttcatgtccggcttcttcccgatcatgatgttcggtctgccgggtgcggcgctggcgatgtacttcgcagcaccgaaagagcgtcgtccgatggttggcggtatgctgctttctgttgctgttactgcgttcctgaccggtgtgactgagccgctggaattcctgttcatgttccttgctccgctgctgtacctcctgcacgcactgctgaccggtatcagcctgtttgtggcaacgctgctgggtatccacgcgggcttctctttctctgcgggggctatcgactacgcgttgatgtataacctgccggccgccagccagaacgtctggatgctgctggtgatgggcgttatcttcttcgctatctacttcgtggtgttcagtttggttatccgcatgttcaacctgaaaacgccgggtcgtgaagataaagaagacgagatcgttactgaagaagccaacagcaacactgaagaaggtctgactcaactggcaaccaactatattgctgcggttggcggcactgacaacctgaaagcgattgacgcctgtatcacccgtctgcgccttacagtggctgactctgcccgcgttaacgatacgatgtgtaaacgtctgggtgcttctggggtagtgaaactgaacaaacagactattcaggtgattgttggcgcgaaagcagaatccatcggcgatgcgatgaagaaagtcgttgcccgtggtccggtagccgctgcgtcagctgaagcaactccggcaactgccgcgcctgtagcaaaaccgcaggctgtaccaaacgcggtatctatcgcggagctggtatcgccgattaccggtgatgtcgtggcactggatcaggttcctgacgaagcattcgccagcaaagcggtgggtgacggtgtggcggtgaaaccgacagataaaatcgtcgtatcaccagccgcagggacaatcgtgaaaatcttcaacaccaaccacgcgttctgcctggaaaccgaaaaaggcgcggagatcgtcgtccatatgggtatcgacaccgtagcgctggaaggtaaaggctttaaacgtctggtggaagagggtgcgcaggtaagcgcagggcaaccgattctggaaatggatctggattacctgaacgctaacgcccgctcgatgattagcccggtggtttgcagcaatatcgacgatttcagtggcttgatcattaaagctcagggccatattgtggcgggtcaaacaccgctgtatgaaatcaaaaagtaa

SEQ ID NO: 6543 - DNA, 492 bp, Escherichia coli
atgagcacagaaacaattgaaatattcaataatagtgatgaatgggcaaatcaactaaaacacgcattatcgaaaggagaaaatctggcattactacatggtttaactcctgatatccttgatagaatatatgcatatgcattcgactaccatgaaaagggtaatataacggacgcagaaatttattataaattcttgtgcatttatgcgttcgaaaatcatgagtatctaaaagattttgcatcagtatgtcagcccaaaaagaaatatcaacaagcatatgacctttacaaactaagttacaattacttcccgtatgatgactattcagttatttatcgtatgggtcaatgtcagattggggctaaaaatatcgataacgcaatgcaatgtttctatcacattattaacaattgtgaggatgatagtgttaagagtaaagcgcaggcatatattgaactcttaaacgataattcagaagataatggctaa

SEQ ID NO: 6544 - DNA, 315 bp, Escherichia coli
atgatccgcaaagcctttgtcatgcaggtaaaccccgacgcccacgaagagtatcagcgtcggcataatcccatctggccagaactggaagcagtgctgaaatctcacggtgcgcataactacgccatctatctcgacaaagcgcgtaatctgctgtttgccatggtagagattgaatctgaagaacgctggaatgcggttgccagcactgatgtttgccaacgttggtggaaatatatgaccgatgttatgcccgctaacccggataacagcccggtgagtagcgagctgcaagaagtgttttacctgccgtaa

SEQ ID NO: 6545 - DNA, 4029 bp, Escherichia coli
atggtttactcctataccgagaaaaaacgtattcgtaaggattttggtaaacgtccacaagttctggatgtaccttatctcctttctatccagcttgactcgtttcagaaatttatcgagcaagatcctgaagggcagtatggtctggaagctgctttccgttccgtattcccgattcagagctacagcggtaattccgagctgcaatacgtcagctaccgccttggcgaaccggtgtttgacgtccaggaatgtcaaatccgtggcgtgacctattccgcaccgctgcgcgttaaactgcgtctggtgatctatgagcgcgaagcgccggaaggcaccgtaaaagacattaaagaacaagaagtctacatgggcgaaattccgctcatgacagacaacggtacctttgttatcaacggtactgagcgtgttatcgtttcccagctgcaccgtagtccgggcgtcttctttgactccgacaaaggtaaaacccactcttcgggtaaagtgctgtataacgcgcgtatcatcccttaccgtggttcctggctggacttcgaattcgatccgaaggacaacctgttcgtacgtatcgaccgtcgccgtaaactgcctgcgaccatcattctgcgcgccctgaactacaccacagagcagatcctcgacctgttctttgaaaaagttatctttgaaatccgtgataacaagctgcagatggaactggtgccggaacgcctgcgtggtgaaaccgcatcttttgacatcgaagctaacggtaaagtgtacgtagaaaaaggccgccgtatcactgcgcgccacattcgccagctggaaaaagacgacgtcaaactgatcgaagtcccggttgagtacatcgcaggtaaagtggttgctaaagactatattgatgagtctaccggcgagctgatctgcgcagcgaacatggagctgagcctggatctgctggctaagctgagccagtctggtcacaagcgtatcgaaacgctgttcaccaacgatctggatcacggcccatatatctctgaaaccttacgtgtcgacccaactaacgaccgtctgagcgcactggtagaaatctaccgcatgatgcgccctggcgagccgccgactcgtgaagcagctgaaagcctgttcgagaacctgttcttctccgaagaccgttatgacttgtctgcggttggtcgtatgaagttcaaccgttctctgctgcgcgaagaaatcgaaggttccggtatcctgagcaaagacgacatcattgatgttatgaaaaagctcatcgatatccgtaacggtaaaggcgaagtcgatgatatcgaccacctcggcaaccgtcgtatccgttccgttggcgaaatggcggaaaaccagttccgcgttggcctggtacgtgtagagcgtgcggtgaaagagcgtctgtctctgggcgatctggataccctgatgccacaggatatgatcaacgccaagccgatttccgcagcagtgaaagagttcttcggttccagccagctgtctcagtttatggaccagaacaacccgctgtctgagattacgcacaaacgtcgtatctccgcactcggcccaggcggtctgacccgtgaacgtgcaggcttcgaagttcgagacgtacacccgactcactacggtcgcgtatgtccaatcgaaacccctgaaggtccgaacatcggtctgatcaactctctgtccgtgtacgcacagactaacgaatacggcttccttgagactccgtatcgtaaagtgaccgacggtgttgtaactgacgaaattcactacctgtctgctatcgaagaaggcaactacgttatcgcccaggcgaactccaacttggatgaagaaggccacttcgtagaagacctggtaacttgccgtagcaaaggcgaatccagcttgttcagccgcgaccaggttgactacatggacgtatccacccagcaggtggtatccgtcggtgcgtccctgatcccgttcctggaacacgatgacgccaaccgtgcattgatgggtgcgaacatgcaacgtcaggccgttccgactctgcgcgctgataagccgctggttggtactggtatggaacgtgctgttgccgttgactccggtgtaactgcggtagctaaacgtggtggtgtcgttcagtacgtggatgcttcccgtatcgttatcaaagttaacgaagacgagatgtatccgggtgaagcaggtatcgacatctacaacctgaccaaatacacccgttctaaccagaacacctgtatcaaccagatgccgtgtgtgtctctgggtgaaccggttgaacgtggcgacgtgctggcagacggtccgtccaccgacctcggtgaactggcgcttggtcagaacatgcgcgtagcgttcatgccgtggaatggttacaacttcgaagactccatcctcgtatccgagcgtgttgttcaggaagaccgtttcaccaccatccacattcaggaactggcgtgtgtgtcccgtgacaccaagctgggtccggaagagatcaccgctgacatcccgaacgtgggtgaagctgcgctctccaaactggatgaatccggtatcgtttacattggtgcggaagtgaccggtggcgacattctggttggtaaggtaacgccgaaaggtgaaactcagctgaccccagaagaaaaactgctgcgtgcgatcttcggtgagaaagcctctgacgttaaagactcttctctgcgcgtaccaaacggtgtatccggtacggttatcgacgttcaggtctttactcgcgatggcgtagaaaaagacaaacgtgcgctggaaatcgaagaaatgcagctcaaacaggcgaagaaagacctgtctgaagaactgcagatcctcgaagcgggtctgttcagccgtatccgtgctgtgctggtagccggtggcgttgaagctgagaagctcgacaaactgccgcgcgatcgctggctggagctgggcctgacagacgaagagaaacaaaatcagctggaacagctggctgagcagtatgacgaactgaaacacgagttcgagaagaaactcgaagcgaaacgccgcaaaatcacccagggcgacgatctggcaccgggcgtgctgaagattgttaaggtatatctggcggttaaacgccgtatccagcctggtgacaagatggcaggtcgtcacggtaacaagggtgtaatttctaagatcaacccgatcgaagatatgccttacgatgaaaacggtacgccggtagacatcgtactgaacccgctgggcgtaccgtctcgtatgaacatcggtcagatcctcgaaacccacctgggtatggctgcgaaaggtatcggcgacaagatcaacgccatgctgaaacagcagcaagaagtcgcgaaactgcgcgaattcatccagcgtgcgtacgatctgggcgctgacgttcgtcagaaagttgacctgagtaccttcagcgatgaagaagttatgcgtctggctgaaaacctgcgcaaaggtatgccaatcgcaacgccggtgttcgacggtgcgaaagaagcagaaattaaagagctgctgaaacttggcgacctgccgacttccggtcagatccgcctgtacgatggtcgcactggtgaacagttcgagcgtccggtaaccgttggttacatgtacatgctgaaactgaaccacctggtcgacgacaagatgcacgcgcgttccaccggttcttacagcctggttactcagcagccgctgggtggtaaggcacagttcggtggtcagcgtttcggggagatggaagtgtgggcgctggaagcatacggcgcagcatacaccctgcaggaaatgctcaccgttaagtctgatgacgtgaacggtcgtaccaagatgtataaaaacatcgtggacggcaaccatcagatggagccgggcatgccagaatccttcaacgtattgttgaaagagattcgttcgctgggtatcaacatcgaactggaagacgagtaa

SEQ ID NO: 6546 - DNA, 504 bp, Escherichia coli
atgccgggcaaccgcccgcattatgggcgttggcctcaacacgattttccgccatttaaaaaactcaggccgcagtcggtaacctcgcgcatacagccgggcagtgacgtcatcgtctgcgcggaaatggacgaacagtggggatacgtcggggctaaatcgcgccagcgctggctgttttacgcgtatgacaggctccggaagacggttgttgcgcacgtattcggtgaacgcactatggcgacgctggggcgtcttatgagcctgctgtcaccctttgacgtggtgatatggatgacggatggctggccgctgtatgaatcccgcctgaagggaaagctgcacgtaatcagcaagcgatatacgcagcgaattgagcggcataacctgaatctgaggcagcacctggcacggctgggacggaagtcgctgtcgttctcaaaatcggtggagcagcatgacaaagtcatcgggcattatctgaacataaaacactatcaataa

SEQ ID NO: 6547 - DNA, 4134 bp, Escherichia coli
atgagcggaaaaccggcagcgcgtcagggcgacatgacgcagtatggcggtagcattgttcagggttcagccggggtgcgcattggtgcccccaccggcgtggcctgttcggtgtgccccggcggagtgacgtccggccatccggtcaatcccctgctcggtgcaaaggtccttcccggtgaaaccgacatcgccctgcccggcccgctgccgttcatcctctcccgcacctacagcagttaccggacaaaaacgcccgcgccggtggggagcctcggccccggctggaaaatgcctgcggatatccgcttacagctgcgcgataacacactgatactcagtgataacggcggcagaagcctgtattttgagcacctgtttcccggtgaggacggttacagccgcagcgagtcactgtggctggtgcgcggcggcgtggcgaaactggatgaaggtcaccggctggccgcactctggcaggcgctgccggaagaactccgcttaagtccgcatcgttatctggcgacaaacagtccgcaggggccgtggtggctgctcggttggtgtgagcgggtgccggaagcggatgaggtgctgcctgcgccgctgccgccgtaccgggtactgaccgggctggtggaccgcttcgggcgcacacagacgttccaccgcgaagccgccggtgaattcagcggcgaaatcaccggcgtgacggatggtgcctggcgtcacttccggctggtactgaccacgcaggcgcagcgggcagaagaagcccggcagcaggccatttccggcgggacggaaccgtccgcttttcctgataccctgccgggttacaccgaatatggccgggacaacggcatccgtctgtctgccgtgtggctgacgcacgacccggaatacccggagaatttacctgccgcgccgctggtgcgctatggctggacgccacgcggcgaactggcggtggtgtatgaccgtagtggcaaacaggtgcgcagctttacttacgatgataaataccggggccggatggtggcgcaccgtcacacgggccggccggaaatccgttaccgttacgacagcgacgggcgggtgacagaacagctaaacccggcaggcttaagctacacgtatcagtatgagaaagaccgcatcaccatcaccgacagcctggaccgccgtgaagtgctgcacacgcagggcgaagccgggctgaagcgggtggtgaaaaaggaacacgcggacggcagcgtcacgcagagtcagtttgacgccgtgggcaggctcagggcacagacggatgccgcaggcaggacaacagagtacagcccggatgtggtgacgggcctcatcacgcgcataaccacgccggatggcagggcatcggcgttttactataaccaccacaaccagttaacgtcagccaccgggcctgacgggctggaattgcgccgggaatatgatgaattgggccgtctgattcaggaaactgcccctgacggcgatatcacccgctaccgttatgataatccacacagtgacttaccctgcgcaacggaagatgccaccggcagccggaaaaccatgacgtggagccgttacggtcagttgctgagcttcaccgactgttccggttatgtaacccgttatgaccatgaccgcttcgggcagatgacggcggtgcaccgcgaggaagggctgagtcagtaccgcgcatacgacagccgtggacagttaattgccgtgaaagacacgcagggccatgaaacgcggtatgaatacaacatcgccggtgacctgaccgccgtcattgccccggacggcagcagaaacgggacacagtacgatgcgtggggaaaggccgtccgtaccacgcagggcgggctaacgcgcagtatggaatacgatgctgccggacgggtcatccgcctgaccagtgaaaacggcagccacaccaccttccgttacgatgtacttgaccggctgatacaggaaaccggctttgacggccgcacacagcgttatcaccacgacctgaccggcaaacttatccgcagcgaggatgagggtctggtcacccactggcactatgacgaagcagaccgcctcacgcaccgcaccgtgaagggtgaaaccgcagagcggtggcagtatgacgaacgtggctggctgacagacatcagccatatcagcgaagggcaccgggtggcggtgcattacaggtatgatgagaaaggccggctgaccggtgagcgtcagacggtgcatcacccgcagacggaagcactgctctggcagcatgagaccagacatgcgtacaacgcgcaggggctggcgaaccgctgtataccggacagcctgcccgccgtggaatggctgacctacggcagcggttacctggcaggcatgaaactcggcgacacaccgctggtggagtacacccgcgaccgcctgcaccgggaaacgctgcgcagcttcggccgttatgaactcaccaccgcttatacccctgccgggcagttacagagccagcacctgaacagcctgctgtctgaccgcgattacacctggaacgacaacggcgaactcatccgcatcagcagcccgcgccagacccggagttacagctacagcaccaccggcaggctgaccggcgttcacaccaccgcagcgaatctggatatccgcatcccgtatgccacagacccggcaggtaaccgcctgcccgacccggagctgcacccggacagcaccctcagcatgtggccggataaccgtatcgcccgtgacgcgcactatctttaccggtatgaccgtcacggcaggctgacagagaaaaccgacctcatcccggaaggggttatccgcacggatgatgagcggactcaccggtaccattacgacagtcagcaccggctggtgcactacacgcggacacaatatgaagagccgctggtcgaaagtcgctatctttacgacccgctgggccgcagggtggcaaaacgggtgtggcggcgtgaacgggacctgacgggctggatgtcgctgtcacggaaaccgcaagtgacctggtacggctgggacggcgaccggctgaccacaatacagaacgacagaacccgcatccagacgatttatcagccggggagcttcacgccactcatcagagttgaaaccgccaccggtgagctggcgaaaacgcagcgccgcagcctggcggatgcgcttcagcagtccggcggcgaagacggtggcagtgtggtgttcccgccggtgctggtgcagatgctcgaccggctggaaagtgaaatcctggctgaccgggtgagtgaggaaagccgccgctggctggcatcgtgcggcctgaccgtggagcagatgcaaaaccagatggacccggtgtacacgccggcgcgaaaaatccacctgtaccactgcgaccatcgcggcctgccgctggcccttatcagcaaggaagggacaacagaatggtgcgcagaatacgatgaatggggcaacctgctgaatgaagagaacccgcatcagctgcagcagcttatccgcctgccggggcagcagtatgatgaggagtccggcctgtattacaaccgccaccgctattatgacccgctgcaggggcggtatatcactcaggatccgattgggctgaaggggggatggaatttttatcagtatccgttgaatccagttacgaatacagatcctctggggttagaagtttttcctagaccattccccttgccaattccatggcccaaaagccctgcacagcagcaagcagatgataatgctgcaaaagcattgacaaaatggtggaacgatacagcatcacaaagaatatttgactctctaatattgaataatccgggactagcattagatataacaatgatagcttctcgtggaaatgttgcagacacagggataactgatcgtgtcaatgacataataaatgacagattctggagtgatgggaaaaaacccgacagatgtgacgtacttcaggaactaattgattgtggtgatattagtgctaaagatgcaaaaagcacacagaaagcctggaattgtcgtcactccagacagtcaaacgataaaaaaagatag

SEQ ID NO: 6548 - DNA, 447 bp, Escherichia coli
atgaagccacgaaatattaataatagcctaccactgcaaccattagttcctgatcaggagaacaaaaataagaaaaatgaagagaaatccgttaatccagttaaaatcacaatggggtctggtttaaattatattgaacaagaatctcttggaggaaaatatctaacacatgatttgtcaataaagatagcggatatttctgaagagataattcagcaagcaatattatctgctatgagcatatataaattttcgataacagatgatttaatgagtatggctgtaaatgaactcataaaactgaccaaaatagagaataatgtagacctgaataaattcactactatatgcacagacgttctatccccccgcgtcaccagacataataaagaaaaaaacaaacgacattctacccttctcaaaaatcccctttttaattttcattga

SEQ ID NO: 6549 - DNA, 345 bp, Escherichia coli
ttgattctcgatagacacataacatccaggggttatgtttgtatgcgtcccgcgactatcgccccattaacgccatacgataaatgggatggtgagaaatgggtgacggataccgaggcacagcatagcgtcgcagtagatgcagcagaagcacagcgccagtcgctgattgatactgcaatggcttccattagtctgattcaactgaaattacaggctgggcggaagctgatgcaggcagagacctcccgacttaacactgtgctggattacattgacgcggtgacggcaacagataccagcaccgcgccggatgtcatctggcctgaactgccggaggagtag

SEQ ID NO: 6550 - DNA, 1401 bp, Escherichia coli
atgaatagcgaaggggggaaaccggggaatgtactgaccgttaacggcaactataccggaaacaatggcctgatgacgttcaacgcgacgctgggcggcgataattcgcccaccgataagatgaacgtgaaaggcgatacccaagggaacactcgcgttcgggttgataacattggcggcgtcggtgcacaaacggtcaacggtattgaactcattgaggttggcggtaattctgcaggtaacttcgcgctgaccaccggaactgtcgaagctggggcttacgtctacacgctggctaaagggaaggggaatgacgagaaaaactggtatctgaccagtaaatgggacggcgtaacgccagcggatacacccgatcccatcaataatccccctgttgtggatccggaaggcccatcagtttatcgcccggaggccggaagctatatcagcaacattgccgcagccaactcgctgtttagccatcgtttacacgaccgtctgggtgagccgcagtatacagattcactgcattctcaggggtcggcaagcagtatgtggatgcgtcatgtcggagggcacgaacgttcaagggccggtgacggtcagctaaatactcaggctaaccgctatgtattgcagctaggcggcgatttggcgcagtggagtagcaacgcgcaggatcgctggcatcttggcgtgatggcaggctacgccaatcagcacagtaatactcagagtaatcgtgtgggttataaatcggatgggcgcatcagcggttacagcgctgggctgtacgcgacctggtatcagaacgatgcgaataagaccggcgcttatgttgacagctgggcgctgtataactggtttgataacagcgtcagttccgataaccgttctgctgacgactatgattctcgcggtgtgacggcctctgttgagggtgggtatacctttgaagcgggaacatttagcggcagcgaagggacgctgaatacctggtacgtccagccacaggcgcaaatcacctggatgggtgtgaaagattccgaccatacccggaaagacggaacgcgcattgaaacggaaggcgacggaaatgtgcaaacgcgacttggggtgaaaacctacctgaacagccatcaccagcgtgacgatggtaaacagcgtgagttccagccttacattgaagcgaactggatcaacaatagcaaagtctacgccgtgaagatgaatggtcaaaccgtaggccgtgaaggtgcgcgtaatctcggtgaagtacgtaccggggttgaggcgaaagtaaataacaaccttagcctgtgggggaatgtcggtgtgcaactaggtgataaaggctatagcgatactcagggcatgctgggagtgaaatatagctggtaa

SEQ ID NO: 6551 - DNA, 1320 bp, Escherichia coli
atgatgtcaggagaacacacgttaaaagcggtacgaggcagttttattgatgtcacccgtacgatcgataacccggaagagattgcctctgcgctgcggtttattgaggatggtttattactcattaaacagggaaaagtggaatggtttggcgaatgggaaaacggaaagcatcaaattcctgacaccattcgcgtgcgcgactatcgcggcaaactgatagtaccgggctttgtcgatacacatatccattatccgcaaagtgaaatggtgggggcctatggtgagcaattgctggagtggttgaataaacacaccttccctactgaacgtcgttatgaggatttagagtacgcccgcgaaatgtcggcgttcttcatcaagcagcttttacgtaacggaaccaccacggcgctggtgtttggcactgttcatccgcaatctgttgatgcgctgtttgaagccgccagtcatatcaatatgcgtatgattgccggtaaggtgatgatggaccgcaacgcaccggattatctgctcgacactgccgaaagcagctatcaccaaagcaaagaactgatcgaacgctggcacaaaaatggtcgtctgctatatgcgattacgccacgcttcgccccgacctcatctcctgaacagatggcgatggcgcaacgcctgaaagaagaatatccggatacgtgggtacatacccatctctgtgaaaacaaagatgaaattgcctgggtgaaatcgctttatcctgaccatgatggttatctggatgtttaccatcagtacggcctgaccggtaaaaactgtgtctttgctcactgcgtccatctcgaagaaaaagagtgggatcgtctcagcgaaaccaaatccagcattgctttctgtccgacctccaacctttacctcggcagcggcttattcaacttgaaaaaagcatggcagaagaaagttaaagtgggcatgggaacggatatcggtgccggaaccactttcaacatgctgcaaacgctgaacgaagcctacaaagtattgcaattacaaggctatcgcctctcggcatatgaagcgttttacctggccacgctcggcggagcgaaatctctgggccttgacgatttgattggcaactttttacctggcaaagaggctgatttcgtggtgatggaacccaccgccactccgctacagcagctgcgctatgacaactctgtttctttagtcgacaaattgttcgtgatgatgacgttgggcgatgaccgttcgatctaccgcacctacgttgatggtcgtctggtgtacgaacgcaactaa

SEQ ID NO: 6552 - DNA, 1239 bp, Escherichia coli
atgaagactatcttcaggtacattctttttttagcactgtattcttgttgtaatacagtcagtgcatatacaagttttattgtgggaaataatgcaggagttgataactatcgaggcccctccactgccgcacagatgacctttaattacacatcaacagcaagcaacttggttttttataaacccacgcagctcggcccgactggggtaaaaatgtactggtcatacctggatacaggtaccggtggtggtattctttactgcaatacatctggcagagcgaatcctggtccaataactattgaaaatgccatggtctattcaggtaaagattatggcggacataaactatttaatacatctgttcctggtctgtattacaccatgttaatatcaagggtctggtctgcatacgatacaataactgacattcaatcgccaggaatctatatcggagatccttccaaccaagaatttttcttttccgtcacagacagcgatctacaaactaagggttgcaacaaagcagacgactacgataagttttgggctattggtggtatagtacacaacataactgttgaattttatacagatactaatttcgatcctacacttaatcagcaagtccagttatccagttcatcaaattacctttattcgtttaaggcctacagtcctggtacaaaagttgtagatcacagcaaccacatttatgtcaatttcacactgaataatgtcaaattaaccttaccaacatgttttacctccatacttaccgggccatcagtcaatggttcaacggttagaatgggagaatatagctctgggacaattaaaaatggcgcttcacctgttccctttgatatctcgcttcagaattgtattcgtgtgcgtaatattgaaacaaaactcgtcactggaaaagtaggtactcaaaacacacaactgcttggtaatacgcttactggaagcactgccgccaaaggcgttggcgtactcattgaaggtttagcaaccagtaaaaatccgctaatgacattaaaacctaatgatacgaattctgtttatatagattatgaaaccgaagatgacacctccgatggggtttaccctaatcaaggtaacggcacatcacagcctcttcatttccaggcaacattaaagcaagacgggaatattgctatcgaacccggcgaatttaaagccaccagtactttccaggtaacctatccctga

SEQ ID NO: 6553 - DNA, 597 bp, Escherichia coli
atgcatcccactcaacgtaagctgatgaagagaataattctgtttctgtcattactgttttgcatcgcctgtccagccattgctggacaggatattgaccttgttgccaatgtaaaaaacagcacctgcaaaagcggaatcagtaaccagggtaatattgatcttggcgtcgttggggtgggatatttttcaggtaatgttactcctgaaagttatcaaccaggtggaaaagagttcactatcactgtatccgactgtgcattacagggaactggcgatgtgctaaatcagttacatattgattttagagcccttagcggtgtcatggctgctggctctaggcaaatatttgctaatgaaatttcgtcaggagcaagtaatgtaggagtagttatattttctactcaggattcggcgaatacattcaatgttcttaatgcttcaggcggatctcgttccgtttatccagtaatgtcggatgacatgaatggttcatcctggaaatttagcacccgaatgcaaaaaatcgatcctgcattgagtgttacatctggtcaacttatgagccatgtgttagtggatatttactacgaataa

SEQ ID NO: 6554 - DNA, 741 bp, Escherichia coli
atgttttttaacaccaaacatacaacagctttatgcttcgtaacctgtatggcttttagttcatcgtctattgcggacattgtcatttcgggtactcgcgtaatatataaaagcgatcaaaaaagtgtcaacgtacgtctggaaaataaagggaataacccgttgcttgtccagagttggttagatactggcgatgacaacgctgagcctggcagtattacagtcccttttactgctacgccgccagtatcgcgtattgatgccaaacgtgggcaaacaatcaaattaatgtacacagccagcacctcactgcctaaagacagagagagcgtgttctggtttaacgtactggaagttccaccaaaaccagatgcagaaaaggtcgcgaatcaaagcctgctgcaactggcatttcgcacacgtataaaacttttctatcgcccggatggattgaagggaaatccctctgaagccccgttagccctgaagtggttctggtcaggttcagaaggtaaggcgtcattacgagtgaccaatccaaccccttactacgtctcttttagcagtggtgatttagaagctagcggtaaacgctatccgattgatgtgaaaatgattgcaccatttagtgatgaggtcatgaaagtcaatggccttaatggcaaagcgaattctgcaaaagtgcatttttacgccattaatgactttggtggcgcaattgaaggtaatgccaggctgtaa

SEQ ID NO: 6555 - DNA, 357 bp, Escherichia coli
atggctcgcgtaaaacgtggtgttattgcacgtgcacgtcacaagaaaattttgaaacaagctaaaggctactacggtgcgcgttctcgcgtataccgcgttgccttccaggctgttatcaaagctggtcagtatgcttaccgtgaccgtcgtcaacgtaagcgtcagttccgtcaactgtggattgcgcgtatcaacgcagcagcacgtcagaacggtatttcttacagcaaattcatcaatggcctgaaaaaagcctctgttgaaatcgaccgtaagatcctggctgatatcgcagtattcgacaaagtagcgttcaccgctctggttgaaaaagcgaaagcagctctggcataa

SEQ ID NO: 6556 - DNA, 1059 bp, Escherichia coli
atgctaccatctatttcaatcaacaataccagcgcagcttacccagaatccatcaatgaaaataacaatgatgaagttaatggattagtacaagagttcaaaaacctttttaatggtaaggaaggaataagcacctgtattaaacatctacttgagcttataaaaaacgccatacgagtaaacgacgatccttatagatttaatattaataattcctcagttacttatattgatattgactccaatgatacagaccatattactattggtatcgacaaccaagaaccaatagaattacctgcgaactataaagacaaagaactcgtccgtactatcattaatgacaacatagttgagaagactcatgatatcaataacaaggaaatgatcttcagcgcattaaaagaaatatatgatggagatcctggttttatcttcgataagatatcacacaaactcagacatacggtaacggaatttgatgagagcgggaaaagcgaaccaacggacttatttacctggtacggtaaagataaaaaaggcgactctctcgctattgtaattaaaaataaaaacggaaatgattacttatctctcggttactacgatcaggacgactaccacattcaaagaggaattcgtattaatggtgatagtctcacccaatattgtagtgaaaacgccaggagtgcttcagcgtggtttgaaagcagtaaagctatcatggcagaatcatttgcaactggttccgatcatcaggttgtaaacgagctcaacggggaaagactgagagaaccaaacgacgtttttaaacgttatggtcgagcaataagatatgattttcaagtggacgatgcaaaatataaatgcgaccatctaaaagaaatagtttctactttagtcggtaacaaaattaacgttggccattctcaaaaaatatataagcattttaaggatctcgaaggtaaaattgaagaaaggcttcaaaatcgccaggctgaatatcaaaatgaaattaatcaaccatctgcgccaggtgttaattttgatgatatttaa

SEQ ID NO: 6557 - DNA, 1254 bp, Escherichia coli
atgctggaacaaatgggcattgccgcgaagcaagcctcgtataaattagcgcaactctccagccgcgaaaaaaatcgcgtgctggaaaaaatcgccgatgaactggaagcacaaagcgaaatcatcctcaacgctaacgcccaggatgttgctgacgcgcgagccaatggccttagcgaagcgatgcttgaccgtctggcactgacgcccgcacggctgaaaggcattgccgacgatgtacgtcaggtgtgcaacctcgccgatccggtggggcaggtaatcgatggcggcgtactggacagcggcctgcgtcttgagcgtcgtcgcgtaccgctgggggttattggcgtgatttatgaagcgcgcccgaacgtgacggttgatgtcgcttcgctgtgcctgaaaaccggtaatgcggtgatcctgcgcggtggcaaagaaacgtgtcgcactaacgctgcaacggtggcggtgattcaggacgccctgaaatcctgcggcttaccggcgggtgccgtgcaggcgattgataatcctgaccgtgcgctggtcagtgaaatgctgcgtatggataaatacatcgacatgctgatcccgcgtggtggcgctggtttgcataaactgtgccgtgaacagtcgacaatcccggtgatcacaggtggtataggcgtatgccatatttacgttgatgaaagtgtagagatcgctgaagcattaaaagtgatcgtcaacgcgaaaactcagcgtccgagcacatgtaatacggttgaaacgttgctggtgaataaaaacatcgccgatagcttcctgcccgcattaagcaaacaaatggcggaaagcggcgtgacattacacgcagatgcagctgcactggcgcagttgcaggcaggccctgcgaaggtggttgctgttaaagccgaagagtatgacgatgagtttctgtcattagatttgaacgtcaaaatcgtcagcgatcttgacgatgccatcgcccatattcgtgaacacggcacacaacactccgatgcgatcctgacccgcgatatgcgcaacgcccagcgttttgttaacgaagtggattcgtccgctgtttacgttaacgcctctacgcgttttaccgacggcggccagtttggtctgggtgcggaagtggcggtaagcacacaaaaactccacgcgcgtggcccaatggggctggaagcactgaccacttacaagtggatcggcattggtgattacaccattcgtgcgtaa

SEQ ID NO: 6558 - DNA, 1167 bp, Escherichia coli
atgatctatcttgtaattagtgtctttctcattacagcatttatctgtttatatcttaagaaggatatattttatccagccgtatgcgttaatatcatcttcgcactggtcttattgggatatgaaataacgtcagatatatatgcttttcagttaaatgacgctacgttgatttttctactttgcaatgttttgacatttaccctgtcatgtttattgacggaaagtgtattagatctaaatatcagaaaagtcaataatgctatttatagcataccatcgaagaaagtgcataatgtaggcttgttagttatttctttttcgatgatatatatatgcatgaggttaagtaactaccagttcgggactagcttacttagctatatgaatttgataagagatgctgatgttgaagacacatcaagaaatttctcagcatacatgcagccaatcattctaactacttttgctttatttatttggtctaaaaaatttactaatacaaaggtaagtaaaacatttactttacttgtttttattgtattcatctttgcaattatactgaatactggtaagcaaattgtctttatggttatcatctcttatgcattcatcgtaggtgttaatagagtaaaacattatgtttatcttattacagctgtaggtgttctattctccttgtatatgctctttttacgtggactgcctggggggatggcatattatctatccatgtatttggtcagccctataatcgcgtttcaggagttttattttcagcaagtatctaactctgccagttctcatgtcttttggttttttgaaaggctgatggggctattaacaggtggagtctctatgtcgttgcataaagaatttgtgtgggtgggtttgccaacaaatgtttatactgctttttcggattatgtttatatttccgcggagctaagctatttgatgatggttattcatggctgtatttcaggtgttttatggagattgtctcgaaattacatatctgtgaaaatattttattcatattttatttataccttttctttcattttttatcatgaaagcttcatgactaatattagcagttggatacaaataactctttgtatcatagtattctctcaatttcttaaggcccagaaaataaagtga

SEQ ID NO: 6559 - DNA, 948 bp, Escherichia coli
gtgtgtcatcgcgcatttcgacttcatctttgcaaggactgggttttcatgttttctgggctgttaatcattctggttcccctgattgtgggttacctcattccgcttcgccaacaagctgcgttaaaagttattaatcagctattaagctggatggtttaccttattctcttttttatgggtatcagtctggcgtttctcgataacctcgccagtaacctgttggcgattctgcattattctgccgtcagtattaccgttattttactgtgtaatattgccgccctgatgtggctggagcgaggcctgccgtggcgcaaccaccatcagcaagaaaaactcccgtcgcgtattgcgatggcgctggagtcgctaaaactgtgcggcgtagtagtgattggttttgccattggtctaagtggactggctttcttacaacacgcgaccgaagccagtgaatacacgttaattttgctacttttcctcgttggtattcagttgcgcaataatggcatgaccttaaagcagattgtccttaatcgccggggaatgattgtcgccgtggtggtggttgtcagttcattaattggtggtttaattaacgcctttattcttgatctccccatcaataccgcgctggcaatggcctccggtttcggctggtattctctttccggtattttattgaccgaatcttttggtccggtaatcgggagcgcggcgttttttaatgatctggcccgtgaactgattgctattatgttgatccctgggctgattcgccgcagccgctctactgcactgggcttatgcggtgccacatcaatggatttcaccctgcccgttcttcaacgtactggcgggctggatatggtcccggcggcaattgttcacggttttattcttagcctgttagtgccgatcctcatcgcctttttctctgcgtaa

SEQ ID NO: 6560 - DNA, 147 bp, Escherichia coli
atgactaagagcaccacgatgatgatccacttcatcatgaccctttccttatttaaggccccttcctcgggaggggctttcccgtttcagcgtcccgctgaaatcgtcggcttacctcctttcgccctgaattcagtctatcgctga

SEQ ID NO: 6561 - DNA, 1188 bp, Escherichia coli
atgttccctgtttcatcaattggtaatgatattagtagtgatttagtccgtcgaaaaatgaatgaccttcctgaaagcccaacaggaaataacctcgaagcactagcaccaggtatagaaaaactaaaacagacctctattgaaatggtcactttacttaacacgttacaacctggtggaaaatgcattatcactggtgattttcaaaaagaattagcgtacttacaaaatgtaattctttataatgtctcgtctcttcgtctggattttttaggttataacgcccaaattattcaacgatcggacaatacttgtgaacttaccattaatgaaccgttaaaaaaccaggaaatatccacaggtaatatcaatattaattgcccattaaaagatatttacaatgaaatcaggaggttaaacgtaatttttagttgtgggactggagatatcgttgatctatcctctctggacttacgtaatgtcgatttagattattatgatttcacagataaacatatggctaatactattttaaatccttttaaattgaattcaacaaattttactaatgccaacatgtttcaggttaattttgttagttcaacacaaaacgccacaatctcctgggattatttactaaaaataacgcctgttttaataagcattagcgatatgtattctgaagaaaaaatcaagtttgtcgaaagttgtttaaatgagcctggagacattaccgaagaacaattaaaaattatgagatttgcaattataaaatctataccaagggcaactcttacagataaattagaaaatgaattaacaaaagaaatatataaaagctcatcgaaaatcatcaattgcttgaacagaattaaattaacagagatgaaagaattctcatcagaaaaaatatatgattacatcgatataatcattgaagattatgaaaataccaaagaaaatgcttatctggtcgtcccccaaattaattatactatggatttaaacatagaagactctagctcagaagagttactttcagataataccctcgagaaagacgaaaattctccggacaatggctttgaggtcggggaatataacacatatgaagcatataactcagagaagcaatattttaccagagaggactatacgtatgattacgaccttttaaatgcaatatag

SEQ ID NO: 6562 - DNA, 474 bp, Escherichia coli
atgctaaacatcgtactttacgaaccagaaattccgccaaatactggcaacatcatccgtctttgcgctaataccggctttcgtctgcatatcatcgaaccgatgggatttgcctgggacgataagcgcctgcgccgcgcggggctggactatcacgagtttaccgccgttacgcgtcatcatgactatcgcgcgttcctcgaagcagaaaatccccagcgcctgttcgccctcaccacgaaaggtacacctgctcacagcgccgtaagctatcaggatggcgattatctgatgttcggcccggaaacacgcggcctgccagcgagcattcttgatgccctgcccgctgaacaaaaaattcgcattccgatggtgccggacagccgcagcatgaatctgtccaatgcggtgtcggtagtggtgtatgaagcctggcggcagttggggtatccgggagcggtattgagagattag

SEQ ID NO: 6563 - DNA, 708 bp, Escherichia coli
atgtaccgttatttgtctattgctgcggtggtactgagcgcagcattttccggcccggcgttggccgaaggtatcaatagtttttctcaggcgaaagccgcggcggtaaaagtccacgctgacgcgcccggtacgttttattgcggatgtaaaattaactggcagggcaaaaaaggcgttgttgatctgcaatcgtgcggctatcaggtgcgcaaaaatgaaaaccgcgccagccgcgtagagtgggaacatgtcgttcccgcctggcagttcggtcaccagcgccagtgctggcaggacggtggacgtaaaaactgcgctaaagatccggtctatcgcaagatggaaagcgatatgcataacctgcagccgtcagtcggtgaggtgaatggcgatcgcggcaactttatgtacagccagtggaatggcggtgaaggccagtacggtcaatgcgccatgaaggtcgatttcaaagaaaaagctgccgaaccaccagcgcgtgcacgcggtgccattgcgcgcacctacttctatatgcgcgaccaatacaacctgacactctctcgccagcaaacgcagctgttcaacgcatggaacaagatgtatccggttaccgactgggagtgcgagcgcgatgaacgcatcgcgaaggtgcagggcaatcataacccgtatgtgcaacgcgcttgccaggcgcgaaagagctaa

SEQ ID NO: 6564 - DNA, 549 bp, Escherichia coli
atgattcggcaacgtcgtcgtgcgttaacgccggaacaacagcaggaaatgggtcaacaagccgctacccggatgatgacttatcccccggtggtgatggcacatacggtcgctgtattcctctcttttgatggcgaactcgacacccagccactcatagaacaactctggcgcgccggtaagcgcgtatatcttccagttttgcatccctttagtgccggtaatttgctgttcctgaattaccatccgcaaagcgaactggtgatgaacaggttgaagatccatgagccaaaattggatgtgcgtgacgtgctacccctttcccgattagacgtgctgatcacaccgctggtcgcctttgatgagtacggtcagcgcctgggaatgggcggtggtttttatgatcggaccttacaaaactggcagcactataaaacgcaaccggtgggttatgcgcatgattgtcagttggtggaaaaactccccgttgaagagtgggatatccctcttcctgcggtggttacaccgtcgaaagtctgggagtggtaa

SEQ ID NO: 6565 - DNA, 1128 bp, Escherichia coli
atgatgcgccatttacgcaatatttttaatctgggtatcaaagagttgcgcagtctgctcggtgataaagcgatgctgacgctgattgtcttctcgtttacggtgtcggtgtattcgtcagcgaccgttacgccaggatcgttgaacctcgcgccgatcgccattgccgatatggatcaatcgcagttatcgaaccggatcgttaacagcttctatcgtccgtggtttttgccaccggagatgatcaccgccgatgagatggatgccggactggacgccggacgctataccttcgcgataaatattccgcctaattttcagcgtgatgtcctcgccggacgccagccggatattcaggtgaacgtcgatgccacgcgcatgagccaggcatttaccggcaatgggtatatccagaatattatcaacggtgaagtgaacagctttgtcgcgcgctaccgtgataacagcgaaccgttggtatcgctggaaacccggatgcgctttaacccgaacctcgatcccgcgtggtttggcggggtgatggcgatcatcaacaacattaccatgctggcgattgtattgaccggatcggcgctgatccgcgagcgtgaacacggcacggtggaacacttactggtgatgccgataacgccgtttgagatcatgatggcgaagatctggtcgatggggctggtggtgctggtggtatcgggattatcgctggtgctgatggtgaaaggtgtactgggcgtaccgattgaaggctcgatcccgctgtttatgctgggcgtggcgctcagtctgtttgccaccacgtcaatcggcatttttatggggacgatagcgcgttcaatgccgcaactggggctgctggtgattctggtgctgctgccgctgcaaatgctttccggtggttccacgccgcgcgaaagtatgccgcagatggtgcaggacattatgctgaccatgccgacgacacactttgttagcctcgcgcaggccatcctctaccggggtgccggattcgaaatcgtctggccgcagtttctgacgctgatggcaattggcggcgcatttttcaccattgcgctgctgcgattcaggaagacgattgggacaatggcgtaa

SEQ ID NO: 6566 - DNA, 702 bp, Escherichia coli
atgggtcagaaagtacatcctaatggtattcgcctgggtattgtaaaaccatggaactctacctggtttgcgaacaccaaagaattcgctgacaacctggacagcgattttaaagtacgtcagtacctgactaaggaactggctaaagcgtccgtatctcgtatcgttatcgagcgtccggctaagagcatccgtgtaaccattcacactgctcgcccgggtatcgttatcggtaaaaaaggtgaagacgtagaaaaactgcgtaaggtcgtagcggacatcgctggcgttcctgcacagatcaacatcgccgaagttcgtaagcctgaactggacgcaaaactggttgctgacagcatcacttctcagctggaacgtcgcgttatgttccgtcgtgctatgaagcgtgctgtacagaacgcaatgcgtctgggcgctaaaggtattaaagttgaagttagcggccgtctgggcggcgcggaaatcgcacgtaccgaatggtaccgcgaaggtcgcgtaccgctgcacactctgcgtgctgacatcgactacaacacctctgaagcgcacaccacttacggtgtaatcggcgttaaagtgtggatcttcaaaggcgagatcctgggtggtatggctgctgttgaacaaccggaaaaaccggctgctcagcctaaaaagcagcagcgtaaaggccgtaaataa

SEQ ID NO: 6567 - DNA, 1266 bp, Escherichia coli
atgctcacgaaaaagaaatgggcgttatttagtctattaacactgtgtggcggtacaatttataaattaccgtcgctgaaagatgcgttttatatcccgatgcaggaatatttccatttgaccaatggtcaaattggtaatgctatgtcggtaaactcatttgtcaccacagtgggcttttttctgtctatttattttgccgataaactaccgcgcagatacaccatgtcattctcactcattgcgacaggattactgggtgtttatttgacgacaatgccggggtattggggcatcctctttgtctgggcgctatttggcgttacttgcgacatgatgaactggccggtcttgctcaagtcggtaagtcgattgggcaatagcgaacaacaaggtcggttgtttggcttcttcgaaacagggcgtggcattgtcgataccgtggtggcattttctgcgttggcagtatttacctggtttggcagtggcttattaggttttaaagcaggcatctggttctattcccttattgtgattgccgtaggcattattattttctttgtcctgaatgacaaagaagaggcaccgtccgttgaggtgaaaaaagaagacggagcatcgaaaaacaccagtatgacctcggtgctgaaagacaaaactatctggcttatcgcttttaacgtcttcttcgtttacgcggtttactgtggcctgacattcttcattccattcctgaaaaacatctatctattgcccgttgcgctggtgggggcttacggcatcattaaccaatactgtctgaaaatgattggtggaccgattggtggcatgatttcagataagatcctgaaatcgccaagtaaatatctatgctacacctttatcattagtaccgctgcgctcgtactgttgattatgctgccgcacgaaagtatgccggtctatttagggatggcatgtacgctgggctttggcgcgatagtctttacacagcgagccgtattttttgcacctatcggcgaagcaaaaattgctgaaaataaaacaggtgcggcgatggcgttgggtagctttattggttacgctccggcgatgttctgcttcagtctgtatggctacattctggatttaaatccggggattattggctacaaaatcgtgtttggcattatggcctgcttcgcattcagtggtgcggtggtttccgtaatgctggttaagcgtattagccaacgtaagaaagagatgctggcggctgaagcttaa

SEQ ID NO: 6568 - DNA, 2313 bp, Escherichia coli
atgcctcgcttgttaaccaaacgcggctgctggataacgttggcagccgcgccctttctcctttttcttgcagcgtggggagcagataaactctggcctctaccgctgcatgaagtcaatcccgcacgagtggtcgtggcgcaggatggtacgccgctctggcgcttcgccgatgctgacggcatctggcgttatccggtaacaatcgaagatgtttctccacgttaccttgaagcgctgatcaattatgaagatcgctggttctggaagcatccgggggtgaatccattctcggtggcgcgcgcagcatggcaagatctcacttcgggacgggttatttccggtggcagcacgctcactatgcaggttgctcgtctgcttgatcctcaccccaaaacatttggcggcaaaattcgccagctctggcgcgcgttgcaactggaatggcatctgtctaagcgtgaaattctgaccttgtatcttaaccgcgctccgtttggcggtacgttgcaggggatcggtgcggcaagttgggcttatctcggaaaatcgcctgcgaatttaagctattccgaggcggcaatgctggcggttttgccgcaagcgcccagccgtcttcgcccggatcgttggccggagcgtgccgaagccgcgcgtaataaagtgctcgaacggatggccgtgcaaggtgtgtggtcccgtgagcaggtaaaagagtcaagggaagaacccatctggctggccccccgacaaatgccgcaactggcaccgctgttttcgcgcatgatgctcggtaaaagcaaaagcgacaaaatcactactacgttggatgccggtcttcaacgacgtctggaagaactggcgcaaaactggaaagggcggttgccaccgcgcagctcactggcgatgatcgtggttgatcataccgatatgcgtgttcgcggctgggtgggatcggttgatctcaacgatgattcacgctttggtcatgttgatatggtcaattcgatccgatcgccaggatcagtgctcaaaccgtttgtttatggtctggcgctggatgaaggcttgatccacccggcatcactgctgcaagacgtcccccggcgcaccggtgattatcgaccaggtaactttgatagcggttttcatggcccgatcagcatgagcgaggcgctggtgcgctcgctgaacttacctgctgtgcaggtgctggaagcctatggaccgaaacggtttgcggcaaagttacgcaatgttggattgccgttatatttgcccaacggtgctgcgccgaatctttcactcattctcggcggcgctggtgcaaaactggaagatatggcggcagcgtataccgcgtttgctcgccacggcaaggcaggcaaattgcgcttacagcctgacgatccgctgcttgaacggcctttaatgtcgtcgggggcggcgtggatcattcgccggattatggctgatgaagcgcaacccttgccggatagtgccttgccgcgcgtcgccccactggcatggaaaacgggcaccagctatggctatcgtgacgcctgggcgattggggttaacgctcgctatgtcattgggatctggactggcagaccggacggcacgcccgttgttggtcagtttggctttgccagtgccgtaccattgttgaatcaggtcaataatatcttactgtcgcgcagtgcgaatctgccggaagacccgcgcccgaactcagtcactcgtggcgttatctgctggccgggcggacagtctttgccggaaggtgacggtaactgtcgccgccgcctggcaacctggctgctggacgggagtcagccgccaactctattactgccggagcaggaaggcattaatggcattcgtttccccatctggctggatgaaaatggcaaacgtgttgccgctgattgcccgcaagcgcgacaagaaatgataaatgtctggccgctaccgctggaaccctggctgcccgcatcagaacgtcgcgctgtgcgcttaccaccggcctcgacaagttgcccgccatacggtcacgatgcccagctcccgctgcagctgacaggcgttcgcgatggcgcgattattaaacgtttaccgggcgcagcggaagcgactttgccgttgcaatcaagtggaggggcaggtgaacgctggtggtttctgaatggcgaaccgttaactgaacgcgggcgcaacgtgaccctgcatttgacggataaaggtgattatcaattgctggtgatggatgacgtggggcaaatcgcgacagtgaaatttgtcatgcaatag

SEQ ID NO: 6569 - DNA, 1632 bp, Escherichia coli
atgagacattcattgccctaccgcatgttacgcaaacgtccgatgaaattgagtaccacagtgatcttaatggtcagtgcggtactgttctcggtgctattggtggtgcatctgatttacttctcgcaaatcagtgatatgacgcgagatgggctagccaacaaggcactggcagtggcgcgtaccctcgccgactcgccggaaatccgtcagggcttgcagaaaaaaccgcaggagagtggcatccaggccatcgcggaagccgtacgcaaacgcaacgatctgctgtttattgtcgttaccgatatgcaaagtcttcgctactcgcatcctgaagcccagcgtattggtcagccatttaaaggtgatgacatccttaaagcgctgaatggcgaagaaaatgtcgctatcaatcgcggttttctggcgcaggctttacgcgtatttacccccatctacgatgaaaatcataaacaaattggcgtggtggcgatcggccttgagttaagccgtgtgacccaacagatcaatgacagtcgctggagcattatctggtcggtattatttggcatgctggtcggactgattggcacctgcattctggttaaggtactgaaaaaaatccttttcggcctggaaccctacgaaatctccacgctgtttgagcaacgccaggccatgttgcagtctatcaaagaaggcgtcgttgccgtggacgatcgcggcgaggtcacgctgatcaacgatgccgcacaagaattgctgaattaccgtaagtcgcaggacgatgagaaactgtcgacgctaagccactcatggtcacaggtggtagatgtctcggaagtgttacgcgacggtaccccgcgccgcgacgaagagattacgattaaagaccggctattactgatcaacaccgttccggtgcgcagtaatggcgttatcatcggtgccatttcaaccttcagggacaaaactgaagtacgtaaactgatgcagcgactcgacggtctggtcaactatgctgacgcacttcgtgaacgatcccacgaatttatgaataaattgcatgtgattctcggattattgcatctgaagagttataagcagttggaagattacattctcaaaacagccaataactatcaggaagagattggctctctgctgggtaagatcaaatctccggttatcgctggttttttaatcagcaagattaaccgcgcgaccgatttaggccatacgctgattttaaacagtgaaagccagctgccagacagcggcagtgaggaccaggtcgcgacgctgattaccacgttgggaaatctgatagaaaacgcgctggaggcattagggccggaacccggaggcgaaattagcgtaacattgcactaccgtcacggctggctgcactgtgaagttaatgatgatggaccggggatcgcacccgataaaatcgatcacatttttgacaaaggtgtctcgacaaaaggaagcgagcgaggcgtcggtttagcacttgtcaaacaacaggtagaaaatctcggcggcagcatcgccgtggaatcggaacccgggattttcacacaattttttgtccagataccctgggacggggagaggtcgaacagatga

SEQ ID NO: 6570 - DNA, 774 bp, Escherichia coli
atgagtatggttgaaactgccccgagtaaaattcaggttcgtaatttgaacttctactacggcaaattccatgccctgaaaaacatcaacctggatatcgctaaaaaccaggtaacggcgtttatcgggccgtccggctgcggtaaatcgacgctgctgcgtaccttcaacaaaatgtttgaactgtacccggagcagcgtgcggaaggtgaaattctgcttgatggcgacaacatcctgaccaactctcaggatatcgcactgctgcgtgcgaaagtgggcatggtgttccagaaaccgacgccgtttccgatgtccatctacgacaacatcgcttttggcgttcgtctgtttgagaagctctcccgtgccgacatggacgagcgcgtgcagtgggcattgaccaaagccgcattgtggaacgaaaccaaagataaattgcaccagagcggttactctctctctggtggtcagcaacagcgtctgtgtattgcgcgtggtatcgccattcgcccggaagtgctgctgctcgacgaaccgtgttcggcgctcgaccctatctctaccgggcgtattgaagagctgatcaccgaactgaagcaggattacaccgtggtgatcgtcacccacaacatgcagcaggctgcgcgttgttccgaccacacggcgtttatgtacctgggcgaattgattgagttcagcaacacggacgatctgttcaccaagccagcgaagaaacaaacagaagactacatcaccggtcgttacggttga

SEQ ID NO: 6571 - DNA, 711 bp, Escherichia coli
atgggatctggactggtgaacggaggtgattatttttataataacctttcattcacagtcaccaggtacaacggcatcatggcaactgactcaacacaatgtgtaaaaaaaagccgtggccgcccaaaagtgttcgacagggatgccgcgcttgataaggccatgaaattgttctggcaacacggttatgaagcgacttctcttgcggacctcgtcgaagcgaccggagccaaagcgcccacgctatacgcggaatttaccaacaaagaggggttatttcgtgccgttctcgaccgctatatcgatcgttttgccgctaagcatgaagcacagctgttttgtgaagagaaaagcgtggagtctgcgctggctgactattttgctgccatcgccaactgctttaccagcaaagacaccccggcaggctgcttcatgatcaacaactgcaccaccctctccccagattcaggagatatcgccaatacgttgaaatcacgccatgcgatgcaagagcgcactttgcagcagtttttatgtcaacgacaagcgcgcggggaaatcccgccccactgtgacgtgacacatctggcagaattccttaattgtattattcaggggatgtcgatcagcgcacgcgaaggtgcatcgctggaaaaactgatgcagattgccggaacgactttgcgtttatggcccgaactggtgaaataa

SEQ ID NO: 6572 - DNA, 2109 bp, Escherichia coli
ttgtatctgtttgaaagcctgaatcaactgattcaaacctacctgccggaagaccaaatcaagcgtctgcggcaggcgtatctcgttgcacgtgatgctcacgaggggcaaacacgttcaagcggtgaaccctatatcacgcacccggtagcggttgcctgcattctggccgagatgaaactcgactatgaaacgctgatggcggcgctgctgcatgacgtgattgaagatactcccgccacctaccaggatatggaacagctttttggtaaaagcgtcgccgagctggtagagggggtgtcgaaacttgataaactcaagttccgcgataagaaagaggcgcaggccgaaaactttcgcaagatgattatggcgatggtgcaggatatccgcgtcatcctcatcaaacttgccgaccgtacccacaacatgcgcacgctgggctcacttcgcccggacaaacgtcgccgcatcgcccgtgaaactctcgaaatttatagcccgctggcgcaccgtttaggtatccaccacattaaaaccgaactcgaagagctgggttttgaggcgctgtatcccaaccgttatcgcgtaatcaaagaagtggtgaaagccgcgcgcggcaaccgtaaagagatgatccagaagattctttctgaaatcgaagggcgtttgcaggaagcgggaataccgtgccgcgtcagtggtcgcgagaagcatctttattcgatttactgcaaaatggtgctcaaagagcagcgttttcactcgatcatggacatctacgctttccgcgtgatcgtcaatgattctgacacctgttatcgcgtgctgggccagatgcacagcctgtacaagccgcgtccgggccgcgtgaaagactatatcgccattccaaaagcgaacggctatcagtctttgcacacctcgatgatcggcccgcacggtgtgccggttgaggtccagatccgtaccgaagatatggaccagatggcggagatgggtgttgccgcgcactgggcttataaagagcacggcgaaaccagtactaccgcacaaatccgcgcccagcgctggatgcaaagcctgctggagctgcaacagagcgccggtagttcgtttgaatttatcgagagcgttaaatccgatctcttcccggatgagatttacgttttcacaccggaagggcgcattgtcgagctgcctgccggtgcaacgcccgtcgacttcgcttatgcagtgcataccgatatcggtcatgcctgcgtgggcgcacgcgttgaccgccagccttacccgctgtcgcagccgcttaccagcggtcaaaccgttgaaatcattaccgctccgggcgctcgcccgaatgccgcttggctgaactttgtcgttagctcgaaagcgcgcgccaaaattcgtcagttgctgaaaaacctcaagcgtgatgattctgtaagcctgggccgtcgtctgctcaaccatgctttgggtggtagccgtaagctgaatgaaatcccgcaggaaaatattcagcgcgagctggatcgcatgaagctggcaacgcttgacgatctgctggcagaaatcggacttggtaacgcaatgagcgtggtggtcgcgaaaaatctgcaacatggggacgcctccattccaccggcaacccaaagccacggacatctgcccattaaaggtgccgatggcgtgctgatcacctttgcgaaatgctgccgccctattcctggcgacccgattatcgcccacgtcagccccggtaaaggtctggtgatccaccatgaatcctgccgtaatatccgtggctaccagaaagagccagagaagtttatggctgtggaatgggataaagagacggcgcaggagttcatcaccgaaatcaaggtggagatgttcaatcatcagggtgcgctggcaaacctgacggcggcaattaacaccacgacttcgaatattcaaagtttgaatacggaagagaaagatggtcgcgtctacagcgcctttattcgtctgaccgctcgtgaccgtgtgcatctggcgaatatcatgcgcaaaatccgcgtgatgccagacgtgattaaagtcacccgaaaccgaaattaa

SEQ ID NO: 6573 - DNA, 987 bp, Escherichia coli
ttgagtgtaccgctgtcgacatggaatcttctgcgatacaacaattcgtatctacagaaggtaactatgtttccacaatgcaaattttcccgcgagtttctacatcctcgctactggctcacatggtttgggcttggtgtactctggctttgggtacagcttccttatcctgttctctgctttctcggcacgcgtattggcgcaatggcgcgaccattcctgaaacgtcgtgaatctatcgcccgtaaaaacctggaactttgtttcccgcagcattctgcggaagaacgcgagaagatgattgccgaaaactttcgttcactcggcatggcgctggtagaaaccggcatggcatggttctggcccgacagtcgcgtacgtaaatggtttgatgttgaagggttggataaccttaaacgcgcacaaatgcaaaatcgcggcgtaatggttgtcggcgtccattttatgtcgctggaactgggcggccgcgtgatgggactgtgccaaccaatgatggctacctatcgtccacataataatcagctgatggaatgggtgcagacccgtgggcgcatgcgctctaacaaagcgatgatcggcagaaataatctgcgcggcattgtcggtgcactgaagaaaggtgaagcggtatggtttgctcccgatcaggattatggtcgtaaaggcagctccttcgcgccgttctttgcggtggaaaatgtcgccacaaccaatggcacctatgttctctcccgtctctctggcgcagccatgttgaccgtaacgatggtaagaaaagcggattacagcggatatcgtttgttcatcaccccagagatggaaggctacccgacagatgaaaatcaagccgctgcctatatgaacaagattatcgagaaagagatcatgcgcgcaccggagcagtacctctggatccaccgtcgctttaaaacgcgcccggtgggagaatcgtcgttgtacatttaa

SEQ ID NO: 6574 - DNA, 795 bp, Escherichia coli
atgaaacagtatttagaactgatgcaaaaagtgctcgacgaaggcacacagaaaaacgaccgtaccggaaccggaacgctttccatttttggtcatcagatgcgttttaacctgcaagatggattcccgctggtgacaactaaacgttgccacctgcgttccatcatccatgaactgctgtggtttctgcagggcgacactaacattgcttatctacacgaaaacaatgtcaccatctgggacgaatgggccgatgaaaacggcgacctcgggccagtgtatggtaaacagtggcgcgcctggccaacgccagatggtcgtcatattgaccagatcactacggtactgaaccagctgaaaaacgacccggattcgcgccgcattattgtttcagcgtggaacgtaggcgaactggataaaatggcgctggcaccgtgccatgcattcttccagttctatgtggcagacggcaaactctcttgccagctttatcagcgctcctgtgacgtcttcctcggcctgccgttcaacattgccagctacgcgttattggtgcatatgatggcgcagcagtgcgatctggaagtgggtgattttgtctggaccggtggcgacacgcatctgtacagcaaccatatggatcaaactcatctgcaattaagccgcgaaccgcgtccgctgccgaagttgattatcaaacgtaaacccgaatccatcttcgactaccgtttcgaagactttgagattgaaggctacgatccgcatccgggcattaaagcgccggtggctatctaa

SEQ ID NO: 6575 - DNA, 741 bp, Escherichia coli
atgaataacaacaccacggcaccaacctatacgctgcgtggcttacagttgattggttggcgtgatatgcagcacgccctcgattatctgtttgctgacgggcagcttaagcagggaacgctggttgccattaatgctgaaaaaatgctgactattgaagataacgccgaggtcagggagttaattaacgctgccgaatttaaatatgcggatggcatcagcgttgtacgttcagtacgtaaaaagtacccgcaggcgcaggtttcccgcgttgccggtgccgatctctgggaagagctgatggcgcgcgcaggcaaagaagggacgccggtatttcttgtgggcggtaaacctgaagtgctggcgcaaactgaagctaaactgcgcaaccagtggaatgtgaatatcgttggcagtcaggatggttattttaaacccgagcagcgtcaggcgctgtttgaacgcattcatgccagcggtgcgcaaatcgtcaccgttgcgatgggatcgccaaagcaggagatcatcatgcgcgactgccgtctggtacatccagatgcgctgtatatgggcgttggcgggacttacgatgttttcaccggtcacgtaaaacgcgcaccgaaaatctggcaaacgctggggctggagtggctctaccgcctgctttcgcagccgagccgcattaagcgtcagcttcgtttgctgcgttatttacgctggcactacaccggcaacctatga

SEQ ID NO: 6576 - DNA, 978 bp, Escherichia coli
atgagctctatctccctgatccaaccggatcgcgacctgttctcctggccgcagtactgggccgcctgttttggaccggcaccgtttttgccgatgtctcgtgaagagatggatcaacttggctgggatagctgcgacatcattttggttactggcgacgcgtatgtcgatcacccaagcttcgggatggcgatttgcggtcgtatgctggaagcgcagggctttcgcgtcgggatcatcgcccagccggactggagcagcaaagacgactttatgcgtctgggtaaaccgaatctgtttttcggtgttactgctggcaacatggattcgatgatcaaccgttataccgccgatcgccgtttacgtcatgacgatgcctacacgccggataacgtcgcgggtaagcgcccggatcgcgccacactggtttatacccagcgttgtaaagaggcgtggaaagatgtaccggtgatcctcggcggtattgaggctagtctgcgccgtaccgcgcattatgattactggtccgataccgtgcgccgttccgtgctggtggattcgaaagccgacatgctgatgtttggtaacggtgagcgtccgctggtggaagtggcgcatcgtctggcgatgggcgagccaattagtgaaatccgcgatgtgcgtaataccgcgattatcgtgaaagaggcgctgcctggctggagcggcgtggattccacccgtcttgatacccctggaaaaatcgacccaatcccgcatccgtatggtgaagatttgccgtgcgcggataacaaaccggtggcaccgaaaaagcaggaagccaaagccgtaaccgtgcagccaccgcgcccgaaaccgtgggaaaaaacctacgtgttgctgccttctttcgagaaagtgaagggcgataaagtgctgtacgcccatgcttcgcgtattctgcaccacgaaaccaacccagctgtgcccgcgcattga

SEQ ID NO: 6577 - DNA, 1242 bp, Escherichia coli
atgcaaaaacacggcgaccgctatgtgtggatcaacccgcctgctattccgctttctaccgaagagatggacagcgtttttgcgctgccatacaagcgcgtgccacatccggcctatggcaatgcccgtattccggcttacgaaatgatccgtttttcggtcaacattatgcgtggctgctttggcggctgctctttctgttctatcaccgagcacgaagggcgcattattcagagccgttccgaagattcgatcattaatgagatcgaagcgatccgcgacaccgttccaggttttacgggcgtgatttccgatcttggtgggccaactgccaacatgtatatgttgcgctgcaaatcgccacgcgctgaacaaacttgtcgccgtttgtcgtgcgtttatccggatatttgtccgcacatggacacgaaccacgaaccaacgatcaacctctatcgccgtgcgcgtgatctgaaaggcattaaaaagatcctgattgcctctggtgtgcgttatgacatagccgtagaagatccgcgctatatcaaagaactggcgacccatcacgtcggcggttatctgaagattgccccggaacataccgaagaagggccgttatcgaagatgatgaagccgggcatgggcagctatgaccgctttaaagagctgttcgatacttactcaaaacaggcaggtaaagagcagtatctgatcccctatttcatctccgcgcaccccggtacgcgtgatgaagatatggtgaatctggcgctgtggctgaaaaagcaccgcttccgcctcgaccaggtgcagaacttctatccgtcgccgctggcgaactcaaccaccatgtattacaccgggaaaaacccgctggcgaagattggttataagagcgaagacgtcttcgtaccgaagggcgacaaacagcgtcgtttgcataaagcgttgttgcgttaccacgatccggcaaactggccgttaatccgccaggcgctggaagcgatgggcaaaaagcatctgattggcagccgtcgcgattgcttagtgcctgcgccaaccattgaagagatgcgtgaagctcgtcgccagaaccgcaatacccgtccggcgttgacgaaacatacgccgatggcgacccagcgtcagacgcctgctacggcaaaaaaagcgtcgtctacgcaatctcgtccggtgaatgctggtgcgaagaaacggcctaaagcggcggttggacgttaa

SEQ ID NO: 6578 - DNA, 639 bp, Escherichia coli
atggctgtcgctgccaacaaacgttcggtaatgacgctgttttccggtcctactgacatctatagccatcaggtccgcattgtgctggctgagaaaggtgtaagtttcgagatcgaacacgtggaaaaggacaatccgcctcaggatctgattgacctcaacccgaatcagagcgttccgaccctggtggatcgtgagctgaccctgtgggaatctcgcatcattatggaatatctggatgagcgtttcccgcatccgccactgatgcctgtttacccggtagctcgcggtgaaagccgtctgtacatgcatcgcatcgaaaaagactggtacacgctgatgaacaccatcatcaacggttcagcttctgaagcagatgccgcacgtaagcaactgcgcgaagaactgctggcgattgcgccggtcttcggtcagaagccgtacttcctgagcgatgagttcagcctggtcgattgctatcttgctccgctgctgtggcgtctgccgcaactgggcatcgagttcagcggcccgggtgcgaaagagctgaaaggctatatgacccgcgtctttgagcgtgactctttccttgcttctttaactgaagcagaacgtgaaatgcgtctgggccggagttaa

SEQ ID NO: 6579 - DNA, 681 bp, Escherichia coli
atgattcagtatctgaacgtctttttttacgatatctacccgtacatttgtgcgacggtgtttttcctcggcagctggctgcgctacgactacgggcagtacacctggcgcgcctcctcaagtcaaatgctcgataaacgcgggatggtgatatggtcgaatctgttccatatcggcattttggggattttcttcgggcacttgttcggcatgttaacgccgcactggatgtacgcgtggtttttgccagtggcagcgaaacaactcatggcgatggtgctcggcggtatttgcggtgtgttgacgttgattggcggcgcaggactgctgtggcgcaggctgacaaatcagcgcgtgcgtgccacttccactacgccggatatcatcatcatgagcattttgctgatccagtgtctgttggggctaagtaccataccgttttcagcacagtatcctgatggtagcgaaatgatgaagctggtgggttgggcgcaaagcattgtcactttccgtggtggatcgtcagagatgctcaacggcgtagcgttcgtcttccgcctgcatctggtgttgggaatgaccatcttcctgctcttcccgttcacccgactggtgcatgtgtggagcgcgccgtttgagtactttactcgtcgatatcaaattgtgcgttcgcggcgataa

SEQ ID NO: 6580 - DNA, 1443 bp, Escherichia coli
atgtccagaaggcttcgcagaacaaaaatcgttaccacgttaggcccagcaacagatcgcgataataatcttgaaaaagttatcgcggcgggtgccaacgttgtacgtatgaacttttctcacggctcgcctgaagatcacaaaatgcgcgcggataaagttcgtgagattgccgcaaaactggggcgtcatgtggctattctgggtgacctccaggggcccaaaatccgtgtatccacctttaaagaaggcaaagttttcctcaatattggggataaattcctgctcgacgccaacctgggtaaaggtgaaggcgacaaagaaaaagtcggtatcgactacaaaggcctgcctgctgacgtcgtgcctggtgacatcctgctgctggacgatggtcgcgtccagttaaaagtactggaagttcagggcatgaaagtgttcaccgaagtcaccgtcggtggtcccctctccaacaataaaggtatcaacaaacttggcggcggtttgtcggctgaagcgctgaccgaaaaagacaaagcagacattaagactgcggcgttgattggcgtagattacctggctgtctccttcccacgctgtggcgaagatctgaactatgcccgtcgcctggcacgcgatgcaggatgtgatgcgaaaattgttgccaaggttgaacgtgcggaagccgtttgcagccaggatgcaatggatgacatcatcctcgcctctgacgtggtaatggttgcacgtggcgacctcggtgtggaaattggcgacccggaactggtcggcattcagaaagcgttgatccgtcgtgcgcgtcagctaaaccgagcggtaatcacggcgacccagatgatggagtcaatgattactaacccgatgccgacgcgtgcagaagtcatggacgtagcaaacgccgttctggatggtactgacgctgtgatgctgtctgcagaaactgccgctgggcagtatccgtcagaaaccgttgcagccatggcgcgcgtttgcctgggtgcggaaaaaatcccgagcatcaacgtttctaaacaccgtctggacgttcagttcgacaatgtggaagaagctattgccatgtcagcaatgtacgcagctaaccacctgaaaggcgttacggcgatcatcaccatgaccgaatcgggtcgtaccgcgctgatgacctcccgtatcagctctggtctgccaattttcgccatgtcgcgccatgaacgtacgctgaacctgactgctctctatcgtggcgttacgccggtgcactttgatagcgctaatgacggcgtagcagctgccagcgaagcggttaatctgctgcgcgataaaggttacttgatgtctggtgacctggtgattgtcacccagggcgacgtgatgagtaccgtgggttctactaataccacgcgtattttaacggtagagtaa

SEQ ID NO: 6581 - DNA, 966 bp, Escherichia coli
atgacaacccagactgtctctggtcgccgttatttcacgaaagcgtggctgatggagcagaaatcgcttatcgctctgctggtgctgatcgcgattgtctcgacgttaagcccgaactttttcaccatcaataacttattcaatattctccagcaaacctcagtgaacgccattatggcggtcgggatgacgctggtgatcctgacgtcgggcatcgacttatcggtaggttctctgttggcgctgaccggcgcagttgctgcatctatcgtcggcattgaagtcaatgcgctggtggctgtcgctgctgctctcgcgttaggtgccgcaattggtgcggtaaccggggtgattgtagcgaaaggtcgcgtccaggcgtttatcgctacgctggttatgatgcttttactgcgcggcgtgaccatggtttataccaacggtagcccagtgaataccggctttactgagaacgccgatctgtttggctggtttggtattggtcgtccgctgggcgtaccgacgccagtctggatcatggggattgtcttcctcgcggcctggtacatgctgcatcacacgcgtctggggcgttacatctacgcgctgggcggcaacgaagcggcaacgcgtctttctggtatcaacgtcaataaaatcaaaatcatcgtctattctctttgtggtctgctggcatcgctggccgggatcattgaagtggcgcgtctctcctccgcacaacccacggcggggactggctatgagctggatgctattgctgcggtggttctgggcggtacgagtctggcgggcggaaaaggtcgcattgttgggacgttgatcggcgcattaattcttggcttccttaataatggattgaatttgttaggtgtttcctcctattaccagatgatcgtcaaagcggtggtgattttgctggcggtgctggtagacaacaaaaagcagtaa

SEQ ID NO: 6582 - DNA, 891 bp, Escherichia coli
atgaacatgaaaaaactggctaccctggtttccgctgttgcgctaagcgccaccgtcagtgcgaatgcgatggcaaaagacaccatcgcgctggtggtctccacgcttaacaacccgttctttgtatcgctgaaagatggcgcgcagaaagaggcggataaacttggctataacctggtggtgctggactcccagaacaacccggcgaaagagctggcgaacgtgcaggacttaaccgttcgcggcacaaaaattctgctgattaacccgaccgactccgacgcagtgggtaatgctgtgaagatggctaaccaggcgaacatcccggttatcactcttgaccgccaggcaacgaaaggtgaagtggtgagccacattgcttctgataacgtactgggcggcaaaatcgctggtgattacatcgcgaagaaagcgggtgaaggtgccaaagttatcgagctgcaaggcattgctggtacatccgcagcccgtgaacgtggcgaaggcttccagcaggccgttgctgctcacaagtttaatgttcttgccagccagccagcagattttgatcgcattaaaggtttgaacgtaatgcagaacctgttgaccgctcatccggatgttcaggctgtattcgcgcagaatgatgaaatggcgctgggcgcgctgcgcgcactgcaaactgccggtaaatcggatgtgatggtcgtcggatttgacggtacaccggatggcgaaaaagcggtgaatgatggcaaactagcagcgactatcgctcagctacccgatcagattggcgcgaaaggcgtcgaaaccgcagataaagtgctgaaaggcgagaaagttcaggctaagtatccggttgatctgaaactggttgttaagcagtag

SEQ ID NO: 6583 - DNA, 717 bp, Escherichia coli
gtgggacgtaaatgggccaatattgttgctaaaaaaacggctaaagacggtgcaacgtctaaaatttatgcaaaattcggtgtagaaatctatgctgctgctaaacaaggtgaacccgatccagaattaaacacatctttaaaattcgttattgaacgtgcaaagcaggcacaagttccaaagcacgttattgataaagcaattgataaagccaaaggcggcggagatgaaacgttcgtgcagggacgttatgaaggctttggtcctaatggctcaatgattatcgccgagacattgacttcaaatgttaaccgtacgattgctaacgttcgcacaattttcaataaaaaaggcggcaatatcggagcggcaggttctgtcagctatatgtttgacaatacgggtgtgattgtatttaaagggacagaccctgaccatatttttgaaattttacttgaagctgaagttgatgttcgtgatgtgactgaagaagaaggtaacattgttatttatactgaacctactgaccttcataaaggaatcgcggctctaaaagcagctggaatcactgagttctcaacaacagaattagaaatgattgctcaatctgaagttgagctttccccagaagatttagaaatctttgaagggcttgttgatgcccttgaagatgacgacgatgtacaaaaagtttatcataacgtcgcaaatctctaa

SEQ ID NO: 6584 - DNA, 795 bp, Escherichia coli
atggatctgttgtaccgggtaaaaacgctttgggccgcgctgcgcggtaatcattacacctggcctgccatcgatatcaccctccccggcaatcgccattttcatctgattggcagtattcatatgggtagccacgatatggctcccctgcccacccgtttgctcaaaaagctcaaaaacgccgatgcgctgatcgtcgaggcggatgtttccaccagcgatacgccttttgctaatttgcctgcctgcgaggcgctggaagagcgcattagcgaggagcaactccaaaacctgcagcacattagccaggagatgggcatttctccctcactcttttctacccaaccgctgtggcaaatcgcgatggttcttcaggcgacgcaggcacaaaaactggggctgcgggcagaatacggtatcgattaccagctattgcaggcggcgaagcaacaacataaacccgtgattgaactggaaggggctgaaaaccagattgccatgttgctccagctccctgacaaaggactggcgctgctggacgatacgctgacccactggcataccaacgcacggttgctgcaacaaatgatgagctggtggctgaatgcaccgccgcaaaataatgatataacgctgcccaatacgttcagtcagtcgctgtacgatgtgctgatgcatcagcgaaatctcgcctggcgggataaattacgcgccatgccgccggggcgatatgtggtcgcggtcggtgcactacacctgtatggagaagggaatttgccgcaaatgttgcgctaa

SEQ ID NO: 6585 - DNA, 693 bp, Escherichia coli
ttgacatcatcaataaccaatgaaattatgcaattatatacggatagggaggttcttaacatggggctttgtagtcgttataaaagtcttacatgcaatagttgctcaatgcattgccaaataatgccagaagagtcaccgcgtttgcagtattgcgcaaactcgtgtttttgtatgtggcccgaagaaagttcatattttaatcgtggtgtggtagaaggtatcttaacaaaaaaccacaatgcgagattaagcggatatatttttgtcgatttttcagtaagttttttacgtctattccttgaaaaagactggattgactatcttgcaagtactgacatggggattgttttagtcagcgaccgcaatatgcaatcgttagctaattactggcgaaaacacaactcagcaatatctgctgtcatatataatgatgatggtcttgatgttgccaatgaaaagatcagacaactatttattggtcgttatttatcatttaccggaggtaacacattaactcagatggaattcaccataatggggtatatggtttctggttataatccatatcagattgctgaagttctggatatggatatccgtagcatctacgcgtacaagcaacgaatcgaaaagagaatgggtggtaaaataaacgaattatttattcgttcacattcggtccaacattga

SEQ ID NO: 6586 - DNA, 357 bp, Escherichia coli
gtggcccgtatagcaggcattaacattcctgatcataagcatgccgtaatcgcattaacttcgatttatggcgtcggcaagacccgttctaaagccatcctggctgcagcgggtatcgctgaagatgttaagatcagtgagctgtctgaaggacaaatcgacacgctgcgtgacgaagttgccaaatttgtcgttgaaggtgatctgcgccgtgaaatcagcatgagcatcaagcgcctgatggatcttggttgctatcgcggtttgcgtcatcgtcgtggtctcccggttcgcggtcagcgtaccaagaccaacgcacgtacccgtaagggtccgcgcaaaccgatcaagaaataa

SEQ ID NO: 6587 - DNA, 117 bp, Escherichia coli
atgaaagttcgtgcttccgtcaagaaattatgccgtaactgcaaaatcgttaagcgtgatggtgtcatccgtgtgatttgcagtgccgagccgaagcataaacagcgccaaggctga

SEQ ID NO: 6588 - DNA, 606 bp, Escherichia coli
atggcgctgcatgacgaaaacgtcgtctggcatagccatccggtcactgtgcaacaacgcgagctacaccacggtcatcgtggtgtagtgctgtggtttaccggcctctccgggtccggtaaatcaacggtcgccggggcgctggaggaggcgttacataaactcggcgtcagtacgtatctgctggatggcgacaatgttcgccacggattatgcagcgatctcggttttagcgatgccgatcgtaaagagaatatccgtcgcgtcggtgaagtggcgaatttgatggttgaagccggactggtggtgctgaccgcatttatctcgccacaccgcgccgaacgccagatggttcgcgaacgcgtaggagaagggcgctttatcgaagtgtttgtcgatacgccgctggcgatttgcgaagcccgcgatcccaaaggcttatataagaaagcgcgtgccggtgaactgcgcaactttacgggaatagattccgtttacgaagcgcctgaatcggcagaaattcatctcaatggtgaacaattagtaacaaatttggtacagcaattattagatctgttgagacagaacgatattatcagatcctga

SEQ ID NO: 6589 - DNA, 969 bp, Escherichia coli
atggataattttcttgctctgaccttaacgggtaaaaaaccggttatcaccgagcgagaaatcaacggcgttcgctggcgctggctgggcgatggtgtgctggaactgacgccattaacgccaccgcaaggcgcactggtgatttcagcgggaatacacggtaatgagacggcacctgtggagatgctggacgcgttgcttggcgcgatatctcacggcgagatcccgttacgttggcggttgctggtgatcctcgggaatcctcctgcgctgaagcaagggaaacgttattgccatagcgatatgaatcgaatgtttggcggtcgttggcagctatttgctgaaagcggagaaacctgtcgggcgcgcgaactggaacagtgcctggaagatttttatgaccagggcaaagaatctgtgcgctggcaccttgatctacataccgcaattcgtggctccttgcatccgcagttcggtgtattaccgcaacgcgacattccctgggacgagaaatttctgacgtggctgggtgcggcggggctggaggcgctggtgttccatcaggaacctggtggtacgtttacccatttcagcgccagacattttggcgcgctggcctgtacgctggaacttggcaaagcgttgccctttgggcaaaacgatcttcgccagtttgcagtaactgccagcgcaattgctgcgctgctatctggtgagagtgtcggtatcgtgagaacaccgccgctccgttatcgggtggtttcgcaaattactcgccactcgccgtccttcgaaatgcatatggcaagtgacacgctgaattttatgccgtttgagaaaggaacattgctggcgcaggacggagaggaacgttttaccgtaacccatgatgtagagtatgtgttattccctaatccgttggtagcgttgggattacgcgcgggattaatgctcgaaaaaataagctaa

SEQ ID NO: 6590 - DNA, 1293 bp, Escherichia coli
atgcgctataatggtttaaataatatgtttttccctctttgcctgattaacgataaccactctgtcacaagtccatcacatacaaagaaaacaaaatcagataattacagcaaacatcataaaaacacgttaattgacaataaagccctctctcttttcaaaatggatgatcatgaaaaagtgataggcttgattcagaaaatgaaaagaatttatgatagtttaccatcaggaaaaatcacgaaagaaacggacaggaaaatacataaatattttatagatatagcttcacatgcaaataataaatgtgacgatagaattacgagaagagtttaccttaataaagataaggaagtgtcaattaaggtggtatattttataaataatgtcaccgtccataataatactatcgaaatcccacagacagtaaatggtggttacgatttttcacaccttagcctgaaaggtatcgtgattaaagatgaagatttatccaattcgaattttgcaggttgcagactacaaaacgctatttttcaggactgtaatatgtataaaacgaattttaatttcgccataatggaaaaaatactttttgataattgtattctcgatgactcaaatttcgctcagataaaaatgactgacggaactctaaattcatgttccgctatgcatgttcaattctacaatgcaacaatgaatagagccaatattaaaaataccttccttgattattcaaatttttatatggcatacatggctgaggtaaatctttataaagtaatagcgccatatattaatttatttagagccgaccttagcttctctaaacttgatttaattaactttgaacatgctgatctgtctcgtgtcaacctgaataaagcaaccctccagaatataaacttaattgatagcaaactcttttttacgcggttaacaaatacgttcctcgaaatggttatatgtaccgactctaatatggctaatgttaattttaataatgccaatttaagcaattgccatttcaactgttctgttttaacaaaagcctggatgtttaatatccgtctctatcgtgttaatttcgatgaggctagcgtccagggaatgggtattaccattctccgtggtgaggaaaatatctccattaatagtgatatcctggtaacactacagaaattctttgaagaagattgtgccactcatactggcatgtcacaaactgaggataatcttcatgcagtcgctatgaagattactgcagatattatgcaagatgcagattga

SEQ ID NO: 6591 - DNA, 390 bp, Escherichia coli
atggcaaaggcaccaattcgtgcacgtaaacgtgtaagaaaacaagtctctgacggcgtggctcatatccatgcttctttcaacaacaccatcgtgactatcactgatcgtcagggtaacgcgttgggttgggcaacagccggtggttccggtttccgtggttctcgcaaatccactccgtttgcagctcaggttgcagcagagcgttgcgctgacgccgtgaaagaatacggcatcaagaatctggaagttatggttaaaggtccgggtccaggccgcgaatctactattcgtgctctgaacgccgcaggtttccgcatcactaacattactgatgtgactccgatccctcataacggttgtcgtccgccgaaaaaacgtcgcgtataa

SEQ ID NO: 6592 - DNA, 1383 bp, Escherichia coli
atgacgcaattaaccatgaaagacaaaattggctacgggctgggagacaccgcctgcggcttcgtctggcaggccacgatgttcctgctggcctatttctacaccgacgtcttcggcctgtcggcggggattatgggcacgctgtttttggtctcccgcgtgctcgacgccgtcaccgacccgctgatggggctgctggtagaccgcacccgcacgcggcacggccagttccgcccgttcctgctgtggggggccatcccgttcggcatcgtctgcgtgctgaccttctacacgccggacttctccgcacagggcaagatcatctacgcctgcgtgacctacattctcctgaccctggtctacaccttcgttaacgtgccgtactgcgccatgccgggcgtcatcaccgccgacccgaaagagcgtcacgccctgcagtcctggcgcttcttcctggcggcggcgggctcgctcgctatcagcggcatcgcgctgccgctggtgagcatcatcggcaaaggggacgagcaggtgggctacttcggcgccatgtgcgtgctggggctgagcggcgtggtgctgctctacgtctgcttcttcacgaccaaagagcgctacacctttgaggtgcagccgggctcgtcggtggcgaaagaccttaagctgctgctgggcaacagccagtggcgcatcatgtgcgcgttcaagatgatggcgacctgctccaacgtggtgcgcggcggggcgacgctctacttcgtgaaatacgtgatggatcacccggagttggcgacccagtttttactttacggcagcctcgccaccatgttcggctcgctttgctcctcacgcctgctgggccgcttcgaccgcgtcaccgccttcaagtggatcatcgtcgcctactcgctgatcagcctgctgattttcgtcaccccggcggagcacatcgcgctcatttttgccctcaacatcctgttcctgttcgtctttaataccaccacgccgctgcagtggctgatggcttctgacgtggtggactacgaggagagccgcagcggtcgccgcctcgacgggctggtgttctccacctacctgttcagcctgaagattggcctggcgattggcggggcggtggtgggctggatcctggcgtacgtcaactattccgccagcagcagcgtgcagccggttgaggtgctcaccaccatcaaaattctgttctgcgtggtgccggtggtgctctacgcgggcatgttcatcatgctgtcgctctacaagctcaccgatgcccgcgtggaggccatcagccggcagctgattaagcaccgcgcggcgcagggcgaggccgttcccgacgccgcgacagccgcatcccattaa

SEQ ID NO: 6593 - DNA, 843 bp, Escherichia coli
atgctcagttatcgccacagctttcacgctggcaaccacgccgacgtccttaaacataccgttcagagcctgatcatcgagtcgctgaaagagaaagataaaccgtttctctatctcgacacccacgcaggggccgggcgttatcagttaggcagcgaacatgccgagcgtaccggcgaatatctcgaaggcatcgcccgtatctggcagcaggacgatttgcccgcagaactggaggcgtacatcaatgtggtaaaacacttcaaccgtagcggtcagttgcgttactaccccggttcgccgttgattgctcgcctgctactgcgtgaacaggacagcctgcaactgaccgaactgcacccgagcgattacccgttgttgcgttctgaatttcagaaagatagccgtgcgcgtgtcgaaaaagccgacggtttccagcagcttaaggccaaactgccgccggtttcccgccgtggtttaatccttatcgacccgccgtatgaaatgaaaactgactatcaagcggtggtcagcgggatagcagaaggttacaaacgtttcgccactggtatttacgcactgtggtatccggtggtgctgcgtcagcaaattaagcgcatgatccacgatctggaagcgaccggtattcgcaaaattctgcaaattgaactggcggtactgccagacagcgatcgccgtggcatgaccgcttccggcatgattgtgattaacccgccgtggaaactggaacaacagatgaataacgtgctgccgtggctgcacagcaaactggttccggcaggcaccgggcacgccaccgtaagctggatcgtgccggagtaa

SEQ ID NO: 6594 - DNA, 1491 bp, Escherichia coli
ttgttgtatctgaacttcccctcggttagcatcaggctattcgcgtctgacgagagtaacaccttgaaacgctggcccgtttttccccgctcattacgacaactggtaatgctggcatttttgctgattctgctgcccctgttggtgctggcatggcaagcctggcaaagcctgaatgcgcttagcgatcaggcggcgctggttaaccgcactacgcttattgatgcccggcgcagtgaagcgatgaccaacgcggcgctggagatggagcgtagttaccgtcagtattgcgtgctggacgacccaaccctggcgaaggtttatcaaagccagcgcaagcgttacagcgaaatgctcgatgcccacgcaggcgtgctgccggacgataaactctaccaggcattacgtcaggatttgcacaatctggctcaacttcagtgtaacaacagcggtcccgatgctgccgccgccgcacgtcttgaagcctttgccagtgccaataccgaaatggtacaggccacgcgcacagtggtgttctctcgtgggcagcagcttcagcgtgaaatcgccgaacgtgggcaatattttggttggcaatcgctggtgctatttctggtgagtctggtaatggtactgcttttcacgcggatgattatcgggccggtgaaaaatatcgagcgcatgatcaaccgtctgggggaagggcgttctctgggcaatagcgtctcgttcagtggaccgagcgagttacgctcggttgggcaacgtattctttggttaagtgagcgcctgtcatggctggaatcccaacgccatcaatttttaagacatttatctcatgaattaaaaacgccactggcgagtatgcgcgagggcactgaattactggctgaccaggttgtcgggccgcttacgccagagcaaaaagaggtggtgagcattcttgatagcagcagccgcaatttgcaaaaactgatcgaacaactgcttgattacaaccgtaaacaggcggacagtgcggtggaactggagaatgttgagttagcaccgctggtggagacagtggtttctgctcatagcctgcccgcacgggctaaaatgatgcataccgacgtcgatctcaaagcaacagcttgcctggcggagccaatgctgctgatgagcgtactggataatctttactccaatgcggtgcactacggggctgaatccggtaacatttgccttcgcagcagtttacatggtgcgcgggtttatattgatgtcatcaatacaggcacgcccattccgcaagaggaacgcgccatgatcttcgaacccttttttcagggaagccaccagcgaaaaggggcggtgaagggcagcggtctgggattaagcattgccagggattgtattcgccgtatgcaaggggaactgtatctggtcgacgagagcgggcaagacgtttgtttccgcattgaattaccgtcgtcgaaaaacacgaaataa

SEQ ID NO: 6595 - DNA, 231 bp, Escherichia coli
atgatgaaaaagactgccgcaattatttctgcctgtatgctgacttttgccctgagcgcctgttccggttcgaactatgtgatgcacaccaatgacggacgtaccatcgtctctgacggcaaaccacagactgataacgataccggtatgatttcgtataaagacgctaatggcaacaaacagcagatcaaccgtactgacgtgaaagagatggtcgaactggatcagtaa

SEQ ID NO: 6596 - DNA, 1332 bp, Escherichia coli
atggctaaacaaccgggattagattttcaaagtgccaaaggtggcttaggcgagctgaaacgcagactgctgtttgttatcggtgcgctgattgtgttccgtattggctcttttattccgatccctggtattgatgccgctgtacttgccaaactgcttgagcaacagcgaggcaccatcattgagatgtttaacatgttctctggtggtgctctcagccgtgcttctatctttgctctggggatcatgccgtatatttcggcgtcgatcattatccagctgctgacggtggttcacccaacgttggcagaaattaagaaagaaggggagtctggtcgtcgtaagatcagccagtacacccgctacggtactctggtgctggcaatattccagtcgatcggtattgctaccggtctgccgaatatgcctggtatgcaaggcctggtgattaacccgggctttgcattctacttcaccgctgttgtaagtctggtcacaggaaccatgttcctgatgtggttgggcgaacagattactgaacgaggtatcggcaacggtatttcaatcattatcttcgccggtattgtcgcgggactcccgccagccattgcccatactatcgagcaagcgcgtcaaggcgacctgcacttcctcgtgttgctgttggttgcagtattagtatttgcagtgacgttctttgttgtatttgttgagcgtggtcaacgccgcattgtggtaaactacgcgaaacgtcagcaaggtcgtcgtgtctatgctgcacagagcacacatttaccgctgaaagtgaatatggcgggggtaatcccggcaatcttcgcttccagtattattctgttcccggcgaccatcgcgtcatggttcgggggcggtactggttggaactggctgacaacaatttcgctgtatttgcagcctgggcaaccgctttatgtgttactctatgcgtctgcaatcatcttcttctgtttcttctacacggcgttggttttcaacccgcgtgaaacagcagataacctgaagaagtccggtgcatttgtaccaggaattcgtccgggagagcaaacggcgaagtatatcgataaagtaatgacccgcctgaccctggttggtgcgctgtatattacctttatctgcctgatcccggagttcatgcgtgatgcaatgaaagtaccgttctacttcggtgggacctcactgcttatcgttgttgtcgtgattatggactttatggctcaagtgcaaactctgatgatgtccagtcagtatgagtctgcattgaagaaggcgaacctgaaaggctacggccgataa

SEQ ID NO: 6597 - DNA, 1260 bp, Escherichia coli
atgctaacatcctttaaacttcattcattgaaaccttacactctgaaatcatcaatgattttagagataataacttatatattatgttttttttcaatgataattgcattcgtcgataatactttcagcataaaaatatataatatcactgctatagtttgcttattgtcactaattttacgtggcagacaagaaaattataatataaaaaaccttattcttcccctttctatatttttaataggcttgcttgatttaatttggtattctgcgtttaaagtagataattcgccatttcgtgctacttaccatagttatttaaatactgccaaaatatttatatttggttcttttattgttttcttgacactaactagccagctaaaatcaaaaaaagagagtgtattatacactttgtattctctgtcatttctaattgctggatatgcaatgtatattaatagcattcatgaaaatgaccgcatttcttttggtgtaggaacggcaacaggagcagcatattcaacaatgctaatagggatagttagtggcgttgcgattctttatactaagaaaaatcatccttttttatttttattaaatagttgcgcggtactttatgttctggcgctaacacaaaccagagcaaccctactcctgttccctataatttgtgttgctgcattaatagcttattataataaatcacccaagaaattcacttcctctattgttctactaattgctatattagctagcattgttattatatttaataaaccaatacagaatcgctataatgaagcattaaatgacttaaacagttataccaatgctaatagtgttacttccctaggtgcaagactggcaatgtacgaaattggtttaaatatattcataaagtcacctttttcatttagatcagcagagtcacgcgctgaaagtatgaatttgttagttgcagaacacaataggctaagaggggcattggagttttctaacgtacatctacataatgagataattgaagcagggtcactgaaaggtctgatgggaattttttccacacttttcctctatttttcactattttatatagcatataaaaaacgagctttgggtttgttgatattaacgcttggcattgtggggattggactcagtgatgtgatcatatgggcacgcagcattccaattatcattatatccgctatagtcctcttactcgtcattaataatcgtaacaatacaattaattaa

SEQ ID NO: 6598 - DNA, 1026 bp, Escherichia coli
gtgccaggttatgcgcaatatcgttcattttccgaggatcttagtatgaatatggaagaaattgtggcccttagtgtaaagcataacgtctcggatctacacctgtgcagcgcctggcccgcacgatggcgcattcgcggcagaatggaagctgcgccgtttgatacgccggacgtcgaagagctactgcgggagtggctggatgacgatcagcgggcaatattgctggagaatggtcagctggattttgccgtgtcgctggcggaaaaccagcgattgcgtggcagcgcattcgcgcaacggcatggcatttcgctggcgttacggctgttaccttcgcactgcccgcagctcgaacagcttggcgcaccaacggtattgccggaattactcaagagcgagaatggcctgattctggtgacgggggcgacggggagtggcaaatctaccacgctggcggcgatggttggctatctcaatcaacatgccgatgcgcatattctgacgctggaagatcctgttgaatatctctatgccagccagcgatgtttgatccagcagcgggaaattggtttgcactgtatgacgttcgcatcgggattgcgggccgcattgcgggaagatcctgatgtgattttgctcggagagctgcgtgacagcgagacaatccgtctggcactgacggcggcagaaaccgggcatttggtgctggcaacattacatacgcgtggtgccgcgcaggcagttgagcgactggtggattcatttccggcgcaggaaaaagaccccgtgcgtaatcaactggcaggtagtttacgggcagtgctgtcacaaaagctggaagtggataaacaggaaggacgcgtggcgctatttgaattgctgattaacacacccgcggtggggaatttgattcgcgaagggaaaacccaccagttaccgcatgttattcaaaccgggcagcaggtggggatgataacgtttcagcagagttatcagcaccgggtgggggaagggcgtttgtga

SEQ ID NO: 6599 - DNA, 3369 bp, Escherichia coli
gtgaatatggcagtaaagatttcaggtgtactgaaagacggcacaggaaaaccggtacagaactgcacaatccagctgaaagcaaaacgtaacagcaccacggtggtggtgaacacgctggcctcagaaaatccggatgaagccgggcgttacagcatggacgttgagtacggtcagtacagcgttattctgttggtggaaggattcccgccgtcacatgccgggaccattaccgtgtatgaagattctcaacccggtacgctgaatgattttctcggtgccatgacggaggatgatgcccgtccggaggcactgcgccgttttgaactgatggtggaagaggtggcgcgtaacgcgtccgcggtggcacagaacacggcagccgcgaagaagtcagccagtgatgccagcacatcagcccgtgaggcggcaacccatgcggctgatgctgcggactcagcacgcgcagccagcacgtcagccggacaggccgcgtcgtcggctcagtcagcgtcttccagcgcaggaacggcatcaacaaaggccactgaagcatcaaaaagtgctgccgctgcagagtcctcaaaaagcgcggcggccaccagtgccggtgcggcgaaaacgtcagaaacgaatgcttcagcgtcactacaatcagcagccacatctgcatccaccgcgaccacgaaggcatcagaagctgcgacctcggcccgggatgcggcggcctcaaaagaagcggcaaaatcatcagaaacgaacgcatcatcaagcgccagtagtgcagcttcctcggcaacggcggcaggaaattccgcgaaggcggcaaaaacgtccgagacgaacgccaggtcttctgaaacggcagcgggacagagcgcctcggctgcggcaggctcaaaaacagcggctgcgtcgtctgccagtgcagcgtcaacaagtgccgggcaggcctcagccagtgccaccgccgccggaaaatcggcagaaagcgccgcatcgtctgcttcaacagccacaacgaaggctggcgaagccactgaacaggccagcgcagcagcgaggtctgcttccgcagcgaagacatccgaaacgaacgcgaaagcgtcggaaacaagcgcagaatcctcaaaaacggctgccgcatcgtcagccagttcggcggcgtcatcggcatcatcggcgtctgcttcaaaagatgaggcgaccagacaagcgtcagcagcgaagagcagcgccacgacggcatccacgaaggcgacagaggctgctggcagtgcgacggcggcagctcagagcaaaagtacggcggaatccgcggcaacgcgcgccgagacagcagctaaacgggcagaggatattgcatccgccgtggcgcttgaggatgcaagtacgacgaaaaaggggatagtacagctcagcagtgcgaccaacagtacgtctgaaacgctggcggcaacgccaaaggcagtaaaatcagcctatgacaatgcagagaaacgtctgcagaaagaccagaacggcgctgatatacccgataagggatgcttcctgaacaacattaacgcggtcagtaaaacagactttgctgataagcgtggtatgcgttatgtgcgggttaacgctcctgcaggtgcaacatctggaaaatattaccctgttgttgttatgcgttctgctggctcagtaagcgaactggcatcaagagtcattatcaccacggcaacgcgaaccgcaggcgatccgatgaataactgcgagtttaacggatttgttatgcctggtggctggactgacagggggcgttatgcttatggcatgttctggcaatatcaaaacaatgaacgagccattcactcaataatgatgagtaataagggcgatgatttgcgctctgtgttctatgttgatggcgctgctttccctgtttttgcgtttattgaagatggcctgtcaatatccgcacctggtgctgatctcgttgttaatgatacgacctataagtttggggcaacaaatccggcgactgaatgtatcgcggcggacgttatccttgattttaagagtgggcgtggtttttatgagtctcattcgttaatcgttaacgataacttgtcgtgcaaaaaactttttgccacagacgaaattgtagcgcgtggtggtaatcagattcgaatgataggtggggagtatggtgcattatggcgtaatgatggcgctaaaacttacctgctgcttaccaatcaaggtgatgtttatggtggctggaatacattaagaccgtttgctattgataacgcaaccggcgaactggttattggaaccaaactgtccgcaagtctgaacggtaatgcattaacagcaacaaagctgcaaacgccaagacgggtttctggtgttgagtttgatggttccaaagatattactttaaccgccgcgcatgtggctgcttttgccagaagggcaacggatacatatgccgatgcggatggtggcgttccatggaatgccgaatctggcgcttacaatgtcacccgctctggcgacagctatattctggttaacttctataccggagtcggaagttgccggaccctgcagatgaaggcgcattacagaaatggtggtctgttctaccgttcttcaagagacggttatggttttgaggaagactgggcagaagtttatacctcgaaaaatcttccaccagaaagctacccagtcggcgcaccaatcccgtggccatcagataccgttccgtctggttatgccctgatgcaggggcaggcttttgacaaatctgcttacccgaaacttgcagccgcttatccgtcaggcgtgatccctgatatgcgtggctggacgattaagggcaaacctgccagtggtcgggccgtattgtctcaggaacaggacggcattaaatcgcatacccacagcgccagcgcatccagtacagatttggggacgaaaaccacatcgtcgtttgattacggcactaaatccacgaataacaccggggcacatacacacagtgtgagcggctctacaaactcggctggagcacacacacactcactagccaacgtgaacacggctagtgctaactccggtgctggtagtgcatcaacaagattgtctgttgtgcataatcaaaactatgcaacatcatctgctggcgcacatacccactcactgtccggcactgctgcaagcgcaggtgcacacgcgcatactgtcggtattggtgctcatacgcactccgttgcgattggttcacatggacacaccatcaccgttaacgctgctggtaacgcggaaaacaccgtcaaaaacatcgcatttaactatattgtgaggcttgcataa

SEQ ID NO: 6600 - DNA, 1329 bp, Escherichia coli
atgcacattggacaggctcttgatctggtatcccgttacgattctctgcgtaacccactgacttctctgggggattacctcgaccccgaactcatctctcgttgccttgccgaatcaggtactgtaacgctacgcaagcgccgtcttcccctcgaaatgatggtctggtgtattgttggcatggcgcttgagcgtaaagaacctcttcaccagattgtgaatcgcctggacatcatgctgccgggcaatcgccccttcgttgcccccagtgccgttattcaggcccgccagcgcctgggaagtgaggctgtccgccgcgtgttcacgaaaacagcgcagctctggcataacgccacgccgcatccgcactggtgcggcctgaccctgctggccatcgatggtgtgttctggcgcacaccggatacaccagagaacgatgcagccttcccccgccagacacatgccgggaacccggcgctctacccgcaggtcaaaatggtctgccagatggaactgaccagccatctgctgacggctgcagccttcggcacgatgaagaacagcgaaaatgagcttgctgagcaacttatagaacaaaccggcgataacactctgacgttaatggataaaggttattactcactgggactgttaaatgcctggagcctggcgggagaacaccgccactggatgatacctctcagaaagggagcgcaatatgaagagatcagaaaactgggtaaaggcgatcatctggtgaagctgaaaaccagcccgcaggcacgaaaaaagtggccgggactgggaaatgaagtgactgcccgcctgctgaccgtgacgcgcaaaggaaaagtctgccatctgctgacgtcgatgacggacgccatgcgcttccccggaggagaaatgggggatctgtacagtcatcgctgggaaatcgaactgggatacagggagataaaacagacgatgcaacggagcaggctgacgctgagaagtaaaaagccggagcttgtggagcaagagctgtggggtgtcttactggcttataatctggtgagatatcagatgattaaaatggcggaacatctgaaaggttactggccgaatcaactgagtttctcagaatcatgcggaatggtgatgagaatgctgatgacattgcagggcgcttcaccgggacgtataccggagctgatgcgcgatcttgcaagtatgggacaacttgtgaaattaccgacaagaagggaaagggccttcccgagagtggtaaaggagaggccctggaaataccccacagccccgaaaaagagccagtcagttgcttaa

SEQ ID NO: 6601 - DNA, 714 bp, Escherichia coli
atgaagatttttttggagaatctttatcattctgattgctatttcctgccgataagagacaaccagcaagtccttgtcggcgttgagttaattacccatttctccagtgaagatggtacggttcgtatcccgacgagtcgggttatagcgcaacttaccgaggagcaacattggcaattattttcagagcagttggaattactaaaatcatgccaacatttttttattcaacataaactctttgcctggcttaatttaacgccacaagtggctacattattattagagagggataattacgcaggcgaactattaaaatatccgtttattgaactgttgattaatgagaattacccgcatctcaatgaaggaaaagataatcgcggtcttttatccttatcgcaagtgtatccccttgtgttaggtaatttgggagcaggcaatagcacaatgaaagcggtttttgatggtcttttcacccgcgtcatgctggataaaagttttattcagcaacaaatcacgcaccgctccttcgaaccgtttattcgtgcgatccaggcgcaaatttccccttgttgcaattgcatcattgcgggaggcattgatacggcagaaatattggcacagattacccccttcgatttccatgctctccagggatgcctgtggcctgccgttcccataaatcagataacgacgttggttcagcgataa

SEQ ID NO: 6602 - DNA, 1665 bp, Escherichia coli
atgagtgaggcagaagcccgcccgactaactttatccgtcagatcatcgatgaagatctggccagtggtaagcacaccacagtacacacccgtttcccgccggagccgaatggctatctgcatattggccatgcgaaatctatctgcctgaacttcgggatcgcccaggactataaaggccagtgcaacctgcgtttcgacgacactaacccggtaaaagaagatatcgagtatgttgagtcgatcaaaaacgacgtagagtggttaggttttcactggtctggtaacgtccgttactcctccgattattttgatcagctccacgcctatgcgatcgaactgatcaataaaggcctggcgtacgttgatgaactgacgccggaacagatccgcgaataccgcggcaccctgacgcaaccgggtaaaaacagcccgtaccgcgaccgcagcgttgaagagaacctggcgctgttcgaaaaaatgcgtgccggtggttttgaagaaggtaaagcctgcctgcgtgcgaaaatcgacatggcttcaccgtttatcgtgatgcgcgatccggtgctgtaccgtattaaatttgctgaacaccaccagactggcaacaagtggtgcatctacccgatgtacgacttcacccactgcatcagcgatgccctggaaggtattacgcactctctgtgtacgcttgagttccaggacaaccgtcgtctgtacgactgggtactggacaacatcacgattcctgttcacccgcgccagtatgagttctcgcgcctgaatctggaatacaccgtgatgtccaagcgtaagttgaacctgctggtgaccgacaagcacgttgaaggctgggatgacccgcgtatgccgaccatttccggtctgcgtcgtcgtggttacactgcggcttctattcgtgagttctgcaaacgcatcggcgtgaccaagcaggacaacaccattgagatggcgtcgctggaatcctgcatccgtgaagatctcaacgaaaatgcgccgcgcgcaatggcggttatcgatccggtgaaactggttatcgaaaactatcagggcgaaggcgaaatggttaccatgccgaaccatccgaacaaaccggaaatgggcagccgtcaggtgccgtttagcggtgagatttggattgatcgcgccgatttccgcgaagaagctaacaagcagtacaaacgtctggtgctgggtaaagaagtgcgtctgcgtaatgcttatgtgattaaggcagaacgcgtcgagaaagatgccgaaggtaatatcaccaccatcttctgtacttatgacgccgataccttaagcaaagatccggcagatggtcgtaaagtcaaaggtgttattcactgggtgagcgcggcacatgcgctgccggttgaaatccgtttgtatgaccgtctgttcagcgtgcctaacccaggtgctgcggatgatttcctgtcggtgattaacccggaatcgctggtgatcaaacagggctttgctgaaccgtcgctgaaagatgcggttgcgggtaaagcattccagtttgagcgtgaaggttacttctgcctcgatagccgccattctacggcggaaaaaccggtatttaaccgcaccgttgggctgcgtgatacctgggcgaaagtaggcgagtaa

SEQ ID NO: 6603 - DNA, 1191 bp, Escherichia coli
atgattatttccgcagccagcgattatcgcgccgcagcgcaacgcattctgccgccgttcctgttccactatatggatggtggtgcatattctgaatacacgctgcgccgcaacgtggaagatttgtcagaagtggcgctgcgccagcgtattctgaaaaacatgtccgacttaagcctggaaacgacgctgtttaatgagaaattgtcgatgccggtggcactggctccggtgggtttgtgtggcatgtatgcgcgtcgtggcgaagttcaggcagccaaagcggcggacgcgcatggtattccgtttactctctcgacggtttccgtttgcccgattgaagaagtcgcgccagccatcaagcgcccaatgtggttccagctttatgtactgcgcgatcgcggctttatgcgtaacgcgctggagcgagcaaaagcagcgggttgttcgacgctggttttcaccgtggatatgccgacaccgggcgcacgctaccgtgatgcgcattcaggtatgagcggcccgaacgcggcaatgcgccgctacttgcaagcggtgacacatccgcaatgggcgtgggatgtgggcctgaacggtcgtccacatgatttaggtaatatctcagcttatctcggcaaaccgaccggactggaagattacatcggctggctggggaataacttcgatccgtccatctcatggaaagaccttgaatggatccgcgatttctgggatggcccgatggtgatcaaagggatcctcgatccggaagatgcgcgcgatgcagtacgttttggtgctgatggaattgtggtttctaaccacggtggccgccagctggacggtgtactctcttccgcccgtgcactgcctgctattgcagatgcggtgaaaggtgatatagccattctggcggatagcggaattcgtaacgggcttgatgtcgtgcgtatgattgcgctcggtgccgacaccgtactgctgggtcgtgctttcttgtatgcgctggcaacagcgggccaggcgggtgtagctaacctgctaaatctgatcgaaaaagagatgaaagtggcgatgacgctgactggcgcgaaatcgatcagcgaaattacgcaagattcgctggtgcaggggctgggtaaagagttgcctgcggcactggctcccatggcgaaagggaatgcggcatag

SEQ ID NO: 6604 - DNA, 1326 bp, Escherichia coli
atgagcaaagtaactccccagccgaaaatcggctttgtttcccttggctgtccgaaaaaccttgttgattcagagcgtattctcaccgaactccgcactgaaggttatgacgtggtaccgagctatgacgatgcggacatggtgatcgtcaacacctgcggctttattgacagcgcggtacaagaatcactggaagccattggtgaagcgttgaatgaaaacggcaaggttattgtgaccggttgtctgggggcaaaagaagatcagatccgcgaagtccacccgaaagtgctggaaatcaccgggcctcatagctatgagcaggttctggagcacgttcatcactacgtgccaaaaccgaaacacaacccattcctgagcctggtgccagaacaaggtgtgaaactgacgccgcgtcattatgcctatctgaaaatttctgaaggctgtaatcaccgctgcaccttctgcattattccgtctatgcgcggcgacctggtgagccgtccgattggcgaagtgttaagtgaagcgaaacgtctggtagatgcgggcgttaaagagattctggtgatctcgcaggatacttccgcctatggcgttgatgttaaacatcgtactggcttccacaacggcgagccggtaaaaaccagcatggtcagcctgtgcgaacagttatcgaaactggggatctggacacgtctgcactacgtttacccttatccgcatgtggacgacgtcatcccactgatggcagaaggcaaaatcctgccgtatctggacattccgttgcagcacgccagcccgcgcattctcaaactgatgaagcgtccgggttctgtagatcgccaactggcgcgcatcaaacagtggcgcgaaatctgcccggaactgaccctacgctcaacctttattgtcggcttccctggcgagacagaagaagatttccagatgctactcgacttcctgaaagaagcgcgtctggatcgcgttggctgctttaaatacagcccggttgaaggtgcagacgccaatgccctgcctgaccaggttccggaagaagttaaagaagaacgctggaaccgtttcatgcagctgcagcagcagatttccgccgagcgcctgcaagagaaagtgggccgtgaaattctggtgattatcgacgaagtggacgaagaaggcgcgattggtcgcagcatggcagatgcaccggaaatcgacggcgcggtttatctcaatggtgaaaccaacgttaagccgggtgatatcctgcgtgtgaaagtcgagcacgccgatgagtacgatttgtggggtagccgggtttaa

SEQ ID NO: 6605 - DNA, 903 bp, Escherichia coli
atggccaatctctacgacttgaaaaagttcgacttaaatcttcttgtcatatttgagtgtatttaccagcatttaagcattagcaaagctgctgaatcactatatatcaccccatcagccgtgagccagtcgttacaacgcttacgtgcgcaatttaatgaccctttattcattcgctcaggaaaaggtatcgcgccgacgacaacagggttaaatctgcatcaccatcttgagaaaaatctcagaggccttgaacaaacaattaatatagtcaataagtccgaactaaagaaaaactttattatctacggccctcagctcatttcttgctctaataatagtatgctgatccgctgcctacggcaagattcctctgtcgagattgagtgccatgatatcctcatgtcagcagagaatgctgaagaactgttggttcaccgcaaagccgatctggtgatcacccaaatgccagtgatcagccgttccgtcatttgcatgccattgcatacgattcgcaatactctaatttgtagtaataggcatccacgaattactgacaatagcacttatgaacaaattatggcagaagagttcacccaattaatatctaaatcagcaggggttgatgatattcaaatggaaatagacgagagatttatgaatcgcaaaatctcatttcgtggttcctctttgctgacaatcattaatagcattgcagttacagatttactgggaatagtcccctatgaactttataattcctaccgtgactttcttaacttaaaagagataaaactagaacatccgttaccttcaataaagctttacatttcctataataaatcttctttaaataatttggtgttctcccgatttattgaccgtctaaatgagagtttttga

SEQ ID NO: 6606 - DNA, 1935 bp, Escherichia coli
atgtttcaggacaacccgctgctagcgcagcttaaacagcaactgcattcccagacgccacgcgctgaaggggtggtaaaagccacagaaaaaggctttggcttcctggaagtcgacgcgcaaaaaagttatttcattccgccgccgcagatgaaaaaagtcatgcatggcgaccgaattatcgcggtgatccacagtgaaaaagaacgtgaatccgcagagccagaagaactggttgaaccgttcctgactcgtttcgtgggtaaggttcagggcaaaaatgaccgtctggccatcgttcctgatcatccactcttaaaagacgccattccttgccgcgcagcccgtggcctgaaccacgagtttaaagaaggcgactgggcggttgccgaaatgcgccgtcatccgctgaaaggcgatcgttctttctatgcagaactgacacaatacatcacttttggtgacgatcactttgtaccgtggtgggttacccttgcacgccataatctggaaaaagaagcaccagacggcgtcgctaccgaaatgctcgatgaaggtctggttcgtgaagatctgaccgcgctggattttgtcaccatcgacagtgccagcacagaagatatggatgacgcccttttcgctaaggcgttgccggatgacaaacttcagctgattgtggcgattgccgatccaaccgcgtggattgctgaaggcagcaagctggacaaagccgcgaaaattcgcgcattcaccaactatctgcctggcttcaacatccctatgctgcctcgcgagctttctgacgatctctgctcactgcgcgccaatgaagtccgcccggtactggcatgccgcatgacgctctccgctgatggcaccattgaagataatatcgaattctttgccgccaccatcgaatccaaagcaaagctggtgtatgaccaggtttctgactggctggaaaataccggtgactggcagcctgaaagtgaagcaattgccgaacaagtccgtttgctagcgcaaatttgccaacgccgcggcgagtggcgtcataaccacgcactggtgtttaaagatcgcccggattaccgctttattctcggtgaaaaaggtgaagtgctggatatcgtcgccgagcctcgtcgcattgccaaccgtatcgtcgaagaagcgatgattgccgctaacatttgtgcggcccgcgtactgcgcgataagctcggttttggcatctataacgtgcatatgggctttgatccggcgaatgccgacgcgctggcagcgttgctgaaaacgcacggtctgcatgtcgatgccgaagaagtgctcacgctggacggtttctgcaaactgcgtcgtgaactggacgcgcaaccaactggtttcctcgacagccgcattcgtcgcttccagtcatttgctgaaattagcactgaacccggtcctcactttggcctcggtctggaagcatacgccacctggacttcgccgatccgtaaatatggcgacatgatcaaccaccgtctgctgaaagcggttatcaaaggcgaaactgcgacgcgcccacaggatgaaatcactgtccaaatggccgagcgtcgccgtctcaaccggatggcagaacgtgatgttggtgactggttatacgcacgcttcctgaaagacaaagccgggaccgacacccgtttcgcagcggaaattgtcgatatcagccgtggcggcatgcgtgttcgtttggttgataacggcgctatcgcctttattccggcacctttcttacacgctgtgcgcgatgaactggtttgcagccaggaaaacggcactgtacaaattaaaggtgaaacggtttacaaagtgactgacgttattgacgtcactattgccgaagtccgcatggaaacccgcagcattattgcgcgcccggtcgcgtaa

SEQ ID NO: 6607 - DNA, 789 bp, Escherichia coli
atgatggaattcatcctcagtcatgtagaaaagggcgtgatgacactaacgctcaaccgcccggaacgcctgaacagttttaatgatgagatgcacgcacaactggcagagtgcctgaaacaggtcgagcgcgacgacactatccgttgcctgttacttacaggtgccgggcgcggattttgtgctggtcaggatcttaacgatcgtaacgttgatcccacaggccccgcaccggatttagggatgtcagttgaacgtttctataacccactggtacgtcgcctggcaaaactgccaaaaccggtgatctgtgcagtcaatggcgtggcggcaggggcaggcgcaacactggcactggggggcgacatcgttattgctgcccgttcagcaaaattcgtcatggcgtttagtaagttaggcttaatacccgattgcggtggaacctggttactgccacgcgttgccggacgagcgcgcgccatggggctggcactgctggggaatcaactgagtgctgaacaggcgcacgaatgggggatgatctggcaggttgttgatgatgaaacgctggcagataccgcgcaacagctggcacggcatctggcgacacaaccgacatttggtcttggacttatcaagcaagcgataaatagcgctgaaaccaatacgctcgatacgcaactggatctggaacgtgactatcagcgacttgccggacggagcgcagattatcgtgaaggtgtcagtgcgttcctggctaaacgctcaccgcagttcacggggaaatag

SEQ ID NO: 6608 - DNA, 1428 bp, Escherichia coli
atgatgataaatgtgcaaactgtggcagtgattgggagcggcaccatgggggcaggcattgctgaagttgctgccagtcatggacaccaggttttactgtatgacatttctgctgaagcgctgacccgcgcaatcgacgggatacacgcgcggctaaattcacgcgtgacgcggggaaaactgactgctgaaacctgtgaacgcacattgaaacgcctgatcccggtgaccgatattcacgcgctggcagctgcggacctggtcattgaagcggcgtctgaacgtctggaagtcaaaaaagcgctctttgcacagctggcggaagtttgcccgccacaaacgctattgaccactaacacttcgtcaatctctataaccgcgattgctgcggagataaaaaatcctgaacgtgttgcggggctgcatttttttaacccggcaccggtgatgaagttggtggaggtggtcagtgggctggcaacggcggcggaagttgttgagcagttgtgtgaactaacgttgagttggggtaagcagcctgtgcgctgtcattcgactcctggatttatcgttaaccgtgttgcgcgtccttattattccgaggcctggcgggcactggaagagcaggttgctgcaccagaagtgattgacgctgcacttcgcgatggcgctggtttcccgatggggccgctggaattaaccgatctgattggtcaggacgtcaattttgctgtcacctgttcggtgtttaacgctttctggcaggagcgtcgttttttaccttcgctggtgcaacaggaactggtgattggtggacggttgggcaagaaaagtgggctgggcgtgtacgactggcgcgcggaacgtgaggcagttgttggcctggaagcggtaagcgacagttttagcccaatgaaagtagaaaagaaaagtgacggtgtcacggaaattgacgatgttttattgattgagacacaaggcgagacggcacaggcgctggcaatacgactggcacgcccggtggtagtgatcgataaaatggcgggcaaggtggtgaccattgctgctgcagcggtgaacccggactcagcgacccgcaaggccatttattacctgcaacagcagggcaaaacagtgctgcaaattgcagattacccaggaatgctgatttggcgaacggtagcaatgatcatcaatgaagcccttgatgcgcttcaaaaaggcgtggcctctgaacaggatatcgataccgccatgcgtcttggggtgaattatccatatggcccacttgcctggggagcgcaacttggctggcagcgaatattaaggctccttgaaaatctacagcatcactatggcgaagaacgctatcgcccatgttcattgctgcgccaacgggcgcttctggagagcggttatgagtcataa

SEQ ID NO: 6609 - DNA, 831 bp, Escherichia coli
atgtctatgccattaagcaatgcccttcagagtcaaattattacagatgctcacttccttcatcacccaatagtcgacagtgagtttacacgtaaattaaaatatgcacgcatggattcggaaaacatctatcttccgcctcttactcgtggcaataaccataattacgatggaaaaagcgttgtcgaaattagaaaacttgatattagtaaagagccttggccatttaattatgtgacaggagcatgcagagaatccgatggtattacaacaacaggacgtatgctctatcggaacttgaaaatcacctcagctttagacgaaatatatggtggcatatgtaaaaaggcgcatgctaccacagagttagcagaaggtttacggctaaatttatttatgaagagccctttcgatcctgttgaggactatacagttcatgaaataacattaggccctggttgcaatgttcctggttatgccggaaccacgataggatatatttcaacccttccagcttctcaggcaaaaagatggaccaatgagcagccaaggattgatatctatattgatcagataatgacggtaacaggggtagcaaattcttccggattcgcccttgccgcattacttaatgctaatattgagttgggtaatgacccaataattggtatagaagcctatcccggtaccgcggagatccatgcaaaaatgggatataaagttatcccgggtgatgaaaatgcaccactcaaacgtatgactctgcaaccgtcatctcttccagaactgtttgaattaaaaaatggtgaatggaattatattggtaaataa

SEQ ID NO: 6610 - DNA, 1827 bp, Escherichia coli
atgcattatatgaagtggatttatccacgccgcttacgcaatcaaatgatcctgatggcaatcctgatggtcattgtcccaacgcttactattggttatatcgtagaaacggaaggacgttcagcagtcttatctgaaaaagagaaaaaactttctgccgtggtcaacctgcttaatcaggcactaggcgatcgctatgatctctacatcgacttaccacgtgaggagcgtatccgcgcattaaatgcagaacttgcccccattaccgaaaatatcactcacgccttccctggcatcggtgctggttattacaacaaaatgctggatgcgataatcacctacgcgccttcagcgctatatcagaataatgtcggcgttaccattgccgcagatcaccctggtcgcgaagtgatgcgtacaaatacccctttagtttattcaggcaggcaggtgcgcggcgatattttgaattcaatgctccccattgagcgtaatggtgaaatcctcggctatatctgggccaatgaattaaccgaagatattcgccgccaggcctggaaaatggatgtgaggattatcattgtgctcaccgctggtttgctgataagcctgctgttgattgtccttttctcccgtcgcctgagcgccaatattgatatcatcaccgatggcctctcgactctggcacaaaatattcccactcgattaccacaattgcccggtgaaatggggcaaatcagtcagagtgttaataacctcgcccaggcactgcgtgaaacgcggacacttaacgatctgattattgaaaacgctgccgatggcgtcattgccattgaccgccagggtgatgtaaccaccatgaacccagcagcagaagttatcactggctatcaacgccatgaactggtagggcagccttactccatgttgttcgacaatactcagttctacagtccagtactggatacgctggaacatggcaccgaacatgtggcgctggagatcagttttccaggtcgtgaccgcaccattgaactcagtgtcactaccagtcgtattcataacacgcacggtgaaatgataggtgctttggtgattttctctgatttaactgcccgcaaagaaacccagcgccgcatggcgcaagcagaacgcctcgccacactgggtgagctgatggctggcgtcgcgcatgaagtacgtaatccgttaacggctattcgtggttatgtacagatcttgcgccaacaaaccagtgacccaatacatcaggaatatctgtccgtagtactcaaagaaatcgattcaattaacaaagttattcagcaattgctcgaattttcacgtccacgccacagtcaatggcaacaagtcagcctcaatgcattggttgaagaaactctggtactggtacaaaccgccggcgtacaagcgcgggtcgacttcataagcgaactggataatgaattaagcccgattaacgccgatcgtgaactgctcaaacaggtactactgaatatcctgatcaatgccgtccaggctatcagcgcacgagggaaaattcgcattcaaacctggcaatacagcgactcacaacaggccatttcgatagaggacaacggctgtggcattgatctctcgctgcaaaaaaagatcttcgatccctttttcaccaccaaagcctcaggaaccgggcttggtctggcgttaagtcaacgcatcattaatgcccatcagggtgatattcgcgtcgccagtttgccgggctacggcgcaaccttcacgcttattttaccgatcaacccgcagggaaatcagactgtatga

SEQ ID NO: 6611 - DNA, 315 bp, Escherichia coli
atgaccaaccgtctggtgttgtccggcaccgtgtgcagggctccccttcgaaaggtcagtccatcaggaattcctcactgccagttcgtgcttgagcatcgttctgtgcaggaggaagccggctttcaccggcaggcgtggtgtcaaatgcccgttattgttagcggacacgaaaaccaggccattactcacagtataacggtcggcagtcgcataaccgttcaggggttcatttcatgccacaaggcaaagaacggactgagcaaaatggttttgcatgccgagcagattgaattgatagattctggagactag

SEQ ID NO: 6612 - DNA, 228 bp, Escherichia coli
atggcacgttatttccgtcgtcgcaagttctgccgtttcaccgcggaaggcgttcaagagatcgactataaagatatcgctacgctgaaaaactacatcaccgaaagcggtaagattgtcccaagccgtatcaccggtacccgtgcaaaataccagcgtcagctggctcgcgctatcaaacgcgctcgctacctgtccctgctgccgtacactgatcgccatcagtaa

SEQ ID NO: 6613 - DNA, 603 bp, Escherichia coli
gtgttagctttttgccgctcttcgttgaagtcaaaaaaatatatcatcattttactggcgctcgctgcaattgccggactgggtactcatgccgcctggagtagcaatggtttgccacgtatcgacaataaaacactggccagactggcacagcagcacccggttgtcgttttgtttcgtcatgctgaacgttgcgaccgttcaaccaatcaatgcttgtcagataaaacaggtattacggttaaaggtacccaggatgcccgtgaactgggcaacgcttttagtgctgatatccctgatttcgatctttattccagtaataccgtccggaccattcagtcggctacctggttttcagcgggtaaaaaattgacggtagataaacgacttcttcagtgcggtaatgagatttatagtgcaattaaggacttacaaagcaaagcgcctgataaaaatatcgttattttcacccataatcattgcctgacatatattgctaaagataagcgtgacgcgacatttaaacctgattatctggatggtttagtcatgcatgtggaaaaaggcaaagtttatctggatggggaattcgttaaccactaa

SEQ ID NO: 6614 - DNA, 807 bp, Escherichia coli
atgatcgaaacgctgcttgaagtgcgtaatttaagtaaaacgttccgctaccggaccggctggtttcgtcgtcagaccgtagaagcggtaaaacccttgagctttacgctacgtgaaggccagacactggcgattattggcgagaatggttcgggtaaatccacgctggcaaaaatgctggcgggaatgatagagcctaccagcggcgagttattgattgacgatcatccactgcattttggcgattattccttccgcagtcagcgtattcgcatgatttttcaggatccttcgacctcgttgaatccccgtcaacgtatctcgcaaattctggattttccactgcgcctgaacaccgacctggaaccggaacagcgtcgcaaacagattattgaaacgatgcgtatggttgggctgctaccggatcacgtcagttactatccgcatatgttggcacccggacaaaaacagcgtctgggtctggcgcgcgcgctgatattgcgcccaaaagtcattattgccgatgaagccctcgcttcactggatatgtcgatgcgttcgcagttgattaatctgatgctggaattacaggaaaaacagggcatttcgtatatttatgttacccagcatatcggaatgatgaagcacattagcgaccaggtgctggtgatgcatcagggcgaggttgtcgagcgaggcagcaccgcggatgtgctggcatcgccgctgcatgaactcaccaaacggctgattgccggtcattttggcgaggcattgacggcggatgcgtggcgtaaagatcgctaa

SEQ ID NO: 6615 - DNA, 1185 bp, Escherichia coli
atgtctaaagaaaagtttgaacgtacaaaaccgcacgttaacgtcggtactatcggccacgttgaccatggtaaaacaacgctgaccgctgcaatcactaccgtactggctaaaacctacggcggtgctgctcgcgcattcgaccagatcgataacgcgccggaagaaaaagctcgtggtatcaccatcaacacttctcacgttgaatacgacaccccgacccgtcactacgcacacgtagactgcccggggcacgccgactatgttaaaaacatgatcaccggtgctgcgcagatggacggcgcgatcctggtagttgctgcgactgacggcccgatgccgcagactcgtgagcacatcctgctgggtcgtcaggtaggcgttccgtacatcatcgtgttcctgaacaaatgcgacatggttgatgacgaagagctgctggaactggttgaaatggaagttcgtgaacttctgtctcagtacgacttcccgggcgacgacactccgatcgttcgtggttctgctctgaaagcgctggaaggcgacgcagagtgggaagcgaaaatcctggaactggctggcttcctggattcttacattccggaaccagagcgtgcgattgacaagccgttcctgctgccgatcgaagacgtattctccatctccggtcgtggtaccgttgttaccggtcgtgtagaacgcggtatcatcaaagttggtgaagaagttgaaatcgttggtatcaaagagactcagaagtctacctgtactggcgttgaaatgttccgcaaactgctggacgaaggccgtgctggtgagaacgtaggtgttctgctgcgtggtatcaaacgtgaagaaatcgaacgtggtcaggtactggctaagccgggcaccatcaagccgcacaccaagttcgaatctgaagtgtacattctgtccaaagatgaaggcggccgtcatactccgttcttcaaaggctaccgtccgcagttctacttccgtactactgacgtgactggtaccatcgaactgccggaaggcgtagagatggtaatgccgggcgacaacatcaaaatggttgttaccctgatccacccgatcgcgatggacgacggtctgcgtttcgcaatccgtgaaggcggccgtaccgttggcgcgggcgttgtagcaaaagttctgagctaa

SEQ ID NO: 6616 - DNA, 1185 bp, Escherichia coli
  misc_feature (336)..(336): n=g, a, t or c
  misc_feature (353)..(355): n=g, a, t or c
atgtctaaagaaaagtttgaacgtacaaaaccgcacgttaacgtcggtactatcggccacgttgaccatggtaaaacaacgctgaccgctgcaatcactaccgtactggctaaaacctacggcggtgctgctcgcgcattcgaccagatcgataacgcgccggaagaaaaagctcgtggtatcaccatcaacacttctcacgttgaatacgacaccccgacccgtcactacgcacacgtagactgcccggggcacgccgactatgttaaaaacatgatcaccggtgctgctcagatggacggcgcgatcctggtagttgctgcgactgacgggccnatgccccaaacttgtgnnnacattctgttgggtcgtcaggtaggcgttccgtacatcatcgtgttcctgaacaaatgcgacatggttgatgacgaagagctgctggaactggttgaaatggaagttcgtgaacttctgtctcagtacgacttcccgggcgacgacactccgatcgttcgtggttctgctctgaaagcgctggaaggcgacgcagagtgggaagcgaaaatcctggaactggctggcttcttggattcctacattccggaaccagagcgtgcgattgacaagccgttcctgctgccgatcgaagacgtattctccatctccggtcgtggtaccgttgttaccggtcgtgtagaacgcggtatcatcaaagttggtgaagaagttgaaatcgttggtatcaaagagactcagaagtctacctgtactggcgttgaaatgttccgcaaactgctggacgaaggccgtgctggtgagaacgtaggtgttctgctgcgtggtatcaaacgtgaagaaatcgaacgtggtcaggtactggctaagccgggcaccatcaagccgcacaccaagttcgaatctgaagtgtacattctgtccaaagatgaaggcggccgtcatactccgttcttcaaaggctaccgtccgcagttctacttccgtactactgacgtgactggtaccatcgaactgccggaaggcgtagagatggtaatgccgggcgacaacatcaaaatggttgttaccctgatccacccgatcgcgatggacgacggtctgcgtttcgcaatccgtgaaggcggccgtaccgttggcgcgggcgttgtagcaaaagttctgagctaa

SEQ ID NO: 6617 - DNA, 1083 bp, Escherichia coli
atgtcgcttttgtgcgcatttttcagaaatgtagatatttttagattatggctacgaaatgagcatcgccatgtcaccctacatctcataagaggatcgcttctgatgaatgcactgaccgccgtacaaaataacgctgtcgattcaggccaggactatagcggattcaccctcaccccgtcggcgcaatccccgcgtctgctggaactcaccttcaccgaacagacgaccaaacagtttcttgagcaggttgccgagtggcccgtgcaggcgctggagtacaaatcgtttctgcgttttcgggtagccaaaattcttgacgatctatgtgcgaaccagctgcaaccattgctgttgaagacgttgctaaaccgcgctgaaggtgcgttgttgatcaatgcggtgggtgtcgatgatgtgaagcaagcggatgagatggtgaagctggcgacggcggtggcgcatctgattggccgttccaatttcgatgcgatgagcggtcagtattacgcgcgttttgtagtgaaaaatgtcgataactcagacagctatctgcgccagccgcaccgcgtgatggagctacacaacgacggcacgtatgtcgaagagataaccgattacgtgctgatgatgaaaatcgacgagcaaaacatgcagggcggaaattcgctgctgctgcatctcgatgactgggaacatctcgacaactatttccgccacccgctggcgcgtcgcccgatgcgctttgccgcgccgccgagtaaaaacgtcagcaaagatgtttttcatccggtgttcgacgtcgatcaacagggtcgcccggtgatgcgctatatcgaccagttcgtccagccgaaagacttcgaagaaggcgtgtggttgagcgagctttccgacgccattgaaaccagcaaaggcattctttctgtgcccgttcccgttggcaaattcctgttgattaacaacctgttctggctgcacggtcgcgaccgctttactccgcacccggatctgcgccgtgaactgatgcgccagcgtggctatttcgcttacgcctctaaccactaccagacgcatcagtaa

SEQ ID NO: 6618 - DNA, 1341 bp, Escherichia coli
atgatgattactctgcgcaaacttcctctggcggttgccgtcgcagcgggcgtaatgtctgctcaggcaatggctgttgatttccacggctatgcacgttccggtattggttggacaggtagcggcggtgaacaacagtgtttccagactaccggtgctcaaagtaaataccgtcttggcaacgaatgtgaaacttatgctgaattaaaattgggtcaggaagtgtggaaagagggcgataagagcttctatttcgacactaacgtggcctattccgtcgcacaacagaatgactgggaagctaccgatccggccttccgtgaagcaaacgtgcagggtaaaaacctgatcgaatggctgccaggctccaccatctgggcaggtaagcgcttctaccaacgtcatgacgttcatatgatcgacttctactactgggatatttctggtcctggtgccggtctggaaaacatcgatgttggcttcggtaaactctctctggcagcaacccgctcctctgaagctggtggttcttcctctttcgccagcaacaatatttatgactataccaacgaaaccgcgaacgacgttttcgatgtgcgtttagcgcagatggaaatcaacccgggcggcacattagaactgggtgtcgactacggtcgtgccaacttgcgtgataactatcgtctggttgatggcgcatcgaaagacggctggttattcactgctgaacatactcagagtgtcctgaagggctttaacaagtttgttgttcagtacgctactgactcgatgacctcgcagggtaaagggctgtcgcagggttctggcgttgcatttgataacgaaaaatttgcctacaatatcaacaacaacggtcacatgctgcgtatcctcgaccacggtgcgatctccatgggcgacaactgggacatgatgtacgtgggtatgtaccaggatatcaactgggataacgacaacggcaccaagtggtggaccgtcggtattcgcccgatgtacaagtggacgccaatcatgagcaccgtgatggaaatcggctacgacaacgtcgaatcccagcgcaccggcgacaagaacaatcagtacaaaattaccctcgcacaacaatggcaggctggcgacagcatctggtcacgcccggctattcgtgtcttcgcaacctacgccaagtgggatgagaaatggggttacgactacaccggtaacgctgataacaacgcgaacttcggcaaagccgttcctgctgatttcaacggcggcagcttcggtcgtggcgacagcgacgagtggaccttcggtgcccagatggaaatctggtggtaa

SEQ ID NO: 6619 - DNA, 1650 bp, Escherichia coli
atggaaatcttcttcaccatactgataatgaccctcgtggtctcgctgtccggggtggtcactcgtgtcatgccctttcagatcccgcttccgcttatgcaaatcgccatcggtgcgctactggcgtggccgacgtttggtttgcatgtggagtttgatcctgaactctttttagtcttgtttatcccgccgttgctgttcgctgatggctggaaaacgccgacccgtgaatttctcgaacatggtcgagagattttcggcctcgcgctggcgctggtggtggtcaccgtggtcggcattggcttccttatttactgggtggtgccgggcattccgctgatccctgcctttgcgctggcggcggtgctttctccgaccgatgctgtggcgctctccgggattgttggcgaagggcgcatcccgaaaaaaatcatgggcattttgcagggcgaagcgttgatgaatgacgcctccggtctggtgtcgttgaagtttgccgtagcagtggcgatggggacgatgatcttcaccgtcggcggtgcgacggtcgaatttatgaaagtagccattggcggtattctcgccggttttgtggtgagctggctgtacggtcgctcgctgcgattcctcagccgctggggcggtgatgaacccgcgacgcagatcgtcctgctgttcctgctgccattcgcttcttatctgattgccgaacatattggcgtttccggcatcctcgctgcggttgccgccgggatgaccatcacccgctccggtgtgatgcgccgtgcgccgctggcaatgcgcctgcgtgcaaacagcacctgggcgatgctggaatttgtctttaacggcatggtgttcctgctgttaggtctgcagctgccgggtattctggagacgtcgctgatggcagcagaaatcgaccctaacgtcgaaatctggatgctgtttaccaatattattctgatatatgcggcgctgatgctggtccgtttcggctggctgtggacgatgaaaaagttcagcaaccgcttcctgaagaagaagccgatggagtttggttcgtggaccacacgagaaatcctgatcgcgtctttcgccggggtgcgtggggcgatcactctggccggtgtgctctctatcccgctgctcttgccggatggtaacgtcttcccggcgcgctatgagctggtgttcctggcggctggcgtcattctcttctcgctgtttgtcggcgtggtgatgttgcctattctgctacaacacattgaagtcgcggatcattcgcaacaattgaaagaggaacgtattgcgcgagcggcaacggcagaagtggcgattgtggcgatccagaaaatggaggagcgtctggcggcggataccgaagagaatatcgataaccagctgcttacggaggtcagttctcgcgtcattggtaacctgcgtcgtcgcgccgatggacgtaacgacgttgaaagttccgtgcaggaagagaaccttgagcgtcgcttccgtctggcggcattgcgttctgaacgtgctgaactttaccacctgcgcgccacacgggagatcagcaacgaaacgctgcaaaaattactgcacgatctcgatttgcttgaagcgttgctaattgaggaaaatcagtaa

SEQ ID NO: 6620 - DNA, 66 bp, Escherichia coli
atgaaacgcattagcaccaccattaccaccaccatcaccattaccacaggtaacggtgcgggctga

SEQ ID NO: 6621 - DNA, 2463 bp, Escherichia coli
atgcgagtgttgaagttcggcggtacatcagtggcaaatgcagaacgttttctgcgtgttgccgatattctggaaagcaatgccaggcaggggcaggtggccaccgtcctctctgcccccgccaaaatcaccaaccacctggtggcgatgattgaaaaaaccattagcggccaggatgctttacccaatatcagcgatgccgaacgtatttttgccgaacttttgacgggactcgccgccgcccagccggggttcccgctggcgcaattgaaaactttcgtcgatcaggaatttgcccaaataaaacatgtcctgcatggcattagtttgttggggcagtgcccggatagcatcaacgctgcgctgatttgccgtggcgagaaaatgtcgatcgccattatggccggcgtattagaagcgcgcggtcacaacgttactgttatcgatccggtcgaaaaactgctggcagtggggcattacctcgaatctaccgtcgatattgctgagtccacccgccgtattgcggcaagccgcattccggctgatcacatggtgctgatggcaggtttcaccgccggtaatgaaaaaggcgaactggtggtgcttggacgcaacggttccgactactctgctgcggtgctggctgcctgtttacgcgccgattgttgcgagatttggacggacgttgacggggtctatacctgcgacccgcgtcaggtgcccgatgcgaggttgttgaagtcgatgtcctaccaggaagcgatggagctttcctacttcggcgctaaagttcttcacccccgcaccattacccccatcgcccagttccagatcccttgcctgattaaaaataccggaaatcctcaagcaccaggtacgctcattggtgccagccgtgatgaagacgaattaccggtcaagggcatttccaatctgaataacatggcaatgttcagcgtttctggtccggggatgaaagggatggtcggcatggcggcgcgcgtctttgcagcgatgtcacgcgcccgtatttccgtggtgctgattacgcaatcatcttccgaatacagcatcagtttctgcgttccacaaagcgactgtgtgcgagctgaacgggcaatgcaggaagagttctacctggaactgaaagaaggcttactggagccgctggcagtgacggaacggctggccattatctcggtggtaggtgatggtatgcgcaccttgcgtgggatctcggcgaaattctttgccgcactggcccgcgccaatatcaacattgtcgccattgctcagggatcttctgaacgctcaatctctgtcgtggtaaataacgatgatgcgaccactggcgtgcgcgttactcatcagatgctgttcaataccgatcaggttatcgaagtgtttgtgattggcgtcggtggcgttggcggtgcgctgctggagcaactgaagcgtcagcaaagctggctgaagaataaacatatcgacttacgtgtctgcggtgttgccaactcgaaggctctgctcaccaatgtacatggccttaatctggaaaactggcaggaagaactggcgcaagccaaagagccgtttaatctcgggcgcttaattcgcctcgtgaaagaatatcatctgctgaacccggtcattgttgactgcacttccagccaggcagtggcggatcaatatgccgacttcctgcgcgaaggtttccacgttgtcacgccgaacaaaaaggccaacacctcgtcgatggattactaccatcagttgcgttatgcggcggaaaaatcgcggcgtaaattcctctatgacaccaacgttggggctggattaccggttattgagaacctgcaaaatctgctcaatgcaggtgatgaattgatgaagttctccggcattctttctggttcgctttcttatatcttcggcaagttagacgaaggcatgagtttctccgaggcgaccacgctggcgcgggaaatgggttataccgaaccggacccgcgagatgatctttctggtatggatgtggcgcgtaaactattgattctcgctcgtgaaacgggacgtgaactggagctggcggatattgaaattgaacctgtgctgcccgcagagtttaacgccgagggtgatgttgccgcttttatggcgaatctgtcacaactcgacgatctctttgccgcgcgcgtggcgaaggcccgtgatgaaggaaaagttttgcgctatgttggcaatattgatgaagatggcgtctgccgcgtgaagattgccgaagtggatggtaatgatccgctgttcaaagtgaaaaatggcgaaaacgccctggccttctatagccactattatcagccgctgccgttggtactgcgcggatatggtgcgggcaatgacgttacagctgccggtgtctttgctgatctgctacgtaccctctcatggaagttaggagtctga

SEQ ID NO: 6622 - DNA, 909 bp, Escherichia coli
atggctgccattaatacgaaagtcaaaaaagccgttatccccgttgcgggattaggaaccaggatgttgccggcgacgaaagccatcccgaaagagatgctgccacttgtcgataagccattaattcaatacgtcgtgaatgaatgtattgcggctggcattactgaaattgtgctggttacacactcatctaaaaactctattgaaaaccactttgataccagttttgaactggaagcaatgctggaaaaacgtgtaaaacgtcaactgcttgatgaagtgcagtctatttgtccaccgcacgtgactattatgcaagttcgtcagggtctggcgaaaggcctgggacacgcggtattgtgtgctcacccggtagtgggtgatgaaccggtagctgttattttgcctgatgttattctggatgaatatgaatccgatttgtcacaggataacctggcagagatgatccgccgctttgatgaaacgggtcatagccagatcatggttgaaccggttgctgatgtgaccgcatatggcgttgtggattgcaaaggcgttgaattagcgccgggtgaaagcgtaccgatggttggtgtggtagaaaaaccgaaagcggatgttgcgccgtctaatctcgctattgtgggtcgttacgtacttagcgcggatatttggccgttgctggcaaaaacccctccgggagctggtgatgaaattcagctcaccgacgcaattgatatgctgatcgaaaaagaaacggtggaagcctatcatatgaaagggaagagccatgactgcggtaataaattaggttacatgcaggccttcgttgaatacggtattcgtcataacacccttggcacggaatttaaagcctggcttgaagaagagatgggcattaagaagtaa

SEQ ID NO: 6623 - DNA, 849 bp, Escherichia coli
gtgaggcgattgccggggattttactgcttactggagccgcgctcgttgtgatcgctgccctgctggttagcggcctgcgtattgctttaccgcatcttgacgcctggcgtccggaaatcctcaacaaaatagaatccgcgactggcatgccggtagaagccagtcagctctcagccagctggcagaattttggcccgacgcttgaagcacacgacatccgtgcagaactaaaagatggcggcgaattttcggttaaacgcgttactctggcgctggatgtctggcagagcctgttacatatgcgctggcagtttcgcgacctcactttctggcagctgcgctttcgcaccaacactcctatcaccagcggtggtagtgatgacagtctggaagccagtcacatcagcgatctgtttcttcgtcaatttgaccatttcgatcttcgcgacagtgaagtcagtttcctgacgccatccggtcagcgcgccgagctggcgatcccacaactcacctggctgaacgatccacgtcgacaccgtgcggaaggcctggtaagcctctccagccttaccggacagcacggcgtgatgcaggtgcgcatggatttgcgcgatgatgaggggttgttaagcaatggtcgcgtctggctccaggcggatgacatcgacctgaagccgtggctcggtaaatggatgcaggacaatattgcgctggaaacggcacagttctcccttgaaggctggatgacgatcgacaaaggcgatgtaaccggcggtgacgtctggctgaaaacagggcggtgccagctggttgggcgagaagcaaacgcatacgctgtcggtggataa

SEQ ID NO: 6624 - DNA, 2961 bp, Escherichia coli
gtggataatctgaccgcgcatattacgcgtgaaaatccgggctggcagttctctattcccgatacacggatcacgatggacggcaaaccctggccgagcggagcattgacgctggcctggataccggaacaggacgttggcggcaaagacaataaacgcagtgacgaactccggattcgcgccagtaatctggagctggcaggcctggagggcatacgcccgctggccgcgaaactttcacctgcactgggtgatgtttggcgctccacacaaccgagcggcaagattaacactctggcgctggatatcccgcttcaggcggcagacaagacccgttttcaggcatcgtggagcgatctggcctggaagcaatggaaattattaccgggtgcggaacacttctccgggacgctttccggcagcgttgaaaatggtttgcttaccgcgtcgatgaagcaggcaaagatgccttacgaaacggtattccgtgcgccactagaaatcgccgacggccaggcaactataagctggctgaacaataacaaaggtttccagctggatgggcgtaatattgacgttaaagccaaagccgtccatgcgcgcggcggttttcgttacctgcaacctgctaacgatgaaccctggctgggtattctggctggcatcagtaccgatgatggttcacaagcctggcgctatttcccggaaaacttgatgggtaaagacctggttgattacttaagtggcgcgattcagggcggtgaagcggataacgcgacgctggtttatggtggcaatccgcaactcttcccctataaacacaacgaaggtcagtttgaagtgctggtgccgctgcgcaacgcgaagtttgccttccagccggactggcctgcattaactaaccttgatattgaactggactttattaacgacggtttatggatgaaaaccgatggcgttaatctgggcggcgtgcgcgcgagtaatcttaccgcagtgatccctgactactcaaaagaaaaactgctgattgacgctgacattaaaggtccgggtaaagccgttggcccttactttgatgagacaccgctgaaagattctctgggtgcgaccctgcaagaactccagctcgacggcgatgtgaatgctcgcttacatcttgatatcccgctgaacggcgaactggtaaccgcgaaaggtgaagtgacgctgcgtaataacagtctgtttatcaaaccactcgacagcaccctgaaaaatttgagcggtaaattcagctttatcaatagcgatctgcaaagtgaaccactgacagcaagctggtttaatcagccgttgaacgtggatttttccaccaaagaaggggcaaaagcctaccaggtagcggtaaacctcaacggtaactggcaaccggcgaaaaccggcgttctgcctgaagcggtgaacgaagcattgagtggcagcgtggcgtgggatggtaaagtgggcattgatctgccttatcatgctggtgcgacctataacatagagctgaacggcgatctaaagaatgtgagcagtcacttaccttcaccgttagccaaacctgcgggtgaaccactagcggtaaacgttaaggttgatggcaatctcaacagctttgaattaaccggacaggctggtgcggataatcatttcaatagccgctggttgctcggtcaaaagctgacgctcgatcgtgctatttgggcggcagacagtaaaacgctcccgccgttgccggaacaaagtggcgttgaactcaatatgccgccgatgaatggtgccgagtggctggccctgttccagaaaggcgctgcggagagtgtcggtggtgcagcgagtttcccacaacacataacgttacgtacgcctatgttgtcactgggaaatcagcaatggaataacctgagtattgtttcgcaaccgacggcaaatggcaccctggttgaagcgcaagggcgtgaaatcaacgccacgctagcgatgcgtaataacgcgccgtggctggcgaatatcaaatatctttattacaacccgagcgtggcgaaaactcgtggtgattcaacgccgtcatcacctttcccgacaacggagcgcattaacttccgtggctggccggacgcccaaatacgatgcacagagtgctggttctgggggcaaaaattcggtcgcattgacagtgatatcaccatttctggcgatacgttaacgctgaccaatggactgattgatactggtttctcgcggcttactgccgatggtgaatgggttaataatccggggaatgaacgtacctcgctgaaaggaaaactgcgcgggcagaaaattgatgccgccgcagaattttttggtgtcacgacgcccatacgccagtcgtcatttaatgtggattacgatttacactggcgcaaagcaccctggcagccagatgaagcgacgttgaatggcatcattcatactcaactgggtaaaggcgaaattaccgaaatcaataccggacatgccgggcaattgctgcgcttattgagcgtagatgccctgatgcgtaagctgcgttttgatttcagagacacttttggcgaagggttctattttgactccattcgcagcaccgcgtggattaaagacggcgttatgcacaccgacgacacgctggtggatggcctggaggcggatatcgccatgaaagggtcggtaaatctggtacgtcgcgacctgaatatggaagcggttgtcgcaccagagatttctgcgacggtgggcgtggctgcggcttttgcggttaaccccattgttggcgcggcagtgtttgccgccagtaaagtgctggggccgctgtggagcaaagtctccattttgcgctatcacatttcgggtccgctggacgatccgcaaatcaacgaagtgttgcgccaaccgcgtaaagaaaaagcgcaatga

SEQ ID NO: 6625 - DNA, 4014 bp, Escherichia coli
gtgggaacagggcttgctaatgctgatgattcgcttccttccagcaactatgcgccgcctgccgggggaacattctttttgcttgctgacagcagttttagcagcagtgaagaggcgaaagtgcgactggaagcgccggggcgtgattatcggcgctatcagatggaagagtacggcggcgtggacgttcgcctgtatcgtattcctgacccgatggcatttttgcgccagcagaaaaacctgcatcgcattgtggtgcaaccgcaatatctgggcgacgggctgaacaatacgctaacctggctgtgggataactggtacggcaaatctcgccgcgtgatgcagcgtactttctcttctcagtcacggcagaatgtgactcaggcgttacccgaattacagctcggcaatgccattattaaaccttcccgttatgtacagaacaaccagttttccccgctgaaaaaatatcccctggtgaaacagttccgttatccactatggcaggctaaaccgttcgagccgcagcaaggggtaaaactggaaggcgcatccagcaatttcatctcgccgcagccgggtaacatttatattcctctcggccaacaagagccgggactgtacctcgtcgaggcgatggttggtgggtatcgggcgacgacggtggtgtttgtttccgataccgtggcgcttagcaaagtgtcaggcaaagagcttctggtgtggaccgcgggtaaaaaacagggtgaagcgaagcccggctcagagatcttgtggactgacggtcttggcgtgatgacccgcggtgtgaccgatgacagcggtaccttgcagttacaacatatatcgccagaacgttcatacattctgggtaaggatgctgaaggcggcgtttttgtctccgagaacttcttctacgaaagcgaaatctacaacacccgcttgtatatttttaccgatcgcccgctatatcgcgcaggcgatcgtgtcgatgttaaagtgatcggccgcgagttccacgatccgttgcattcatcccccatcgtcagcgccccggcgaagctttcggtgctggacgccaacggcagtctgttgcaaaccgtcaatgtcacgctggatgcgcgcaatggcgggcagggaagtttccgcctgccagaaaatgccgtagccggaggttatgagttacgtcttgcttaccgcaatcaggtctatagcagcagttttcgcgtggcaaactacatcaagccacatttcgagattggtttagctctcgccaaaaaagagttcaaaactggcgaagcggtcagcggcaaactgcaactgctctacccggatggcgagccggtaaaaaatgcccgcgtgcagttaagtttgcgcgctcagcaattatcaatggtcggtaacgatttgcgttatgccggacgtttccccgtgtcgctggaaggcagcgaaacggtgtccgacgccagcggtcatgtggcgttaaatctccccgccgccgataaaccgagccgctatttgttaaccgtctccgccagtgacggcgcggcgtatcgcgtcaccaccaccaaagagatcctcattgaacgcggtctggcgcattactcattaagtactgccgcacaatacagtaatagcggcgagtcggttgtgttccgttatgccgcgctggaatcttcaaaacaggttcctgttacgtatgaatggttgcgtctcgaagaccgcacgagccatagcggagagctaccgtcaggcggcaaatcctttaccgtcaatttcgctaaacctggcaactacaatctgacattacgcgataaagacggcttaattctcgctgggttaagtcatgccgtcagcggtaagggcagcacggcgcatactggtacggtagatatcgtggcggataaaacgctgtaccagccaggcgaaaccgcgaagatgctgattacctttccggagccaattgatgaagcattattgacgctggaacgcgatcgcgtggaacagcagtcgctgctttcgcatccggcaaactggctaacgctacaacgtttaaacgatacccagtatgaagcccgggttccagtgagcaattcctttgcgcctaacatcactttttcggtgctgtatacccgtaacggtcagtacagttttcagaacgccgggatcaaagttgccgttccccagctggatatccgggtgaaaacggacaaaacccattaccagcctggtgaactggtcaatgtcgaattaacctcgtcgctgaaaggtaaacctgtttctgcgcagctaacggtaggcgtggtcgatgaaatgatctacgcgctgcaaccagaaatcgcgccgaatatcggcaaatttttctatccgctggggcgtaacaatgtgcgtaccagctccagtctgtcgtttatcagctacgaccaggcgctctccagcgagccggttgcgcctggcgcaactaaccgcagcgagcggcgagtaaaaatgcttgaacgtccacggcgtgaagaggtggataccgcggcatggatgccgtcactcacaaccgataaacaaggcaaagcgtatttcacgttcctgatgcctgattcgttaacccgctggcgtatcaccgcgcgtgggatgaacggcgacgggctggtcgggcaggggcgtgcttatctgcgttcggaaaaaaatctctacatgaagtggagtatgccaacggtgtatcgcgtgggcgacaaaccggcggcaggactgtttatcttcagtcagcaggataacgaaccggtggcgctggtgactaaatttgcaggcgctgagatgcgccagacgctgacgctgcacaaaggggcgaattatatttcgctgacgcagaatattcagcaatctggcttgttaagtgcagaactgcaacaaaatgggcaagtgcaggacagcattagcacaaaactgtcttttgtggataacagctggcccgttgaacagcagaaaaatgtcatgctcggtggtggcgataacgcgctgatgttgcccgagcaggcgagcaatatccggctacaaagtagtgaaacgccgcaggagattttccgcaacaatcttgatgcgttagtcgatgaaccgtggggtggcgtaatcaacaccggtagccgtctgatcccgctcagtctcgcctggcgttcgcttgccgatcatcaaagtgccgccgctaacgacattcgtcagatgattcaggataaccgtctgcggctgatgcaactggcggggcccggagcgcgctttacctggtggggtgaagatggcaatggtgacgccttccttacggcatgggcatggtacgccgactggcaggccagccaggcgatcggcgtaacgcaacaaccggaatactggcagcatatgctcgacagctacgcggagcaggcagataacatgccgttattgcatcgggcgctggtgctggcatgggcgcaggagatgaatttgccgtgcaaaacgttgttgaaagggttggatgaagctatcgcccggcgcggaactaaaactgaagatttctctgaggaagacacccgcgatatcaatgatagcctgatcctcgatacaccggagtctccactggcagatgcggtggcaaacgtcttaaccatgacgttgctgaaaaaagcgcagttgaagtccacggtgatgccacaggttcagcaatatgcgtgggataaagcggcaaacagcaatcagccgctggcgcacacggttgtgctgcttaatagcggtggcgacgctacccagacggccgctattttaagtggtttgaccgctgagcaatccactattgagcgcgcgctggccatgaactggctggcgaaatatatggcgacaatgcctccagttgttttgcctgcgcctgcgggcgcatgggctaaacataagttaactggagggggcgaagactggcgttgggttggtcagggcgtgccggacattctctcttttggtgacgaattatcgccgcaaaatgtgcaggtccgctga

SEQ ID NO: 6626 - DNA, 1743 bp, Escherichia coli
atgataaaaccgacgtttttacgccgggtggccattgctgctctgctctcaggaagttgttttagcgccgccgccgcgcctcctgcgccgcccgtctcgtatggtgtggaggaagatgtcttccacccggtacgcgcgaaacagggaatggtagcgtctgtggacgccactgccactcaggtgggggtggatattctcaaggagggcgggaatgccgttgatgccgccgtggcggtgggctacgcgctggcggtaacgcatccgcaggcagggaatctgggcggtggtggttttatgttaatccgctcgaaaaatggcaataccacggctatcgatttccgcgaaatggcacccgccaaagcgacccgcgatatgttcctcgatgatcagggcaacccggacagcaaaaaatcactcacttcgcatctggcttccggcacaccgggtacggtagcaggtttctcgctggcgctggataaatacggcaccatgccgctgaacaaagtcgtgcagcccgcgtttaaactggcacgcgatggttttatcgttaacgacgcgctggctgacgatctcaaaacctacggtagcgaagtgttgccgaatcacgaaaacagtaaagctatcttctggaaagagggcgagccgctgaaaaagggcgacacgctggtgcaggcgaacctggcaaagagcctggagatgattgctgaaaacggcccggacgaattctataaaggcacgattgcggaacagatcgcccaggagatgcagaaaaacggtggcttgatcactaaagaagatttagcagcctataaagcggtcgaacgcactccgataagcggcgattatcgcgggtatcaggtttactccatgccaccgccatcctccggcgggatccatatcgtacaaatcctcaatattctggaaaacttcgatatgaagaaatacggctttggcagcgccgatgcgatgcaaatcatggcagaagcggagaaatacgcctacgccgaccgctcggaatatcttggcgacccggattttgtcaaagtaccgtggcaggcgctgaccaataaagcctatgccaaatctattgccgatcaaattgatatcaataaagcgaagccatccagcgaaattcgccccggcaagcttgcgccttatgagagtaatcaaactacccattactcagtggtggataaagatggtaacgcggtggcggtgacctatacgctgaacaccaccttcggtacgggcattgtcgcgggcgagagcggtattctgcttaataaccagatggatgatttctccgccaaaccgggcgtaccgaacgtttacgggctggtgggcggtgatgccaacgccgtcgggccgaacaaacgcccgctgtcgtcgatgtcgccgaccattgtggtgaaagacggtaaaacctggctggttaccggtagcccaggcggtagccggatcatcactacagtgctgcaaatggtggtgaatagcatcgattatggcttgaacgtcgccgaagcgaccaatgcgccgcgtttccaccatcagtggttgccggacgagctgcgtgtcgaaaaagggtttagcccggatacgctcaagctgctggaagcaaaaggtcagaaagtggcgctgaaagaggcgatgggcagtacacaaagcattatggttgggccggacggtgagttgtacggcgcatccgacccgcgctcggtggatgatttaacggcggggtactaa

SEQ ID NO: 6627 - DNA, 309 bp, Escherichia coli
gtgcacatacagaggaaatcaacgatgagtaaatgtagtgctgatgaaaccccggtttgctgctgtatggatgttggcaccattatggacaactccgactgcaccgcgtcttacagccgcgtgtttgcaaaccgcgcagaagcagagcaaacgctggcggcgctgactgaaaaagcccgtagcgtggaatctgaaccttgcaaaatcaccccgactttcactgaagagtctgacggtgtgcgcctggatatcgatttcacttttgcctgcgaagctgaaatgctgattttccagctgggtctgcgttaa

SEQ ID NO: 6628 - DNA, 1104 bp, Escherichia coli
gtgaatttactgacagtgagtactgatctcatcagtatttttttattcacgacactgtttctgttttttgcccgtaaggtggcaaaaaaagtcggtttagtggataaaccaaacttccgcaaacgtcaccagggattgatacctctcgttggggggatttcggtttacgcagggatttgcttcacgttcggaattgtcgattactatattccgcatgcatctctctatctcgcttgtgccggtgtgcttgttttcattggcgcgctggatgaccgttttgatatcagcgtaaaaatccgtgccaccatacaggccgctgttggcattgttatgatggtgttcggcaagctttatctcagtagcctgggttatatctttggctcctgggagatggtgctcggaccgtttggttacttcctgacgctatttgccgtctgggcggccattaatgcgttcaacatggttgatggcattgatggcttgctgggcgggttgtcctgcgtctcgtttgcagcaatcggtatgattttgtggttcgacgggcaaaccagcctcgcaatctggtgctttgcgatgatcgccgccatcctgccatacatcatgcttaaccttggtatcctgggtcgccgctacaaagtctttatgggtgatgcgggcagtacgctgattggttttaccgttatctggatcctgctcgaaacgacccagggcaaaacccatcccatcagcccggttaccgctttgtggataatcgccattccgctaatggatatggtggcgattatgtaccgtcgcctgcgtaaaggcatgagcccattctctcctgaccgtcagcatattcaccatttgatcatgcgtgccgggtttacttcccgtcaggcgtttgtgctgattacccttgccgcagcactgctcgcttccattggcgtgctggcagaatattctcattttgtcccggagtgggtcatgctggtgctctttttgctagcattcttcctctatggatattgcattaagcgtgcctggaaagttgctcgctttattaagcgcgtaaaacgcagactgcgtagaaatcgtggtggcagccccaatttaaccaaataa

SEQ ID NO: 6629 - DNA, 1725 bp, Escherichia coli
gtgttatcacctgtttgtccagggtttgtttgcatgagatacatcaaatcgattacacagcagaagctgagctttttgcttgcaatctatattggcctttttatgaatggcgcggttttttaccgccgcttcggcagctatgcgcacgattttaccgtctggaaaggcatttctgctgttgttgaactggccgccaccgtactggtgaccttctttttactacgtcttctttcgctgtttggccgccgcagctggcgtattctggcatcgctggtggtgctcttttccgcaggtgccagctattacatgaccttccttaatgtggtcattggttatggcatcatcgcttccgtcatgaccaccgatatcgacctgtcaaaagaagttgttggtctgaactttattctctggttaatcgccgttagtgcattgcctcttatccttatctggaataaccgctgtcgctacaccttgctccgacaactgcgaaccccagggcagcgtattcgcagcctggcggtcgtcgtactggcgggtattatggtttgggcaccgattcgtttgctggatatccagcagaagaaagtggagagggcgaccggcgttgatttgccgagttatggcggtgtcgtagcgaactcttatctgccatcaaactggctttctgcgttggggctgtatgcctgggcgcgggtcgatgaatcttccgataataattcattgcttaatccggcgaagaaattcacttatcaggcaccgcaaaacgttgatgacacttatgtcgtgtttatcatcggtgaaaccacgcgttgggaccatatgggtattttcggctatgagcgtaataccacgccgaaactggcccaggagaaaaatctggcggcgttccgtggttactcctgtgataccgcaaccaaactctcactgcgttgcatgtttgtacgtcaggggggcgcggaagataatccgcagcgcacattaaaagaacagaacattttcgcggttctgaagcagttaggattcagttctgacctctacgctatgcagagcgaaatgtggttctacagcaacacgatggcggacaacattgcttatcgtgagcagattggtgcggagccacgtaatcgtggcaagccggtagatgatatgttgctggtagacgaaatgcagcaatcgctagggcgcaacccggatggtaagcatctgatcattctgcataccaaaggttcgcattttaactacacccagcgttatccgcgtagcttcgcgcagtggaagccggaatgtattggtgttgatagcggctgtaccaaagcgcagatgatcaactcctatgacaactcggtgacctatgtggatcactttatctccagcgtgattgatcaggttcgcgataagaaagcgattgtgttctacgcagctgaccacggtgagtcaattaatgaacgcgagcacctgcacggcacgccgcgtgaactggcaccgccggagcagttccgcgtaccgatgatggtctggatgtcagataaatatctggaaaatccggccaatgcgcaggcgtttgcgcagctgaaaaaagaagccgacatgaaagtgccacgccgtcacgtagagctgtacgataccatcatgggttgtcttggctatacttcaccggatggtggaattaacgaaaacaacaactggtgtcacatcccgcaggcaaaagaggcagcggctaactaa

SEQ ID NO: 6630 - DNA, 624 bp, Escherichia coli
atggctatcatcaatacgctatatctgatggaaaaaaatatgcctaaacttattttagcctccacctcgccatggcgtcgcgctcttctggaaaaactgcaaatctcttttgaatgtgcagcaccagaggtcgacgaaaccccacgcagcgacgaatcaccgcgacagttggtgcttcgactggcacaagaaaaagcgcaatctctggcgtcacgttatccggatcatttaattattggttcagaccaggtatgtgttcttgatggcgaaatcaccggtaaaccgttaacggaagaaaatgcccgtctgcaattacgcaaagccagcggcaatatcgtcaccttctatactggactggcgttgtttaattcggcgaatgggcatctgcaaacagaagtggagccttttgacgtccatttccgtcacctgagcgaggcggagattgataattacgtgcgtaaagagcatcccctgcactgcgcgggtagctttaagagtgaaggatttggcattacgctgtttgagcgtttagaggggcgtgatcctaacacgctggttggtttaccgctaatcgcgctgtgtcagatgttacgtcgggaagggaaaaacccgctgatgggatag

SEQ ID NO: 6631 - DNA, 597 bp, Escherichia coli
atgatcgaatttgtttatccgcacacgcagctggttgcgggtgtggatgaagtcggacgcgggccgttagttggcgcggtcgtcaccgctgcggtgatccttgacccggcgcgcccgattgccgggctgaatgattccaaaaagctgagcgaaaaacgccgtctggcgctctatgaagagatcaaagagaaagcgttgagctggagtctgggccgcgcggaaccccacgaaatcgacgagctgaacattcttcatgcgaccatgctggcgatgcagcgtgccgtcgctgggctgcatattgcgccggaatatgtgttgattgatggtaaccgctgcccgaaattaccgatgcctgcgatggctgtggtgaaaggcgatagccgcgtaccggaaatcagtgccgcgtctatcctggcgaaagtgacgcgtgacgccgaaatggcggcgctggatattgttttcccgcaatatggttttgcccaacacaaagggtacccaaccgcttttcatctggaaaaactggctgaacacggcgcgaccgaacaccatcggcgcagctttgggcctgtcaaacgcgcactgggacttgcgtcctga

SEQ ID NO: 6632 - DNA, 777 bp, Escherichia coli
atgttacgtttctctgctaatttatcgatgttatttggagaatatgattttctcgcccgttttgagaaagctgcgcagtgtggttttcgcggcgttgaatttatgtttccttatgactacgacattgaagaattaaaacatgtgctggcgagtaataaactcgaacatacgctgcacaatttaccggcgggtgactgggcggcgggggagcgcggtattgcctgtattcctggccgtgaagaagagtttcgggatggcgtagcagcagcgattcgttatgcccgtgcgctgggtaataaaaaaattaactgtctggtcggtaaaacgccggctggtttcagcagtgaacagattcacgcaacgcttgtagaaaacctgcgttatgccgcgaatatgctgatgaaagaagatattttattactgattgaacctattaaccattttgatattcctggtttccatctcaccggaactcggcaggcgctgaaattgattgatgatgttggttgctgcaatttgaaaattcagtatgacatttatcatatgcagcggatggaaggtgaattaaccaacaccatgactcagtgggctgataaaattggtcacctgcaaattgccgataatccgcatcgcggcgaaccgggaaccggagaaattaattatgattatctctttaaggtaatcgaaaattctgactacaacggttgggttgggtgtgaatataaaccccaaaccaccacggaagccggtttacgctggatggatccgtaccgttaa

SEQ ID NO: 6633 - DNA, 1539 bp, Escherichia coli
atggcaatcactaaatcaactccggcaccattaaccggtgggacgttatggtgcgtcactattgcattgtcattagcgacatttatgcaaatgttggattccactatttctaacgtcgcaataccgacaatatctggctttctgggagcatcaacagacgaaggcacctgggttatcacctcgtttggtgtagcaaatgccattgcgatccctgttactggcaggttggcacaaagaataggcgaattaagattatttttactttcagtcacttttttttcgctgtcttcattaatgtgtagcctatcgaccaatcttgatgtgctgatattttttagagtcgttcaggggttaatggcggggccgttaattccactgtcacagagtttattattaaggaattatccgccagaaaaaagaacatttgctctggcattatggtcaatgaccgtgattatcgctccgatatgtgggccgatattgggcggttatatttgtgataactttagctggggttggatatttttaatcaatgtccctatggggattatcgtcctgacattatgcttaaccttacttaaaggaagagaaactgagacttcaccggtcaaaatgaatctaccaggactgaccctgttagtgctcggtgttggtggcttgcaaattatgcttgataaagggcgcgatctggattggttcaactcgagtacaataataatattaacagtagtatcagttatttctctgatctctttagtcatttgggagtcgacctcagagaacccgattcttgatctcagtttgtttaagtcccgtaacttcaccattggtattgtgagtatcacatgcgcgtatttattttactctggagcgatcgtccttatgccgcagttactccaggaaacgatggggtataatgcgatatgggccggacttgcttatgcgcccatcggcatcatgccactattaatttcacctttgataggacgttatggcaacaaaatagacatgcggttgttagtgacatttagttttttgatgtatgcggtttgctattactggcgttctgtgacatttatgccaacgattgattttacaggcatcattttgccgcagttttttcagggattcgccgttgcctgtttctttttacccttaacaacgatttcgttttcaggcttgccagataataaatttgccaatgcctcgagtatgagtaatttttttcgtaccttgtcaggatcagttggtacgtcgttgacaatgacgctgtggggacgacgcgaatcgttacaccatagtcagttgacagcaaccatcgatcaatttaaccccgtgtttaattcatcgtcacaaattatggataaatattatggttcgctttcaggagttcttaatgaaattaataatgaaataacccagcagtcactttctatttctgcaaatgagattttccgtatggcggctattgcttttatcttacttacggttttggtttggtttgcgaaaccgccgtttacagcgaaaggcgttgggtga

SEQ ID NO: 6634 - DNA, 1164 bp, Escherichia coli
gtggaacagattaattcaaataaaaaacattctaacagaagaaaatacttttctttattggcggtagttttatttattgcgttttcaggtgcctatgcctattggtcaatggaattagaagacatgattagtacagatgacgcctatgtcacggggaatgcagatccaatttctgcacaagtctcaggtagtgtcactgtcgttaatcataaagatacgaactacgttcgacaaggtgacattttagtttcactggataaaactgatgccactatcgcactcaataaagctaaaaataatctggcaaatattgttcggcaaacgaataaactatacttacaggataaacaatacagtgccgaagtcgcttcagcacgtattcagtatcaacaatctttagaagattataaccgtcgagtgccgttagcgaagcagggggttatttcaaaagaaacgctggagcataccaaagatacgttaataagtagcaaagcggcattgaatgccgctatccaggcttataaagcgaataaagctttagtaatgaacacaccattaaaccgtcagccacaagtcgttgaagcggcggatgcaactaaagaagcctggttggcgcttaaacgtacggatattaagagtccggttaccggctatattgcccagagaagtgttcaggtcggcgaaacagtgagccccggacaatcgttaatggctgtcgtaccggcacgtcaaatgtgggttaatgccaactttaaagaaacacaactcacggatgtacggattggtcaatcggtcaatattatcagcgatctttatggtgaaaatgttgtgtttcatggtcgggtgacagggatcaatatgggaaccggcaatgcgttctccttattacctgcacaaaatgcgacagggaactggatcaaaatcgttcagcgtgtaccggttgaagtttctcttgatccaaaagaactcatggaacaccccttgcgtattggtttatcgatgacagcaactattgatacgaagaacgaagacattgccgagatgcctgagctggcttcaaccgtgacctccatgccggcttataccagtaaggctttagttatcgataccagtccgatagaaaaagaaattagcaacattatttcgcataatggacaactttaa

SEQ ID NO: 6635 - DNA, 801 bp, Escherichia coli
gtgcttaatctgaccccctcggcaatcagtcagtctattcagaaactgcgcgttatattccctgacccattgtttattcgcaaaggccagggtgtcactcctaccgcatttgcgatgcatctacatgagtatatcagtcagggccttgagtccattcttggcgcgctggatatcgaaggaagctatgataagcaacgaacgataactattgcgaccactccctcggtcggagcactggtccttcctgtcatctatcgggcgattaaaactcactatccgcagcttttactgcgcaacccgcccatcagcgacgcggaaaaccaactcagtcagtttcaaaccgatctcatcatcgataacatgttttgcaccaatcgtacggtgcaacatcatgttctgttcaccgacaatatggtgttaatttgccgcgagggaaatccactactctctttagaagatgacagagagactatcgacaacgctgcgcatgtacttctgttaccggaagagcaaaatttcagcggtctgcggcagagagttcaagaaatgtttccggaccggcaaatcaatttcaccagctacaacattttgacaatcgctgcactggttgccaacagtgacatgttagcgattattcccagccgtttttataacctgtttagccgctgctggccgctggaaaaactgccttttccgtccttaaatgaggagcaaatagatttctctatccactacaacaaattcagcctgcgtgatcccatcctgcacggagtaatagatgttatccgtaatgcattttga

SEQ ID NO: 6636 - DNA, 750 bp, Escherichia coli
atggattatgtttgctccgtagttttcatctgtcaatcatttgatttaattataaacaggagagttatctcgttcaaaaaaaattcattgtttattgtaagcgacaaaattagaagggagttaccagtatgcccctctaaactaagaattgttgatatagataagaaaacatgtttatccttttttatcgacgtgaataatgagctgcctggcaaatttactcttgataagaatggctatattgctgaagaggaacctccattatcgcttgttttttctctgtttgaagggattaaaatagcagactcacactccctttggttaaaagaaagactatgtatatccttacttgccatgttcaaaaaacgcgaaagtgtaaattcatttatactaacaaatataaatacatttacctgtaaaattactggaataatcagttttaatattgagcggcaatggcatttaaaagatattgcggaattgatttatacgagtgaaagtttaataaaaaaaagattaagggatgaaggaacgtcatttactgaaatattgagagatactaggatgaggtatgcaaaaaaactcataacttcaaactcttattctatcaatgtcgtagcccagaaatgtggctataacagtacttcatatttcatatgtgcatttaaagattattatggtgtcacgccatctcattattttgagaaaataatcggcgtcacagatggaataaacaaaacaattgactga

SEQ ID NO: 6637 - DNA, 459 bp, Escherichia coli
gtggattcaaacatggcccaactaaaatttaactcaatcctggtggtttgtaccggcaacatttgccgttcgcccattggcgagcgcttgctgcgtaaacgtctgccgggcgtaaaagtcaaatcggcaggtgttcatggtctggtaaaacaccctgcagatgcgacagcggcagatgttgccgctaatcatggcgtatctcttgaaggacatgccggacgtaagctcactgctgagatggcacgaaattacgatctgattctggcaatggagtcggaacatattgctcaggttaccgcaattgctcccgaggtccgcgggaagacaatgctgtttgggcaatggctggaacagaaagagatcccggatccctatcgtaaaagtcaggacgcatttgaacatgtctacggtatgttggagcgcgccagtcaggaatgggcgaagcgcctcagccggtaa

SEQ ID NO: 6638 - DNA, 1584 bp, Escherichia coli
atgaatttaaccctcaaagaatcgcttgttacccgtagccgggtatttagcccgtggactgcgttctactttttacagtcgctattaattaacctcggcttaggttaccccttcagtttgctctacaccgctgcgtttacggctattttgcttttgctatggcgaacattgcctcgcgtacaaaaagttctggtcggtgtcagttcgctggtggcggcttgttatttcccttttgctcaggcctacggcgcgcctaatttcaatacattgctggcattgcactccaccaatatggaagagtcgaccgaaatcctgacgatttttccgtggtacagctacctggtcggcttatttatttttgcgctcggcgtaatagcaatcaggcgaaaaaaagagaatgaaaaagcgcgctggaataccttcgacagcctgtgtctggtattcagtgtggcgacattttttgttgctcccgtgcaaaacctggcctggggtggcgtatttaaactgaaagatactggctatccggtatttcgttttgctaaggatgtcatcgtcaataataacgaggtgattgaagagcaagaacggatggcaaaactttccggaatgaaagatacctggacggtcactgccgttaagccgaagtatcagacctatgtggtggtgatcggtgaaagcgcgcgtcgcgatgccctcggtgcctttggcggtcactgggacaataccccgtttgccagcagcgttaacggtttgatatttgctgactacattgccgccagtggctccacgcagaaatcgcttggcttaacgctcaatcgcgttgtcgatggcaaaccacagtttcaggataactttgtcaccctggcaaatcgcgcgggcttccagacctggtggttttccaaccagggtcaaatcggcgaatacgataccgctatcgccagcatcgccaaacgagcagatgaagtgtacttcctgaaagaaggtaattttgaagcagataaaaacaccaaagacgaagcgttactggatatgaccgctcaagtgctggcgcaagagcactcgcaaccgcagctgattgttctacatctgatgggctcacatccgcaggcctgcgacaggacacaaggaaaatacgaaacctttgtgcaatcgaaagaaacgtcgtgctatctctataccatgacgcaaacggacgatttactgcgcaagctgtacgatcagttacgcaacagcggcagcagcttctcgctggtttacttttctgaccacggtctggcctttaaagagcgcggtaaagacgtgcaataccttgcccatgatgataaatatcagcaaaatttccaggtgccttttatggtcatttccagcgacgataaagcgcatcgtgtgattaaagcccgccgctcagccaatgacttcttaggctttttctcccagtggacggggattaaagcgaaggaaattaacatcaaatacccgtttatatctgagaagaaagccgggccgatatacatcaccaacttccagttacagaaggtggattacaaccatctcggaaccgatattttcgacccgaaaccttaa

SEQ ID NO: 6639 - DNA, 816 bp, Escherichia coli
atgaggcgggagatgttttctacaaacttaatacagagtaattatggtgatttaaatattaaaagcctggctttcgactcttttaaagaaaggctgcagtctactatgacagcactcactttctttatatcaacgggtcaatgtgactgcgatgaaatagcagaatcaaactttaattatatgattgcctatatgtctaacattaactatgatgcctcaaagccaggagcgccagcacttagttttgatacatatctgcaggacaatgttaaatatagagtaataattaataatctttatggtagtgaaattcggataagaggtataaataaagattttattggaatggatgtcacttctgtatttcgcccagaaaaaatgaccaatttgatcagtataaaaaacaggttggttattcactatttaaggactatatactatgaacaaaattatatacatcctgtcgggagcatttttgctgcgattcaaaaaaatgagagtctcctaaagtttccttcgataatatcaatgcttaatatcaatcttctttttaatccactaaatcttccgggaatgggaagtggtgtgcttgaagatattatgagtattccagatagttcacttagaaaacgtctcgggtatgaggttttaagcttctcgctacaggcacattcattgagccaggaatgtattgataagttggacatttttttcgctgacgatctgtttaaatatgagtcagtatgcatcgccgcgatggaacatttaaaaagtaaggcaacggcccctatacaaaacggaccgttgccagcataa

SEQ ID NO: 6640 - DNA, 732 bp, Escherichia coli
atgaaaaagttagttcttgccgctttacttgcttcctttactttcggtgcttctgccgcagagaaaatcaattttggcgtttcagccacctatccaccctttgaatctataggtgctaataatgagattgtcggctttgatatcgatctggcaaaagccttgtgcaaacaaatgcaggcagaatgtacttttactaatcacgcgttcgacagcctgatcccgtccctgaaattcagaaaatatgacgccgtaatctccggtatggatatcaccccggagcgtagcaaacaggtatcgtttaccacgccctactatgaaaactcagccgtcgtgattgccaaaaaagatacctacaaaacgtttgccgatctgaaaggcaaacgtattgggatggaaaacggtactacgcaccagaaatatattcaggatcagcacccggaagtgaaaactgtctcttatgacagttatcagaatgcctttatcgatctgaaaaatggtcgtattgatggggtatttggtgacacagcggtggtaaacgaatggctgaaaaccaatccacaacttggtgttgctactgagaaagtgaccgatccgcaatattttggcaccggcctgggcatcgctgtacgtccggataacaaagccctgctggaaaaactgaataacgcgctggcagcaattaaagctgacggtacttatcaaaaaatcagtgaccagtggttcccacagtaa

SEQ ID NO: 6641 - DNA, 1509 bp, Escherichia coli
atgactgaaaaaaaatatatcgttgcgctcgaccagggcaccaccagctcccgcgcggtcgtaatggatcacgatgccaatatcattagcgtgtcgcagcgcgaatttgagcaaatctacccaaaaccaggttgggtagaacacgacccaatggaaatctgggccacccaaagctccacgctggtagaagtgctggcgaaagccgatatcagttccgatcaaattgcagctatcggtattacgaaccagcgtgaaaccactattgtctgggaaaaagaaaccggcaagcctatctataacgccattgtctggcagtgccgtcgtaccgcagaaatctgcgagcatttaaaacgtgacggtttagaagattatatccgcagcaataccggtctggtgattgacccgtacttttctggcaccaaagtgaagtggatcctcgaccatgtggaaggctctcgcgagcgtgcacgtcgtggtgaattgctgtttggtacggttgatacgtggcttatctggaaaatgactcagggccgtgtccatgtgaccgattacaccaacgcctctcgtaccatgttgttcaacatccataccctggactgggacgacaaaatgctggaagtgctggatattccgcgcgagatgctgccagaagtgcgtcgttcttccgaagtatacggtcagactaacattggcggcaaaggcggcacgcgtattccaatctccgggatcgccggtgaccagcaggccgcgctgtttggtcagttgtgcgtgaaagaagggatggcgaagaacacctatggcactggctgctttatgctgatgaacactggcgagaaagcggtgaaatcagaaaacggcctgctgaccaccatcgcctgcggcccgactggcgaagtgaactatgcgttggaaggtgcggtgtttatggcaggcgcatccattcagtggctgcgcgatgaaatgaagttgattaacgacgcctacgattccgaatatttcgccaccaaagtgcaaaacaccaatggtgtgtatgtggttccggcatttaccgggctgggtgcgccgtactgggacccgtatgcgcgcggggcgattttcggtctgactcgtggggtgaacgctaaccacattatacgcgcgacgctggagtctattgcttatcagacgcgtgacgtgctggaagcgatgcaggccgactctggtatccgtctgcacgccctgcgcgtggatggtggcgcagtagcaaacaatttcctgatgcagttccagtccgatattctcggcacccgcgttgagcgcccggaagtgcgcgaagtcaccgcattgggtgcggcctatctcgcaggcctggcggttggcttctggcagaacctcgacgagctgcaagagaaagcggtgattgagcgcgagttccgtccaggcatcgaaaccactgagcgtaattaccgttacgcaggctggaaaaaagcggttaaacgcgcgatggcgtgggaagaacacgacgaataa

SEQ ID NO: 6642 - DNA, 846 bp, Escherichia coli
atgagtcaaacatcaaccttgaaaggccagtgcattgctgaattcctcggtaccgggttgttgattttcttcggtgtgggttgcgttgcagcactaaaagtcgctggtgcgtcttttggtcagtgggaaatcagtgtcatttggggactgggggtggcaatggccatctacctgaccgcaggggtttccggcgcgcatcttaatcccgctgttaccattgcattgtggctgtttgcctgtttcgacaagcgcaaagttattccttttatcgtttcacaagttgccggcgctttctgtgctgcggctttagtttacgggctttactacaatttatttttcgacttcgagcagactcatcacattgttcgcggcagcgttgaaagtgttgatctggctggcactttctctacttaccctaatcctcatatcaattttgtgcaggctttcgcagttgagatggtgattaccgctattctgatggggctgatcctggcgttaacggacgatggcaacggtgtaccacgcggccctttggctcccttgctgattggtctactgattgcggtcattggcgcatctatgggcccattgacaggttttgccatgaacccagcgcgtgacttcggtccgaaagtctttgcctggctggcgggctggggcaatgtcgcctttaccggcggcagagacattccttacttcctggtgccgcttttcggccctatcgttggcgcgattgtaggtgcatttgcctaccgcaaactgattggtcgccatttgccttgcgatatctgtgttgtggaagaaaaggaaaccacaactccttcagaacaaaaagcttcgctgtaa

SEQ ID NO: 6643 - DNA, 2166 bp, Escherichia coli
atgccaggttttactatggatactaaaaagatattcaagcacataccctgggtgattctcggaatcatcggtgcattctgcctcgcggtagttgcattacgtcggggggagcacatcagcgccctgtggatcgtggtcgcctctgtatcggtgtatctggtggcgtatcgctactacagtctgtacatcgcccagaaggtgatgaaactcgaccccacgcgcgcgacgcctgcggttattaacaacgacggtctgaactacgttccgaccaaccgttacgtgttgtttggtcaccacttcgccgctatcgccggtgctggtccgctggtgggtccggttctcgccgcgcagatgggctacctgcctggcacgctgtggctgctggcgggggtcgtgctggccggtgcggttcaggactttatggtgctgtttatctcctctcgccgtaatggcgcatctcttggtgagatgatcaaagaagagatgggaccagtaccggggactatcgcgctgtttggctgtttcttaatcatgatcatcatcctcgccgtcctggcgctgattgtggttaaagccctggccgaaagtccgtggggtgtcttcaccgtttgctcaaccgtaccgattgcgctgtttatgggtatctacatgcgctttattcgtccggggcgtgtgggtgaagtctctgtcattggtatcgtgctgctggttgcctctatctacttcggtggcgtgattgctcacgatccgtactggggtccggcactgacctttaaagacaccaccattaccttcgcgctgattggctatgcgtttgtttccgcactgctgccagtgtggctgatcctcgcaccgcgcgactatctggcaaccttcctgaaaatcggcgttatcgtcggcctggcgctgggtatcgtggtgctgaacccggaactgaaaatgcctgccatgacccagtacattgacggtactggcccgctgtggaaaggcgctctgttcccgttcctgttcatcaccatcgcctgtggtgcggtatctggcttccacgcgctgatctcttccggtacgacgccaaaactgctggctaatgaaaccgacgcgcgtttcatcggctacggcgcaatgctgatggagtccttcgtggcgattatggcgctggttgctgcgtccatcatcgaaccgggtctttacttcgcgatgaacaccccgcctgctggccttggcatcaccatgcctaacctgcatgaaatgggtggcgagaacgcgccgatcatcatggcgcagctgaaagacgttaccgcacacgcggcagcgaccgtcagctcctggggcttcgtgatttcgccagagcagatcctgcaaaccgcgaaagacattggtgagccttctgtcctgaaccgtgcaggtggcgcgccgacgctggcggtaggtatcgcgcacgtgttccacaaagtgctgccgatggctgacatgggcttctggtatcacttcggtattctgttcgaagccctgttcatcctgaccgcgctggatgcgggtacccgttctggccgctttatgctgcaagacctgctgggtaacttcatcccgttcctgaaaaaaaccgattctctggttgccggtatcatcggtactgcgggctgtgtgggtctgtggggctacctgctgtatcagggcgtggttgatccgctgggcggcgttaagagcctgtggccgctgttcggtatctccaaccagatgctggcagccgtagcgctggtactgggcaccgttgtgctgattaagatgaagcgcacccaatacatctgggtaactgttgttccggctgtatggctgcttatctgcaccacctgggcgctgggcctgaaactgttcagcaccaacccgcagatggaaggcttcttctacatggcaagccagtacaaagagaagattgctaacggtactgacctgacggcgcagcagattgccaatatgaaccacatcgttgtgaacaactacaccaacgcaggtctgagtattctgttcctgattgtggtgtacagcatcatcttctacggtttcaaaacctggcttgcggtgcgtaacagcgacaaacgtactgacaaagaaacaccgtacgttccaatcccggaaggcggcgtgaagatctcttcgcaccactaa

SEQ ID NO: 6644 - DNA, 951 bp, Escherichia coli
atgaaagagcttgtggtcgttgccattggtggcaacagcattatcaaagataacgccagccagtcgattgagcatcaggcggaggcggtgaaagccgtcgccgatacggtgctggaaatgctggcttccgattacgacattgtgctgacccacggcaacgggccgcaggtcgggctggatttacgccgtgcggagattgcccacaagcgcgaagggctgcccttaacgccgctggcgaactgtgtggcagatacgcagggcggcatcggctatctgatccaacaggcgctgaataaccggctggcgcgtcacggcgagaagaaagccgtcaccgtggtgactcaggtggaagtggataaaaacgatccaggttttgcccatcccaccaagcccatcggcgcattctttagtgacagccagcgtgacgaattacaaaaggcaaaccctgactggtgttttgttgaagatgccgggcggggctatcgccgcgtggtcgcctcgccggaaccgaaacgtattgtcgaagcacctgccattaaagcgctgatccaacaaggttttgtcgtaattggcgcgggcggcggtggaattccggtagtgcgtactgacgcgggagattaccaaagcgtggacgcggttatcgacaaagatctctctaccgcgctgctggcccgtgaaattcacgccgacattcttgtgatcaccactggcgtcgaaaaagtgtgtattcactttggcaaaccgcagcagcaggcgctcgatcgggtggatattgccaccatgacccgctatatgcaggaagggcatttcccgcccggcagcatgttgccaaaaatcatcgccagcctgacatttttagaacaaggcggcaaagaagtgattatcaccacgccggaatgcctgcctgcggcgctgcgcggcgaaacgggcactcatattattaaaacgtaa

SEQ ID NO: 6645 - DNA, 744 bp, Escherichia coli
atgagtaactggccttatccccgcatcgtcgctcatcgtggcggcggtaagctggccccggaaaacaccctggcgtcaatcgacgtcggggcaaaatacggtcataagatgatcgaatttgacgcgaagttatcgaaagatggcgagatcttcctgctccatgacgacaatctcgaacgtaccagcaacggctggggcgtcgcgggtgaactgaactggcaggatttactgcgcgtggatgcgggcagttggtacagcaaaatgtttaaaggtgagccgctaccgttgctttcgcaggtggcggaacgttgccgcgaacacgggatgatggcgaatatcgaaatcaaacccaccaccggcaccgggccattaacgggcaaaatggtggcgctggcggcacgcgagctgtgggccggtatgacgccgccgctgctgtcatcgtttgagattgatgctttagaagctgcacaacaggcggcaccggaactgccgcgcggtttgttgctggatgagtggcgcgacgactggcgcgaactgaccgcgcggctgggctgcgtctctattcatctcaatcataagttactcaataaagcgcgagtgatgcagttgaaagacgccggactgcggattctggtttataccgtcaataaaccccagcgcgcagcagagttgctgcgctggggtgtggattgcatctgtaccgatgcgattgacgtgattggtccgaactttacggcccaatag

SEQ ID NO: 6646 - DNA, 408 bp, Escherichia coli
gtggtcctgtggcaatctgatttgcgcgtctcctggcgcgcacagtggctttccttgctgattcatgggctggttgccgctgttattttactcatgccctggccactcagttacaccccgttatggatggtgttactttcgctggtggtgtttgattgcgttcgcagccagcggcgtattaatgctcgccagggggaaattcgcttgttgatggacgggcgtttgcgttggcaagggcaggagtggagcatcgtcaaagcaccgtggatgattaagagcggcatgatgctgcgtttacgttctgatggcggtaaacggcaacatttatggctggcagccgacagcatggacgaagctgaatggcgggatttacggcggattttgttgcaacaagagacgcaaagataa

SEQ ID NO: 6647 - DNA, 267 bp, Escherichia coli
atggacattaacaacaaagcccgcattcattgggcatgccgccgtggtatgcgcgaactcgatatttcaatcatgccgtttttcgaacatgagtacgacagcttaagcgatgacgaaaaacgcatctttattcgtctgctggaatgtgacgatccggacctgtttaactggctgatgaatcacggtaaaccggccgatgcagaactggaaatgatggtccgactcatccagacacggaaccgggaacgtggtcctgtggcaatctga

SEQ ID NO: 6648 - DNA, 501 bp, Escherichia coli
atgttacccaggatcagacacaataattttattggtgcggtggagttatttgtaaagtcttcgtatacaaaaacacattcaaacaatttttttaacaacatccatcatgcatttaagaaaaaagattggatttcgaattatgatagcctgttaactttgagggagttctttcgttgcgcaactcagattgataaaagtggttatcaggtgctttcatcaaaaaatgaaactgttcacgccatggataagtttcttatcagtttcagccttaaagataacggtgccgaatatacaatgacattgcgaggtagtggatttgaatacgaagaaatacccataacaataaatgaatataactcattcatggatttcaaaaaccgtgaatttccgttagaacaaacagacgattgtatgcctgggatattctacagaaaaaacagtctgacataccgaaaaggattaaaggttatattcaccaggcgattggtgacgtgtctttag

SEQ ID NO: 6649 - DNA, 1029 bp, Escherichia coli
atgcgcgtactgctatttttacttctttcccttttcatgttgccggcattttcggctgataacctgttgcgctggcatgatgcgcagcatttcacggtgcaagcctctacgccgcttaaagccaaacgcgcatggaaactgtgcgcgctttatcccagcctgaaagattcatattggttatcgttgaactatggtatgcaggaggctgctcgccgctacggtgtggatttaaaagtgctggaggcaggcggctacagccagttggctacccagcaagcacaaatcgaccagtgtaaacagtggggcgcagaggccattttgctcggtagtagcacgacctcatttcccgacctgcaaaagcaggtagcaagtctgccggtgatcgaactggtaaatgctattgatgctccccaggtgaaaagccgcgttggtgtgccctggtttcagatgggctatcaaccggggcgatatctggtgcaatgggcgcacggtaaaccactgaatgtgctgttgatgcccggacccgataacgccgggggcagtaaggagatggtcgaaggttttcgcgcagccattgccggaagcccggtgcgtattgttgatattgcgcttggtgataacgatattgaaatccagcgtaacctgttgcaggagatgctggaacgccatccagaaatcgacgtcgttgccggaacggccattgcggcagaggcggcaatgggggaagggcgtaacctgaaaacgccgcttaccgtggtgtcgttttatctttcacatcaggtgtatcgcgggctgaagcggggaagagtgattatggctgccagcgatcaaatggtctggcagggggaactggcggttgagcaggccatcaggcaattacaggggcaatcggtttctgataatgtcagcccaccgattttagttctgacgccgaaaaatgccgaccgtgaacatattcgccgctcgctgtcaccagggggatttcgtccggtctatttttatcagcacacatcagcggctaagaaataa

SEQ ID NO: 6650 - DNA, 801 bp, Escherichia coli
atgagactgatccccctgactaccgctgaacaggtcggcaaatgggctgctcgccatatcgtcaatcgtatcaatgcgttcaaaccgactgccgatcgtccgtttgtactgggcctgccgactggcggcacgccgatgaccacctataaagcgttagtcgaaatgcataaagcaggccaggtcagctttaagcacgttgtcaccttcaacatggacgaatatgtcggtctgccgaaagagcatccggaaagctactacagctttatgcaccgtaatttcttcgatcacgttgatattccagcagaaaacatcaaccttctcaacggcaacgccccggatatcgacgccgagtgccgccagtatgaagaaaaaatccgttcttacggaaaaattcatctgtttatgggcggtgtaggtaacgacggtcatattgcatttaacgaaccggcgtcttctctggcttctcgtactcgtatcaaaaccctgactcatgacactcgcgtcgcaaactctcgtttctttgataacgatgttaatcaggtgccaaaatatgccctgactgtcggtgttggtacactgctggatgccgaagaagtgatgattctggtgctgggtagccagaaagcactggcgctgcaggccgccgttgaaggttgcgtgaaccatatgtggaccatcagctgtctgcaactgcatccgaaagcgatcatggtgtgcgatgaaccttccaccatggagctgaaagttaagactttaagatatttcaatgaattagaagcagaaaatatcaaaggtctgtaa

SEQ ID NO: 6651 - DNA, 2874 bp, Escherichia coli
atgacacagacgttaagccagcttgaaaacagcggcgcttttattgaacgccatatcggaccggacgccgcgcaacagcaagaaatgctgaatgccgttggtgcacaatcgttaaacgcgctgaccggccagattgtgccgaaagatattcaacttgcgacaccaccgcaggttggcgcaccggcgaccgaatacgccgcactggcagaactcaaggctattgccagtcgcaataaacgcttcacgtcttacatcggcatgggttacaccgccgtgcagctaccgccggttatcctgcgtaacatgctggaaaatccgggctggtataccgcgtacactccgtatcaacctgaagtctcccagggccgccttgaagcactgctcaacttccagcaggtaacgctggatttgactggactggatatggcctctgcttctcttctggacgaggccaccgctgccgccgaagcaatggcgatggcgaaacgcgtcagcaaactgaaaaatgccaaccgcttcttcgtggcttccgatgtgcatccgcaaacgctggatgtggtccgtactcgtgccgaaacctttggttttgaagtgattgtcgatgacgcgcaaaaagtgctcgaccatcaggacgtcttcggcgtgctgttacagcaggtaggcactaccggtgaaattcacgactacactgcgcttattagcgaactgaaatcacgcaaaattgtggtcagcgttgccgccgatattatggcgctggtgctgttaactgcgccgggtaaacagggcgcggatattgtttttggttcggcgcaacgcttcggcgtgccgatgggctacggtggcccacacgcggcattctttgcggcgaaagatgaatacaaacgctcaatgccgggccgtattatcggtgtatcgaaagatgcagctggcaataccgcgctgcgcatggcgatgcagactcgcgagcaacatatccgccgtgagaaagcgaactccaacatttgtacttcccaggtactgctggcaaacatcgccagcctgtatgccgtttatcacggcccggttggcctgaaacgtatcgctaaccgcattcaccgtctgaccgatatcctggcggcgggcctgcaacaaaaaggtctgaaactgcgccatgcgcactatttcgacaccttgtgtgtggaagtggccgacaaagcgggcgtactgacgcgtgccgaagcggctgaaatcaacctgcgtagcgatattctgaacgcggttgggatcacccttgatgaaacaaccacgcgtgaaaacgtaatgcagcttttcaacgtgctgctgggcgataaccacggcctggacatcgacacgctggacaaagacgtggctcacgacagccgctctatccagcctgcgatgctgcgcgacgacgaaatcctcacccatccggtgtttaatcgctaccacagcgaaaccgaaatgatgcgctatatgcactcgctggagcgtaaagatctggcgctgaatcaggcgatgatcccgctgggttcctgcaccatgaaactgaacgccgccgccgagatgatcccaatcacctggccggaatttgccgaactgcacccgttctgcccgccggagcaggccgaaggttatcagcagatgattgcgcagctggctgactggctggtgaaactgaccggttacgacgccgtttgtatgcagccgaactctggcgcacagggcgaatacgcgggcctgctggcgattcgtcattatcatgaaagccgcaacgaagggcatcgcgatatctgcctgatcccggcttctgcgcacggaactaaccccgcttctgcacatatggcaggaatgcaggtggtggttgtggcgtgtgataaaaacggcaacatcgatctgactgatctgcgcgcgaaagcggaacaggcgggcgataacctctcctgtatcatggtgacttatccttctacccacggcgtgtatgaagaaacgatccgtgaagtgtgtgaagtcgtgcatcagttcggcggtcaggtttaccttgatggcgcgaacatgaacgcccaggttggcatcacctcgccgggctttattggtgcggacgtttcacaccttaacctacataaaactttctgcattccgcacggcggtggtggtccgggtatgggaccgatcggcgtgaaagcgcatttggcaccgtttgtaccgggtcatagcgtggtgcaaatcgaaggcatgttaacccgtcagggcgcggtttctgcggcaccgttcggtagcgcctctatcctgccaatcagctggatgtacatccgcatgatgggcgcagaagggctgaaaaaagcaagccaggtggcaatcctcaacgccaactatattgccagccgcctgcaggatgccttcccggtgctgtataccggtcgcgacggtcgcgtggcgcacgaatgtattctcgatattcgcccgctgaaagaagaaaccggcatcagcgagctggatattgccaagcgcctgatcgactacggtttccacgcgccgacgatgtcgttcccggtggcgggtacgctgatggttgaaccgactgaatctgaaagcaaagtggaactggatcgctttatcgacgcgatgctggctatccgcgcagaaattgaccaggtgaaagccggtgtctggccgctggaagataacccgctggtgaacgcgccgcacattcagagcgaactggtcgccgagtgggcgcatccgtacagccgtgaagttgcggtattcccggcaggtgtggcagacaaatactggccgacagtgaaacgtctggatgatgtttacggcgaccgtaacctgttctgctcctgcgtaccgattagcgaataccagtaa

SEQ ID NO: 6652 - DNA, 1674 bp, Escherichia coli
atgactgaatcttttgctcaactctttgaagagtccttaaaagaaatcgaaacccgcccgggttctatcgttcgtggcgttgttgttgctatcgacaaagacgtagtactggttgacgctggtctgaaatctgagtccgccatcccggctgagcagttcaaaaacgcccagggcgagctggaaatccaggtaggtgacgaagttgacgttgctctggacgcagtagaagacggcttcggtgaaactctgctgtcccgtgagaaagctaaacgtcacgaagcctggatcacgctggaaaaagcttacgaagatgctgaaactgttaccggtgttatcaacggcaaagttaagggcggcttcactgttgagctgaacggtattcgtgcgttcctgccaggttctctggtagacgttcgtccggtgcgtgacactctgcacctggaaggcaaagagcttgaatttaaagtaatcaagctggatcagaagcgcaacaacgttgttgtttctcgtcgtgccgttatcgaatccgaaaacagcgcagagcgcgatcagctgctggaaaacctgcaggaaggcatggaagttaaaggtatcgttaagaacctcactgactacggtgcattcgttgatctgggcggcgttgacggcctgctgcacatcactgacatggcctggaaacgcgttaagcatccgagcgaaatcgtcaacgtgggcgacgaaatcactgttaaagtgctgaagttcgaccgcgaacgtacccgtgtatccctgggcctgaaacagctgggcgaagatccgtgggtagctatcgctaaacgttatccggaaggtaccaaactgactggtcgcgtgaccaacctgaccgactacggctgcttcgttgaaatcgaagaaggcgttgaaggcctggtacacgtttccgaaatggactggaccaacaaaaacatccacccgtccaaagttgttaacgttggcgatgtagtggaagttatggttctggatatcgacgaagaacgtcgtcgtatctccctgggtctgaaacagtgcaaagctaacccgtggcagcagttcgcggaaacccacaacaagggcgaccgtgttgaaggtaaaatcaagtctatcactgacttcggtatcttcatcggcttggacggcggcatcgacggcctggttcacctgtctgacatctcctggaacgttgcaggcgaagaagcagttcgtgaatacaaaaaaggcgacgaaatcgctgcagttgttctgcaggttgacgcagaacgtgaacgtatctccctgggcgttaaacagctcgcagaagatccgttcaacaactgggttgctctgaacaagaaaggcgctatcgtaaccggtaaagtaactgcagttgacgctaaaggcgcaaccgtagaactggctgacggcgttgaaggttacctgcgtgcttctgaagcatcccgtgaccgcgttgaagacgctaccctggttctgagcgttggcgacgaagttgaagctaaattcaccggcgttgatcgtaaaaaccgcgcaatcagcctgtctgttcgtgcgaaagacgaagctgacgagaaagatgcaatcgcaactgttaacaaacaggaagatgcaaacttctccaacaacgcaatggctgaagctttcaaagcagctaaaggcgagtaa

SEQ ID NO: 6653 - DNA, 798 bp, Escherichia coli
gtgctgttacttgccggaaaacgaccctataatccgagtaattcattctttatttcagggtcgattatgtcagctacggaccgctactctcatcaactcctctacgctaccgtccgccagcgactgctggatgatatcgcgcagggggtttaccaggccgggcaacagatccctaccgaaaacgagctttgtacacaatataacgtcagccgcattaccattcgcaaagccatcagcgacttagtggcagacggcgtactgatccgctggcagggaaaaggcacctttgtacaaagccagaaagttgaaaacgccctgcttactgtcagtggttttaccgattttggcgtctcacaaggcaaggcgacgaaagagaaagtgatcgaacaggaacgggtcagcgccgcgccgttttgcgaaaagctgaacatccccggaaacagcgaagtgttccatctctgccgggtgatgtatctcgataaagagccgctgtttattgatagttcatggatcccgctgtcgcgttatcctgactttgatgagatttacgtcgaaggaagctccacctatcagttatttcaggagcgttttgacacgcgagtggtcagcgacaaaaagaccatcgatatctttgccgccacccgcccgcaggcaaaatggctgaaatgcgaactgggcgaaccgttgtttcgcatcagcaaaatcgcctttgatcagaatgacaaaccggtgcacgtctccgaactcttctgccgcgccaatcgcatcaccttaactattgataataaaagacattaa

SEQ ID NO: 6654 - DNA, 2433 bp, Escherichia coli
atgaccacactgaaactggacacgctcagcgaccgcattaaagcgcacaaaaatgcgctggtgcatattgtgaaaccgccagtctgtaccgagcgcgcgcagcactataccgagatgtatcaacaacatctcgataagccgatcccggtacgtcgcgcgctggcactggcgcatcacctggcgaatcgcaccatctggatcaaacacgatgagttgatcattggcaaccaggcaagcgaagttcgcgccgcgccgatcttcccggaatatactgtctcgtggatcgaaaaagagattgatgatctggcagatcgtcccggtgctggctttgcggtgagcgaagagaacaaacgcgttctgcatgaagtgtgcccgtggtggcgcggtcagaccgtacaggatcgctgctacggcatgtttaccgatgagcaaaaaggtctgctggcgaccggaatcattaaagcggaaggcaatatgacctccggcgatgcgcacctggcggtgaatttcccgctgctgctggaaaaagggcttgatggtctgcgcgaggaagtagcggaacgtcgctcgcgcatcaacctgacggtgctggaagatttacacggtgagcaattcctgaaagcgattgatatcgtgctggtggcagtcagtgaacacattgaacgtttcgctgccctggcgcgtgaaatggccgcgaccgaaacccgcgaaagccgtcgcgatgaactgctggcgatggcagaaaactgcgatcttatcgcccaccagccgccgcagactttctggcaggcgctgcaactgtgttacttcatccagttgattttgcagatcgaatctaacggtcactcagtatcgtttggtcgtatggaccagtatctctacccgtactatcgccgcgacgttgaactcaaccagacgctggatcgcgaacacgccatcgagatgctgcatagctgctggctgaaactgctggaagtgaacaagatccgctccggctcacactcaaaagcctctgcgggaagtccgctgtatcagaacgtcactattggcgggcaaaatctggttgatggtcaaccaatggacgcggtgaatccactctcttacgcgatcctcgaatcctgcggtcgcctgcgttccactcagcctaacctcagcgtgcgttaccatgcaggaatgagcaacgatttcctcgacgcctgcgtacaggtgatccgttgcggcttcgggatgccggcgttcaacaacgacgaaatcgtgatcccggaatttattaaactcggtattgaaccgcaggacgcttatgactacgcagcgattggttgtatagaaaccgccgtcggtggcaaatggggctatcgctgtaccggcatgagctttatcaacttcgcccgcgtgatgctggcggcgctggaaggcgggcatgatgccaccagcggcaaagtgttcctgccacaagaaaaagcgttgtcggcaggtaacttcaacaacttcgatgaagtgatggacgcgtgggatacgcaaatccgttactacacccgcaaatcaatcgaaatcgaatatgtcgtcgacaccatgctggaagagaacgtgcacgatattctctgctcggcgctggtggatgactgtattgagcgagcgaaaagtatcaagcaaggcggcgcgaaatatgactgggtttctggcctgcaggtcggcattgccaacctcggcaacagcctggcggcagtgaagaaactggtgtttgaacaaggtgcgattggtcagcaacagcttgctgccgcactggcagatgacttcgacggcctgactcacgagcagctgcgtcagcggctgattaacggtgcgccgaagtacggcaacgacgatgatactgtcgatacgctgctggctcgcgcttatcagacctatatcgacgaactgaaacagtaccataatccgcgctacggtcgtggtccggttggcggcaactattacgcgggtacgtcatcaatctccgctaacgtaccgtttggcgcgcagactatggcaacaccggacgggcgtaaagcccacaccccgctggcagaaggcgcaagcccggcctccggtactgaccatcttggccctactgcggtcattggctcagtgggtaaactgcctacggcagcgattctcggcggcgtgttgctcaaccagaaactgaatccggcaacgctggagaacgaatctgacaagcagaaactgatgatcctgctgcgtaccttctttgaagtgcataaaggctggcatattcagtacaacatcgtttcccgcgaaacgctgctggatgcgaaaaaacatcccgatcagtatcgcgatctggtagtgcgtgtcgcgggctattccgcgttcttcaccgcgctctctccagacgctcaggacgatatcatcgcccgtactgaacatatgctgtaa

SEQ ID NO: 6655 - DNA, 2697 bp, Escherichia coli
atgtttaaagaaatttttacccggctcattcgccatttaccttcccgtctggttcatcgtgatccattgcctggcgcgcagcagacagtgaatacggtggtcccgccgtccttaagtgcgcattgcctgaaaatggcggtgatgcccgaagaagaattgtggaaaacgttcgacacccatccggaagggttaaatcaggcggaagtggaatctgcccgcgaacaacatggtgaaaataaattacccgcacaacaaccgtcgccgtggtgggtacatttatgggtctgctatcgcaacccctttaatattttactcaccattctcggcgctatttcttacgccacggaagatttatttgctgcgggcgttatcgcgctaatggtcgctatttctacgttgctgaactttattcaggaagcacgttccactaaagcggcagatgccctgaaagcgatggtcagcaatactgcgacggtgctgcgcgtaattaacgacaaaggcgaaaatggctggctggagatcccgatcgaccagctggtgcccggcgatattataaaactggcggcgggagatatgatcccggcagatttacgtatcttgcaggcgcgggatctgttcgtcgctcaggcgtcgttaaccggtgagtctctgcccgtagaaaaagccgctaccactcgccagccggagcacagcaatccgctggagtgcgacacgctgtgttttatgggcaccaccgtggtgagcggcacggcacaagcaatggtgattgctacaggtgccaatacctggtttggtcaactggcggggcgtgttagtgagcaggaaagcgagccgaatgcctttcagcaagggatcagccgcgtcagtatgctgctgattcgctttatgctggtgatggcaccggtggtgctgttaatcaatggttacaccaaaggcgactggtgggaagcggcgctgtttgcgctttcggtcgcggtaggcctaacgccggaaatgttgccgatgattgttacctcgacgctggcgcgcggcgcagtaaagctgtcgaaacagaaagtgatcgtcaaacatctggatgctattcagaactttggcgcaatggatattctgtgcactgataaaaccggcaccctgacgcaggataaaattgtgctggagaatcataccgatatctccggtaaaaccagcgaacgcgtgctgcatagcgcgtggttgaacagtcattatcagaccggacttaaaaacctgctcgatacagcggtgctcgaaggtacggatgaagagtcagcgcgctcgctggccagtcgttggcaaaaaattgatgagattccgtttgatttcgagcgtcgccggatgtcggtggtagtggcagaaaataccgagcaccatcagctggtttgcaaaggtgcattgcaggaaatcctcaatgtgtgttcgcaggtgcgtcacaatggcgagattgtgccgctcgatgacatcatgctgcgtaagattaagcgggttactgatacgctgaatcgtcaggggctgcgcgtggttgcggtggcgacgaaatacctgccagcgcgtgaaggagattaccagcgggcggatgaatccgacctgatcctcgaaggatatattgcttttcttgatccgccaaaagagacaaccgctccggcactgaaggcattaaaagcgagtggaattaccgtaaaaatccttactggcgacagtgagttagttgcagcgaaagtgtgccatgaagtggggctggacgcgggagaggtggtcattggtagtgatattgaaacgctatctgacgacgaactggcaaatcttgcacagcgtaccacgctgtttgcccgcctgacgccgatgcataaagaacgcattgtgaccttactgaagcgcgaagggcatgtggttggctttatgggcgatggtattaatgatgcgcccgccttacgcgctgcggatatcggcatttctgtggacggcgcggtagatattgcccgtgaagcggctgatatcatcctgctggaaaaaagcctgatggtgctggaagagggggttattgagggacgtcgcactttcgccaacatgctgaaatacatcaaaatgacggcgagctctaacttcggtaatgtgttcagcgtgctggtagcgagtgctttcttgcccttcctgccgatgttgccgttacacttgcttattcagaacctgctgtacgatgtgtcacaggtggcgatcccgtttgataacgtcgacgacgagcaaattcaaaagccgcagcgttggaatccggcggatctggggcgctttatgatcttcttcggaccgatcagctcgatcttcgatattttgacgttttgcctgatgtggtgggtattccatgccaacacgccggaaacgcaaacgctgttccagtcgggatggtttgtggtgggcttactgtcgcaaacgctgattgtgcatatgatccgcacccgccgtgtgccgtttattcagagctgtgcatcgtggccgttaatgatcatgaccgtgatcgtgatgattgtcgggatcgcattgccgttttcaccgctggccagttatctgcaattacaggcgctgccgttaagctatttcccgtggctggttgcgattctggcagggtatatgacattaacccagttggtgaaagggttctatagccgtcgttacggctggcaataa

SEQ ID NO: 6656 - DNA, 189 bp, Escherichia coli
gtgcattcagcaatgggtaaactctggtttatcgttggtttagttgccagcaggtattatatcgccatagatgctacgaatattattggattctccttattatttgcggcgcttttttcacttaccggaggttatatggaacctgatcccacgcctctccctcgacggagattaaaacttttccggtaa

SEQ ID NO: 6657 - DNA, 807 bp, Escherichia coli
gtgacgggtgataaggagatcatcacaatggcatttaagatctggcaaattggtttgcatttacaacagcaagaagcggtagcggttgcgatcgtgcggggcgcaaaagaatgctttttgcaacgctggtggcggttgccgctggagaacgacattatcaaagatgggcggattgttgatgcgcagcagctggctaaaacgttgttaccgtggagtcgcgaactgccgcagcgtcatcacattatgttggcgtttcccgccagtcgcacattacagcggtcatttccgcgcccgtcgatgtcccttggtgagcgggagcaaacggcctggctgtcagggacgatggcccgcgagctggatatggatccggactccctgcgcttcgattacagcgaagactcactcagtcccgcctataacgtgactgccgcgcaaagcaaagagctggcaacgctgcttactctggcagaaaggttgcgtgttcatgtgagcgcgatcaccccggatgccagtgcattacagcgattcctgccttttttaccttctcatcagcaatgtctggcctggcgtgataacgaacagtggctgtgggcgacgcgctatagctgggggcgcaaactggcggtggggatgactagcgcgaaggagctggcggcagcgttatccgttgatcccgaaagcgtcgcgatatgtggcgaaggcggatttgatccctgggaggccgtttctgttcgtcagccgccgctaccgccgccaggtggagactttgccatcgcgctggggctggcgcttgggaaggcgtactga

SEQ ID NO: 6658 - DNA, 693 bp, Escherichia coli
atgaaaaagattaatgcaataattttattatcttctctgacctctgcctcggtatttgctggcgcatacgtcgaaaacagggaggcatataatcttgcctccgatcagggcgaggttatgctacgtgtgggttataacttcgatatgggcgcgggtattatgttaaccaatacctacaactttcagcgagaagatgaactaaaacatggatataacgaaattgaaggctggtatccgttatttaaaccaaccgataaattaaccatccagcccggtggcttaattaatgataagagtatcggttcgggtggtgcagtgtatctggacgtcaactataaatttgtaccatggtttaatctgacagtacgaaatcgctataaccataataactatagttcaacagatttgagcggggaactggataataatgacacctatgaaattggcacctactggaattttaaaatcaccgataaattttcctatacatttgagccacattacttcatgcgagtgaatgactttaatagtagcaacgggaaagatcatcattgggaaatcactaacaccttccgttaccgtattaatgaacactggctcccttatttcgaattgcgctggttagaccgcaacgtcgaaccgtaccaccgcgagcaaaaccagatccgtatcgggacgaagtatttcttctga

SEQ ID NO: 6659 - DNA, 2496 bp, Escherichia coli
atgttaacgattcaatttctctgtcctttgcctaacggtctacatgctcgtccggcgtgggaacttaaagaacagtgcagccagtggcaaagcgaaatcacttttattaaccatcgccagaacgcaaaggcagatgcgaaaagctcgctggcgctgattggcaccggcaccctatttaatgacagttgcagcctgaacattagcggcagcgatgaagagcaggcgcggcgcgtgctggaagagtacatccaggtgcgctttatcgacagcgacagcgttcagcctacgcaggcagaactgacggcgcatccgctgccgcgttcattaagccgccttaacccggatttactgtacggcaatgtgctggcaagcggcgtcggcgtgggtacgctgaccctgttacaaagcgacagcctcgacagttatcgggcaatccccgccagtgcgcaagattccacccggctggagcacagcctggcaacgcttgccgagcaactgaaccagcaattgcgtgagcgtgacggcgaaagcaaaactatcctcagcgcccatttgtcgctgattcaggatgatgaatttgcaggcaatatccgtcgcctgatgacagaacagcatcaggggctgggggcggcgatcatcagcaatatggagcaggtttgcgccaaactttctgcctctgccagcgattatctgcgcgaacgtgttagcgacattcgcgatatcagcgaacagttgctgcatatcacctggccggaactgaagccgcgcaacaagctggtgcttgaaaaaccgaccattctggtggctgaagatttaaccccaagccagtttttgagccttgatttgaaaaatcttgcgggcatgattctggagaaaaccgggcgcacctcgcatacactgattctggcccgtgcctcggcgatcccggtactgagtggcttgccgctggatgcgattgcccgttatgccgggcaacctgcagtgcttgacgcccagtgcggcgtgctggcgattaacccgaatgacgcggtgagcggttattatcaggtcgcgcagacgctggcggataaacgccaaaaacaacaggcgcaggctgccgcgcagctggcctattcccgtgataacaagcgtattgatattgcggcgaatatcggcaccgctctggaagcgccaggcgcgtttgccaacggcgcggaaggtgtcgggctgttccgtaccgaaatgctctatatggatcgcgacagcgcgccggacgagcaggagcaatttgaagcctaccagcaggtgctactggcggcgggcgacaagccgattatcttccgcacgatggacatcggcggcgataaaagcattccttatctgaatattccccaggaagagaacccgttcctcggctatcgcgcggtacgtatttacccggaatttgctggcctgttccgcactcaactgcgggccattttgcgcgccgccagtttcggcaacgcccagttgatgatcccgatggttcacagcctcgatcagatcttatgggtgaaaggcgagatccaaaaagcgatcgttgagcttaagcgcgatggcctgcgtcatgcagagacgattacgcttgggatcatggtggaagttccgtcggtgtgctacatcatcgaccacttctgcgatgaggtcgatttcttcagtatcggctccaacgatatgacccagtatctgtatgcggtcgatcgtaataacccgcgcgtatcgccgctatataacccgattacgccatcgttcctgcgcatgttgcagcaaatagttaccactgcgcatcagcggggcaaatgggtaggcatttgcggtgaactgggcggtgaaagccgttatctgccgctactgcttgggctgggcctggatgagctgagtatgagtagcccgcgtattccggcggtgaaaagccagcttcgtcaactggatagcgaggcgtgtcgggaactggcgcgtcaggcatgtgaatgccgcagtgcgcaggaaattgaagcgttactcaccgcctttacgccggaagaagacgttcgcccactgctggcgctggagaatatctttgttgatcaggattttagcaataaagagcaggcgatccagttcctgtgcggcaacctcggcgttaacgggcgcactgaacatccgtttgagctggaagaagatgtctggcagcgggaagagattgttaccaccggcgttggttttggcgtagcgatcccgcacaccaaatctcagtggatccgtcattccagtatcagcattgcccggctggcgaaaccgattggctggcagtcagaaatgggcgaagtcgaactggtgatcatgctgacgctgggtgctaacgaagggatgaatcatgtgaaagtcttctcgcagctggcgcgtaaactggtgaataaaaacttccgccagtcgttgtttgccgcgcaagatgcacaaagtatcctgacgctgctggaaacagaattaaccttctga

SEQ ID NO: 6660 - DNA, 1938 bp, Escherichia coli
ttgttattacccgaaaaaccagaaattgcacatgaaattgcccagcgtctactggggcaaaaaaaattaccctcgcttgagtggttaaaaatagtggcgactgatgagcacattcttgcctcattagaaaaatatcacgaaccatatgccatttttgatgattactattgtggtgcgatatggtcagccaccgtattacaggagcaaggtgttgcagccctgccccgatttgctccctatgccgcaagtgactactgcgccgatgtgttgcgtcatatcaatcatccgttcgcattgacactgcttatacgtgtagccgggcaaactaaacgctgtcacgatcggatgacgaaagccattgctgcgttcccacatgcagcaatggcggcactgacggaacttcttgggcaaaaagaagagaacagttggcgcattatgctaatgacaatgcttatctcacaaccagcactggcagaacaggtcattccctggctctcgacacccgcagttgccgtactgaaatcatgccagcaacaactgacacagccctcaaaccatgccagcgccgatctactgccagccgtagtagtctcccctccctggctttcgaaaaagaaaaaatcgccgattccggtgctggatttagcgccattaggcattgagccaatctgttatctgacagaagaaatcagtaatcaacttttggcgaaatatatctggtattcaaaacacatcacggttagccatgaagaaagtactaccaacctgttggcaaggatgggttttcaacgacggatcgctggtacatatattaaagctcccgaagcggtagttgaggcatggctaaatgaagattattcaaccttactaagtgaatttaaggtgtttcattcacctaccgggcattattggcagttggggattttgacaacattgccgctggagaaagcagtaaaagcatggaatgcccttaccctatctccacataccgataccgaatactccatgttacattttggactcaaagggttacctgggttagtaaactcacttgcacgctatccacaagaagccttgcccatcacgaattacttcgcagcgagtgagctggctcctgccgtcgcccgtgccttcaacaaactgaaaacgctacgcgaaaacgcccgtagctggctgttgaaatacccggaacatgcccttaccggcctgctgcctgcggcgctcggcaaagccggtgaagcacaggataacgcccgcgctgccttgcgtatgcttaccgaaaacggtcatcagccattactgcaagaaatcgcccgacgttataaccagccggaagtaaccgatgcggtgaacgctctgcttgcgctcgatcccttagataatcacccgacaaaaatccccactcttccggccttttatcagccatcgctctggacgcgcccggtattaaaagcaaatgcccaatcactgccagatagcgccctcctccacctcggtgaaatgctccgcttccctcaggaagaggctctgtatccgggattattgcaggtgaaagacgtctgttccgccgactcactggcgggatttgcctgggatctgtttaccgcctggcagaccgctggcgcgccgtcgaaagagagttgggcgttcactgcgttaggcgttctcggtaacgatgacaccgcccgcaaactgacgccattaatacgcgcctggcctggtgaatcccagcataaacgcgccaccgttgggttggatattctcgctgctatcggtagtgatatcgcccttatgcagcttaacggcatcgcccagaaactgaaattcaaagcattacaggagcgggcaaaagaaaaaattgccgacattgccgagagccgcgaactcacggtggcggagcttgaagatcgggttagcaccggatctcggtctggatga

SEQ ID NO: 6661 - DNA, 1185 bp, Escherichia coli
atgcaaaaaacggctaccactccatcaaaaatacttgatctcactgccgcggcatttttacttgtcgcctttctgacgggtattgcgggcgctcttcagactcctaccctaagtatattcctcgcagatgaactgaaagcccgtcctataatggtaggttttttcttcaccggtagcgctattatgggaattctggtcagtcaatttctggcaaggcactccgataaacaaggcgaccgtaaattactgattctgctatgttgcttatttggagtgctggcctgcacgctttttgcgtggaatcgcaactacttcattctcctctcaacgggcgtacttctgagtagttttgcttccaccgcaaacccgcaaatgttcgccctcgcccgtgaacacgccgacagaacaggccgtgagacggtcatgttcagtacatttttacgtgctcagatctcgcttgcctgggttatcgggccaccgctcgcttatgaactggcaatgggatttagttttaaagtgatgtatctcaccgctgccatcgcatttgttgtttgcggactgatagtctggttgtttttgccatcaatacaaagaaatattcctgtcgttacccaacccgtagaaattttaccctccacccacaggaagcgggatacgcggctactttttgtggtctgttcaatgatgtgggcggcgaataatctctacatgataaatatgccgctatttattattgatgaactgcatctaaccgataaactgactggagaaatgattggtatcgctgccggtctggaaattccgatgatgttaatcgcaggctattacatgaaacgtattggcaagcgactattaatgctcattgctatcgtgagtggaatgtgtttttacgccagcgtactcatggcgacgactccggcggttgagctggaattgcaaattcttaatgccatcttccttggtattctctgtggtatcggcatgctttattttcaggacttgatgcctgaaaaaataggctctgcgacaacgttatatgcaaatacttcacgcgtcggctggattatcgccggctctgttgacggaattatggttgaaatctggagctaccatgcgttgttctggctggcgatagggatgttgggtattgcgatgatttgcctgctgtttattaaagatatttag

SEQ ID NO: 6662 - DNA, 1335 bp, Escherichia coli
atgagttctgccaagaagatcgggctatttgcctgtaccggtgttgttgccggtaatatgatggggagcggtattgcattattacctgcgaacctagcaagtatcggtggtattgctatctggggttggattatctctattattggtgcaatgtcgctggcgtatgtatatgcccgactggcaacaaaaaacccgcaacaaggtggcccaattgcttatgccggagaaatttcccctgcatttggttttcagacaggtgttctttattaccatgctaactggattggtaacctggcgattggtattaccgctgtatcttatctttccaccttcttcccagtattaaatgatcctgttccggcgggtatcgcctgtattgctatcgtctgggtatttacctttgtaaatatgctcggcggtacttgggtaagccgtttaaccactattggtctggtgctggttcttattcctgtggtgatgactgctattgttggctggcattggtttgatgcggcaacttatgcagctaactggaatactgcggataccactgatggtcatgcgatcattaaaagtattctgctctgcctgtgggccttcgtgggtgttgaatccgcagctgtaagtactggtatggttaaaaacccgaaacgtaccgttccgctggcaaccatgctgggtactggtttagcaggtattgtttacatcgctgcgactcaggtgctttccggtatgtatccgtcttctgtaatggcggcttccggtgctccgtttgcaatcagtgcttcaactatcctcggtaactgggctgcgccgctggtttctgcattcaccgcctttgcgtgcctgacttctctgggctcctggatgatgttggtaggccaggcaggtgtacgtgccgctaacgacggtaacttcccgaaagtttatggtgaagtcgacagcaacggtattccgaaaaaaggtctgctgctggctgcagtgaaaatgactgccctgatgatccttatcactctgatgaactctgccggtggtaaagcatctgacctgttcggtgaactgaccggtatcgcagtactgctgactatgctgccgtatttctactcttgcgttgacctgattcgttttgaaggcgttaacatccgcaactttgtcagcctgatctgctctgtactgggttgcgtgttctgcttcatcgcgctgatgggcgcaagctccttcgagctggcaggtaccttcatcgtcagcctgattatcctgatgttctacgctcgcaaaatgcacgagcgccagagccactcaatggataaccacaccgcgtctaacgcacattaa

SEQ ID NO: 6663 - DNA, 978 bp, Escherichia coli
atggcatgtggcgagttctccctgattgcccgttattttgaccgtgtaagaagttctcgtcttgatgtcgaactgggcatcggcgacgattgcgcacttctcaatatccccgagaaacagaccctggcgatcagcactgatacgctggtggcgggtaaccatttcctccctgatatcgatcctgctgatctggcttataaagcactggcggtgaacctaagcgatctggcagcgatgggggccgatccggcctggctgacgctggcattaaccttaccggacgtagacgaagcgtggcttgagtccttcagcgacagtttgtttgatcttctcaattattacgatatgcaactcattggcggcgataccacgcgtgggccattatcaatgacgttgggtatccacggctttgttccgatgggacgagccttaacgcgctctggggcgaaaccgggtgactggatctatgtgaccggtacaccgggcgatagcgccgccgggctggcgattttgcaaaaccgtttgcaggttgccgatgctaaagatgcggactacttgatcaaacgtcatctccgtccatcgccgcgtattttacaggggcaggcactgcgcgatctggcaaattcagccatcgatctctctgacggtttgatttccgatctcgggcatatcgtgaaagccagcgactgcggcgcacgtattgacctggcattgctgccgttttctgatgcgctttctcgccatgttgaaccggaacaggcgctgcgctgggcgctctctggcggtgaagattacgagttgtgtttcactgtgccggaactgaaccgtggcgcgctggatgtggctctcggacacctgggcgtaccgtttacctgtatcgggcaaatgaccgccgatatcgaagggctttgttttattcgtgacggcgaacctgttacattagactggaaaggatatgaccattttgccacgccataa

SEQ ID NO: 6664 - DNA, 1284 bp, Escherichia coli
atgacctggtttattgaccggcgtctgaacggcaaaaacaaaagcatggtgaatcgccagcgttttttacgccgttataaagcgcaaattaaacagtcgatctccgaggccattaataagcgttcggtgactgacgtcgacagcggcgaatccgtatccattcccacggaagatattagcgaaccgatgtttcatcaggggcgtggcggtctgcgccaccgcgtgcatccgggcaatgaccatttcgtccagaacgaccgaattgaacgtccccagggtggcggcggaggttccggcagtggtcagggccaggccagccaggatggtgaaggtcaggatgaatttgtctttcagatttcgaaagatgagtatcttgatctgctctttgaagatttggccttaccgaatctgaaacaaaaccaacaacgccagctgaccgaatataaaacgcatcgggcgggttataccgctaacggcgttccggccaatatcagcgttgtgcgttcattgcagaactcactggcgcgacgcacagccatgacggcaggcaagcggcgggaacttcatgcactggaagagaatttggccatcatcagcaacagtgaacctgcgcaactgctggaagaggaacgtctgcgcaaagaaattgcagaattacgtgccaaaattgaacgcgtcccttttattgacaccttcgatttacgttacaagaactacgagaagcggcccgatccctccagccaggcagtgatgttttgcctgatggacgtttccggttcaatggatcaatccactaaagatatggctaagcgtttttatattctgctgtatctgttcctcagcagaacgtataagaacgtggaagtcgtatacatccgccatcatacccaggcgaaagaagtcgatgaacatgagtttttctactcgcaggaaacaggcggcaccattgtttccagcgccctgaaactgatggatgaggtagtgaaagagcgttataacccggcacagtggaatatttacgctgcacaagcatcggacggcgataactgggccgatgactctccgctttgccatgaaatcctggcgaaaaaattattacctgttgttcgttattacagctatatcgaaattacccgtcgtgcacatcagacattgtggcgagaatatgagcatctgcaatctactttcgacaactttgcgatgcagcacatccgcgaccaggatgatatttatccggtgttccgtgaactgtttcataaacaaaatgcaacagctaaaggctaa

SEQ ID NO: 6665 - DNA, 1476 bp, Escherichia coli
atgattcagtcaacacgtatttccatggggttattctttaaatattttttatcgttaacgaaaattgatcctggtcaaaactatatatctctgccatcaataaaatccagcactcacattgctctcctttttatggtttctatgggtacacaaaaattaaaagctcaaagcttttttattttcagtttattgctgacgttaattttattttgcattactaccttatataacgaaaacacaaatgtaaaactcatcccacagatgaattacctgatggttgttgtggctttgtttttccttaacgccgtcatttttcttttcatgttaatgaaatatttcactaacaaacaaattttaccaacactcattttaagccttgcatttttaagtggccttatctatttagttgaaaccattgtaattatccataaaccaattaacggcagtacactgatccagacaaagtcgaatgatgtttctattttctatattttccgccaactcagttttatttgtttaacctcgctggcgctcttttgttatggaaaagacaacatccttgacaacaataagaaaaaaacgggaatcctgttgctggcgctgatcccttttttagtttttccccttctggcacacaatctgagcagttataacgctgactattctttgtatgtcgtcgattactgtccggacaaccatactgcgacctggggaatcaactatacaaaaatattggtttgtctgtgggcatttttactgttctttattatcatgcgcacacgattagccagcgaactatggccgttaatagcattattatgtctggcatcgctatgctgcaacttacttctactgactctggatgagtataattatactatctggtatatcagtcgcgggattgaagtttccagtaaactgtttgttgtgtcttttctgatttataacatttttcaggagctgcaactctccagcaaactggcagttcatgatgtgctgaccaatatttataatcggcgctactttttcaacagcgtagagtcattattgtcgcgacctgttgttaaggacttctgtgtcatgctggttgatattaatcagttcaaacgcatcaatgcccaatggggacatcgtgtgggtgataaagtgctggtttcaattgtcgatattatccagcaaagcatccgccccgatgatattttagcgcgactggagggtgaggtgtttggcttgctatttaccgaactcaatagtgcccaggcaaaaatcattgcggaacgtatgcgtaaaaatgtcgaactcctgaccggctttagtaacagatatgatgttcctgaacaaatgaccatcagtattggcacggttttttcaacgggtgacacgcgtaatatctcgcttgtcatgacggaagcagataaagccttacgcgaagcgaaaagcgaggggggcaacaaagtgattattcatcatatttaa

SEQ ID NO: 6666 - DNA, 696 bp, Escherichia coli
atgttcagaaaattagcagctgaatgttttggtactttctggcttgtttttggtggctgtggtagtgctgtactggccgcaggcttcccggaattaggcattggttttgccggcgtggcgttggcgttcggtctgaccgttctgacgatggcctttgctgttggtcatatttctggtggtcattttaacccggcggtcactattggtttatgggctggcggacgttttccggcaaaagaagtcgttggctacgtaattgcccaggttgtcggcggtattgttgcagcggcgctgctgtatttaattgccagtggtaaaacgggttttgacgcggcagccagcggttttgcttctaacggttatggcgagcattcaccaggcggttattccatgctttccgcgctggtagttgaactggtattgagtgcaggtttcctgttggtgatccacggcgcaaccgacaaattcgcgccggcaggttttgcgccgatcgctattggtctggccttaaccctgattcacttaattagtattccggtgactaacacttctgttaacccggcgcgcagcaccgcggttgctatcttccagggcggctgggcattagaacaactgtggttcttctgggtggtgccaattgtcggcggcattatcggtggtctgatttaccggaccctgctggaaaagcgtgattaa

SEQ ID NO: 6667 - DNA, 1086 bp, Escherichia coli
atgttcaagcgtcgttatgtaacattgcttcccctttttgtgttgcttgccgcctgtagcagcaagccaaaacctactgagactgatacgaccaccggaacgccgtctggcggcttcctgcttgagccgcagcacaatgtgatgcagatgggcggcgatttcgctaataacccgaatgcccagcagttcatcgacaaaatggtgaacaaacacggtttcgatcgtcagcagttgcaggaaattctctcccaggcgaagcgtctggattcggtactgcggctgatggataaccaggcaccaaccacatcggtgaaaccgccatcaggtccgaacggcgcatggctccgttatcgcaaaaaatttattacgccggacaacgtgcagaacggtgtggttttctggaatcagtatgaagatgcgttgaatcgcgcgtggcaggtgtatggagtaccgccggaaattatcgtcgggattatcggcgttgaaacccgctgggggcgcgtgatggggaaaactcgcatcctcgatgcgctggcaacgctgtcatttaactacccacgccgcgcggagtatttctctggcgagctggaaaccttcctgttgatggcgcgcgacgagcaggacgatccgctcaatctgaaaggttcctttgccggggcgatgggctacggacagtttatgccgtcgtcttacaaacaatatgcggtagatttcagcggcgacgggcatatcaacctgtgggatccggttgatgcgatcggtagcgtggcgaactatttcaaagcgcacggctgggtgaaaggcgatcaggtcgcggtaatggcaaacggtcaggctccaggcttgccaaatggcttcaaaactaagtacagcatttcgcagcttgccgccgcaggtttaacgccacagcagccgctgggcaaccatcaacaagccagcctgctgcgtctggatgttggcaccggctaccagtactggtacggtctgccgaacttctacaccatcacccgttacaaccacagcacccattacgcaatggcggtctggcagttaggacaagccgtggcgctggcgcgagtacagtag

SEQ ID NO: 6668 - DNA, 7152 bp, Escherichia coli
ttgctatcagtatttacattttttcgctgtgctagaaagggcgcatttatgttagctcgttcagggaaggtaagcatggctacgaagaagagaagtggagaagaaataaatgaccgacaaatattatgcgggatgggaattaaactacgccgcttaactgcgggtatctgtctgataactcaacttgcgttccctatggctgcggcagcacaaggtgtggtaaacgccgcaacccaacaaccagttcctgcacaaattgccattgcaaatgccaatacggtgccctacacccttggagcgttggaatcggcccaaagcgttgccgaacgtttcggtatttcggtggctgagttacgcaaactcaaccagtttcgtacgtttgctcgaagttttgataatgtccgccagggtgatgaactggatgtcccggcacaagttagtgaaaaaaaattaaccccgccgccgggtaatagcagtgacaacctcgagcaacagatagccagtacttcacagcaaatcgggtctctgctcgccgaagatatgaacagcgagcaagcggcaaatatggcgcgtggatgggcctcttctcaggcttcaggcgcaatgacagactggttaagccgcttcggtaccgcaagaatcacgctgggcgtggatgaagattttagcctgaagaactcccagttcgattttctccatccgtggtatgaaacgcctgataatctctttttcagtcagcatactctccatcgtactgacgagcgtacgcagattaacaacggcttaggttggcgtcatttcactcccacatggatgtcgggcatcaacttctttttcgaccacgatcttagccgttaccactcccgcgccggcattggcgcggagtactggcgcgactatctaaaattaagcagtaacggctatttgcgactgaccaactggcgcagcgcacctgaactggacaacgattatgaagcacgcccggccaatggctgggatgtacgcgcagaaagctggctacccgcctggccgcaccttggcggtaaactggtctatgaacagtattatggcgatgaagtggccctgttcgataaagacgatcggcaaagtaatcctcatgccataaccgctggacttaactatacccccttcccgctgatgaccttcagcgcggagcaacgccagggtaaacagggcgaaaatgacacccgttttgccgtcgattttacctggcaacctggcagcgcaatgcagaaacagcttgacccgaatgaagtcgctgcacggcgtagccttgcaggcagccgttatgatctggtggatcgcaacaacaatatcgttctggaatatcgcaaaaaagaactggttcgcctgaccctgacagaccccgtgacagggaagtcaggagaagtgaaatcactggtttcgtcgctacaaaccaaatatgccctgaaaggctataacgtcgaagccaccgcactggaagctgccggtggcaaagtggtcacaacgggtaaagatattctggttaccctgccggcttaccggttcaccagtacgccagaaaccgataacacctggccgattgaagtcaccgccgaagatgtcaaaggcaatttgtcgaatcgtgaacagagcatggtggtcgttcaggcacctacgctaagccagaaagattcctcggtatcgttaagtacccaaacattgaacgcggattcccattcaaccgccacactgacttttattgcgcatgatgcagcaggtaatcctgttgtcgggctggtgctctcgacgcgtcacgaaggtgttcaggacatcaccctttctgactggaaagataatggtgacggaagctatacccagatcctgaccacaggagcgatgtctggcacgctgacgctgatgccacagctgaatggtgtggatgcggctaaagcccccgccgtggtgaatatcatttctgtttcgtcatcccgaactcactcgtcaattaagattgataaggaccgttatctctccggcaatcctatcgaggtgacggtagaactgagagatgaaaatgacaaacctgttaaggaacaaaaacagcaactgaataacgcagtcagcatcgacaacgtgaaaccaggagtcactacagactggaaagaaaccgcagatggcgtctataaggcgacctataccgcctataccaaaggcagtggacttactgcgaagctattaatgcaaaactggaatgaagatttgcataccgctggatttatcatcgacgccaacccgcagtcagcgaaaattgcgacattatctgccagcaataatggtgtgctcgccaatgagaatgcagcaaacaccgtctcggtcaatgtcgctgatgaaggaagcaacccaatcaatgatcataccgtcacgtttgcggtattaagcggatcggcaacttccttcaacaatcaaaacaccgcaaaaacggatgttaatggtctggcgacttttgatctgaaaagtagtaagcaggaagacaacacggttgaagtcacccttgaaaatggcgtgaaacaaacgttaatcgtcagttttgtcggcgactcgagtactgcgcaggttgatctgcagaagtcgaaaaatgaagtggttgctgacggcaatgacagcgtcacaatgaccgcgaccgtccgggatgcaaaaggcaacctgctcaatgacgtcatggtcactttcaatgttaattcagcagaggcgaaactgagccaaaccgaagtgaatagccacgacgggatcgccacagctacgctgaccagtttgaaaaatggtgattatagggttacggcctctgtgagctctggttcccaggctaatcaacaggtgaattttatcggtgatcaaagtactgctgccctgaccctcagtgtgccttcaggtgatatcaccgtcaccaacacagctccgcaatatatgactgcaaccttgcaggataaaaatggcaacccactaaaagataaagaaatcaccttctctgtgccaaacgacgtcgcaagtaagttctcgattagcaacggaggaaaaggcatgacggatagtaacggggttgcaatcgcctccctgaccggcacgttagcgggcacgcatatgatcatggctcgtctggctaacagcaatgtcagcgatgcacagccaatgacgtttgtggcggataaagacagagcggttgtcgttttgcaaacatcgaaagcggaaatcattgggaatggcgtggatgagacaactctgacagcaacagtgaaagatccgtcgaatcatccggtggcggggataacggtaaacttcaccatgccacaggacgttgcggcaaactttacccttgaaaataacggtattgccatcactcaggccaatggggaagcgcatgtcacgctgaaaggtaaaaaagcgggcacgcatacggttaccgcaacgctgggtaataacaataccagtgattcgcagccggtaacatttgtggcggacaaagcctcggctcaggttgtcctgcagatatcaaaagatgagatcacaggtaatggcgtcgatagcgcaacgctaactgcaacggttaaagatcagttcgacaatgaggtgaataatcttccggtaacattcagctcagcctcttcaggactcaccctgaccccgggagtaagtaataccaacgagtctggcatcgcgcaggccactctcgcaggcgttgcctttggtgagaagacggttactgcatcactggctaataatggtgccagcgacaacaaaactgtgcattttattggcgacacagcggcggcaaaaattatcgagttggcgcctgtcccagacagcataatcgccggtaccccgcagaacagctccggcagcgtcatcaccgccacagtcgttgataataatggctttccggtgaaaggtgtgactgtgaacttcaccagcaacgcagcgacagccgaaatgacgaacggcggtcaagccgtgacgaacgaacagggtaaggctaccgtcacttataccaatacccgctcctcgatagaatcaggagcgagaccggataccgttgaggccagtctggaaaatggtagctccacgcttagcacatcaattaatgtcaacgctgatgcgtctacggcacatctcaccttgctacaggcactttttgatacagtctccgcaggcgagacaaccagtctgtatattgaggtgaaggataattacggcaacggtgtcccccagcaggaggtaaccctcagcgtttcaccaagtgaaggcgtgacccccagtaataacgctatatatactaccaaccacgacggcaatttttacgcaagctttaccgctacaaaagccggggtttatcaattgacggcaaccctcgaaaatggcgattcgatgcaacaaacagtgacctatgtgccgaacgtcgcgaatgctgaaatcacgctggcagcctcgaaggatccggtgattgccgacaataacgatctcacgacactaacagcaacagtcgctgatacagagggcaatgcgatagccaacactgaggtaacatttactctgccggaagatgtgaaggcgaacttcacgctgagcgatggcggtaaagtgattactgatgctgaaggcaaagcgaaagtcacgctgaaaggtacaaaagcaggcgctcatactgttacagcatcgatgactggcggtaagagtgagcagttggtggtgaactttattgcggatacgctcactgcgcaggttaatcttaacgttaccgaggacaattttatcgctaataacgtcgggatgaccaggctgcaggcaacagtgactgatggaaacggcaacccgttagccaatgaggcggtgacattcacgctaccggcagatgtgagcgcaagctttactctcggacaaggcggttccgccattactgatatcaacggcaaggctgaagttacactgagcggtacaaaatccggcacctaccccgtgacagttagcgtgaacaattatggtgtcagtgatacgaaacaggtgactttgattgccgatgctggtaccgcaaaactagcctccttaacctctgtatactcattcgtcgtcagcacgaccgagggcgcaaccatgacggcaagcgtcactgacgctaacggcaacccggtagaaggcataaaagttaatttccgcggaacctccgtcacgctaagcagcaccagcgttgaaacggatgatcggggtttcgctgaaattcttgtgacaagcaccgaggtcggactgaaaacagtttcagcctctctggcagataaacctactgaagtcatctcgcgattactgaatgccagtgcagatgttaattctgcgacgattaccagtctggagataccggaaggtcaggtaatggtcgcacaagacgtagcagttaaagctcacgttaacgaccagtttggcaacccggttgcgcatcaacccgtgacattcagtgcagagccatcctcgcaaatgatcatcagccagaatacggtctctactaatacgcagggtgtagccgaggtcaccatgacgcccgaaagaaacggttcgtatatggtgaaagcatccctgccgaatggagcctcacttgagaaacaactggaggctattgatgaaaaactgacactcacggcgtccagtccgcttatcggtgtctatgcccctacaggcgctactctgacggcaacgctaacctctgcaaatggcactccagtggagggtcaggtcatcaactttagcgtaacgccagaaggggcgacgttaagtggcggaaaagtgagaactaactcttcaggtcaggctccagtcgttttgaccagcaataaagtcggtacatatacggtgactgcatctttccataacggcgtaacaatacagacacagacaaccgtgaaagtcactggcaactcaagcaccgcccatgttgctagctttatcgctgatccatcgactatcgccgccaccaacactgatttaagtaccttaaaggcaacggttgaggatggcagtggtaacctgatcgaaggtctcactgtgtacttcgccttaaaaagcggctctgccacattaacgtcattaacagcggtgaccgatcaaaacggaatcgcgacaacaagcgtgaaaggagcgatgacaggtagcgtcacggtaagcgcagtcacgaccgctggtggaatgcaaacagtagatataacgctggtggctggcccggcagacacctcgcagtccgtccttaagagcaatcggtcatcactgaaaggggactataccgatagtgctgaattacgtcttgttctgcacgatatatcaggcaatccgatcaaagtttctgaagggatggaatttgtgcaatcaggtactaacgtgccctatataaaaattagcgcaattgattacagtctaaatatcaacggtgattacaaagccactgttacaggaggcggagagggtatcgcaacgctgatccctgtattgaatggtgttcatcaagctggtctgagtaccacaatacaattcactcgcgcagaagacaaaataatgagcggtacagtatcagtcaatggtactgacctaccgacaactacattcccttcgcaggggttcaccggggcgtattatcagttgaataatgacaactttgccccaggaaaaacggcggctgattatgagttttcaagctctgcctcctgggtcgatgttgatgctaccggtaaagtgacatttaaaaatgtcggcagcaattcggaaaggattacggcgacgccaaaatcaggaggccctagctatgtatacgaaatccgtgtgaagagttggtgggtgaacgccggcgaggctttcatgatatacagccttgctgaaaatttttgcagcagcaatggctacacgctccccagagcaaactatttaaaccactgtagttcccgaggcatcgggtcactgtacagtgaatggggagatatggggcattacacgactgacgctggttttcaatcaaatatgtattggtcatctagtcccgcaaactcaagcgaacaatacgtagtttccctggcaacaggtgatcaaagcgtatttgaaaagcttgggtttgcttatgcgacatgttataaaaacctgtga

SEQ ID NO: 6669 - DNA, 4008 bp, Escherichia coli
atgttagctcgttcagggaaggtaagcatggctacgaagaagagaagtggagaagaaataaatgaccgacaaatcttatgcgggatgggaattaaactacgccgcttaactgcgggtatctgcctgataactcaacttgtgttccctatggctgcggcagcacaaggtgtggtaaacgccgcaacccaacaaccagttcctgcacaaattgccattgcaaatgccaatacggtgccctacacccttggagcgctggaatcggcccaaagcgttgccgaacgtttcggtatttcggtggctgagttacgcaaactcaaccagtttcgtacgtttgctcgaggttttgataatgtccgccagggtgatgaactggatgtcccggcacaagttagtgaaaataatttaaccccgccaccgggtaatagcagtggcaaccttgagcaacagatagccagtacttcacagcaaatcgggtctctgctcgccgaggatatgaacagcgagcaagcggcaaatatggcgcgtggatgggcctcttctcaggcttcaggcgcaatgacagactggttaagccgcttcggtaccgcaagaatcacgctgggcgtggatgaagattttagcctgaagaactcccagttcgattttctccatccgtggtatgaaacgcctgataatctctttttcagtcagcatactctccatcgtactgacgagcgtacgcagattaacaacggcttgggttggcgtcatttcactcccacatggatgtcgggcatcaacttctttttcgaccacgatcttagccgttaccactcccgcgccggcattggcgcggagtactggcgcgactatctaaaattaagcagtaacggctatttgcgactgaccaactggcgcagcgcacctgaactggacaacgattatgaagcacgcccggccaatggctgggatgtacgcgcagaaggctggctacccgcctggccgcaccttggcggtaaactggtctatgaacagtattatggcgatgaagtggccctgttcgataaagatgatcggcaaagtaatcctcatgccataaccgctggacttaactatacccccttcccgctgatgaccttcagcgcggagcaacgccagggtaaacagggcgaaaatgacacccgttttgccgtcgattttacctggcaacctggaagcgcgatgcagaaacagcttgacccgaatgaagtcgatgcacggcgtagccttgcaggcagccgttttgatctggtggatcgcaacaacaacatcgttctggaatatcgcaaaaaagaactggttcgcctgaccctgacagaccccgtgacagggaagtcaggagaagtgaaatcactggtttcgtcgctacaaaccaaatatgccctgaaaggctataacgtcgaagccaccgctctggaagctgccggtggtaaagtggttacaacgggtaaagatattctggttaccctgccggcgtaccggttcaccagtacgccagaaaccgataacacctggccgattgaagtcaccgctgaagatgtcaaaggcaatttttcgaatcgtgaacagagcatggtagtcgttcaggctcctacgctaagccagaaagattcctcggtatcgttaagtagccagacgttgagcgcggattcccattcaaccgccacactgacttttattgcgcatgatgcagcaggtaatcctgttatcgggctggtgctctcgacgcgtcacgaaggtgttcaggacatcaccctttctgactggaaagataatggtgacggaagctatacccagatcctgaccacaggagcgatgtctggcacgctgacgctgatgccacagctgaacggtgtggatgcggctaaagcccccgccgtggtgaatatcatttctgtttcgtcatcccggactcactcgtcaattaagattgataaggaccgttatctctccgggaatcctatcgaggtgacggtagaactgagagatgaaaatgacaaacctgttaaggagcaaaaacagcaactgaataccgcagtcagcatcgacaacgtgaaacctggtgtcactacagactggaaagaaaccgcagatggcgtctataaggcaacctataccgcctataccaaaggcagtgggcttactgcgaagctgttaatgcaaaactggaatgaagatttgcataccgctggatttatcatcgacgccaacccgcagtcagcgaaaattgcgacattatctgccagcaataatggtgtgctcgccaatgagaatgcagcaaacaccgtctcggtcaatgtcgctgatgaaggaagcaacccaatcaatgatcataccgtcacgtttgcggtattaagcggatcggcaacttcctttaacaatcaaaacaccgcaaaaacggatgttaatggtctggcgacttttgatctgaaaagtagtaagcaggaagacaacacggttgaagtcacccttgaaaatggcgtgaaacaaacgttaatcgtcagttttgtcggcgactcgagtaccgcgcaggttgatctgcagaagtcgaaaaatgaagtggtcgctgacggcaatgacagtgccacaatgaccgcgacagttcgggatgcaaaaggcaacctgctcaatgacgtcaaggtcaccttcaatgtcaattcagcagcagcgaaactgagccaaaccgaagtgaatagccacgacgggatcgccacagctacgctgaccagtttgaaaaatggtgattatacggttacggcctctgtgagctctggttctcaggctaatcaacaggtgatttttatcggtgatcaaagtactgctgccctgaccctcagtgtgccttcaggtgatatcaccgtcaccaacacagctccgctacatatgactgcaaccttgcaggataaaaatggcaatccactaaaagataaagaaatcaccttctctgtgccaaacgacgtcgcaagtcggttctcgattagcaacagcggaaaaggcatgacggatagcaacgggactgcaatcgcctccctgaccggcacgttagcgggcacgcatatgatcacggctcgtctggctaacagcaatgtcagcgatacacagccaatgacgtttgtggcggataaagacagagcggttgtcgttctgcaaacatcgaaagcggaaatcattgggaatggcgtggatgagacgactctgacagcaacagttaaagatccttttgataacgtggttaaaaatctttcagtagtcttccgcacctcccccgcagacacgcaactgagtctgaacgcgcgtaatactaatgagaacggtattgccgaagttacccttaagggcacggttttgggtgttcatacagccgaagccatactgcttaacggcaacagagatacgaaaatcgtcaatattgcgcccgatgccagcaacgcgcaggtcaccctgaacatccctgcacaacaggtggtgacgaataacagtgacagcgtgcagctgacggcgacggtgaaagacccgtcgaatcatccggtggcgggaataacggtgaacttcaccatgccacaggacgtggcggcaaactttacccttgaaaataacggtattgccatcactcaggccaatggcgaagcgcatgtcaccctcaaaggcaaaaaagcgggcacgcatactgtgaccgccacgctgggtaacaataatgccagcgatgcgcaaccagtcaccttcgtggcggataaggacagcgcggttgtcgttctgcaaacatcgaaagcggaaatcattgggaatggcgtggatgagacgactctgacggcaacagtgaaagatccttttgataacgcagtaaaagatctacaggtcaccttcagtaccaaccccgcagatactcaacttagtcagagcaaaagcaatactaacgacagtggtgtggccgaagttacctttaagggcacgggttttgggtgttcatacagccgaagccacactgcctaa

SEQ ID NO: 6670 - DNA, 1326 bp, Escherichia coli
atgattaatcgcatcgtatcgttttttatattatgtctggtgttatgcatacccctatgcgtagcgtactttcactctggtgaactgatgatgaggttcgttttcttctggccgttttttatgtccattatgtggattgttggcggcgtctatttctgggtctatcgtgaacgccactggccgtggggagaaaacgcaccagctccccagttgaaagataatccgtctatctccattatcattccctgttttaatgaggagaaaaacgttgaggaaaccatacacgccgctttagcacagcgttatgagaacattgaagttattgccgtaaatgacggttcaacagataaaacccgtgccatcctggatcgcatggctgcacaaattccccatttgcgggtcattcatctggcgcaaaaccaggggaaagccattgcgcttaaaaccggagctgccgcggcgaaaagtgaatatctggtgtgcattgatggcgatgcgttattagaccgcgatgcggcggcatatattgtggaaccgatgttgtacaacccgcgtgtgggtgccgtaaccggtaatcctcgtattcgaacacgttctaccctggtgggtaaaattcaggttggcgagtattcctcaattattggtttgatcaagcgaacccagcgtatctatggaaacgtatttaccgtttccggtgttattgccgcatttcgtcgcagcgccctggcagaagtgggttactggagtgacgatatgatcaccgaagatattgatattagctggaagctgcagttgaatcagtggacgattttttacgagccacgggcactgtgctggatattaatgcctgaaacgttaaaagggctgtggaaacagcgcctgcgctgggctcagggcggtgcagaagtattcctcaaaaatatgacaaggttgtggcgcaaagaaaactttcgaatgtggccgctgttttttgaatactgcctgacgacaatatgggccttcacctgcctggtcggtttcattatttacgcagtccaacttgccggtgtaccgttaaatattgaattgacacatatcgctgcgacacatactgccggaatattattgtgtacgttatgtttactgcaatttattgtcagcctgatgatcgagaatcgctatgagcataatctgacttcatcgcttttctggattatttggttcccggttattttctggatgctgagcctggcaacgacattggtatcatttacacgagtcatgttgatgcctaaaaagcaacgcgcccgttgggtaagtcccgatcgcgggattctgagaggttaa

SEQ ID NO: 6671 - DNA, 2019 bp, Escherichia coli
atgttacgtaatggaaataaatatctcctgatgctggtgagtataattatgctcaccgcgtgcattagccagtcaagaacatcatttataccgccacaggatcgcgaatctttactcgccgagcaaccgtggccgcataatggttttgtagcgatttcatggcataacgttgaagacgaagctgccgaccagcgttttatgtcagtgcggacatcagcactgcgtgaacaatttgcctggctgcgcgagaacggttatcaaccggtcagtattgctcaaattcgtgaagcacatcgaggaggaaaaccgctaccggaaaaagctgtagtgctgacttttgatgacggctaccagagtttttatacccgcgtcttcccaattcttcaggccttccagtggcctgctgtatgggcccccgtcggcagttgggtcgatacgccagcggataaacaagtaaaatttggcgatgagttggtcgatcgagaatattttgccacgtggcaacaagtgcgagaagttgcgcgttcccggctcgttgagctcgcttctcatacatggaattctcactacggtattcaggctaatgccaccggcagcttattgcctgtatatgtaaatcgtgcatattttactgaccacgcacggtatgaaaccgcagcagaataccgggaaagaattcgtctggatgctgtaaaaatgacggaatacctgcgtacaaaggttgaggtaaatccacacgtttttgtttggccttatggcgaagcgaatggcatagcgatagaggaattaaaaaaactcggttatgacatgttcttcacccttgaatcaggtttggcaaatgcgtcgcaattggattccattccgcgggtattaatcgccaataatccctcattaaaagagtttgcccagcaaattattaccgtacaggaaaaatcaccacaacggataatgcatatcgatcttgattacgtttatgacgaaaacctccagcaaatggatcgcaatattgatgtgctaattcagcgggtgaaagatatgcaaatatcaaccgtgtatttgcaggcatttgctgatcccgatggtgatgggctggtcaaagaggtctggtttccaaatcgtttgctaccaatgaaagcagatatttttagtcgggttgcctggcaattacgtacccgctcaggtgtaaacatctatgcgtggatgccggtattaagctgggatttagatcccacattaacgcgagtaaaatacttaccaacaggggagaaaaaagcacaaattcatcctgaacaatatcaccgtctctctcctttcgatgacagagtcagagcacaagttggcatgttatatgaagatcttgccggacatgctgcttttgatggcatattgttccacgatgatgctttgctttcagattatgaagatgccagtgcaccggctatcacggcttatcagcaagcaggctttagcgggagtctgagcgaaattcgacaaaacccggagcaatttaaacagtgggcccgctttaaaagtcgtgcgttaactgacttcactttagaacttagtgcgcgcgtaaaagccattcgcggtccacatattaaaactgcacgaaatatttttgcacttccggtaatacaacctgaaagtgaagcctggtttgcacagaattatgctgatttcctaaaaagctatgactggaccgctattatggctatgccttatctggaaggtgtcgcagaaaaatcggctgaccaatggttaatacaattgaccaatcaaattaaaaacatccctcaggctaaagacaaatctattttagaattacaggcacaaaactggcagaaaaatggtcagcatcaggctatttcttcgcaacaactcgctcactggatgagcctattacaactgaatggagtgaaaaactatggttattatcccgacaattttctgcataaccaacctgaaatagaccttattcgtcctgagttttcaacagcctggtatccgaaaaatgattaa

SEQ ID NO: 6672 - DNA, 498 bp, Escherichia coli
atggctttaaatcttcaagacaaacaagcgattgttgctgaagtcagcgaagtagccaaaggcgcgctgtctgcagtagttgcggattcccgtggcgtaactgtagataaaatgactgaactgcgtaaagcaggtcgcgaagctggcgtatacatgcgtgttgttcgtaacaccctgctgcgccgtgctgttgaaggtactccgttcgagtgcctgaaagacgcgtttgttggtccgaccctgattgcatactctatggaacacccgggcgctgctgctcgtctgttcaaagagttcgcgaaagcgaatgcaaaatttgaggtcaaagccgctgcctttgaaggtgagctgatcccggcgtctcagatcgaccgcctggcaactctgccgacctacgaagaagcaattgcacgcctgatggcaaccatgaaagaagcttcggctggcaaactggttcgtactctggctgctgtacgcgatgcgaaagaagctgcttaa

SEQ ID NO: 6673 - DNA, 2349 bp, Escherichia coli
atgctgagtttatacgaaaagataaagataaggctgataattttatttttattggcagcactgtcatttattggtctttttttcatcattaactatcaactggtatcggagcgcgcggtaaaacgtgccgatagccgctttgaacttattcagaaaaacgttggctatttctttaaagatattgaacgttcggccctgacattaaaggactcactgtatttattaaaaaatacagaggagattcaacgcgccgtgattcttaaaatggaaatgatgccatttttagactcggtgggactggtacttgatgataataaatattatcttttttcgcggagggcgaatgataaaatcgttgtttatcatcaggaacaagtaaatggaccgcttgtcgacgagtcagggcgggttatttttgccgattttaacccatcgaaacgaccgtggtcggtggcttcagatgactctaacaacagctggaatccggcatacaattgctttgatcgtccgggtaaaaaatgtatctcttttacgctacacatcaacggcaaagatcacgatttgttagcggtggataaaattcatgtcgatttaaactggcgatatctgaacgagtatcttgatcaaatcagcgctaatgatgaagttctatttttgaaacaaggccatgagatcattgccaagaatcaactcgctcgtgaaaaactgattatttataatagcgaaggtaattataatattattgattctgtcgatactgaatatatcgaaaaaacatcagcggtgccaaacaacgcattattcgaaatctatttttattatcctggcggtaatttattgaacgcatcagataaacttttttatctgccgtttgcgttcattattatcgtattgctggtggtttatttaatgaccactcgtgtgttccgtcggcaattttctgaaatgacagagctggttaatacgctggcgtttttgcctgactcaacggatcaaatcgaggctctgaaaattcgtgaaggcgatgcgaaagagattatcagcatcaaaaattcgatcgcggaaatgaaagatgccgaaattgaacggtcaaataaattgctctcactgatctcttacgatcaggaaagtggttttattaaaaatatggcgattattgagtctaacaataatcagtatctggctgtggggatcatcaaactgtgtggtctggaagccgtggaagcggtgtttggtgttgatgagcgcaataaaatcgtcaggaaattgtgtcagcgaattgccgagaaatatgcgcaatgctgcgatatcgtgacattcaatgccgatctctatttacttctgtgtcgggaaaatgtacagacatttacccgtaaaatagcgatggtaaacgattttgacagcagctttggctaccgcaatctgcgcatccataagtctgccatttgtgaacctttgcagggggaaaacgcctggagttacgcagaaaaactgaaactggcgatttccagtatccgtgaccatatgttctcagagtttattttctgtgatgacgcgaaactcaacgaaatagaagagaatatctggattgcgcgtaatattcgccatgcaatggaaattggcgaactattcctcgtctatcaaccgatcgttgatattaacacccgcgccattctgggcgcggaggcgttgtgccgttgggtgtctgcggagcgggggatcatttcaccgctgaagttcattaccattgctgaagatatcgggtttatcaatgagctgggttatcagattattaaaacggcaatgggtgaattcagacattttagtcagcgtgcgtcgctgaaggatgatttcttactgcatattaatgtttcgccctggcagttaaacgaaccacactttcatgagcgttttaccaccatcatgaaagaaaatggcctgaaggcgaacagcctctgtgttgagatcactgaaaccgtgatcgagcgaattaatgaacatttttatctcaatattgaacaactgcgtaaacaaggggtacggatatcgattgatgactttggcaccggtttgtcaaacctgaaacgtttttatgaaattaatccagacagcataaaggtggactcgcaattcaccggcgatattttcggtactgcgggaaaaattgtgcgcattattttcgacctggcacgctataaccggatcccggtgattgcggaaggcgtagagagcgaagacgttgcgcgcgaattaatcaaattaggatgtgttcaggctcaggggtatctgtaccagaaacccatgccattctccgcctgggataaaagtggaaaattagtaaaagagtag

SEQ ID NO: 6674 - DNA, 1329 bp, Escherichia coli
atgtccagaatcaataagttcgtacttacagtcagtctgctgatttttatcatgatttcagcagttgcctgcgggatctacactcaaatggtaaaggaacgggtgtatagcctgaaacagtccgttattgatactgcttttgcggtggcaaatattgctgaatatcggcgtagcgtggcaattgatcttatcaacacgctaaatcccacggaggaacagctgttggttggtttgcgcacagcttacgccgactcggtttccccctcttatttgtacgatgtcggtccttatctgatttccagtgacgaatgtattcaggtaaaggagttcgagaaaaattattgtgcagatattatgcaggttgtgaagtatcgacatgtcaaaaatacagggtttatctcttttgacggtaaaaccttcgtctattacctctatccggtaactcacaatcgtagtctgatatttttgcttggtctggagcgtttttctttactgtcaaaatcgctggcgatggacagcgagaacctgatgttctctctatttaagaacggtaaaccggtgaccggtgatgaatataatgctaaaaacgccatcttcaccgtttcggaagcgatggagcacttcgcctatttgccgaccggattgtatgtatttgcgtataaaaaagatgtttatttgcgggtttgtacattgattattttctttgccgcattggtggcagtgatatcgggtgccagttgcctctatctggtacgcagagtgattaatcgtggtattgtggagaaagaagccatcattaataaccattttgaacgcgtactggatggcgggcttttcttttcggctgccgatgtcaaaaaactctacagtatgtataactcggcgttcctggacgacctgaccaaagcaatgggcagaaaatcctttgacgaagatttaaaagcgctgccggaaaaaggcggttatttgtgcctgtttgacgtcgataaattcaaaaacattaacgacaccttcggtcatttgctgggcgatgaagtgttgatgaaagtggtgaaaatccttaaatcacagatcccggtagataaaggtaaagtctaccgcttcggcggtgacgaatttgcggtgatttatacgggtggaacgctggaagagttgctatcgattctaaaagaaatcgttcatttccaggtgggaagcattaatttaagtaccagtatcggtgtagcacattcaaatgaatgtcctaccgtcgaacgcttgaaaatgctggcggatgagcggctgtataagagtaagaaaaacggcagggcacagattagctggcagtaa

SEQ ID NO: 6675 - DNA, 1647 bp, Escherichia coli
atggcagctaaagacgtaaaattcggtaacgacgctcgtgtgaaaatgctgcgcggcgtaaacgtactggcagatgcagtgaaagttaccctcggtccaaaaggccgtaacgtagttctggataaatctttcggtgcaccgaccatcaccaaagatggtgtttccgttgctcgtgaaatcgaactggaagacaagttcgaaaatatgggtgcgcagatggtgaaagaagttgcctctaaagcaaacgacgctgcaggcgacggtaccaccactgcaaccgtactggctcaggctatcatcactgaaggtctgaaagctgttgctgcgggcatgaacccgatggacctgaaacgtggtatcgacaaagcggttaccgctgcagttgaagaactgaaagcgctgtccgtaccatgctctgactctaaagcgattgctcaggttggtaccatctccgctaactccgacgaaaccgtaggtaaactgatcgctgaagcgatggacaaagtcggtaaagaaggcgttatcaccgttgaagacggtaccggtctgcaggacgaactggacgtggttgaaggtatgcagttcgaccgtggctacctgtctccttacttcatcaacaagccggaaactggcgcagtagaactggaaagcccgttcatcctgctggctgacaagaaaatctccaacatccgcgaaatgctgccggttctggaagctgttgccaaagcaggcaaaccgctgctgatcatcgctgaagatgtagaaggcgaagcgctggcaactctggttgttaacaccatgcgtggcatcgtgaaagtcgctgcggttaaagcaccgggcttcggcgatcgtcgtaaagctatgctgcaggatatcgcaaccctgactggcggtaccgtgatctctgaagagatcggtatggagctggaaaaagcaaccctggaagacctgggtcaggctaaacgtgttgtgatcaacaaagacaccaccactatcatcgatggcgtgggtgaagaagctgcaatccagggccgtgttgctcagatccgtcagcagattgaagaagcaacttctgactacgaccgtgaaaaactgcaggaacgcgtagcgaaactggcaggcggcgttgcagttatcaaagtgggtgctgctaccgaagttgaaatgaaagagaaaaaagcacgcgttgaagatgccctgcacgcgacccgtgctgcggtagaagaaggcgtggttgctggtggtggtgttgcgctgatccgcgtagcgtctaaactggctgacctgcgtggtcagaacgaagaccagaacgtgggtatcaaagttgcactgcgtgcaatggaagctccgctgcgtcagatcgtattgaactgcggcgaagaaccgtctgttgttgctaacaccgttaaaggcggcgacggcaactacggttacaacgcagcaaccgaagaatacggcaacatgatcgacatgggtatcctggatccaaccaaagtaactcgttctgctctgcagtacgcagcttctgtggctggcctgatgatcaccaccgaatgcatggttaccgacctgccgaaaaacgatgcagctgacttaggcgctgctggcggtatgggcggcatgggtggcatgggcggcatgatgtaa

SEQ ID NO: 6676 - DNA, 336 bp, Escherichia coli
atggtaagccgatacgtacccgatatgggcgatctgatttgggttgattttgacccgacaaaaggtagcgagcaagctggacatcgtccagctgttgtcctgagtcctttcatgtacaacaacaaaacaggtatgtgtctgtgtgttccttgtacaacgcaatcaaaaggatatccgttcgaagttgttttatccggtcaggaacgtgatggcgtagcgttagctgatcaggtaaaaagtatcgcctggcgggcaagaggagcaacgaagaaaggaacagttgccccagaggaattacaactcattaaagccaaaattaacgtactgattgggtag

SEQ ID NO: 6677 - DNA, 1362 bp, Escherichia coli
atgtttaaaccggaactcctttccccggcgggaacgctgaaaaatatgcgttacgctttcgcttatggcgcagatgctgtttatgcgggccagccgcgttattccctgcgtgtgcgcaacaacgaattcaaccacgaaaatcttcagctcggcatcaatgaagcccacgcgctggggaaaaagttttatgtcgtggtcaacattgcaccgcacaacgccaagctgaaaacctttatccgtgacctgaaaccggtggtggaaatggggccggatgcgctgattatgtccgatccagggctgattatgctggtgcgtgagcacttccctgaaatgccgatccacctttcggtgcaggctaacgccgtgaactgggcgacggtgaaattctggcagcaaatgggcctgacccgcgtgatcctctctcgcgagctgtcgctggaagagattgaagagatccgcaatcaggtgccggatatggagatcgagatcttcgttcacggcgcgctgtgcatggcctactccggtcgctgcctgctctctggctatatcaacaagcgcgacccgaaccagggcacctgcaccaacgcctgccgctgggagtacaacgtccaggaagggaaagaagatgatgttggcaacatcgtacacaagtacgagccgattccggtgcaaaatgttgagccgacgctgggtatcggcgcaccaaccgacaaagtgtttatgatcgaagaggcccagcgtccgggcgagtatatgaccgcgtttgaagatgagcacggcacttacatcatgaactcgaaagatctgcgcgccatcgcccatgtagaacgcctgaccaaaatgggcgtgcattcgctgaaaatcgaaggtcgtaccaaatctttctactattgtgcacgcaccgcacaggtttaccgcaaagctatcgatgacgccgctgcgggaaaaccgttcgataccagcctgctggaaactctggaaggtctggcgcatcgtggctataccgaaggtttcctgcgtcgtcatactcacgacgattatcagaactacgaatacggttattcagtttctgaccgccagcagtttgttggtgagtttaccggtgagcgcaagggggacctcgcggcggtagcggtgaaaaataaattctccgttggcgacagccttgagctgatgacgccgcaaggcaacattaattttacccttgagcacatggaaaacgccaaaggcgaagctatgccgatagcaccaggcgatggttatactgtgtggctcccggtcccgcaggatcttgagctcaattacgcgctgctgatgcgtaatttctccggggaaaccacgcgtaatccccacggtaagtga

SEQ ID NO: 6678 - DNA, 1116 bp, Escherichia coli
atggttacgccagtaagcatcagcaattacatatctcttcctgatgattttcccgtacgtaatattgcaccgcaggtaaaagaagttttaaaggattttattgatgcacttagtacaataatatgtaatgaagagtggcgcacgtctttaaacatcaactcagccacaaaaaagatatttaataaccttgacaacttatcatatattcagaggacttcttttcggggtaacgacacgctatacaatgaaaaggttcagtttaaactcacttatcccgccaggaatggaagacacaaagaaaatattgaatttcaggtagtaataaatttaagccctatttatttagataattttcgccatgatggagaaattaatattttttgcgctcccaacccaaagcctgtcactatggggcgcgtatttcagaccggcgtcgagcgtgtactctttctgtttctgaatgattttattgaacaatttccaatgatcaaccctggtgttcccatcaaaagagcgcatacaccacatattgaacccctgccttcggatcaccataccgctgcagattacttacgccagtttgatttgcttgtcctgaattttatctctcgcggtaattttgtcatactcccccgattatggaataactctgaggttcacagatggttcgtcaataaagatcctaacttgatcaccgccattctcgacataacggacagcgaattaaaagaggatttgttgcaaagcctgatggattcattaggttctaacaaacatgtactacccgaagtctgcatctgctttttatcccttttagcagaacaagaatctcctcattttcagaacttgtttttatttttcgccaatatgttattgcactatcaccaatttatgaatcccaatgaaagtgatttgaatgacgtgttgatgccagcatcattaagtgatgataaaattatcaaacatatggcgcgcaggaccctcaaactgtttgtaaaaaatgaaacaccgccaaaagttactcacgaagacctggtgaaaaacaggcctcgctcccctgtcagaccacctatacccgcaaccgccaaaacgccagacctccctgaacgtcattaa

SEQ ID NO: 6679 - DNA, 270 bp, Escherichia coli
ttgtttttatttttcgccaatatgttgttacactatcaccaatttatgaatcccaatgaaagtgatttgaatgacgtgttgatgccagcatcattaagtgatgataaaattatcaaacatatggcgcgtaagaccctcaaactgtttgtaaaaaatgaaacaccgccaaaagttactcatgaagatctggtgaaaaacaggcctcgctcccctgtcagaccgcctatacccgcaacctccaaaacgccagacattcctgatcgtcattaa

SEQ ID NO: 6680 - DNA, 1074 bp, Escherichia coli
atgaaacaaaaagagctatggattaaccagatcaaagggttatgtatttgtctggtggtgatttatcactcggtcattaccttttatccgcatctgaccacttttcagcatccgttatcggaagtcctgagcaaatgctggatctatttcaatctttaccttgccccctttcgtatgccggtttttttctttatatccggctatttgattcgccgctatatcgacagcgtaccgtggggaaattgtctcgataaacggatctggaacatcttctgggtgctggcgctttggggcgtggtgcagtggctggcgttaagtgcgctgaaccagtggctggcacctgagcgcgatttaagcaatgcctccaatgccgcttatgccgattccaccggtgagttcctgcacgggatgatcaccgccagcaccagcttgtggtatctgtatgcgttaattgtctatttcgtggtatgtaaaatttttagccgtctggcgctgccactattcgccttgtttgtactgctgagtgtggcggttaatttcgttcccacgccgtggtggggaatgaacagtgtgatccgcaatttgccttattacagccttggcgcatggtttggcgcaacaataatgacctgtgttaaagaggtgccgttgcgccgccatctgctgatggcttctttgcttaccgttctggcggtcggtgcctggttgtttactatctcgctgctgttgtcgctggtatcgattgtggtgatcatgaagctgttttatcaatacgagcaacgattcggtatgcgctccaccagcctgctgaatgtgattggctccaacaccattgctatctacaccacccatcgcattctggttgaaatattcagcttaactctgcttgcgcaaatgaacgcagcacgctggtcgccgcaagtcgaactgacactcctgctggtttatccctttgtcagtttgttcatctgtactgttgcgggcttgctggtaagaaaactttcacagcgtgcattcagcgatctgttgttctccccgccttcactgcccgctgccgtcagttactcccgctaa

SEQ ID NO: 6681 - DNA, 1239 bp, Escherichia coli
gtgaagatttatctggtcggtggtgctgttcgggatgcattgttagggctaccggtcaaagacagagattgggtggtggtcggcagtacgccacaggagatgctcgacgcgggctaccagcaggtaggccgcgattttcctgtgtttctgcatccgcaaacgcatgaagagtatgcgctggcacgtaccgaacggaaatccggttccggttacaccggttttacttgctatgccgcaccggatgtcacgctggaagatgatcttaagcgtcgcgatctgaccattaatgcgctggcccaggacgataacggcgagattatcgacccgtacaacggtctgggcgatctgcaaaatcgtctgttgcgccatgtttcccccgcttttggcgaagatccgttacgcgtattgcgcgtggcgcgttttgctgcgcgttatgcccacctcggttttcgtattgccgatgaaactctggcgttgatgcgcgagatgacccatgcgggtgaactggaacacctgacgcctgaacgggtatggaaagagacggaaagcgccctcaccacccgcaatccacaggtgttcttccaggtactgcgcgattgcggcgcactgcgcgttttattcccggaaattgacgcactgtttggcgttccggcccctgccaagtggcatccggaaatcgatacgggtattcataccttaatgacgctctcaatggcggcgatgctgagtccgcaggtcgatgtccgtttcgcaactttatgccacgatctcggtaaagggctgacgccgccagaactctggccgcgtcatcatggtcatggcccggcgggtgttaagttagtggaacaactatgccagcgtctgcgcgtgccaaatgaaattcgcgatttagccagactggtggctgagtttcacgatctcatccacaccttcccaatgctgaacccaaaaaccatcgtcaaattatttgattccatcgatgcctggcgtaaaccgcagcgtgtcgagcaactggcgctgaccagcgaggctgacgtgcgcggcagaaccggttttgaatcagcggactacccgcaaggccgctggttgcgcgaagcctgggaagtggcgcagtcagtgccgacaaaagccgtcgttgaagcgggatttaaaggtgtggagattcgcgaggagctgacccgacggcggattgcggcggtagccagctggaaggaacaacgttgcccaaagcctgaatga

SEQ ID NO: 6682 - DNA, 816 bp, Escherichia coli
atgagcgtaaaagttatcgtcacagacatggacggtacttttcttaacgacgccaaaacgtacaaccaaccacgttttatggcgcaatatcaggaactgaaaaagcgcggcattaagttcgttgttgccagcggtaatcagtattaccagcttatttcattctttcctgagctaaaggatgagatctcttttgtcgcggaaaacggcgcactggtttacgaacatggcaagcagttgttccacggcgaactgacccgacatgaatcgcggattgttattggcgagttgctaaaagataagcaactcaattttgtcgcctgcggtctgcaaagtgcatatgtcagcgaaaatgcccccgaagcatttgtcgcactgatggcaaaacactaccatcgcctgaaacctgtaaaagattatcaggagattgacgacgtactgttcaagttttcgctcaacctgccggatgaacaaatcccgttagtgatcgacaaactgcacgtagcgctcgatggcattatgaaacccgttaccagtggttttggctttatcgacctgattattcccggtctacataaagcaaacggtatttcgcggttactgaaacgctgggatctgtcaccgcaaaatgtggtagcgattggcgacagcggtaacgatgcggagatgctgaaaatggcgcgttattcctttgcgatgggcaatgctgcggaaaacattaaacaaatcgcccgttacgctaccgatgataataatcatgaaggcgcgctgaatgtgattcaggcggtgctggataacacatccccttttaacagctga

SEQ ID NO: 6683 - DNA, 534 bp, Escherichia coli
atgaacacaaaaatcagatacggcctgtcggctgccgttctggcgctgattggtgctggcgcatctgctcctcagatacttgaccagtttctggacgaaaaagaaggtaaccacacaatggcataccgcgatggttctggcatatggaccatctgtcggggtgccacagtggtggatggaaaaaccgtttttcccaatatgaaactgtcgaaggaaaaatgcgaccaggtcaacgccattgagcgtgataaggcgctggcatgggtggagcgcaatattaaagtaccactgaccgaaccacaaaaagcgggtatcgcgtcattttgtccctataacattggccccggtaagtgtttcccgtcgacgttttataagcggctgaatgctggtgatcgtaaaggtgcatgcgaagcgattcgctggtggattaaggatggcggacgcgattgccgcattcgttcaaataactgttacggtcaggttattcgtcgtgaccaggagagcgcattaacctgctgggggatagaacagtga

SEQ ID NO: 6684 - DNA, 312 bp, Escherichia coli
atgactcaagactatgaactggttgtgaaaggagtccgtaattttgagaataaagttacggtaactgtagccttacaggacaaagaacgctttgacggtgaaatttttgacctggatgtcgccatggaccgtgttgaaggagctgcgctggagttttatgaggcagcagccagaaggagcgtccggcaagtcttcctggaagtagcagaaaaattgtcagaaaaagttgagtcttatctgcagcatcagtactcctttaagattgaaaatcctgccaataagcacgagcgtcctcatcataaatatctatga

SEQ ID NO: 6685 - DNA, 1038 bp, Escherichia coli
atgcacggtaattctgaaatgcaaaaaatcaaccaaaccagcgcaatgcctgaaaaaactgacgttcactggagtggtcggtttagcgttgcaccaatgctcgactggacggacagacattgccgctatttcttgcgtctgctttcccgcaatacgttgctgtataccgaaatggtgaccacaggggcgattattcacggtaaaggtgattatctggcgtacagtgaagaagaacatccggtagcgttgcaactgggcggtagcgatccggcggcgctggcgcagtgtgcaaagctggcagaagcgcgcggatatgatgagatcaacctgaatgtcggctgcccgtctgaccgggtgcagaacggcatgtttggtgcgtgtctgatgggtaatgcgcagctggttgccgactgcgtgaaagcgatgcgcgatgtggtgtcgattccggtgacggtgaaaacgcgtattggcatcgacgaccaggacagctatgaatttctctgcgatttcatcaataccgtttccggcaaaggcgagtgtgagatgttcatcatccacgcacgtaaagcctggctttcggggttaagcccgaaagaaaaccgtgaaatcccgccgctcgattatccgcgtgtgtatcaactgaagcgtgactttccgcatctgacaatgtcgattaacggtggtatcaagtcgctggaagaggccaaagcacacctgcaacatatggatggcgtgatggtcgggcgcgaggcgtatcagaatccgggtattctggcggcggtagaccgggagatctttggttcctcggataccgatgccgatccggtggcggtagtgcgcgccatgtatccgtacattgagcgtgaactcagccaggggacgtatctcggccatattacccggcatatgttgggcttgttccagggtattcctggcgcgcggcagtggcggcgttatttaagtgaaaatgcccataaagcgggtgcagacattaatgtgctggaacacgcgctcaaactggtggcggataagcgttaa

SEQ ID NO: 6686 - DNA, 396 bp, Escherichia coli
atgcgtcattacgaaatcgtttttatggtccatcctgaccagagcgaacaggttccgggcatgatcgagcgctacactgctgccatcactggtgcagaaggcaagatccaccgtctggaagactggggccgccgtcagctggcttacccgatcaacaaactgcacaaagcacactacgttctgatgaatgttgaagctccgcaggaagtgatcgatgagctggaaactaccttccgcttcaacgatgccgttatccgcagcatggttatgcgtaccaagcacgctgttaccgaagcatctccgatggttaaagcgaaagacgagcgccgtgagcgtcgcgatgatttcgcaaacgaaaccgctgatgatgctgaagctggggattctgaagagtaa

SEQ ID NO: 6687 - DNA, 981 bp, Escherichia coli
atgctgacacttgcccgccaacaacagcgacaaaatattcgctggttattatgcctgtcagttttgatgctgctggcgcttctcttaagcctttgcgccggtgaacaatggatctcgccaggtgactggtttactcctcgtggcgaactgttcgtctggcaaattcgcctgccacgtacgctggctgtattgctggttggtgcggcgctggctatatccggcgctgtaatgcaggcgttgtttgaaaatcctctggcagaacctggactacttggcgtctctaacggcgcaggcgtggggcttatcgccgcggtattgcttgggcaagggcaactccccaactgggcgctagggctgtgtgcgattgctggcgcgcttatcatcactttaatactcttacgtttcgcccgtcgtcatctttcgaccagtcggttattgctggctggcgttgcattagggattatctgtagcgcactaatgacgtgggctatctacttttccacctcagttgatttgcgtcagctgatgtactggatgatgggcggttttggcggcgtagactggcggcaaagctggctgatgctggcattgatccccgtgttgttgtggatctgttgtcagtccaggccgatgaatatgttagcacttggcgagatctcggcgcggcaactgggtttacccctgtggttctggcgcaatgtgctggtggcagcgaccggctggatggttggcgtcagtgtggcgctggcgggtgctatcggctttattggtctggtgatcccccatattctccggttgtgtggtttaaccgatcatcgcgtattacttcccggctgcgcgctggcaggggcgagcgcattgctgctggccgatattgtagcgcgcctggcattagctgccgcagagctgcctattggcgtggtcaccgcaacgttaggtgcgccggtgtttatctggttattgttaaaagcaggacgttag

SEQ ID NO: 6688 - DNA, 1332 bp, Escherichia coli
atgagtacttcagatagcattgtatccagccagacaaaacaatcgtcctggcgtaaatcagataccacatggacgttaggcttgtttggtacggcaatcggcgccggggtgctgttcttccctatccgcgcaggttttggcggactgatcccgattcttctgatgttggtattggcataccccatcgcgttttattgccaccgggcgctggcgcgtctgtgtctttctggctctaacccttccggcaacattacggaaacggtggaagagcattttggtaaaactggcggcgtggttatcacgttcctgtacttcttcgcgatttgcccactgctgtggatttatggcgttactattaccaatacctttatgacgttctgggaaaaccagctcggctttgcaccgctgaatcgcggctttgtggcgctgttcctgttgctgctgatggctttcgtcatctggtttggtaaggatctgatggttaaagtgatgagctacctggtatggccgtttatcgccagcctggtgctgatttctttgtcgctgatcccttactggaactctgcagttatcgaccaggttgacctcggttcgctgtcgttaaccggtcatgacggtatcctgatcactgtctggctggggatttccatcatggttttctcctttaacttctcgccaatcgtctcttccttcgtggtttctaagcgtgaagagtatgagaaagacttcggtcgcgacttcaccgaacgtaaatgttcccaaatcatttctcgtgccagcatgctgatggttgcagtggtgatgttctttgcctttagctgcctgtttactctgtctccggccaacatggcggaagccaaagcgcagaatattccagtgctttcttatctggctaaccactttgcgtccatgaccggtaccaaaacaacgttcgcgattacactggaatatgcggcttccatcatcgcactcgtggctatcttcaaatctttcttcggtcactatctgggaacgctggaaggtctgaatggcctggtcctgaagtttggttataaaggcgacaaaactaaagtgtcgctgggtaaactgaacactatcagcatgatcttcatcatgggctccacctgggttgttgcctacgccaacccgaacatccttgacctgattgaagccatgggcgcaccgattatcgcatccctgctgtgcctgttgccgatgtatgccatccgtaaagcgccgtctctggcgaaataccgtggtcgtctggataacgtgtttgttaccgtgattggtctgctgaccatcctgaacatcgtatacaaactgttttaa

SEQ ID NO: 6689 - DNA, 1362 bp, Escherichia coli
atgaagacgttatctcccgctgtgattactttactctggcgtcaggacgccgctgaattttatttctcccgcttaagccacctgccgtgggcgatgcttttacactccggctatgccgatcatccgtatagccgctttgatattgtggtcgccgagccgatttgcactttaaccactttcggtaaagaaaccgttgttagtgaaagcgaaaaacgcacaacgaccactgatgacccgctacaggtgctccagcaggtgctggatcgcgcagacattcgcccaacgcataacgaagatttgccatttcagggcggcgcactggggttgtttggctacgatctgggccgccgttttgagtcactgccagaaattgcggaacaagatatcgttctgccggatatggcagtgggtatctacgattgggcgctcattgtcgaccaccagcgtcatacagtttctttgctgagtcataatgatgtcaatgcccgtcgggcctggctggaaagccagcaattctcgccgcaggaagatttcacgctcacttccgactggcaatccaatatgacccgcgagcagtacggcgaaaaatttcgccaggtacaggaatatctgcacagcggtgattgctatcaggtgaatctcgcccaacgttttcatgcgacctattctggcgatgaatggcaggcattccttcagcttaatcaggccaaccgcgcgccatttagcgcttttttacgtcttgaacagggtgcaattttaagcctttcgccagagcggtttattctttgtgataatagtgaaatccagacccgcccgattaaaggcacgctaccacgcctgcccgatcctcaggaagatagcaaacaagcagtaaaactggcgaactcagcgaaagatcgtgccgaaaatctgatgattgtcgatttaatgcgtaatgatatcggtcgtgttgccgtagcaggttcggtaaaagtaccagagctgttcgtggtggaacccttccctgccgtgcatcatctggtcagcaccataacggcgcaactaccagaacagttacacgccagcgatctgctgcgcgcagcttttcctggtggctcaataaccggggctccgaaagtacgggctatggaaattatcgacgaactggaaccgcagcgacgcaatgcctggtgcggcagcattggctatttgagcttttgcggcaacatggataccagtattactatccgcacgctgactgccattaacggacaaattttctgctctgcgggcggtggaattgtcgccgatagccaggaagaagcggaatatcaggaaacttttgataaagttaatcgtatcctgaagcaactggagaagtaa

SEQ ID NO: 6690 - DNA, 813 bp, Escherichia coli
atgatcattacacaagcagacctgcgagaatggcgtatcggagcggtgatgtatcgctggttcctgcgccatttcccacgcggcggtagttatgccgatattcatcatgcactgattgaggaaggatatacggactgggcggagagtctggttgagtatgcgtggaaaaaatggctggcggatgaaaacttcgcgcatcaggaagtttcctctatgcaaaaactggccacagaccccggagagagaccattttgcagtcagtttgcccgcagcgacgatcatgctcgcatcggctgttgtgaggataacgccagaatcgcaaccgctgggtatgccgcgcaaattgccagtatgggttatagcgtgcggattggaagtgtcggctttaacagtcacattggcagctccggtgaacgcgcacgggttgctgtaaccggtaattcttcgcggataagcagcgctggagatagcagtcggattgcgaataccggaatgcgagtacgcgtttgtacattgggtgaacggtgtcatgtcgccagtaatggtgacctggtgcaaatcgccagctttggcgcaaacgccagaattgccaacagcggcgacaatgtacacatcattgccagcggtgaaaattcaacggtagtgagcacgggcgtggtcgactcaattattctcgggccaggaggaagcgccgcactggcatatcatgacggcgaaagagttcgcttcgccgtcgccattgaaggtgaaaacaatattcgagccggagtccgctatcgtcttaatgaacagcatcagtttgttgagtgctga

SEQ ID NO: 6691 - DNA, 2004 bp, Escherichia coli
gtggctaaaatagccgccatttttcagctactggataagaatgtgaccgtatcttctcatcgacttgaactgttaagcccggcacgcgatgccgccattgcccgcgaagctattttgcacggtgccgatgctgtttatatcggcggccctggttttggtgcccgtcataatgccagtaatagcttgaaagatattgccgagctggtgccgtttgcccatcgttatggtgcaaaaattttcgtcacgcttaacaccattttgcatgatgatgagctggaacccgcgcaacggctgattactgacctctaccagaccggtgtcgatgcgctgattgttcaggatatggggattctggaacttgatattccgccgattgaactgcacgccagtacgcagtgcgacattcgtacagttgaaaaagcgaagttcctctctgatgttggcttcacgcagattgtgctggcgcgagagctgaatcttgatcagatccgcgcgattcaccaggctacggacgcgaccattgaattctttattcatggggcactgtgcgtggcctattcgggtcagtgctacatttctcatgcgcaaacagggcgtagcgccaaccgtggcgattgctcgcaggcgtgccgtttgccatacacattgaaagacgatcaggggcgggtggtttcctatgaaaaacatctgctgtcgatgaaagataacgatcagactgccaacctcggcgcgctgattgatgctggtgtacgctccttcaagattgaagggcgttacaaagatatgagctacgtgaagaatatcaccgcccattatcgccagatgcttgatgccattattgaagaacgtggcgatctggcgcgcgcttcatcaggtcgtactgaacatttctttgttccatcgacggaaaagactttccaccgtggtagcacagattattttgtgaatgcccgtaaaggcgatattggcgcgttcgattcgccgaaatttatcggcctgccggtaggcgaagtagtgaaagtggcgaaagatcatctcgatgttgccgttaccgagccactggcaaatggcgatggcctgaacgtgttgattaaacgtgaagtcgtcggttttcgtgccaatacggtcgagaaaaccggagaaaatcagtaccgcgtctggcccaatgaaatgccagcagatttgcacaaaattcgtccacatcacccactaaaccgtaatcttgatcataactggcagcaggcactgacaaaaacctccagcgaacgtcgggtggcggtagacattgaactgggcggctggcaggaacaactgattctgaccctcaccagtgaagagggtgtcagcatcacgcatacgctggacgggcagttcgacgaagccaataacgccgaaaaagcaatgaacaatctgaaggatggtctggcaaaactggggcaaaccctctattacgcccgcgatgtgcaaattaatttgccgggggcgctgtttgtaccaaacagtctgttaaaccagttccgccgtgaagctgctgacatgctggatgctgcgcgtcttgccagttaccagcgcggcagccgtaaaccggttgctgatcctgcgccggtttatccgcaaacgcatctgagtttcctcgcgaacgtatacaaccagaaagcgcgtgaattttatcatcgctatggtgtgcagctgattgacgcggcgtatgaagcacatgaagagaagggcgaagtcccggtgatgatcaccaagcattgtctgcgctttgcctttaatctgtgcccgaaacaggcgaaaggcaatatcaaaagctggaaggcgacgccaatgcaactggttaacggcgatgaagtattaacgctaaagtttgattgccgcccatgcgagatgcacgtcattggcaaaatcaaaaatcacatactgaaaatgccgttaccgggaagcgtagtggcatccgtaagtccggatgagctgctgaaaacattgccgaagcgaaaagggtaa

SEQ ID NO: 6692 - DNA, 1983 bp, Escherichia coli
gtgagtaaacgaattgcgcttttcccggcgttattgctggcgctgttagtgattgtcgctacggcgctcacctggatgaacttctcgcaggcgctgccgcgtagccagtgggcgcaggctgcctggtcgccggatattgacgtcatcgagcagatgatttttcactacagcttgttgccgcgtctggcgatttcgctgctggtgggcgcgggtctggggctggtgggcgtgctgtttcagcaagtgctgcgtaacccgctggcggagccgacgacgcttggcgttgctacaggcgcgcaactggggattaccgtcactacgctctgggcgatccctggtgcgatggcgagccagtttgctgcgcaggcaggggcttgtgttgttggcttaattgtctttggcgtcgcgtgggggaaacggctgtcgccggtaacgctgattctcgcggggttggtagtgagcctttattgcggcgcaatcaatcagttactggttatcttccatcatgaccaactgcaaagcatgtttctgtggagcactggaacgctgacgcaaaccgactggggcggcgttgagcgtttatggccgcagctgctgggcggtgtgatgctgacgttgctgctacttcgtccgttaaccctgatggggcttgatgatggcgtggcgcgcaatctcgggctggccttgtcgcttgcgcgtctggcagcgctgtcgctggcgattgtcatcagtgcgctgctggtgaacgctgtggggattatcggctttatcgggttgttcgcgccgctgctggcaaaaatgctgggggcgcggcgtctgctgccacgactgatgctggcgtcgttgattggtgcgctgatcctctggctttccgatcaaatcatcctctggctgactcgcgtgtggatggaagtgtccaccggttcggtcactgcgttgatcggtgcgccgctgctactgtggctgttgccgcgtttacgcagcattagcgcgccggatatgaaggtcaacgatcgtgtcgcggctgaacgccaacatgtgctggcgtttgccctcgcgggcggcgtgctgctgttgatggctgtggtggtggcgctgtcgtttggtcgtgatgcgcacggctggacgtgggcgagcggggcgttgctcgaggatttaatgccctggcgctggccgcgaattatggcggcgctgtttgcgggcgtcatgctggcggtggcgggctgtattattcagcgactgaccggaaacccgatggcaagcccggaagtgctggggattagctccggcgcggcgtttggcgtggtgttgatgctgtttctggtgccgggtaatgcctttggctggctgttacctgcaggcagtctcggcgcggcggtgacgctgttgatcattatgatcgccgccggccgcggtggattttccccacaccgtatgttactggcggggatggcgttaagcaccgcgttcaccatgcttttgatgatgttgcaggcaagtggtgacccgcgaatggcgcaagtgctgacctggatttccggttcgacctacaacgcgaccgatgcgcaggtctggcgcaccggaattgtgatggtgattttgctggcgattaccccgctgtgccgccgctggctgaccattttaccgctgggtggtgataccgcccgagccgtaggaatggcgctgacgccgacgcgaattgcgctgctgctgttagcggcttgcctgacggcgaccgcgacgatgactattggaccgttgagttttgttggtttaatggcaccgcatattgcgcggatgatgggctttcgacggacgatgccacacatcgtaatttcggcgctggtgggtggtttactgctggtgttcgctgactggtgtgggcggatggtgctgtttccattccagatcccggcggggctgctgtcaacctttatcggcgcgccatattttatctatttgttgagaaagcagagccgttaa

SEQ ID NO: 6693 - DNA, 765 bp, Escherichia coli
atggcctacagcaaaatccgccaaccaaaactctccgatgtgattgagcagcaactggagtttttgatcctcgaaggcactctccgcccgggcgaaaaactcccaccggaacgcgaactggcaaaacagtttgacgtctcccgtccctccttgcgtgaggcgattcaacgtctcgaagcgaagggcttgttgcttcgtcgccagggtggcggcacttttgtccagagcagcctatggcaaagcttcagcgatccgctggtggagctgctctccgaccatcctgagtcacagtatgacttgctcgaaacacgacacgccctggaaggtatcgccgcttattacgccgcgctgcgtagtaccgatgaagacaaggaacgcatccgtgaactccaccacgccatagagctggcgcagcagtctggcgatctggacgcggaatcaaacgccgtactccagtatcagattgccgtcaccgaagcggcccacaatgtggttctgcttcatctgctaaggtgtatggagccgatgttggcccagaatgtccgccagaacttcgaattgctctattcgcgtcgcgagatgctgccgctggtgagtagtcaccgcacccgcatatttgaagcgattatggccggtaagccggaagaagcgcgcgaagcatcgcatcgccatctggcctttatcgaagaaattttgctcgacagaagtcgtgaagagagccgccgtgagcgttctctgcgtcgtctggagcaacgaaagaattag

SEQ ID NO: 6694 - DNA, 2262 bp, Escherichia coli
atgtcgcaacataacgaaaagaacccacatcagcaccagtcaccactacacgattccagcgaagcgaaaccggggatggactcactggcacctgaggacggctctcatcgtccagcggctgaaccaacaccgccaggtgcacaacctaccgccccagggagcctgaaagcccctgatacgcgtaacgaaaaacttaattctctggaagacgtacgcaaaggcagtgaaaattatgcgctgaccactaatcagggcgtgcgcatcgccgacgatcaaaactcactgcgtgccggtagccgtggtccaacgctgctggaagattttattctgcgcgagaaaatcacccactttgaccatgagcgcattccggaacgtattgttcatgcacgcggatcagccgctcacggttatttccagccatataaaagcttaagcgatattaccaaagcggatttcctctcagatccgaacaaaatcaccccagtatttgtacgtttctctaccgttcagggtggtgctggctctgctgataccgtgcgtgatatccgtggctttgccaccaagttctataccgaagagggtatttttgacttcgttggcaataacacgccaatcttctttatccaggatgcgcataaattccccgattttgttcatgcggtaaaaccagaaccgcactgggcaattccacaagggcaaagtgcccacgatactttctgggattatgtttctctgcaacctgaaactctgcacaacgtgatgtgggcgatgtcggatcgcggcatcccccgcagttaccgcaccatggaaggcttcggtattcacaccttccgcctgattaatgccgaagggaaggcaacgtttgtacgtttccactggaaaccactggcaggtaaagcctcactcgtttgggatgaagcacaaaaactcaccggacgtgacccggacttccaccgccgcgagttgtgggaagccattgaagcaggcgattttccggaatacgaactgggcttccagttgattcctgaagaagatgaattcaagttcgacttcgatcttctcgatccaaccaaacttatcccggaagaactggtgcccgttcagcgtgtcggcaaaatggtgctcaatcgcaacccggataacttctttgctgaaaacgaacaggcggctttccatcctgggcatatcgtgccgggactggacttcaccaacgatccgctgttgcagggacgtttgttctcctataccgatacacaaatcagtcgtcttggtgggccgaatttccatgagattccgattaaccgtccgacctgcccttaccataatttccagcgtgacggcatgcatcgcatggggatcgacactaacccggcgaattacgaaccgaactcgattaacgataactggccgcgcgaaacaccgccggggccgaaacgcggcggttttgaatcataccaggagcgcgtggaaggcaataaagttcgcgagcgcagcccatcgtttggcgaatattattcccatccgcgtctgttctggctaagtcagacgccatttgagcagcgccatattgtcgatggtttcagttttgagttaagcaaagtcgttcgtccgtatattcgtgagcgcgttgttgaccagctggcgcatattgatctcactctggcccaggcggtggcgaaaaatctcggtatcgaactgactgacgaccagctgaatatcaccccacctccggacgtcaacggtctgaaaaaggatccatccttaagtttgtacgccattcctgacggtgatgtgaaaggtcgcgtggtagcgattttacttaatgatgaagtgagatcggcagaccttctggccattctcaaggcgctgaaggccaaaggcgttcatgccaaactgctctactcccgaatgggtgaagtgactgcggatgacggtacggtgttgcctatagccgctacctttgccggtgcaccttcgctgacggtcgatgcggtcattgtcccttgcggcaatatcgcggatatcgctgacaacggcgatgccaactactacctgatggaagcctacaaacaccttaaaccgattgcgctggcgggtgacgcgcgcaagtttaaagcaacaatcaagatcgctgaccagggtgaagaagggattgtggaagctgacagcgctgacggtagttttatggatgaactgctaacgctgatggcagcacaccgcgtgtggtcacgcattcctaagattgacaaaattcctgcctga

SEQ ID NO: 6695 - DNA, 2673 bp, Escherichia coli
atgaatacccttccagaacagtacgcaaacaccgctctccccaccctgcccggtcaaccgcaaaatccatgcgtctggccccgtgatgaattaaccgtcggtgggataaaagcccatatcgatactttccagcgttggctgggtgatgcctttgacaatgggatctctgcagaacagttgattgaggcgcgcaccgagtttatcgaccagctcctgcaacgattatggattgaagcgggattcagccagattgccgacctggcattggtcgccgtcggtggctacggtcgtggcgagctgcatccactttcagacgtcgatttactgattttaagccgtaaaaagctcccggacgatcaggcgcaaaaagtgggcgagctgttaacgctgctctgggatgtaaagctggaagtcggtcatagcgtgcgcacgcttgaagagtgcatgctggaagggttatcggatttaaccgtcgccaccaatttaatcgaatcccgcttattaattggcgatgttgcgctgttcctcgaactgcaaaaacatattttcagcgaaggattctggccttccgacaagttctacgcggcgaaagttgaagaacagaaccagcgccatcagcgttaccatggcaccagctacaaccttgaaccagacatcaaaagcagccctggcggcttgcgcgatatccacactctgcaatgggtggcccgccgtcattttggcgcaacatcgctggatgaaatggtcgggtttggcttcttaacctcagcggagcgggcggaattaaacgaatgtctgcatatattgtggcgtattcgctttgccctgcatctggtcgtcagccgttacgataatcgcctgttattcgatcgccagcttagcgtcgcccagcgtctgaattacagtggtgaaggtaacgaaccggtcgagcggatgatgaaggattacttccgcgttacacgccgcgtcagtgaactcaaccagatgctgctgcaactgttcgatgaagccatcctcgcccttcccgccgacgaaaaaccacgtccaatcgacgatgagtttcagctacgcggtacgctaatcgacctgcgtgatgaaacactatttatgcgccagccggaagccatcttgcgtatgttctacaccatggtgcacaacagtgcgatcaccggcatttactccaccacgctgcgccagttacgccatgcccgtcgccatctgcaacaaccgctgtgtaatattccggaagcacgaaaactgtttttgagcattctgcgtcaccccggagcggtgcggcgcgggctattgccaatgcatcgccatagcgtgctcggcgcgtatatgccgcaatggtcgcatatcgtcgggcagatgcagtttgatctgttccacgcctacacggtggatgaacatactatccgcgtgatgctgaaactggagagttttgccagtgaagaaacgcgccagcgccatccgttgtgtgtggacgtctggccgcgcctgccgtcaactgagctgattttcatcgccgcgctgtttcacgatatcgccaaaggacgcggcggcgaccactccattctcggtgctcaggatgtagtgcattttgccgaactccacgggctgaactcacgcgaaacacagctggtcgcctggctggttcgccagcacctgttgatgtcggtgaccgcccaacgccgcgatattcaggacccggaagtcatcaagcagtttgccgaagaagtgcaaacggaaaatcgtctgcgctatctggtatgcctgactgtggctgacatttgcgccaccaacgaaacgctgtggaatagctggaagcaaagtctgttgcgtgagctctactttgccaccgaaaagcagctacgacgcggaatgcaaaacacgccggatatgcgcgaacgggttcgccatcaccaactccaggcactggcactactgcgcatggataacatcgacgaagaggcgctgcaccaaatttggtcacgctgtcgtgctaactattttgtccgccatagcccaaatcaactggcctggcatgcccgccatttattacagcatgatttaagcaaaccgctggtattgcttagcccgcaggctacgcgtggaggcaccgagatttttatctggagcccggaccgcccttatctgtttgccgccgtctgtgccgaattagaccgccgcaatttaagtgttcacgacgcacaaattttcaccactcgcgacggtatggcgatggatacctttatcgtgctggaacccgatggcaacccgctgtccgcagatcgtcatgaggttattcggtttggtctggagcaagtactgacgcaaagtagctggcagccaccgcagccccgtcgccaacccgccaaattacgccattttactgttgaaaccgaagtaacgtttttgccgacccataccgaccgcaaatcgttcctcgaactgatcgccctcgaccaacctggactgctggcgcgagtcgggaaaatttttgccgatctgggaatttcgcttcatggtgcccgaattacaaccattggcgagcgagtagaagatttattcataattgccaccgctgaccggcgtgcgcttaataacgagttgcagcaggaagtgcatcagcggttgacagaggccctcaatccaaacgataaagggtga

SEQ ID NO: 6696 - DNA, 393 bp, Escherichia coli
atggctgaaaatcaatactacggcactggtcgccgcaaaagttccgcagctcgcgttttcatcaaaccgggcaacggtaaaatcgtaatcaaccaacgttctctggaacagtacttcggtcgtgaaactgcccgcatggtagttcgtcagccgctggaactggtcgacatggttgagaaactggacctgtacatcaccgttaaaggtggtggtatctctggtcaggctggtgcgatccgtcacggtatcacccgcgctctgatggaatacgacgagtccctgcgttctgaactgcgtaaagctggcttcgttactcgtgacgctcgtcaggttgaacgtaagaaagtcggtctgcgtaaagcacgtcgtcgtccgcagttctccaaacgttaa

SEQ ID NO: 6697 - DNA, 429 bp, Escherichia coli
atgaaaacttttacagctaaaccagaaaccgtaaaacgcgactggtatgttgttgacgcgaccggtaaaactctgggccgtctggctactgaactggctcgtcgcctgcgcggtaagcacaaagcggaatacactccgcacgtagataccggtgattacatcatcgttctgaacgctgacaaagttgctgtaaccggcaacaagcgtactgacaaagtgtactatcaccacaccggccacatcggtggtatcaaacaagcgacctttgaagagatgattgctcgccgtcctgagcgtgtgattgaaatcgcggttaaaggcatgttgccaaaaggcccgctgggtcgtgctatgttccgtaaactgaaagtttacgcgggtaacgagcacaaccacgcggcacagcaaccgcaagttcttgacatctaa

SEQ ID NO: 6698 - DNA, 1281 bp, Escherichia coli
gtgaaacatctgacagaaatggtgagacagcacaaagcgggcaaaacaaatggaatttatgccgtttgttccgcacatccgctggtgctggaagctgcaatccgctacgccagtgcaaaccaaacgccgttactgattgaagcaacctccaatcaggtagaccagttcggcggttataccggaatgacgcccgccgattttcgcggctttgtttgtcagctcgccgactcgttgaatttcccgcaggatgcgttgattctgggtggtgaccatctggggccaaaccgctggcaaaacctgccggccgctcaggcaatggccaatgccgatgatttgattaaaagctacgttgcggcaggattcaaaaaaatccaccttgattgcagcatgtcctgtcaggacgatccgattcccttaactgatgacatcgtggctgaacgcgccgcccgtctggcgaaagtggcggaagaaacctgtcttgaacactttggcgaagccgatctggagtatgtcattggtaccgaagtgccggtacctggcggcgcgcatgaaaccttaagcgagctggcggtcaccacgccggatgccgcccgcgccacgctggaagcccatcgtcacgcctttgaaaagcaaggtttgaatgccatctggccacgcatcattgccctggtggttcaacccggcgtcgaattcgatcacaccaacgttattgattatcagcccgccaaagcgagcgccttaagccagatggtcgaaaactacgaaacgctgattttcgaagcgcactctaccgattatcaaacgccgcaatcgctgcgccagctggtgattgaccactttgccattctgaaagttggcccagcgctgaccttcgccctgcgtgaagctctgttctctctggcggcgattgaagaagaactggtgccagcgaaagcctgttctggtctgcgtcaggtgctggaagacgtgatgctcgaccgcccggaatactggcaaagccactaccacggtgacggcaacgcgcgtcgtctggcgcgtggttatagctactcggatcgcgtgcgctattactggccggacagccagattgatgacgctttcgctcatctggtacgtaatctggcggattcaccaattccgctgccgctgatcagccagtatctgccgctgcagtacgtgaaagttcgctccggcgagctgcagccaacgccacgggaactcattatcaaccatattcaggacatcctggcgcagtaccacacagcctgtgaaggccaataa

SEQ ID NO: 6699 - DNA, 1125 bp, Escherichia coli
atgattgcccgcaaaaggcgggccaggacaatccatagccgatatccaatcggaatttacgggagcatagtaatgacagatattgcgcagttgcttggcaaagacgccgacaaccttttacagcaccgttgtatgacaattccttctgaccagctttatctccccggacatgactacgtagaccgcgtaatgattgacaataatcgcccgccagcggtgttacgtaatatgcagacgttgtacaacaccgggcgtctggctggcacaggatatctttctattctgccggttgaccagggcgttgagcactctgccggagcttcatttgctgctaacccgctctactttgacccgaaaaacattgttgaactggcgatcgaagcgggctgtaactgtgtggcgtcaacttacggcgtgctggcgtcggtatcgcggcgttatgcgcatcgcattccattcctcgtcaaacttaatcacaacgagacgctaagttacccgaatacctacgatcaaacgctgtatgccagcgtggagcaggcgttcaacatgggcgcggttgcggttggtgcgactatctattttggctcggaagagtcacgtcgccagattgaagaaatttctgcggcttttgaacgtgcgcacgagctgggtatggtgacagtgctgtgggcctatttgcgtaactccgcctttaagaaagatggcgttgattaccatgtttccgccgacctgaccggtcaggcaaaccatctggcggcaaccatcggtgcagatatcgtcaaacaaaaaatggcggaaaataacggcggctataaagcaattaattacggttacaccgacgatcgtgtttacagcaaattgaccagcgaaaacccgattgatctggtgcgttatcagttagctaactgctatatgggtcgggctgggttgataaactccggcggtgctgcgggcggtgaaactgacctcagcgatgcagtgcgtactgcggttatcaacaaacgcgcaggcggaatggggctgattcttggacgtaaagcgttcaagaaatcgatggctgacggcgtgaaactgattaacgccgtgcaggacgtttatctcgatagcaaaattactatcgcctga

SEQ ID NO: 6700 - DNA, 921 bp, Escherichia coli
atggaattaaaggattattacgccatcatgggcgtgaaaccgacggacgatctcaagacaatcaagaccgcctatcgtcgacttgcccgcaaataccatcctgatgtcagcaaagaaccggatgccgaagcccgcttcaaagaggtcgctgaagcctgggaagtgttaagtgatgaacaacgtcgcgctgagtatgatcagatgtggcaacatcgcaacgatccgcaatttaaccgtcagttccaccatggcgacggtcagagttttaacgccgaagattttgacgatatcttctcgtcaattttcggtcagcatgcccgccagagccgtcaacgccccgccacacgcggccacgatattgaaatcgaagtggcggtattcctcgaagaaacgcttactgagcataagcgtaccatcagctataacctgccggtttataacgcctttggcatgatcgaacaggaaattccgaaaacgctgaatgtgaagatcccggcgggcgtcggcaatggtcaacgcatccgtctgaaaggccaggggacgccgggcgaaaacggcggtccaaatggcgatttgtggctggtgattcatattgcgccacatccgctgtttgatattgtcggccaggatctggaaattgtggtgccggttagcccgtgggaagcggcgctgggtgctaaagtcaccgttccaacactgaaagaaagcattttgctgactatcccgccaggcagccaggccgggcaacgattgcgcgttaaaggcaaaggtctggtgagcaaaaaacagaccggcgatctgtatgcggtactgaaaatcgtgatgccgccgaaaccggatgaaaacactgccgcgctgtggcagcaactggcagacgcccagtcgtcttttgatccacgtaaagattgggggaaagcataa

SEQ ID NO: 6701 - DNA, 588 bp, Escherichia coli
atggtggaccaggcgcaggacaccctgcgcccgaataacagattgtcagatatgcaggcaacaatggaacaaacccaggcctttgaaaaccgtgtgcttgagcgtctgaatgctggcaaaaccgtgcgaagctttctgatcaccgccgtcgagctcctgaccgaggcggtaaatcttctggtgcttcaggtattccgcaaagacgattacgcggtgaagtatgctgtagaaccgttactcgacggcgatggtccgctgggcgatctttctgtgcgtttaaaactcatttacgggttgggcgtcattaaccgccaggaatacgaagatgcggaactgctgatggcattgcgtgaagagctaaatcacgacggcaacgagtacgcctttaccgacgacgaaatccttggaccctttggtgaactgcactgcgtggcggcgttaccaccgccgccacagtttgaaccagcagactccagtttgtatgcaatgcaaattcagcgctatcaacaggctgtgcgatcaacaatggtcctttcactgactgagctgatttccaaaatcagcttaaaaaaagcctttcaaaagtaa

SEQ ID NO: 6702 - DNA, 744 bp, Escherichia coli
atgcagacccaggtcctttttgaacatccactaaatgaaaaaatgcgtacatggctgcgcattgagtttttgattcagcaactcaccgttaatttacccatcgttgaccacgctggcgcgctgcatttcttccgtaatgtcagtgaattactggatgttttcgagcgcggcgaagtccgcactgagctgttgaaagaacttgaccggcagcaacgtaaactccagacctggattggcgtgcctggcgtggaccagagccgtattgaagcattaattcagcagttaaaagcggcggggagcgtattaatttccgcgccgcgtatcgggcaatttctgcgtgaagatcgtttgattgctctggtgcgtcagcgactgagcatcccaggcggctgttgcagctttgatttacctacattgcacatttggctgcatctaccccaggcgcagcgcgacagccaggtagaaacctggattgccagcctgaacccgctcacccaggcacttaccatggtgctggatttaattcgccagtcggcccccttccgtaaacaaaccagcctgaatggtttttatcaggataacggtggcgatgccgacttgctgcgcctgaatctgtcgctcgattcacagctttatccgcaaatttccggacataagagccgttttgccattcgttttatgccgctggacactgaaaacggacaggtaccggaacgtctggatttcgaactggcctgttgctaa

SEQ ID NO: 6703 - DNA, 753 bp, Escherichia coli
atgagtgccattgaagttaagaacctggtgaaaaaattccacggtcagacggtgctgcacggtatcgaccttgaggtaaagcctggcgaagtggtggcaattatcggtccgagtggttccggcaaaaccacgttgctacgcagcataaatctgctggaacaacccgaagcgggaacgatcaccgttggcgatatcactattgatactgcacgttcattaagtcagcaaaaatctctgattcgccagttgcgtcagcacgtcgggtttgtcttccagaactttaatttgtttccgcatcgtacggtgctggagaacattattgaagggccggtgatcgtcaaaggtgaaccgaaagaagaggccacggcgcgcgctcgcgagctgctggcaaaagttgggctggcaggtaaagaaaccagctatccacgtcgtttgtctggcggtcaacagcagcgtgttgcgattgcgcgtgcgctggcaatgcgtcctgaggtgattttgtttgacgagccaacgtcagcgctggatccagagctggtgggtgaagtcctgaacaccatccgtcagctggcgcaggaaaagcgcacgatggtgattgtgacgcacgaaatgagctttgcccgggatgttgcggaccgggcgatctttatggaccaggggcggatagtcgagcagggggccgcaaaagcgttatttgccgaccccgagcagcctcgcacccgccagttcctcgagaagtttctgctgcaataa

SEQ ID NO: 6704 - DNA, 645 bp, Escherichia coli
atgagtaaacccgctatcacgctttggtcagatgcccactttttctccccttatgtgttatccgcctgggtggcgttgcaggaaaaaggcctgtcgtttcatatcaagaccatcgacctcgacagcggtgaacatttgcagccgacgtggcaaggttacggtcagacacgccgtgtgccgttattacaaatcgatgattttgagttgagtgaatcttctgccattgcggagtatctggaagatcgatttgcgccaccgacctgggaacgtatttatccgcttgatttagaaaatcgtgcgcgtgcacgacagattcaggcctggctgcgcagcgatctgatgcccatccgcgaagagcgtccgacggatgttgtctttgcgggggcgaaaaaagcgccactaacggccgagggaaaagccagtgcagagaaactgttcgcgatggcagaacatttgttagtactgggtcagccgaatttatttggtgaatggtgcattgctgatactgatctggcgctaatgattaaccgcctggtactacatggcgatgaggtgccagaacgcctggtggattatgcaacattccagtggcagcgagcgtctgtccagcgttttattgcactttcggcgaagcaatctggctga

SEQ ID NO: 6705 - DNA, 1821 bp, Escherichia coli
ttgcagatgattgtgcgcatactgctgctgtttatcgctctgttcacctttggtgtgcaggcgcaggctatcaaggaaagctatgcctttgccgtgctgggcgaaccccggtacgcgtttaatttcaaccattttgattatgtgaaccccgccgcgccaaaaggtgggcagataacgttgtcagccctcggcaccttcgataatttcaaccgctatgcactgcgcggcaacccgggcgcacgcaccgagcagctgtacgacacgctatttacgacttccgatgacgaaccaggcagttattacccgctgattgctgaaagcgcacgctatgctgacgattattcctgggtggaggtcgctattaatccgcgcgcccgttttcatgatggttcgcccattactgcccgcgatgtagagtttacttttcaaaaatttatgaccgaaggcgtgccgcaatttcgtctggtctacaaaggcaccaccgtcaaagccattgcaccgttaaccgtgcgcattgagttagctaaacccggcaaagaagatatgctgagtctgttttcgctgccggtatttccagaaaagtactggaaggatcacaaacttagcgacccgctcgccacgcctccgcttgccagtggtccgtaccgcgttacgtcctggaaaatggggcaaaatattgtctattcccgtgtgaaagattactgggcagcaaacttaccggtaaaccgtggacgctggaatttcgacaccattcgctacgattattacctcgatgataatgtcgcctttgaagcgtttaaagcaggtgcctttgatttgcgtatggaaaacgacgccaaaaactgggccacgcgttataccggtaaaaatttcgataaaaaatacatcatcaaagatgagcaaaagaacgaatcagcccaggatacgcgttggctggcgtttaatatccaacgtccggtattcagcgatcgccgggtccgggaagctatcactctcgcctttgactttgaatggatgaacaaggcgttgttttacaatgcctggagtcgcacgaacagttattttcagaataccgaatacgcggccagaaattaccccgacgccgcggagctggtgcttctggcaccaatgaaaaaagatctaccgtcagaagtcttcacacaaatctaccagccgccggtatccaaaggcgatggctacgatcgtgacaacctgttaaaagccgacaaacttctcaacgaagcgggctgggtgctgaagggtcagcaacgcgttaatgccacaacgggtcagccactcagctttgaattattgcttcccgcaagcagcaatagtcagtgggtattgccgttccagcacagcctgcaacggctgggtatcaacatggacattcgcaaggtggataactcgcaaatcactaaccgcatgcgcagtcgcgactatgacatgatgccgcgcgtatggcgggcgatgccgtggcccagttccgatttacagatttcctggtcatcggaatatatcaattccacttataatgcccccggcgtgcaaagcccggttatcgactcgctgatcaaccaaattattgccgcgcagggaaataaagaaaaattactgccgttggggcgagcactggatcgcgtattaacgtggaattattacatgctgccaatgtggtacatggcggaagaccgtctcgcctggtgggataaattctcccagccggccgtgcgccccatctatagcctcggtatcgatacctggtggtatgacgtcaataaagcggccaaactgccgtccgccagcaaacagggagagtag

SEQ ID NO: 6706 - DNA, 594 bp, Escherichia coli
atgaatgaaatcatttctgcagcagttttattgatcctgattatggatccgctcggaaacctacctattttcatgtccgtactgaaacatactgaaccgaaaagacggcgggcaatcatggtgcgagagttgcttattgctctcctggtgatgctggtgttcctgtttgcgggtgagaaaattctggcatttcttagcctacgagcagaaaccgtctccatttctggcggcatcattctgtttctgatcgccattaaaatgattttccccagcgcttcaggaaatagcagcgggcttccggcaggtgaagagccatttatcgtgccgttggcaattccgttagtcgccgggccgactattctcgccacgctgatgttgttgtctcatcagtacccgaatcagatggggcatctggtgattgctctgctgctggcctggggcggcacctttgtcatcctgctacagtcttcgctatttttacgtctgctgggcgagaaaggggtgaacgcacttgaacgcctgatgggattgattctggtgatgatggcaacccagatgttcctcgacggcattcgaatgtggatgaaggggtaa

SEQ ID NO: 6707 - DNA, 1275 bp, Escherichia coli
atgacagataaacgcaaagatggctcaggcaaattgctgtattgctctttttgcggcaaaagccagcatgaagtgcgcaagctgattgccggtccatccgtgtatatctgcgacgaatgtgttgatttatgtaacgacatcattcgcgaagagattaaagaagttgcaccgcatcgtgaacgcagtgcgctaccgacgccgcatgaaattcgcaaccacctggacgattacgttatcggccaggaacaggcgaaaaaagtgctggcggtcgcggtatacaaccattacaaacgtctgcgcaacggcgataccagcaatggcgtcgagttgggcaaaagtaacattctgctgatcggtccgaccggttccggtaaaacgctgctggctgaaacgctggcgcgcctgctggatgttccgttcaccatggccgacgcgactacactgaccgaagccggttatgtgggtgaagacgttgaaaacatcattcagaagctgttgcagaaatgcgactacgatgtccagaaagcacagcgtggtattgtctacatcgatgaaatcgacaagatttctcgtaagtcagacaacccgtccattacccgagacgtttccggtgaaggcgtacagcaggcactgttgaaactgatcgaaggtacggtagctgctgttccaccgcaaggtgggcgtaaacatccgcagcaggaattcttgcaggttgatacctctaagatcctgtttatttgtggcggtgcgtttgccggtctggataaagtgatttcccaccgtgtagaaaccggctccggcattggttttggcgcgacggtaaaagcgaagtccgacaaagcaagcgaaggcgagctgctggcgcaggttgaaccggaagatctgatcaagtttggtcttatccctgagtttattggtcgtctgccggttgtcgcaacgttgaatgaactgagcgaagaagctctgattcagatcctcaaagagccgaaaaacgccctgaccaagcagtatcaggcgctgtttaatctggaaggcgtggatctggaattccgtgacgaggcgctggatgctatcgctaagaaagcgatggcgcgtaaaaccggtgcccgtggcctgcgttccatcgtagaagccgcactgctcgataccatgtacgatctgccgtccatggaagacgtcgaaaaagtggttatcgacgagtcggtaattgatggtcaaagcaaaccgttgctgatttatggcaagccggaagcgcaacaggcatctggtgaataa

SEQ ID NO: 6708 - DNA, 2355 bp, Escherichia coli
atgaatcctgagcgttctgaacgcattgaaatccccgtattgccgctgcgcgatgtggtggtttatccgcacatggtcatccccttatttgtcgggcgggaaaaatctatccgttgtctggaagcggcgatggaccatgataaaaaaattatgctggtcgcgcagaaagaagcttcaacggatgagccgggtgtaaacgatcttttcaccgtcgggaccgtggcctctatattgcagatgctgaaactgcctgacggcaccgtcaaagtgctggtcgaggggttacagcgcgcgcgtatttctgcgctctctgacaatggcgaacacttttctgcgaaggcggagtatctggagtcgccgaccattgatgagcgggaacaggaagtgctggtgcgtactgcaatcagccagttcgaaggctacatcaagctgaacaaaaaaatcccaccagaagtgctgacgtcgctgaatagcatcgacgatccggcgcgtctggcggataccattgctgcacatatgccgctgaaactggctgacaaacagtctgttctggagatgtccgacgttaacgaacgtctggaatatctgatggcaatgatggaatcggaaatcgatctgctgcaggttgagaaacgcattcgcaaccgcgttaaaaagcagatggagaaatcccagcgtgagtactatctgaacgagcaaatgaaagctattcagaaagaactcggtgaaatggacgacgcgccggacgaaaacgaagccctgaagcgcaaaatcgacgcggcgaagatgccgaaagaggcaaaagagaaagcggaagcagagttgcagaagctgaaaatgatgtctccgatgtcggcagaagcgaccgtagtgcgtggttatatcgactggatggtacaggtgccgtggaatgcgcgtagcaaggtcaaaaaagacctgcgtcaggcgcaggaaatccttgataccgaccattatggtctggagcgcgtgaaagatcgaatccttgagtatcttgcggttcaaagccgtgtcaacaaaatcaagggaccgatcctctgcctggtagggccgccgggggtaggtaaaacctctcttggtcagtccattgccaaagccaccgggcgtaaatatgtccgtatggcgctgggcggcgtgcgtgatgaagcggaaatccgtggtcaccgccgtacttacatcggttctatgccgggtaaactgatccagaaaatggcgaaagtgggcgtgaaaaacccgctgttcctgctcgatgagatcgacaaaatgtcttctgacatgcgtggcgatccggcctctgcactgcttgaagtgctggatccagagcagaacgtagcgttcagcgaccactacctggaagtggattacgatctcagcgacgtgatgtttgtcgcgacgtcgaactccatgaacattccggcaccgctgctggatcgtatggaagtgattcgcctctccggttataccgaagatgaaaaactgaacatcgccaaacgtcacctgctgccgaagcagattgaacgtaatgcactgaaaaaaggtgagctgaccgtcgacgatagcgccattatcggcattattcgttactacacccgtgaggcgggcgtgcgtggtctggagcgtgaaatctccaaactgtgtcgcaaagcggttaagcagttactgctcgataagtcattaaaacatatcgaaattaacggcgataacctgcatgactatctcggtgttcagcgtttcgactatggtcgcgcggataacgaaaaccgtgtcggtcaggtaaccggtctggcgtggacggaagtgggcggtgacttgctgaccattgaaaccgcatgtgttccgggtaaaggcaaactgacctataccggttcgctcggcgaagtgatgcaggagtccattcaggcggcgttaacggtggttcgtgcgcgtgcggaaaaactggggatcaaccctgatttttacgaaaaacgtgacatccacgtccacgtaccggaaggtgcgacgccgaaagatggtccgagtgccggtattgctatgtgcaccgcgctggtttcttgcctgaccggtaacccggttcgtgccgatgtggcaatgaccggtgagatcactctgcgtggtcaggtactgccgatcggtggtttgaaagaaaaactcctggcagcgcatcgcggcgggattaaaacagtgctaattccgttcgaaaataaacgcgatctggaagagattcctgacaacgtaattgccgatctggacattcatcctgtgaagcgcattgaggaagttctgactctggcgctgcaaaatgaaccgtctggtatgcaggttgtgactgcaaaatag

SEQ ID NO: 6709 - DNA, 450 bp, Escherichia coli
atgcaagttattctgcttgataaagtagcaaacctgggtagcctgggtgatcaggtaaacgttaaagcgggctatgctcgtaacttcctggtaccgcagggtaaagctgttccagctaccaagaaaaacattgaattcttcgaagctcgtcgcgctgaactggaagctaaactggctgaagttctggcagctgctaatgctcgcgctgagaaaatcaatgcactggaaactgttaccatcgcgtctaaagctggcgacgaaggtaaactgttcggttccatcggtactcgcgacatcgctgacgctgtaactgcagctggcgttgaagtggctaagagcgaagttcgtctgccgaacggcgttctgcgtaccactggcgaacacgaagtgagcttccaggttcacagcgaagtattcgcgaaagtgatcgtaaacgtagtagctgaataa

SEQ ID NO: 6710 - DNA, 864 bp, Escherichia coli
atgaaaatgatttccacgatacagaaaaaagagactgtcatggtcgcacccattcccgcgaaacgcggcagaaaacccgccgttgccaccgcaccagcgactggacaggttcagtctttaacgcgtggcctgaaattactggagtggattgccgaatccaatggcagtgtggcactcacggaactggcgcaacaagccgggttacccaattccacgacccaccgcctgctaaccacgatgcaacagcagggtttcgtgcgtcaggttggcgaactgggacattgggcaatcggcgcacatgcctttatggtcggcagcagctttctccagagccgtaatttgttagcgattgttcaccctatcctgcgcaatctaatggaagagtctggcgaaacggtcaatatggcggtgcttgatcaaagcgatcacgaagcgattattatcgaccaggtacagtgtacgcatctgatgcgaatgtccgcgcctatcggcggtaaattgccgatgcacgcttccggtgcgggtaaagcctttttagcccaactgagcgaagaacaggtgacgaagctgctgcaccgcaaagggttacatgcctatacccacgcaacgctggtgtctcctgtgcatttaaaagaagatctcgcccaaacgcgcaaacggggttattcatttgacgatgaggaacatgcactggggctacgttgccttgcagcgtgtattttcgatgagcaccgtgaaccgtttgccgcaatttctatttccggaccgatttcacgtattaccgatgaccgcgtgaccgagtttggcgcgatggtgattaaagcggcgaaggaagtgacgctggcgtacggtggaatgcgctga

SEQ ID NO: 6711 - DNA, 870 bp, Escherichia coli
atgagacagtctatggctaccaaactgcaggacgggaatacaccttgtctggcagctacaccttctgaaccacgtcccaccgtgctggtgtttgactccggcgtcggtgggttgtcggtctatgacgagatccggcatctcttaccggatctccattacatttatgctttcgataacgtcgctttcccgtatggcgaaaaaagcgaagcgtttattgttgagcgagtggtggcaattgtcaccgcggtgcaagaacgttatccccttgcgctggctgtggtcgcttgcaacactgccagtaccgtttcacttcctgcattacgcgaaaagttcgacttcccggttgttggtgtcgtgccggcgattaaacctgctgcacgtctgacggcaaatggcattgtcggattactggcaacccgcggaacagttaaacgttcttatactcatgagctgatcgcgcgtttcgctaatgaatgccagatagaaatgctgggctcggcagagatggttgagttggctgaagcgaagctacatggcgaagatgtttctctggatgcactaaaacgtatcctacgcccgtggttaagaatgaaagagccgccagataccgttgtattgggttgcacccatttccctctactacaagaagaactgttacaagtgctgccagagggaacccggctggtggattctggcgcagcgattgctcgccgaacggcctggttgttagaacatgaagccccggatgcaaaatctgccgatgcgaatattgccttttgtatggcaatgacgccaggagctgaacaattattgcccgttttacagcgttacggcttcgaaacgctcgaaaaactggcagttttaggctga

SEQ ID NO: 6712 - DNA, 2598 bp, Escherichia coli
gtgctagaagaataccgtaagcacgtagctgagcgtgccgctgaggggattgcgcccaaacccctggatgcaaaccaaatggccgcacttgtagagctgctgaaaaacccgcccgcgggcgaagaagaattcctgttagatctgttaaccaaccgtgttcccccaggcgtcgatgaagccgcctatgtcaaagcaggcttcctggctgctatcgcgaaaggcgaagccaaatcccctctgctgactccggaaaaagccatcgaactgctgggcaccatgcagggtggttacaacattcatccgctgatcgacgcgctggatgatgccaaactggcacctattgctgccaaagcactttctcacacgctgctgatgttcgataacttctatgacgtagaagagaaagcgaaagcaggcaacgaatatgcgaagcaggttatgcagtcctgggcggatgccgaatggttcctgaatcgcccggcgctggctgaaaaactgaccgttactgtcttcaaagtcactggcgaaactaacaccgatgacctttctccggcaccggatgcgtggtcacgcccggatatcccactgcacgcgctggcgatgctgaaaaacgcccgtgaaggtattgagccagaccagcctggtgttgttggtccgatcaagcaaatcgaagctctgcaacagaaaggtttcccgctggcgtacgtcggtgacgttgtgggtacgggttcttcgcgtaaatccgccactaactccgttctgtggtttatgggcgatgatattccacatgtgccgaacaaacgcggcggtggtttgtgcctcggcggtaaaattgcacccatcttctttaacacgatggaagacgcgggtgcactgccaatcgaagtcgacgtctctaacctgaacatgggcgacgtgattgacgtttacccgtacaaaggtgaagtgcgtaaccacgaaaccggcgaactgctggcgaccttcgaactgaaaaccgacgtgctgattgatgaagtgcgtgctggtggccgtattccgctgattatcgggcgtggcctgaccaccaaagcgcgtgaagcacttggtctgccgcacagtgatgtgttccgtcaggcgaaagatgtcgctgagagcgatcgcggcttctcgctggcgcaaaaaatggtaggccgtgcctgtggcgtgaaaggcattcgtccgggcgcgtactgtgaaccgaaaatgacttctgtaggttcccaggacaccaccggcccgatgacccgtgatgaactgaaagacctggcgtgcctgggcttctcggctgacctggtgatgcagtctttctgccacaccgcggcgtatccgaagccagttgacgtgaacacgcaccacacgctgccggacttcattatgaaccgtggcggtgtgtcgctgcgtccgggtgacggcgtcattcactcctggctgaaccgtatgctgctgccggataccgtcggtaccggtggtgactcccatacccgtttcccgatcggtatctctttcccggcgggttctggtctggtggcgtttgctgccgcaactggcgtaatgccgcttgatatgccggaatccgttctggtgcgcttcaaaggcaaaatgcagccgggcatcaccctgcgcgatctggtacacgctattccgctgtatgcgatcaaacaaggtctgctgaccgttgagaagaaaggcaagaaaaacatcttctctggccgcatcctggaaattgaaggtctgccggatctgaaagttgagcaggcctttgagctaaccgatgcgtccgccgagcgttctgccgctggttgtaccatcaagctgaacaaagaaccgatcatcgaatacctgaactctaacatcgtcctgctgaagtggatgatcgcggaaggttacggcgatcgtcgtaccctggaacgtcgtattcagggcatggaaaaatggctggcgaatcctgagctgctggaagccgatgcagatgcggaatacgcggcagtgatcgacatcgatctggcggatattaaagagccaatcctgtgtgctccgaacgacccggatgacgcgcgtccgctgtctgcggtacagggtgagaagatcgacgaagtgtttatcggttcctgcatgaccaacatcggtcacttccgtgctgcgggtaaactgctggatgcgcataaaggtcagttgccgacccgcctgtgggtggcaccgccaacccgtatggacgccgcacagttgaccgaagaaggctactacagcgtcttcggtaagagtggtgcgcgtatcgagatccctggctgttccctgtgtatgggtaaccaggcgcgtgtggcggacggtgcaacggtggtttccacctctacccgtaacttcccgaaccgtctgggtactggcgcgaatgtcttcctggcttctgcggaactggcggctgttgcggcgctgattggcaaactgccgacgccggaagagtaccagacctacgtggcgcaggtagataaaacagccgttgatacttaccgttatctgaacttcaaccagctttctcagtacaccgagaaagccgatggggtgattttccagactgcggtttaa

SEQ ID NO: 6713 - DNA, 657 bp, Escherichia coli
atgaaatgcaatgtttcatatcattttcaaggagccgacatgaaccgctttgtggtggccgaaccactgtggtgtacaggatgtaatacctgtctcgctgcctgttcggacgtgcataaaacgcaaggtttacagcaacacccgcgcctggccctggcgaagacgtcaacaatcactgcccctgtcgtgtgtcatcactgtgaggaagccccttgcctgcaggtctgcccggtcaatgccatctctcagagggatgatgcgatccaactcaacgaaagcctctgtattggctgcaagctttgcgccgtggtctgcccatttggcgcaatcagcgcttcaggaagccgtccggtgaatgcccatgcgcaatatgtttttcaggctgaaggctcactcaaagacggcgaagaaaacgcgccaacacaacatgctttgctgcgctgggaacctggtgtccagaccgtcgcggtgaaatgcgacctgtgtgatttcttgccagaaggtccggcctgcgttcgcgcttgcccgaatcaggcgttacggctgatcaccggtgatagcctgcaacgtcagatgaaagaaaaacagcgccttgccgcaagctggtttgccaatggcggggaggatcccctttccctcactcaggagcaacgctaa

SEQ ID NO: 6714 - DNA, 1893 bp, Escherichia coli
atggctatcgaaatcaaagtaccggacatcggggctgatgaagttgaaatcaccgagatcctggtcaaagtgggcgacaaagttgaagccgaacagtcgctgatcaccgtagaaggcgacaaagcctctatggaagttccgtctccgcaggcgggtatcgttaaagagatcaaagtctctgttggcgataaaacccagaccggcgcactgattatgattttcgattccgccgacggtgcagcagacgctgcacctgctcaggcagaagagaagaaagaagcagctccggcagcagcaccagcggctgcggcggcaaaagacgttaacgttccggatatcggcagcgacgaagttgaagtgaccgaaatcctggtgaaagttggcgataaagttgaagctgaacagtcgctgatcaccgtagaaggcgacaaggcttctatggaagttccggctccgtttgctggcaccgtgaaagagatcaaagtgaacgtgggtgacaaagtgtctaccggctcgctgattatggtcttcgaagtcgcgggtgaagcaggcgcggcagctccggccgctaaacaggaagcagctccggcagcggcccctgcaccagcggctggcgtgaaagaagttaacgttccggatatcggcggtgacgaagttgaagtgactgaagtgatggtgaaagtgggcgacaaagttgccgctgaacagtcactgatcaccgtagaaggcgacaaagcttctatggaagttccggcgccgtttgcaggcgtcgtgaaggaactgaaagtcaacgttggcgataaagtgaaaactggctcgctgattatgatcttcgaagttgaaggcgcagcgcctgcggcagctcctgcgaaacaggaagcggcagcgccggcaccggcagcaaaagctgaagccccggcagcagcaccagctgcgaaagcggaaggcaaatctgaatttgctgaaaacgacgcttatgttcacgcgactccgctgatccgccgtctggcacgcgagtttggtgttaaccttgcgaaagtgaagggcactggccgtaaaggtcgtatcctgcgcgaagacgttcaggcttacgtgaaagaagctatcaaacgtgcagaagcagctccggcagcgactggcggtggtatccctggcatgctgccgtggccgaaggtggacttcagcaagtttggtgaaatcgaagaagtggaactgggccgcatccagaaaatctctggtgcgaacctgagccgtaactgggtaatgatcccgcatgttactcacttcgacaaaaccgatatcaccgagttggaagcgttccgtaaacagcagaacgaagaagcggcgaaacgtaagctggatgtgaagatcaccccggttgtcttcatcatgaaagccgttgctgcagctcttgagcagatgcctcgcttcaatagttcgctgtcggaagacggtcagcgtctgaccctgaagaaatacatcaacatcggtgtggcggtggataccccgaacggtctggttgttccggtattcaaagacgtcaacaagaaaggcatcatcgagctgtctcgcgagctgatgactatttctaagaaagcgcgtgacggtaagctgactgcgggcgaaatgcagggcggttgcttcaccatctccagcatcggcggcctgggtactacccacttcgcgccgattgtgaacgcgccggaagtggctatcctcggcgtttccaagtccgcgatggagccggtgtggaatggtaaagagttcgtgccgcgtctgatgctgccgatttctctctccttcgaccaccgcgtgatcgacggtgctgatggtgcccgtttcattaccatcattaacaacacgctgtctgacattcgccgtctggtgatgtaa

SEQ ID NO: 6715 - DNA, 1854 bp, Escherichia coli
atgaaaatgactttgccgtttaaaccccatgtgctggcgctaatttgcagtgccgggctttgtgccgcctctaccgggctatatataaaaagccgcacagtggaagcgcctgtggaaccgcaatcgacacaactggctgtgtctgacgctgccgcggttacgtttcctgcaacggtttccgcacctcccgtaacacccgccgtcgtcaaatccgcattcagcactgcacaaatagatcaatgggtcgcgcccgtcgcgctgtatcccgacgccctactttcgcaggtgctgatggcatcaacctatccgacaaacgttgctcaagcagtgcaatggtcgcacgataatccacttaaacaaggcgatgctgctattcaggcggtatctgaccagccgtgggacgccagcgttaaatcactggtggcctttccacaattgatggcattgatgggcgaaaacccgcaatgggtgcaaaacctgggcgatgcttttctggcccagccgcaggacgtgatggactcggtacagcgattgcggcaactggcgcaacaaaccggctcgctgaagtcatcaaccgaacagaaagttattaccacaacgaagaaagctgtaccggtaaaacagacagtcacggcacccgtcataccatccaatacagttttaactgccaaccccgtcattacagagccggcaacaaccgtcatttccattgagcccgccaatcctgatgtggtctatattcccaactacaacccaaccgtggtttacgggaactgggccaatactgcgtatccgccggtttatctgccaccaccagccggagaaccgtttgttgacagctttgtacgcggattcggctatagcatgggcgttgctaccacgtacgcactattcagcagcatcgactgggacgacgacgatcatgaccatcatcatcatgacaatgatgattatcatcaccacgatggcggtcatcgtgacggtaatggctggcaacacaacggcgacaacatcaatatcgacgtcaacaatttcaaccgtatcaccggtgagcatcttactgataagaatatggcatggcggcacaatccaaactaccgtaatggtgtgccctatcatgatcaggatatggcaaagcggtttcatcaaaccgatgtcaacggcggaatgagcgccacgcaattacctgccccaacgcgcgacagccagcgtcaggcggcagcaaatcagtttcagcaacgaacacacgccgcaccagtcattacacgagatacccaacgtcaggcagcggcacagcggtttaatgaagctgaacactatgggagctatgacgacttccacgacttcagccgtcgccaaccactgacccagcaacaaaaggacgccgctcgtcagcgttatcagtccgcctcgcctgagcagcgccaggcagttcgcgagagaatgcagactaacccgaagatccagcagcgaagagaggcagcgcgtgagcgcattcagtccgcctcgcctgagcagcgccaggcggttcgcgagaaaatgcagactaacccgcagaaccagcagcgaagagacgcagcgcgtgagcgtattcagtccgcatcaccagagcagcgccaggtgtttaaggaaaaagtacagcagcgcccactgaatcaacagcaacgtgataacgcccgccagcgtgttcaatcggcatcacctgaacaacgtcaggtttttcgggagaaagttcaggagagccgcccacaacgtctaaacgacagtaaccatactgtcaggctgaataacgagcaacggtcagcagtatgcgaacgtctctctgaacgtggagcaagaagactggaaaggtaa

SEQ ID NO: 6716 - DNA, 405 bp, Escherichia coli
atgaaatccgtttttacgatttccgccagcctggcgattagcctgatgctgtgctgcacggcgcaggcaaacgaccataaactcctcggcgccattgcaatgccgcgtaacgaaaccaacgatctggcgctgaaacttcctgtttgtcgcattgtgaaacgcatacaactctctgccgaccatggcgatttacagttaagcggtgcatcggtttatttcaaagccgcccgtagcgccagtcagagcctgaatattccttcagaaataaaagaagggcaaaccactgactggatcaacattaacagcgataacgacaataaacgctgcgtctcaaaaatcaccttttcgggtcatacggtgaactcatcggatatggccacgctgaaaattatcggcgacgactaa

SEQ ID NO: 6717 - DNA, 1647 bp, Escherichia coli
atgtcaaacaaaccctttatctaccaggcacctttcccgatggggaaagacaataccgaatactatctactcacttccgattacgttagcgttgccgacttcgacggcgaaaccatcctgaaagtggaaccagaagccctgaccctgctggcgcagcaagcctttcacgacgcttcttttatgctccgcccggcacaccagaaacaggttgcggctattcttcacgatccagaagccagcgaaaacgacaagtacgtggcgctgcaattcttaagaaactccgaaatcgccgccaaaggcgtgctgccgacctgccaggataccggcaccgcgatcatcgtcggtaaaaaaggccagcgcgtgtggaccggcggcggtgatgaagaaacgctgtcgaaaggcgtctataacacctatatcgaagataacctgcgctattcacagaatgcggcgctggacatgtacaaagaggtcaacaccggcactaacctgcctgcgcaaatcgacctgtacgcggtagatggcgatgagtacaaattcctttgcgttgcgaaaggcggcggctctgccaacaaaacgtatctctaccaggaaaccaaagccctgctgactcccggcaaactgaaaaacttcctcgtcgagaaaatgcgtaccctcggtactgcagcctgcccgccgtaccatatcgcgtttgtgattggcggtacgtctgcggaaaccaacctgaaaaccgtcaagttagcaagcgctcactattacgatgaactgccgacggaagggaacgaacatggtcaggcgttccgcgatgtccagctggaacaggaactgctggaagaggcccagaaactcggtcttggcgcgcagtttggcggtaaatacttcgcgcacgacattcgcgttatccgtctgccacgtcacggcgcatcctgcccggtcggcatgggcgtctcctgctccgctgaccgtaacattaaagcgaaaatcaaccgcgaaggtatctggatcgaaaaactggaacacaacccaggccagtacattccacaagaactgcgccaggccggtgaaggcgaagcggtgaaagttgaccttaaccgcccgatgaaagagatcctcgcccagctttcgcaatacccggtatccactcgtttgtcgctcaccggcaccattatcgtgggccgagatattgcacacgccaagctgaaagagctgattgacgccggtaaagaacttccgcagtacatcaaagatcacccgatctactacgcgggtccggcgaaaacccctgccggttatccatcaggttcacttggcccaaccaccgcaggccgtatggactcctacgtggatctgctgcaatcccacggcggcagcatgatcatgctggcgaaaggtaaccgcagtcagcaggttaccgacgcgtgtcataaacacggcggcttctacctcggtagcatcggcggtccggcggcggtactggcgcagcagagcatcaagcatctggagtgcgtcgcttatccggagctgggtatggaagctatctggaaaatcgaagtagaagatttcccggcgtttatcctggtcgatgacaaaggtaacgacttcttccagcaaatcgtcaacaaacagtgcgcgaactgcactaagtaa

SEQ ID NO: 6718 - DNA, 879 bp, Escherichia coli
atgagttttgatccgacgggttacaccctcgcccatgagcatctgcatattgatctctccggctttaaaaacaacgtggactgccgccttgatcagtatgcgttcatttgccaggagatgaacgacctgatgacccggggcgtgcgtaatgtgattgagatgaccaaccgttacatggggcgcaatgcgcaatttatgcttgatgtaatgcgcgagacggggatcaacgtggtggcctgtaccggttattaccaggacgcgtttttcccggaacatgtggcgacccgcagcgtgcaggaactggcgcaggagatggtcgatgaaattgaacagggtatcgatggcacggagctgaaagccgggatcatcgcggagatcggcaccagcgaaggaaagattacgccgctggaagagaaggtatttattgccgctgcgctggcgcataaccagaccggacgcccgatctccacgcatacgtcgttcagcacgatggggctggagcaactggcgttgctacaagcccacggggttgatctttcgcgcgtcaccgttggtcactgcgatctgaaagacaacctcgacaacattttgaagatgatcgatctcggcgcgtacgtgcagttcgacaccatcggcaagaacagttactacccggacgaaaagcgtattgcgatgcttcatgcgctacgcgaccgtgggttgctgaaccgcgtcatgctgtcgatggatattacgcgccgctcccatttaaaagccaacggtggttatggctatgactatttactaaccacctttattccgcaattgcgccagtcaggattcagtcaggccgatgtggatgtgatgttacgtgaaaatccctctcaatttttccaataa

SEQ ID NO: 6719 - DNA, 1227 bp, Escherichia coli
atggcgcgatttgtggtgttagtgattgatagctttggcgtaggggcaatgaaagatgtcacgctggtgcgtccgcaagatgcgggagcgaatacatgtggtcacatcctgagccagttgccgcatttgcagctaccaacgctggagacgctggggctaatcaacgcattgggttatgcgccaggcgatatgcagccgtcagattccgcaacctggggcgtggcagagctgcaacatgaaggtggcgatacctttatggggcatcaggaaattttaggcacgcgcccgttaccgccgctgcggatgccttttcgcgatgtgattgaccgtgttgagcaggcattagtttccgctggctggcaggtggagcgccgtggcgatgatctgcaatttctgtgggtcaatcaggcggttgcgattggcgataatctcgaggcggatttaggccaggtctataacattaccgccaatctctctgtgatctcttttgacgacgcaatcaaaattggtcgtatcgtgcgtgagcaggtacaggtcggtcgggtcattacatttggtggcctgttaaccgacagtcaacgcattctcgatgccgcagaaagcaaagaagggcgctttattggtatcaatgcgccgcgttctggcgcttatgacaacggtttccaggtcgtgcatatgggctatggcgtcgatgaaaaagtgcaggtgccacaaaaactgtatgaagcaggcgtgccaaccgtgctggtgggtaaggtggcagatatcgtcaacaatccttatggcgtgagctggcaaaatctggtggatagccagcggattatggatatcaccctcaacgaatttaacacccatccgacggcgtttatttgcaccaacattcaggaaaccgacctcgctggtcatgcagaagacgtcgcacgttatgccgaacgtttgcaggtcgttgaccgtaaccttgcccggcttgttgaggcgatgcagccagatgattgcctggtcgtgatggcggatcacggcaacgatccgaccattggtcacagccaccatacccgcgaagtggtgccagtgctggtttatcagcaagggatgatcgctacgcagctcggtgtgcgcaccacgctttctgatgtgggggctaccgtgtgtgaatttttccgcgcgccaccgccacaaaatggtcgctcttttctttcctccctccggtttgcaggagacaccctatga

SEQ ID NO: 6720 - DNA, 447 bp, Escherichia coli
atgacgcccggcgagcgcagcctcattcaacgggccctgaaaaccctggaccgccatcttcatgaacccggcgtggccttcacctccacccgtgcagcacgggaatggctgattctgaacatggcgggactggagcgtgaagaattccgggtgctgtatctgaacaaccagaatcagctgattgccggtgaaaccctcttcaccggcaccatcaaccgcacggaagtccatccccgggaagtgattaaacgcgccctgtaccacaatgccgctgccgtggtactggcacacaatcacccgtccggtgaagtcacacccagtaaggcagaccggcttatcaccgaacgtctggtacaggcactgggcctggtggatatccgggtgccggaccatctgatagtcggtggcaaccaggttttctcctttgccgaacatggtctgctttaa

SEQ ID NO: 6721 - DNA, 222 bp, Escherichia coli
atgaaaattatcacccgtggtgaagccatgcgtattcaccaacaacatccgacatcccgtctttttccgttctgtaccggtaaataccgctggcacggcagtgctgaagcgtataccggtcgtgaagtgcaggatattcccggtgtgctggccgtgtttgctgaacgccgtaaggacagttttggtccgtatgtccggctgatgagcgtcaccctgaactga

SEQ ID NO: 6722 - DNA, 222 bp, Escherichia coli
atgagaatcatcacccgtggtgaagccatgcgtattcaccaacagcatcctgcatcccgtctttttccgttctgtaccggtaagtatcgctggcacggcagtgctgaagcgtatactggtcgtgaagtgcaggatattcccggcgttcttgccgtgtttgcagaacgccgtaaggacagttttggcccgtatgtccggctgatgagtgtcaccctgaactga

SEQ ID NO: 6723 - DNA, 477 bp, Escherichia coli
atgcagcagctttcctttctgcccggagagatgacgcccggcgagcgcagtctcattctgcgggccctgcaaaccctggaccgccatyttcatgaacccggcgtggccttcacctccacccgtgcggcacgggaatggctgattctgaacatggcgggactggagcgggaagagttccgggtgctgtatctgaacaaccagaatcagctgattgccggtgaaaccytcttcaccggcaccatcaaccgtacggaagttcatccccgggaagtgattaaacgcgccctgtaccacaatgccgctgccgtggtgctggcgcacaatcacccgtccggtgaagtcacacccagtaaggcagaccggcttatcaccgaacgtctggtacaggcactgggcctggtggatatccgggtgccggaccatctgatagtcggtggcaaccaggttttctcctttgccgaacatggtctgctttaa

SEQ ID NO: 6724 - DNA, 948 bp, Escherichia coli
atgagactcaggaaatacaataaaagtttgggatggttgtcattatttgcaggcactgtattgctcagtggctgtaattctgcgctgttagatcccaaaggacagattggtctggagcaacgttcactgatactgacggcatttggcctgatgttgattgtcgttattcccgcaatcttgatggctgttggtttcgcctggaagtaccgtgcgagcaataaagatgctaagtacagcccgaactggtcacactccaataaagtggaagctgtggtctggacggtacctatcttaatcatcatcttccttgcagtactgacctggaaaaccactcacgctcttgagcctagcaagccgctggcacacgacgagaagcccattaccatcgaagtggtttccatggactggaaatggttcttcatctacccggaacagggcattgctaccgtgaatgaaatcgctttcccggcgaacactccggtgtacttcaaagtgacctccaactccgtgatgaactccttcttcattccgcgtctgggtagccagatttatgccatggccggtatgcagactcgcctgcatctgatcgccaacgaacccggcacttatgacggtatctccgccagctacagcggcccgggcttctcaggcatgaagttcaaagctattgcaacaccggatcgcgccgcattcgaccagtgggtcgcaaaagcgaagcagtcgccgaacaccatgtctgacatggctgcgttcgaaaaactggccgcgcctagcgaatacaaccaggtggaatatttctccaacgtgaaaccagacttgtttgccgatgtaattaacaagtttatggctcacggtaagagcatggacatgacccagccagaaggtgagcacagcgcacacgaaggtatggaaggcatggacatgagccacgcggaatccgcccattaa

SEQ ID NO: 6725 - DNA, 1365 bp, Escherichia coli
gtgattagtctattcgacatgtttaaggtggggattggtccctcatcttcccataccgtagggcctatgaaggcaggtaaacagttcgtcgatgatctggtcgaaaaaggcttactggatagcgttactcgcgttgccgtggacgtttatggttcactgtcgctgacgggtaaaggccaccacaccgatatcgccattattatgggtcttgcaggtaacgaacctgccaccgtggatatcgacagtattcccggttttattcgcgacgtagaagagcgcgaacgtctgctgctggcacagggacggcatgaagtggatttcccgcgcgacaacgggatgcgttttcataacggcaacctgccgctgcatgaaaacggtatgcaaatccacgcctataacggcgatgaagtcgtctacagcaaaacttattattccatcggcggcggttttatcgtcgatgaagaacactttggtcaggatgctgccaacgaagtaagcgtgccgtatccgttcaaatctgccaccgaactgctcgcgtactgtaatgaaaccggctattcgctgtctggtctcgctatgcagaacgaactggcgctgcacagcaagaaagagatcgacgagtatttcgcgcatgtctggcaaaccatgcaggcatgtatcgatcgcgggatgaacaccgaaggtgtactgccaggcccgctgcgcgtgccacgtcgtgcgtctgccctgcgccggatgctggtttccagcgataaactgtctaacgatccgatgaatgtcattgactgggtaaacatgtttgcgctggcagttaacgaagaaaacgccgccggtggtcgtgtggtaactgcgccaaccaacggtgcctgcggtatcgttccggcagtgctggcttactatgaccactttattgaatcggtcagcccggacatctatacccgttactttatggcagcgggcgcgattggtgcattgtataaaatgaacgcctctatttccggtgcggaagttggttgccagggcgaagtgggtgttgcctgttcaatggctgctgcgggtcttgcagaactgctgggcggtagcccggaacaggtttgcgtggcggcggaaattggcatggaacacaaccttggtttaacctgcgacccggttgcagggcaggttcaggtgccgtgcattgagcgtaatgccattgcctctgtgaaggcgattaacgccgcgcggatggctctgcgccgcaccagtgcaccgcgcgtctcgctggataaggtcatcgaaacgatgtacgaaaccggtaaggacatgaacgccaaataccgcgaaacctcacgcggtggtctggcaatcaaagtccagtgtgactaa

SEQ ID NO: 6726 - DNA, 1653 bp, Escherichia coli
atgcctttccgcgctctgatcgacgcttgctggaaagaaaaatatactgccgcacggtttacccgtgacctgattgccgggataaccgtcgggattattgctatcccgctggcgatggcgttggctattggtagtggtgtggcaccccagtacggtttatataccgcagctgttgcggggattgtcattgctctgacgggtgggtcacgctttagcgtttccggtccgactgcggcatttgtggtaattctctatcccgtgtcgcaacagtttggactggcaggactgctggttgcgaccttgctgtcggggatctttttgattctgatgggtctggcacgctttggtcgcctgattgagtatattccggtttccgtcaccttaggtttcacctcgggtatcgggatcaccatcggtaccatgcagattaaagattttctcggtctgcaaatggcccatgtcccggaacattatctacaaaaagtcggcgcattatttatggcgctgccgaccattaatgtgggtgatgctgccattggcattgtgacgctaggtattcttgttttttggccgcgtctgggcattcgtttacccggtcaccttccggccttgctggctggttgcgcggtgatggggattgttaacctgctcggcggacatgttgctaccatcggttcgcaattccactacgtcctggccgatggttctcagggtaacggtattccgcaactgctgccgcaactggtgctgccgtgggatctgcctaattcagaattcacgctaacctgggattctattcgcacactgctgcctgcggcattctcaatggcaatgctcggcgcaatcgaatctctgctctgcgccgtggtgctggatggtatgaccgggacgaaacacaaggcgaacagcgaactggttggacagggactggggaatattatcgctccgttctttggtggtattaccgctacagctgccatcgcgcgttctgccgctaacgtccgtgccggggcaacgtcccctatctcggcggtgatccactctattctggttattcttgccctgctggtactggcaccgctgctctcctggctgccgctttccgccatggcagccctgctgttgatggtggcgtggaacatgagtgaagcgcacaaagtggtcgacttgctgcgtcatgcgccgaaagatgacatcatcgtcatgctgctgtgcatgtcgctgaccgtgttgtttgatatggttattgccatcagcgtggggatcgtgctggcatcgctgctgtttatgcgtcgtatcgcacgtatgactcgcctggcaccggtagtcgtagatgttccagacgatgtcctggttctgcgcgttattggcccgctgttttttgctgctgctgaaggcttattcacggacctggagtcacgtcttgaaggcaaacggattgtgattctgaagtgggatgccgttccggtacttgatgctggtggtcttgatgcgttccagcgttttgtgaagcgtctgcccgagggatgtgaactgcgcgtgtgcaacgtggaattccagccactgcgcactatggctcgcgctggcattcaaccgatcccgggacgcctggcgttcttcccgaatcgtcgcgcggcgatggcggatttataa

SEQ ID NO: 6727 - DNA, 207 bp, Escherichia coli
atgaataaagaacaatctgctgatgatccctccgtggatctgattcgtgtaaaaaatatgcttaatagcaccatttctatgagttaccctgatgttgtaattgcatgtatagaacataaggtgtctctggaagcattcagggcaattgaggcagcgttggtgaagcacgataataatatgaaggattattccctggtggttgactga

SEQ ID NO: 6728 - DNA, 2313 bp, Escherichia coli
gtgcatatgttgaaggccaggaattgcggctggatacgtttactgcccctgtttatgctgagtctaccagtacaggcggaacttcgatgtgttgcaaatgcagttgatattgaatcatttttttctgcggctaccgctgaagataaacaacaagttgaacaagctatcaacagtagcgtgaatcttgtccccttcggtttatctgcatcgaactggaaagtgcatcgtggcgatttagtggtagaaggtaatatagagagtaatcaaaaattgattgttcttgggaatttgacagtcaaaggtaatatttccactttctctctttctaatccatgggttattctcggtaacgtgacggcaacgaatatagttgcggattcaccactgttaattaccggttcgataaatgcaagtggactggtatttatcgactcatattacgataatccgtctacgattaaggggagtattaatgcgcgtgggatatttatcaatgacataattgcacctgttgttgcgtcttcgacaaatagtgaattcatggtccgtgcgagtgacaaacatgacactgaaaatgtcaaaaaagcgctgatgataataaatcctgatgcatattattgggggctaattaatgatgaagatgctctgaaagaaatttttaagcgaagcaatattcgcatggcagggaatgtctgtaatcagatgaaaaaagaagcgctgtttcgccctaagccttctcctgagttagtgcaagaattgcaaatgctggatgaaggcaaagttgctgcatttgaaggacgagacattgcgacatttgatcttgccgtaatgcgaactctcccaaggcttaaaggaatttcagctaacctacgcaaacaacttattaatagcaatgatgaacaaacgattgaaagtatggcgagatatatgcctgacaatgagattctggagttgaccgatcagcaattgggttaccagcctgttgttctggggttgctcgaccgtgaaccgctctctgtcgaaataatgacgcgaatgagtcgtctacctgatggtgtcggtccgttgaatcttgcgctacgtgaaaatctccctctggatatcgtcatgactctggcgaaaagagattgggatatgatcattcaggagctttataaagatgcgtggttattgcctgaatccattattgatggctatatccgcagtgatgattcctctattcgtcaggtcggtgctggaggacaactcacctacaatcaggcaatgcagttggcgaacgattcatcaaacaatgttgtcacaagcttagcgttcaagctggcagagatgaaacaccatggtcaattgttgcggatgacgccacaagagagtgacaaagttgcaggctatttataccaaaaattcgagaatgacgatgatctaatacgtgtgttatttttagcattgccagataacttacagtttaattttgttaaaaggatggagaaaaaatccccggcctacttttgctgtcgggatatgcaggtaattcactctgacgctgctttacaacggttattgacacgtttcaacgatcctgaagggtggagtaatctggcgaaaaatcagtatctgagcacgtcgatgaaacaaaaaatttggcaacgtgctttatcgcatcggaaaaataatccgaaagcagattcagatgcatatgaaaccagcgctgatatgattttgtctgagctgattagccacggcgaagttgatgaccagatgctattaaatgccaccgccctgatacgttcggacgactgggactttttagagagtgcattaattagttgggataatttacccgctgttgttctcaaggaattacagcaaaacacgccacgcaatgatatttgggcgaagttttttctgaggcaggaaaacagttcccgtgcgcaggttgacgaagcgttacgtgtttattatgcactagaccccgatgcgttagcacaactggatgtactggcaaaacaaccggatcgtatatggtggagtacactggcgaaaagcaatctcacatttttcaagttcggcgcacttaacaaccgccacacaccgcctgcagtactggcggcagaaattgatcccgagtggtggattgtggcgatgaataatccccgttttccagttgatgtattaaaggcgaggctgaaacgtgatcctttgctggcgttagagcttgttaaccctgaactggatttagtccgccagctggcgcttaacggtaagacgcgcgcaatacgggaacaagcgatgagaaaacttgatgagttgtattga

SEQ ID NO: 6729 - DNA, 1212 bp, Escherichia coli
atgcttaccacccttatttatcgtagccatatacgtgacgacgaacctgtcaaaaaaatcgaagaaatggtttcgatagcaaatcgcaggaacatgcagtctgacgtaacagggatcttactgtttaatggttctcattttttccagcttctggaaggtccggaagaacaggttaaaatgatatatcgggctatatgccaggatccacggcactataatattgttgagctgctgtgcgattacgcgcctgctcgccgttttggcaaagcgggaatggaattatttgatttgcgcctgcacgagcgagatgacgttttacaggccgtattcgacaaaggcacatcaaaatttcagctaacttatgatgacagagcgctacaattttttcgtacttttgtccttgcaaccgaacaatcaacctatttcgagatccctgccgaagactcctggctttttatcgctgacggatctgataaagaacttgattcctgtgccctttcaccaactataaacgaccactttgcctttcatcctattgtcgatcccttatcgcggcggataatcgcttttgaagccattgtgcaaaaaaatgaagatagcccatcagccatagcggttgggcagcgtaaagacggggaaatctacacagcggatctcaaaagtaaggcgcttgcattcacgatggcacacgcacttgagctcggtgataaaatgatttcaatcaatctattacctatgaccctggttaacgaacctgacgcagtctcttttttacttaatgaaataaaggccaatgctctggtgcctgaacaaatcatcgttgaatttactgaaagtgaagtcatatctcggtttgatgagtttgccgaagcgattaaatcgctaaaggctgctggtatcagtgtagcaattgatcattttggcgcaggttttgctggtttgttactcctgtcacgcttccagcctgacagaattaaaatcagtcaggaattgattaccaatgttcataaaagtgggccacggcaggcaattattcaggcgatcataaaatgctgtacatcacttgaaattcaagtcagtgctatgggcgtggcaacaccagaagagtggatgtggcttgaatccgcaggaattgagatgtttcagggagatctgtttgctaaagctaaattgaatggtatcccttccatagcgtggccagagaaaaaataa

SEQ ID NO: 6730 - DNA, 2613 bp, Escherichia coli
atgactcaacagccacaagccaaataccgtcacgattatcgtgcgccggattaccagattactgatattgacttgacctttgacctcgacgcgcaaaagacggtcgttaccgcggtcagccaggctgtccgtcatggtgcatcagatgctccccttcgtctcaacggcgaagacctcaaactggtttctgttcatattaatgatgagccgtggaccgcctggaaagaagaagagggcgcactggttatcagtaatttgccggagcgttttacgcttaagatcattaatgaaataagcccggcggcgaataccgcgctggaagggctttatcagtcaggcgatgcgctttgcacccagtgtgaagccgaaggtttccgccatattacgtattatctcgaccgcccggacgtgctggcgcgttttaccaccaaaattattgccgataaaatcaaatatcccttcctgctttccaatggtaaccgcgttgcgcaaggcgaactggaaaacggacgccattgggtacagtggcaggacccgttcccgaaaccgtgctacctgtttgcgctggtggcaggcgactttgatgtactgcgcgatacctttaccacgcgttctggtcgcgaagtagcactggagctgtacgtcgatcgcggcaaccttgatcgcgcgccgtgggcgatgacctcgctgaaaaactccatgaaatgggatgaagaacgctttggcctggagtatgacctcgacatctatatgatcgtcgcggtggatttcttcaatatgggcgcaatggagaataaggggctgaatatctttaactccaaatatgtgctggcccgcaccgacaccgccaccgacaaagattacctcgatattgaacgcgttatcggccatgaatatttccataactggaccggtaaccgagtgacctgtcgcgactggttccagctcagcctgaaagaaggtttaaccgtcttccgcgatcaggagttcagctctgaccttggttcccgcgcagttaaccgcatcaataatgtacgcaccatgcgcggattgcagtttgcagaagacgccagcccgatggcgcacccgatccgcccggatatggtcattgagatgaacaacttctacaccctgaccgtttacgagaagggcgcggaagtgattcgcatgatccacaccctgcttggcgaagaaaacttccagaaagggatgcagctttatttcgagcgtcatgatggtagtgcagcgacctgtgacgactttgtgcaggcgatggaagatgcgtcgaatgtcgatctctcccatttccgccgttggtacagccagtccggtacaccgattgtgaccgtcaaagacgactacaatccggaaaccgagcagtacaccctgaccatcagccagcgcacgccagccacgccggatcaggcagaaaaacagccgctgcatattccgtttgccatcgaactgtatgataacgaaggcaaagtgatcccgttgcagaaaggcggtcatccggtgaattccgtgctgaacgtcactcaggcggaacagacctttgtctttgataatgtctacttccagccggtgcctgcgctgctgtgcgaattctctgcgccagtgaaactggaatataagtggagcgatcagcaactgaccttcctgatgcgtcatgcgcgtaatgatttctcccgctgggatgcggcgcaaagtttgctggcaacctacatcaagctgaacgtcgcgcgtcatcagcaaggtcagccgctgtctctgccggtgcatgtggctgatgctttccgcgcggtactgcttgatgagaagattgatccagcgctggcggcagaaatcctgacgctgccttctgtcaatgaaatggctgaattgttcgatatcatcgacccgattgctattgccgaagtacgcgaagcactcactcgtactctggcgactgaactggcggatgagctactggctatttacaacgcgaattaccagagcgagtaccgtgttgagcatgaagatattgcaaaacgcactctgcgtaatgcctgcctgcgtttcctcgcttttggtgaaacgcatctggctgatgtgctggtgagcaagcagttccacgaagcaaacaatatgactgatgcgctggcggcgctttctgcggcggttgccgcacagctgccttgccgtgacgcgctgatgcaggagtacgacgacaagtggcatcagaacggtctggtgatggataaatggtttatcctgcaagccaccagcccggcggcgaatgtgctggagacggtgcgcggcctgttgcagcatcgctcatttaccatgagcaacccgaaccgtattcgttcgttgattggcgcgtttgcgggcagcaatccggcagcgttccatgccgaagatggcagcggttacctgttcctggtggaaatgcttaccgacctcaacagccgtaacccgcaggtggcttcacgtctgattgaaccgctgattcgcctgaaacgttacgatgccaaacgtcaggagaaaatgcgcgcggcgctggaacagttgaaagggctggaaaatctctctggcgatctgtacgagaagataactaaagcactggcttga

SEQ ID NO: 6731 - DNA, 480 bp, Escherichia coli
atgacagtggcgtatattgccataggcagcaatctggcctctccgctggagcaggtcaatgctgccctgaaagcattaggcgatatccctgaaagccacattcttaccgtttcttcgttttaccgcaccccaccgctggggccgcaagatcaacccgattacttaaacgcagccgtggcgctggaaacctctcttgcacctgaagagctactcaatcacacacagcgtattgaattgcagcaaggtcgcgtccgcaaagctgaacgctggggaccacgcacgctggatctcgacatcatgctgtttggtaatgaagtgataaatactgaacgcctgaccgttccgcactacgatatgaagaatcgtggatttatgctgtggccgctgtttgaaatcgcgccggagttggtgtttcctgatggggagatgttgcgtcaaatcttacatacaagagcatttgacaaattaaacaaatggtaa

SEQ ID NO: 6732 - DNA, 1158 bp, Escherichia coli
atgacgaaacatgccaggtttttcctcctgccctcctttattctgatctccgcggctttaatcgccggttgtaacgataagggagaagagaaagctcacgtcggtgaaccgcaggttaccgttcatattgtaaaaacggccccgttagaagttaagactgaattaccaggccgcaccaatgcttatcgtatagccgaagttcgcccacaggttagcgggatcgtactgaatcgcaatttcactgaaggcagcgatgtgcaagcaggccagtccctgtaccagatcgatcccgcgacctatcaggcaaattatgacagcgcgaaaggcgaactggcgaaaagtgaagccgccgccgccatcgcgcatttgacggtaaaacgttacgttccgctcgtgggtacgaaatacatcagccagcaggagtacgaccaggccattgctgatgctcgtcaggccgatgccgccgtgattgccgcaaaagccacagtcgaaagcgctcgcatcaatcttgcttataccaaagtcactgcgccaattagcggacgtatcggcaaatcgactgtgaccgaaggcgctcttgtcactaatgggcaaacgactgaactggcgactgtccagcagctcgatcctatctacgttgatgtgacccaatccagcaacgattttatgaggctgaagcaatccgtagagcaaggaaatttgcataaggaaaacgccaccagcaacgtagagttggtcatggaaaacggtcaaacctatcccctgaaaggtacgctgcaattctccgatgtgaccgttgatgaaagcaccggctccataaccctacgtgctgtcttccctaacccgcaacatacgcttttgccgggtatgtttgtgcgtgcacggattgatgaaggcgtccaacctgacgccattcttatcccgcaacaaggcgttagccgcacaccgcgtggtgatgcaaccgtgctgattgttaacgataaaagtcaggttgaagcgcgccctgtcgttgccagtcaggcgattggcgataaatggttgattagtgaaggactgaaatctggcgatcaagtcattgtcagcggcctgcaaaaagcgcgtccgggagagcaggttaaagccactaccgatacccccgcagatactgcatcgaagtaa

SEQ ID NO: 6733 - DNA, 774 bp, Escherichia coli
atgataaaacggacgttattagcggcggccatttttagcgcattgcccgcttatgccgggttaacttccattaccgcgggctacgattttaccgattattctggcgatcatggcaaccgtaatttagcgtatgctgaactggtggcgaaagttgaaaacgcaacgctgctttttaatctttcccaggggcgtcgtgattatgaaactgaacatttcaatgccactcgcggtcagggtgcggtctggtataaatggaataactggctgacaacccgaacgggtattgcctttgcggataatacgccggtctttgcccgccaggattttcgtcaggatattaacctggccctgttaccaaaaacgcttttcacgaccggttatcgctacactaaatattacgatgatgtcgaagtcgatgcctggcaaggcggcgtatcactctatactggcccggtgatcaccagctaccgctatacccattatgactccagcgatgcaggtggtagttatagcaatatgatttccgtgcgtctgaatgacccgcgcggcactggttatacgcaactatggctaagccgcggaacaggtgcttacacctatgactggacgccagaaacacgctacggcagcatgaagagcgtcagtctgcaacgtattcaaccgctgactgagcaacttaatctcgggctgacggcaggtaaagtgtggtacgacaccccaaccgatgattttaacggtctgcaacttgcagcccgtctgacctggaaattctga

SEQ ID NO: 6734 - DNA, 1395 bp, Escherichia coli
atgcctgacgctaaaaaacaggggcggtcaaacaaggcaatgacgtttttcgtctgcttccttgccgctctggcgggattactctttggcctggatatcggtgtaattgctggcgcactgccgtttattgcagatgaattccagattacttcgcacacgcaagaatgggtcgtaagctccatgatgttcggtgcggcagtcggtgcggtgggcagcggctggctctcctttaaactcgggcgcaaaaagagcctgatgatcggcgcaattttgtttgttgccggttcgctgttctctgcggctgcgccaaacgttgaagtactgattctttcccgcgttctactggggctggcggtgggtgtggcctcttataccgcaccgctgtacctctctgaaattgcgccggaaaaaattcgtggcagtatgatctcgatgtatcagttgatgatcactatcgggatcctcggtgcttatctttctgataccgccttcagctacaccggtgcatggcgctggatgctgggtgtgattatcatcccggcaattttgctgctgattggtgtcttcttcctgccagacagcccacgttggtttgccgccaaacgccgttttgttgatgccgaacgcgtgctgctacgcctgcgtgacaccagcgcggaagcgaaacgcgaactggatgaaatccgtgaaagtttgcaggttaaacagagtggctgggcgctgtttaaagagaacagcaacttccgccgcgcggtgttccttggcgtactgttgcaggtaatgcagcaattcaccgggatgaacgtcatcatgtattacgcgccgaaaatcttcgaactggcgggttataccaacactaccgagcaaatgtgggggaccgtgattgtcggcctgaccaacgtacttgccacctttatcgcaatcggccttgttgaccgctggggacgtaaaccaacgctaacgctgggcttcctggtgatggctgctggcatgggcgtactcggtacaatgatgcatatcggtattcactctccgtcggcgcagtatttcgccatcgccatgctgctgatgtttattgtcggttttgccatgagtgccggtccgctgatttgggtactgtgctccgaaattcagccgctgaaaggccgcgattttggcatcacctgctccactgccaccaactggattgccaacatgatcgttggcgcaacgttcctgaccatgctcaacacgctgggtaacgccaacaccttctgggtgtatgcggctctgaacgtactgtttatcctgctgacattgtggctggtaccggaaaccaaacacgtttcgctggaacatattgaacgtaatctgatgaaaggtcgtaaactgcgcgaaataggcgctcacgattaa

SEQ ID NO: 6735 - DNA, 312 bp, Escherichia coli
atgcagaaccaaagaatccgtatccgcctgaaagcgtttgatcatcgtctgatcgatcaagcaaccgcggaaatcgtcgagactgccaagcgcactggtgcgcaggtccgtggtccgatcccgctgccgacacgcaaagagcgcttcactgttctgatctccccgcacgtcaacaaagacgcgcgcgatcagtacgaaatccgtactcacttgcgtctggttgacatcgttgagccaaccgagaaaaccgttgatgctctgatgcgtctggatctggctgccggtgtagacgtgcagatcagcctgggttaa

SEQ ID NO: 6736 - DNA, 993 bp, Escherichia coli
atgcagagcgataaagtgctcaatttgccggcaggctactttggtattgtgttggggacgatagggatgggatttgcctggcgctatgccagccaggtttggcaggtcagccactggttaggggatgggctggtgattctggcgatgatcatctggggattattgactagcgcatttattgcccgactcatacgctttccgcatagcgtgctggcggaagttcgccatccagtgctgagcagttttgtgagtttgtttccggcaacgacgatgctggtggcgattggttttgttccgtggtttcgcccactggcggtgtgcctgttcagttttggtgtcgtggttcagttggcttatgccgcctggcaaactgcgggattatggcgcggatctcaccctgaagaagctaccacgcctggactgtatctgccgacagttgccaacaactttatcagcgcaatggcctgtggtgcgttgggctacaccgacgccggtctggtgtttttaggcgcaggcgttttctcatggctaagccttgaaccggtgatcttgcagcgtctgcgcagttcgggagaattacccacggcactgcggacatcactcggcattcagctcgctcctgcgctggtggcttgtagtgcctggctgagcgtcaacggcggcgagggtgacacgctggcgaaaatgcttttcggttatggactgctgcaactgctgtttatgctacgtctgatgccatggtatctctcccagccatttaatgcttcattctggagtttctcgttcggcgtatctgcactggcaaccaccggtttgcatctggggagtggcagcgataatggatttttccatacgctggcggtgccgctgtttatctttaccaattttattattgcaatactgctcatccgtacttttgcgcttctgatgcagggaaaattgttagtcagaaccgagcgcgccgttttaatgaaagcagaggacaaagaatga

SEQ ID NO: 6737 - DNA, 450 bp, Escherichia coli
atgggtatcatagctcaaaataaaatcagttcattgggcatgctgttcggtgccatcgctttaatgatggggattatccacttttcattcggccctttctccgcaccaccgccaacgtttgaaagcatcgtggcggacaaaacggctgaaattaaaagaggtcttctcgccggaataaaaggcgaaaaaattaccaccgtggagaaaaaagaggacgtagatgtcgataaaatcctcaatcaaagcggtatcgcactggccattgctgcgctactttgcgcatttattggcggtatgcgtaaggaaaatcgctggggcattcgcggcgcgctggtttttggcggcgggacgctggctttccataccttgctttttggtatcggcatcgtgtgcagcattttgctgatattccttatcttttccttcctgaccggcggttcactggtttaa

SEQ ID NO: 6738 - DNA, 1239 bp, Escherichia coli
atggctgacactcgccctgaacgtcgctttacgcgcattgatcgtctcccgccctacgtttttaacatcaccgctgaactgaaaatggctgcgcgtcggcgcggcgaagatattatcgatttcagcatgggtaacccggacggtgcgactccgccgcatatcgtcgaaaaattatgtactgtggcccagcgcccggacacgcatggttactccacttcacgcggcattccgcggttacgtcgcgccatttcccgctggtatcaggatcgctacgacgttgaaatcgacccggaatcagaagccatcgtcactattggttcgaaagagggcctggcgcatctgatgctggcgacgctggatcatggtgacacggtgctggtgccgaatccaagttacccgatccatatttatggcgcggtgattgccggggcgcaggtacgctcagtgccgctggtggaaggtgtcgatttcttcaacgaactggagcgagccattcgtgaaagttatccgaaaccgaagatgatgatcctcggcttcccgtcaaacccaaccgcgcaatgcgtggaactggagttcttcgaaaaagtagtggcgctggcgaaacgctacgatgtgctggtggtccatgacctggcctatgccgatatcgtctacgatggctggaaagcgccgtcaattatgcaggtaccgggtgcacgcgatgtggcagtcgagttctttacgctgtcgaaaagctacaacatggcgggctggcgtatcggctttatggttggcaacaaaacgctggtcagcgccctggctcgtattaaaagctatcacgattacggcacctttacgccgttgcaggtggcggcgattgcggcgctggagggcgatcaacagtgcgtgcgcgacattgccgaacagtacaaacgccgccgtgatgtattggttaaagggctgcatgaagcgggctggatggttgaaatgccgaaggcttcgatgtatgtctgggcgaaaatcccggaaccatatgcggccatgggatcgctggaatttgccaagaagctccttaacgaagcgaaggtttgtgtctcgccggggattggctttggcgactatggtgatacgcatgttcgctttgcactgattgaaaaccgcgaccgtattcgtcaggccatcagagggattaaagcgatgttccgtgccgacggtttactacccgccagcagcaaacatattcacgaaaacgcggaataa

SEQ ID NO: 6739 - DNA, 216 bp, Escherichia coli
atgtcaaataaaatgactggtttagtaaaatggtttaacgctgataaaggtttcggctttatttctcctgttgatggtagtaaagatgtgtttgtgcatttttctgcgattcagaatgataattatcgaaccttatttgaaggtcaaaaggttaccttctctatagagagtggtgctaaaggtcctgcagcagcaaatgtcatcattactgattaa

SEQ ID NO: 6740 - DNA, 1461 bp, Escherichia coli
atgaaaaaattactgcgtctttttttcccgctctcgctgcgggtacgttttctgttggcaacggcagcggtagtactggtgctttcgcttgcctacggaatggtcgcgctgatcggttatagcgtcagtttcgataaaactacgtttcggctgttacgtggcgagagcaatctgttctatacccttgcgaagtgggaaaacaataagttgcatgtcgagttacccgaaaatatcgacaagcaaagccccaccatgacgctaatttatgatgagaacgggcagcttttatgggcgcaacgtgacgtgccctggctgatgaagatgatccagcctgactggctgaaatcgaatggttttcatgaaattgaagcggatgttaacgataccagcctcttgctgagtggagatcattcgatacagcaacagttgcaggaagtgcgggaagatgatgacgacgcggagatgacccactcggtggcagtaaacgtctacccggcaacatcgcggatgccaaaattaaccattgtggtggtggataccattccggtggagctaaaaagttcctatatggtctggagctggtttatctatgtgctctcagccaatctgctgttagtgatcccgctgctgtgggtcgccgcctggtggagtttacgccccatcgaagccctggcaaaagaagtccgcgaactggaagaacataaccgcgaattgctcaatccagccacaacgcgagaactgaccagtctggtacgaaacctgaaccgattgttaaaaagtgaacgcgaacgttacgacaaataccgtacgacgctcaccgacctgacccatagtctgaaaacgccactggcggtgctgcaaagtacgctgcgttctctgcgtagtgaaaagatgagcgtcagtgatgctgagccggtaatgctggagcaaatcagccgcatttcacagcaaattggctactacctgcatcgtgccagtatgcgcggcgggacattgctcagccgcgagctgcatccggtcgccccactgctggacaatctcacctcagcgctgaacaaagtgtatcaacgcaaaggggtcaatatctctctcgatatttcgccagagatcagctttgtcggtgagcagaacgattttgtcgaggtgatgggcaacgtgctggataatgcctgtaaatattgcctcgagtttgtcgaaatttctgcaaggcaaaccgacgagcatctctatattgtggtcgaggatgatggccccggtattccattaagcaagcgagaggtcattttcgaccgtggtcaacgggttgatactttacgccctgggcaaggtgtagggctggcggtagcccgcgaaatcaccgagcaatatgagggtaaaatcgtcgccggagagagcatgctgggcggtgcgcggatggaggtgatttttggtcgccagcattctgcgccgaaagatgaataa

SEQ ID NO: 6741 - DNA, 1368 bp, Escherichia coli
atgcgcacacaagttctgcttaatcgattgaaaaaacatcttttttttaaagatgtgttcgatgctgtgtacctgtgctcacagaggtctactttttcgcgaaaacgtagatctctaccgcccaacgaaaagcatgaaagcgatcacgaatcccattgggtcgtcatgttctgccgatcgcatcttcctatcctcgctccaggcctgccgcataaccaatcaggcttcctacttacagaattgagaaaagaggatgtggaaatgctcagtcaaattcaacgctttggcggcgcgatgttcacgccagtgctgctgtttcccttcgccgggattgtggtgggtcttgccatcttgctgcaaaacccgatgtttgtcggggaatcactgaccgatccgaacagtttattcgcgcaaatcgtacacattattgaagagggcggttggacggtattccgtaatatgccgctgatttttgctgtcggtttacccattggccttgctaagcaagcgcaggggcgtgcttgtctggcggtgatggtgagtttcctgacctggaactatttcatcaacgcgatgggaatgacctggggaagctacttcggcgtcgatttcactcaggacgcggtggcaggtagcggtctgacaatgatggccgggattaaaaccctcgataccagcattatcggcgcaattatcatttccggcattgtgacggcgctgcataaccgtctgttcgataaaaaactgccggtttttctcggcattttccaggggacgtcttatgtggtgattatcgccttcctggtgatgatcccctgtgcctggctgacgttgctcggctggccaaaagtacaaatggggattgaatctctgcaagcgttcctgcgttcggcgggtgcacttggggtctgggtttacaccttcctcgaacgtattctgatcccaaccggtttacaccacttcatctacggacagtttatctttggtccggcagctgttgaaggcggcattcagatgtactgggcgcagcatctgcaagagttcagtttgagcgccgagccgctgaaatcgttgttcccggaaggcggttttgccctgcacggtaactcaaaaatctttggtgccgtgggcatttctttagcgatgtacttcactgccgcaccggaaaatcgggtaaaagtggcgggcttgctgattcccgcaaccttaaccgccatgctggtgggaattaccgaaccgctggaatttaccttcctgttcatttcaccgttgctgtttgcggtacacgccgtgctggcggcctcaatgtcgaccgtaatgtatctctttggtgtggtgggcaacatgggcggaggtctgattgactag

SEQ ID NO: 6742 - DNA, 972 bp, Escherichia coli
gtgaccattgctattgttataggcacacatggttgggctgcagagcagttgcttaaaacggcagaaatgctgttaggcgagcaggaaaacgtcggctggatcgatttcgttccaggtgaaaatgccgaaacgctgattgaaaagtacaacgctcagttggcaaaactcgacaccactaaaggcgtgctgtttctcgttgatacatggggaggcagcccgttcaatgctgccagccgcattgtcgtcgacaaagagcattatgaagtcattgcaggcgttaacattccaatgctcgtggaaacgttaatggcccgtgatgatgacccaagctttgatgaactggtggcactggcagtagaaacaggccgtgaaggcgtgaaagcactgaaagccaaaccggttgaaaaagccgcgccagcacccgctgccgcagcaccaaaagcggctccaactccggcaaaaccaatggggccaaacgactacatggttattggccttgcgcgtatcgacgaccgtctgattcacggtcaggtcgccacccgctggaccaaagaaaccaatgtctcccgtattattgttgttagtgatgaagtggctgcggataccgttcgtaagacactgctcacccaggttgcacctccgggcgtaacagcacacgtagttgatgttgccaaaatgattcgcgtctacaacaacccgaaatatgctggcgaacgcgtaatgctgttatttaccaacccaacagatgtagagcgtctcgttgaaggcggcgtgaaaatcacctctgttaacgtcggtggtatggcattccgtcagggtaaaacccaggtgaataacgcggtttcggttgatgaaaaagatatcgaggcgttcaagaaactgaatgcgcgcggtattgagctggaagtccgtaaggtttccaccgatccgaaactgaaaatgatggatctgatcagcaaaatcgataagtaa

SEQ ID NO: 6743 - DNA, 411 bp, Escherichia coli
atgttacaaccaaagcgtacaaaattccgtaaaatgcacaaaggccgtaaccgcggtctggcgcagggtacggatgttagcttcggcagcttcggtctgaaagctgttggccgtggtcgtctgactgcccgtcagatcgaagcagcacgtcgtgctatgacccgtgcagttaagcgtcaaggtaagatctggatccgtgtgttcccggacaaaccgatcactgaaaagccgctggcagtgcgtatgggtaaaggtaaaggtaacgtggagtattgggttgccttgattcagccgggtaaagtcctgtatgaaatggacggtgttccggaagagctggcccgtgaagcattcaagctggcagcagcgaaactgccgattaaaaccacctttgtaactaagacggtgatgtaa

SEQ ID NO: 6744 - DNA, 3099 bp, Escherichia coli
atgggggatattatgcgtcccattccgtttgaggaacttttgacgcgcatatttgatgaataccaacaacaacgctcaatctttggtattcccgagcaacagttttactcacctgtaaaaggtaaaactgttagcgtcttcggtgaaacctgtgccactcccgtcggccctgccgctggcccgcacacgcagctcgcgcaaaatattgtcacttcctggctgactggcggacgcttcatcgaactaaaaaccgtccaaattcttgaccgcctggagctggaaaagccctgtatcgatgccgaagacgagtgctttaacaccgaatggtctaccgagtttaccctgcttaaagcctgggatgaatacctcaaagcctggtttgccctgcaccttctcgaagcgatgttccagccttctgattccggtaaatcgttcatctttaatatgagcgtcggttacaacctcgaaggtattaagcaaccgccgatgcaacagttcatcgacaatatgatggacgcatctgaccatccgaaattcgctcaatatcgcgatacgctgaataaattactccaggatgacgcatttttagctcgccacggattgcaggaaaaacgcgaaagcttgcaagccttacccgctcgcatccccaccagtatggtgcatggcgtcaccctctccaccatgcacggctgtcctccgcatgaaatcgaagccatttgccgctacatgctggaagaaaaagggctcaacacctttgtgaaacttaacccgaccttactggggtacgcgcgtgttcgtgagatcctcgatgtctgcggtttcggttacataggcttaaaagaagagtcatttgatcacgacctcaagctgacgcaagcactggaaatgctggaacgcctgatggcactggcaaaagaaaaatcactcggctttggcgtaaaactgactaacactctcggcaccatcaacaataaaggcgcactgcctggtgaagagatgtatatgtcaggccgtgcgctgttcccgctctccatcaatgttgcagcagttctctctcgcgcctttgacggcaaactgcccatttcttattccggtggtgccagtcagctgactatccgcgatatttttgatacaggtattcgccctattactatggcaaccgacctgctgaaacctggcggctatctgcgcttaagtgcctgcatgcgcgagctggaaggctccgacgcctggggacttgaccatgttgacgtcgaacgactgaacagactggcagcagatgcgttaaccatggaatacacccagaaacactggaagccagaagagcgtattgaagtggcagaagacctgccgctgaccgactgctacgttgccccctgtgttactgcctgcgctatcaagcaagatattccggaatacatccgtctgcttggcgaacaccgctatgccgacgcgctggaactcatctaccaacgcaacgctctgcccgccattaccggtcatatttgcgatcaccagtgccaatacaactgtacccgcctggattacgacagtgcgctgaatatccgcgaactgaaaaaagtcgcgctggaaaaaggttgggatgaatataagcaacgctggcacaaaccagccggttctggttcacgccatccggttgccgtgattggtgcaggtccggcgggtctggcagcaggttacttccttgccagagcgggccatccggttacgctgtttgaacgcgaagccaatgcgggcggcgtggtgaaaaatatcattcctcagttccgtattcctgcagagttaattcagcacgatatcgattttgttgccgctcacggcgtgaaatttgagtatggctgctcacccgatttaaccattgagcagttaaaaaatcagggcttccactatgttctgattgccaccggcactgataaaaatagcggtgtgaaactggcgggcgacaaccaaaatgtctggaaatcactccccttcctgcgtgaatacaacaagggtacagcgctcaagctgggcaaacatgtggtcgttgtcggggcgggtaacaccgcaatggactgcgctcgtgcggcgttacgcgttccaggcgtagaaaaagcaacgatcgtttaccgtcgttcactacaagagatgcccgcatggcgcgaagagtatgaagaagcgttgcacgacggcgtagagttccgtttcctgaataatccggaacgtttcgatgctgatggcaccttaaccttgcgcgttatgtcgcttggcgaaccggatgagaaaggtcgtcgtcgtccggttgaaaccaatgaaacagtaacactgcttgtagacagcctgatcaccgccattggtgaacagcaggatactgaagccctgaatgcgatgggcgtgccgctggacaaaaacggctggccagacgtcgaccataatggcgaaactcgtctgactgacgtctttatgatcggcgacgtacagcgcggaccatcctccattgtcgctgctgtcggaaccgcgcgtcgggcgaccgatgccatccttagtcgggaaaatatccgttcccaccagaacgataaatactggaacaacgtcaatccagcggaaatctatcaacgtaaaggcgatatctctatcacgctggtgaacagtgacgatcgtgacgcgtttgtcgcccaggaagccgctcgctgcctcgaatgtaactacgtttgcagcaagtgtgtggatgtctgcccgaaccgcgccaacgtctccattgcggtcccaggcttccagaaccgtttccagacgctgcacctcgacgcttactgtaacgaatgcggcaactgcgctcagttctgtccgtggaacggtaaaccgtacaaagacaaaatcaccgtcttcagcctggcgcaagactttgataacagcagcaacccaggcttccttgtggaagattgccgggtacgagtacgtctgaataaccaaagctgggtgttaaacatcgacagcaaaggtcagtttaacaacgtaccaccggagctgaacgatatgtgccgcatcatcagccatgtccaccagcatcatcattatctgctgggccgcgtggaggtgtaa

SEQ ID NO: 6745 - DNA, 1551 bp, Escherichia coli
atgcccacttctcatgaaaatgcactgcaacaacgttgccagcaaattgtcaccagcccagtgcttagcccggagcagaagcgccattttctggcactggaagcagaaaacaatctgccttacccacagcttcctgccgaagcccgccgcgcgctggatgaaggtgtaatctgcgatatgtttgaaggtcatgcgccgtacaaaccgcgctatgtcttacccgattacgcccgttttctggcgaacggttccgaatggctggagctggaaggcgcgaaagatcttgatgacgcactctctctgctgaccattctttaccaccacgtaccgtcggtcacatcgatgccggtctacctggggcaactggatgcgttgttgcaaccgtatgttagaattctaacacaagacgagatcgatgttcgaataaaacgtttctggcgttacctcgacagaaccctgccagacgcctttatgcacgccaatatcggcccgtctgattcgcccattacccgcgcgatcttacgtgcagatgcagagttgaagcaggtttcaccgaacctgacctttatctacgatcctgaaatcacccctgatgacctgctgctggaagtggcgaagaacatctgtgaatgtagcaaaccgcacatcgccaacggtccggtgcatgataaaattttcacaaaagggggctacgggattgtgagctgttacaactcactgccgctggcgggtggtggcagcacgctggtacgccttaacctgaaagccattgccgagcgcagcgaatcgctggatgacttctttacgcgcactctaccgcactactgccagcagcagatcgccatcatcgatgcgcggtgtgaattcctctatcaacaatcacacttctttgagaatagcttcctggtgaaagaagggctgattaaccctgaacgttttgtgccaatgtttggcatgtatgggctggcggaagcggttaacttgctgtgtgaaaaagaagggattgccgcgcgctacggtaaagaagccgccgcaaatgaagtaggttatcgcatcagcgcgcaactggcggagtttgtcgccaatacccccgtgaaatatggctggcaaaaacgcgccatgttacacgcacagtcggggatcagttccgatatcggcaccacgccgggcgcgcgtttgccgtatggcgatgagccagatccgatcacccatctgcaaactgtcgccccgcatcatgcttattattattccggcatcagcgacattctgacgctcgacgaaaccatcaaacgtaacccgcaggcactggtacagctttgcctcggtgcctttaaagccggaatgcgtgaatttaccgccaatgtcagcggtaacgatctggttcgcgttaccggttatatggtgcgtttgtcggatttagaaaaatatcgcgccgaaggttcacgcaccaacaccacctggctgggcgaagaagccgcacgcaacactcgtattctggaacgccagccgcgcgtgataagccatgaacagcagatgcgctttagtcagtaa

SEQ ID NO: 6746 - DNA, 246 bp, Escherichia coli
ttggtacagctttgcctcggtgcctttaaagccggaatgcgtgaatttaccgccaatgtcagcggtaacgatctggttcgcgttaccggttatatggtgcgtttgtcggatttagaaaaatatcgcgccgaaggttcacgcaccaacaccacctggctgggcgaagaagccgcacgcaacactcgtattctggaacgccagccgcgcgtgataagccatgaacagcagatgcgctttagtcagtaa

SEQ ID NO: 6747 - DNA, 690 bp, Escherichia coli
atgtcccaacctcgcccactgctctctcctcccgaaactgaagaacagttgttagcgcaagcacagcaactttctggttatacattgggagaactggcggcacttgtcgggctggttacgccagagaatttaaaacgcgataaaggctggattggcgtgttactggagatctggctaggtgccagcgcagggagtaaacctgagcaagattttgctgctctgggcgtggaacttaaaactatccctgtggatagtcttggtcgtccgctggaaacaacattcgtttgtgttgccccgttaacgggcaatagcggggtgacctgggaaaccagccacgtgcgccacaaactcaaacgcgtactgtggataccggttgaaggcgagcgcagcatcccgctggcgcagcgtcgcgttggatcaccgttgctgtggagcccgaatgaagaggaagaccggcagctacgcgaagactgggaagaattaatggatatgattgttctcggtcaggttgagcggattaccgctcgtcacggggagtatttacagatacgaccgaaagcagcgaatgcgaaagcgcttaccgaagccattggtgcccggggcgaacggattctgacgctgccacgcggcttttatttgaagaagaatttcaccagtgcactactggcccgtcattttctgatccagtag

SEQ ID NO: 6748 - DNA, 810 bp, Escherichia coli
atgttcttaattaacggtcataagcaggaatcgctggcagtaagcgatcgggcaacgcagtttggtgatggttgttttaccaccgccagagttatcgacggtaaagtcagtttgttatcggcgcatatccagcgactacaggatgcttgtcagcggttgatgatttcctgtgacttctggcctcagcttgaacaagagatgaaaacgctggcagcagaacagcaaaatggtgtgctgaaagtcgtgatcagtcgcggtagtggcgggcgagggtacagcacattgaacagcggaccggcaacgcggattctctccgttacggcttatcctgcacattacgaccgtttgcgtaacgaggggattacgttggcgctaagcccggtgcggctggggcgcaatcctcatcttgcaggtattaaacatctcaatcgtcttgagcaagtattgattcgctctcatcttgagcagacaaacgctgatgaggcgctggtccttgacagcgaagggtgggttacggaatgctgtgcggctaatttgttctggcggaagggcaacgtagtttatacgccgcgactggatcaggcaggtgttaacggcattatgcgacaattctgtatccgtttgctggcacaatcctcttatcagcttgtcgaagtgcaagcctctctggaagagtcgttgcaggcagatgagatggttatttgtaatgcgttaatgccagtgatgcccgtatgtgcctgtggcgatgtctccttttcgtcagcaacgttatatgaatatttagccccactttgtgagcgcccgaattag

SEQ ID NO: 6749 - DNA, 474 bp, Escherichia coli
atgagtcaaaacgatatcattatcagaactcattataagtctcctcatagattgcacatcgatagcgacataccaacaccttcatcagagcctattaatcaatttgcgcgccagctcatcaccctacttgatacctctgacttaagttcgatgctgtcatactgtgttactcaggaatttaccgcaaactgtcgaaaaatatcacaaaattgttattccactgccctttttaccattaactttgccacttcacccatccatacagaaaatatactcattacattacactataaaaaagaaatcatttccttattactggaaaccacgcctattaaagctaaccatttgcgaagcatactggattatattgaacaggaacagttaactgctgaagatcgtaaccattgtatgaaactgtctaaaaaaatccatagagaaaaaaactatacacccaacagtaaatctcaatggtag

SEQ ID NO: 6750 - DNA, 1515 bp, Escherichia coli
atgaagaatgaaaagagaaaaacgggaatagaaccgaaggttttctttccgccgttaataatcgtcggcatactttgttggcttacagtcagagatctggatgcagcgaatgtcgttattaatgctgtattcagttacgtcaccaatgtatggggatgggcatttgaatggtatatggtggtgatgcttttcggttggttctggctggtgtttggcccgtatgccaaaaagcgtttaggtaacgaaccgccagaatttagcaccgccagttggatctttatgatgttcgcctcctgtacgtctgctgccgtactgttctggggatcgattgagatctactactacatctccaccccgccgtttggcttagaaccgaactcgacaggggcgaaagagttggggctggcttacagcttgttccactggggacctctgccgtgggccacttacagcttcctttcagtcgccttcgcttacttcttctttgtccgcaaaatggaagtgattcgccccagctcgacactggtgccgctggtaggtgaaaaacacgccaaagggttgttcggcactatcgtcgacaacttctatctcgtcgccttgatcttcgcgatgggtaccagtctgggccttgccacgccgctggtgaccgagtgtatgcaatggttgtttggcattccgcataccctgcaactggacgctatcatcattacctgctggattatcctcaacgccatttgcgtcgcttgcggtctgcaaaaaggggtacgtatcgccagtgacgtgcgtagttacctgagcttcctgatgctgggttgggtgttcattgtcagcggtgccagcttcatcatgaactacttcaccgattcggtggggatgttgctgatgtatctgccgcgcatgttgttctataccgatcccatcgctaaaggcggcttcccgcagggctggaccgtgttctactgggcatggtgggtgatttatgctatccagatgagtatcttcctcgcccgcatctcccgtggtcgtactgtgcgtgaactgtgcttcggcatggtgctggggctgacagcgtcaacctggatcctgtggactgtactcggtagtaacactctgctgttgatagataaaaacatcatcaacattccaaatctgatcgaacagtacggtgtggcgcgcgccatcattgaaacctgggccgctctgccactcagcaccgccaccatgtggggcttcttcatcctctgctttattgccaccgttacgctggttaacgcctgctcttataccctggcgatgtccacttgccgcgaagtacgcgatggtgaagaaccacctctgctggtgcgtatcggttggtcaattctggttggcattatcggtattgttctgctggcgctcggcggcctgaaaccgattcaaaccgccattatcgccggaggatgcccgctgttcttcgtcaacattatggtgacgctctcctttattaaagacgcgaaacagaactggaaagattaa

SEQ ID NO: 6751 - DNA, 1395 bp, Escherichia coli
gtgccgcatcatcagccatgtccaccagcatcatcattatctgctgggccgcgtggaggtgtaatcatgttgattctgaagaatgtcactgcggtacagctacacccggcaaaagtgcaggaaggcgttgatatcgccatcgaaaacgatgtgattgtcgctatcggcgatgccctgacgcaacgctaccccgacgccagcttcaaagagatgcatggccggattgtgatgccagggattgtctgctcgcacaaccatttttactcggggctttcccgcggaattatggcaaacatcgccccttgcccggatttcatctcaacgctgaaaaatctctggtggcggctcgatcgcgcccttgatgaagagtcgctctattacagcggactgatttgttccctggaagcgattaagagcggatgtacatcggttatcgatcaccatgcctctccggcgtatatcggcgggtcgctctccacattgcgcgacgcatttttaaaagttggcctgcgcgcgatgacctgttttgaaactactgaccgtaacaacggcatcaaagagttgcaggaaggtgtagaagaaaacatccgtttcgcccgtttgattgatgaggcgaagaaagcgacaagcgagccgtatctggtggaagcacatatcggtgctcacgcgccgtttaccgtgccggatgccggtctggagatgctgcgtgaagccgtgaaagccacaggccgtggtttgcatattcacgctgcggaagacctttacgacgtttcctacagtcaccactggtacggcaaagacctgctggcacgactggcgcaattcgatctcatcgacagcaaaacgctggtcgctcatgggctgtacttgtcgaaagatgacatcaccctactcaatcagcgcgatgcgttcctggtgcataacgcccgttcaaacatgaacaaccatgtcggctacaaccatcaccttagcgacatccgcaatctggcgttgggaacggacggcattggttcggacatgtttgaagagatgaaatttgccttctttaaacatcgcgatgcgggtggtccgctgtggcctgacagttttgccaaagccctgactaacggtaacgaactgatgagccgcaactttggcgcgaaatttgggcttctggaagccggttacaaagctgatttaaccatttgcgattacaactcgccgacgccgctgctggcagacaatatcgccgggcatatcgctttcggtatgggctcaggcagcgttcacagcgtgatggtcaatggtgtgatggtctatgaagaccgtcagtttaacttcgattgcgattccatttatgcacaagccagaaaagccgctgccagtatgtggcgtcggatggatgcgctggcataa

SEQ ID NO: 6752 - DNA, 966 bp, Escherichia coli
atgaatactgtcggcacgccgttgctatggggcggattcgctgttgttgtcgccattatgctggctatcgacctgttgttgcaggggcgtcgtggggcacatgccatgaccatgaaacaggctgcggcctggtcgctggtctgggtgacgctgtcgttactgtttaacgccgctttctggtggtatctggtgcaaaccgaaggtcgcgccgttgccgatccacaggcactggcctttctcacaggttatctgattgagaaatcgctggcggtcgataacgtctttgtctggctgatgttgttcagctatttctctgttccggcggcattacaacgccgcgtgctggtgtatggcgtgctcggggcgattgttctgcgtaccatcatgatcttcactggcagctggctaatttcgcagttcgactggatcctgtatatcttcggtgccttcctgctgtttaccggcgtgaagatggcgctcgcccatgaagatgaatcaggcattggcgacaagcgctggtgcgctggctacgcggttcatttgcgcatgaccgacaccatcgacaacgagcatttctttgtgcgtaagaatggattgctgtacgccacaccgctgatgctggtactgattctggtggaattgagcgacgtgattttcgccgtggatagcattccggctatcttcgccgtgaccactgacccgttcattgtgctgacctcaaacctgtttgcgatcctcggcctgcgtgcgatgtatttcctgctggcgggcgtagcagagcgtttctcgatgctcaaatatggcctggcggtgattctggtgtttatcggtatcaagatgctgattgtcgacttctaccatattccaatcgccgtctcgctgggcgtggtgtttggcattctggtgatgacgtttattatcaacgcctgggtgaattatcggcatgataagcagcggggtggataa

SEQ ID NO: 6753 - DNA, 348 bp, Escherichia coli
atgagcaacattattaagcaacttgaacaagagcagatgaagcaggacgtaccttccttccgtccgggtgataccgtggaagtgaaagtatgggttgttgaaggttccaaaaaacgtctgcaggcattcgagggcgtggttatcgctattcgtaaccgcggtctgcactctgcattcactgttcgtaaaatttccaacggcgaaggcgttgagcgtgtcttccagactcactctccggtagttgacagcatttctgtcaaacgtcgtggtgctgttcgtaaagctaaactgtactacctgcgtgagcgtactggtaaggctgctcgtatcaaagagcgtcttaactaa

SEQ ID NO: 6754 - DNA, 399 bp, Escherichia coli
atgtctacaacacataacgtccctcagggcgatcttgttttacgtactttagccatgcccgccgataccaatgccaatggtgacatctttggtggttggttaatgtcacaaatggatattggcggcgctattctggcaaaagaaattgcccacggtcgcgtagtgactgtgcgggttgaaggaatgactttcttacggccggttgcggtcggcgatgtggtgtgctgctatgcacgctgtgtccagaaagggacgacatcggtcagcattaatattgaagtgtgggtgaaaaaagtagcgtctgaaccaattgggcaacgctataaagcgacagaagcattatttaagtatgtcgcggttgatcctgaaggaaaacctcgcgccttacctgttgagtaa

SEQ ID NO: 6755 - DNA, 540 bp, Escherichia coli
atgaagcagtttcttgattttttaccgctggttgtctttttcgcgttttacaagatttatgacatctatgcggctactgcggcgctgatcgtcgccacggcgattgtgcttatctatagctgggttcgctttcgtaaggttgagaagatggccctgatcacttttgttctggtggtcgtcttcggtggcttgacgctgttcttccacaatgatgagtttattaaatggaaggttactgtcatttatgctctatttgcgggagccctgttagtcagccaatgggtgatgaaaaagccgctaattcagcggatgctgggtaaagaactcacgctgccgcaaccggtatggtcgaagctgaatctggcctgggctgttttctttatcctttgcggtctggcaaacatctacatcgcattctggctgccgcaaaatatttgggtcaactttaaagtctttggcctgaccgcccttaccttaatcttcacattgttaagcggtatctatatctaccgccacatgccgcaggaagataaatcctaa

SEQ ID NO: 6756 - DNA, 1314 bp, Escherichia coli
atgccattagtcattgttgctatcggtgtaatcttgttgttgctcctgatgatccgcttcaaaatgaacggcttcatcgctctcgtcctcgtggcgcttgctgttggattaatgcaaggaatgccgctggataaagttattggctccatcaaagccggtgtcgcggacgtcggtagccttgccctgatcatgggttttggcgcaatgctgggcaaaatgctggcagactgcggtggcgcacaacgtatcgccaccacgctgattgccaaatttggtaaaaaacacatccagtgggcggtggtactgaccggttttaccgttggttttgccctgttctatgaagtgggctttgtgctgatgctgccgctggtgtttaccatcgcggcttctgcgaatattccactgctgtatgttggtgtaccaatggcggctgcactgtctgtgacccacggcttcctgccaccgcatccgggtccgactgcgattgccaccattttcaatgccgatatgggtaaaaccctgctgtacggtactattctggcaatcccgaccgtgattctcgccggtccggtttacgctcgcgtgttgaaaggtatcgataagccaattccggaaggtctctacagcgcgaaaaccttcagcgaagaagagatgccgagctttggcgtcagcgtctggacctctctggtgccggtagtactgatggcgatgcgtgcgattgccgaaatgatcctgccgaaaggtcacgctttcctgccggtagcggagttcctcggtgacccggtaatggcaacgctgattgccgtgctgattgcgatgttcacctttggtctaaaccgtggtcgttcaatggatcagattaacgacacgctggtttcttccatcaaaatcattgcgatgatgctgttgatcatcggtggtggcggtgcgttcaagcaggtgctggtagacagcggcgtggacaaatacattgcttccatgatgcacgaaaccaacatttctccgctgctgatggcctggtcgattgctgccgtactgcgtatcgcgctgggttccgcaaccgttgcggcaatcactgcgggtggtatcgcggcaccgctgattgcaacgacgggtgttagcccggagctgatggttattgcggttggttccggtagtgtgattttctctcatgtgaacgatccgggcttctggctgttcaaagagtactttaacctgactatcggcgagaccatcaaatcctggtcgatgctggaaaccattatctcggtgtgcggtctggtaggctgtctgctgctgaatatggtgatttga

SEQ ID NO: 6757 - DNA, 987 bp, Escherichia coli
atgacccaacccgttctggacattcaacaactgcatttgagtttccccggttttaacggtgatgttcacgcgctcaacaatgtgtccttgcagattaaccgcggtgaaattgtcggtctggtgggagaatccggctcaggtaaatcagtcaccgcaatgctgattatgcgtctgctaccgacgggcagttattgcgtacatcgggggcagatttccctgctgggagaagatgttcttaacgcgcgggaaaaacagcttcgtcagtggcgcggcgcacgagtggcgatgatctttcaggaaccgatgaccgccctcaatccgacacgtcgaataggtcttcagatgatggacgtgatccgccatcatcaaccaataagtcgtcgggaagccagagctaaagcgattgacctgctggaagagatgcaaatcccggatgccgtggaagttatgtcgcgctatccgtttgagctttcaggtggtatgcgccagcgggtaatgattgcgctggcattctcctgcgagccgcaattgattattgccgacgaaccgactacggcgctggacgtcacggtgcagttgcaggtactgcgtttgcttaaacataaagcccgcgccagtggaactgcggttctgttcatcagccatgatatggccgtggtgtcgcaactgtgcgatagcgtttacgtgatgtatgccggaagcgtaattgaaagcggcgtgacggcagacgttatccatcatccccggcatccgtataccattggtttgctgcaatgcgcaccagaacatggagtaccacgccagctattacccgccattccagggacggtaccaaacctcacccatttgcctgacggctgcgcttttcgcgatcgttgctatgcggcaggtgcacagtgtgaaaacgtcccggcgctgacagcgtgtggtgacaacaaccagcgctgtgcctgttggtatccgcagcaggaggttataagtgtctga

SEQ ID NO: 6758 - DNA, 969 bp, Escherichia coli
atgacgatgccaacgaatcaatgcccgtggcggatgcaggttcatcacattacgcaagaaacgccggatgtgtggacgatttccctgatttgccacgattactacccatatcgcgccgggcaatatgcactggtcagcgtgcgaaactcagcggaaacgctgcgtgcttacaccatttcctccacgccaggcgtgagtgaatatatcaccctgaccgtgcggcggattgatgacggtgtcggctcccagtggctgacgcgcgatgtaaaacgcggtgattatctctggctttcggacgcgatgggggaatttacctgcgacgataaagcagaagataaattcctgttgctggcggcaggctgcggcgtcacgccgattatgtcgatgcgtcgctggcttgcgaagaaccgtccacaggccgatgtgcgggtgatctacaacgtgcgtacgccgcaggatgttattttcgccgatgagtggcgtaactatccggtaacgctggtggcagaaaataacgttaccgaaggctttatcgctggtcgtctcactcgcgaactgctggcaggtgtacctgacttagcttcacgtaccgtgatgacctgcggcccggctccgtatatggattgggtagagcaggaagtgaaagcgctcggcgtgacgcgtttctttaaagagaaattcttcaccccagtagcagaagcggcgaccagcggtctgaaattcaccaaactgcaaccggcacgagaattttacgccccggttggcaccacgctactggaggcgctggaaagcaataacgttccggttgtcgctgcctgccgtgcgggtgtttgcggctgctgtaagacaaaagtggtttccggtgaatatacggtgagcagcacaatgacgctgaccgacgccgaaatcgctgaaggttacgtactggcctgctcctgccatccgcagggggatttggttctcgcataa

SEQ ID NO: 6759 - DNA, 480 bp, Escherichia coli
atgttcacgattaaaacagatgatctcacccatccagcagtgcaagcattagtggcttaccatatttccggcatgctgcagcagtctccccccgaaagcagtcatgctttagatgtgcaaaaattacgtaacccgacagtgacattctggtcagtatgggaaggcgaacaactcgcaggaattggtgcgctgaagttgctggatgataaacacggcgagctgaaatcaatgcgtaccgcgccaaattatttacgtcgtggtgtcgccagtctgattttacgccacattttgcaggtcgcccaggacagatgccttcatcgcctgagcttagaaacgggtacacaggctggatttacggcctgccatcaactttatttgaagcatggtttcgctgattgcgaaccgtttgctgattatcgacttgatccacacagtcgatttttatcattgacgctatgcgaaaataatgaattgccatga

SEQ ID NO: 6760 - DNA, 312 bp, Escherichia coli
atgtacgcggttttccaaagtggtggtaaacaacaccgagtaagcgaaggtcagaccgttcgcctggaaaagctggacatcgcaactggcgaaactgttgagttcgctgaagtgctgatgatcgcaaacggtgaagaagtcaaaatcggcgttcctttcgttgatggcggcgtaatcaaagctgaagttgttgctcacggtcgtggcgagaaagttaaaatcgttaagtttcgtcgtcgtaaacactatcgtaagcagcagggccatcgtcagtggttcactgatgtgaaaattactggcatcagcgcctaa

SEQ ID NO: 6761 - DNA, 393 bp, Escherichia coli
atgagcatgcaagatccgatcgcggatatgctgacccgtatccgtaacggtcaggccgcgaacaaagctgcggtcaccatgccttcctccaagctgaaagtggcaatcgccaacgtgctgaaggaagaaggttttattgaagattttaaagttgaaggcgacaccaagcctgaactggaacttactctgaagtatttccagggcaaagctgttgtagaaagcattcagcgtgtcagccgcccaggtctgcgcatctataaacgtaaagatgagctgccgaaagttatggcgggtctgggtatcgcagttgtttctacctctaaaggtgttatgactgatcgtgcagcgcgccaggctggtcttggtggcgaaattatctgctacgtagcctaa

SEQ ID NO: 6762 - DNA, 2241 bp, Escherichia coli
atgaaggtagatattgataccagcgataagctgtacgccgacgcatggcttggctttaaaggtacggactggaaaaacgaaattaatgtccgcgattttattcaacataactatacaccgtatgaaggcgatgaatctttcctcgccgaagcgacgcctgccaccacggaattgtgggaaaaagtaatggaaggcatccgtatcgaaaatgcaacccacgcgccggttgatttcgataccaatattgccaccacaattaccgctcatgatgcgggatatattaaccagccgctggaaaaaattgttggcctgcaaacggatgcgccgttgaaacgtgcgctacacccgttcggtggcattaatatgattaaaagttcattccacgcctatggccgagaaatggacagtgaatttgaatatctgtttaccgatctgcgtaaaacccataaccagggcgtatttgatgtttactcaccggatatgctgcgctgccgtaaatctggcgtgctgaccggtttaccagatggctatggccgtgggcgcattatcggtgactatcgccgcgtagcgctgtatggcatcagttatctggtacgtgaacgcgaactgcaatttgccgatctccagtctcgtctggaaaaaggcgaggatctggaagccaccatccgtctgcgtgaggagctggcagagcatcgtcatgcgctgttgcagattcaggaaatggcggcgaaatatggctttgatatctctcgcccggcgcagaatgcgcaggaagcggtgcagtggctctacttcgcttatctggcggcagtgaaatcgcaaaatggcggcgcgatgtcgctgggccgcacggcatcgttcctcgatatctacattgagcgcgactttaaagctggcgtactcaatgagcagcaggcacaggaactgatcgatcacttcatcatgaagatccgtatggtacgcttcctgcgtacaccggaatttgattcgctgttctccggcgacccaatctgggcgacggaagtgatcggcgggatggggctggacggtcgtacgctggtgaccaaaaactccttccgctatttgcacaccctgcacactatggggccggcaccggaacctaacctgaccattctttggtcggaagaattaccgattgccttcaaaaaatatgccgcgcaggtgtcgatcgtcacctcttccttgcagtatgaaaatgacgatctgatgcgtactgacttcaacagcgacgattacgcgattgcctgctgcgtcagcccaatggtgattggtaagcaaatgcagttctttggtgcacgcgctaacctggcgaaaacgctgctctacgcaattaacggcggggtggacgagaagctgaagattcaggtcgggccgaaaacagcaccgctgatggacgacgtgctggattacgacaaagtgatggacagcctcgatcacttcatggactggctggcggtgcagtacatcagcgcgctgaatatcattcactacatgcacgacaagtacagctacgaagcttcgctgatggcgctgcacgatcgtgatgtctatcgcactatggcatgcggcatcgcgggcctgtcggtggcgacggactccctgtctgccatcaaatatgcccgcgtgaaaccaatccgtgacgaaaacggcctggcggtggactttgaaatcgacggtgaatatccgcagtacggcaacaacgacgagcgcgtagacagcattgcctgcgacctggttgaacgctttatgaagaaaattaaagcgctgccaacctatcgcaacgccgtccctacccagtcgattctgactatcacttctaacgtggtgtacggccagaaaaccggtaatacgccggacggtcgtcgcgccggaacaccgttcgcgccgggcgctaacccgatgcatggtcgtgaccgcaaaggtgccgtggcctcattgacgtcggtggcgaaactgccgttcacctacgccaaagatgggatctcgtacaccttctcaatcgttcctgcggcgctgggcaaagaagatccagtacgtaaaaccaaccttgtcggcctgctggatgggtatttccaccacgaagcggatgtcgaaggcggtcaacacctcaacgtcaacgtaatgaatcgggaaatgctgctggatgccatcgagcacccggaaaaatatcctaacctgacaatccgtgtctctggctacgcgtgcgcttcaacgcactga

SEQ ID NO: 6763 - DNA, 324 bp, Escherichia coli
atgagacttctgattctgactctttcattaataacgctggcggggtgtacggttactcgccaagcccatgtgagcgaagttgacgcggcaacaggtattgtacggttagtttatgaccaggcttttttgcagcatgcccataccgatcgttatgtcagtcgcgggatcgccgatcgcgcatgccagcaggaaggctatacccacgcggtcccctttggtcagccagtaggcaactgtagcctttttgcgggttccttatgtttgaatacggaattcactttgtcatatcagtgccatcattccgccttccctgtctttctctaa

SEQ ID NO: 6764 - DNA, 1026 bp, Escherichia coli
atgccttcaattcgactggctgatttagcgcagcagttggatgcagaactacacggtgatggcgatatcgtcatcaccggcgttgcgtccatgcaatctgcacaaacaggtcacattacgttcatggttaacccaaaataccgtgagcatttaggcttgtgccaggcgtccgcggttgtcatgacccaggacgatcttcctttcgcgaaaagtgccgcactggtagtgaagaatccctacctgacttacgcgcgcatggcgcaaattttagataccacgccgcagcccgcgcagaacattgcacccagtgcggtgatcgacgcgacggcgaagctgggtaacaacgtatcgattggcgctaacgcggtgattgagtccggcgttgaactgggcgataacgtgattatcggtgccggttgcttcgtaggtaaaaacagcaaaatcggtgcaggttcgcgtctctgggcgaacgtaaccatttaccatgagatccagatcggtcagaattgcctgatccagtccggaacagtggtaggcgcagacggctttggttatgccaacgatcgtggtaactgggtgaagatcccacagattggtcgcgtaattattggcgatcgcgtggagatcggtgcctgcacaaccatcgatcgcggcgcgctggatgacactattattggcaatggcgtgatcattgataaccagtgccagattgcacataacgtcgtgattggcgacaatacggcggttgccggtggcgtcattatggcgggcagcctgaaaattggtcgttactgcatgatcggcggagccagcgtaatcaacgggcatatggaaatatgcgacaaagtgacggttacgggcatgggtatggtgatgcgtcccatcactgaaccaggcgtctattcctcaggcattccgctgcaacccaacaaagtctggcgcaaaaccgctgcactggtgatgaacattgatgacatgagcaagcgtctgaaatcgcttgagcgcaaggttaatcaacaagactaa

SEQ ID NO: 6765 - DNA, 456 bp, Escherichia coli
ttgactactaacactcatactctgcagattgaagagattttagaacttctgccgcaccgtttcccgttcttactggtggatcgcgtgctggattttgaagaaggtcgttttctgcgcgcagtaaaaaatgtctctgtcaatgagccattcttccagggccatttccctggaaaaccgattttcccgggtgtgctgattctggaagcaatggcacaggcaacaggtattctggcgtttaaaagcgtaggaaaactggaaccgggtgagctgtactacttcgctggtattgacgaagcgcgcttcaagcgcccggtcgtgcctggcgatcaaatgatcatggaagtcactttcgaaaaaacgcgccgcggcctgacccgttttaaaggggttgctctggtcgatggtaaagtagtttgcgaagcaacgatgatgtgtgctcgtagccgggaggcctga

SEQ ID NO: 6766 - DNA, 651 bp, Escherichia coli
atgaacaatatgaacgtaattattgccgatgaccatccgatagtcttgttcggtattcgcaaatcacttgagcaaattgagtgggtgaatgttgtcggcgaatttgaagactctacagcactgatcaacaacctgccgaaactggatgcgcatgtgttgattaccgatctctccatgcctggcgataagtacggcgatggcattaccttaatcaagtacatcaagcgccatttcccaagcctgtcgatcattgttctgactatgaacaacaacccggcgattcttagtgcggtattggatctggatatcgaagggatcgtgctgaaacaaggtgcaccgaccgatctgccgaaagctctcgccgcgctgcagaaagggaagaaatttaccccggaaagcgtttctcgcctgttggaaaaaatcagtgctggtggttacggtgacaagcgtctctcgccaaaagagagtgaagttctgcgcctgtttgcggaaggcttcctggtgaccgagatcgctaaaaagctgaaccgcagtattaaaaccatcagtagccagaagaaatctgcgatgatgaagctgggtgtcgagaacgatatcgccctgctgaattatctctcttcagtgaccttaagtccggcagataaagactaa

SEQ ID NO: 6767 - DNA, 768 bp, Escherichia coli
atgtggattggcataattagcctgtttcctgaaatgttccgcgcaattaccgattacggggtaactggccgggcagttaaaaatggcctgctgagcatccagagctggagtcctcgcgacttcacgcatgaccggcaccgtaccgtggacgatcgtccttacggcggcggaccggggatgttaatgatggtgcaacccttgcgggacgccattcatgcagcaaaagccgcggcgggtgaaggcgcaaaggtgatttatctgtcaccacagggacgcaagcttgatcaagcgggcgtcagcgaactggcaacgaatcaaaaattgattctggtgtgcggtcgctacgaaggtatagatgagcgcgtgatccaaaccgaaattgacgaagaatggtcaatcggcgattacgttctcagtggtggtgagttaccagcaatgacgctgattgactccgtttcccggtttattccgggagtactgggacatgaagcctcggcaacggaagattcctttgctgaaggattgctggattgcccgcactatacgcggcctgaggtgttagaagggatggaagttccgccagtgttactgtcgggcaaccatgccgagatacgtcgctggcgtttgaaacagtcgctgggccgtacctggcttagaagacctgaacttctggaaaacctggctctgactgaagagcaagcaaggttgctggcggagttcaaaacggaacacgcacaacagcaacataaacatgatgggatggcgtaa

SEQ ID NO: 6768 - DNA, 726 bp, Escherichia coli
atggcaactgtttccatgcgcgacatgctcaaggctggtgttcacttcggtcaccagacccgttactggaacccgaaaatgaagccgttcatcttcggtgcgcgtaacaaagttcacatcatcaaccttgagaaaactgtaccgatgttcaacgaagctctggctgaactgaacaagattgcttctcgcaaaggtaaaatccttttcgttggtactaaacgcgctgcaagcgaagcggtgaaagacgctgctctgagctgcgaccagttcttcgtgaaccatcgctggctgggcggtatgctgactaactggaaaaccgttcgtcagtccatcaaacgtctgaaagacctggaaactcagtctcaggacggtactttcgacaagctgaccaagaaagaagcgctgatgcgcactcgtgagctggagaaactggaaaacagcctgggcggtatcaaagacatgggcggtctgccggacgctctgtttgtaatcgatgctgaccacgaacacattgctatcaaagaagcaaacaacctgggtattccggtatttgctatcgttgataccaactctgatccggacggtgttgacttcgttatcccgggtaacgacgacgcaatccgtgctgtgaccctgtacctgggcgctgttgctgcaaccgtacgtgaaggccgttctcaggatctggcttcccaggcggaagaaagcttcgtagaagctgagtaa

SEQ ID NO: 6769 - DNA, 663 bp, Escherichia coli
atgatgttctggcgcattttccgtcttgagctgcgtgtagcgtttcgccatagcgccgaaatcgccaacccgctgtggttcttcctgattgtaattaccctttttccgctcagtatcggtccggagccgcaactgctggcgcgtattgcaccgggcattatctgggttgctgcgctgctttcatccttgctggcgctggaacgactgttccgtgacgatttgcaggacggcagtcttgaacaattgatgttgttgccgttacccttgcccgccgttgtgctggcgaaggtgatggcgcactggatggtaaccggtctgccgttactcatcctttcgccactggtagcaatgctactgggaatggatgtttatggctggcaagtgatggcgctgacgctgctgctgggaacgcctacgcttggctttctcggtgcaccgggcgtggcgctgacagtgggacttaagcgcggtggtgtgctgctcagcatactggtgttaccgctgactatcccattactcatctttgccaccgccgcgatggacgcggcttctatgcatttgcccgttgacgggtatctggcaattttaggcgcgttgctggcaggcaccgcgacattaagtccttttgcgacggcggcagcgttacgaatcagcattcaataa

SEQ ID NO: 6770 - DNA, 4224 bp, Escherichia coli
gtgaaagatttattaaagtttctgaaagcgcagactaaaaccgaagagtttgatgcgatcaaaattgctctggcttcgccagacatgatccgttcatggtctttcggtgaagttaaaaagccggaaaccatcaactaccgtacgttcaaaccagaacgtgacggccttttctgcgcccgtatctttgggccggtaaaagattacgagtgcctgtgcggtaagtacaagcgcctgaaacaccgtggcgtcatctgtgagaagtgcggcgttgaagtgacccagactaaagtacgccgtgagcgtatgggccacatcgaactggcttccccgactgcgcacatctggttcctgaaatcgctgccgtcccgtatcggtctgctgctcgatatgccgctgcgcgatatcgaacgcgtactgtactttgaatcctatgtggttatcgaaggcggtatgaccaacctggaacgtcagcagatcctgactgaagagcagtatctggacgcgctggaagagttcggtgacgaattcgacgcgaagatgggggcggaagcaatccaggctctgctgaagagcatggatctggagcaagagtgcgaacagctgcgtgaagagctgaacgaaaccaactccgaaaccaagcgtaaaaagctgaccaagcgtatcaaactgctggaagcgttcgttcagtctggtaacaaaccagagtggatgatcctgaccgttctgccggtactgccgccagatctgcgtccgctggttccgctggatggtggtcgtttcgcgacttctgacctgaacgatctgtatcgtcgcgtcattaaccgtaacaaccgtctgaaacgtctgctggatctggctgcgccggacatcatcgtacgtaacgaaaaacgtatgctgcaggaagcggtagacgccctgctggataacggtcgtcgcggtcgtgcgatcaccggttctaacaagcgtcctctgaaatctttggccgacatgatcaaaggtaaacagggtcgtttccgtcagaacctgctcggtaagcgtgttgactactccggtcgttctgtaatcaccgtaggtccatacctgcgtctgcatcagtgcggtctgccgaagaaaatggcactggagctgttcaaaccgttcatctacggcaagctggaactgcgtggtcttgctaccaccattaaagctgcgaagaaaatggttgagcgcgaagaagctgtcgtttgggatatcctggacgaagttatccgcgaacacccggtactgctgaaccgtgcaccgactctgcaccgtctgggtatccaggcatttgaaccggtactgatcgaaggtaaagctatccagctgcacccgctggtttgtgcggcatataacgccgacttcgatggtgaccagatggctgttcacgtaccgctgacgctggaagcccagctggaagcgcgtgcgctgatgatgtctaccaacaacatcctgtccccggcgaacggcgaaccaatcatcgttccgtctcaggacgttgtactgggtctgtactacatgacccgtgactgtgttaacgccaaaggcgaaggcatggtgctgactggcccgaaagaagcagaacgtctgtatcgctctggtctggcttctctgcatgcgcgcgttaaagtgcgtatcaccgagtatgaaaaagatgctaacggtgaattagtagcgaaaaccagcctgaaagacacgactgttggccgtgccattctgtggatgattgtaccgaaaggtctgccttactccatcgtcaaccaggcgctgggtaaaaaagcaatctccaaaatgctgaacacctgctaccgcattctcggtctgaaaccgaccgttatttttgcggaccagatcatgtacaccggcttcgcctatgcagcgcgttctggtgcatctgttggtatcgatgacatggtcatcccggagaagaaacacgaaatcatctccgaggcagaagcagaagttgctgaaattcaggagcagttccagtctggtctggtaactgcgggcgaacgctacaacaaagttatcgatatctgggctgcggcgaacgatcgtgtatccaaagcgatgatggataacctgcaaactgaaaccgtgattaaccgtgacggtcaggaagagaagcaggtttccttcaacagcatctacatgatggccgactccggtgcgcgtggttctgcggcacagattcgtcagcttgctggtatgcgtggtctgatggcgaagccggatggctccatcatcgaaacgccaatcaccgcgaacttccgtgaaggtctgaacgtactccagtacttcatctccacccacggtgctcgtaaaggtctggcggataccgcactgaaaactgcgaactccggttacctgactcgtcgtctggttgacgtggcgcaggacctggtggttaccgaagacgattgtggtacccatgaaggtatcatgatgactccggttatcgagggtggtgacgttaaagagccgctgcgcgatcgcgtactgggtcgtgtaactgctgaagacgttctgaagccgggtactgctgatatcctcgttccgcgcaacacgctgctgcacgaacagtggtgtgacctgctggaagagaactctgtcgacgcggttaaagtacgttctgttgtatcttgtgacaccgactttggtgtatgtgcgcactgctacggtcgtgacctggcgcgtggccacatcatcaacaagggtgaagcaatcggtgttatcgcggcacagtccatcggtgaaccgggtacacagctgaccatgcgtacgttccacatcggtggtgcggcatctcgtgcggctgctgaatccagcatccaagtgaaaaacaaaggtagcatcaagctcagcaacgtgaagtcggttgtgaactccagcggtaaactggttatcacttcccgtaatactgaactgaaactgatcgacgaattcggtcgtactaaagaaagctacaaagtaccttacggtgcggtactggcgaaaggcgatggcgaacaggttgctggcggcgaaaccgttgcaaactgggacccgcacaccatgccggttatcaccgaagtaagcggttttgtacgctttactgacatgatcgacggccagaccattacgcgtcagaccgacgaactgaccggtctgtcttcgctggtggttctggattccgcagaacgtaccgcaggtggtaaagatctgcgtccggcactgaaaatcgttgatgctcagggtaacgacgttctgatcccaggtaccgatatgccagcgcagtacttcctgccgggtaaagcgattgttcagctggaagatggcgtacagatcagctctggtgacaccctggcgcgtattccgcaggaatccggcggtaccaaggacatcaccggtggtctgccgcgcgttgcggacctgttcgaagcacgtcgtccgaaagagccggcaatcctggctgaaatcagcggtatcgtttccttcggtaaagaaaccaaaggtaaacgtcgtctggttatcaccccggtagacggtagcgatccgtacgaagagatgattccgaaatggcgtcagctcaacgtgttcgaaggtgaacgtgtagaacgtggtgacgtaatttccgacggtccggaagcgccgcacgacattctgcgtctgcgtggtgttcatgctgttactcgttacatcgttaacgaagtacaggacgtataccgtctgcagggcgttaagattaacgataaacacatcgaagttatcgttcgtcagatgctgcgtaaagctaccatcgttaacgcgggtagctccgacttcctggaaggcgaacaggttgaatactctcgcgtcaagatcgcaaaccgcgaactggaagcgaacggcaaagtgggtgcaacttactcccgcgatctgctgggtatcaccaaagcgtctctggcaaccgagtccttcatctccgcggcatcgttccaggagaccactcgcgtgctgaccgaagcagccgttgcgggcaaacgcgacgaactgcgcggcctgaaagagaacgttatcgtgggtcgtctgatcccggcaggtaccggttacgcgtaccaccaggatcgtatgcgtcgccgtgctgcgggtgaagctccggctgcaccgcaggtgactgcagaagacgcatctgccagcctggcagaactgctgaacgcaggtctgggcggttctgataacgagtaa

SEQ ID NO: 6771 - DNA, 1020 bp, Escherichia coli
atgttgcagtttattctccgacgtttgggactcgtcatccccacgtttatcggtattacccttctcacatttgcctttgtccacatgatcccgggcgatccggtgatgatcatggcgggcgaacgtgggatctccccagagcgtcacgcgcagctgctggctgaactcggcttagataaaccgatgtggcagcagtatctccattacatttggggcgttatgcatggcgatctaggcatttcaatgaaaagccgcatcccggtttgggaagagttcgtgccgcgcttccaggccacgctggaacttggcgtctgcgcgatgatttttgctacggcagtcggtattccggtcggcgtgctggctgcggttaaacgcggttccattttcgatcacacagcggttggcctggcgctgacaggttattcaatgcctatcttctggtggggcatgatgctgatcatgctggtttcggtgcactggaacctgacgcccgtctccggtcgcgtgagcgatatggtgttcctcgatgactccaatccgttaaccggttttatgctaatcgacaccgccatctggggtgaagacggcaactttatcgatgccgtcgcccatatgatcttgcctgccattgtgctgggtactattccgctggcggtcattgtgcgtatgacacgctcctcgatgctggaagtgctgggcgaggattacatccgcaccgcgcgcgccaaagggctaacccgcatgcgggtgattatcgtccatgcgctgcgtaacgcgatgctgccggtggtgaccgttatcggcctgcaggtgggaacattgctggcgggggcgattctgaccgaaaccatcttctcgtggcccggtctgggacgctggttgattgacgcactgcaacgccgcgactatccggtagtgcagggcggcgtattgctggtggcgacgatgattatcctcgtcaacttgctggtcgatctgctgtacggcgtggtgaacccgcgtattcgtcataagaagtaa

SEQ ID NO: 6772 - DNA, 1608 bp, Escherichia coli
atgcgtatttccttgaaaaagtcagggatgctgaagcttggtctcagcctggtggctatgaccgtcgcagcaagtgttcaggctaaaactctggtttattgctcagaaggatctccggaagggtttaacccgcagctgtttacctccggcaccacctatgacgcctcttccgtcccgctttataaccgtctggttgaatttaaaatcggcaccaccgaagtgatcccgggcctcgctgaaaagtgggaagtcagcgaagacggtaaaacctataccttccatctgcgtaaaggtgtgaagtggcacgacaataaagaattcaaaccgacgcgtgaactgaacgccgatgatgtggtgttctcgttcgatcgtcagaaaaacgcgcaaaacccgtaccataaagtttctggcggcagctacgaatacttcgaaggcatgggcttgccagagctgatcagtgaagtgaaaaaggtggacgacaacaccgttcagtttgtgctgactcgcccggaagcgccgttcctcgctgacctggcaatggacttcgcctctattctgtcaaaagaatatgctgatgcgatgatgaaagccggtacaccggaaaaactggacctcaacccaatcggaaccggtccgttccagttacagcagtatcaaaaagattcccgtatccgctacaaagcgtttgatggctactggggcaccaaaccgcagatcgatacgctggttttctctattacccctgacgcttccgtgcgttacgcgaaattgcagaagaatgaatgccaggtgatgccgtacccgaacccggcagatatcgctcgcatgaagcaggataaatccatcaatctgatggaaatgccggggctgaacgtcggttatctctcgtataacgtgcagaaaaaaccactcgatgacgtgaaagttcgccaggctctgacctacgcggtgaacaaagacgcgatcatcaaagcggtttatcagggcgcgggcgtatcagcgaaaaacctgatcccgccaaccatgtggggctataacgacgacgttcaggactacacctacgatcctgaaaaagcgaaagccttgctgaaagaagcgggtctggaaaaaggtttctccatcgacctgtgggcgatgccggtacaacgtccgtataacccgaacgctcgccgcatggcggagatgattcaggcagactgggcgaaagtcggcgtgcaggccaaaattgtcacctacgaatggggtgagtacctcaagcgtgcgaaagatggcgagcaccagacggtaatgatgggctggactggcgataacggggatccggataacttcttcgccaccctgttcagctgcgccgcctctgaacaaggctccaactactcaaaatggtgctacaaaccgtttgaagatctgattcaaccggcgcgtgctaccgacgaccacaataaacgcgttgaactgtacaaacaagcgcaggtggtgatgcacgatcaggctccggcactgatcatcgctcactccaccgtgtttgaaccggtacgtaaagaagttaaaggctatgtggttgatccattaggcaaacatcacttcgaaaacgtctctatcgaataa

SEQ ID NO: 6773 - DNA, 1875 bp, Escherichia coli
atgaaaggacaagaaactcgtggttttcagtcagaagtgaaacagcttctgcacctgatgatccattctctctattccaataaagaaatcttcctgcgtgagcttatctctaacgcctccgatgcggcggacaagctgcgtttccgtgcgctctctaacccggacctgtacgaaggtgatggcgaactacgcgttcgtgtctctttcgataaagacaagcgtacgctgaccatctccgataacggcgtggggatgacccgcgacgaagtgattgaccatctggggactatcgctaaatccggtaccaaatcattcctcgaatccctgggttctgaccaggcgaaagacagccagctgatcggtcagtttggtgttggtttctactctgcgtttatcgtggccgacaaagtgaccgtgcgtactcgcgcggcaggcgaaaaaccagaaaatggcgtcttctgggaatcggctggcgaaggtgaatacaccgttgccgacatcaccaaagaagatcgtggtactgaaatcaccctgcatctgcgtgaaggcgaagacgagttcctcgatgactggcgcgtgcgttccatcatcagcaaatactccgaccatatcgcgctgccggtagagatcgaaaaacgcgaagagaaagacggcgaaaccgttatctcctgggagaaaatcaacaaagcgcaggcgctgtggactcgtaacaagtcggaaatcaccgatgaagagtacaaagagttctacaaacacatcgcccacgactttaatgatccgctgacctggagccacaaccgtgttgaaggtaagcaggagtacaccagcctgctgtacatcccgtcccaggctccgtgggatatgtggaaccgcgatcataaacacggcctgaaactgtatgttcagcgtgtgttcatcatggacgacgcagaacagttcatgccgaactatctgcgcttcgtgcgtggtctgattgactccagcgatctgccgctgaacgtttcccgtgaaatcctccaggacagcacggtaacgcgtaacctgcgcaatgcgctgaccaagcgtgtgctgcaaatgctggaaaaactggcgaaagacgacgcggaaaaataccagaccttctggcaacagtttggcctggtactgaaagaaggtccggcggaagatttcgctaaccaggaagcgatcgccaaactgctgcgttttgcttctacccataccgattcttctgcgcagaccgtatctctggaagactacgtttcccgcatgaaagaagggcaggagaaaatctactacatcaccgcagacagctatgcggcagcgaagagcagcccgcacctggaactgctgcgtaagaaaggcatcgaagttctgctgctttccgaccgcatcgatgagtggatgatgaactatctgactgagttcgacggtaaaccgttccagtcggtgtctaaagttgacgagtcgcttgaaaaactggctgacgaagttgatgagagcgcgaaagaagcggagaaagcactgactccgttcatcgaccgtgtgaaagccctgctcggcgagcgcgtgaaagatgtccgtctgactcaccgtctgaccgatacgccagcgatcgtttcgaccgacgcggacgaaatgagcactcagatggcgaaactgttcgctgcggcgggccagaaagtgccagaagtgaaatacatcttcgaactgaacccggatcacgtactggtgaaacgtgcggcagatactgaagatgaagcgaagttcagcgagtgggtagaactgctgctggatcaggcgctgctggcagaacgcggcacgctggaagatccgaacctgtttattcgtcgtatgaaccagctgctggtttcctga

SEQ ID NO: 6774 - DNA, 1185 bp, Escherichia coli
gtgtctaaagaaaaatttgaacgtacaaaaccgcacgttaacgttggtactatcggccacgttgaccacggtaaaactactctgaccgctgcaatcaccaccgtactggctaaaacctacggcggtgctgctcgtgcattcgaccagatcgataacgcgccggaagaaaaagctcgtggtatcaccatcaacacttctcacgttgaatacgacaccccgacccgtcactacgcacacgtagactgcccggggcacgccgactatgttaaaaacatgatcaccggtgctgctcagatggacggcgcgatcctggtagttgctgcgactgacggcccgatgccgcagactcgtgagcacatcctgctgggtcgtcaggtaggcgttccgtacatcatcgtgttcctgaacaaatgcgacatggttgatgacgaagagctgctggaactggttgaaatggaagttcgtgaacttctgtctcagtacgacttcccgggcgacgacactccgatcgttcgtggttctgctctgaaagcgctggaaggcgacgcagagtgggaagcgaaaatcctggaactggctggcttcctggattcttatattccggaaccagagcgtgcgattgacaagccgttcctgctgccgatcgaagacgtattctccatctccggtcgtggtaccgttgttaccggtcgtgtagaacgcggtatcatcaaagttggtgaagaagttgaaatcgttggtatcaaagagactcagaagtctacctgtactggcgttgaaatgttccgcaaactgctggacgaaggccgtgctggtgagaacgtaggtgttctgctgcgtggtatcaaacgtgaagaaatcgaacgtggtcaggtactggctaagccgggcaccatcaagccgcacaccaagttcgaatctgaagtgtacattctgtccaaagatgaaggcggccgtcatactccgttcttcaaaggctaccgtccgcagttctacttccgtactactgacgtgactggtaccatcgaactgccggaaggcgtagagatggtaatgccgggcgacaacatcaaaatggttgttaccctgatccacccgatcgcgatggacgacggtctgcgtttcgcaatccgtgaaggcggccgtaccgttggcgcgggcgttgttgctaaagttctgggctaa

SEQ ID NO: 6775 - DNA, 804 bp, Escherichia coli
atggctatccctgcatttggtttaggtactttccgtctgaaagacgacgttgttatttcatctgtgataacggcgcttgaacttggttatcgcgcaattgataccgcacaaatctatgataacgaagccgcagtaggtcaggcgattgcagaaagtggcgtgccacgtcatgaactctacatcaccactaaaatctggattgaaaatctcagcaaagacaaattgatcccaagtctgaaagagagcctgcaaaaattgcgtaccgattatgttgatctgacgctaatccactggccgtcaccaaacgatgaagtctctgttgaagagtttatgcaggcgctgctggaagccaaaaaacaagggctgacgcgtgagatcggtatttccaacttcacgatcccgttgatggaaaaagcgattgctgctgttggtgctgaaaacatcgctactaaccagattgaactctctccttatctgcaaaaccgtaaagtggttgcctgggctaaacagcacggcatccatattacttcctatatgacgctggcgtatggtaaggccctgaaagatgaggttattgctcgtatcgcagctaaacacaatgcgactccggcacaagtgattctggcgtgggctatgggggaaggttactcagtaattccttcttctactaaacgtaaaaacctggaaagtaatcttaaggcacaaaatttacagcttgatgccgaagataaaaaagcgatcgccgcactggattgcaacgaccgcctggttagcccggaaggtctggctcctgaatgggattaa

SEQ ID NO: 6776 - DNA, 102 bp, Escherichia coli
atgcgaagtgaacagatttctggctcgtcactcaatccgtcttgtcgtttcagttctgcgtactctcctgtgaccaggcagcgaaaagacatgagtcgatga

SEQ ID NO: 6777 - DNA, 1260 bp, Escherichia coli
atgaatcttaccgaattaaagaatacgccggtttctgagctgatcactctcggcgaaaatatggggctggaaaacctggctcgtatgcgtaagcaggacattatttttgccatcctgaagcagcacgcaaagagtggcgaagatatctttggtgatggcgtactggagatattgcaggatggatttggtttcctccgttccgcagacagctcctacctcgccggtcctgatgacatctacgtttcccctagccaaatccgccgtttcaacctccgcactggtgataccatctctggtaagattcgcccgccgaaagaaggtgaacgctattttgcgctgctgaaagttaacgaagttaacttcgacaaacctgaaaacgcccgcaacaaaatcctctttgagaacttaaccccgctgcacgcaaactctcgtctgcgtatggaacgtggtaacggttctactgaagatttaactgctcgcgtactggatctggcatcacctatcggtcgtggtcagcgtggtctgattgtggcaccgccgaaagccggtaaaaccatgctgctgcagaacattgctcagagcattgcttacaaccacccggattgtgtgctgatggttctgctgatcgacgaacgtccggaagaagtaaccgagatgcagcgtctggtaaaaggtgaagttgttgcttctacctttgacgaacccgcatctcgccacgttcaggttgcggaaatggtgatcgagaaggccaaacgcctggttgagcacaagaaagacgttatcattctgctcgactccatcactcgtctggcgcgcgcttacaacaccgttgttccggcgtcaggtaaagtgttgaccggtggtgtggatgccaacgccctgcatcgtccgaaacgcttctttggtgcggcgcgtaacgtggaagagggcggcagcctgaccattatcgcgacggcgcttatcgataccggttctaaaatggacgaagttatctacgaagagtttaaaggtacaggcaacatggaactgcacctctctcgtaagatcgctgaaaaacgcgtcttcccggctatcgactacaaccgttctggtacccgtaaagaagagctgctcacgactcaggaagaactgcagaaaatgtggatcctgcgcaaaatcattcacccgatgggcgaaatcgatgcaatggaattcctcattaataaactggcaatgaccaagaccaatgacgatttcttcgaaatgatgaaacgctcataa

SEQ ID NO: 6778 - DNA, 1533 bp, Escherichia coli
atgcccatgagtatgtcatccataccgtcgtcctcccaatccgggaagctctatggctgggtcgaaagaattggtaacaaggttccccatccttttctgctctttatctatttgattatcgtactcatggtgacgacggcaattttgtcggcctttggcgtcagtgcgaaaaacccgaccgatggtacgccggtcgtggtgaaaaacctgctcagtgtggaaggattacactggtttttacccaatgttattaaaaactttagcggttttgctccacttggtgcgatcctggcgctggttttaggtgccggtctggcggagcgcgtcggcttactgccagcactaatggttaaaatggcatcgcatgttaatgcccgctacgccagttatatggtgctgtttattgcttttttcagccacatttcttccgatgcggcgttagtgatcatgccaccgatgggtgcgctgatttttctggcggtgggcaggcatccagttgcaggtttactggctgccattgcaggcgtaggttgcggctttacggctaatttactgattgtcacaaccgacgtgttgctgtcggggatcagcacggaagcggcagctgcgttcaatccgcaaatgcacgtcagtgtaattgataactggtattttatggccagctccgtagtcgtactgacgattgttggcggcctgataaccgacaaaatcatcgagccacggttaggtcaatggcagggaaacagcgatgagaaactgcagacattgaccgaaagtcagcgttttggtttacgcatagcaggtgtcgtatcgctactttttattgctgcgattgcgctgatggtgatcccgcaaaacgggatattgcgcgatccgattaatcacaccgtgatgccatcaccctttattaaaggtatcgtgccactgatcattctttttttctttgttgtctcgctggcttatggcatcgctacccgcacaattcgacgtcaggcggatttaccgcatttaatgattgaaccgatgaaagagatggcgggatttatcgtgatggtttttcccctcgcccaatttgtcgccatgtttaactggagcaacatggggaaattcatcgccgtggggctgaccgatatactggaaagttcagggcttagcggcatcccggcgtttgtcggtctggcgttgctttcctctttcttatgcatgtttattgccagcggttccgcaatctggtcgattctcgcccccattttcgtaccaatgtttatgctacttggctttcacccggcatttgcgcaaatcctctttcgtattgccgactcatccgtattgcctttagcgccggtatctccttttgttccactgtttcttggattcctgcaacgctacaaaccagacgcgaaactgggtacttactattcgttagtcttgccctatccacttatctttttggtggtatggctgctgatgttgctggcgtggtatcttgtcggtctgccgataggtccgggtatttacccacgtttgtcttaa

SEQ ID NO: 6779 - DNA, 693 bp, Escherichia coli
atggtgatcccggaaaacgggatattgcgcgatccgattaatcacaccgtgatgccatcaccctttattaaaggtatcgtgccactgatcattctttttttctttgttgtctcgctggcttatggcatcgctacccgcacaattcgacgtcaggcggatttaccgcatttaatgattgaaccgatgaaagagatggcgggatttatcgtgatggtttttcccctcgcccagtttgtcgccatgtttaactggagcaacatggggaaattcatcgccgtggggctgaccgatatcctggaaagttcagggcttagcggcatcccggcgtttgtcggtctggcgttgctttcctctttcttatgcatgtttatcgccagcggttccgcaatctggtcgattctggcccccattttcgtaccaatgtttatgctacttggctttcacccggcatttgcgcaaatcctctttcgtattgccgactcatccgtattgcctttagcgccagtatctccttttgttccactgtttcttggattcctgcaacgctacaaaccagacgcgaaactgggtacttactattcgttagtcttgccctatccgcttatctttttggtggtatggctgctgatgttgctggcgtggtatcttgtgggcctgccgataggtccgggtatttacccacgtttgtcttaa

SEQ ID NO: 6780 - DNA, 3222 bp, Escherichia coli
atgccaaaacgtacagatataaaaagtatcctgattctgggtgcgggcccgattgttatcggtcaggcgtgtgagtttgactactctggcgcgcaagcgtgtaaagccctgcgtgaagagggttaccgcgtcattctggtgaactccaacccggcgaccatcatgaccgacccggaaatggctgatgcaacctacatcgagccgattcactgggaagttgtacgcaagattattgaaaaagagcgcccggacgcggtgctgccaacgatgggcggtcagacggcgctgaactgcgcgctggagctggaacgtcagggcgtgttggaagagttcggtgtcaccatgattggtgccactgccgatgcgattgataaagcagaagaccgccgtcgtttcgacgtagcgatgaagaaaattggtctggaaaccgcgcgttccggtatcgcacacacgatggaagaagcgctggcggttgccgctgacgtgggcttcccgtgcattattcgcccatcctttaccatgggcggtagcggcggcggtatcgcttataaccgtgaagagtttgaagaaatttgcgcccgcggtctggatctctctccgaccaaagagttgctgattgatgagtcgctgatcggctggaaagagtacgagatggaagtggtgcgtgataaaaacgacaactgcatcatcgtctgctctatcgaaaacttcgatgcgatgggcatccacaccggtgactccatcactgtcgcgccagcccaaacgctgaccgacaaagaatatcaaatcatgcgtaacgcctcgatggcggtgctgcgtgaaatcggcgttgaaaccggtggttccaacgttcagtttgcggtgaacccgaaaaacggtcgtctgattgttatcgaaatgaacccacgcgtgtcccgttcttcggcgctggcgtcgaaagcgaccggtttcccgattgctaaagtggcggcgaaactggcggtgggttacaccctcgacgaactgatgaacgacatcactggcggacgtactccggcctccttcgagccgtccatcgactatgtggttactaaaattcctcgcttcaacttcgaaaaattcgccggtgctaacgaccgtctgaccactcagatgaaatcggttggcgaagtgatggcgattggtcgcacgcagcaggaatccctgcaaaaagcgctgcgcggcctggaagtcggtgcgactggattcgacccgaaagtgagcctggatgacccggaagcgttaaccaaaatccgtcgcgaactgaaagacgcaggcgcagatcgtatctggtacatcgccgatgcgttccgtgcgggcctgtctgtggacggcgtcttcaacctgaccaacattgaccgctggttcctggtacagattgaagagctggtgcgtctggaagagaaagtggcggaagtgggcatcactggcctgaacgctgacttcctgcgccagctgaaacgcaaaggctttgccgatgcgcgcttggcaaaactggcgggcgtacgcgaagcggaaatccgtaagctgcgtgaccagtatgacctgcacccggtttataagcgcgtggatacctgtgcggcagagttcgccaccgacaccgcttacatgtactccacttatgaagaagagtgcgaagcgaatccgtctaccgaccgtgaaaaaatcatggtgcttggcggcggcccgaaccgtatcggtcagggtatcgaattcgactactgttgcgtacacgcctcgctggcgctgcgcgaagacggttacgaaaccattatggttaactgtaacccggaaaccgtctccaccgactacgacacttccgaccgcctctacttcgagccggtaactctggaagatgtgctggaaatcgtgcgtatcgagaagccgaaaggcgttatcgtccagtacggcggtcagaccccgctgaaactggcgcgcgcgctggaagctgctggcgtaccggttatcggcaccagcccggatgctatcgaccgtgcagaagaccgtgaacgcttccagcatgcggttgagcgtctgaaactgaaacaaccggcgaacgccaccgttaccgctattgaaatggcggtagagaaggcgaaagagattggctacccgctggtggtacgtccgtcttacgttctcggcggtcgggcgatggaaatcgtctatgacgaagctgacctgcgtcgctacttccagacggcggtcagcgtgtctaacgatgcgccagtgttgctggaccacttcctcgatgacgcggtagaagttgacgtggatgccatctgcgacggcgaaatggtgctgattggcggcatcatggagcatattgagcaggcgggcgtgcactccggtgactccgcatgttctctgccagcctacaccttaagtcaggaaattcaggatgtgatgcgccagcaggtgcagaaactggccttcgaattgcaggtgcgcggcctgatgaacgtgcagtttgcggtgaaaaacaacgaagtctacctgattgaagttaacccgcgtgcggcgcgtaccgttccgttcgtctccaaagccaccggcgtaccgctggcaaaagtggcggcgcgcgtgatggctggcaaatcgctggctgagcagggcgtaaccaaagaagttatcccgccgtactactcggtgaaagaagtggtgctgccgttcaataaattcccgggcgttgacccgctgttagggccagaaatgcgctctaccggggaagtcatgggcgtgggccgcaccttcgctgaagcgtttgccaaagcgcagctgggcagcaactccaccatgaagaaacacggtcgtgcgctgctttccgtgcgcgaaggcgataaagaacgcgtggtggacctggcggcaaaactgctgaaacagggcttcgagctggatgcgacccacggcacggcgattgtgctgggcgaagcaggtatcaacccgcgtctggtaaacaaggtgcatgaaggccgtccgcacattcaggaccgtatcaagaatggcgaatatacctacatcatcaacaccacctcaggccgtcgtgcgattgaagactcccgcgtgattcgtcgcagtgcgctgcaatataaagtgcattacgacaccaccctgaacggcggctttgccaccgcgatggcgctgaatgccgatgcgactgaaaaagtaatttcggtgcaggaaatgcacgcacagatcaaataa

SEQ ID NO: 6781 - DNA, 2583 bp, Escherichia coli
atgcaagagcaataccgcccggaagagatagaatccaaagtacagcttcattgggatgagaagcgcacatttgaagtaaccgaagacgagagcaaagagaagtattactgcctgtctatgcttccctatccttctggtcgactacacatgggccacgtacgtaactacaccatcggtgacgtgatcgcccgctaccagcgtatgctgggcaaaaacgtcctgcagccgatcggctgggacgcgtttggtctgcctgcggaaggcgcggcggtgaaaaacaacaccgctccggcaccgtggacgtacgacaacatcgcgtatatgaaaaaccagctcaaaatgctgggctttggttatgactggagccgcgagctggcaacctgtacgccggaatactaccgttgggaacagaaattcttcaccgagctgtataaaaaaggcctggtatataagaagacttctgcggtcaactggtgcccgaacgaccagaccgtactggcgaacgaacaagttatcgacggctgctgctggcgctgcgataccaaagttgaacgtaaagagatcccgcagtggtttatcaaaatcactgcttacgctgacgagctgctcaacgatctggataaactggatcactggccagacaccgttaaaaccatgcagcgtaactggatcggtcgttccgaaggcgtggagatcaccttcaacgttaacgactatgacaacacgctgaccgtttacactacccgcccggacacctttatgggttgtacctacctggcggtagctgcgggtcatccgctggcgcagaaagcggcggaaaataatcctgaactggcggcctttattgacgaatgccgtaacaccaaagttgccgaagctgaaatggcgacgatggagaaaaaaggcgtcgatactggctttaaagcggttcacccattaacgggcgaagaaattcccgtttgggcagcaaacttcgtattgatggagtacggcacgggcgcagttatggcggtaccggggcacgaccagcgcgactacgagtttgcctctaaatacggcctgaacatcaaaccggttatcctggcagctgacggctctgagccagatctttctcagcaagccctgactgaaaaaggcgtgctgttcaactctggcgagttcaacggtcttgaccatgaagcggccttcaacgccatcgccgataaactgactgcgatgggcgttggcgagcgtaaagtgaactaccgcctgcgcgactggggtgtttcccgtcagcgttactggggcgcgccgattccgatggtgacgctggaagacggtaccgtaatgccgaccccggacgaccagctgccggtgatcctgccggaagatgtggtaatggacggcattaccagcccgattaaagcagatccggagtgggcgaaaactaccgttaacggtatgccagcactgcgtgaaaccgacactttcgacacctttatggagtcctcctggtactatgcgcgctacacttgcccgcagtacaaagaaggtatgctggattccgaagcggctaactactggctgccggtggatatctacattggtggtattgaacacgccattatgcacctgctctacttccgcttcttccacaaactgatgcgtgatgcaggcatggtgaactctgacgaaccagcgaaacagttgctgtgtcagggtatggtgctggcagatgccttctactatgttggcgaaaacggcgaacgtaactgggtttccccggttgatgctatcgttgaacgtgacgagaaaggccgtatcgtgaaagcgaaagatgcggcaggccatgaactggtttataccggcatgagcaaaatgtccaagtcgaagaacaacggtatcgacccgcaggtgatggttgaacgttacggcgcggacaccgttcgtctgtttatgatgtttgcttctccggctgatatgactctcgaatggcaggaatccggtgtggaaggggctaaccgcttcctgaaacgtgtctggaaactggtttacgagcacacagcaaaaggtgatgttgcggcactgaacgttgatgcgctgactgaaaatcagaaagcgctgcgtcgcgatgtgcataaaacgatcgctaaagtgaccgatgatatcggccgtcgtcagaccttcaacaccgcaattgcggcgattatggagctgatgaacaaactggcgaaagcaccaaccgatggcgagcaggatcgcgctctgatgcaggaagcactgctggccgttgtccgtatgcttaacccgttcaccccgcacatctgcttcacgctgtggcaggaactgaaaggcgaaggcgatatcgacaacgcgccgtggccggttgctgacgaaaaagcgatggtggaagactccacgctggtcgtggtgcaggttaacggtaaagtccgtgccaaaatcaccgttccggtggacgcaacggaagaacaggttcgcgaacgtgctggccaggaacatctggtagcaaaatatcttgatggcgttactgtacgtaaagtgatttacgtaccaggtaaactcctcaatctggtcgttggctaa

SEQ ID NO: 6782 - DNA, 1425 bp, Escherichia coli
atgagtactgaaatcaaaactcaggtcgtggtacttggggcaggccccgcaggttactccgctgccttccgttgcgctgatttaggtctggaaaccgtaatcgtagaacgttacaacacccttggcggtgtttgcctgaacgtcggctgtatcccttctaaagcactgctgcacgtagcaaaagttatcgaagaagccaaagcgctggctgaacacggtatcgtcttcggcgaaccgaaaaccgatatcgacaagattcgtacctggaaagagaaagtgatcaatcagctgaccggtggtctggctggtatggcgaaaggccgcaaagtcaaagtggtcaacggtctgggtaaattcaccggggctaacaccctggaagttgaaggtgagaacggcaaaaccgtgatcaacttcgacaacgcgatcattgcagcgggttctcgcccgatccaactgccgtttattccgcatgaagatccgcgtatctgggactccactgacgcgctggaactgaaagaagtaccagaacgcctgctggtaatgggtggcggtatcatcggtctggaaatgggcaccgtttaccacgcgctgggttcacagattgacgtggttgaaatgttcgaccaggttatcccggcagctgacaaagacatcgttaaagtcttcaccaagcgtatcagcaagaaattcaacctgatgctggaaaccaaagttaccgccgttgaagcgaaagaagacggcatttatgtgacgatggaaggcaaaaaagcacccgctgaaccgcagcgttacgacgccgtgctggtagcgattggtcgtgtgccgaacggtaaaaacctcgacgcaggcaaagcaggcgtggaagttgacgaccgtggtttcatccgcgttgacaaacagctgcgtaccaacgtaccgcacatctttgctatcggcgatatcgtcggtcaaccgatgctggcacacaaaggtgttcacgaaggtcacgttgccgctgaagttatcgccggtaagaaacactacttcgatccgaaagttatcccgtccatcgcctataccgaaccagaagttgcatgggtgggtctgactgagaaagaagcgaaagagaaaggcatcagctatgaaaccgccaccttcccgtgggctgcttctggtcgtgctatcgcttccgactgcgcagacggtatgaccaagctgattttcgacaaagaatctcaccgtgtgatcggtggtgcgattgtcggtactaacggcggcgagctgctgggtgaaatcggcctggcaatcgaaatgggttgtgatgctgaagacatcgcactgaccatccacgcgcacccgactctgcacgagtctgtgggcctggcggcagaagtgttcgaaggtagcattaccgacctgccgaacccgaaagcgaagaagaagtaa

SEQ ID NO: 6783 - DNA, 2631 bp, Escherichia coli
atgagcaagagcaccgctgagatccgtcaggcgtttctcgactttttccatagtaagggacatcaggtagttgccagcagctccctggtaccccataacgacccaactttgttgtttaccaacgccgggatgaaccagttcaaggatgtgttccttgggctcgacaagcgtaattattcccgcgctaccacttcccaacgctgcgtgcgtgcgggtggtaaacacaacgacctggaaaacgtcggttacaccgcgcgtcaccataccttcttcgaaatgctgggcaacttcagcttcggcgactatttcaaacacgatgccattcagtttgcatgggaactgctgaccagcgaaaaatggtttgccctgccgaaagagcgtctgtgggttaccgtctatgaaagcgacgacgaagcctacgaaatctgggaaaaagaagtagggatcccgcgcgaacgtattattcgcatcggcgataacaaaggtgcgccatacgcatctgacaacttctggcagatgggtgacactggtccgtgcggcccgtgcaccgaaatcttctacgatcacggcgaccacatttgggggggccctccgggaagcccggaagaagacggcgaccgctacattgagatctggaacatcgtcttcatgcagttcaaccgccaggccgatggcacgatggaaccgctgccgaagccgtctgtagataccggtatgggtctggagcgtattgctgcggtgctgcaacacgttaactctaactatgacatcgacctgttccgcacgctgatccaggcggtagcgaaagtcactggcgcaaccgatctgagcaataaatcgctgcgcgtaatcgctgaccacattcgttcttgtgcgttcctgatcgcggatggcgtaatgccgtccaatgaaaaccgtggttatgtactgcgtcgtatcattcgtcgcgcagtgcgtcacggtaatatgctcggcgcgaaagaaaccttcttctacaaactggttggtccgctgatcgacgttatgggctctgcgggtgaagacctgaaacgccagcaggcgcaggttgagcaggtgctgaagactgaagaagagcagtttgctcgtactctggagcgcggtctggcgttgctggatgaagagctggcaaaactttctggtgatacgctggatggtgaaactgctttccgtctgtacgacacctatggcttcccggttgacctgacggctgatgtttgtcgtgagcgcaacatcaaagttgacgaagctggttttgaagctgcaatggaagagcagcgtcgtcgcgcgcgcgaagccagcggctttggtgccgattacaacgcaatgatccgtgttgacagtgcatctgaatttaaaggctatgaccatctggaactgaacggcaaagtgactgcgctgtttgttgatggtaaagcggttgatgccatcaatgcaggccaggaagctgtggtcgtgctggatcaaacgccattctatgcggaatccggcggtcaggttggcgataaaggcgaactgaaaggcgctaacttctcctttgcggtggaagatacgcagaaatacggccaggcgattggtcacatcggtaaacttgctgcgggttctctgaaagtgggcgacgcggtgcaggctgatgttgatgaggctcgtcgcgcccgtattcgtctgaatcactccgcaacgcacctgatgcacgctgcgctgcgccaggttctgggtactcatgtatcgcagaaaggttcactggttaacgacaaggtgctgcgcttcgacttctcacacaacgaagcgatgaaaccagaagagattcgtgcggtcgaagacctggtgaacacacagattcgtcgcaatttgccgatcgaaaccaacatcatggatctcgaagcggcgaaagcgaaaggtgcgatggcgctgttcggcgagaagtatgatgagcgcgtacgcgtgctgagcatgggcgatttctctaccgagttgtgtggcggtactcacgccagccgcactggtgatattggtctgttccgcatcatctctgaatcgggtactgctgcaggcgttcgtcgtatcgaagcggtaaccggagaaggtgctatcgccaccgttcatgcagacagcgatcgcttaagcgaagtcgcgcatctgctgaaaggcgatagcaataatctggctgataaagtgcgctcagtactggaacgtacgcgtcagctggaaaaagagttacaacagcttaaagaacaagctgccgcacaggagagcgcaaatctttccagtaaggcaattgatgttaatggtgttaagctgttggttagcgagcttagcggtgttgagccgaaaatgttgcgtaccatggttgacgatttaaaaaatcagctggggtcgacaattatcgtgctggcaacggtagtcgaaggtaaggtttctctgattgcaggcgtatctaaggacgtcacagatcgtgtgaaagcaggggaactgattggtatggtcgctcagcaggtgggcggcaagggtggtggacgtcctgacatggcgcaagccggtggtacggatgctgcggccttacctgcagcgttagccagtgtgaaaggctgggtcagcgcgaaattgcaataa

SEQ ID NO: 6784 - DNA, 2070 bp, Escherichia coli
atgtctgagaaaacttttctggtggaaatcggcactgaagagctgccaccaaaagcactgcgcagcctggctgagtcctttgctgcgaactttactgcggagctggataacgctggcctcgcacacggcaccgttcaatggtttgctgctccgcgtcgtctggcgctgaaagtagctaacctggcggaagcgcaaccggatcgtgaaatcgaaaaacgcggcccggcgattgcccaggcgttcgacgctgaaggcaaaccgagcaaagcggcagaaggttgggcgcgtggttgcggtattaccgttgaccaggctgagcgtctgactaccgataaaggcgaatggctgctgtatcgcgcccatgtgaagggcgaaagcaccgaagcactgctgccgaatatggttgcgacttctctggcgaaactgccgatcccgaaactgatgcgttggggcgcaagcgacgtgcacttcgtgcgtccggtgcacaccgtgaccctgctgctgggcgacaaagtcattccggcaaccattctgggcattcagtccgatcgcgtgattcgcggccaccgctttatgggcgagccggaattcaccatcgataacgccgatcagtatccggaaattctgcgtgagcgtgggaaagtcatcgccgattacgaagaacgtaaggcgaagattaaagccgatgccgaagaagcagcgcgtaagattggcggtaacgctgacttaagcgaaagcctgctggaagaagtggcttcgctggtggagtggccggtcgttctgaccgcaaaattcgaagagaaattcctcgcggtgccggctgaagcgctggtttacaccatgaaaggtgaccagaaatacttcccggtgtatgcgaacgacggcaaactgctgccgaactttatcttcgttgccaacatcgaatcgaaagatccgcagcagattatctccggtaacgagaaagtcgttcgtccgcgtctggcggatgccgagttcttcttcaacaccgaccgtaaaaaacgtcttgaagataacctgccgcgcctgcaaaccgtgttgttccagcaacagttggggacgctgcgcgacaaaactgaccgcatccaggcgctggctggctggattgctgaacagattggcgctgacgttaaccacgctacccgtgcgggtctgctgtctaagtgcgacctgatgaccaacatggtcttcgagttcaccgacacccagggcgttatggggatgcactatgcgcgtcacgatggcgaagcggaagatgtcgcggtggcgctgaatgagcagtatcagccgcgttttgctggtgatgacctgccgtccaacccagtagcttgtgcgctggcgattgctgacaagatggataccctggcgggtatcttcggtatcggtcagcatccgaaaggcgacaaagacccgtttgcgctgcgtcgtgccgcgcttggcgtgctgcgaattatcgttgagaagaacctcaaccttgatctgcaaacgctgaccgaagaagcggtgcgtctgtatggcgataagctgactaatgccaacgtagttgatgatgttatcgactttatgctcggtcgcttccgcgcctggtatcaggacgaaggttataccgttgacaccatccaggcggtactggcgcgtcgtccgactcgtccggctgatttcgatgcccgtatgaaagcggtatcgcatttccgtaccctggatgcagctgctgcactggcggcggcgaacaaacgtgtatctaacattctggcgaaatctgacgaagtgctgagcgaccgcgtgaatgcctctaccctgaaagagccggaagaaattaaactggcgatgcaggttgtggtgctacgtgacaagctggagccgtactttacggaaggtcgttaccaggatgcgctggtcgaactggctgagctgcgtgaaccggttgatgctttcttcgataaagtgatggtcatggttgatgacaaagaattgcgtatcaaccgtctgaccatgctggagaaactgcgcgaactgttcctgcgcgttgcggatatttcgctgttgcaataa

SEQ ID NO: 6785 - DNA, 789 bp, Escherichia coli
atgggttttctttccggtaagcgcattctggtaaccggtgttgccagcaaactatccatcgcctacggtatcgctcaggcgatgcaccgcgaaggagctgaactggcattcacctaccagaacgacaaactgaaaggccgcgtagaagaatttgccgctcaattgggttctgacatcgttctgcagtgcgatgttgcagaagatgccagcatcgacaccatgttcgctgaactggggaaagtttggccgaaatttgacggtttcgtacactctattggttttgcacctggcgatcagctggatggtgactatgttaacgccgttacccgtgaaggcttcaaaattgcccacgacatcagctcctacagcttcgttgcaatggcaaaagcttgccgctccatgctgaatccgggttctgccctgctgaccctttcctaccttggcgctgagcgcgctatcccgaactacaacgttatgggtctggcaaaagcgtctctggaagcgaacgtgcgctatatggcgaacgcgatgggtccggaaggtgtgcgtgttaacgccatctctgctggtccgatccgtactctggcggcctccggtatcaaagacttccgcaaaatgctggctcattgcgaagccgttaccccgattcgccgtaccgttactattgaagatgtgggtaactctgcggcattcctgtgctccgatctctctgccggtatctccggtgaagtggtccacgttgacggcggtttcagcattgctgcaatgaacgaactcgaactgaaataa

SEQ ID NO: 6786 - DNA, 237 bp, Escherichia coli
atgtcccgagtctgccaagttactggcaagcgtccggtgaccggtaacaaccgttcccacgcactgaacgcgactaaacgccgtttcctgccgaacctgcactctcaccgtttctgggttgagagcgagaagcgttttgtcaccctgcgcgtatctgctaaaggtatgcgtgtaatcgataaaaaaggcatcgatacagttctggctgaactgcgtgcccgtggcgaaaagtactaa

SEQ ID NO: 6787 - DNA, 957 bp, Escherichia coli
gtgagactcgccccgctctaccgcaacgcccttctattaacaggacttttgctttcaggaatagccgcagttcaggccgctgactggccgcgtcagattactgacagccgtggcacacatacactggaaagccagccgcagcgtattgtttccaccagcgtcaccctgaccggctcactgctggcgattgatgctccggtgatcgccagcggcgcgaccacgccgaataaccgcgtcgcggatgaccagggctttttacgccagtggagcaaggtggcgaaagaacgcaaactgcaacggctctatatcggcgaaccgagcgccgaagccgttgccgcgcaaatgccggatctgattttaattagcgcaaccggcggggattcggcgctggcactgtatgatcagctttccaccatcgccccgacattaatcatcaattacgacgacaaaagctggcagtcgctgttaacgcaacttggcgaaattaccgggcatgagaaacaagcggcagagcggattgcgcagtttgataagcaactggcggcggcgaaagagcaaatcaaattaccgccgcagccggtcactgccattgtctatactgccgctgcacacagtgccaatctctggacgccagaatcagcacaagggcagatgctggaacaactcggctttacgctggcgaagttacccgcagggttaaatgccagccaaagtcagggtaaacgccatgacatcattcagcttggtggggaaaatctggctgcagggttaaatggcgagtcactattcctgttcgccggtgatcagaaagatgccgatgctatttatgctaatccgctgctcgcgcacctgcctgcagtacaaaacaagcaggtttatgcgctgggaaccgagacgttccgtctggattactacagcgccatgcaagtgctggataggcttaaggcgctgttttaa

SEQ ID NO: 6788 - DNA, 1290 bp, Escherichia coli
atgaaaaaacaacgtaatttacgtagcatggcggcccaggccgttgaacaagtcgtcgagcaagggcaatcattaagcaacattctgccaccgctccagcaaaaagtttccgataaagacaaagcacttcttcaagagttgtgctttggcgtactgcgtacgctttcgcagttagactggctgattaataagttaatggcccgtccgatgaccggcaaacagcggaccgtgcattacctgattatggttggtttgtatcaactgctttatacccgcattccacctcatgctgcgctggctgaaacggttgaaggcgctatcgcaattaagcgtccgcaacttaaagggttgataaacggtgtattacgccagttccagcgtcagcaagaagagttattagccgagtttaatgccagtgatgcacgttatctgcatccttcctggttgctgaagcgtctgcaaaaagcgtatccagagcagtggcaatccatcgtcgaagccaataaccagcgtccgccaatgtggctgcgtattaatcgtacgcatcattcccgcgacagctggcttgcattgctggatgaagcaggaatgaaaggtttcccgcatgcggattaccctgatgctgtacgtctggaaacacctgcacctgttcatgcgctacctggttttgaagacggatgggttaccgttcaggatgcatcagcacaaggttgcatgacctggcttgcgccacaaaacggtgaacacattttggatctttgtgccgcccccggcggtaaaacaacgcatatccttgaggtggcaccagaagcgcaggttgttgcggttgatatcgacgaacagcgcctctctcgggtttacgacaatttaaaacgccttggtatgaaggcgaccgtgaaacaaggtgatggccgttacccttctcaatggtgtggcgagcaacagtttgatcgcattttattagatgcgccttgttcagcaaccggtgtgattcgtcgccatccagatattaaatggttacgtcgcgatcgcgatatcccggaactcgcgcaattgcagtctgaaattctcgacgccatttggccgcatttaaaaaccggtggaactctggtctatgccacctgttcggtgttaccggaagagaatagcctgcagattaaagcctttttgcaacgtaccgctgatgccgaactttgcgaaacaggaacaccagagcaaccgggtaaacaaaatctacctggtgccgaagagggcgacggcttcttttacgctaagctaatcaaaaagtga

SEQ ID NO: 6789 - DNA, 1152 bp, Escherichia coli
atgtttgaaccaatggaacttaccaatgacgcggtgattaaagtcatcggcgtcggcggcggcggcggtaatgctgttgaacacatggtgcgcgagcgcattgaaggtgttgaattcttcgcggtaaataccgatgcacaagcgctgcgtaaaacagcggttggacagacgattcaaatcggtagcggtatcaccaaaggactgggcgctggcgctaatccagaagttggccgcaatgcggctgatgaggatcgcgatgcattgcgtgcggcgctggaaggtgcagacatggtctttattgctgcgggtatgggtggtggtaccggtacaggtgcagcaccagtcgtcgctgaagtggcaaaagatttgggtatcctgaccgttgctgtcgtcactaagcctttcaactttgaaggcaagaagcgtatggcattcgcggagcaggggatcactgaactgtccaagcatgtggactctctgatcactatcccgaacgacaaactgctgaaagttctgggccgcggtatctccctgctggatgcgtttggcgcagcgaacgatgtactgaaaggcgctgtgcaaggtatcgctgaactgattactcgtccgggtttgatgaacgtggactttgcagacgtacgcaccgtaatgtctgagatgggctacgcaatgatgggttctggcgtggcgagcggtgaagaccgtgcggaagaagctgctgaaatggctatctcttctccgctgctggaagatatcgacctgtctggcgcgcgcggcgtgctggttaacatcacggcgggcttcgacctgcgtctggatgagttcgaaacggtaggtaacaccatccgtgcatttgcttccgacaacgcgactgtggttatcggtacttctcttgacccggatatgaatgacgagctgcgcgtaaccgttgttgcgacaggtatcggcatggacaaacgtcctgaaatcactctggtgaccaataagcaggttcagcagccagtgatggatcgctaccagcagcatgggatggctccgctgacccaggagcagaagccggttgctaaagtcgtgaatgacaatgcgccgcaaactgcgaaagagccggattatctggatatcccagcattcctgcgtaagcaagctgattaa

SEQ ID NO: 6790 - DNA, 2856 bp, Escherichia coli
atggaaaagacatataacccacaagatatcgaacagccgctttacgagcactgggaaaagcagggctactttaagcctaatggcgatgaaagccaggaaagtttctgcatcatgatcccgccgccgaacgtcaccggcagtttgcatatgggtcacgccttccagcaaaccatcatggataccatgatccgctatcagcgcatgcagggcaaaaacaccctgtggcaggtcggtactgaccacgccgggatcgctacccagatggtcgttgagcgcaagattgccgcagaagaaggtaaaacccgtcacgactacggccgcgaagctttcatcgacaaaatctgggaatggaaagcggaatctggcggcaccattacccgtcagatgcgccgtctcggcaactccgtcgactgggagcgtgaacgcttcaccatggacgaaggcctgtccaatgcggtgaaagaagttttcgttcgtctgtataaagaagacctgatttaccgtggcaaacgcctggtaaactgggatccgaaactgcgcaccgctatctctgacctggaagtcgaaaaccgcgaatcgaaaggttcgatgtggcacatccgctatccgctggctgacggtgcgaaaaccgcagacggtaaagattatctggtggtcgcgactacccgtccagaaaccctgctgggcgatactggcgtagccgttaacccggaagatccgcgttacaaagatctgattggcaaatatgtcattctgccgctggttaaccgtcgtattccgatcgttggcgacgaacacgccgacatggaaaaaggcaccggctgcgtgaaaatcactccggcgcacgactttaacgactatgaagtgggtaaacgtcacgccctgccgatgatcaacatcctgacctttgacggcgatatccgtgaaagcgcccaggtgttcgataccaaaggtaacgaatctgacgtttattccagcgaaatccctgcagagttccagaaactggagcgttttgctgcacgtaaagcagtcgttgccgcagttgacgcgcttggcctgctggaagaaattaaaccgcacgacctgaccgttccttacggcgaccgtggcggcgtagttatcgaaccaatgctgaccgaccagtggtacgtgcgtgccgatgtcctggcgaaaccggcggttgaagcggttgagaacggcgacattcagttcgtaccgaagcagtacgaaaacatgtacttctcctggatgcgcgatattcaggactggtgtatctctcgtcagttgtggtggggtcaccgtatcccggcatggtatgacgaagcgggtaacgtttatgttggccgcaacgaagacgaagtgcgtaaagaaaataacctcggtgctgatgttgtcctgcgtcaggacgaagacgttctcgatacctggttctcttctgcgctgtggaccttctctacccttggctggccggaaaataccgacgccctgcgtcagttccacccaaccagcgtgatggtatctggtttcgacatcattttcttctggattgcccgcatgatcatgatgaccatgcacttcatcaaagatgaaaatggcaaaccgcaggtgccgttccacaccgtttacatgaccggcctgattcgtgatgacgaaggccagaagatgtccaaatccaagggtaacgttatcgacccactggatatggttgacggtatttcgctgccagaactgctggaaaaacgtaccggcaatatgatgcagccgcagctggcggacaaaatccgtaagcgcaccgagaagcagttcccgaacggtattgagccgcacggtactgacgcgctgcgcttcaccctggcggcgctggcgtctaccggtcgtgacatcaactgggatatgaagcgtctggaaggttaccgtaacttctgtaacaagctgtggaacgccagccgctttgtgctgatgaacacagaaggtcaggattgcggcttcaacggcggcgaaatgacgctgtcgctggcggaccgctggattctggcggagttcaaccagaccatcaaagcgtaccgcgaagcgctggacagcttccgcttcgatatcgccgcaggcattctgtatgagttcacctggaaccagttctgtgactggtatctcgagctgaccaagccggtaatgaacggtggcaccgaagcagaactgcgcggtactcgccatacgctggtgactgtactggaaggtctgctgcgcctcgcgcatccgatcattccgttcatcaccgaaaccatctggcagcgtgtgaaagtactttgcggtatcactgccgacaccatcatgctgcagccgttcccgcagtacgatgcatctcaggttgatgaagccgcactggccgacaccgaatggctgaaacaggcgatcgttgcggtacgtaacatccgtgcagaaatgaacatcgcgccgggcaaaccgctggagctgctgctgcgtggttgcagcgcggatgcagaacgtcgcgtaaatgaaaaccgtggcttcctgcaaaccctggcgcgtctggaaagtatcaccgtgctgcctgccgatgacaaaggtccggtttccgttacgaagatcatcgacggtgcagagctgctgatcccgatggctggcctcatcaacaaagaagatgagctggcgcgtctggcgaaagaagtggcgaagattgaaggtgaaatcagccgtatcgagaacaaactggcgaacgaaggctttgtcgcccgcgcaccggaagcggtcatcgcgaaagagcgtgagaagctggaaggctatgcggaagcgaaagcgaaactgattgaacagcaggctgttatcgccgcgctgtaa

SEQ ID NO: 6791 - DNA, 444 bp, Escherichia coli
atgaaaaacgcgacgttctaccttctggacaatgacaccaccgtcgatggcttaagcgccgttgagcaactggtgtgtgaaattgccgcagaacgttggcgcagcggtaagcgcgtgctcatcgcctgtgaagatgaaaagcaggcttaccggctggatgaagccctgtgggcgcgtccggcagaaagctttgttccgcataatttagcgggagaaggaccgcgcggcggtgcaccggtggagatcgcctggccgcaaaagcgtagcagcagccggcgcgatatattgattagtctgcgaacaagctttgcagattttgccaccgctttcacagaagtggtagacttcgttccttatgaagattctctgaaacaactggcgcgcgaacgctataaagcctaccgcgtggctggtttcaacctgaatacggcaacctggaaataa

SEQ ID NO: 6792 - DNA, 675 bp, Escherichia coli
gtgaaggtgaaaaacaattcacagctgttgatgccgcgcgaaaaaatgctgaagtttggtattagcgccttaacggatgtcgagctgctggcgctatttctgcgtaccggaacgcgcggtaaagatgtattaaccctggcaaaagagatgctggagaatttcggctctctttatggcttgttaacctctgaatatgaacaatttagtggcgttcatggaattggcgtggcgaaatttgcccagttaaaggggattgctgaactggcgcggcgttactacaacgtgcggatgcgtgaagaaagccctttactcagcccggagatgacgagggaatttttacaaagccagctcacgggtgaggagcgggagatctttatggtgatctttctcgactcccaacaccgggttataacgcataggcgtcttttttccggcacgctaaaccatgttgaagtccatcctcgggaaattatccgcgaagcgataaaaataaacgcctcggcgctgatccttgcacataatcacccttcgggttgtgctgaacccagtaaagcggataaactcattactgaacggataataaagagttgtcagttcatggatttacgcgtgctcgaccatatcgtgattgggcgtggagagtatgtttcttttgccgaacgcggctggatttaa

SEQ ID NO: 6793 - DNA, 645 bp, Escherichia coli
atgcgtatcattctgcttggcgctccgggcgcggggaaagggactcaggctcagttcatcatggagaaatatggtattccgcaaatctccactggcgatatgctgcgtgctgcggtcaaatctggctccgagctgggtaaacaagcaaaagacattatggatgctggcaaactggtcaccgacgaactggtgatcgcgctggttaaagagcgcattgctcaggaagactgccgtaatggtttcctgttggacggcttcccgcgtaccattccgcaggcagacgcgatgaaagaagcgggcatcaatgttgattacgttctggaattcgacgtaccggacgaactgatcgttgaccgtatcgtcggtcgccgcgttcatgcgccgtctggtcgtgtttatcacgttaaattcaatccgccgaaagtagaaggcaaagacgacgttaccggtgaagaactgactacccgtaaagatgatcaggaagagaccgtacgtaaacgtctggttgaataccatcagatgacagcaccgctgatcggctactactccaaagaagcagaagcgggtaataccaaatacgcgaaagttgacggcaccaagccggttgctgaagttcgcgctgatctggaaaaaatcctcggctaa

SEQ ID NO: 6794 - DNA, 843 bp, Escherichia coli
atgcattcactccaacgtaaagttctgcgtactatttgtccggaccaaaaaggtctgatcgcacgtattaccaatatttgctacaagcacgagttaaatatcgtacagaacaatgaatttgttgatcaccgtaccgggcgcttttttatgcgcacggaactggaagggatttttaatgattccaccctgctggcggatctcgatagcgcattgccagaaggctccgtgcgtgagctgaatcctgccggtcgtcgccggatagtgattctggtcactaaagaagcgcattgccttggcgatttgttgatgaaagccaattacggcggcctggatgtcgaaatcgcggcagttattggtaaccacgatactttacgttctctggttgagcgttttgatattccgtttgagctggtaagccatgaagggttaacccgcaacgagcacgatcaaaagatggcggatgccattgatgcttatcaacctgactacgtggtgctggcgaagtatatgcgggtattaacgccggaatttgtggcacgcttcccgaataagatcatcaatattcaccattcattcctgccagcgtttattggcgcacgtccttatcaccaggcctatgaacgtggtgtgaagattattggcgcaaccgctcactatgtgaatgacaatctggacgaaggcccaatcatcatgcaggacgttattcatgtcgatcatacctacacagctgaagatatgatgcgcgcaggtcgtgacgtcgagaaaaacgtcttaagtcgtgcactatacaaagtactggcacagcgcgtctttgtttacggtaatcgaacgattattctttaa

SEQ ID NO: 6795 - DNA, 459 bp, Escherichia coli
gtgtctcagctttgtccctgtggtagtgctgtcgagtatagcctatgttgccacccttatgtgtctggtgaaaaggttgcacctgatccagaacatctcatgcgttcgcgttactgcgcttttgtgatgcaagacgcagattatttaataaagacctggcatccctcttgtggagcagcggcgttacgtgccgaattgatggccggatttgcgcatactgaatggttgggattgaccgtatttgaacattgttggcaggacgccgacaatatcggatttgtcagttttgttgctcgatttaccgaaggtggtaaaacaggtgcaataattgaacgttcgcgatttttgaaagaaaacggtcaatggtactatattgacggtacacgtccgcagtttggtcgcaacgatccctgcccttgtggttcaggtaaaaaatttaaaaagtgctgcggccaataa

SEQ ID NO: 6796 - DNA, 3780 bp, Escherichia coli
atgagtttatggaaaaaaatcagcctcggcgtggttatcgttatcttactgttgctgggatcggtggcgtttctggtgggcaccaccagcggcctgcatctggtatttaaagcggcggatcgctgggtgccaggactggatattggcaaggtcaccggcggctggcgcgatctcaccttgtctgacgttcgttatgagcagccaggcgtggcggtaaaagcgggcaatctgcatctggctgtcgggcttgagtgcctgtggaacagcagtgtttgtattaatgatctggcgctgaaagacattcaggtcaacatcgacagtaaaaaaatgcctccttctgaacaggttgaagaagaggaagatagcggtccgctggatctctccacgccgtatcccatcaccctgacacgggtggcactggacaacgtcaacattaagattgatgacaccacggtatcggtgatggacttcacctccggcctgaactggcaggagaaaaccctgaccctgaaaccgacgtcgctgaaaggcctgctgattgctctgccgaaagtggcggaagtggcgcaggaagaagtggtcgaaccgaaaattgaaaatccgcagccggatgaaaagccgctcggcgaaacgctgaaagatctcttttctcgcccggtattgccggaaatgaccgacgtgcatttgccgcttaacctgaacattgaagagtttaagggcgagcagctgcgcgtgacgggcgacacggacatcaccgtgagcaccatgctgctgaaagtgagcagcattgacggcaatactaaactggacgccctggatatcgattccagtcaagggatcgtcaacgccagcggcacggcgcagctgtcagacaactggccggtggacatcactctcaacagtacactgaacgtggagccgttgaaaggtgaaaaagtgaagctgaaaatgggcggcgcgctgcgcgaacagctggagattggcgttaatctttccggtccggtggatatggatttacgcgcccagacgcgactggcggaagccggattgccgctcaacgtggaagtgaacagcaaacagctttactggccgttcactggtgagaagcagtatcaggcggatgatctgaaactgaaacttaccggcaaaatgaccgattacacgctctctatgcgtacggcagtgaagggacaggagatcccgcccgcgactattaccctcgacgccaaaggtaatgaacagcaggtcaatctcgacaaactcaccgtcgcggcgctggaagggaaaactgaactcaaggcgttgctcgactggcaacaggccattagttggcgcggtgagctaacgcttaacggcattaacaccgccaaagagttcccggactggccgtcgaaactcaatggcttgattaaaacccgcggtagcctgtacggcggcacctggcagatggacgtgccggagttgaagctgaccggtaacgttaaacagaacaaagtgaacgttgacggcacgctgaaaggcaacagttatatgcagtggatgatcccagggcttcatctggaactcgggccaaacagtgccgaagtgaaaggcgagctgggggtaaaagatctcaatcttgatgccaccatcaacgcgccggggctggataacgcgctgccggggcttggcggtacagcgaaagggctggtgaaagtacgcggcacggtggaagcgccacaactactggcagatatcaccgcgcgcggcctgcgctggcaggaactttccgtggcgcaggttcgcgtggaaggcgatatcaaatccaccgatcagatcgccgggaaactcgacgtacgcgttgagcaaatttcgcagccggatgtaaatatcaacctcgtcaccctgaatgccaaaggcagcgaaaagcagcacgagctacagttgcggattcagggggagcctgtctccgggcagcttaatctggcaggaagttttgatcgcaaagaagaacgctggaagggaactcttagcaatacccgcttccagacgccggttggcccgtggtcgctgacccgcgatattgcgctggattaccgcaataaggagcaaaaaatcagcatcgggccacactgctggcttaacccgaatgcggaactgtgcgtgccgcaaactatcgatgcgggggccgaagggcgtgcggtggtgaatctcaaccgcttcgacctcgccatgctgaaaccgtttatgccagaaaccactcaggccagcggtatcttcacgggtaaagcggacgttgcctgggacaccacgaaagaggggctgccgcagggcagtatcaccctttcggggcgtaacgtgcaggtaacgcaaaccgtcaacgatgcggcgctgcccgtggcgtttcagacactgaatctgacggcggaattgcgtaacaaccgtgccgaattgggctggaccatccgcctgaccaataacggccagtttgatggacaggtgcaggtgaccgatccgcaaggccgccgtaatcttggtggcaacgtcaatatccgtaacttcaaccttgcgatgataaaccccatctttacccgtggggaaaaagcagcggggatggtgagtgccaacttgcgtctgggtggtgatgtgcaaagcccgcagttgtttggtcagcttcaggttacgggtgtggatatcgatggcaactttatgccgtttgatatgcaaccgagccagcttgcggtcaactttaacggtatgcgctcgacgcttgccggtacagtacggacccagcagggtgaaatctacctgaacggtgatgccgactggagccaaattgaaaactggcgggcgcgggtaacggcgaaaggcagtaaagtgcggatcaccgtgccgccgatggtacgaatggatgtatcgccagatgttgtattcgaggctacaccaaacctgtttaccctcgatggtcgcgtggatgtcccttgggcgcgcatcgtggtgcacgatctgccggaaagcgcagtaggcgtctccagcgatgtggtgatgcttaacgataacctgcaaccggaagagccgaaaacggcgtcgattccgattaacagtaacctgattgtccacgttggcaacaatgtgcgcattgacgcctttggcctgaaagcgcggctgacgggcgatctcaatgtcgttcaggacaaacaagggctgggtctgaacgggcagatcaacatccctgaagggcgcttccatgcctatggtcaggatctgattgtgcgtaaaggtgagttactgttctctggtccgccagatcaaccgtatcttaatattgaagctattcgtaacccggatgctacagaagacgacgtaatcgccggagttcgcgtcactggtctggcggacgaaccgaaagcggagatcttctctgacccggcgatgtcgcaacaagctgccttgtcttatttgctacgtggacaagggctggagagcgatcagagcgacagtgcggcaatgacctcgatgctgattggtttgggggttgcgcaaagtggccagattgtgggtaaaatcggcgagacgtttggcgtaagcaatttagcgctcgacacccagggagtaggcgactcctcccaggtagtggtcagcggctatgtattgccaggtctgcaagtgaaatacggcgtgggtatatttgactctatagcaacactcacgttacgttatcgcctgatgcctaagctatatctggaagccgtgtctggtgtagaccaggcactggatttgctctatcagttcgagttttag

SEQ ID NO: 6797 - DNA, 852 bp, Escherichia coli
atggctgaaattaccgcatccctggtaaaagagctgcgtgagcgtactggcgcaggcatgatggattgcaaaaaagcactgactgaagctaacggcgacatcgagctggcaatcgaaaacatgcgtaagtccggtgctattaaagcagcgaaaaaagcaggcaacgttgctgctgacggcgtgatcaaaaccaaaatcgacggcaactacggcatcattctggaagttaactgccagactgacttcgttgcaaaagacgctggtttccaggcgttcgcagacaaagttctggacgcagctgttgctggcaaaatcactgacgttgaagttctgaaagcacagttcgaagaagaacgtgttgcgctggtagcgaaaattggtgaaaacatcaacattcgccgcgttgctgcgctggaaggcgacgttctgggttcttatcagcacggtgcgcgtatcggcgttctggttgctgctaaaggcgctgacgaagagctggttaaacacatcgctatgcacgttgctgcaagcaagccagaattcatcaaaccggaagacgtatccgctgaagtggtagaaaaagaataccaggtacagctggatatcgcgatgcagtctggtaagccgaaagaaatcgcagagaaaatggttgaaggccgcatgaagaaattcaccggcgaagtttctctgaccggtcagccgttcgttatggaaccaagcaaaactgttggtcagctgctgaaagagcataacgctgaagtgactggcttcatccgcttcgaagtgggtgaaggcatcgagaaagttgagactgactttgcagcagaagttgctgcgatgtccaagcagtcttaa

SEQ ID NO: 6798 - DNA, 423 bp, Escherichia coli
atgctgaaaacaatttcgccgttaatttctcccgaactattgaaagtgctggcagagatgggacatggagatgaaattattttttccgatgctcactttcccgcccattcgatgggaccgcaggtgatccgcgctgatggcctgttggtgagcgacttgctccaggcgattatcccgttatttgaactggacagttatgcaccgccgctggtgatgatggcggcggtagaaggtgacactctcgatcctgaagtagaacgacgttaccgtaatgcgctttcactacaagccccgtgtcctgacatcatccgcatcaatcgttttgcgttttatgaacgggcgcaaaaagcctttgcgatcgttatcacaggcgaacgagcgaagtacgggaatattcttttaaaaaaaggggtaacaccgtaa

SEQ ID NO: 6799 - DNA, 1842 bp, Escherichia coli
atggagcaaaacccgcagtcacagctgaaacttcttgtcacccgtggtaaggagcaaggctatctgacctatgccgaggtcaatgaccatctgccggaagatatcgtcgattcagatcagatcgaagacatcatccaaatgatcaacgacatgggcattcaggtgatggaagaagcaccggatgccgatgatctgatgctggctgaaaacaccgcggacgaagatgctgccgaagccgccgcgcaggtgctttccagcgtggaatctgaaatcgggcgcacgactgacccggtacgcatgtacatgcgtgaaatgggcaccgttgaactgttgacccgcgaaggcgaaattgacatcgctaagcgtattgaagacgggatcaaccaggttcaatgctccgttgctgaatatccggaagcgatcacctatctgctggaacagtacgatcgtgttgaagcagaagaagcgcgtctgtccgatctgatcaccggctttgttgacccgaacgcagaagaagatctggcacctaccgccactcacgtcggttctgagctttcccaggaagatctggacgatgacgaagatgaagacgaagaagatggcgatgacgacagcgccgatgatgacaacagcatcgacccggaactggctcgcgaaaaatttgcggaactacgcgctcagtacgttgtaacgcgtgacaccatcaaagcgaaaggtcgcagtcacgctaccgctcaggaagagatcctgaaactgtctgaagtattcaaacagttccgcctggtgccgaagcagtttgactacctggtcaacagcatgcgcgtcatgatggaccgcgttcgtacgcaagaacgtctgatcatgaagctctgcgttgagcagtgcaaaatgccgaagaaaaacttcattaccctgtttaccggcaacgaaaccagcgatacctggttcaacgcggcaattgcgatgaacaagccgtggtcggaaaaactgcacgatgtctctgaagaagtgcatcgcgccctgcaaaaactgcagcagattgaagaagaaaccggcctgaccatcgagcaggttaaagatatcaaccgtcgtatgtccatcggtgaagcgaaagcccgccgtgcgaagaaagagatggttgaagcgaacttacgtctggttatttctatcgctaagaaatacaccaaccgtggcttgcagttccttgacctgattcaggaaggcaacatcggtctgatgaaagcggttgataaattcgaataccgccgtggttacaagttctccacctacgcaacctggtggatccgtcaggcgatcacccgctctatcgcggatcaggcgcgcaccatccgtattccggtgcatatgattgagaccatcaacaagctcaaccgtatttctcgccagatgctgcaagagatgggccgtgaaccgacgccggaagaactggctgaacgtatgctgatgccggaagacaagatccgcaaagtgctgaagatcgccaaagagccaatctccatggaaacgccgatcggtgatgatgaagattcgcatctgggggatttcatcgaggataccaccctcgagctgccgctggattctgcgaccaccgaaagcctgcgtgcggcaacgcacgacgtgctggctggcctgaccgcgcgtgaagcaaaagttctgcgtatgcgtttcggtatcgatatgaacaccgactacacgctggaagaagtgggtaaacagttcgacgttacccgcgaacgtatccgtcagatcgaagcgaaggcgctgcgcaaactgcgtcacccgagccgttctgaagtgctgcgtagcttcctggacgattaa

SEQ ID NO: 6800 - DNA, 1929 bp, Escherichia coli
atgcctgttataactcttcctgatggcagccaacgccattacgatcacgctgtaagccccatggatgttgcgctggacattggtccaggtctggcgaaagcctgtatcgcagggcgcgttaatggcgaactggttgatgcttgcgatctgattgaaaacgacgcacaactgtcgatcattaccgccaaagacgaagaaggtctggagatcattcgtcactcctgtgcgcacctgttagggcacgcgattaaacaactttggccgcataccaaaatggcaatcggcccggttattgacaacggtttttattacgacgttgatcttgaccgcacgttaacccaggaagatgtcgaagcactcgagaagcggatgcatgagcttgctgagaaaaactacgacgtcattaagaagaaagtcagctggcacgaagcgcgtgaaactttcgccaaccgtggggagagctacaaagtctccattcttgacgaaaacatcgcccatgatgacaagccaggtctgtacttccatgaagaatatgtcgatatgtgccgcggtccgcacgtaccgaacatgcgtttctgccatcatttcaaactaatgaaaacggcaggggcttactggcgtggcgacagcaacaacaaaatgttgcaacgtatttacggtacggcgtgggcagacaaaaaagcacttaacgcttacctgcagcgcctggaagaagccgcgaaacgcgaccaccgtaaaatcggtaaacagctcgacctgtaccatatgcaggaagaagcgccgggtatggtattctggcacaacgacggctggaccatcttccgtgaactggaagtgtttgttcgttctaaactgaaagagtaccagtatcaggaagttaaaggtccgttcatgatggaccgtgtcctgtgggaaaaaaccggtcactgggacaactacaaagatgcaatgttcaccacatcttctgagaaccgtgaatactgcattaagccgatgaactgcccgggtcacgtacaaattttcaaccaggggctgaagtcttatcgcgatctgccgctgcgtatggccgagtttggtagctgccaccgtaacgagccgtcaggttcgctgcatggcctgatgcgcgtgcgtggatttacccaggatgacgcgcatatcttctgtactgaagaacaaattcgcgatgaagttaacggatgtatccgtttagtctatgatatgtacagcacttttggcttcgagaagatcgtcgtcaaactctccactcgtcctgaaaaacgtattggcagcgacgaaatgtgggatcgtgctgaggcggacctggcggttgcgctggaagaaaacaacatcccgtttgaatatcaactgggtgaaggcgctttctacggtccgaaaattgaatttaccctgtatgactgcctcgatcgtgcatggcagtgcggtacagtacagctggacttctctttgccgtctcgtctgagcgcttcttatgtaggcgaagacaatgaacgtaaagtaccggtaatgattcaccgcgcaattctggggtcgatggaacgtttcatcggtatcctgaccgaagagttcgctggtttcttcccgacctggcttgcgccggttcaggttgttatcatgaatattaccgattcacagtctgaatacgttaacgaattgacgcaaaaactatcaaatgcgggcattcgtgttaaagcagacttgagaaatgagaagattggctttaaaatccgcgagcacactttgcgtcgcgtcccatatatgctggtctgtggtgataaagaggtggaatcaggcaaagttgccgttcgcacccgccgtggtaaagacctgggaagcatggacgtaaatgaagtgatcgagaagctgcaacaagagattcgcagccgcagtcttaaacaattggaggaataa

SEQ ID NO: 6801 - DNA, 1182 bp, Escherichia coli
atgactaacagcaatcgcatcaagctcacatggattagctttctctcctacgcactgactggtgcgttggttattgtcaccgggatggtgatgggaaatatcgccgattatttcaatctgcctgtttccagtatgagtaataccttcaccttcctcaacgccggcattttaatctctatcttcctcaacgcctggctgatggaaatcgtcccgttgaaaacgcagttacgttttggctttctcctgatggtgctggcggttgccggtttgatgttcagccacagcctggcgctgttctcggcggcgatgttcattctcggggtggtcagcggcatcaccatgtcgattggtacattcctggtaacacaaatgtatgaagggcgtcagcgcggttcccgcctgttatttaccgactccttcttcagtatggctgggatgattttcccaatgatcgccgcgtttctactggcgcgcagcattgagtggtactgggtttatgcctgcatcgggctggtgtatgtcgctatttttattctgaccttcggctgtgagttcccggcgctgggcaaacatgcgccaaaaacggatgctccggtagagaaagaaaagtgggggatcggcgtactgtttctctctgttgcggcgttgtgctacatcctcggtcagttaggttttatctcctgggtgcctgagtatgccaaaggcctgggcatgagcctgaacgacgcgggcacgctggtgagtaacttctggatgtcatacatggtcggcatgtgggcgttcagctttattcttcgcttctttgatttgcaacgcattctgaccgtactggctggtctggctgcgattctgatgtacgtctttaacaccggaacaccagcacatatggcgtggtcaattctcgctctgggcttcttctccagcgcgatctataccaccatcatcaccctgggttcacagcagaccaaagtaccgtcgccaaaactggttaactttgtcctgacctgcggaaccatcggtactatgttgacctttgtggttaccggcccgatcgttgaacatagcggtccgcaggcggcactgcttacagcaaacggtctgtacgctgtcgtctttgtgatgtgcttcctgttaggtttcgtcagccgtcaccgtcagcataacaccctgacctctcattaa

SEQ ID NO: 6802 - DNA, 717 bp, Escherichia coli
atgaatgaattttttcctttagcaagcgccgccgggatgaccgtcggccttgccgtttgtgcattgattgtcgggctggcgctggcgatgttctttgcggtatgggagtcggcaaaatggcgtcctgtcgcgtgggcaggttcagcgctggtaaccattctgcgtggcctgccagaaattctggtggtgctgtttatctattttggctcctcgcagctgctgctgacgctttcggatggcttcactatcaatcttgggttcgtgcagatcccagtgcagatggacattgagaacttcgacgttagcccgttcctttgtggtgtcatcgctctgtcactgctgtatgccgcctatgcctcgcaaacgcttcggggcgcgttgaaagcggtgccggtgggtcagtgggagtctggtcaggcgctggggctgtcgaaatcggctatctttttccgtctggtgatgccgcagatgtggcgtcatgcgctgcctggcctcggtaaccagtggctggtgctgctgaaagataccgcgctggtcagtttgattagtgtgaatgatttaatgctgcaaacaaaaagcatcgctactcgtacccaggaaccatttacctggtacattgtggcggcggcgatttacctggtgatcaccctgctcagtcagtacattctcaaacgcattgacctgcgcgcgacacgttttgagcggaggcccagctaa

SEQ ID NO: 6803 - DNA, 558 bp, Escherichia coli
gtggtcatgatgagcaaacaactcaccgcgcaagcacctgttgatcccatcgttttgggaaaaatgggttcgtcttacggtattcgtgggtggctcagagtgttttcttccaccgaagacgccgaaagcatttttgactatcagccctggtttatccagaaggcgggtcagtggcagcaagtccagctggaaagctggaagcaccacaatcaggacatgatcatcaagctgaaaggcgttgacgatcgtgatgcggcgaacctgctgacgaattgtgaaattgtcgtggattcatcgcagctgcctcagcttgaagagggggactactactggaaagacctgatgggctgccaggtagtaaccactgaaggctacgatctcggtaaagtcgtcgatatgatggaaaccggatctaatgacgttctcgtcattaaggcaaacctgaaagatgcgtttggtatcaaggaacgtctcgtaccgttcctcgatgggcaggttatcaagaaagtcgatctcactactcgttcaatcgaagtagattgggatcctggtttttaa

SEQ ID NO: 6804 - DNA, 1557 bp, Escherichia coli
atgctggtgagaacacgacatctggtcggccttatttcgggagtactgattctttcagtattgctgcctgtcggcttaagcatctggctggcccatcagcaggtagaaacatcgtttattgaagagctggatacctattcctcccgcgtcgctattcgagccaataaggtggcgacacaagggaaagatgcgctgcaggagctggaaagatggcaaggcgctgcctgtagcgaagcccatctcatggaaatgcgtcgggtatcttacagttatcgctatattcaggaagtggcttatatcgataacaacgttccccagtgttcgtctctggagcatgaaagtccgcccgataccttccccgagccaggtaaaatttcgaaagatggttatcgtgtctggttaacatcgcataacgatttaggcattatccgttacatggtcgccatgggaacggcacattatgtcgtcatgatcgaccccgcttcctttattgatgtcattccctatagctcatggcaaattgatgccgccattattggcaatgcccataacgttgtcataaccagcagcgatgaaattgctcagggaattattaccaggctacaaaaaacacccggtgagcatatcgaaaataatggaatcatttacgatatcctgcccttaccggagatgaatatttcgatcatcacatgggcttcaacgaaaatgttgcagaaaggctggcatcggcaagtctttatttggttaccgctcgggttggtgattggcctgctggcagcgatgtttgtgctgcgtattttgcgccgtattcagtcaccgcatcatcggctgcaggatgctatcgaaaatcgtgatatttgcgtgcactatcagccgattgtctccttagccaatggcaaaattgtcggtgctgaggcactggcgcgctggccgcagacagacggtagttggttgtcaccagatagttttattccgctggcacagcaaacgggcctttctgagccattgacgctactgattataagaagcgtctttgaagatatgggcgactggctgcgtcagcatccacagcagcatatttcgatcaatcttgaatcccccgtgctcacctcggaaaaaatcccgcaattgctgcgtgacatgatcaatcactatcaggttaatcccagacagatcgcgcttgaactcactgaacgcgagtttgccgatccgaaaaccagcgccccgataatttctcgctaccgggaggcgggccatgaaatttatcttgatgattttggtacggggtattcaagtttaagttatttacaggatctggatgtcgacattctgaagatcgataaatctttcgttgatgcgctggaatataaaaatgtcacgccgcatatcatcgaaatggcaaaaacactgaaactgaaaatggtagcggagggaatcgaaaccagtaaacaagaagagtggttacgccagcatggcgtgcactacggtcagggctggctctacagcaaggcattaccgaaagaagatttcttacgctgggccgagcaacatttgtga

SEQ ID NO: 6805 - DNA, 180 bp, Escherichia coli
atggcaaagactattaaaattactcaaacccgcagtgcaatcggtcgtctgccgaaacacaaggcaacgctgcttggcctgggtctgcgtcgtattggtcacaccgtagagcgcgaggatactcctgctattcgcggtatgatcaacgcggtttccttcatggttaaagttgaggagtaa

SEQ ID NO: 6806 - DNA, 639 bp, Escherichia coli
atgaaaaagttaacagtggcggctttggcagtaacaactcttctctctggcagtgcctttgcgcatgaagcaggcgaattttttatgcgtgcaggttctgcaaccgtacgtccaacagaaggtgctggtggtacgttaggaagtctgggtggattcagcgtgaccaataacacgcaactgggccttacgtttacttatatggcgaccgacaacattggtgtggaattactggcagcgacgccgttccgccataaaatcggcacccgggcgaccggcgatattgcaaccgttcatcatctgccaccaacactgatggcgcagtggtattttggtgatgccagcagcaaattccgtccttacgttggggcaggtattaactacaccaccttctttgataatggatttaacgatcatggcaaagaggcagggctttccgatctcagtctgaaagattcctggggagctgccgggcaggtgggggttgattatctgattaaccgtgactggttggttaacatgtcagtgtggtacatggatatcgataccaccgccaattataagctgggcggtgcacagcaacacgatagcgtacgcctcgatccgtgggtgtttatgttctcagcaggatatcgtttttaa

SEQ ID NO: 6807 - DNA, 981 bp, Escherichia coli
atggcttttacaccttttcctccccgtcagcctacggcttctgcccgtttaccgctgacgctgatgacgcttgatgactgggcgcttgccaccattactggcgcggacagcgaaaaatatatgcagggtcaggtgacagcagatgtcagccagatggcagaagatcagcacctgctcgccgcccattgcgacgccaaaggtaaaatgtggagcaatttacgtctgttccgcgacggcgatggctttgcatggattgaacggcgcagcgtgcgtgaaccgcagctgactgaactgaaaaaatatgcggtattctctaaagtgaccatcgcgccagacgacgagcgtgtgctgcttggtgttgccggttttcaggcgcgcgccgcgctggcaaatctctttagcgaactgccttcgaaagaaaaacaggtagtcaaagaaggcgcgaccactttgctatggtttgaacacccggcagaacgtttcctgatcgtaaccgatgaagctactgctaatatgctgaccgataaactgcgcggtgaagcggaactgaacaatagccaacagtggctggcattaaacattgaagcgggtttcccggtgattgatgccgccaacagcgggcagtttatcccacaggcgaccaatctccaggcgctgggcggtatcagctttaagaaaggctgttataccggacaagagatggtggcgcgagcaaaattccgtggtgccaataaacgtgcgctctggttgctggcaggtagcgccagccgactgccggaagctggtgaagacttagagctgaaaatgggcgagaactggcgtcgtaccggtacggtactggctgcggtaaaactggaagatggtcaggtcgtggtacaggtcgtcatgaataacgatatggaaccggatagcatcttccgcgtacgcgacgatgcgaatacattgcatatcgagccgctgccgtattcgctcgaagagtaa

SEQ ID NO: 6808 - DNA, 834 bp, Escherichia coli
atggaatatcaacactggttacgtgaagcaataagccaacttcaggcgagcgaaagcccgcggcgtgatgctgaaatcctgctggagcatgttaccggcagagggcgtacttttattctcgcctttggtgaaacgcagctgactgacgaacaatgtcagcaacttgatgcgctactgacacgtcgtcgcgatggtgaacccattgctcatttaaccggggtgcgagaattctggtcgttgccgttatttgtttcgccagcgaccttaattccgcgcccggatacggagtgtctggtggagcaggcactggcgcggttgcctgaacaaccttgccgtattctcgatctcgggacgggtaccggggcgattgcgcttgcgctggctagcgagcgcccggactgcgaaattatcgctgtagatcgtatgcctgatgctgtctccctggcacaacgtaatgcccagcatctggcgatcaaaaatatccacattctgcaaagcgactggtttagcgcgctagccgggcagcagtttgcgatgattgtcagcaatccgccgtatattgacgagcaggaccctcatcttcaacaaggcgatgtccgctttgagccgctcactgcgctggttgcggcagacagtggaatggcagacatcgtgcatatcatcgaacagtcgcgtaacgcgctggtatccggcggctttctgcttctggaacatggctggcagcagggcgaagcggtgcgacaagcatttatcctcgcggggtatcatgacgtcgaaacctgccgtgactatggtgataacgagcgcgtaacgctcggccgctattatcaatga

SEQ ID NO: 6809 - DNA, 393 bp, Escherichia coli
atgacaagtttttctacactgcttagtgttcatcttattagtatcgcgctttctgttgggctattaaccttacgtttctggctacgttatcagaagcatccacaggcatttgctcgctggacgcgcattgtgccgccggttgtcgatacgctgttactgttaagcggcattgcgttgatggctaaagcgcacatcctgccattttccgggcaggcacagtggctgactgaaaagctgtttggagttatcatttatatcgttttgggttttattgcactcgattatcgtcgtatgcacagtcagcaggcgcgcattattgccttcccgctggcgttggtggtgctgtacatcatcattaaactcgccaccacaaaagtaccgttactggggtaa

SEQ ID NO: 6810 - DNA, 429 bp, Escherichia coli
atggctaagaaagtacaagcctatgtcaagctgcaggttgcagctggtatggctaacccgagtccgccagtaggtccggctctgggtcagcagggcgtaaacatcatggaattctgcaaagcgttcaacgcaaaaactgattccatcgaaaaaggtctgccgattccggtagtaatcaccgtttacgctgaccgttctttcactttcgttaccaagaccccgccggcagcagttctgctgaaaaaagcggctggtatcaagtctggttccggtaagccgaacaaagacaaagtgggtaaaatttcccgcgctcagctgcaggaaatcgcgcagaccaaagctgccgacatgactggtgccgacattgaagcgatgactcgctccatcgaaggtactgcacgttccatgggcctggtagtggaggactaa

SEQ ID NO: 6811 - DNA, 705 bp, Escherichia coli
atggctaaactgaccaagcgcatgcgtgttatccgcgagaaagttgatgcaaccaaacagtacgacatcaacgaagctatcgcactgctgaaagagctggcgactgctaaattcgtagaaagcgtggacgtagctgttaacctcggcatcgacgctcgtaaatctgaccagaacgtacgtggtgcaactgtactgccgcacggtactggccgttccgttcgcgtagccgtatttacccaaggtgcaaacgctgaagctgctaaagctgcaggcgcagaactggtaggtatggaagatctggctgaccagatcaagaaaggcgaaatgaactttgacgttgttattgcttctccggatgcaatgcgcgttgttggccagctgggccaggttctgggtccgcgcggcctgatgccaaacccgaaagtgggtactgtaacaccgaacgttgctgaagcggttaaaaacgctaaagctggccaggttcgttaccgtaacgacaaaaacggcatcatccacaccaccatcggtaaagtggactttgacgctgacaaactgaaagaaaacctggaagctctgctggttgcgctgaaaaaagcaaaaccgactcaggcgaaaggcgtgtacatcaagaaagttagcatctccaccaccatgggtgcaggtgttgcagttgaccaggctggcctgagcgcttctgtaaactaa

SEQ ID NO: 6812 - DNA, 915 bp, Escherichia coli
atgagctggattgaacgaattaaaagcaacattactcccacccgcaaggcgagcattcctgaaggggtgtggactaagtgtgatagctgcggtcaggttttataccgcgctgagctggaacgtaatcttgaggtctgtccgaagtgtgaccatcacatgcgtatgacagcgcgtaatcgcctgcatagcctgttagatgaaggaagccttgtggagctgggtagcgagcttgagccgaaagatgtgctgaagtttcgtgactccaagaagtataaagaccgtctggcatctgcgcagaaagaaaccggcgaaaaagatgcgctggtggtgatgaaaggcactctgtatggaatgccggttgtcgctgcggcattcgagttcgcctttatgggcggttcaatggggtctgttgtgggtgcacgtttcgtgcgtgccgttgagcaggcgctggaagataactgcccgctgatctgcttctccgcctctggtggcgcacgtatgcaggaagcactgatgtcgctgatgcagatggcgaaaacctctgcggcactggcaaaaatgcaggagcgcggcttgccgtacatctccgtgctgaccgacccgacgatgggcggtgtttctgcaagtttcgccatgctgggcgatctcaacatcgctgaaccgaaagcgttaatcggctttgccggtccgcgtgttatcgaacagaccgttcgcgaaaaactgccgcctggattccagcgcagtgaattcctgatcgagaaaggcgcgatcgacatgatcgtccgtcgtccggaaatgcgcctgaaactggcgagcattctggcgaagttgatgaatctgccagcgccgaatcctgaagcgccgcgtgaaggcgtagtggtacccccggtaccggatcaggaacctgaggcctga

SEQ ID NO: 6813 - DNA, 954 bp, Escherichia coli
atgaatcctttgttaaccgattcccgccgtcaggcgctgcgttcagcttcccactggtatgccgtgctaagcggcgagcgcgtcagcccacaacaggaagcgcgctggcaacagtggtatgaacaggatcaggataaccagtgggcctggcagcaggttgaaaacctgcgcaaccagcttggcggtgtgcctggcgacgttgccagccgggcgttgcacgatacccgcctcacccgccgtcacgtgatgaaaggattactgctgttgctcggcgctggcggaggctggcagctctggcagtcggaaaccggcgaaggtctgcgggcagattaccgcaccgccaaaggcacagtcagccgtcagcaactggaagatggctccctgctcacgctgaatacccaaagcgcggcggatgtgcgttttgatgcgcatcagcgcaccgtccggctctggtacggtgaaatcgccattactaccgcgaaagatgccctgcaacgccccttccgtgtcctgacccgtcagggccagctcactgctttagggacagaatttaccgtccgccagcaggataatttcacgcagcttgacgtgcagcagcacgctgtggaagtgcttctcgccagtgcccccgcgcaaaaacgcatcgtgaacgctggtgaaagcctgcagttcagcgcctctgagtttggcgcagtgaaaccgctggatgacgagagtacaagctggacgaaggacatcctgagcttcagcgataaaccgctgggtgaggtgatagccacgctaacccgttaccgcaacggcgtgctgcgctgcgatcccgccgttgccgggctgcgcctgagcgggacgttcccgctgaaaaataccgatgcgatcctgaacgttatcgcgcaaacgcttcccgttaaaattcagtctattacgcggtactggataaacatttcaccactgtaa

SEQ ID NO: 6814 - DNA, 498 bp, Escherichia coli
gtgaatcagatattcatggtgatttttctcgtgttgtcaggatttatcgtcggaaatgtctggagcgaccgaggatggcaaaaaaaatgggcggaacgtgatgctgccgcattatcacaagaggtaaatgctcaatttgctgctcgaataattgaacaggggcgaactatagcccgtgatgaggctgttaaagatgcgcaacagaaatctgctgaaatttctgccagggctgcttatctgtctgatagtgttaaccagttgcgtgccgaagcaaaaaaatatgccatacgccttgacgcagcgaagcataccgcagatcttgccgctgccgtcagaggcaaaacaaccaaaaccgccgaaggaatgctcaccaacatgctcggagatattgcagcagaagctcagctttatgctgaaattgctgacgaacgctacatcgcaggagtgacttgtcaacagatctatgaatctttaagagataaaaagcatcaaatgtag

SEQ ID NO: 6815 - DNA, 456 bp, Escherichia coli
gtgggtcagcgaaacgtttcgctgatggagaaaaaaatgaaaaaaggcaccgttcttaattctgatatttcatcggtgatctcccgtctgggacataccgatacgctggtggtgtgtgatgctggtttacccatccccaaaagtacaacgcgtatcgatatggcattaacccagggtgtaccttcttttatgcaggtgctgggcgtcgtcacaaatgaaatgcaggtcgaggcggccattatcgcggaagagatcaaacaccataatccgcaactccacgaaacgttgctcactcaccttgagcagctgcaaaaacaccagggaaataccattgaaattcgttacaccacgcatgaacaattcaaacaacaaaccgcagaaagtcaggcggtaattcgcagcggagaatgttctccgtatgcgaatatcattctctgtgctggcgtgacgttctga

SEQ ID NO: 6816 - DNA, 276 bp, Escherichia coli
gtggcttctgtttctatcagctgtccctcctgttcagctactgacggggtggtgcgtaacggcaaaagcactgccggacatcagcgctatctctgctctcactgccgtaaaacatggcaactgcagttcacttacaccgcttctcaacccggtacgcaccagaaaatcattgatatggccatgaatggcgttggatgccgggcaaccgcccgcattatgggcgttggcctcaacacgattttccgccatttaaaaaactcaggccgcagtcggtaa

SEQ ID NO: 6817 - DNA, 276 bp, Escherichia coli
gtggcttctgtttctatcagctgtccctcctgttcagctactgacggggtggtgcgtaacggcaaaagcaccgccggacatcagcgctatctctgctctcactgccgtaaaacatggcaactgcagttcacttacaccgcttctcaacccggtacgcaccagaaaatcattgatatggccatgaatggcgttggatgccgggcaacagcccgcattatgggcgttggcctcaacacgattttacgtcacttaaaaaactcaggccgcagtcggtaa

SEQ ID NO: 6818 - DNA, 276 bp, Escherichia coli
gtggcttccatttccatcagatgtccttcctgctccgctactgaaggcgtggtgcgtaacggcaaaagcactgccggacatcagcgctatctctgctctccttgccgtaaaacatggcaactacagttcacttacaccgcctctcagcccggtaagcaccagaaaatcattgatatggccatgaatggcgtcggatgtcgcgccagtgcacgcattatgggcgttggcctcaacacggttttacgtcacttaaaaaactcaggccgcagtcggtaa

SEQ ID NO: 6819 - DNA, 417 bp, Escherichia coli
atgatgactaaaacccaaataaataaattaataaaaatgatgaatgatttagactatccatttgaagcaccgctcaaggaatcatttattgaaagtataatccaaatagaatttaattctaattcaactaattgcctggagaagttatgtaatgaagttagtattctttttaagaatcaacctgattatcttacttttttaagagcaatggatggattcgaagttaatggattacgattatttagcctctcgattccagaaccttcagttaaaaacctttttgccgtaaatgaattttatagaaataatgatgatttcataaaccctgatctacaagaacggttagtgatcggggattatagcatttcaatatttacttatgacattaaaggtgatgctgccaacttactgatttag

SEQ ID NO: 6820 - DNA, 753 bp, Escherichia coli
atgtctgatttactttgctctgccaaattgggtgctatgacgctggcgttactgcttagcgctaccagtttgtctgccctggcgtctgtaacgccagatcgtacccgtttgatatttaatgaaagcgacaaatcaatcagcgtgacgctgcgtaataacgatccgaaactcccttatctggctcaaagctggattgaagatgaaaagggtaacaagatcacctcgccgttaactgtgctgccgccagtgcaacgcatcgattcaatgatgaacgggcaggtaaaagtgcagggaatgccggatatcaacaaattgccagccgatcgtgaaagcatgttctactttaacgtgcgcgagatcccgccaaaatcaaacaaacccaataccctgcaaatcgcgctgcaaacgcgtatcaagttgttctggcgaccaaaggcgctggaaaaggtcagtatgaaaagtccgtggcagcacaaggtgacgctcacccgcagcggtcaggcatttaccgtcaataacccaacgccgtactacgtgattatcagcaacgccagtgcgcagaaaaacggtaatccagctgcagggttctcgcctctggtcattgagccgaaaaccacggtaccgctgaatgtgaaaatggatagcgtaccggtgctgacttacgtcaacgactttggcgcacggatgccgctgttcttccagtgcaatggcaacagctgccaggtggatgaagagcagagccgcaaaggctga

SEQ ID NO: 6821 - DNA, 897 bp, Escherichia coli
atgccgtggggcgacaacagtaccgttagctataacggcaactatggcagtgggacggacagcagccaggtcggttattttagccgtgtcgatgacgcgactcactatcagttgaacatcggcaccagtgacaaacacaccagcgttgatggctactacagccatgatggttcgctggcgcaggttgacctcagtgcgaactaccatgaagggcaatacacctctgcgggcttgtcgttacagggcggcgcaacgcttactacccacggcggcgcacttcaccgtacccagaatatgggcgggacacgcctgctgattgatgccgatggcgttgccgatgttccggtggaaggtaacggggctgctgtttataccaatatgtttggtaaagccgtcgtttctgacgttaacaattattatcgcaatcaggcgtatatcgacctcaacaaattgccggaaaacgccgaagcaacccagtcggtggtgcaagccacgctaactgaaggagccattggctaccgcaaatttgccgtcatcagtggtcaaaaagcgatggcggtgctgcgtttacaagatggcagccatccaccgtttggcgcagaagtaaaaaatgataacgagcagacagtgggccttgtcgatgatgacggtagtgtctatctggctggggtgaaacctggcgaacatatgagtgtgttctggagtggtgttgcgcattgcgatatcaacctgccggacccgctgcctgccgatctgtttaacggcttgttactgccatgccagcataaaggcaacgtcgcgccggttgttcctgatgacataaagcctgtcattcaggagcagacgcaacaggtgacacccaccgatccccctgtttctgtttcagctaaccaataa

SEQ ID NO: 6822 - DNA, 1701 bp, Escherichia coli
atgcatcccacaggcccgcatctcgggcctgatgttctgtttcgagagtccaacatgaaagtgacattaacgtttaacgaacaacgtcgtgcggcgtatcgtcagcaagggttatggggcgatgcttcgctggccgattactggcagcagaccgctcgtgcgatgccagacaaaattgccgtggtcgataatcatggtgcatcgtacacctatagcgcgctcgatcacgccgcgagctgtctggcaaactggatgttagcgaagggtattgaatcaggcgatcgcatcgcatttcaactgcctggctggtgtgaatttaccgttatctatcttgcctgcctgaaaatcggtgcagtttccgtgccgctgttgccttcctggcgggaagcagaactggtgtgggtgctcaataagtgtcaggcaaaaatgttctttgcaccgacgttgtttaaacaaacgcgtccggtagatttaatcctgccgctgcaaaatcagcttccacaactacaacaaattgtcggcgtggacaaactggctcccgccacctcttccctctcattaagtcagattatcgccgacaatacctcactgaccacggcgataacgacccacggcgatgaattagctgcggtgctgtttacctccggaaccgagggtctgccaaagggcgtgatgctaacgcataacaatattctcgccagtgagcgggcttattgcgcgcgactgaatctgacctggcaggatgtctttatgatgcctgcgccacttggtcacgcaacgggctttctgcatggcgtaacggcaccattcttaattggcgctcgcagcgtgttgttagatattttcactcctgatgcgtgtctcgcgctgcttgagcagcagcgttgcacctgtatgctcggcgcaacgccgtttgtctatgatcttttgaatgtactagagaaacaacccgcggacctttcagcgctgcgtttctttctttgcggcggaaccacaatccccaaaaaagtggcgcgtgaatgccagcagcgcggcattaaattattaagtgtttatggttccacagaaagttcgccgcatgcggtggtgaatctcgatgatcctttgtcgcgctttatgcacaccgatggttacgctgccgcaggtgtagagattaaagtggtcgatgacgcacgcaagaccttaccgccaggttgcgaaggtgaagaagcctcgcgtggccccaatgtgtttatggggtattttgatgaacctgaattaaccgcccgtgccctggatgaagaaggctggtattacagcggcgatctctgccgtatggatgaggctggctatataaaaattaccggacgcaaaaaagatattattgtccgcggcggcgaaaatattagcagccgtgaagtggaagatattttattgcagcatcctaaaattcacgatgcctgtgtggttgcaatgtccgatgaacgtttaggtgaacgatcatgcgcttatgtcgtgctgaaagcgccgcatcattcattatcgctggaagaggtagtggctttttttagccgtaaacgggtcgcaaaatataaatatcctgaacatatcgtggtaatcgaaaaactaccgcgaactacctcaggtaaaatacaaaagtttttgttaagaaaagatattatgcggcgtttaacgcaggatgtctgtgaagagattgaataa

SEQ ID NO: 6823 - DNA, 228 bp, Escherichia coli
atgcaatacactccagatactgcgtggaaaatcactggcttttcccgtgaaatcagcccggcatatcgccaaaaactgctttctcttggcatgttacctggctcctcttttaatgtggtgcgcgtcgctccactcggcgaccccattcatatcgaaacccgtcgtgtgagcctggtattacgcaaaaaagatctggccttattagaagtggaagcggtttcctgttaa

SEQ ID NO: 6824 - DNA, 2163 bp, Escherichia coli
atggacgtttcttacctgctcgacagccttaatgacaaacagcgcgaagcggtggccgcgccacgcagcaaccttctggtgctggcgggcgcgggcagtggtaagacgcgcgtactggtgcatcgtatcgcctggttgatgagcgtggaaaactgctcgccatactcgattatggcggtgacgtttaccaacaaagcggcggcggagatgcgtcatcgtatcgggcaactgatgggcacgagccagggcggtatgtgggtcggcaccttccacgggctggcgcaccgtttgctgcgtgcgcaccatatggacgccaatctgccgcaggatttccagatcctcgacagtgaagaccagctacgcctgcttaagcgtctgatcaaagccatgaacctcgacgagaagcagtggccgccgcggcaggcaatgtggtacatcaacagccagaaagatgaaggcctgcgtccgcatcatattcaaagctacggtaatccggtggagcagacctggcagaaggtgtatcaggcgtatcaggaagcgtgtgaccgcgcgggcctggtggacttcgccgagctgctgctgcgcgctcacgagttgtggcttaacaagccgcatatcctgcaacactaccgcgaacgttttaccaatatcctggtggacgaattccaggataccaacaacattcagtacgcgtggatccgcctgctggcgggcgacaccggcaaagtgatgatcgtcggtgatgacgaccagtcaatctacggctggcgcggggcgcaggtggagaatattcagcgtttccttaatgatttccccggtgccgaaactattcgtctggagcaaaactaccgctctaccagcaatattctgagcgccgctaacgccctgattgaaaacaataacgggcgtctgggtaaaaaactgtggaccgatggcgcggacggtgagcctatttccctctattgcgcttttaacgaactcgatgaagcgcgttttgtggttaaccgcatcaaaacctggcaggacaacggcggagcgcttgccgagtgcgccattctctaccgcagcaacgcccagtcgcgggtgctcgaagaggcgttattgcaggccagtatgccgtaccgtatttacggcgggatgcgcttcttcgaacgccaggaaatcaaagatgcgctctcgtatctgcgcctgattgccaaccgcaacgacgacgcggcctttgagcgtgtggtgaatacgccaacgcggggtattggtgaccggacgctggacgtggtacgtcagacatcgcgcgatcgccagttaacactctggcaggcatgtcgtgagctgttgcaggaaaaagccctcgccgggcgagctgccagcgccttgcagcgatttatggaattaatcgacgccttagcgcaggaaactgccgatatgccgctgcatgtacagactgaccgggtaattaaagactccggcctgcgtaccatgtatgagcaggagaagggcgaaaaaggtcagacgcgtatcgaaaacttagaggaactggtgacggcaacgcgccagttcagctacaacgaagaagacgaagatttaatgccgctgcaggcgttcctctcccatgcggcactggaagcaggtgaagggcaggcggatacctggcaggatgcggtgcagttgatgacgctacactcggcgaaaggcctggagttcccgcaggtgtttatcgttggtatggaagagggcatgttcccaagccagatgtcgctggatgaaggcgggcgtctggaagaagaacgccgtctggcctacgttggcgtaacccgcgcgatgcagaaactgacgctgacctacgcggaaacccgccgtctgtatggtaaagaggtttaccatcgcccgtcgcgctttatcggcgagctgccggaagagtgtgtggaagaggtgcgcctgcgcgccacggtaagccgcccggtcagccatcagcggatgggtacgccgatggtcgagaacgacagcggctacaagctcggccagcgcgtacgccacgctaagtttggtgaaggcaccattgtcaatatggaaggcagcggtgagcatagccgtttgcaggtggcatttcagggccagggtattaaatggctggtggcggcatacgcccggctggagtcggtgtaa

SEQ ID NO: 6825 - DNA, 1686 bp, Escherichia coli
atgataaccattcccattacgcttcgtatgttgatagcaaagtatctctgtctgttgaagcccttttggctgcgtaagaataataaaacttcagtgttgttaatcattattatcctcgccatgatccttggcgtggttaaaattcaggtctggttaaacgactggaataatgattttttcaatgcgctaagccagaaagaaaccgataagctttggcagcttgtcctttggttccctgccctgctggggatctttgtattaatatccgtaaacaaaacatggttaattaaactactgactattcgctggcgcgaatggttaacagattactaccttaatcggtggtttgcagataaaaactactacttcacgcagatctacggcgagcataaaaatacagataaccctgaccaacgtatcgctgaagacattctcttactgatcagcaaaacgctcagtctttcatttggcttcatccagtcacttagcatgctgatcacctttaccgttattctttgggaaagcgcgggtacgctctcattcactgttggtggaacagaatggaatatccaggggtatatggtctataccgtcgtgctcattgtgatcggtggaactttatttacccataaggtgggtaaacgtattcgtccgcttaatgtggaaaaacaacgtagcgaagcgacatttcgaacaaatcttgtgcagcataataagcaggcagaactgattgcgctaagcaatgctgagtctctacaacgccaggagttgagcgacaattttcataccattaaagagaactggcatcgtttaatgaatcgtcagcggtggcttgattactggcagaatatttattcgcgctcgcttagcgttcttccctactttctgttattgccgcagtttattagcgggcagatcaatctgggcggactgatgaaatcgcgccaggcatttatgctggtatcgaacaatttaagctggtttatttataaatatgacgaacttgctgaactggctgcggttatcgatcgcttgtatgagttccatcaactcactgaacagcgccctacgaataagcctaaaaattgccaacatgcggtacaagtggctgatgcgagtattcgtacgcctgataataagatcatattagagaacctgaactttcatgtttcgccaggcaaatggctattactgaaaggctactctggcgcgggaaaaaccacactgcttaaaacattatcccactgctggccgtggtttaaaggtgatatttcttctcctgctgacagttggtatgtgtcacaaacaccgttaatcaaaaccggcttactgaaagagattatttgtaaagcacttcccctgcccgtagacgataaatcgttgagcgaagtactgcatcaggttggtcttgggaaattggctgcgcgtattcatgaccacgatcgctggggagatattctttccagcggcgaaaaacaacgtatcgccctggcacgattaattttacgacgtccgaaatggatatttcttgacgaaactacctctcatcttgaggaacaagaggctatccgcttactgcgtttagtgcgtgaaaaactacccacaagcggcgtcattatggttacacatcaacccggtgtctggaacctggccgatgatatttgtgacattagcgcggttttataa

SEQ ID NO: 6826 - DNA, 990 bp, Escherichia coli
atggcttcacaactgactgatgcatttgcgcgtaagttttactacttgcgcctgtcgattaccgatgtgtgtaactttcgttgcacctactgcctgccggatggctacaaaccgagcggcgtcaccaataaaggctttcttaccgtcgatgaaattcgccgggttacgcgcgccttcgccagactgggcaccgaaaaagtgcgcctgacaggaggagagccgtctttacgccgcgactttaccgatatcatcgccgctgtgcgggaaaacgacgctatccgccagattgcggtcacaaccaatggttaccgtctggaacgcgatgtggcgagctggcgcgatgcgggacttactggcattaacgtcagtgtcgacagtctggacgcccgccagtttcacgctattaccgggcaggataaattcaaccaggtcatggcagggattgatgctgcatttgaggccggttttgagaaggtcaaagtcaataccgtgctgatgcgtgatgttaatcatcaccagctcgacacctttctgaactggatccagcatcgccctatccagctgcgtttcatcgaactgatggaaacgggcgagggcagcgagctcttccgtaagcatcacatctctggtcaggttctgcgtgacgagctactgcgtcgcggctggatccaccaattacgtcaacgcagcgacggtcccgcgcaagtcttttgccatccagattacgccggagagattggccttatcatgccgtatgaaaaagacttctgcgccacttgcaaccgcctgcgcgtttcctccattggtaaactccatctctgcctgtttggtgaaggcggcgttaacctgcgcgatctgctggaagacgatacccagcaacaggcgctggaagcgcgtatttcagcggcgctgcgggagaagaaacagacccatttcctgcatcaaaacaacaccggtattacgcaaaacttatcgtacattggcggctaa

SEQ ID NO: 6827 - DNA, 267 bp, Escherichia coli
atgcttgaagatactacaattcataatgcaataactgataaagcgttagcaagttactttcgcagttcgggtaatttgttagaagaagaatcagcagtgttagggcaggctgtcaccaatttaatgctttcaggcgataatgttaataataaaaatattatcttaagtctgatacactccttggaaacaacaagtgatattctcaaagctgatgtgattagaaaaacactggaaatcgtgttgcgatacacagctgatgatatgtaa

SEQ ID NO: 6828 - DNA, 1008 bp, Escherichia coli
gtgcccttgtcaaaaactggagatttaactatgagcgaaacggcatcctggcagccgagcgcatccattcctaacttattaaaacgcgcggcgattatggcggagatccgtcgtttctttgccgatcgtggagtgctggaggtggagacgccttgtatgagccaggcgacggtaaccgatattcatttggtcccgtttgagacacgtttcgttggccccgggcattcgcaggggatgaatctctggttaatgaccagcccggaataccatatgaaacgcctgctggttgccggttgtgggccggtattccagctgtgccgcagcttccgtaatgaagagatggggcgttatcacaaccctgagttcactatgctggagtggtatcgaccgcactatgatatgtaccggttgatgaacgaggtggacgatctcttacaacaggtgctggactgcccggcagcagaaagcctttcttatcaacaagctttcttgcgttatctggaaattgacccgctctctgccgacaaaacgcaactgcgggaagtcgcagcgaaactggatttgagcaatgttgctgataccgaagaagaccgcgacacgctgctacaattgctgtttacctttggcgtagagccaaatattggcaaagaaaaaccgacctttgtgtaccactttccagccagccaggcatcactggcgcaaatcagtaccgaagatcatcgggtcgctgaacgctttgaggtttattataaaggtattgagctggcgaatggtttccatgaattgacggatgcccgtgagcagcaacaacgctttgaacaagataaccgtaagcgcgcggcgcgcggtttgccgcagcaccccattgaccagaatctgattgaagccttgaaagtcggtatgcctgactgttccggcgtggcattaggtgttgatcgtctggtgatgttggcgctgggcgcggagacactggctgaagtcatcgcctttagcgttgaccgggcataa

SEQ ID NO: 6829 - DNA, 1305 bp, Escherichia coli
atgaaatttcccggtaaacgtaaatccaaacattacttccccgtaaacgcacgcgatccgctgcttcagcaattccagccagaaaacgaaaccagcgctgcctgggtagtgggtatcgatcaaacgctggtcgatattgaagcgaaagtggatgatgaatttattgagcgttatggattaagcgccgggcattcactggtgattgaggatgatgtagccgaagcgctttatcaggaactaaaacagaaaaacctgattacccatcagtttgcgggtggcaccattggtaacaccatgcacaactactcggtgctcgcggacgaccgttcggtgctgctgggcgtcatgtgcagcaatattgaaattggcagttatgcctatcgttacctgtgtaacacttccagccgtaccgatcttaactatctacaaggcgtggatggcccgattggtcgttgctttacgctgattggcgagtccggggaacgtacctttgctatcagtccaggccacatgaaccagctgcgggctgaaagcattccggaagatgtgattgccggagcctcggcactggttctcacctcatatctggtgcgttgcaagccgggtgaacccatgccggaagcaaccatgaaagccattgagtacgcgaagaaatataacgtaccggtggtgctgacgctgggcaccaagtttgtcattgccgagaatccgcagtggtggcagcaattcctcaaagatcacgtctctatccttgcgatgaacgaagatgaagccgaagcgttgaccggagaaagcgatccgttgttggcatctgacaaggcgctggactgggtagatctggtgctgtgcaccgccgggccaatcggcttgtatatggcgggctttaccgaagacgaagcgaaacgtaaaacccagcatccgctgctgccgggcgctatagcggaattcaaccagtatgagtttagccgcgccatgcgccacaaggattgccagaatccgctgcgtgtatattcgcacattgcgccgtacatgggcgggccggaaaaaatcatgaacactaatggagcgggggatggcgcattggcagcgttgctgcatgacattaccgccaacagctaccatcgtagcaacgtaccaaactccagcaaacataaattcacctggttaacttattcatcgttagcgcaggtgtgtaaatatgctaaccgtgtgagctatcaggtactgaaccagcattcacctcgtttaacgcgcggcttgccggagcgtgaagacagcctggaagagtcttactgggatcgttaa

SEQ ID NO: 6830 - DNA, 1221 bp, Escherichia coli
atgacaccaggcggacaagctcagataggtaatgttgatctcgtaaaacagcttaacagcgcggcggtttatcgcctgattgaccagtacgggccaatctcgcggattcagattgccgagcaaagccagcttgcccccgccagcgtaaccaaaattacgcgtcagcttatcgaacgcgggctgatcaaagaagttgatcagcaggcctccaccgggggccgccgcgctatctccatcgtcaccgaaacccgcaatttccacgcaatcggcgtacggcttggtcgtcatgacgccaccatcactctgtttgatctcagcagcaaagtgctggcagaagaacattacccgctgccggaacgtacccagcaaacgctggaacatgccctgttgaatgccattgctcagtttattgatagctaccagcgcaaactgcgcgagctgatcgcgatttcggtgatcctgccagggcttgttgacccggacagcggcaaaattcattacatgccgcatattcaggtagaaaactgggggctggtagaagctctggaagaacgttttaaagtgacctgtttcgttggtcacgatatccgtagtctggcgctggcggagcactacttcggtgcaagtcaggattgcgaagactccattctggtgcgtgtccatcgcggaaccggggccgggattatctctaacgggcgcatttttattggccgcaacggcaacgtcggtgaaattggccatattcaggtcgaaccgctgggtgaacgctgccactgcggcaactttggctgcctggaaactatcgctgccaacgctgccattgaacaacgggtgttgaatctgttaaagcagggctaccagagccgcgtgccgctggacgactgcaccatcaaaactatctgcaaagccgcgaacaaaggcgatagtctggcgtcggaagtaattgagtatgtcggtcgtcatctgggtaaaaccatcgccattgctatcaacttatttaatccgcaaaaaattgttattgccggtgaaatcaccgaagccgataaagtgctgctccctgctattgaaagctgcattaatacccaggcgctgaaggcgtttcgcactaatctgccggtggtacgttctgagctggatcaccgctcggcaatcggcgcttttgcgctggtaaaacgcgccatgctcaacggtattttgctccagcatttgctggaaaattaa

SEQ ID NO: 6831 - DNA, 3363 bp, Escherichia coli
atgactatgttccagtattacaaacgatcacggcattttgttttttcagcatttattgcttttgtttttgtcttgttatgccagaacacggcgtttgcgcgggcgtcatcgaatggtgatctgccgacaaaagcggacctgcaggcgcaacttgactcactaaataaacaaaaagatctttctgctcaggacaaactggtgcagcaggatctgacagatacattagccaccctcgataaaatcgatcgcataaaagaagagacagttcagctacggcaaaaagtcgctgaagcgccggaaaaaatgcgccaggcgaccgcggcgttaacagcacttagcgatgtcgataacgacgaagaaacgcgcaaaattctgagcacgctgtcgttgcgccagctggaaactcgcgttgcccaggcgctggacgatttgcaaaacgcacaaaacgatctggcgtcttataacagccagctggtttcgttacagacgcagcccgaacgcgtgcaaaatgcgatgtataacgcttcgcagcagctgcaacaaattcgcagtcgtctggatgggactgatgtcggcgagacagccttacgtcccagccagaaagtgttaatgcaggcccagcaggcgttgctgaatgcggagattgaccagcagcgtaaaagcctggaagggaacaccgtcttgcaggataccttgcaaaagcaacgtgattacgtgacggcgaacagcgctcgtctggagcaccagttacaactgttgcaagaagcggtaaacagcaagcgcctgactttaaccgaaaaaacggcgcaggaagccgtctccccggatgaagccgcgcgtattcaggctaatccgctggtgaagcaggaactggaaattaaccagcagttaagtcagcgtctgattaccgcgactgaaaacggtaatcagttgatgcagcaaaacattaaagtcaaaaactggctggagcgggcgctgcaatcggaacgcaatattaaagagcagattgccgtcctgaagggcagcctgctgttgtctcgtatcctttaccagcaacaacaaacgctgccctcggcggatgaactggaaaacatgaccaaccgcatcgcggatttgcgtctcgaacagtttgaagttaaccagcagcgtgatgcactcttccagagcgatgcgttcgtcaacaaactggaagaaggtcacaccaacgaagtcaacagcgaagttcacgatgcgttattgcaagtggttgatatgcgtcgcgaattgctggatcaactcaacaaacagttgggtaaccagctgatgatggccattaacctgcaaatcaaccagcagcagttaatgagtgtgtcgaaaaacctgaaatccatcctgactcagcaaatcttttgggtgaacagtaaccgtccaatggactgggactggatcaaagcgttcccgcaaagcctgaaagatgaatttaagtcgatgaaaatcacggtgaactggcaaaaagcctggcccgccgtttttatcgctttcctcgctggtttgccgctgctgttgattgccgggctgatccactggcgtctgggctggctgaaagcgtatcaacaaaaactggcttccgctgtgggttccctgcgtaacgacagccagctcaacacaccaaaagcgatccttatcgacctgatccgtgcgctgccggtgtgcctgattattctcgcggttggcctgattctgttgaccatgcagctcaacatcagcgaactgctatggtcgttcagcaaaaaactggcgatattctggctggtgtttggcctgtgctggaaggtactggagaaaaacggcgttgccgtacgtcacttcggcatgccggaacagcagaccagccactggcgtcggcaaattgtccgcatcagtctcgcattgctgcctatccatttctggtctgtggtggcagaactttccccgctgcatctgatggatgatgtgctggggcaagcgatgattttcttcaacctgctgctgattgccttcctggtatggccgatgtgccgcgaaagctggcgtgataaagagtcgcacaccatgcgactggtcaccattaccgtgctgtcgataatcccgattgcgctgatggtgctgactgctacaggctacttctacactacgctgcgtctggcaggacgctggattgaaaccgtttatctggtgatcatctggaacctgctgtaccagacggtactgcgtggcttaagcgtagcggcgcggcgtatcgcctggcgtcgtgcgctggcgcgtcggcagaatctggtgaaagagggcgcagaaggtgctgaaccgccggaagaacccaccattgcactggagcaagttaaccagcagacgctgcgtattaccatgttgctgatgtttgcgctgttcggtgtcatgttctgggcaatttggtccgatttgatcaccgtgttcagctatctcgacagcatcacgctctggcattacaacggcactgaagctggcgctgcggtggtgaaaaacgtcaccatgggcagtctgttgtttgcgattatcgcctcaatggtggcctgggcgttgattcgcaacctgcctggtttactggaagtgctggtgctctcgcgactgaatatgcgccagggcgcgtcgtatgccattactaccatccttaactacatcattattgctgttggtgcgatgacggtgttcggatcgctgggcgtctcttgggataaactccagtggctggccgcagcattatccgtaggtcttggttttggtttacaagaaattttcggtaacttcgtctccggtttgatcattctattcgaacgtccggtgcgtattggcgatacggtaaccattggtagcttctcggggacggtaagtaagatccgtattcgtgcgacaacgattaccgatttcgatcgcaaagaagtgatcatcccgaacaaagcgtttgttaccgagcgtctgatcaactggtcgttgactgacactactacgcgtctggtgatccgtctcggcgtggcctatggctccgatctggaaaaagtgcgtaaagtgttactgaaggcggcgactgagcacccaagggtgatgcacgaaccaatgccggaagtcttctttacggcatttggtgccagcacgttggatcatgagctgcgtctgtatgtgcgtgaactgcgtgaccgtagtcgtactgtcgatgagctgaaccgtactatcgatcagctgtgccgtgaaaacgacatcaacattgcctttaaccagcttgaagtgcatctgcacaacgagaagggcgatgaggtgacggaagtaaaacgcgactacaaaggcgatgacccgacgccagcggtagggtaa

SEQ ID NO: 6832 - DNA, 996 bp, Escherichia coli
atgcagcccaaaatttactggattgataacctgcgagggatagcgtgtttaatggtggtgatgattcacaccactacctggtatgtgaccaatgctcatagtgttagccccgtcacatgggatatcgccaatgttctgaattctgcctctcgtgtcagcgtgccgctatttttcatgatttccggctatctcttttttggcgaacgcagcgcccagccgcgccatttcttgcgtatcggcttatgtctgattttttatagcgcaatcgcactgctctacattgcgctgtttacctccatcaatatggagttagcgctgaaaaacctgctgcaaaagccagtgttttaccacttgtggtttttcttcgcgattgcggtgatttatctggtttcaccgctgattcaggtgaagaacgtcggcggaaaaatgttgctggtgctaatggcggtgattggcattatcgctaacccaaacacagtgccgcagaaaattgacggttttgaatggctgccaattaacttatatatcaatggcgatactttttactacattctgtatggcatgttgggccgcgctatagggatgatggacacacagcataaagcactgtcgtgggtgagcgccgcgctgtttgcgacgggggtttttattatctctcgcgggacattatatgaattgcagtggcgcggaaattttgccgatacctggtatctttactgtgggccgatggtttttatctgcgcaatcgcgctattgactctggttaaaaacacgctggatacgcgtaccattcgcggacttggcttaatctcccgccattcattgggtatatacggattccacgccttgattatccatgcgctgcgcacccggggaattgagcttaaaaattggccaatactggatattatttggatcttttgcgcgacgttggcagcgagtttgttactttctatgctggtacaacgaatcgacagaaacagattagtgagttaa

SEQ ID NO: 6833 - DNA, 834 bp, Escherichia coli
gtgctggcgatgccttccgctatctccgtcgctgtattacccgattcaccgcacgccagagagatggcgaccaaagcgcataacagcgggcacgaagtgttgattcatctcccgatggcaccgttgagtaaacagccgctggagaaaaatacgctacgcccggagatgagcagcgacgaaattgagcgcattattcgtagtgcggtcaataacgtgccctatgccgtggggatcaacaaccacatgggcagcaagatgacctctaacctgtttggtatgcagaaagtgatgcaggcgctggagcgttacaatctttacttcctcgacagcgtaaccatcggtaatacccaggcgatgcgcgccgcgcaaggcactggcgtgaaggtgatcaaacggaaggtattcctcgacgattcgcaaaatgaagcggacatccgtgtgcaatttaatcgcgcaattgacctggcgcgtcgcaacggttcgaccattgccattgggcatcctcaccctgcaacggtacgcgtgttgcaacagatggtttataacctgccgccagacattacgctggtgaaagccagcagcttgctgaatgaaccgcaggttgatacttctacaccgccgaaaaacgctgtgcctgatgcaccgcgtaatccgttccgtggcgtgaagctgtgcaaaccgaagaaaccgatagaacctgtttatgctaatcgcttctttgaagtattaagcgaaagcatcagccagagcacgctgatcgtttacttccagcatcagtggcaaggctggggcaaacagcccgaagcggcgaagtttaacgctagcgcaaattaa

SEQ ID NO: 6834 - DNA, 954 bp, Escherichia coli
atgcgggcgaaacttctgggaatagtcctgacaacccctattgcgatcagctcttttgcttctaccgagactttatcgtttactcctgacaacataaatgcggacattagtcttggaactctgagcggaaaaacaaaagagcgtgtttatctagccgaagaaggaggccgaaaagtcagtcaactcgactggaaattcaataacgctgcaattattaaaggtgcaattaattgggatttgatgccccagatatctatcggggctgctggctggacaactctcggcagccgaggtggcaatatggtcgatcaggactggatggattccagtaaccccggaacctggacggatgaaagtagacaccctgatacacaactcaattatgccaacgaatttgatctgaatatcaaaggctggctcctcaacgaacccaattaccgcctgggactcatggccggatatcaggaaagccgttatagctttacagccagaggtggttcctatatctacagttctgaggagggattcagagatgatatcggctccttcccgaatggagaaagagcaatcggctacaaacaacgttttaaaatgccctacattggcttgactggaagttatcgttatgaagattttgaactcggtggcacatttaaatacagcggctgggtggaatcatctgataacgatgaacactatgacccgggaaaaagaatcacttatcgcagtaaggtcaaagaccaaaattactattctgttgcagtcaatgcaggttattacgtcacacctaacgcaaaagtttatgttgaaggcgcatggaatcgggttacgaataaaaaaggtaatacttcactttatgatcacaataataacacttcagactacagcaaaaatggagcaggtatagaaaactataacttcatcactactgctggtcttaagtacacattttaa

SEQ ID NO: 6835 - DNA, 702 bp, Escherichia coli
atgacaaccttaagctgtaaagtgacctcggtagaagctatcacggataccgtatatcgtgtccgcatcgtgccagacgcggccttttcttttcgtgctggtcagtatttgatggtagtgatggatgagcgcgacaaacgtccgttctcaatggcttcgacgccggatgaaaaagggtttatcgagctgcatattggcgcttctgaaatcaacctttacgcgaaagcagtcatggaccgcatcctcaaagatcatcaaatcgtggtcgacattccccacggagaagcgtggctgcgcgatgatgaagagcgtccgatgattttgattgcgggcggcaccgggttctcttatgcccgctcgattttgctgacagcgttggcgcgtaacccaaaccgtgatatcaccatttactggggcgggcgtgaagagcagcatctgtatgatctctgcgagcttgaggcgctttcgttgaagcatcctggtctgcaagtggtgccggtggttgaacaaccggaagcgggctggcgtgggcgtactggcaccgtgttaacggcggtattgcaggatcacggtacgctggcagagcatgatatctatattgccggacgttttgagatggcgaaaattgcccgcgatctgttttgcagtgagcgtaatgcgcgggaagatcgcctgtttggcgatgcgtttgcatttatctga

SEQ ID NO: 6836 - DNA, 621 bp, Escherichia coli
atggcaagatatttgggtcctaagctcaagctgagccgtcgtgagggcaccgacttattccttaagtctggcgttcgcgcgatcgataccaagtgtaaaattgaacaagctcctggccagcacggtgcgcgtaaaccgcgtctgtctgactatggtgtgcagttgcgtgaaaagcaaaaagttcgccgtatctatggtgtgctggagcgtcagttccgtaactactacaaagaagcagcacgtctgaaaggcaacaccggtgaaaacctgttggctctgctggaaggtcgtctggacaacgttgtataccgtatgggcttcggtgccactcgtgcagaagcacgtcagctggttagccataaagcaattatggtaaacggtcgtgttgttaacatcgcttcttatcaggttagtccgaatgacgttgtaagcattcgtgagaaagcgaagaagcagtctcgcgtgaaagccgctctggagctggctgagcagcgtgaaaagccaacctggctggaagttgatgctggcaagatggaaggtacgtttaagcgtaagccggagcgttctgatctgtctgcggacattaacgaacacctgatcgtcgagctttactccaagtaa

(The sequence listing continues in the following parts.)
